United States Patent Application Publication US 2007/0054278 A1 - sequence listing, part 143

SEQ ID NO: 492038 - DNA, 201 bp, Homo sapiens
ccgaggtgggcagatcacctgagattgggagtttgagaccagcctgaccaacatggagagacccccacctctactgaaaatacaaaattagctgggcatgktggtgcatggtgcatgcctgcagtcccagctactcgggaggctgaggcaggagaatcacttgaacccaggaggcggaggttgctgtgagccgagattgca

SEQ ID NO: 492039 - DNA, 201 bp, Homo sapiens
accccccgcccccaaaagacctctcagtaattccggtggatacaggaagtgctcagcaacgattacgccccgagggccaatcacagggctgcggccgagaragaagccttattagagctttctcaacctgcagccctcatctccgccggcgagtagggccaggtgttgggaggtgagtagctctccggcagctctgcaact

SEQ ID NO: 492040 - DNA, 201 bp, Homo sapiens
ttgtatttttttagtagagacagggtttcaccgtgttagccaggatggtcttgatctcctgacctcgtgatccacccgcctcagcctcctaaagtgctggsaattacaggcatgagccatcacgccccacctgagactgtcttttaaaaaaaaaaaaaaaaaatcaatgtggaacactcctttgccacctagaataatcag

SEQ ID NO: 492041 - DNA, 201 bp, Homo sapiens
tgtatctgcactgatggtttctgttcagagattcgattttatgttaacatctctggtattttttttttttttttttaagatggagttttactcttgcccaygctggcaatggcatgatctaggctcactgcaacctccggcttcaaggaggttgattctcctgcctcagcctcctgagtagctgggattacaggcactcac

SEQ ID NO: 492042 - DNA, 201 bp, Homo sapiens
ccccctgtaatcccagctactcggaaggctggggcacaagaatcgcgtgaacccaggaggcggaggttgaagtgagccaccgtgccagctgagaatccttyttacttctccaacttctgttggccacctgcattccttggcttgtggcccttcctccaacttcggcagagcatcttcaaacgttgccctggctcccttatc

SEQ ID NO: 492043 - DNA, 201 bp, Homo sapiens
cacttgagcctgggaggaagaagttacagcgaattgagatcacgtcacctcactccagcctgggtgacagtgagatcctgtctcaaaaaaaaaaaaaaaamaaaaaaaacaaaggcgcctttttaatcactcactgacacgtgtagaggagcaaaaagtttgagttgctggttggcccaggaggtcaaggctgcagtgagc

SEQ ID NO: 492044 - DNA, 201 bp, Homo sapiens
ggttgtcgtaagtctctcctctcttccagagcagctgtgctttcgatctggggccacagacgagcaatggtcatgcctgacttggctgtatggaacctctygctgatgtgaacacctgttcccatgtttagatccaggccgatggcctgtgaattttgttcttctctcattcctattccttcataggatcaccagtgcatg

SEQ ID NO: 492045 - DNA, 201 bp, Homo sapiens
caaaaaaaaaaaaaaaaatgacgtggtcctatttctcccacaggttggtgtcttgttccgctaccactcagcagtgggctgatctctccttggcccttgargtcaaccagtccctgacgtgcgtaaacctctccgacaatgagcttctggatgagggtgctaagttgctgtacacaactttgagacaccccaagtgctttc

SEQ ID NO: 492046 - DNA, 201 bp, Homo sapiens
gttgtctgatggtggtgctaataagtgattacatggtccagctttcaattgtactcatttgtcaggggtatatgcccagagaaaccctaaatacttcagcygtgatggacacacatttggtgtaaccctttcttctcttccctatagatcccaggatgatcagcacatgcttcctttctggacggacctttgttccatatt

SEQ ID NO: 492047 - DNA, 201 bp, Homo sapiens
gtcgaaacctgcagaaaatgtcactgcaggtaataaaggagaatctcccggagaatgtcactgcgtctgaatcagacgccgaggttgagaggtgagaaccrtttcactctaccagtcgttccatctttagcctcatcccatgcccccttaggaagaggccagagcctcctatgcactgtggcttagggtcaggaattccct

SEQ ID NO: 492048 - DNA, 201 bp, Homo sapiens
ccaaaagacctctcagtaattccggtggatacaggaagtgctcagcaacgattacgccccgagggccaatcacagggctgcggccgagaaagaagccttawtagagctttctcaacctgcagccctcatctccgccggcgagtagggccaggtgttgggaggtgagtagctctccggcagctctgcaacttcatttcttta

SEQ ID NO: 492049 - DNA, 201 bp, Homo sapiens
agccagggtgacaaagtgagactccgtctcaaaaaaaaaaaaaaaaaaaatacaaaaagtagctgagcgtggtggtgggtgcccataatcccagctagtcrggaggctgaggcaggagaactgtttgaacctgggaggcagaggttgcagtgagctgagatcgtactactgtactccagcctgggctgcagagtgaaacta

SEQ ID NO: 492050 - DNA, 201 bp, Homo sapiens
ttgtgacagctactgggtggagatggcgagcctccaggtctttgaaaagatgcaccgaatggatctgtctgagagagcaaaggatgaagtcagaggtgagyggaaatcggtccacactgtgtcctaggaggaagcaggcgtcctctccaggactttagaaattcagaaggccaggcgcgctggctcacgcctgtcgtccca

SEQ ID NO: 492051 - DNA, 201 bp, Homo sapiens
ctttatcttctatcagagatcattcactcatggttcatgcttctcctgtatgatgattcagaataccagctattgacatttttcaagcaagaacccttcargaacatcaagttgccccttttctgttagtcctctggtttgagagctctccccttgggaagctgtccagtggctgcccaggcgatgagaacctacatgcat

SEQ ID NO: 492052 - DNA, 201 bp, Homo sapiens
ggttcaagtaattctgctgcctcagcctcccaagttgctgggattacaggcacccgccaccacgcccggctaatttttgtgcatttagtggagctggtttygccacattgccaggctggtctcgaactcatgacctcaggtgacctgccctcctcaggctcccaaagtgctgggattataggcatgagccaccatgcccag

SEQ ID NO: 492053 - DNA, 201 bp, Homo sapiens
cccgagtagctgggactacaggcgcccaccaccacgcctggctaatttttttgtgtttttagtagagacggggtttcaccgtgttagccaggatggtctcratctcctgaccttgtgatccgcccgcctcggcctcccaaagtgctgggattacaggcgtgagccaccgcgcccggcccctgaagattgtgttttgagatg

SEQ ID NO: 492054 - DNA, 201 bp, Homo sapiens
caggcgtgagccaccgcgcccggctgtgtgtttgcattatcatattcagcccagttttcacgaagtttcttgtctcctgggtgatccacgtagctccccasttccttatctgatctatgcttgtcctttcattgttgtgttactactttgctataatgagagagtgttttcgctttataggttaacttttagaacctgagc

SEQ ID NO: 492055 - DNA, 201 bp, Homo sapiens
tgcattatcatattcagcccagttttcacgaagtttcttgtctcctgggtgatccacgtagctccccacttccttatctgatctatgcttgtcctttcatkgttgtgttactactttgctataatgagagagtgttttcgctttataggttaacttttagaacctgagcagcccctcagggaaaaccctgacagtagctgg

SEQ ID NO: 492056 - DNA, 201 bp, Homo sapiens
ggaactggcatttgagacaggagtgctaatcaccatccctctccactcctcccttgattgtcatcacagctcccacgtgggacaagatggtgtcttcggcrcagatgggcttcaacctgcaggctctcctggagcagctcagccaggatgagttgagcaagttcaagtatctgatcacgaccttctccctggcacacgagc

SEQ ID NO: 492057 - DNA, 201 bp, Homo sapiens
ggcgtgagccaccgcacccagccagcaagtgcatttagaactactctactttctaccccataacttttttttttgtttgtttgagacaagtctcactctgycacccaggatggagtgcagcagcacaatctcagcttattgcaactcccgccccctgggttcaagtgtttctcctgcatcagcctcttgaatagctaggat

SEQ ID NO: 492058 - DNA, 201 bp, Homo sapiens
ttcaagaccagcctggccaacatggggaaaccctgtctctactaaaaatacaaaacttagctgggtgtggtggcacgcgcatgtgtgtacacacacacacmcccctgtaatcccagctactcggaaggctggggcacaagaatcgcgtgaacccaggaggcggaggttgaagtgagccaccgtgccagctgagaatccttt

SEQ ID NO: 492059 - DNA, 201 bp, Homo sapiens
  misc_feature (1)...(201): n = A,T,C or G
aaaacttagctgggtgtggtggcacgcgcatgtgtgtacacacacacacccccctgtaatcccagctactcggaaggctggggcacaagaatcgcgtgaanccaggaggcggaggttgaagtgagccaccgtgccagctgagaatcctttttacttctccaacttctgttggccacctgcattccttggcttgtggccctt

SEQ ID NO: 492060 - DNA, 201 bp, Homo sapiens
agtacagtggtgaaatcagctcactgcatcctcaaacttctgggttcaagtgatgttcctgagtacctgggatgacaggtattaagtgtgcaccatcatgyccagctaacttaagtgggggtttttttttgtgtttttttttttttttttttttttggaaagacaaaatctcactatgttgtccaggctggtcttgaactc

SEQ ID NO: 492061 - DNA, 201 bp, Homo sapiens
tgtaacctccacctcccaggttcaagcgattctcctgattctcctgactcagcctcctgagtagctgggattataggcacctgccaccacacccagctaatttttttttttttttttgagacgaagtcttgttcttgtcacccaggctggagtatagtggcaccatccctgttcactgcaacctccgcctcccagattcaa

SEQ ID NO: 492062 - DNA, 201 bp, Homo sapiens
ttttatgaaggcaataaaatcttgagcttatggtaaaatgcaaaattttccccccttctcctttttcagaagcagctttgaaatcctttaataaaaggaarcctctatcattaggtaagttacctcatttataacttttattcttcatgtgagatctggggactcgggcctttgttttaaggagaatgtgctgagcactaa

SEQ ID NO: 492063 - DNA, 201 bp, Homo sapiens
tttctaggctttggaactgcgacataactagcgatggctgctgcgatctcacaaagcttctccaagaaaaatcaagcctgttgtgtttggatctggggctraatcacataggagttaagggaatgaagttcctgtgtgaggctttgaggaaaccactgtgcaacttgagatgtctgtggtgagttaacttataagttcaac

SEQ ID NO: 492064 - DNA, 201 bp, Homo sapiens
tgtgtgccaccacgcccagctaattttttgtattttagtagagacagggtttcaccgtgttagtcaggatggtctggatctcctaacctcgtgatccgtcygcctcagcctcccaaagtgctgggatgacaggcgtgagccactgtgcccagcctagcacacaatcttgacaaagaatttcggtgcgacttggggtactgt

SEQ ID NO: 492065 - DNA, 201 bp, Homo sapiens
cttgctctgtcacccaagctggagtgcagtggcgcaatctcggctcactgcaagctccatctcccgggttcacgccattctgcctcagcctccccagtagytgggactacaggcgcccgccacacgcccggctaattttttgtatttgtagtagagacagggtttcaccgtgttagccaggatggtctcgatctcctgacc

SEQ ID NO: 492066 - DNA, 201 bp, Homo sapiens
caaaggctgctactccttcatccacctcagcttccagcagtttctcactgccctgttctacaccctggagaaggaggaggaagaggatagggacggccacrcctgggacattggggacgtacagaagctgctttccggagtagaaagactcaggaaccccgacctgatccaagcaggctactactcctttggcctcgctaa

SEQ ID NO: 492067 - DNA, 201 bp, Homo sapiens
catctctactaaaaatataaaattaggtgggcgtggtagcgcatacttgtaatcctagctactcaggaggctgaggcaggagaatcacttgaacccgggarggcggaggttgcggggagcctagatcataccattgctctccagcctgcgcagcaagagagaaactgtctcaaaaaataaaataaaataaaattcagtggt

SEQ ID NO: 492068 - DNA, 201 bp, Homo sapiens
gggacggccacacctgggacattggggacgtacagaagctgctttccggagtagaaagactcaggaaccccgacctgatccaagcaggctactactccttyggcctcgctaacgagaagagagccaaggagttggaggccacttttggctgccggatgtcaccggacatcaaacaggaattgctgcgatgcgacataagtt

SEQ ID NO: 492069 - DNA, 201 bp, Homo sapiens
tttttttttttttgagacaaagtctagctctgtttcccaggctggagtacagtggcgctatctcagctcactgcaacttccacctcccaggttcaagcaaytctcgtgcctcagccttctaagtagctgggactacagccgcctgtcaccaacctggctaattttcgtatttttagtcgatatagggtttcactatgttgg

SEQ ID NO: 492070 - DNA, 201 bp, Homo sapiens
ctaatttttgcatttgttagttttatttttagtagacagggtttcaccatgttgggcaggctggtcttgaactcctgacctcaggtgatccacccacttcrgcctcccaaagtgctgggattacaggcatgagccaccgtacctagcccacattgacttttgatacagcaagtatttcttgctatggctctgtataataga

SEQ ID NO: 492071 - DNA, 201 bp, Homo sapiens
cttttggctgccggatgtcaccggacatcaaacaggaattgctgcgatgcgacataagttgtaagggtggacattcaacggtgacagacctgcaggagctsctcggctgtctgtacgagtctcaggaggaggagctggtgaaggaggtgatggctcagttcaaagaaatatccctgcacttaaatgcagtagacgttgtgc

SEQ ID NO: 492072 - DNA, 201 bp, Homo sapiens
ttccacctcccaggttcaagcaattctcgtgcctcagccttctaagtagctgggactacagccgcctgtcaccaacctggctaattttcgtatttttagtygatatagggtttcactatgttggccaggctggtctcaagctccagacctcaggtgatcctcccaccttggactcccaaagtgctgtgattacaggcgtga

SEQ ID NO: 492073 - DNA, 201 bp, Homo sapiens
tgttggccaggctggtctcaagctccagacctcaggtgatcctcccaccttggactcccaaagtgctgtgattacaggcgtgagccaccgcacccggccctgttgttgtttttaaaatagagacagggtcttaagttgccaggctggtctggaacttctggactggagtgatcacccacctgagcttcccaaagtgcgggg

SEQ ID NO: 492074 - DNA, 201 bp, Homo sapiens
taccagtcgttccatctttagcctcatcccatgcccccttaggaagaggccagagcctcctatgcactgtggcttagggtcaggaattccctcttgttggrctctttgtttgtttttgttttgagatggagtcttgctctgtcgctcaggctggagcgcagtggcgcgatcttggctccctgcaacctccgcctcccgggt

SEQ ID NO: 492075 - DNA, 201 bp, Homo sapiens
gttggccaggctggtctcaagctccagacctcaggtgatcctcccaccttggactcccaaagtgctgtgattacaggcgtgagccaccgcacccggccctgttgttgtttttaaaatagagacagggtcttaagttgccaggctggtctggaacttctggactggagtgatcacccacctgagcttcccaaagtgcgggga

SEQ ID NO: 492076 - DNA, 201 bp, Homo sapiens
gtcaggaattccctcttgttggactctttgtttgtttttgttttgagatggagtcttgctctgtcgctcaggctggagcgcagtggcgcgatcttggctcmctgcaacctccgcctcccgggttcaagtgattcttctgcctcagcctcctgagtagctgggactacaggcgcctgccaccttgcccggctaatttttata

SEQ ID NO: 492077 - DNA, 201 bp, Homo sapiens
ttggccaggctggtctcaagctccagacctcaggtgatcctcccaccttggactcccaaagtgctgtgattacaggcgtgagccaccgcacccggccctgttgttgtttttaaaatagagacagggtcttaagttgccaggctggtctggaacttctggactggagtgatcacccacctgagcttcccaaagtgcggggat

SEQ ID NO: 492078 - DNA, 201 bp, Homo sapiens
cagctcactgcagccttaacttccctggctcaggtgatcctcccacctcagcctcctcagtagctgggactacaggtgcatgccactatgcccagcacaattttttttttttttgtatttttttgtagagacagggttttgccatgttgcccaggctggtctcaaactccaagcaatcctcccaccttggcttcccaaagt

SEQ ID NO: 492079 - DNA, 201 bp, Homo sapiens
agctcactgcagccttaacttccctggctcaggtgatcctcccacctcagcctcctcagtagctgggactacaggtgcatgccactatgcccagcacaattttttttttttttgtatttttttgtagagacagggttttgccatgttgcccaggctggtctcaaactccaagcaatcctcccaccttggcttcccaaagtg

SEQ ID NO: 492080 - DNA, 201 bp, Homo sapiens
ctgggcacagtggtgaatgcctgtaatcccagctacttgggaggctgaggcaggagaattgcttgaatccgggaggcagaggttgtagtgagccgagattrcagcactgcactccagccagggtgacaaagtgagactccgtctcaaaaaaaaaaaaaaaaaaaatacaaaaagtagctgagcgtggtggtgggtgcccat

SEQ ID NO: 492081 - DNA, 201 bp, Homo sapiens
tgaatccgggaggcagaggttgtagtgagccgagattgcagcactgcactccagccagggtgacaaagtgagactccgtctcaaaaaaaaaaaaaaaaaawatacaaaaagtagctgagcgtggtggtgggtgcccataatcccagctagtcgggaggctgaggcaggagaactgtttgaacctgggaggcagaggttgca

SEQ ID NO: 492082 - DNA, 201 bp, Homo sapiens
caggcatgattcaccatgcccggcccaaatatatttttttaagacagggtcttgctgtgttgctcaggctggagtacagtggtgaaatcagctcactgcakcctcaaacttctgggttcaagtgatgttcctgagtacctgggatgacaggtattaagtgtgcaccatcatgtccagctaacttaagtgggggtttttttt

SEQ ID NO: 492083 - DNA, 201 bp, Homo sapiens
tcactatgttgcccaggctgggagtttgttcttgaagaagcagggtagatggtgagtgtccttgttcgtggcacagcaggaactggcatttgagacaggastgctaatcaccatccctctccactcctcccttgattgtcatcacagctcccacgtgggacaagatggtgtcttcggcgcagatgggcttcaacctgcagg

SEQ ID NO: 492084 - DNA, 201 bp, Homo sapiens
acttggggtactgtggtgcctgctctatcatcatgcttcagcaggaaatgtgggtgaatagtgcctggtggcatggcaggtaaagaaatgttttgttttgtttttttttttgagacagtcttgctctgtcacccaagctggagtgcagtggcgcaatctcggctcactgcaagctccatctcccgggttcacgccattctg

SEQ ID NO: 492085 - DNA, 201 bp, Homo sapiens
taaacatggaaaaaatagttcctaaagtttaaatatatcgagcccctggtttccatttaagtacgatacaggtgtacacactaaagatttcactttcgttytcttttccctaggttcaaaaacatttccccagctgatgctcatcggaacctctgcctagctcttcgaggtcacaagactgtaacgtatctgacccttcaa

SEQ ID NO: 492086 - DNA, 201 bp, Homo sapiens
tttagtagagacacggttttaccatgttaggttggtcttgaactccttgacctcaggtgatccatccacctcggcctcccaaagtgctgggattacaggcrtgaaccaccgtgcccggcctgagacttctgttggtcatgcagatccccaacacacgagggtgggcttggcttgccggagggcatcgatcagcactggctg

SEQ ID NO: 492087 - DNA, 201 bp, Homo sapiens
agctaccacaagcttatgtggcaattttgtgtaaataagaaaaagttcgttattctgactagaaacagtactaagggcagatgacccaggatgcagcatgrgctgaacttgagtttctacttgccttgaacagtaaacaccctggacaaccatacgtgaggaccctgaatccaaagaaactcccagaatctttatcatctt

SEQ ID NO: 492088 - DNA, 201 bp, Homo sapiens
  misc_feature (1)...(201): n = A,T,C or G
gtggcaattttgtgtaaataagaaaaagttcgttattctgactagaaacagtactaagggcagatgacccaggatgcagcatgggctgaacttgagtttcnacttgccttgaacagtaaacaccctggacaaccatacgtgaggaccctgaatccaaagaaactcccagaatctttatcatctttttttttttttttatga

SEQ ID NO: 492089 - DNA, 201 bp, Homo sapiens
tacttgccttgaacagtaaacaccctggacaaccatacgtgaggaccctgaatccaaagaaactcccagaatctttatcatctttttttttttttttatgragtcttgctctgttgcccaggccaaagtgcaatggcacgatcttggctcactgcaacctctgtctcctgggttcaagtaattctgctgcctcagcctccc

SEQ ID NO: 492090 - DNA, 201 bp, Homo sapiens
ctgcctcagcctcccaagttgctgggattacaggcacccgccaccacgcccggctaatttttgtgcatttagtggagctggtttcgccacattgccaggcyggtctcgaactcatgacctcaggtgacctgccctcctcaggctcccaaagtgctgggattataggcatgagccaccatgcccagccagagtccttatgtt

SEQ ID NO: 492091 - DNA, 201 bp, Homo sapiens
ttttgatttgcatttctctgatggccagtgatgatgagcattttttcatgtgttttttggctgcataaatgtcttcttttgagaagtgtctgttcatgtcsttcgcccactttttgatggggttgtttgtttttttcttgtaaattattttctacctatttctatcgctttcaggtatcgtacagttggcctaacatatct

SEQ ID NO: 492092 - DNA, 201 bp, Homo sapiens
agaataatgggatgcagggtgagggggaatattgggtgaattaaagatttgggtcactaatttctttctttttttctcaagatatagtcttgctctgtctyctaggctggagtgcagtgccacaatcttggttcactgcaacctctgcctcccgggttcaagtgattcttctccgtcaacctcccaagtagctgggattac

SEQ ID NO: 492093 - DNA, 201 bp, Homo sapiens
caagcatgtcccaccatgcctggctgatttttttttttttttttttgtattctaaatagagatggggtttcaccatgttagccaggatagtctcgatgtcrtgacctcatgatctgcccgcctcggcctcccaaagtgttgggattacaggcgtgagccaccgcacccagccagcaagtgcatttagaactactctacttt

SEQ ID NO: 492094 - DNA, 201 bp, Homo sapiens
atatttagtagagccggggtttcaccgtgttggctgggctggtctcgaactcctgacctcaagtgacatccatcttccaaaatgctgggattacagccatrtgccaccacgcccagctaattcttgtatttttaggagaaatggggtttcatcatgttgttccggctggtcttaaactcctggcctcatgatccacctgcc

SEQ ID NO: 492095 - DNA, 201 bp, Homo sapiens
ggccaggagtttgagaccagtcaggccaatgtggtgaaaccctgtctctactaaaaatataaaaaaatcagccgggcgtggtggcacactcctgtagtccyagctacttgggaggctgaggcaggaggattgcttgaaccagagagtcagaggttgcagtgagccaagatcgtgccactgcgctccagcctgggtgacagc

SEQ ID NO: 492096 - DNA, 201 bp, Homo sapiens
aaacatcatccctgggcagaaaggccttcttctcatgacttcatgatctgaatccccccgagtcattcattctccatgaagtcatcgattttccaggtgtkggtgaactgcctgtgactcctctcctccccggcccctacccctcagggataatgagttcattgctgggctagatgttttagccatgattctgcctctgtt

SEQ ID NO: 492097 - DNA, 201 bp, Homo sapiens
tgaggcaggaggattgcttgaaccagagagtcagaggttgcagtgagccaagatcgtgccactgcgctccagcctgggtgacagcaagactccatctcaaraaaaaaaaacaaacaaacatggtattaattacacaatggaatactcctcaaccttaaggaactcctatctttttatttaaaaattgccagttttatttca

SEQ ID NO: 492098 - DNA, 201 bp, Homo sapiens
aaaatcgatgactttaatgatgaactcaataagctgctggaagaaatagaagaaaaaaacccacaactgattattgatactgagaaacatcatccctgggmagaaaggccttcttctcatgacttcatgatctgaatccccccgagtcattcattctccatgaagtcatcgattttccaggtgttggtgaactgcctgtga

SEQ ID NO: 492099 - DNA, 201 bp, Homo sapiens
gttacaagtttgaaaacggcaggaggaaacccagagagttgtaaacttacgaaggtctgggctctgaaaaagatacaaattttctttccatgccaatagcrctcacacagacatggtgaatgttcctgaaacccgccggactttctgtaagaagtgtggcaagcaccacccccacaaagtgacacaaggcaaggattcttg

SEQ ID NO: 492100 - DNA, 201 bp, Homo sapiens
tcctgagtagctgggaccacaggcacttgccaccatgcctggctaatttttttcactttttgtagagacagggtcttgctatgttgcccaggctggcctcraattactaaactcaatcagtcctcctgcctcaccctcccaaactgctggggtacaggtgtgagccatgacacctggcccttaccagctacttatatcctg

SEQ ID NO: 492101 - DNA, 201 bp, Homo sapiens
cctcctgcctcaccctcccaaactgctggggtacaggtgtgagccatgacacctggcccttaccagctacttatatcctgaagattattattatttttttwttttttgagatagagtctctctctgttgcccaggctggagtgcagtggcgtgatctcggctcactgcaagctccgcctcccgggttcatgccattctcct

SEQ ID NO: 492102 - DNA, 201 bp, Homo sapiens
ttcaattgtactcatttgtcaggggtatatgcccagagaaaccctaaatacttcagccgtgatggacacacatttggtgtaaccctttcttctcttccctrtagatcccaggatgatcagcacatgcttcctttctggacggacctttgttccatatttggatcaaataaggatctgatgggtctagcaatcaatgatagc

SEQ ID NO: 492103 - DNA, 201 bp, Homo sapiens
gcgatcttggctccctgcaacctccgcctcccgggttcaagtgattcttctgcctcagcctcctgagtagctgggactacaggcgcctgccaccttgcccrgctaatttttatattttcattagagacgggatctcagcatgttggccagtctggtcttgaactccgcctgacctcaggtgatccacctgcctcagcctcc

SEQ ID NO: 492104 - DNA, 201 bp, Homo sapiens
catggtccagctttcaattgtactcatttgtcaggggtatatgcccagagaaaccctaaatacttcagccgtgatggacacacatttggtgtaaccctttyttctcttccctatagatcccaggatgatcagcacatgcttcctttctggacggacctttgttccatatttggatcaaataaggatctgatgggtctagca

SEQ ID NO: 492105 - DNA, 201 bp, Homo sapiens
tagacgttgtgccatcttcattctgcgtcaagcactgtcgaaacctgcagaaaatgtcactgcaggtaataaaggagaatctcccggagaatgtcactgcktctgaatcagacgccgaggttgagaggtgagaaccgtttcactctaccagtcgttccatctttagcctcatcccatgcccccttaggaagaggccagagc

SEQ ID NO: 492106 - DNA, 201 bp, Homo sapiens
cagtaagacctgggaagctgaaacacgatcgcgtttgttggaaatctataaatacatacaaagcggggaagggtaagcttggcctttgaatctggataagstagagacttttcttttttgagatggaggcttgctctgtcacctaggctgaagtgcagtggtacgacctcggctgactgcaacctctacctcctgggttca

SEQ ID NO: 492107 - DNA, 201 bp, Homo sapiens
cggctaatttttatattttcattagagacgggatctcagcatgttggccagtctggtcttgaactccgcctgacctcaggtgatccacctgcctcagcctccaaagtgggattacaggcatgattcaccatgcccggcccaaatatatttttttaagacagggtcttgctgtgttgctcaggctggagtacagtggtgaaa

SEQ ID NO: 492108 - DNA, 201 bp, Homo sapiens
tggggactcgggcctttgttttaaggagaatgtgctgagcactaagaatgcaaagaaatgccggacttagcatccctgctcccagggcggagctggtctcscaggtgcgtagcagtaagacctgggaagctgaaacacgatcgcgtttgttggaaatctataaatacatacaaagcggggaagggtaagcttggcctttga

SEQ ID NO: 492109 - DNA, 201 bp, Homo sapiens
cccaggctgggagtttgttcttgaagaagcagggtagatggtgagtgtccttgttcgtggcacagcaggaactggcatttgagacaggagtgctaatcacyatccctctccactcctcccttgattgtcatcacagctcccacgtgggacaagatggtgtcttcggcgcagatgggcttcaacctgcaggctctcctggag

SEQ ID NO: 492110 - DNA, 201 bp, Homo sapiens
tttaatgaatgatttgcaaatcaggtagtcttctgggccagtgtacgctcagactcccaatggaagctattggaagctacatgctcaatgtgatcctcctkttaatactaaaatcacaggacacgtggcctggcatagtggctcacgcctataatcccatcaccttgggaggccgaagcaaggcagatcccttgagggcag

SEQ ID NO: 492111 - DNA, 201 bp, Homo sapiens
gggctgaacttgagtttctacttgccttgaacagtaaacaccctggacaaccatacgtgaggaccctgaatccaaagaaactcccagaatctttatcatctttttttttttttttatgaagtcttgctctgttgcccaggccaaagtgcaatggcacgatcttggctcactgcaacctctgtctcctgggttcaagtaatt

SEQ ID NO: 492112 - DNA, 201 bp, Homo sapiens
aggttgaagtgagccaccgtgccagctgagaatcctttttacttctccaacttctgttggccacctgcattccttggcttgtggcccttcctccaacttcrgcagagcatcttcaaacgttgccctggctcccttatcacgtcacctcctgctggctttgactctcagctccctcttatgaggatccctgtgattgctgga

SEQ ID NO: 492113 - DNA, 201 bp, Homo sapiens
tcctgacctcaggtgatccgcccatctcggcctcccaaagtgctgggattacaggcgtgagccactgcgccaggccctatgtctaagttctagtctgtgtyatgcaaagaacacctgtgaaattttaaggatacagtgcctcaagccattcagccaaaagccactgcccagcaccccacattcagagaggtgggaattggg

SEQ ID NO: 492114 - DNA, 201 bp, Homo sapiens
ccgggttcatgccattctcctgcctcagcctcccgagtagctgggactacaggcgcccaccaccacgcctggctaatttttttgtgtttttagtagagackgggtttcaccgtgttagccaggatggtctcgatctcctgaccttgtgatccgcccgcctcggcctcccaaagtgctgggattacaggcgtgagccaccgc

SEQ ID NO: 492115 - DNA, 201 bp, Homo sapiens
tggcctcatgatccacctgccttggcctgccaaagtcctgggattacaggcatgagccactgtgcccagccactcatttcttatgaatttattctaacacrttttccggatgaacagggcaccttgaaacataggttagtgggctgggtatggtggcttctgcctgtaatcccagtactttgggaggcctaggctggtgta

SEQ ID NO: 492116 - DNA, 201 bp, Homo sapiens
cctcaagccattcagccaaaagccactgcccagcaccccacattcagagaggtgggaattgggccaggcacagtggctcatacctgtaatcccagcacttygggaggccgaagcgggcggatcacttaaggtcaggagctcaagaccagcctggccaacttgaaactccatctctactaaaatataaaaattagccgagca

SEQ ID NO: 492117 - DNA, 201 bp, Homo sapiens
tccctccccagcatcttttcaggagttccatggactcacctcttcattatccagggttaagctgcagatattgttattaggattccaccttgttctctctytttttttttttttttttttttgatacggagtctcgcttgctcttttgccaggctgaagtgcagtggagcgatcttggctcactgcaatctccgcctcctg

SEQ ID NO: 492118 - DNA, 201 bp, Homo sapiens
tgggaggccgaagcgggcggatcacttaaggtcaggagctcaagaccagcctggccaacttgaaactccatctctactaaaatataaaaattagccgagcrtagtagtgggtgcctctttttttttttttttttttttgagatagtttcactcttgttgcccaggctgtagtgtaatggcgcgatctcagctcactgcaac

SEQ ID NO: 492119 - DNA, 201 bp, Homo sapiens
tccccagcatcttttcaggagttccatggactcacctcttcattatccagggttaagctgcagatattgttattaggattccaccttgttctctctttttytttttttttttttttttgatacggagtctcgcttgctcttttgccaggctgaagtgcagtggagcgatcttggctcactgcaatctccgcctcctgggtt

SEQ ID NO: 492120 - DNA, 201 bp, Homo sapiens
tctcaggaaaaaataaaaaagaggtaggaattagatatcgtgccagaaaatgctggctctatcagcaggtgagtggtctcaacttggctatcttacaaatmccttgtgagttagctacaatcagatgcacttgaacctggaatcctatctgggaggcaatcttaaaagaatttgactcgggatgggcaaggtggctcatgc

SEQ ID NO: 492121 - DNA, 201 bp, Homo sapiens
ctggcaggcagatcacctgaggttgggagttcgagaccagcctgaccaacgtagagaaaccctgtctgtactaaaaatacaaaattagccaggtatggtgrcacattcctgtaatcccagctactccggaggccgaggcaggagaatcacttgaacccaggaggcggaggttgcagtgagccgacatcacaccattgcatt

SEQ ID NO: 492122 - DNA, 201 bp, Homo sapiens
taccttgtgagttagctacaatcagatgcacttgaacctggaatcctatctgggaggcaatcttaaaagaatttgactcgggatgggcaaggtggctcatrcctgtaatcctggcattttgggagtccaaggcaggtagattgcttgaggccaagaatttaaaaacagcctggccaacacaatgaagccctgtctctactg

SEQ ID NO: 492123 - DNA, 201 bp, Homo sapiens
tagctgggactacaggcgtccgccaccacgcccggctaattttttgtatttttttagtagagacagggtttcaccgtgttagccaggatggtcttgatctsctgacctcgtgatccacccgcctcagcctcctaaagtgctgggaattacaggcatgagccatcacgccccacctgagactgtcttttaaaaaaaaaaaaa

SEQ ID NO: 492124 - DNA, 201 bp, Homo sapiens
cctttcttctcttccctatagatcccaggatgatcagcacatgcttcctttctggacggacctttgttccatatttggatcaaataaggatctgatgggtytagcaatcaatgatagctttctcagtgcctccctagtaaggatcctgtgtgaacaaatagcctctgacacctgtcatctccagagagtggtgtaagtaga

SEQ ID NO: 492125 - DNA, 201 bp, Homo sapiens
cagcctgggcaacagagtgacactctgtctcaaaaaaaaaagatgcaagcattttgaactggaaggagataagagaaaggaacaagtgatccagttctaartgtcatcttttcttttatgaaggcaataaaatcttgagcttatggtaaaatgcaaaattttccccccttctcctttttcagaagcagctttgaaatcctt

SEQ ID NO: 492126 - DNA, 201 bp, Homo sapiens
tgccggagggcatcgatcagcactggctgcattaacgtgttgatttctgtgtttccccaggttgtggggatgttccatccctccgttcagttgtgaagacstctgctctgccctcagctgcaaccagagcctcgtcactctggacctgggtcagaatcccttggggtctagtggagtgaagatgctgtttgaaaccttgac

SEQ ID NO: 492127 - DNA, 201 bp, Homo sapiens
tcactccagcctgggtgacagtgagatcctgtctcaaaaaaaaaaaaaaaacaaaaaaaacaaaggcgcctttttaatcactcactgacacgtgtagaggmgcaaaaagtttgagttgctggttggcccaggaggtcaaggctgcagtgagccaagatggcgttaccacactccagcctgggcaaccgagtgagaccgtgt

SEQ ID NO: 492128 - DNA, 201 bp, Homo sapiens
tgaaacaaatctccttgatgcacaaagtaaccttttcttcccccattgtaccccaggttgaaaatcgatgactttaatgatgaactcaataagctgctggwagaaatagaagaaaaaaacccacaactgattattgatactgagaaacatcatccctgggcagaaaggccttcttctcatgacttcatgatctgaatcccc

SEQ ID NO: 492129 - DNA, 201 bp, Homo sapiens
aatcagtcctcctgcctcaccctcccaaactgctggggtacaggtgtgagccatgacacctggcccttaccagctacttatatcctgaagattattattattttttttttttttgagatagagtctctctctgttgcccaggctggagtgcagtggcgtgatctcggctcactgcaagctccgcctcccgggttcatgcca

SEQ ID NO: 492130 - DNA, 201 bp, Homo sapiens
gaggcaggtggatcacctaaggtcaggagttcgtagaccagcctgtctctactaaagagacaggtgaaaccctgtctctctaaaaccacaaaaatcaggcrggcatggtggcacatagctataatctcatctacttggaggcacgagaactgcttgaatccaggaggcagaggctacagtgagccgagatcatgccacagc

SEQ ID NO: 492131 - DNA, 201 bp, Homo sapiens
cgcgatctcggctcactgcaacctccgcctcctgggttcaagcgattctcctgccccagcctcctgagtagctgggattacaggtgcctgtcaccacgccyagctaacttctgtatatttagtagagacacggttttaccatgttaggttggtcttgaactccttgacctcaggtgatccatccacctcggcctcccaaag

SEQ ID NO: 492132 - DNA, 201 bp, Homo sapiens
gggtgaggcagagaattgcttgaacctgggaggcggaagttgcagtgagctgagattgtgccactgtactccagcctgggtgtcagagcgagactgtctcaaaaaaaaaaaaaaaaaagtttctatacattcataaagtttcaagatttgggggtgtgttttcacttctccatcgtcatggactccaatctgccatctatt

SEQ ID NO: 492133 - DNA, 201 bp, Homo sapiens
agcgattctcctgccccagcctcctgagtagctgggattacaggtgcctgtcaccacgcccagctaacttctgtatatttagtagagacacggttttaccrtgttaggttggtcttgaactccttgacctcaggtgatccatccacctcggcctcccaaagtgctgggattacaggcgtgaaccaccgtgcccggcctgag

SEQ ID NO: 492134 - DNA, 201 bp, Homo sapiens
attttgtattttaatagagatggggtttcactatgttggccaggctggtcttgaactcctgaccacgtgatcaacccgcctcagcctcccaatgtgctggrattacaggtgtgagccgccatgcccagctacacttttttttgaaacggggtctcgttttcttgctcaggctggagtacaatggggcaatcacagctcact

SEQ ID NO: 492135 - DNA, 201 bp, Homo sapiens
tgggacttggacatctttaggggaggccattcttctgtccaccacaccaccccatgattccatttccatgtcaccactgtctctaagtgtgtctaacccayggctcaagagtcaaaggtgcatcacagcagtgagaactcacaggttcgggtttgctttcttcctgtggttgatttctaggctttggaactgcgacataac

SEQ ID NO: 492136 - DNA, 201 bp, Homo sapiens
ctatctcctgttcctttgaagaaccccatctctctccaatcttttcctccactattcttaatgtgcccactgtctcctggagaatgccaacctcccttccrtaagaatagagggaagaacgaacgttgcagagaattagaactcagtttgtagaaagttaggagcacagcgcagagagtttttgtttttgtttttgttttg

SEQ ID NO: 492137 - DNA, 201 bp, Homo sapiens
attgcaggatgacattccacacatcctagcccaagcacggaaaatcttgttcgtgattgacggctttgatgagctgggagccgcacctggggcgctgatcsaggacatctgcggggactgggagaagaagaagccggtgcccgtcctcctggggagtttgctgaacagggtgatgttacccaaggccgccctgctggtcac

SEQ ID NO: 492138 - DNA, 201 bp, Homo sapiens
gctgaggtgggaggatcacttgagcctgggaggaagaagttacagcgaattgagatcacgtcacctcactccagcctgggtgacagtgagatcctgtctcaaaaaaaaaaaaaaaacaaaaaaaacaaaggcgcctttttaatcactcactgacacgtgtagaggagcaaaaagtttgagttgctggttggcccaggaggt

SEQ ID NO: 492139 - DNA, 201 bp, Homo sapiens
aacataagtggcaagtgagatggatgctggcagccctggggggctgcatctaggtcttgacaggaatagacactgtctctggactgggctttgtttgtgtkgtagaagatgcaaacactcagagtgccattaaaaaaaagaaaaagggccaggcatggtggctcatgcctgtaatcccagcactttgtgaggctgaggcgg

SEQ ID NO: 492140 - DNA, 201 bp, Homo sapiens
ttaacataagtggcaagtgagatggatgctggcagccctggggggctgcatctaggtcttgacaggaatagacactgtctctggactgggctttgtttgtktggtagaagatgcaaacactcagagtgccattaaaaaaaagaaaaagggccaggcatggtggctcatgcctgtaatcccagcactttgtgaggctgaggc

SEQ ID NO: 492141 - DNA, 201 bp, Homo sapiens
gggaaagctcttaacataagtggcaagtgagatggatgctggcagccctggggggctgcatctaggtcttgacaggaatagacactgtctctggactgggytttgtttgtgtggtagaagatgcaaacactcagagtgccattaaaaaaaagaaaaagggccaggcatggtggctcatgcctgtaatcccagcactttgtg

SEQ ID NO: 492142 - DNA, 201 bp, Homo sapiens
atgagctggtgaaacatgaagaaaacggcctggtccttgaggactcagaggaactggcagctcagctgcaggtagccacgtctgccaccacgcccgggtgkgcagggttctggagactggcaccgagccacgctccctgatccctgcttctcacagccagggtgggaccatgtggggtctggtggaaaagctagggaggga

SEQ ID NO: 492143 - DNA, 201 bp, Homo sapiens
ttctttataaattacacagtctcaggtatgtctttattagcagagtgagaaaggactaatagagtaacccttaaacccccggaccccaaaatggagttgcygcaggatggaagtctgaaatccttgtgatgtccagctggcagaaaggaatttggatgagtagggctggccaacttctggtattgctggtgggtcctgtca

SEQ ID NO: 492144 - DNA, 201 bp, Homo sapiens
tcgtttgctccaatgtacatcattgggttaactggcaaaatctgaatgaggtccctacattagaaaaccttattgtagcagggttagtttcctgattttgmtattgccttggttatataagacaaagtccgtgttattaaggaatacacaggaatatttaggggtaaaagataactcatctgccacttagaaaataataaa

SEQ ID NO: 492145 - DNA, 201 bp, Homo sapiens
tctaaagtctgcacattgtccttttgtggcttatttccttgataattttattaaaattaaattggggggccaggtgcagtgactcacatctgtaatctcarcattttgggaggctgaggcaggtgggtcacctgaggtcaggagttcgagaccagcctggccaacatggtgaaatcctgtctctacttaaaaatacaaaaa

SEQ ID NO: 492146 - DNA, 201 bp, Homo sapiens
aacggcctggtccttgaggactcagaggaactggcagctcagctgcaggtagccacgtctgccaccacgcccgggtgtgcagggttctggagactggcacygagccacgctccctgatccctgcttctcacagccagggtgggaccatgtggggtctggtggaaaagctagggagggagcagaggtcacagatgctggccc

SEQ ID NO: 492147 - DNA, 201 bp, Homo sapiens
gagagggatttagccattaaatcagcaggggttggtcgtggggatgtggggtacaggaagatagaggatttaggcatggctgcagggttttaagctggtgrgactgttggctgggaaatctaggaaatccagcattgaaggacaggctttgtgaatctgttgtggatgggctgagccttcagtggccatggggcaacctgc

SEQ ID NO: 492148 - DNA, 201 bp, Homo sapiens
cccctttccatatctatatctatatctacacacacacatacacatatatgtagtgtgtgtgtgtgtatatatatatatatttatgtatgtatgtatgtatktatttatttatttatttattttgagacagaatcctgctctgtcacccaggctggagtgcagtggtgcaatcttggctcactgccacttccgcctcccgag

SEQ ID NO: 492149 - DNA, 201 bp, Homo sapiens
gatttttgaataagggggcccatgttttcatcttgcactggaccttgcaaattctgcagctggtcctgactgtcaagagagggatttagccattaaatcakcaggggttggtcgtggggatgtggggtacaggaagatagaggatttaggcatggctgcagggttttaagctggtgggactgttggctgggaaatctagga

SEQ ID NO: 492150 - DNA, 201 bp, Homo sapiens
tggccttctccctgtgtgcatctgtgtccaaatttcccctttccatatctatatctatatctacacacacacatacacatatatgtagtgtgtgtgtgtgtatatatatatatatttatgtatgtatgtatgtatttatttatttatttatttattttgagacagaatcctgctctgtcacccaggctggagtgcagtggt

SEQ ID NO: 492151 - DNA, 201 bp, Homo sapiens
ccactgcactccagcctgggcaagagagcaagactctgtctcagggaaaaaaataaaaacaaacaaacaaacaaacaaaaacagctgaattagtttcctgyaacatctcactgtttctgtgaggcaaaaaaatcccacatgcaaagtacaaattatgtcatttctgtgattccacatttgagtccaatgttcctgttgaaa

SEQ ID NO: 492152 - DNA, 201 bp, Homo sapiens
gtggccttctccctgtgtgcatctgtgtccaaatttcccctttccatatctatatctatatctacacacacacatacacatatatgtagtgtgtgtgtgtgtatatatatatatatttatgtatgtatgtatgtatttatttatttatttatttattttgagacagaatcctgctctgtcacccaggctggagtgcagtgg

SEQ ID NO: 492153 - DNA, 201 bp, Homo sapiens
accaacatatgcacaggaggcaaaccaacttttgatcatttattgaaacaaataagaggttaatctctgggtaaaaaggccttgtttgccagcagctcagrggatgccttcaagctgacaggcactagtgcactttgaagtaggaagcatcacataggttctggagataagcaatagataaacaacgggagttaccagaag

SEQ ID NO: 492154 - DNA, 201 bp, Homo sapiens
tgaggaaggtgccacctgagaccacagcagtggggaagagtgtaagagggatggaaattgagatgaattcatgggtgtttggcctgtgcagtcacacaggrccccatgctgagagggaccctgagcttggcttaatgctttgctgttaccgtcttaaaattcctcctcattttatgtttgagtctatgttttgttttgttt

SEQ ID NO: 492155 - DNA, 201 bp, Homo sapiens
gctcagggaggaggcggggccttaagcagggggaacggggtgggcgggatgtgctttttctgaaaaggtggctctggaggccacttgggcacgggaccttrgctctggctgaactcccaggaggaggctacttcctggtgtgccagcccctccctgccagttggccccagaggccgtttaccaaggcgtttgaggaggcca

SEQ ID NO: 492156 - DNA, 201 bp, Homo sapiens
acaacccaatgtttctcccgcagcacttagcagcccaggtgaaggtaaatacaagaaggagagggaacaaagatgagggagggacacatcctgataatgcrccaaagacaaccacaggcaggaatactgatggcaacgaggcagacagggaacactgcccattgctctgcctgcctcacttttgttcaggggccaccagga

SEQ ID NO: 492157 - DNA, 201 bp, Homo sapiens
gcatcgtctcacacctgcaggccagaaggctgagatgaaggcgttctcagggccatgctctctctgaagatgctagggaaggatctccctccgagcttccrccagctccttagcttgtggcagcagaagtccaatcttcacgtggccttctccctgtgtgcatctgtgtccaaatttcccctttccatatctatatctata

SEQ ID NO: 492158 - DNA, 201 bp, Homo sapiens
tgcagggttttaagctggtgggactgttggctgggaaatctaggaaatccagcattgaaggacaggctttgtgaatctgttgtggatgggctgagccttcrgtggccatggggcaacctgcctgggaggagggcgagcagcagttcatcagcataggtggtgaatgaggctcaggaggggctactgaggccggaactgtgg

SEQ ID NO: 492159 - DNA, 201 bp, Homo sapiens
gccagcacgcctggttaatttttgtatttttagtagagagtgggtttcaccatattggccaggctggtcttgaactcctgacctcaagtgatctgcccacytcagcctcccaaaatgctggtattacagacgtgagccactgcacccagtctgaatctatgttttatcagtgaaatccaatggggcaatagaacatgtgca

SEQ ID NO: 492160 - DNA, 201 bp, Homo sapiens
tggcaccatctcagctcactgagatctccacctcccaggctcaagtgattctcctgcctcagcctcccaagtagctgggactacagccacctgccagcacrcctggttaatttttgtatttttagtagagagtgggtttcaccatattggccaggctggtcttgaactcctgacctcaagtgatctgcccacttcagcctc

SEQ ID NO: 492161 - DNA, 201 bp, Homo sapiens
ggccaacctgtgttctcctcacctctgccagtcctgcatgcccccaccccgtcacagtctcagtgagaaggggagggtgtgtgacctggaagagaggtgtytagtaacaggaccctgacattcaattctcttctcatagaggatgaagacttctccatcctgctggaagctttagaaagtagctgtgtggctgcggtgagg

SEQ ID NO: 492162 - DNA, 201 bp, Homo sapiens
tggctgtacctccaaaatatatcccagatctgatctcttcttataatttgtactgctacaaccttagtcaaagccactaatatctcttatctgaactccartggtttactagttttctgcctctcttcttgacacaattcatctttctacatagcagccagagtaagataaaatcataaatcagatcatataacttctacc

SEQ ID NO: 492163 - DNA, 201 bp, Homo sapiens
tgccatgaggtctgatgctcatgtctcccaaccaaatgaccatggggaccccagtaaataatgtctcccattagcatggactgttgtctagctagggagcyaagacacggggtccaaggagggggattagaattatcaaagggagcccattctatataattaatacaatttgggtgatggggccgggagtgattagtaact

SEQ ID NO: 492164 - DNA, 201 bp, Homo sapiens
cctcagcaccctggagcgccgccctcgggtttcggtctcctggatctgcgggtcggtctcggcgggcggattactcctcgcccacaacctcgaggccccgrggtcaaccgcgccctccgggccggcaacccagggtttagtcagattcctcctgacccaccgcttctgggaaagaggcgcctcccgtcaggaggatgctga

SEQ ID NO: 492165 - DNA, 201 bp, Homo sapiens
acacctgtagtcccagcactttgggaaggtaaggcaggtgcatcacctgaggtctggaattcaacaccagcctggccaacatggtgttggccatctctacyaaagcccatctctactaaaaatacaaaaattagccaagcatggtggtgcacacctgtaatcccagctacttggggggttgtagcggaaaaattgctcgaa

SEQ ID NO: 492166 - DNA, 201 bp, Homo sapiens
acaggaggagctggtggatcttgtccctggcattagaaagaaataaattatttaattgactttttaaaaattcaaaaaaatttaaaatttattactttttwaaaaattgacttattaaatcccagtgcaaccaatctaacacatagagaaacaactgagcagcaatgcccccaaccatcccatcccaaatatatgcttatt

SEQ ID NO: 492167 - DNA, 201 bp, Homo sapiens
cacagcaagaccctgtctgaaaaaaaaaaaaaaggattggaattcattttcaaattaattttgggcttctggtctgtgcttctttctgcatttaactccayaaagattaagctgtcaattaaatcttggaattgcaatatttaatagaactacataggtagaatactctatgagttaaatataatttaactaatttaggtg

SEQ ID NO: 492168 - DNA, 201 bp, Homo sapiens
tcaagtgatccacccacctcagcctcccaaagtgctgggattacaggtgtgagccactgcactggcctaagattttcattttaacagggaactgttagaayagaaaagaagcttcccaagaggcactcattttaaaaataaattatagcttaaattattactatgtggattatatcagcaaaggcagaaagaattaatgtt

SEQ ID NO: 492169 - DNA, 201 bp, Homo sapiens
tcttccaatttccaagctgtttaatcacactgattcagacactccggatagcagctgggattgtagttatctttatgctttgagctctctagttttgtctrcacatcttataaaatatcccctcctcattctcctctagctggaacactaacccaatggatgttgtggtgaactttctttgaccaggcagagaagtgcagc

SEQ ID NO: 492170 - DNA, 201 bp, Homo sapiens
tgtctcttctaatatgggcactaatcctatcacaaggcctctaccctcatgaactcattaccttccaaaggtcccacctccaaatgctagcacattggggrttagggaattcaacatatgaattttggggggaaggtacacaaacatttagtccatagcatgtatatatactatgatcccttctatgtaaaacaaaaatat

SEQ ID NO: 492171 - DNA, 201 bp, Homo sapiens
atctattttaaatataacactgaagttattacataaacactgacgtcaaaatcatgccagagcagtgttactatttttacatgtatatgagtattcatgayctttaatgtctggacacattctaggtcacagaacagaagcaaattttcacttttgtgtgtttttggtacagtgacatgtctggttccttttgagctagat

SEQ ID NO: 492172 - DNA, 201 bp, Homo sapiens
ctcaagaccagcctgggcaaaatggctggtgctgaacttctggcctcatgcaatcctcctgccttggtttcccaaagagctgagattacaggtgtcagtcrgtagtcatgcccagccatgactttttaatattctttgcaagtaaaaaattctgaagcttaagagagttaaacctcagattccaagtttactaattcttat

SEQ ID NO: 492173 - DNA, 201 bp, Homo sapiens
ttcatggagccctgaatcctctggtagtgtgtcagaaatctgtgaggatagagaatcagtaggaagttaaagacaaggctctgggttcccacatctccccrtcttctctaatggcagttcaatttttctctgtttatctggttttttgttttttgctttttgttttttttttcttgagacggagtctcgctctgtcatcca

SEQ ID NO: 492174 - DNA, 201 bp, Homo sapiens
atgcatagccataccctatgaaacagtttatttcaattatatataaaagtatataagtgcctagaaatgtgactaaaaggtccacaaacttaatgtgacckctgacaaaacaagtaatagtggccatgaagtgggatggatgagtggggagcaatagaaagggacatgtttacattttgctccatatttctacattatttc

SEQ ID NO: 492175 - DNA, 201 bp, Homo sapiens
gactaaaaggtccacaaacttaatgtgaccgctgacaaaacaagtaatagtggccatgaagtgggatggatgagtggggagcaatagaaagggacatgttkacattttgctccatatttctacattatttcaggctttcatggtctagatattcacatattacttctattattattattattattattagagacagagttt

SEQ ID NO: 492176 - DNA, 201 bp, Homo sapiens
tttatcagcagcatgaaaatggactcatacaatgatccattacctagggtaaaattctcctgaatgtcaaacaaagagataaactacatttgggttttggktaagtcccctgtaatgatgaatcaagaatcctcaagtctgtcttgccacccatttaatacgtatttttgttaaggctgaagtttagagttagaatcagga

SEQ ID NO: 492177 - DNA, 201 bp, Homo sapiens
agatcaagggtaggcacatttcaggcaaagtacatgactaggaggtccctaggtgacaaggtgccctgcctgtgagtcagtatcaaggaaccaaaaggccmctgtggttgaagcgtctgagacatgttacttagctgctgcatgtagttaacctcagaaccaaatgctctctacaaaggctcagatcatcacaatgtcatg

SEQ ID NO: 492178 - DNA, 201 bp, Homo sapiens
tgttggccatctctaccaaagcccatctctactaaaaatacaaaaattagccaagcatggtggtgcacacctgtaatcccagctacttggggggttgtagyggaaaaattgctcgaacccggaagacaggtcgcagtgagccgagatcgtgccactgcactccagcctgggcaacatagtgagactccatctcaacaacaa

SEQ ID NO: 492179 - DNA, 201 bp, Homo sapiens
ctggggactgtagacaatctccgaggttctttctgggatccatgaggtcaaaaagttttcatgtgttacttgcttttttcactcttgttctctcagaagtrtacaatgaagttttgtggagactataatgtgctatcaaagcaaatagaattaagctgttttttaagtcagatattagagatttacaaaaatgtaaaacaa

SEQ ID NO: 492180 - DNA, 201 bp, Homo sapiens
acccagtgggaggtaattgaatcatgggggcaagtctttcctgtgctgttcttgtgatagtgaataagtctcatgagatctgatggtttttaaaagagttytggctgggcatggtggtgggcacctgtaatccaaactactagggaggctgaggcagagtgaattgcttgaacctgggagaaggaggttgcagtgagccga

SEQ ID NO: 492181 - DNA, 201 bp, Homo sapiens
gaggttgcagtgagccgagattgcaccgctgcactccagcctgggcaaaattgaagactctgtctccaaaaaaaaaaaaaaggagttcctctgcataagckctctctctttgcctgctgccatccatgtaagatgtgacttgctcttccttgccctcactatgattgtgagtctttccccagccacgtggaactgtaagtc

SEQ ID NO: 492182 - DNA, 201 bp, Homo sapiens
gcctcagcctctcaagtagctggaattacaggtgcccatcaccacatctggctaatttttgtatttttagtagagatgagttttcaccatgttgaccaggytagtttcaaactcctgacctcaaatgattcgcccgccttagcttcccacagtgctgggattacaggcatgagccactgcacctggcccagaaacaaattt

SEQ ID NO: 492183 - DNA, 201 bp, Homo sapiens
cttaatggcatttgtggaatgtgtttaagagccaaaactgtgaaaatgtaagctttatctttcttttttcctagattatttaaagaggattgtagccacamttcagatgaatgtttacaagccaaataatgatttaagagtgtgctcaataaaaaggccataggtttaagaattaaatggaataatataaattactaggtc

SEQ ID NO: 492184 - DNA, 201 bp, Homo sapiens
ccctggatggcacagacataatttgtttggcgtgatttaaacatataaaatcagtaattaacatttagcatatcacacgaccacttttgcttttaacaaastaatcttcacacatggtaacaaatacctatgatttttcatttagaaatattataagaagactaaacttactattgcaacaacaaaaatttaacccattaa

SEQ ID NO: 492185 - DNA, 201 bp, Homo sapiens
cctgcctacagaaccacaatatagtgaaaattcattttaaaagtattttcaaaaagtaatttatttgaaagtatgactagtacatggaactatttaaaaaytataaaacataaacagttgattgttcatgttatgctgaactaggattcctacttagtggttccaaaaaaggtttgcatgatattaaagacataacaccat

SEQ ID NO: 492186 - DNA, 201 bp, Homo sapiens; identical to SEQ ID NO: 261811

SEQ ID NO: 492187 - DNA, 201 bp, Homo sapiens
aaatttcacaactgcttgttactacgattatcttggaatcttctgcttaggaatttagatcttgctctttggaatagtgaaagaaatgggatttacccagsaatactacttttaaaacaatttttctcctgtagatctttgccgccgttcattatcagaagacactgtaagtattccatcattgttaaacctaaattttac

SEQ ID NO: 492188 - DNA, 201 bp, Homo sapiens
gtgatactggaatatgggatacttttcatgtttatatatatatatatatgtatatatatatacatatatatatatatataaacatgaaatatatatatatrgctcctttgtgccccatgtcattttcagattatggtagcatgctgatacagcaccatgaaagaactcaaggaaaatatatcaatgtaagaagttcactct

SEQ ID NO: 492189 - DNA, 201 bp, Homo sapiens
tatatggctcctttgtgccccatgtcattttcagattatggtagcatgctgatacagcaccatgaaagaactcaaggaaaatatatcaatgtaagaagttsactcttagacccagtgttctgaggtcacatgggtttggactgtctcaatcagaaagattaatgactgttatcaagaacatgaacattggcttcctccata

SEQ ID NO: 492190 - DNA, 201 bp, Homo sapiens
aactaatttgttagctttggtaagctgataccaagtcttaaaccatgtttatgataagtgcccaactaactcttatagagcacttacttaatgctctatamatattttatcacaaagatggtaatgatttttttttctctttgtagacagggagatttgaaaaagaagaaaaagaaaaagaagggtaaggcattaaaaaag

SEQ ID NO: 492191 - DNA, 201 bp, Homo sapiens
gcccggctcgggccctagcgcccggaagacgcaggtctcactcctcggcttcaccaggccagcctggggtccctggttgcttacagccacgtgtacttctstttttaccctccgcgggaagcgagggaaggttttaaagagaccgcagctcccggagtccatttcaaactgttttcttatttgactcctttgctgctttat

SEQ ID NO: 492192 - DNA, 201 bp, Homo sapiens
tcagtgacactaggaatataataaaggtaacacagcaagaagcacagaactactccctcttcatctccatattttcataatttcttgtgtttcaaataggraaacatcttcctcaaagtctgcctagtgagatatggcctactggttgcctcatagctttgtacagattatgaggactgaaaataattgggcatttaccca

SEQ ID NO: 492193 - DNA, 201 bp, Homo sapiens
aatgtcttaaataatttaaccataaattttctgtcatgtgatactggaatatgggatacttttcatgtttatatatatatatatatgtatatatatatacwtatatatatatatataaacatgaaatatatatatatggctcctttgtgccccatgtcattttcagattatggtagcatgctgatacagcaccatgaaaga

SEQ ID NO: 492194 - DNA, 201 bp, Homo sapiens
tttgtagagtatcttctaaaattgcatttgacttctgtgaaattattaaatggaagttattgatgcagtgacaatttctccaagttcctgtcgtctttctytctcttttttttttttatggagtgggacagaatcttaccctgttgcccaggctggagtacaatggcacgatctcggctcactgcaacctctgtctcccga

SEQ ID NO: 492195 - DNA, 201 bp, Homo sapiens
ttaggcaccccaatcaggtagatagattcaagctctcctgctgtatctatataaagttaatagaaaaaggaataagttgaaatctgagattctgttaatgrtagataaacttttctttgttaggaccaaaatgtctttgactccaagaagaaagtgaaattaaccaatgcggaaggagtagagtttaagctttccaagaaa

SEQ ID NO: 492196 - DNA, 201 bp, Homo sapiens
taaaatgttttaagattttacttttgactcaggatgaatagagcatggaaaagataaaacatttccttagctttgtgacttttataagtttttgctacttyctccttttttgaatgccttttgaaatctaaatttttccctaacttaaaaaaaactcagcaacaatgactgatttctttctaacaaactctgcatttcata

SEQ ID NO: 492197 - DNA, 201 bp, Homo sapiens
tgccgtgaaaagcagcacacaaaagcaatagagctgcttcaggtaaaataattacttgaatgaggtgtcagacatttgcagctttgtttcattttcattgygttgtaataacctactagcatgtaaatttaatgggaaaactaatcagaaatgtaccactacacaaatttcattgtcattttagttaactcttgggttaca

SEQ ID NO: 492198 - DNA, 201 bp, Homo sapiens
tctgtgttttgaccagagctttttcaattgtaaactgcaactaacaaatcctccttttaactagtaaaaccaaaaaatgagaatttattgatcagtgtgaytgaaaaatgcggcgatagatccaacttagggttcagtttcatccagaagcaaaaatgaagtcaaaagggtatggcctcttttcctccaggttcaagatca

SEQ ID NO: 492199 - DNA, 201 bp, Homo sapiens
caactacttaggtcacttgcttatctcaaatagttacctgataagcgaatttggtgcccttattgagcttggatcatatgtgctactctaaatcagagtgygttcccaaaactgaggtgggttggtggatgctaagcagtcacaagtcataaacttgatagttgttttggaatagagtttgtattaagccaccaccttgct

SEQ ID NO: 492200 - DNA, 201 bp, Homo sapiens
tgaaactgtagccaaaatctcctgctcatttgtccttgataagagaagctgcaaacttcaaactcaaatatgggcggaagaaggaggcaattagtgacctrcaacagctgtggaagtaagctctgaaacgtggagttgtagaaataacacatttattgttgctacttgatatgagggagttacttgtttatattactttct

SEQ ID NO: 492201 - DNA, 201 bp, Homo sapiens
ttgaaaaggggaaattttaatgatttttggaaacgttgccagcaagataaattgcctttgtattatactttataagatttttccaaaatattcatttcatrttgtcagtaaccttattaaataggtaatgcttttctaatcattttgtagctaagaaaactgagatttggctgttaagtgatatgcccaatacctcaaagc

SEQ ID NO: 492202 - DNA, 201 bp, Homo sapiens
gtctgtgtgaatgttcattgaaggaatattcataagaacagaaatttagaaacagcataaagttctgtactattaaaggattggctaaattttaccataaycacaaagtaattacagtcactacaaccaataacattaaaaaagatacagtaatgtagatctatgtttattgtaacaaagatatccacaggatattgaatg

SEQ ID NO: 492203 - DNA, 201 bp, Homo sapiens
ctggggcgggcccaggccggctggaggatgcggcctgtttccggcgcgcgagaccacctcgcgcgggaggcacgggaaggggagacccccgaaaccccccsgtctattgtccgcccggctcgggccctagcgcccggaagacgcaggtctcactcctcggcttcaccaggccagcctggggtccctggttgcttacagcca

SEQ ID NO: 492204 - DNA, 201 bp, Homo sapiens
ctgcatgtgcactgataggccaaggccagctgaaccaggccatgaaaatcctacaaaaagctgaaggttggaagtttgttaaacttatctgtaaatataaygtgcatataactttgtagagtatcttctaaaattgcatttgacttctgtgaaattattaaatggaagttattgatgcagtgacaatttctccaagttcct

SEQ ID NO: 492205 - DNA, 201 bp, Homo sapiens
atacttttctataattgatttttcgcaattaatatttactacatttgtattttttaatgcactttacaaatatttttagcacagacacaacaaatgaaagmaaagtgccaaagagctgggaaagtcaagagactgataatatatatgtagtatatttgatgctaatgtaaatttcacaactgcttgttactacgattatct

SEQ ID NO: 492206 - DNA, 201 bp, Homo sapiens
tttcagattatggtagcatgctgatacagcaccatgaaagaactcaaggaaaatatatcaatgtaagaagttcactcttagacccagtgttctgaggtcasatgggtttggactgtctcaatcagaaagattaatgactgttatcaagaacatgaacattggcttcctccatagagaagaaatcagtatctgagttgcata

SEQ ID NO: 492207 - DNA, 201 bp, Homo sapiens
tctttctttctttttttttttttttttgagactgtcacccaggctggagggcagtggtgcagacatgactcactatagccccagacagtcctcccaagtasctgggaccacaggtacacaccaccatgcccggctaatttaaaaaaaaatttgtagagacagagtcttgccatgttgcccaggctggtctttaaactcctg

SEQ ID NO: 492208 - DNA, 201 bp, Homo sapiens
agtttagaggctggtgctaaccaggtggaagctgtacgggttctacggggcgagaggaaagggctggatctggatgtcaggcctgtcattcccatagatgrgatctcttcagtgttattaagttaggaaatatgtgtgtggaagcaccaacacttgaaataatgtcggaagaaaagtttggcctgtttttttgccctgtaa

SEQ ID NO: 492209 - DNA, 201 bp, Homo sapiens
acttttctcaactgaatcctgcctacagaaccacaatatagtgaaaattcattttaaaagtattttcaaaaagtaatttatttgaaagtatgactagtacrtggaactatttaaaaattataaaacataaacagttgattgttcatgttatgctgaactaggattcctacttagtggttccaaaaaaggtttgcatgatat

SEQ ID NO: 492210 - DNA, 201 bp, Homo sapiens
gaactcaaggaaaatatatcaatgtaagaagttcactcttagacccagtgttctgaggtcacatgggtttggactgtctcaatcagaaagattaatgactrttatcaagaacatgaacattggcttcctccatagagaagaaatcagtatctgagttgcataccaggcagtattaaaatctaacaggtctgtttggcccat

SEQ ID NO: 492211 - DNA, 201 bp, Homo sapiens
agacccccgaaacccccccgtctattgtccgcccggctcgggccctagcgcccggaagacgcaggtctcactcctcggcttcaccaggccagcctggggtscctggttgcttacagccacgtgtacttctctttttaccctccgcgggaagcgagggaaggttttaaagagaccgcagctcccggagtccatttcaaactg

SEQ ID NO: 492212 - DNA, 201 bp, Homo sapiens
gtatttgcaaaacaaacagtataaagagaaacaatgaatagtcatttgtgggaggcctaagagggcggatcacgaggtcaggggtttgagaccagaccgascaatatggtgaaaccccatgtctactgaagatacaaaaaattagctgggtatggtggtgtgcacctgtattcccagttacttgggaggctgaggcaggag

SEQ ID NO: 492213 - DNA, 201 bp, Homo sapiens
ggaattttgagttattgaggtttgcagtgaatacaaaatcagaatttaacaccataggaaattttccattgcactcatgtctacagtaacatatttcaagrcctttagggaaggacccccaccttcaagttacagcccaaaaaagaagaaatagaactcaacagactgggagctgggagacttcttttctggtagcagctc

SEQ ID NO: 492214 - DNA, 201 bp, Homo sapiens
tttcctttctcctagcctaccttaattataactgagtccatttttctttgagtggtttacatagtgatcagcaagaattctttctatattaaggatttttytccactcctctattatatagtttgtattttaaattttttcttagaaatatattttttactaaatgaagattttaacatttttttatagatgtatctgtga

SEQ ID NO: 492215 - DNA, 201 bp, Homo sapiens
ttgcaactttacaatcaaataataaaactaaagtgagttattaaaaggaagtgtcttttataggggatggggttctttttaaaggtttgtttggttttgaytgttgcttgttgttcacagaccaacagatgtgggattactagctgtaattgcaaataacatcattaccattaacaaggtatggagtatttgtgctttcca

SEQ ID NO: 492216 - DNA, 201 bp, Homo sapiens
actcctctattatatagtttgtattttaaattttttcttagaaatatattttttactaaatgaagattttaacatttttttatagatgtatctgtgaagtytttttctttatggtctctgaatttttttgtcatgctgagaaatgaggccttttcccccttcaataaaattcaacaccccttcatgctaaaaactctcaat

SEQ ID NO: 492217 - DNA, 201 bp, Homo sapiens
atttccagtatggatctctgcatgggcagtatccaacttaaaattatacatacgctgtgcaggtggcatttatactgttagtactgttagcagtggagggktatcagtgctctgggaaagtattatattaaattaatgtttgagaactatggtggcatatctttaagatttgattattataggggaatgtttccagttgta

SEQ ID NO: 492218 - DNA, 201 bp, Homo sapiens
ggagatttgaaaaagaagaaaaagaaaaagaagggtaaggcattaaaaaagtctttataaattttctccaaaataaatgtttgattttagccctatatagmaatatttggacataaatatactgccctcccttgtatctttgaaaactttttatcttgactatagctaacatttaattttattctattactttaaagatcg

SEQ ID NO: 492219 - DNA, 201 bp, Homo sapiens
gcaagaagcacagaactactccctcttcatctccatattttcataatttcttgtgtttcaaatagggaaacatcttcctcaaagtctgcctagtgagatayggcctactggttgcctcatagctttgtacagattatgaggactgaaaataattgggcatttacccatcttggtatctgttgtatcctttatctgtgtgtg

SEQ ID NO: 492220 - DNA, 201 bp, Homo sapiens
agctcatgccacatgggattcatcatgagagttcagccgctctatgtatgcctcactgatcatacacttaaatgtccagcagtgtcttattgtagaaacayttctaagggcttattctcaacttctgtacttaccaaaccatttgtgaactggcactgctttaaaggaaagttttattttacagatatctaccttcatatt

SEQ ID NO: 492221 - DNA, 201 bp, Homo sapiens
tttgatcttttttcagtttcacataccttatctaaggtttcccaggatttaaacagaaactacttctatgatttcagctggagtctgaagatacttgtttmtgttcaagtcccactttaaattatgtcttaggagactgaaagtggaatcttctgagcattcctaaatatctgcttagaaatatcatgtgataaagaggga

SEQ ID NO: 492222 - DNA, 201 bp, Homo sapiens; identical to SEQ ID NO: 261848

SEQ ID NO: 492223 - DNA, 201 bp, Homo sapiens
tttttcagtttcacataccttatctaaggtttcccaggatttaaacagaaactacttctatgatttcagctggagtctgaagatacttgtttctgttcaartcccactttaaattatgtcttaggagactgaaagtggaatcttctgagcattcctaaatatctgcttagaaatatcatgtgataaagagggaccttctta

SEQ ID NO: 492224 - DNA, 201 bp, Homo sapiens
tctatgatttcagctggagtctgaagatacttgtttctgttcaagtcccactttaaattatgtcttaggagactgaaagtggaatcttctgagcattcctraatatctgcttagaaatatcatgtgataaagagggaccttcttaatacactgatgttcttcactaaatggatggccacaagaaaaataaagtaaatgtct

SEQ ID NO: 492225 - DNA, 201 bp, Homo sapiens
taaatggatggccacaagaaaaataaagtaaatgtcttaaataatttaaccataaattttctgtcatgtgatactggaatatgggatacttttcatgtttwtatatatatatatatgtatatatatatacatatatatatatatataaacatgaaatatatatatatggctcctttgtgccccatgtcattttcagattat

SEQ ID NO: 492226 - DNA, 201 bp, Homo sapiens
aaacccagcccatcctgatgctccacaaaactgaccaccaaaccagtccttaaggtttgaacataattcctcttcttgatcttcatacaaacagttgcatrtataatgtgctatgaacaaatgacttcctcaggtaatcagaaaatcaaagaaaatgaactaatctgtttaattttgacttttgagttagaaagatgaagc

SEQ ID NO: 492227 - DNA, 201 bp, Homo sapiens
gatttaaacagaaactacttctatgatttcagctggagtctgaagatacttgtttctgttcaagtcccactttaaattatgtcttaggagactgaaagtgraatcttctgagcattcctaaatatctgcttagaaatatcatgtgataaagagggaccttcttaatacactgatgttcttcactaaatggatggccacaag

SEQ ID NO: 492228 - DNA, 201 bp, Homo sapiens
tatatatatatatatgtatatatatatacatatatatatatatataaacatgaaatatatatatatggctcctttgtgccccatgtcattttcagattatrgtagcatgctgatacagcaccatgaaagaactcaaggaaaatatatcaatgtaagaagttcactcttagacccagtgttctgaggtcacatgggtttgga

SEQ ID NO: 492229 - DNA, 201 bp, Homo sapiens
aattcattttaaaagtattttcaaaaagtaatttatttgaaagtatgactagtacatggaactatttaaaaattataaaacataaacagttgattgttcaygttatgctgaactaggattcctacttagtggttccaaaaaaggtttgcatgatattaaagacataacaccatatttgtctctgattttttacttgctatt

SEQ ID NO: 492230 - DNA, 201 bp, Homo sapiens
gcatgctgatacagcaccatgaaagaactcaaggaaaatatatcaatgtaagaagttcactcttagacccagtgttctgaggtcacatgggtttggactgyctcaatcagaaagattaatgactgttatcaagaacatgaacattggcttcctccatagagaagaaatcagtatctgagttgcataccaggcagtattaaa

SEQ ID NO: 492231 - DNA, 201 bp, Homo sapiens
ttgaaaattttgacccaaggcacagcagtgaaatttatagttctcaatttagttgtcattattgacaggcattggtattattagtcattgctaagcaactraaacttcatcagttcaaataagttttaattgtcaaatgaagtataaacacatgaactttctagaaatatttcctcttttggataggtctttaaccagttc

SEQ ID NO: 492232 - DNA, 201 bp, Homo sapiens
ttaatacgttttacatggtggatgacaggttattttaaaaaattttttctggccgggcgcagtggctcacgcctgtaatcccagcactttgggaggccaargcaggcagatcatttgaggttgctagttcgagaatagcttggccaatatggtgaaaccctgtctctactaaaaatacaaaaattagccgggtgtggtagt

SEQ ID NO: 492233 - DNA, 201 bp, Homo sapiens
agaatagcttggccaatatggtgaaaccctgtctctactaaaaatacaaaaattagccgggtgtggtagtgcgcacctgtaatcccagctactcgggtggytgaggcaggagaatcacgtgaacccagaaggatcacgtgaacccaggaggtggatggaggttgcagtgagctgagatggtgccactgcattccagcctga

SEQ ID NO: 492234 - DNA, 201 bp, Homo sapiens
agtactgttagcagtggaggggtatcagtgctctgggaaagtattatattaaattaatgtttgagaactatggtggcatatctttaagatttgattattataggggaatgtttccagttgtagacactaaatagatataggttgttttccagattcatcaattggtgattacttgtacaattaataatttgtccacctgct

SEQ ID NO: 492235 - DNA, 201 bp, Homo sapiens
aacctctgtctcccgagttcaagcaattctcctgcctcagcctcccgagtagctgggattataggtgcgcgtcaccacacccagctaatttttgtatgttwagtagaaatggggtttcaccatattggccaggctcatttcaccctccgcctcccaggttcaagcaattcttgtgcctcagcctcccaagtagctgggatc

SEQ ID NO: 492236 - DNA, 201 bp, Homo sapiens
ttgtgccccatgtcattttcagattatggtagcatgctgatacagcaccatgaaagaactcaaggaaaatatatcaatgtaagaagttcactcttagaccyagtgttctgaggtcacatgggtttggactgtctcaatcagaaagattaatgactgttatcaagaacatgaacattggcttcctccatagagaagaaatca

SEQ ID NO: 492237 - DNA, 201 bp, Homo sapiens
ttaagaaaaaaattaatttattagagaactgtgtcaggtattaacgtgaacattttgactttgcttgtgcataaatttttccctggaagctataaaagtgmtgtaggtactgcagtgatcactggggtggaaaaaaaggtgaaacaaagtctgttttactgttaaatattaggggttaaaatgagatcacagtttactgtc

SEQ ID NO: 492238 - DNA, 201 bp, Homo sapiens
agagcacttacttaatgctctataaatattttatcacaaagatggtaatgatttttttttctctttgtagacagggagatttgaaaaagaagaaaaagaaraagaagggtaaggcattaaaaaagtctttataaattttctccaaaataaatgtttgattttagccctatatagaaatatttggacataaatatactgccc

SEQ ID NO: 492239 - DNA, 201 bp, Homo sapiens
atacatatatatatatatataaacatgaaatatatatatatggctcctttgtgccccatgtcattttcagattatggtagcatgctgatacagcaccatgraagaactcaaggaaaatatatcaatgtaagaagttcactcttagacccagtgttctgaggtcacatgggtttggactgtctcaatcagaaagattaatga

SEQ ID NO: 492240 - DNA, 201 bp, Homo sapiens
gtgattacttgtacaattaataatttgtccacctgctttcctctacatgtgtggatgattttgttgtttcaggcattcagtgaaacttaagatgagggatstaatgcataggtgtatttcttaaaggtctaatgaatataactgcatgcacttgctagatatttaacttgaaactttttttttctttttattgaaactgta

SEQ ID NO: 492241 - DNA, 201 bp, Homo sapiens
cctggcagaattataatttcttgatcatacccaatgaagaacattctcatacattgtgggtttgaatgtaagagtaatacagacttttcagtgagcagttyggtgatgtgtagcagattttaaatttacctaccctttgatccaataatttcacttctagaaacttgaggaaatgattagataaatttacgtatgtgtctg

SEQ ID NO: 492242 - DNA, 201 bp, Homo sapiens
gggaatgtttccagttgtagacactaaatagatataggttgttttccagattcatcaattggtgattacttgtacaattaataatttgtccacctgctttsctctacatgtgtggatgattttgttgtttcaggcattcagtgaaacttaagatgagggatctaatgcataggtgtatttcttaaaggtctaatgaatata

SEQ ID NO: 492243 - DNA, 201 bp, Homo sapiens
atacttttcatgtttatatatatatatatatgtatatatatatacatatatatatatatataaacatgaaatatatatatatggctcctttgtgccccatrtcattttcagattatggtagcatgctgatacagcaccatgaaagaactcaaggaaaatatatcaatgtaagaagttcactcttagacccagtgttctgag

SEQ ID NO: 492244 - DNA, 201 bp, Homo sapiens
atgttctcattctcccgacctcgtgatccgcccacctcagcctcccaaagtgctgggattacaggcgtgagccaccgtgcccggccaggaacactctaatrgaaaaagctttatttttctttctttctttttttttttttttttgagactgtcacccaggctggagggcagtggtgcagacatgactcactatagccccag

SEQ ID NO: 492245 - DNA, 201 bp, Homo sapiens
ttacagctcctcagtagcacaatagatctcttctgatatctgtgttttgaccagagctttttcaattgtaaactgcaactaacaaatcctccttttaactrgtaaaaccaaaaaatgagaatttattgatcagtgtgactgaaaaatgcggcgatagatccaacttagggttcagtttcatccagaagcaaaaatgaagtc

SEQ ID NO: 492246 - DNA, 201 bp, Homo sapiens
tcacgcgcgctctcaagaccgtcaataagagtaagtgtcggggtgggcactggggcgggcccaggccggctggaggatgcggcctgtttccggcgcgcgaraccacctcgcgcgggaggcacgggaaggggagacccccgaaacccccccgtctattgtccgcccggctcgggccctagcgcccggaagacgcaggtctca

SEQ ID NO: 492247 - DNA, 201 bp, Homo sapiens
ggcagtggtgcagacatgactcactatagccccagacagtcctcccaagtagctgggaccacaggtacacaccaccatgcccggctaatttaaaaaaaaawttgtagagacagagtcttgccatgttgcccaggctggtctttaaactcctgggctcaacaaatcctcctgcctcagcctcccaaattgctgggattccag

SEQ ID NO: 492248 - DNA, 201 bp, Homo sapiens
ctaaaaaaaatggatgtttcagttaaatgttttaaagaggtacagatttttacaaggacataatataagttattgttctgtagaaatatcctattaaataytgtatgtccctccctctgtacactttgtaaagaaagtaaaatacataaaaagaaaatcatatagggatgtgtgacattattgtaattgtgtacttgagaa

SEQ ID NO: 492249 - DNA, 201 bp, Homo sapiens
tctcttgataaagctttaaccagtgatttccattcccatccgaagaagctaagaggtaattaacctctgtgacagtccaggctctctgaggagtgaggacyttgaaggaagggtcttggtatagcagggagggaagctgtctctgccgccctcctccgagtgtggtttctgatgatccttaattagggctttgtctttcat

SEQ ID NO: 492250 - DNA, 201 bp, Homo sapiens
ttgtgtacttgagaataacgtgcaaaaataaaaatcagaatattttcctgttaaaaaaataataataataataattttgcatggaattaactaagtcagtygagaatattcttccagggtggtcagaatttgaggtatcagtattccctactacacttcctgtatctgtttgaccaacaggaccttgcagctagggagcac

SEQ ID NO: 492251 - DNA, 201 bp, Homo sapiens
ggtactgctctgaattccttgatggtattgttgatgatattgggcttcttctcctgctggagcctcagccaccattggtaggtgttgtcctccaagagcgygttctgggcagtcagcagcagctgcactatctggttgaacctctcatcgaaccaggctgagagcccatgctgcctgatgcagtgggtgcaagtgcagggc

SEQ ID NO: 492252 - DNA, 201 bp, Homo sapiens
aattatcatagactaacaattgaaatataattctccaagacttaaaaaaaataaatattttaaattaaatctttaaacaataaagcataattattaatatytgattgttggaaagtatacacaacattttcccctttgtattaacataaatattagcttatgataacaatactcacttaaagtcctttaggcacttgggta

SEQ ID NO: 492253 - DNA, 201 bp, Homo sapiens
gtgtagatgacacatttttaaaatccattcatctgttgatggacacttagattgattccatatcttggctattgtgaatagtactgtaataaacatgggcrtgcagataccttttaaatttattgaattccgtttttggatgtatactcaggaatgggattgttggatcatgtggtagatctatttttagatttttgagaa

SEQ ID NO: 492254 - DNA, 201 bp, Homo sapiens
gtgtagaaggctaggccaaaacaatggcctgccattacccacgcttcttcatattttaacatccatgaatagaggatgaatttttaaaaaataaatacagraaacgatgcatcttaaaattgagggcatgttagatttgataaaatatggtgtgaattatttcaggcatgtaacaagcaaccagatttaacagattttaat

SEQ ID NO: 492255 - DNA, 201 bp, Homo sapiens
caggggaactgccctttatataaccatcagatttcatgagatgtattcactatcatgagaacagcatgggaaaaatctatccaatgattcagttatctcccaccaggtccctcctgtgatacatggggattacggaagctacaattcaagatgagatttgggtggggacataaccaaaccatatcattccaactctggccc

SEQ ID NO: 492256 - DNA, 201 bp, Homo sapiens
aatgagtgtttggtgtctgttcccacccctagccatcacactgaatgctcccagcccagaatgctggtcactgtgtggccagcaaggcctgcatgtgctayagatgctgctcccagccaatgcagagtgctgcttgtagatgacagcatcagtctccctcatcagatctgaggataggatgccgccatcttaaaggacctc

SEQ ID NO: 492257 - DNA, 201 bp, Homo sapiens
atatgatttcaatttttttatattttttgagacttgttttgtggcctaacgtggtctattctggaaaattttccatgtgctgatgaaaagaatgtgcattytctgactgttggatgaaatgtgctataaatgtctattaggtccatttgatctgaagtgcagtttaaattaaatatttctttgttaatttttgtgtagatg

SEQ ID NO: 492258 - DNA, 201 bp, Homo sapiens
ctagttttgaggttgttttgttcttgcttttctagttccttgaaatgcattgttaggtttatttgaagtctttctatttttttgatgcaggtgtttattgytataaatagcaatatattgctttttttcaatattcttttgctgtattccattggttttggtatcatatgtttttattttcatttgattcaagaaattttt

SEQ ID NO: 492259 - DNA, 201 bp, Homo sapiens
ttttcccagcaccatttattgaaaagactgtcctttccccactgaatgtctttaacacctttgttgaaaataagttgaactttactgaatttgtttatcarcttcaagagtactttgatgaagcttttaggactttttaaaaagtgtaatatcatgttttctgcaaataggtacaatttcactttctcctttacagtttga

SEQ ID NO: 492260 - DNA, 201 bp, Homo sapiens
aggtataatgataaaaccaaggtaattgtgatatccatcacctcaaacattgtttatttctttgtgttaggaacatttcacatcttgccttctagctattktgaaatatatgataaattattgttaactatagtcaccctctagtgctatcgaacactagaaattgtttcctctatctaattgtatttttgtacccattac

SEQ ID NO: 492261 - DNA, 201 bp, Homo sapiens
taatttacgttcccaccagcaatgcactagtgttctccttttgccacatcctcaccagcatctgttattttctgcctttttggtaatagtaatcttaactraggtgagatgatgtcttattgtggttttgatttgcatttccctggtgactggtgatgttgagcattttttcatatgtctgttggccatttatatgtcttc

SEQ ID NO: 492262 - DNA, 201 bp, Homo sapiens
tttgataaaatatggtgtgaattatttcaggcatgtaacaagcaaccagatttaacagattttaatgttttgtcacatatgtaaaatgggaaagaaaactaggcgatcacagctttttgacagtgaggctttatgtcataagaaagtagaatgacatattgaggaaacttaagggaaaaatatgtaggccaaagattttac

SEQ ID NO: 492263 - DNA, 201 bp, Homo sapiens
aagccaccaggtcctaggcttttctttgatgggacactttttgttactaattcaatttaattacttgtagttggtctgtttgggtttcctatttgttcttsgttcaaacttggtaggtgtaaatgtccaggaatttatccattttcattaggcttgccaatttattggcatatagttattcataatagtctctaatgatcc

SEQ ID NO: 492264 - DNA, 201 bp, Homo sapiens
ttctttacagcaaatcataatctgttgcatttattagcttttgtgtttcttgtagtttattctttattactaattctcctgagttctgtcacctcatttcygaggtttttctaattcagaatcaagttcttccatatcttttatcatttctctaatgtcatttagctagtttcaaaataataaattgttttgtagtgcatc

SEQ ID NO: 492265 - DNA, 201 bp, Homo sapiens
atttgataaaatatggtgtgaattatttcaggcatgtaacaagcaaccagatttaacagattttaatgttttgtcacatatgtaaaatgggaaagaaaactaggcgatcacagctttttgacagtgaggctttatgtcataagaaagtagaatgacatattgaggaaacttaagggaaaaatatgtaggccaaagatttta

SEQ ID NO: 492266 - DNA, 201 bp, Homo sapiens
ttctcccagtagtggtgtcagttccctttgctatctgctcagaagctatacaagtctacctaatcgcagacatgcattgagaagatgaccgagaggatgcyggtgagtgggtaccgcctgtggctctgcagccagttgtcgaagacatacttgatgaaggctgggtggtagatcaggatcttatcctgtttcactctgatc

SEQ ID NO: 492267 - DNA, 201 bp, Homo sapiens
ggcagcaggtaggagcacatatgcaggggaactgccctttatataaccatcagatttcatgagatgtattcactatcatgagaacagcatgggaaaaatcyatccaatgattcagttatctcccaccaggtccctcctgtgatacatggggattacggaagctacaattcaagatgagatttgggtggggacataaccaaa

SEQ ID NO: 492268 - DNA, 201 bp, Homo sapiens
ccatgataggtagtgaccttgctgagtagatgctgccaacggctgggtgcaagaggctgcaagtggcacttgggcacacacctgaggctgaccctccaagmtcccggatggactggctctggcaagatgctggggctggaaacgcagaggcatgatggtgcatccatcctcaacccttcactgtgtcatctccccttgaag

SEQ ID NO: 492269 - DNA, 201 bp, Homo sapiens
catattttaacatccatgaatagaggatgaatttttaaaaaataaatacagaaaacgatgcatcttaaaattgagggcatgttagatttgataaaatatgktgtgaattatttcaggcatgtaacaagcaaccagatttaacagattttaatgttttgtcacatatgtaaaatgggaaagaaaactaggcgatcacagctt

SEQ ID NO: 492270 - DNA, 201 bp, Homo sapiens
gaaaagagagtagttggggagcgagaagatgaggtatgtgccagtcgccattcctgggatgtccctggcccagccccccagtgacagccccaaggtggccmgcagggacttgaccctgagctcaggcccttggggaaaatgctgctggaagcctcctgtgtggccttggtggttaagggcaccatattgagtagtctgaga

SEQ ID NO: 492271 - DNA, 201 bp, Homo sapiens
tccgaagaagctaagaggtaattaacctctgtgacagtccaggctctctgaggagtgaggaccttgaaggaagggtcttggtatagcagggagggaagctrtctctgccgccctcctccgagtgtggtttctgatgatccttaattagggctttgtctttcatgctgtcaccagagacatggtgggttatatgacaagctt

SEQ ID NO: 492272 - DNA, 201 bp, Homo sapiens
cctttttagccatgggcaggtgagaagacagctgtctgtaaattaggatgtgcaccctcattagacaccgaatctgccagtgccttaacctttaacttccsaaactccaaaactgtgagaaataagtttctgtcatttataagccacccagtctatggtagttttttttttaataaaatagctctttttttattcactttg

SEQ ID NO: 492273 - DNA, 201 bp, Homo sapiens
agctctgcccttcgaggatgtctgttgtgaatgatgactcagtgattaccagcctttatcagaaaaaaaaaaaagtcttaaagttttggaggatgttaaasctgaaacaggttttttgtttgtttgtttaacactttccacattctgaacccttgagaatctaataaaagctatggaacctctctccagaaaaatgctcat

SEQ ID NO: 492274 - DNA, 201 bp, Homo sapiens
tttaacttccgaaactccaaaactgtgagaaataagtttctgtcatttataagccacccagtctatggtagttttttttttaataaaatagctcttttttwattcactttgatttggatcattggaaatattcaacaataaataaaacagagcaggggatgaggaaaacaggatcttgctaacatcattcagatgcatccc

SEQ ID NO: 492275 - DNA, 201 bp, Homo sapiens
tttttctgcatatggatattcagtttttcccagcaccatttattgaaaagactgtcctttccccactgaatgtctttaacacctttgttgaaaataagttraactttactgaatttgtttatcaacttcaagagtactttgatgaagcttttaggactttttaaaaagtgtaatatcatgttttctgcaaataggtacaat

SEQ ID NO: 492276 - DNA, 201 bp, Homo sapiens
agacacctccattctggttacactttttccagatgctgaatagagactcgctgggaaagcccgcctccagacaatttaaacatggtgccaggaacaccccrttgttgctgaaactctgacttgtgctatctgtcccagccagttcctgattgccagtcacttccctccttcgtactccaccaggaaaaggccacgcctccc

SEQ ID NO: 492277 - DNA, 201 bp, Homo sapiens
catctccccttgaagatccggattttattcatgaagccaaggtggccgtcacgttagactcaaagcctgcatcgtgcacccccgtcttgtgaaaagacccygcagacaggttgttctcccagtagtggtgtcagttccctttgctatctgctcagaagctatacaagtctacctaatcgcagacatgcattgagaagatga

SEQ ID NO: 492278 - DNA, 201 bp, Homo sapiens
cagtcccacagacaaagcatccagcccctgcactgagacagtatagggaagggacttggtcctggcagacaggacagataatcaacatcctagtgggcctyacacatgtgggcatattcttttccataccttcttgtctgttttaacaagctaaccccagtcacagtagcagagagagggtccatcctaacttagctgacc

SEQ ID NO: 492279 - DNA, 201 bp, Homo sapiens
ctctttttttattcactttgatttggatcattggaaatattcaacaataaataaaacagagcaggggatgaggaaaacaggatcttgctaacatcattcaratgcatcccaaccagtgctcagcttcacaacaacacggagagaggtaagggagaatagagagcaaattttaaaacaccaacagccaaacacacaagactg

SEQ ID NO: 492280 - DNA, 201 bp, Homo sapiens
ttttaggactttttaaaaagtgtaatatcatgttttctgcaaataggtacaatttcactttctcctttacagtttgaatgccttttgtttctctattctcyacatgttctctcctgtttcattgctctatgtgtatgtttttataccaataccataatcctttgtagtatattttgaagtctactgtgatgcctccagctt

SEQ ID NO: 492281 - DNA, 201 bp, Homo sapiens
ctgagtgatgaggctgggtgatggtatcacctgataggctgggagggagaacaggaggtgcaaaggcggctcactgtcagtaggaaattcagtgctctttkgataagaaaaaaaatcggtaatatcctaatcctgacaagctgagatgctgctttgcctgtctctgccttttcttctaagtcttcctccttttctttgcac

SEQ ID NO: 492282 - DNA, 201 bp, Homo sapiens
tggcacctgagccagccattatcatcaccagcacttccatgagctacaagctggacccactgcagtcctcctgacacactgaaatcagagcctgcacacaragcagcagatgcttcaatgtaaaggtcatttccaggtccttgacaggcgtgcatctgggccagatccatggcaataaccttcaggttgaggctagagggc

SEQ ID NO: 492283 - DNA, 201 bp, Homo sapiens
aaatctttaaaagctttctttatataagattatgttgtctgcaaacagggacaatttgactttcttctttacaatttgaatgccttttattctttctcttkcctaattgctctggttagaacttccagtactacactgaataagtgtggtgaaaatgaatatccatgtcttattttagttcttagaggaaaagctttcagc

SEQ ID NO: 492284 - DNA, 201 bp, Homo sapiens
atgctgtctctcagaatatgggcgtcttccacatttgttccccaatcccaccccaggagccaaaatgattttaatatgtggaggttgaaccttttccagcrtctccccagccctggggcagcagtcgggggacgttgtccccacccaagacaggttttgagacatgctccgccatgataggtagtgaccttgctgagtaga

SEQ ID NO: 492285 - DNA, 201 bp, Homo sapiens
gtactgctctgaattccttgatggtattgttgatgatattgggcttcttctcctgctggagcctcagccaccattggtaggtgttgtcctccaagagcgcrttctgggcagtcagcagcagctgcactatctggttgaacctctcatcgaaccaggctgagagcccatgctgcctgatgcagtgggtgcaagtgcagggcc

SEQ ID NO: 492286 - DNA, 201 bp, Homo sapiens
attgtaaataagattgctttcttgatttctgttttcactagtttcttgtagatatataaaaacactactcatttttgtatgttaattttgtatcctgcacyttactgagtttttttaaatcaattctaagagtattttgataaatctttaaaagctttctttatataagattatgttgtctgcaaacagggacaatttgac

SEQ ID NO: 492287 - DNA, 201 bp, Homo sapiens
agttgcccacgacagcacagtgccagcagcccaccgacctcttctccagcattgggtccacattcccaggtactgctctgaattccttgatggtattgttsatgatattgggcttcttctcctgctggagcctcagccaccattggtaggtgttgtcctccaagagcgcgttctgggcagtcagcagcagctgcactatct

SEQ ID NO: 492288 - DNA, 201 bp, Homo sapiens
tcttaacggtaagaagaggaaacagctttattttataaataaactgaaggctgctaatagctccagattgtcagtgaggggataccacttaaagatgttayacatttaataaataattttgggagtccactacatgtgaggcgctgcctcagatttaatagaatcatgtgacttttagtgccatagatgtcgttagatcat

SEQ ID NO: 492289 - DNA, 201 bp, Homo sapiens
accaccaacagagccacagtgcaaacaatgtcaattgaatttttaaaaaatcaatcaataatcaggaagcctaacgaggaaaagagagtagttggggagcragaagatgaggtatgtgccagtcgccattcctgggatgtccctggcccagccccccagtgacagccccaaggtggccagcagggacttgaccctgagctc

SEQ ID NO: 492290 - DNA, 201 bp, Homo sapiens
gaaggcacattacaggtattttcttttttattatgggaatataaatgtagatacgaattatatcaatctatttctatcatttaagaaaactcaaattttcaattgtgctataaattactactagatcagatactacagggactagagctagttactatgaaaaagtctcttaggccaagaggattattattttgctgtctt

SEQ ID NO: 492291 - DNA, 201 bp, Homo sapiens
gtggctcacacctataatcccagcactttgggaggctgaggcgggtggatcacttgaggtcagaagttcaagaccagcctggccaacatggtgaaaccctstctctattaaaaatacaaaaaaaattagccaggcatggtggcaggcacctggaatcccagcgtttcaggaggctgaggcaggagaatcgcttgaccccag

SEQ ID NO: 492292 - DNA, 201 bp, Homo sapiens
agtcgtccctgttagcaaaacgactctggtttctaggcgattaagtttctccaagatgggtgggaatctgtaattgcctttgactgttttagtgtcgtctratccactcctttaaagtatttaaacgtatgaggaagttggagtggttcttaaaaagcagagactttcctaagatctctggataatcttagtgaggaaggg

SEQ ID NO: 492293 - DNA, 201 bp, Homo sapiens
ctctcgcgggtcctcagcgttctcctgcggaacctttgaacggggtactcgagcccacaggggaagagcagcggaaggggcctttcggaacgatttggaaygaaaggaagtggaagaaacgcggaaccatggccgctgtggttgctgtttgcggtggtctagggaggaagaagttgacacacttggtaacggctgctgtca

SEQ ID NO: 492294 - DNA, 201 bp, Homo sapiens
gaccgtgaatattcaccaaaacccttcatcttttcaatttcttcatctgtttctgggctgctcattttggatgctttatcttggttactactaccagtatytgctttagatcgtttgtcttgtgtatctaacaaccgagatctcttgaattgccatctgtcatctaagtctaaggctttatgcttaatgatttgtggtgta

SEQ ID NO: 492295 - DNA, 201 bp, Homo sapiens
aaaaactttgaaacaaaaaaaatacagatgcagagttactgcataaatttaacactaagaaactcacagtaagtgaaacaaagtgactatcttactattaygaaaggatactattgaagattttttcctgtaagagaaactacttttgaaaagcagatcacttctgtgtgtctttagttttaaaagtatgaataccaataa

SEQ ID NO: 492296 - DNA, 201 bp, Homo sapiens
gctctactgatgagtgtggtggccatggaaatatactccttagtaagatctccaactgggggaagcatagttgacttaacagccccagctttggacctacyactgtgttaagccacacttcccctgggctgttcctagccaatgactaagcacactgcaggtattagtgcaagtccatgcctatagaacaattttcgggca

SEQ ID NO: 492297 - DNA, 201 bp, Homo sapiens
cccagctttggacctaccactgtgttaagccacacttcccctgggctgttcctagccaatgactaagcacactgcaggtattagtgcaagtccatgcctayagaacaattttcgggcaactttgctcaaagactccctatcagcctagtggaacgttcttaaaatggcgctgcagtctgagactcttcctaaccacttgtc

SEQ ID NO: 492298 - DNA, 201 bp, Homo sapiens
tgaggtaaagaatgacacttccccttcataccaatgtccattaagcagattgcttatttaaaatgttaacactcatcacattttatctatgttgaataaawgtggttctgtgtgattgtcatttatatctgatccccaaatagctcatacaataatccattcaatagaatggaattaaaactgttcagaatgattttccaa

SEQ ID NO: 492299 - DNA, 201 bp, Homo sapiens
gttagttcgctgaaaatatacagaaataaactgaaatattaactcatgggccagctgcggtggctcacgcctgtaatcccagcactttgggaggctgaggygggtagactacctgagctcaggagttcgagaccagcctgggcaacatggtgaaaccctgtctctactaaaaatataaaaaattatccaggtgtggtgatg

SEQ ID NO: 492300 - DNA, 201 bp, Homo sapiens
ttacgaaaggatactattgaagattttttcctgtaagagaaactacttttgaaaagcagatcacttctgtgtgtctttagttttaaaagtatgaataccartaacttttgatgccataattccatttgggaatatatctgaataacaacaaaaatataagatgatgtttcttagtataacataaaacaactgggggagggg

SEQ ID NO: 492301 - DNA, 201 bp, Homo sapiens
atacttttttttcccctccacataaaactccaaaacagcttttgtcccagtttgtttctccatttactggatgcatttatggaaggcacattacaggtatkttcttttttattatgggaatataaatgtagatacgaattatatcaatctatttctatcatttaagaaaactcaaattttcaattgtgctataaattacta

SEQ ID NO: 492302 - DNA, 201 bp, Homo sapiens
taagaatggcatatgttatctattgtgttgtaagtttccttaaatctaaaaattttttcattatctacaatctgagcaaagcattggaacactttcttatyagacatcatttttgttctgccataaaattttattctatgaagattgtactttattccagaatcttcccatgcgttaatccgtaggctaaactaaaacaaa

SEQ ID NO: 492303 - DNA, 201 bp, Homo sapiens
actcgagcccacaggggaagagcagcggaaggggcctttcggaacgatttggaacgaaaggaagtggaagaaacgcggaaccatggccgctgtggttgctktttgcggtggtctagggaggaagaagttgacacacttggtaacggctgctgtcagccttacacatcccgggactcacacgggtaaagtctccatatccta

SEQ ID NO: 492304 - DNA, 201 bp, Homo sapiens
ttatcttggttactactaccagtatctgctttagatcgtttgtcttgtgtatctaacaaccgagatctcttgaattgccatctgtcatctaagtctaaggytttatgcttaatgatttgtggtgtactagctggactagcttcaggaatgtcagtgtgttctaccattaaggtcagattgtctactacatcgagatggtgg

SEQ ID NO: 492305 - DNA, 201 bp, Homo sapiens
taagtatgcctggttaagatatcttccctttgtagaaatgttacattgggatggatagtggtgctgtcacagaaggacaaaatattcctagacgagtctaycctcaaaccagtagtgtcttttacatgaagagatgatttacacctaatagacattgaatatgatagacatacatgtatatatgtatcagttctgagttcc

SEQ ID NO: 492306 - DNA, 201 bp, Homo sapiens
tggtgcgatctcggctcactgcaacccctgcctcccgggttcaagtgattcttctgtctccgcctccccagtagccgggattacaggcacatgctgccacrcccggctaattttttgtatttttcagcagagacggggtttcactgtgttgcccaggctggtcgagaactcctgagctcagacgatccacccgcctcagcc

SEQ ID NO: 492307 - DNA, 201 bp, Homo sapiens
tttcccagataaatgactaaaaatatgactaatatgaaagtaagttgtgatatcactggttattgtaatctgtttaacgaaggaagacagggagtccaggygaatcgggaacacagggagacaccagagagccccacctggactgtgtgcaggtcacctggccaacagaggcactgcatgttggtcactcatccttcagcc

SEQ ID NO: 492308 - DNA, 201 bp, Homo sapiens
gtgaggtggctcacacctgtaatcccaactactagagtggctgaggtgggaggattaattgagcccaggaatttaatgttacagtgagttatgatggcacmactgcactttagtctgggcaacagagcaacgtgctgtcacaaacagacaaaaagtatgttatatatttatataatgaaataagagaaagttcccataatc

SEQ ID NO: 492309 - DNA, 201 bp, Homo sapiens
gcggaaggtgtattggctctgtattcaggaattgctcctgttttgcaaagacaagcatcatatggcaccattaaaattgggatttaccaaagcttgaagcwattatctgtagaacgtttagaagatgaaactcttttaatcaacatgatctgtggggtagtgtcaggggtgatattttccactatagccaatcccaccgat

SEQ ID NO: 492310 - DNA, 201 bp, Homo sapiens
tttttttgagactaggttttgctctgttgcccagcttctcactacagcctcagtctcctgggttcaagtgatcctctcgccttggcctgccaaagtgttgrgattaggtattacagttgtgagccactgtacctggcattttggttcttaattattgaactgctgggcatagttgggcacagctaagtgtttcctggattt

SEQ ID NO: 492311 - DNA, 201 bp, Homo sapiens
ccaggctgggcgacagagcgagactccgtctcaaaaattaaaaaacaaaaaagttcaccccttgtcagcttggcacccacatgtatctccttaaaacatayttaatttccaagtaaagacaataacaaggtaataattctgattaacatgataaaactatcttgtgtacaaacaaaagtgcgtgtatctcttccctagaaa

SEQ ID NO: 492312 - DNA, 201 bp, Homo sapiens
cagttctggaaagttacccttttgtaagagaaatttaaagctataaaggaaatatctatttgtaagtgtatctccctctctgaatcaggaagagaaggacractaaatctttagagacttaatcattggaaaaggcatcaccttaatctgtattaaaaaaacttaccctggatttatgatatctttcctggccatgtcatt

SEQ ID NO: 492313 - DNA, 201 bp, Homo sapiens
tccaagaggcattagtttgatctgagcttgtatggacaactctaggtataaggttgtttctggtagaaaattaatttctatagcttcagtgaataatttaygctagtttaaataatgaataagtgactggcttgggttaaacaaaaaaagcacctgcctctgggtgaggtggctcacacctgtaatcccaactactagagt

SEQ ID NO: 492314 - DNA, 201 bp, Homo sapiens
gaatagtgggattgggaagtagtataaatagcactcggaaaatcaggttttagtataccagtaatatatatgtctatagaaccccattataaacctgttamattttagtgggaagtcattaaagcctgcaaaaatgaggaatgtacccaataggcagaaccggagactatgattttaaaaactatttaatgtaggctgtga

SEQ ID NO: 492315 - DNA, 201 bp, Homo sapiens
ttgagatttaccctatcttccatgaacaataaaattattcttagttggtactcttttaacgtaattctcatattccacgaaaatgtagtttactatatataaaacctgtaaggagtccctggttagactcattttactggaccatcaagagctactttgtttctttgttcagttatagaaaaactgctgaagtatctaggc

SEQ ID NO: 492316 - DNA, 201 bp, Homo sapiens
ataggctactttgaaaatccatggtgatttagtaaaaatgacttaaatgctgtatcttggataagaatcattgttttttttttaaaaaaatacccttgcasatccacaaatataaaaacaatagaactctggcaaaggagataaagtaactgcagaaatagtagtgctgactgatgctttaagaattattgcagacagggt

SEQ ID NO: 492317 - DNA, 201 bp, Homo sapiens
tagtataccagtaatatatatgtctatagaaccccattataaacctgttacattttagtgggaagtcattaaagcctgcaaaaatgaggaatgtacccaawaggcagaaccggagactatgattttaaaaactatttaatgtaggctgtgaagaactttgcattgtgagaactccttcctttcttgctccctggctatctt

SEQ ID NO: 492318 - DNA, 201 bp, Homo sapiens
taatttttgtatttttagtagagatgggatttcaccatgttggccaggctggtctcgaactcctgacctcaagtgatccacccacctcggcctcccaaagrgctgcaaagtgctgggattataggcataagcgaccttgcctggccctctttcctttttagagatagggtctcgatctgttgcccaggctggaatgtggtg

SEQ ID NO: 492319 - DNA, 201 bp, Homo sapiens
tgagatttaccctatcttccatgaacaataaaattattcttagttggtactcttttaacgtaattctcatattccacgaaaatgtagtttactatatataaaacctgtaaggagtccctggttagactcattttactggaccatcaagagctactttgtttctttgttcagttatagaaaaactgctgaagtatctaggct

SEQ ID NO: 492320 - DNA, 201 bp, Homo sapiens
ctactttgtttctttgttcagttatagaaaaactgctgaagtatctaggcttaaattctaaattctaaattataccctttatcaatcaattaaaaaaaaastttttttccaccttaagtagtaaataagagcaaatcttcagtgccagaatacaagtcatcattccacactgggcttctaatttccttgtctgaccattat

SEQ ID NO: 492321 - DNA, 201 bp, Homo sapiens
ttgataatcccagtgggggtcctggttggggaccccctttgcaccagtaggctgggcaggagcttggtgatgaattgtatcagcgtatacctgagctaggrtccagatatggtcccagtcttctggggtgagggtggaagagaggataatgtagaggtcatgccaggttagttcataagactgcataaggtactgaaactc

SEQ ID NO: 492322 - DNA, 201 bp, Homo sapiens
attagtaacaggataactgcacatcatctctggaagcactaggtttatgtgaagtttctggggagaagatgaagggggtggcattttatgtagaaactgayataacatgcagaattcatgtcaaactgcataattttttttgagacacggtctcgctctgtggttcactatagccttgacctctgccctcaagcaatcctt

SEQ ID NO: 492323 - DNA, 201 bp, Homo sapiens
ggttggtatattttctcatggtttcagttaaatgagagagaaaaagggctgggtttttgtcaggaccttgggtgatttctgaaagtttttcatagtttacygctttatgggaaccctttttgagtcctgcaagaagacacacaatcatgtggtcttgatggcggcatccagaggcccccgttttgataatcccagtggggg

SEQ ID NO: 492324 - DNA, 201 bp, Homo sapiens
atgacctacttcagggaaggacaccgggttttatggcctgcctcaagggagatggccagagtattctttctatggtttatggcctgcttcagggcaaaagragtgaggggaaggtgcaaatgacctctttgctctgctattttctcaaatgctcaggtgctatattttggagtagtgtgtcctgaaccacatcactagttt

SEQ ID NO: 492325 - DNA, 201 bp, Homo sapiens
gtctcccaggcaggagtgcagtggcatgatcttggctcactggaagctccacctcctgggttcacgccattctcctgcctcagcctcctgagtagctgggwttacaggcgtccgccaccacgcccggctaattttttgtatttttagtagagacagggtttcaccgtgttagccaggatggtcttgatcccctgaccttgt

SEQ ID NO: 492326 - DNA, 201 bp, Homo sapiens
ggtgaggacaagtgagaatagggcggagaagttgcaggagaggtttgtaaccaacatggaaagagttgtggaggctttggaggtgaggaaggctttgagartgaggaagaataaagctccgtttcttgacataccatggtccttgcttttgaaggttttgggcccggaagtcctccttttcttctgaggagtaaagaggag

SEQ ID NO: 492327 - DNA, 201 bp, Homo sapiens
ccggtggcccaggcctgtaatcctagcactttgggaggccgaggccaggagttggagaccagcctcactaacatggtgaaaccccatctctattaaaaatmcaaaaattagccaggcatggtgtcaggcgcctgtaatcccagctactccagaggctgaggcacgagaatcgcttaagcctgggaggcagaggttgcagtg

SEQ ID NO: 492328 - DNA, 201 bp, Homo sapiens; identical to SEQ ID NO: 492299

SEQ ID NO: 492329 - DNA, 201 bp, Homo sapiens
gtgggtcccttagactgggttagaacgcctaatgcaactccacgccgttcatcgctatagagggagaaaggtttggtgaggtctgggagagtgaggagagkggctgagatgagagccttttggagtagatggaaaggttgggtaataggctgtgcagggtttgaaggcccatggagagggcctttagtggcttggcataac

SEQ ID NO: 492330 - DNA, 201 bp, Homo sapiens
tgaactctaacaataccttcagttcctgctacttcctgaagggggcactctagcacaggagctgaagtaagaatggggcatgggccaaagatggcgcctgmgccagtatgggcaggagagaaggaagaacttggaagtggttcctgctgagggtttgaagggggaaggggagttaacaggcagtggaggatagataggggc

SEQ ID NO: 492331 - DNA, 201 bp, Homo sapiens
agtggacagttttagggataaggtacagaggtcacaagcaagggcctgtctgaaaaggtgggcgctgtctctgaaaccttgaggtagtacgcaccaggtgrgtggacgtgaaatgtgggtgtcagggttttcccacgtaaaggcaaagaggttttgggaatcagggtgtaaaggaattgtgaaaaagcatcctttaagttt

SEQ ID NO: 492332 - DNA, 201 bp, Homo sapiens
ctttttgacatttgataatattttcttcagtgcttgctcatttacttcgcctgaagaattataaaagctgtaaaagccaaaattaaaggtatttcaaataygctaaaaatataagtaattttattagtattttaaattttagttattcctaacccaactaccaaagcccatatacctatttgcctgtcagatgaagtccta

SEQ ID NO: 492333 - DNA, 201 bp, Homo sapiens
ttttgttatagggctgttggctgtgaccctggtgatgagtgaggaaaggtatcacacctttccttacgaatactgaaaatctaaagctttgtagtgttggrgtattagaagtcccaggggaagaggttctgattaactggcactaactgaagtttatcaacagttaaattcaaatgcctactgaaagaggctggacaggtg

SEQ ID NO: 492334 - DNA, 201 bp, Homo sapiens
ggagtacagctgtgtgatcatggcttactgcagcctccacctcccagggtcaagcgattctcccacctcagcctcttgagtagctgggattacaggtacaygccaccatccctggctaattttttgatggtttgttgagatggggaggtctcactatgtggcccaggctggtctcgaactctcgagctcaagcaatcctcc

SEQ ID NO: 492335 - DNA, 201 bp, Homo sapiens
aagaaaagtgcttattaaggcccactgtcttactggggcccattgtatgagggtgaagtttggcagttacccaagagactttctcctcacctccctctgtkcccaagcggtcttatctgtgttttactgtctgctctttctggctgcttgtagttagaagagaagtgatttccttgaaatgcatgaggctagaaagggagc

SEQ ID NO: 492336 - DNA, 201 bp, Homo sapiens
gaaaaaagaaagccacttcatgtatatcaaagggagataatcacacttaggtagtgctgggcccctgtttttgacattctgtcttactgtaacaacacagractcctacaaaaggaacctgtctcatcaggatagctcattcctaggcaatcttgcaggatctctgcaagagatttatatatttgcatggccttggctata

SEQ ID NO: 492337 - DNA, 201 bp, Homo sapiens; identical to SEQ ID NO: 492304

SEQ ID NO: 492338 - DNA, 201 bp, Homo sapiens
aggaatactggggagactgggtcacagtattatccaggtctcttggtattatctagataggagaggagctagtaagaaactgccccagctgggcgtggtgkctcatgcctgtaatcccagcactttgggaggctgaggcgggtggatcacgagggcaaaagattgagaccatcctggccaacgtggtgaaaccctgtctct

SEQ ID NO: 492339 - DNA, 201 bp, Homo sapiens
acgatgagtttggacttccatccctctgacatagtgaaggaggaggcattatacttcaaagatgttctagttactagaaaaatacatacagcacagtacawggcattctgacttataactcagtctcctgtgaatttgattattatgaactggccacaagatttttgatgaaatcatggttttgatcttaaaatttaagag

SEQ ID NO: 492340 - DNA, 201 bp, Homo sapiens
gggcatggtggtgcgcatctgtggtcccagctactcaggaggctgaggcctgagaataacttgaacccaggaggcggaagttgcaatgagccaagactgcrtcactgcactccagcctgggcaacagagtaagactctgccttaaaaaaaaaaaaaaaaaaaagaaaaaggaactgcccctcaggagcacttttataaagt

SEQ ID NO: 492341 - DNA, 201 bp, Homo sapiens; identical to SEQ ID NO: 492305

SEQ ID NO: 492342 - DNA, 201 bp, Homo sapiens
cgatccacccgcctcagcctcccaaagtgctagggttacaggcatgagccaccgtacctggccatttatgtatttttcagtctcctgagtggctagactayagacatccaccactagtcagctaattaaaaaaatttttttttgtagacatggggtcttggtgtgttgcccaggctggtctggaactcctggcttcaagtg

SEQ ID NO: 492343 - DNA, 201 bp, Homo sapiens
cgtatccctgaacttaaaaattaaagttttttattttacttatttatttattttttagacagagtctcgctgtgttgcccaggctggagtgcagtggcgcratcttggcacactgcgaacctttacctcccaggttcaagcgattgtcctgccgcagcctcccaagtagctaggactacaggcacctgccaccacgcctgg

SEQ ID NO: 492344 - DNA, 201 bp, Homo sapiens
caggtgtgagtgaaaatcatttaaaaatcaaaatctattttcacttttaaaaatacatattatactttattattaatttttgtaatttaaacttattaatrgggttcaggacacaccaccccaaaataggactgtagaatccagaatgtgctatcccaaatatgcctctttgtcataagaattattttgagctggttattt

SEQ ID NO: 492345 - DNA, 201 bp, Homo sapiens
agctatttgaaactatacaacgcattattgttaattataagcaacctgcaatgctgcagagcactagaacttatcctcctatctagctgtaattttgtatyctttagcaaatctctacctatcctccccttcccagtctctaatatcctctggttccacattttacttctattagatcaactttttttagcttccacatgt

SEQ ID NO: 492346 - DNA, 201 bp, Homo sapiens
tcaggaggctgaggcctgagaataacttgaacccaggaggcggaagttgcaatgagccaagactgcatcactgcactccagcctgggcaacagagtaagamtctgccttaaaaaaaaaaaaaaaaaaaagaaaaaggaactgcccctcaggagcacttttataaagtgtgttagtgttctccagagagcagaaccaataga

SEQ ID NO: 492347 - DNA, 201 bp, Homo sapiens
attacaggggcctgccactacacctggctaatttttgtgtttttagtagagagagggtttctccatgttggccaggctggtcttgaactctcaacctcagrtgatcagcctgcctcggcctcccaaagtgctgggattacaggcgtgagccaccatgctcagccagaagcaaggtctttctgactttccccaattctcctg

SEQ ID NO: 492348 - DNA, 201 bp, Homo sapiens
tcctttactttcctaataacttgctttcactttacggactcatcctgaattctttcttgcatgagatccaggaaccctctcttggggtctggatctggacycctttcctgtaacagtcctgccttacctgggaggaaagaatgctacacagagaggccaagaagaatctgaatggacaggccttgctgggtgtctgccctc

SEQ ID NO: 492349 - DNA, 201 bp, Homo sapiens
ctcatgagttccagggaccccattttgagaaccaatgagaattcttttcataggattatttactcatgcattgcatttatattgagatcttgccccaaatrttatcagtcttctagtgaaaacaatatctgatagatttaaatataagtaaaacaaaaaagtttttgttaaaataacaataagaatagtggaaataagtga

SEQ ID NO: 492350 - DNA, 201 bp, Homo sapiens
atgcgcatgcctgggaagttgcttcgccctggtgtctgtattcaattaacaccttagtgcaaaaggtgtggaccatcaggaaatggcctctccctggcacyggctgccaatgtatcacttttagagaggtgatgtgataattactgaaccatcatccacattcctagtgggttggggagtcttctcctgacccctgctcat

SEQ ID NO: 492351 - DNA, 201 bp, Homo sapiens
agaaaagtgcttattaaggcccactgtcttactggggcccattgtatgagggtgaagtttggcagttacccaagagactttctcctcacctccctctgtgyccaagcggtcttatctgtgttttactgtctgctctttctggctgcttgtagttagaagagaagtgatttccttgaaatgcatgaggctagaaagggagct

SEQ ID NO: 492352 - DNA, 201 bp, Homo sapiens
acaaaaattagctgggcatggtggtgcacacctgtaatcccagctacttgggaggctgaggcactaaaattgcttgaaccggggatgtggaggttgcagtragccaagattgcaccactgccctccagcctaagtgacagagcaaaactccatcttaaaacacacacacacacccacacaaacacacacacacagagcaac

SEQ ID NO: 492353 - DNA, 201 bp, Homo sapiens
atttaaaaggctttagaacaggaaagaaagaaaaggagagtaggcttgtaagagacccaagcaggcactgagatcaagtgtggtgtttaaccttgaccctkgaactttataggctggctttcccatgactcttcccttaggatgggctgcctacacacacagcgccctccttatctttgggtgcacgtgtttaggaagttg

SEQ ID NO: 492354 - DNA, 201 bp, Homo sapiens
ttctttatctagtcttccattgatgagagcatgtcctttgcaagaatacggatggagctggaggccattatgttactggtggaaggtatctgagttactgrtggcaaatctgtatgggtctgcagcaacttcaattcttacctcctcagaagaaagaattcaactgagaggtataaggcagaaaaggagaccgaaacaaat

SEQ ID NO: 492355 - DNA, 201 bp, Homo sapiens
cttaggatgggctgcctacacacacagcgccctccttatctttgggtgcacgtgtttaggaagttgtacacatgcccatctgaagctttctcccctttttyggtggtgttttcttggagggtcatactccaccattttgtctcttaatgcgcatgcctgggaagttgcttcgccctggtgtctgtattcaattaacacctt

SEQ ID NO: 492356 - DNA, 201 bp, Homo sapiens
cttctcctgacccctgctcatgcctaactacctgtaacaattatccttagcaaactaatccaggaacagaaaactgaatatgcatgttttcactaacaagyagtagctaaatgacgagaacacatgaacacaaagaaaggaacaacagacactggtgtctacaggagggtggagggtgggaggagggagaggatgaggaaa

SEQ ID NO: 492357 - DNA, 201 bp, Homo sapiens
caattatccttagcaaactaatccaggaacagaaaactgaatatgcatgttttcactaacaagtagtagctaaatgacgagaacacatgaacacaaagaarggaacaacagacactggtgtctacaggagggtggagggtgggaggagggagaggatgaggaaaaataactaatgggtactaggcttaatacctgggtgat

SEQ ID NO: 492358 - DNA, 201 bp, Homo sapiens
aagtaaaacaagcacaatttttctttttctttttttctttttctttttttttttgtccaggctggagtgcagtggcatgtgatcttggatcactgcaagcyctgcctcctaggttcaagcaattctctctcctgcctcagcctcccaagtagttaggattataggcgcctgccaccatgcccagctaagttttgtattttt

SEQ ID NO: 492359 - DNA, 201 bp, Homo sapiens
cacaatttttctttttctttttttctttttctttttttttttgtccaggctggagtgcagtggcatgtgatcttggatcactgcaagccctgcctcctagkttcaagcaattctctctcctgcctcagcctcccaagtagttaggattataggcgcctgccaccatgcccagctaagttttgtatttttaatagagaagag

SEQ ID NO: 492360 - DNA, 201 bp, Homo sapiens
ctggggagaatcttacattcttgtctatttggttatagcaaagggaaaaggaatgactttctcaataactacttcaggcatgacatagggggtggcgtggrcaccttggaaaaagaaaaccttaattttttgggtattcttgagagatgggttggtagccaccacgtcgttctagcaggagcattgtttggattgtctgga

SEQ ID NO: 492361 - DNA, 201 bp, Homo sapiens
tcgctatagagggagaaaggtttggtgaggtctgggagagtgaggagaggggctgagatgagagccttttggagtagatggaaaggttgggtaataggctrtgcagggtttgaaggcccatggagagggcctttagtggcttggcataacggtttggcaagtagagcaaaggagggaacccagagtctaaaatatcctgct

SEQ ID NO: 492362 - DNA, 201 bp, Homo sapiens; identical to SEQ ID NO: 492298

SEQ ID NO: 492363 - DNA, 201 bp, Homo sapiens
tggagatcctgggatgctggtagtgtggctcagtccaagtctgacagcctcagaaccaggaaagctgatgtgtaattctcagtttgaggccaaagacctgrgcacatgcagggttgctggtgtaagtctgaagttgcaaggccaagtctggagttcttatttccaagggcaggaggaggaaagtgtcctcgcttcaggagg

SEQ ID NO: 492364 - DNA, 201 bp, Homo sapiens
caggaggctgaggcctgagaataacttgaacccaggaggcggaagttgcaatgagccaagactgcatcactgcactccagcctgggcaacagagtaagacwctgccttaaaaaaaaaaaaaaaaaaaagaaaaaggaactgcccctcaggagcacttttataaagtgtgttagtgttctccagagagcagaaccaatagaa

SEQ ID NO: 492365 - DNA, 201 bp, Homo sapiens
ggttcaagcaattctctctcctgcctcagcctcccaagtagttaggattataggcgcctgccaccatgcccagctaagttttgtatttttaatagagaagrggtttcaccatgttggccaggctagttttgaactcctgacctcaagtgatctgcccgcctcggcctcccaaagtgctgggattacaggcatcagccaccg

SEQ ID NO: 492366 - DNA, 201 bp, Homo sapiens
gtgaacctgtagcctggggacagagatcttgttactgaaacatgagtggtttggtctaggtcctgctgcttgctgcatagaaagccaatcactgaaacgaygagtatcaccaaggaagaaagctttagtcagatgctgcagccaaggagatgtgagctcagtctcaagtccatctccctgactactaaaatgccaggttta

SEQ ID NO: 492367 - DNA, 201 bp, Homo sapiens
tctgataaaataaatataaccttcaagctgagaccagaagggtcaatttctgtgttaatcaaaaagaatagtctatgagactattgggccagtttcaatcttttttttttttttggagcaacatgctgttttaatgagcacttgggtgcaggcgggctgaggcctaaaatggtgtcagccccaagtgaagatgaggcaaag

SEQ ID NO: 492368 - DNA, 201 bp, Homo sapiens
tgattaacatgataaaactatcttgtgtacaaacaaaagtgcgtgtatctcttccctagaaaaggaaataaagtccctgggtgatgtttactcttttcctkatatcctataacttaaatactatgaagtaaaattagcaatacttaaatactgacacaaagtcaatgtactttatgttatatgataaaagaataagagagg

SEQ ID NO: 492369 - DNA, 201 bp, Homo sapiens
aacatgataaaactatcttgtgtacaaacaaaagtgcgtgtatctcttccctagaaaaggaaataaagtccctgggtgatgtttactcttttcctgatatmctataacttaaatactatgaagtaaaattagcaatacttaaatactgacacaaagtcaatgtactttatgttatatgataaaagaataagagaggaacaa

SEQ ID NO: 492370 - DNA, 201 bp, Homo sapiens
tacggatgggggataagaaaaggttgcatgttttaaggtgggaggttggaggagtagaagaaagttagaagccccagaggggtctgggttgatgtgttggrtacgatggggaacgtggaagtggagagtattgtgaagttttgaaaggatatctctgcctaggagcggagatgggctcgagggcaggactaagaaagagtg

SEQ ID NO: 492371 - DNA, 201 bp, Homo sapiens
catttactgagtttataatatgcaatgaggtgactgggtgtgagaagaaaaagcaattctcaacgtaaactggtgcctgggaaaggtaatgaagatcagcmttaagtaatataaatacagagaaagaactgctagggttgacaatacacaagtgattttttcagctatttaaaaaaaactttccattctactcagtaccac

SEQ ID NO: 492372 - DNA, 201 bp, Homo sapiens
gaggctcaggcaggagaatcacttgaacccaggaggcggaggttgcagtgagccgaggtcgtaccactgcactccaggctggcgacagagcaagactctgkctcaaaaaaaaaaaaaaaaaaaaagaaaaagaaaagaaaagaaactgccccaggctggtggctcatgtctataatcccagcactttgggagactgaggca

SEQ ID NO: 492373 - DNA, 201 bp, Homo sapiens
ctaatttttgtatttttagtagagacggggtttcgccatactggccaggctggtcttgaactcctgagctcaggtaatcctcctgccttggcctcccaaastgcagggattacaggtgtgagtgaaaatcatttaaaaatcaaaatctattttcacttttaaaaatacatattatactttattattaatttttgtaattta

SEQ ID NO: 492374 - DNA, 201 bp, Homo sapiens
tgactgggtgtgagaagaaaaagcaattctcaacgtaaactggtgcctgggaaaggtaatgaagatcagcattaagtaatataaatacagagaaagaactrctagggttgacaatacacaagtgattttttcagctatttaaaaaaaactttccattctactcagtaccaccatgtataggttataactaagataatctgt

SEQ ID NO: 492375 - DNA, 201 bp, Homo sapiens
acttgaacccaggaggcggaagttgcaatgagccaagactgcatcactgcactccagcctgggcaacagagtaagactctgccttaaaaaaaaaaaaaaaraaaagaaaaaggaactgcccctcaggagcacttttataaagtgtgttagtgttctccagagagcagaaccaatagaatatagacagatagagggaattta

SEQ ID NO: 492376 - DNA, 201 bp, Homo sapiens
aaatgataggctttaggcatatgagagctgcttgggggatgggatactgcttctgtgataggaaatgggtgggctgtttaagggtaatgtggacggggctrtggtgttctgcgactgagggtgtggaagtatcccaaaaagcggggttaactacggatgggggataagaaaaggttgcatgttttaaggtgggaggttgga

SEQ ID NO: 492377 - DNA, 201 bp, Homo sapiens
gtgcagtggcaaaatcacagctcactgcagcctcgatctcctgggctcaatcagtcctcccacctcagcctcctgagtagttgggactacacacatgcacsaccacacccagctaatttttaaatcatttgtagagataaagtctcactatgttgcccaggttagtcttgaactcctgggctcaagccatcctcttgcctc

SEQ ID NO: 492378 - DNA, 201 bp, Homo sapiens
ataactacttcaggcatgacatagggggtggcgtggacaccttggaaaaagaaaaccttaattttttgggtattcttgagagatgggttggtagccaccaygtcgttctagcaggagcattgtttggattgtctggaaacacatctgtgcctgcaagacagttatgttgagaggacaaggcggtgttgacagggagaggca

SEQ ID NO: 492379 - DNA, 201 bp, Homo sapiens
ataatgcattctgtaagtacatggatggtagttttggcagaagcactgtgtgcagagaaggcacatccatatccagagcgtctattccagtaaagataaartgctgccccttccatgatggaagtgtcccatgtaactggttgactactctggggaatgatgccatatcaggggctcagtgctggtctctgctgctggcat

SEQ ID NO: 492380 - DNA, 201 bp, Homo sapiens
tggaaaaagaaaaccttaattttttgggtattcttgagagatgggttggtagccaccacgtcgttctagcaggagcattgtttggattgtctggaaacacwtctgtgcctgcaagacagttatgttgagaggacaaggcggtgttgacagggagaggcatggcctcatttgctgcttcacaaatgaaagaccatgtctgga

SEQ ID NO: 492381 - DNA, 201 bp, Homo sapiens
gtaatcccagcactttgggaggtggatcatgaggtcaggagttcgagaccagcctggccaacatagtgaaaccctgtctctactaaaaatacaaaaattakccaggcatggtggcatgtgcctgtaatcccagctacttgggaggctgaggcagaattgcttcaacccgggaggcagaggttgcagtgagctgagatcgag

SEQ ID NO: 492382 - DNA, 201 bp, Homo sapiens
aaatacaaaaattatccaggcatggtggcatgtgcctgtaatcccagctacttgggaggctgaggcagaattgcttcaacccgggaggcagaggttgcagygagctgagatcgagccactgtactccagcctgggggacagagcaagactccgtctcagaaaaaaaaaagagtaatggttgaggcattatgaataatagaa

SEQ ID NO: 492383 - DNA, 201 bp, Homo sapiens
gcctccccagtagccgggattacaggcacatgctgccacgcccggctaattttttgtatttttcagcagagacggggtttcactgtgttgcccaggctggycgagaactcctgagctcagacgatccacccgcctcagcctcccaaagtgctagggttacaggcatgagccaccgtacctggccatttatgtatttttcag

SEQ ID NO: 492384 - DNA, 201 bp, Homo sapiens
aaggacaccgggttttatggcctgcctcaagggagatggccagagtattctttctatggtttatggcctgcttcagggcaaaaggagtgaggggaaggtgmaaatgacctctttgctctgctattttctcaaatgctcaggtgctatattttggagtagtgtgtcctgaaccacatcactagttttacttcctgcaaccca

SEQ ID NO: 492385 - DNA, 201 bp, Homo sapiens; identical to SEQ ID NO: 492294

SEQ ID NO: 492386 - DNA, 201 bp, Homo sapiens; identical to SEQ ID NO: 492295

SEQ ID NO: 492387 - DNA, 201 bp, Homo sapiens
caagcacttatccttcatttttaggaggaaactgaaagaaaagattgtagatgttttagacataagtggtgggcagtgccaattttaagtaattgtgtatrgttaaatgattactgtgccctgggactcatttacttctgtgttgaaagatgtttcttgactttatttacacctgatgagtgtggtacagcaaagtagacc

SEQ ID NO: 492388 - DNA, 201 bp, Homo sapiens; identical to SEQ ID NO: 492296

SEQ ID NO: 492389 - DNA, 201 bp, Homo sapiens; identical to SEQ ID NO: 492297

SEQ ID NO: 492390 - DNA, 201 bp, Homo sapiens
aactgggggaacttagaatgggctgtttgttcaggttcttctctgtgtcctggtgtcttcagaggtaaggatattccttttctctatgtaaagggagggtrcctctcaaatgatggtcttatgacctacttcagggaaggacaccgggttttatggcctgcctcaagggagatggccagagtattctttctatggtttatg

SEQ ID NO: 492391 - DNA, 201 bp, Homo sapiens
tcccacaacagagacttgggaggactggatgggtcttgaaaaattaggtaaagcagagtagtaggttgctcggtattaattaaaaaaacatactggcctayccgccaccatcagggttacccttggcttggatgaagcgatggtagttgccggggtgtccgttccagggcaccatcagtcttcagcggctaggccaatgag

SEQ ID NO: 492392 - DNA, 201 bp, Homo sapiens
tggtttatataaatcataaaactatttcattaaaattacaccatgctatggttacatgattacatgtgtttgctttatgaaaattcatttatttgtgtacttttctacgtgtatgttatactcaataaaagctaaaaaatacacaatgtattagagttaacagtactatgactatctgtaggactaagtgcaagcattcat

SEQ ID NO: 492393 - DNA, 201 bp, Homo sapiens
agtgctgtgagcccgattcttttaaaactacttgtattctgccaccccagtggtaatttatctgagttttggggaattcaatttctctaggcacacttaamgacccaatgtgcttgacaatgaagattttatatcttttttttttttttttttgagaagaggtctagctctgtcatcacccaggctggagtgcagcggtgc

SEQ ID NO: 492394 - DNA, 201 bp, Homo sapiens
ggattaatagtaccatatattgaatgctgattcagagcacatacagccttctggagaaccttgccccagcctttcaaagtattgtcacctagctggcaccrtaactgactttgaaaggccattccatcattctgtcaagccatatgcctcaggatattagggaagatgataagaccagtgaattccaggaacaagagcccg

SEQ ID NO: 492395 - DNA, 201 bp, Homo sapiens
ttaatgttctgacagtttaatgataggcataatcatagtaagctggttcatttaatgtaaatggtaaggtgagtggaccagggcttggcaaatgtattttmcacacacacacacacacacacacacgtaaaggtatgtttcttaaatgactgaaagtaagcataatagcagactactgaattagtgtggcacatttgtggg

SEQ ID NO: 492396 - DNA, 201 bp, Homo sapiens
gactttgaaaggccattccatcattctgtcaagccatatgcctcaggatattagggaagatgataagaccagtgaattccaggaacaagagcccgctgatkcacttctttggctgtggagtgagttccttggtcagaagcactgctgtgtggaatactatgatagtggataaggcattctgtatttttgtttttgtttttg

SEQ ID NO: 492397 - DNA, 201 bp, Homo sapiens
ctatgtgtatgtgtgcacgtgtgtgtgtagatgtggttgcaatactctctctaaagaggtgagagccttacccactcaggtagggttagaaggctagataktgtatcagcatctagataaaatgttgctatcatccagaaaattctaatataaagccaaatttaaaaagcctgttaaaggttttcatggttataataataa

SEQ ID NO: 492398 - DNA, 201 bp, Homo sapiens
gggcttaatctgttataatgtgttaaaataggctactttgaaaatccatggtgatttagtaaaaatgacttaaatgctgtatcttggataagaatcattgttttttttttaaaaaaatacccttgcacatccacaaatataaaaacaatagaactctggcaaaggagataaagtaactgcagaaatagtagtgctgactga

SEQ ID NO: 492399 - DNA, 201 bp, Homo sapiens
ctggcatattggacactcagcagtggctgtagccaggcccatcttggtgggtgaaagtccatgatgctgagcccaatccatattgttcatccctcccaccrtggccactttgttcgtgagcccattggccattgacaggggtgactagggtaagaagccaattggtatccacagaacaggtcattctagccacttgattac

SEQ ID NO: 492400 - DNA, 201 bp, Homo sapiens
gactaattctgggaaaaatttgttctctttatcaatctacttatttttatcctgctttagtaaagggagggtatgcctcttaataacatttaagaaactgrtaagtttctagtttgggcagcctgtctaaatagttaattcacagctgcattttgttttttttttttatctaatttttaagttttttaggccaggcatggt

SEQ ID NO: 492401 - DNA, 201 bp, Homo sapiens
tccttctaatgaaaggtgcactgccccacattattttctgttctagaatccgtctcccctcaggaggactgccacacctccaagggaagaactgcaccatyacagagggtgtggtcttgccctccacaactctcttagaccaattgcctcagaacccattgaacatttctctttcttctttctttctctttctttctttct

SEQ ID NO: 492402 - DNA, 201 bp, Homo sapiens
ctccacaactctcttagaccaattgcctcagaacccattgaacatttctctttcttctttctttctctttctttctttctttctttcttttctttctttcyttccttctttctttcctttccttctctctttcttttctttcctttcttctttcttttctttctttcttctttctctgtctctctctctccctttctctct

SEQ ID NO: 492403 - DNA, 201 bp, Homo sapiens
gagccactgtacctggcattttggttcttaattattgaactgctgggcatagttgggcacagctaagtgtttcctggatttttttttctttccctaggaarattctcatctcttaaagggcaaaaatcttgctttccactttccttatggtcatgaattcacagctattgactgcctgctttacatcaggcactgtgctag

SEQ ID NO: 492404 - DNA, 201 bp, Homo sapiens
ctcagcagtggctgtagccaggcccatcttggtgggtgaaagtccatgatgctgagcccaatccatattgttcatccctcccaccgtggccactttgttcrtgagcccattggccattgacaggggtgactagggtaagaagccaattggtatccacagaacaggtcattctagccacttgattaccaaagttttcctgtg

SEQ ID NO: 492405 - DNA, 201 bp, Homo sapiens
cagttgtgagccactgtacctggcattttggttcttaattattgaactgctgggcatagttgggcacagctaagtgtttcctggatttttttttctttccytaggaaaattctcatctcttaaagggcaaaaatcttgctttccactttccttatggtcatgaattcacagctattgactgcctgctttacatcaggcact

SEQ ID NO: 492406 - DNA, 201 bp, Homo sapiens
tatctctgcctaggagcggagatgggctcgagggcaggactaagaaagagtgagtgaaggaaaaggtgttcagggagcagaaaaatgaagtggggggctcrgggtttggagacttctctatcaattcccacaacagagacttgggaggactggatgggtcttgaaaaattaggtaaagcagagtagtaggttgctcggtat

SEQ ID NO: 492407 - DNA, 201 bp, Homo sapiens
tgggaagttgcttcgccctggtgtctgtattcaattaacaccttagtgcaaaaggtgtggaccatcaggaaatggcctctccctggcaccggctgccaatktatcacttttagagaggtgatgtgataattactgaaccatcatccacattcctagtgggttggggagtcttctcctgacccctgctcatgcctaactacc

SEQ ID NO: 492408 - DNA, 201 bp, Homo sapiens
atatttatttatttttttgagagattctcactctgttgcccaggctggagtgcagtggcactatctcagctcactccagcctctacctcccgggttcaagygattctcctgcctcagcccccaagtagcagagactacaggtgagcaccattcccagctaatttttgtatttttagtagagacggggtttcgccatactgg

SEQ ID NO: 492409 - DNA, 201 bp, Homo sapiens
gcccatctgaagctttctccccttttttggtggtgttttcttggagggtcatactccaccattttgtctcttaatgcgcatgcctgggaagttgcttcgcyctggtgtctgtattcaattaacaccttagtgcaaaaggtgtggaccatcaggaaatggcctctccctggcaccggctgccaatgtatcacttttagagag

SEQ ID NO: 492410 - DNA, 201 bp, Homo sapiens; identical to SEQ ID NO: 492291

SEQ ID NO: 492411 - DNA, 201 bp, Homo sapiens
tgaataacaaaatagagatagtgcctgccctaatagtatttataatccagtgggggaaaggaaaattacatacatcatctctcatatgatgacataattaygattctaataaatacgtagtaggaaaaatagaaaactagaagcaagggtaactgagatacccactcccctattgctgggatcagagaaagtcttctcaag

SEQ ID NO: 492412 - DNA, 201 bp, Homo sapiens
acaaagggagtatgatgtaatggtaacaaactgggggaacttagaatgggctgtttgttcaggttcttctctgtgtcctggtgtcttcagaggtaaggatrttccttttctctatgtaaagggagggtacctctcaaatgatggtcttatgacctacttcagggaaggacaccgggttttatggcctgcctcaagggagat

SEQ ID NO: 492413 - DNA, 201 bp, Homo sapiens
ttagatcaactttttttagcttccacatgtgagtgagaatatgcggtatttaactttctgttaagatcatttgcctactttataatcagacgttttcttgytttgttttttgctattgagatgtttgaactctttgtatcttctggatattaatcccctgtgggatgagtagtctgaaaatattttctctgatcctgtagg

SEQ ID NO: 492414 - DNA, 201 bp, Homo sapiens
gccaggcctgtagtgataagatttcttcactccctgcttgatttgcaggcaatcagcttagaaagagctgtggtatagaaaacttgttccttaccagcccsctgccttttgcctggagctcagcaagctagaggtggcattgataccagaaagagatggctgagcagctgcaaacacaactgagagaggatctgggctatg

SEQ ID NO: 492415 - DNA, 201 bp, Homo sapiens; identical to SEQ ID NO: 492300

SEQ ID NO: 492416 - DNA, 201 bp, Homo sapiens
agtctggaactcctggtctcaagcaatccttccatcttggcctcccaaagtgttgggattacaggcatgagccactgtgcccagctctggcattttgagtrcattgaactaaaggatattggaaggcctcagaagcaaggactttctttttttctttttttttttttttgagatggagttttgctctcgtcgcccacacta

SEQ ID NO: 492417 - DNA, 201 bp, Homo sapiens
tgttttaatgagcgcctgggtacaggcaggctcaggcctaaaatggcgttagcgggccagtttcaatcttaagcacattgttgacaaatagaccactttcsaatttagggcagcactatttgcagctctctaccttatgacctcttactacaaataagacttatgcagtgatgatcaaaacttggggaaagggttgcctga

SEQ ID NO: 492418 - DNA, 201 bp, Homo sapiens
tgttggccaggctggtctcgaactcctgacctcaagtgatccacccacctcggcctcccaaagggctgcaaagtgctgggattataggcataagcgacctygcctggccctctttcctttttagagatagggtctcgatctgttgcccaggctggaatgtggtggtgcaatcatggctgactgcagccttgaactcttggg

SEQ ID NO: 492419 - DNA, 201 bp, Homo sapiens
ggtggtgtttgtccgagatgacggtgctcctgctctagcaaatatcctgccaggcgtagtggctcacgcctgtaatcccagtactttgggaggcggaggcygggggatcacctgaggtcaggagtttgagaccagcctggacaacatggtgaaaccccatctctactgaaaatacaaaaattagctgggcatggtggtgca

SEQ ID NO: 492420 - DNA, 201 bp, Homo sapiens
gtttcggcaccagatgtaagagtcttgtatcggtctgaaccctgagagcgagctgacagacaatatggggcggtgtggagcaacatgctgttttaatgagmgcctgggtacaggcaggctcaggcctaaaatggcgttagcgggccagtttcaatcttaagcacattgttgacaaatagaccactttccaatttagggcag

SEQ ID NO: 492421 - DNA, 201 bp, Homo sapiens
ctggtcttaactcctgatgtcaagtaatctgccaggcttggcctctcaaagtgctgggattacaggcgtgagccactgcacccagactaaatgtttatggtttttttttgttggtttgtttgtttttgagatggagacgcgctctgccacccaggctggagtgcaatggtgcgatctcggctcactgcaacccctgcctcc

SEQ ID NO: 492422 - DNA, 201 bp, Homo sapiens
catgcccggcctacaaattattttaaaaatagctgggcatagtggcacacacctgtagtcccagctattcaggaggctgaggcaggaggattgcttgagcycaggaggttgaggctgcagtgagccatgatcttgctactgcactccagcctgtgtgacacagtgagacccagttggaaaaagaaaaagaaaaaaaagaat

SEQ ID NO: 492423 - DNA, 201 bp, Homo sapiens
acaccactcactcaacagagtgagaccctgtctctaaaaatctttttttttttttttttttgagatggagtttcacacttttgcccaggatggagtgcagyggtgcaatctcggctcactgcaacctccacctcccaggttcaggcgattctcctgcctcagcctcctgagcagctgagattacaggcacgcgccaccacg

SEQ ID NO: 492424 - DNA, 201 bp, Homo sapiens
gaggaaatgttttcagttttcctcttattatggagacagagtcttgctctgtcacccaggctagagtctggtggtatgatcttgtctcactgcaacctctrcctcctgggctcaagcaatcctcccatctcagccttctgagtagctgggactacagttgtgagccaccccaacacccagctaatttttgtattttttgta

SEQ ID NO: 492425 - DNA, 201 bp, Homo sapiens
aactctatttttgaataattttagatctatagaaaagtagcagaaataatacagagttatttgatttttcactcagtatccccaaatgttaacatagcacygtggtatagttatcaaaccaaggaaccaatattgggaaattactattcatgaaacttcactctttttttttgattttaccagtttttccactgatgtctg

SEQ ID NO: 492426 - DNA, 201 bp, Homo sapiens
cctttttttattttttaatttcaggcttagcatatttctaatggttactttctgtcacttagagaatgtgtagcagcacatgaaggacactgcatgcctayccaccatggcagctttgtgtccccagctgtcaggtgaggcatggaactcctgctgcccaactctccaggctattcgaggcctgagcgaggagggcacact

SEQ ID NO: 492427 - DNA, 201 bp, Homo sapiens
atctgggtaattaagatatcaaaacatctatcatttctttttgttggttacattccaaatcttctagctatttttaaacatacaataaattattaactatrgccaccctattgtgctatcaaacaatagagcttattccatttaactgttatttttgtacccattaaccaacctctttttatccctctcctcctagtattt

SEQ ID NO: 492428 - DNA, 201 bp, Homo sapiens
aagcggtttactttccacatttacagtattattctgattttgtctattacttttaccagtgagttttataccttcagatgtcttgtttattactttttttwttttaatagagatgggattttgccatgttggccatgctggtcttaaactcttggcctcaagtgatccgcccacctcagcctcccaaagtgctgggattac

SEQ ID NO: 492429 - DNA, 201 bp, Homo sapiens
agtattattctgattttgtctattacttttaccagtgagttttataccttcagatgtcttgtttattacttttttttttttaatagagatgggattttgcyatgttggccatgctggtcttaaactcttggcctcaagtgatccgcccacctcagcctcccaaagtgctgggattacaggtatgagccaccatatccagct

SEQ ID NO: 492430 - DNA, 201 bp, Homo sapiens
ctgtagggtttccactgagaagtctgctgaaagctgtattggatgtggtatgtttcttttatcttgctgattggagtttttttctctttgtctttgatttyggctaatttgattatgatgtgccttggggagaattcctctttcatttgaatttgattggtgacttctcagcttctgtacctggatgctgttcgtctttct

SEQ ID NO: 492431 - DNA, 201 bp, Homo sapiens
ctcttccttctcctttttctgtctcctcctacttctccttgtcctttttctcctcctcctcctccttcccttctcttcccttctcctcctcctcctctttytccttcccttctcctccttctcctccttcctctatctttttctcctcctccttcttctctttcctttctccttcttctcctcctccttctcccccccttc

SEQ ID NO: 492432 - DNA, 201 bp, Homo sapiens
cctaaatcttgcacctacaagtcttagaaagtgaatctgaactaaatgattcaaagatgaaacataatgatatcatacttaatataaacatctatttcaaygtttacgccagactgaacacaataaaagtacttatgaaaattataagtctgcactctttaattcttaagtttacttacacttatgaaataactcttgaca

SEQ ID NO: 492433 - DNA, 201 bp, Homo sapiens
atgttagggtgaagtattggaggaaaaacaaatactttcattaaaatcaaagctactcttcagaatttcattattttcttttaatgagaaatgtatgtgtkggtcgtcttgtcgtctttgactcttaaaatgtaaccaagcaaattttaaactacatctctaaagtgcctaagtgtgatgcctacgttacctttaacttaa

SEQ ID NO: 492434 - DNA, 201 bp, Homo sapiens
tcctaaatcttgcacctacaagtcttagaaagtgaatctgaactaaatgattcaaagatgaaacataatgatatcatacttaatataaacatctatttcarcgtttacgccagactgaacacaataaaagtacttatgaaaattataagtctgcactctttaattcttaagtttacttacacttatgaaataactcttgac

SEQ ID NO: 492435 - DNA, 201 bp, Homo sapiens
ggaacacatctccctcggcagagccagaaaccactgactgactgactaacaaacatttcttcaaataagatctagtgtgaaaagggcttcctctcatttcwtctgggctccattccatgaagaatataagttagttagttagttagtggaaattacaaaggaaaacacaacatctcatacacaatttattttatataactt

SEQ ID NO: 492436 - DNA, 201 bp, Homo sapiens
gaaatacagttcgttttttgcagggattcagaatgtgttgctggacttcaagataggaagaatctttgccttgatggctgatgacagtaaccaccccatcyaccatcatctattaaggatttactgtgtggtcactttacagtcatccaagtaaattttcataatcacctgattacatgggtaccgcttttcagaaaaaga

SEQ ID NO: 492437 - DNA, 201 bp, Homo sapiens
cataatgatatcatacttaatataaacatctatttcaacgtttacgccagactgaacacaataaaagtacttatgaaaattataagtctgcactctttaattcttaagtttacttacacttatgaaataactcttgacatttattttgttggcatgtgctaattaataaacacatattcccaacacagcaaaggaaaaatc

SEQ ID NO: 492438 - DNA, 201 bp, Homo sapiens
gcaaggattaatttttctaagaaggtggcacaagttttgatgtgatttgctggaaaatagtaatagtcacaatttatcttattcccccaagagaatgggakgatgttcccatggaaccttgctcatcctgctagcaataacttgtattctctttctgattcacacaaacaaggatcagagggtgatggtgggggaaatgat

SEQ ID NO: 492439 - DNA, 201 bp, Homo sapiens
ataatgatatcatacttaatataaacatctatttcaacgtttacgccagactgaacacaataaaagtacttatgaaaattataagtctgcactctttaattcttaagtttacttacacttatgaaataactcttgacatttattttgttggcatgtgctaattaataaacacatattcccaacacagcaaaggaaaaatcc

SEQ ID NO: 492440 - DNA, 201 bp, Homo sapiens
taatgatatcatacttaatataaacatctatttcaacgtttacgccagactgaacacaataaaagtacttatgaaaattataagtctgcactctttaattcttaagtttacttacacttatgaaataactcttgacatttattttgttggcatgtgctaattaataaacacatattcccaacacagcaaaggaaaaatccc

SEQ ID NO: 492441 - DNA, 201 bp, Homo sapiens
ttcttagttttaggatttctctttgatttcttttaattttttctatttctttgtcattgtctctttttgtttctggattgtttttcaaatttcacttcccrttctggggaggacttatattgagcaccagaactaaacgactgtactggaatgaacttgttgccctgttgtcatttccagtctcgcaaaggcacagtgaat

SEQ ID NO: 492442 - DNA, 201 bp, Homo sapiens
cttctctccccgatcctctgtatgcaggctgacttaagcccctttatgtttggctagtgccacaacaaaacagccccaaacagattgccatgagcatgctrgcctggcttggtgtttgacgataaaatcagactggtaagtgcagtcagtgttcaggaaagaatctccaggctcttctcccatgacctggttttaaaatca

SEQ ID NO: 492443 - DNA, 201 bp, Homo sapiens
tttgcattgggccctgtctccgggcagctgcagcataacacggagtcacccttgctgtctaagccttgtggctggaggggaagagtgaggaccaagctgtyaacaatcccagacctgccaagccccatttgtctgtgtgcctgccaggattctaagactgcatttgggaattttgacttttactgaatgtgaaattctgtg

SEQ ID NO: 492444 - DNA, 201 bp, Homo sapiens
atctcactccttgaaattatagcaatctgcaatgtaaacagtagagcaaagaattccaaactatatttttatgtacatttaaacctgtaggattatgtacygtctttgtgtatggattaaaaccagggcacttccaacacatagctcaagcttccatacgattaagagcaaacttaaaggcattctttttccccatcctta

SEQ ID NO: 492445 - DNA, 201 bp, Homo sapiens
cacaggccccttctctccccgatcctctgtatgcaggctgacttaagcccctttatgtttggctagtgccacaacaaaacagccccaaacagattgccatragcatgctagcctggcttggtgtttgacgataaaatcagactggtaagtgcagtcagtgttcaggaaagaatctccaggctcttctcccatgacctggtt

SEQ ID NO: 492446 - DNA, 201 bp, Homo sapiens
tagttttcagacttgtgatataagcggtttactttccacatttacagtattattctgattttgtctattacttttaccagtgagttttataccttcagatrtcttgtttattacttttttttttttaatagagatgggattttgccatgttggccatgctggtcttaaactcttggcctcaagtgatccgcccacctcagc

SEQ ID NO: 492447 - DNA, 201 bp, Homo sapiens
ccatccaaaggttactctgttccttcactccacacagctcaggcatttccatgttggtctcagctgccatctcaatggtttattctttttacatgttggascagatctggacctcccaaaatgttttgaggagaagtgggcttagaggggttttccctgctctgtgagagaaggaatttagcaaggattaatttttctaag

SEQ ID NO: 492448 - DNA, 201 bp, Homo sapiens
gagatttgtattatataagtttggctgtctctaatttaaagaaagttaaactttattgcacaacgactactagttctttcttcttcttcttccttctcctyctcttccttctcctttttctgtctcctcctacttctccttgtcctttttctcctcctcctcctccttcccttctcttcccttctcctcctcctcctcttt

SEQ ID NO: 492449 - DNA, 201 bp, Homo sapiens
ctaggccttttttttccttgtctgctgtgggaattccaattacatggaggttagtacacttgatggtgtaacataattttttgtaggccttcttcactgtkttcattctcttttctgtttactcctctgactgggtaatttcatatgttctggcttaaagcttgctaattatttcctctgtttaatcaagtctgccgttaa

SEQ ID NO: 492450 - DNA, 201 bp, Homo sapiens
tcctctgtttaatcaagtctgccgttaaagctttctcaggagtttttcagttcagttattgtattcttagttttaggatttctctttgatttcttttaatwttttctatttctttgtcattgtctctttttgtttctggattgtttttcaaatttcacttcccattctggggaggacttatattgagcaccagaactaaac

SEQ ID NO: 492451 - DNA, 201 bp, Homo sapiens
attttaaattatttaaaagttatagaaaatcatagtgcctcaaaatggcttaccaagaaatactcaaagctgtaggatcagaagcttgacatgaagatttstgtgcatctttgaattgctttacagaaattaaagaaaaatccagacatctaaaagattataatttcagaattcatagtaacatggggatcttcttggtgt

SEQ ID NO: 492452 - DNA, 201 bp, Homo sapiens
cagggtttcaccgtgttggccaagatggtctcgatctcctgaccacatgatccgcccgcctcggcctcccaaaatgctgggattacaggcatgagccaccrcgccctgcctgtagtatatttttaagtcaggtaatgtgatgccttcagcttttttttctcagggttgctttggctattaggagtcttttgtgatacatac

SEQ ID NO: 492453 - DNA, 201 bp, Homo sapiens
agggtttcaccgtgttggccaagatggtctcgatctcctgaccacatgatccgcccgcctcggcctcccaaaatgctgggattacaggcatgagccaccgygccctgcctgtagtatatttttaagtcaggtaatgtgatgccttcagcttttttttctcagggttgctttggctattaggagtcttttgtgatacatacg

SEQ ID NO: 492454 - DNA, 201 bp, Homo sapiens
ttaaaggcaactgagccatgagagcacaagcccatttttctagctgcaaaacggacatgcctgaagtgtatgctcagctcgcatcaccttccagtgccctscctggagctagaacaacaaaacttaatcctcaggaggcttctgaggggctccagggagtcacaggattacttaaagaagggaaaggtcagaccctgatcc

SEQ ID NO: 492455 - DNA, 201 bp, Homo sapiens
agggaccattcctgggctccacttacagacttctgttggggaataggatctcacaaagcagaacaggagtttgtgataaggaagaggacaaagagagcagrtccttgtgttcttcaaaaacggtgaacattatcctactgattttggaccaagggagttctccagtgggaagtgacacagaacctaccacagtgccttcca

SEQ ID NO: 492456 - DNA, 201 bp, Homo sapiens
atttgaatttgattggtgacttctcagcttctgtacctggatgctgttcgtctttctctaaatttgggaaattttcagccattcattctttaaatatactytctaggccttttttttccttgtctgctgtgggaattccaattacatggaggttagtacacttgatggtgtaacataattttttgtaggccttcttcactg

SEQ ID NO: 492457 - DNA, 201 bp, Homo sapiens
acctgggagcaggcacaccctgcaagaggctattccgctgccacccaagcaatgaattatgagacaaagcaaaaattacactgatgttacagagacatcastgatccctgcaatgagtaataatcttcttttgactttgaactggtaggcaaatggaagaaatcttaacagctgacaacatcctagctggtaattaaaaaa

SEQ ID NO: 492458 - DNA, 201 bp, Homo sapiens
gcataacacggagtcacccttgctgtctaagccttgtggctggaggggaagagtgaggaccaagctgtcaacaatcccagacctgccaagccccatttgtstgtgtgcctgccaggattctaagactgcatttgggaattttgacttttactgaatgtgaaattctgtgtatatatagccttggtgagctgacccagtcag

SEQ ID NO: 492459 - DNA, 201 bp, Homo sapiens
agaaaatcatagtgcctcaaaatggcttaccaagaaatactcaaagctgtaggatcagaagcttgacatgaagatttctgtgcatctttgaattgctttasagaaattaaagaaaaatccagacatctaaaagattataatttcagaattcatagtaacatggggatcttcttggtgtcagaactgagttcttgctgaggt

SEQ ID NO: 492460 - DNA, 201 bp, Homo sapiens
aattacaaaggaaaacacaacatctcatacacaatttattttatataacttacttggtgttttcttttattgaatcatacaaattcaaatggggattcctraataaatctttagttaatttacctttggcagaaacaacagattccaaaacaattagtagcatctcatttatttgtagcttaaaaaaaaattctgtagcgt

SEQ ID NO: 492461 - DNA, 201 bp, Homo sapiens
aaacccagctggggatttgggccttcctctggattgtgcccctgaggcactatggtcctggccagtttgtttaacttggcatccccactgatcagagtgcygagatcagctttctgtgatgaacacccaggtcattgtttccacctcaccccaagtagttaagctttcctgacactcccaatggttctgatcaaataggac

SEQ ID NO: 492462 - DNA, 201 bp, Homo sapiens
ttttctttttatacatgatctcgaaaatagtgtgatttagattctgccttgggctgagctctgagggctacatttacctgtcagtttggggattttagtgmagattttttttaaaaaaattaaactctggtaagtactcaggaggctgagaacacaggccccttctctccccgatcctctgtatgcaggctgacttaagcc

SEQ ID NO: 492463 - DNA, 201 bp, Homo sapiens
tatatttttaagtcaggtaatgtgatgccttcagcttttttttctcagggttgctttggctattaggagtcttttgtgatacatacgaattttagaatagttttttttttatttctgtgaagaattttattggtattttaatagggcttgcattgaatctgtagattgccatgggtactatagatatttaacagtattagc

SEQ ID NO: 492464 - DNA, 201 bp, Homo sapiens
cctcgcaaagcacaaaggtggacacagaacccactgtccttggcgcaggagttaaaaaagtaacagcaaatcatgaggtgacatcaggcacactgaagagmtggaggatttggtgtcttacatttcctggtccctccaaaatgtctaatatagacagttttgtgacaaagtctttgaaaaaaattataattggccacacag

SEQ ID NO: 492465 - DNA, 201 bp, Homo sapiens; identical to SEQ ID NO: 383281

SEQ ID NO: 492466 - DNA, 201 bp, Homo sapiens; identical to SEQ ID NO: 383230

SEQ ID NO: 492467 - DNA, 201 bp, Homo sapiens; identical to SEQ ID NO: 383231

SEQ ID NO: 492468 - DNA, 201 bp, Homo sapiens; identical to SEQ ID NO: 383358

SEQ ID NO: 492469 - DNA, 201 bp, Homo sapiens
acctgggggaaaggaaatacccaactccagctccctctagacattctgtaccacctaagggggtgaaaaaacaaactgagaactgtgaagtttacagcctrgggacacaggctcactaaaagactgagataaaatggtagaactataggacacttccccttcccgtgtatcttaccactacattactaaagggctatttac

SEQ ID NO: 492470 - DNA, 201 bp, Homo sapiens
tatgcactaaacatagtcaaacatttcaaaaatttgaagcatattttataaaacttacaagaaagaaagatacatactggatgaattgaaggaagaattcrtaaaaccatatgtgtctgcttcatattgagggaaactttttttttctttttttaacctctcagcactagttgacattgcttggctacgtactccgttaga

SEQ ID NO: 492471 - DNA, 201 bp, Homo sapiens
tcttaaagattcctcctcttaacactatcacaatggcaattaaatttccccatagttttggagggaacattcaaatagtaacatctagctagaacagcctrtctgttggcagaatgaagtagaacagtttagtgggaacaaggatacaagtgtatttttcatggaccaaatacagactctggaaaggatacggttgtggat

SEQ ID NO: 492472 - DNA, 201 bp, Homo sapiens
ctaatttttactcttaagtaaggattattttggactgagggactcactaagtgaaagtgattcatcatttcagactttgttacagggaggtgattatgcastaaacatagtcaaacatttcaaaaatttgaagcatattttataaaacttacaagaaagaaagatacatactggatgaattgaaggaagaattcataaaac

SEQ ID NO: 492473 - DNA, 201 bp, Homo sapiens
atacttaaaaaggaatgccctgttagtgatctttccaaaacgtaacatcaatcaatgccatttcctattttccttcaataatttttgaatgagttaggctwataaataaataaataaataaataccattcttctatttaaaaatattcaagggagaacaaatggataaaatccaaactctttaggccactcaggctctgaa

SEQ ID NO: 492474 - DNA, 201 bp, Homo sapiens
gacagcatctcactctgtcacacagtctggagtgctgtggtgattgtagctcactgcagcctagaactcctgggctcaagtgatcctcctgccttagactyctgagtagctgggactacaggcgtgtgccaccctgccctgcttctaataacctcttaaagattcctcctcttaacactatcacaatggcaattaaatttc

SEQ ID NO: 492475 - DNA, 201 bp, Homo sapiens
tacttaaaaaggaatgccctgttagtgatctttccaaaacgtaacatcaatcaatgccatttcctattttccttcaataatttttgaatgagttaggctawtaaataaataaataaataaataccattcttctatttaaaaatattcaagggagaacaaatggataaaatccaaactctttaggccactcaggctctgaat

SEQ ID NO: 492476 - DNA, 201 bp, Homo sapiens
ttataaaggaagtttatggtggattttttaaaattattttgataactgacattggggtattctccatcttatgagtctgaaaatatttcttcgcagccagstaatacacatgtgactcagacgccaccaaagaagtatgtgtccaagacctcaagttgaaagctgtggactgcggagggactctctggtgaagttgttgca

SEQ ID NO: 492477 - DNA, 201 bp, Homo sapiens
actggtctatacttttttctttatatctaaaattcactggaagagctatgaaatctgtccaagatttcgttcagttcaggaaaaaccaaaaccaaaaccawaaccagtgagtttataaaggaagtttatggtggattttttaaaattattttgataactgacattggggtattctccatcttatgagtctgaaaatatttc

SEQ ID NO: 492478 - DNA, 201 bp, Homo sapiens
ttccccggtgctgtaaagaaatagtacttgaacataaatttaatttagtaaggccatttttacttttgcagaaagggtacactggccagcagttttgccaygagagtacaccaaacaaaggagacagggtcatttataacctaatgtatccaccctactgctgtgtccggtttccattgtctggaacgggacttcacattc

SEQ ID NO: 492479 - DNA, 201 bp, Homo sapiens
ttttgccacgagagtacaccaaacaaaggagacagggtcatttataacctaatgtatccaccctactgctgtgtccggtttccattgtctggaacgggacytcacattctgtatttgtcctgacttgctagcaacttagaactttttaaaagaggcagaggtagaggagaacaaaggaaggaggaggtaacttgtggaatg

SEQ ID NO: 492480 - DNA, 201 bp, Homo sapiens
ggagaagcaataaaatgtatactgattagaaaggaagaagtaaaactctctttgcttacagacgacatttatctatttacaaaatctgaaaaaattgacaraagtctcctgaaactaataagtgattatagcagggttgcatgatacaggtttaatacacacatttcagtcattttcctatatgccagcaatgaacaagtg

SEQ ID NO: 492481 - DNA, 201 bp, Homo sapiens
tcacatcccttgtaagttggattcctaggtattttattctctttgaagcaattgtgaatgggagttcactcatgatttggctctctgtttgtctgttattkgtgtataagaatgcttgtgatttttgcacattgattttgtatcctgagactttgctgaagttgcttatcagcataaggagattttgggctgagacaatgg

SEQ ID NO: 492482 - DNA, 201 bp, Homo sapiens
cagggtgcactcgccggcgaggctgcacggcgccggtttcattgctaaaatccgacggacttgttgcagaactcgttttttttgtcgggaaagggcttccycgtgtaactttacagcagttatcgtagataagacttgcaaattacagatgtggacggtgagggaacgggaatttcactgaaagcgcctgagaaccagtaa

SEQ ID NO: 492483 - DNA, 201 bp, Homo sapiens
agggtgcactcgccggcgaggctgcacggcgccggtttcattgctaaaatccgacggacttgttgcagaactcgttttttttgtcgggaaagggcttcccygtgtaactttacagcagttatcgtagataagacttgcaaattacagatgtggacggtgagggaacgggaatttcactgaaagcgcctgagaaccagtaag

SEQ ID NO: 492484 - DNA, 201 bp, Homo sapiens
cattatggattagtttgagagttaaagattcttgggggacccaatcgtaggggggctttcacacttttgtgagttttacctccgtgaattctcagagaagrtcagagaaaaatccccaattgcttcctgcatgaggagtgtaaaaggaattattttgaaaaattctagggcattttgttcttaacaagacttgccaacaaa

SEQ ID NO: 492485 - DNA, 201 bp, Homo sapiens
gtgagttttacctccgtgaattctcagagaagatcagagaaaaatccccaattgcttcctgcatgaggagtgtaaaaggaattattttgaaaaattctagkgcattttgttcttaacaagacttgccaacaaaagaaactattttactcgagcctagtgtactgggatttttacaagtggttaactgacctgggggaaagg

SEQ ID NO: 492486 - DNA, 201 bp, Homo sapiens
cttaggtagaaatctgacacaatatgtacaagatctgtgaggtaaattacaaaactctgatgaaaaaaaataaatggagaaatgtctcatgtacatggatrttctgaaacaacattgtcaaaatatcatttattcccatttgctctatagatttaactaaatcccagtaaaaaaataccagcaaattattttgtggatatt

SEQ ID NO: 492487 - DNA, 201 bp, Homo sapiens
aaaataccagcaaattattttgtggatattgacgaactgatttcaaagtttttatttttatttttttttaaagtacagcataatttgttgaaaaaaattgraagttaagtgcagaatacagtacaacctgagagtgatattccaggccgggctgctcataagagtgagacagcgtggattgtcgccagagaaactgcctta

SEQ ID NO: 492488 - DNA, 201 bp, Homo sapiens
agaggggtacccggccgtgtgaggtgtcagtctgcccctacttgggggtacctcacagttaggctactcagaggtcagggacccactttaggaggcagtcygtccgttctcagatctcaagctgcatgctgggggagccactactctcttccaagctgtcagacagggacatttaagtctgtagaggtttctgctgccttt

SEQ ID NO: 492489 - DNA, 201 bp, Homo sapiens
ggtacccggccgtgtgaggtgtcagtctgcccctacttgggggtacctcacagttaggctactcagaggtcagggacccactttaggaggcagtctgtccrttctcagatctcaagctgcatgctgggggagccactactctcttccaagctgtcagacagggacatttaagtctgtagaggtttctgctgcctttcgttt

SEQ ID NO: 492490 - DNA, 201 bp, Homo sapiens
acatcttgctgaaaatcctacctaatggaataacacaaggagaagcaataaaatgtatactgattagaaaggaagaagtaaaactctctttgcttacagaygacatttatctatttacaaaatctgaaaaaattgacagaagtctcctgaaactaataagtgattatagcagggttgcatgatacaggtttaatacacaca

SEQ ID NO: 492491 - DNA, 201 bp, Homo sapiens
gagactaggattgcaacccctgcctttttttgttttccatttgcttggtagatcttcctccatccttttatttgagcctatgtgtgtctctgcacgtgagrtgggtttcctgaatacagcacggtgatgggtcttgactctttatccaattttccagtctgtgtcttttaattggagcatttagcccatttacatttaagg

SEQ ID NO: 492492 - DNA, 201 bp, Homo sapiens
tccagtctgtgtcttttaattggagcatttagcccatttacatttaaggttaatattgttatgtgtgaatttgatcctgtcattatgatgttagctggttwttttgctcgttaattgatgcagtttcttcctagcatcgatgatctttacactttggcctgtttttgcagtggctggtactggttgttcctttccatgttt

SEQ ID NO: 492493 - DNA, 201 bp, Homo sapiens
atgaagctcagtttggctggatatgaaattctgggttgaaaattcttttaagaatgttgaatattggcccccgctctcttctggcttgtagagtttctgcygagagatcagctgttagtctgatgggcttccctttgtgggtaacctgacctttctctctggctgcccttaacattttttccatcatttcaactttggtga

SEQ ID NO: 492494 - DNA, 201 bp, Homo sapiens
ggcttgtagagtttctgctgagagatcagctgttagtctgatgggcttccctttgtgggtaacctgacctttctctctggctgcccttaacattttttccwtcatttcaactttggtgaatctgacaattatgtgtcttggagttgctcttctcgaggagtatctttgtagcattctctgtatttcctgcatttgaatgtt

SEQ ID NO: 492495 - DNA, 201 bp, Homo sapiens
gattttttaaaattattttgataactgacattggggtattctccatcttatgagtctgaaaatatttcttcgcagccagctaatacacatgtgactcagaygccaccaaagaagtatgtgtccaagacctcaagttgaaagctgtggactgcggagggactctctggtgaagttgttgcaagcatgattaattcattgggg

SEQ ID NO: 492496 - DNA, 201 bp, Homo sapiens
gtttttaacttctttgccataggttcaaacttcctcctttagcttggagaagtttgatcatctgaagccttcttctctcaggtcgtcaaagtcattctccrtccagctttgttccattgctgatgaggagctgcattcctttggaggaggagaggtgctctgatttttagaatttcagtttttcagccctgttttttcccc

SEQ ID NO: 492497 - DNA, 201 bp, Homo sapiens
cagcagatgttgctgtttgattgttcctctggaagttttatctcagaggggtacccggccgtgtgaggtgtcagtctgcccctacttgggggtacctcacagttaggctactcagaggtcagggacccactttaggaggcagtctgtccgttctcagatctcaagctgcatgctgggggagccactactctcttccaagct

SEQ ID NO: 492498 - DNA, 201 bp, Homo sapiens
agcagatgttgctgtttgattgttcctctggaagttttatctcagaggggtacccggccgtgtgaggtgtcagtctgcccctacttgggggtacctcacagttaggctactcagaggtcagggacccactttaggaggcagtctgtccgttctcagatctcaagctgcatgctgggggagccactactctcttccaagctg

SEQ ID NO: 492499 - DNA, 201 bp, Homo sapiens
gcagatgttgctgtttgattgttcctctggaagttttatctcagaggggtacccggccgtgtgaggtgtcagtctgcccctacttgggggtacctcacagttaggctactcagaggtcagggacccactttaggaggcagtctgtccgttctcagatctcaagctgcatgctgggggagccactactctcttccaagctgt

SEQ ID NO: 492500 - DNA, 201 bp, Homo sapiens
cagatgttgctgtttgattgttcctctggaagttttatctcagaggggtacccggccgtgtgaggtgtcagtctgcccctacttgggggtacctcacagttaggctactcagaggtcagggacccactttaggaggcagtctgtccgttctcagatctcaagctgcatgctgggggagccactactctcttccaagctgtc

SEQ ID NO: 492501 - DNA, 201 bp, Homo sapiens
tccgacagtccccagtgagatgaacctggtacctcatttggaaatgcagaaatcattcgtcttctgtgtcactcacgctgggagctgtagactggagctgytcctattcagccatcttggctccaccccctaatttttactcttaagtaaggattattttggactgagggactcactaagtgaaagtgattcatcatttca

SEQ ID NO: 492502 - DNA, 201 bp, Homo sapiens
agatggagcagagaagcaagaagaagcagactcctcactccttcaccagggtggatttgctggtttgaagcagacctgagttgggagaggagagaggcgaraagttttaattggatgaaatatttctttagactggtctatacttttttctttatatctaaaattcactggaagagctatgaaatctgtccaagatttcgt

SEQ ID NO: 492503 - DNA, 201 bp, Homo sapiens
gaatatttcctaactcgttttatgaggccagcattactgtaataccaaagccacagacattgcaagaaaactacataccaatatcccttatgaacctagayacaaatatccccaacaaagtattagcaaattgaatccaacaatgtataagaataattacatgccacaaccacgtggtatttatcccaggtatataaggct

SEQ ID NO: 492504 - DNA, 201 bp, Homo sapiens
cattgtgtaatttttcctgttacttttcaagaccaacacatatcacagtatagggaggtcagagactcctgagggcagctctacaattctgaagcagtacrtttcttttatatttttgtaggtaatgatttgttgtaagttatccatagttgtaagtaaccggatcatatgttttccttgatattatggagaatttgacag

SEQ ID NO: 492505 - DNA, 201 bp, Homo sapiens
cacactttggcttttaacgtctatttatggaaagatgactaccagattattatctccaatcaggatggctcccctaaactccagacttggacatgtaactrcctactggatttctgtctccattaggatatctcacaatcgaatgcaactcctaaaactcctattaatattttctccttatagggactctttcctctgtgt

SEQ ID NO: 492506 - DNA, 201 bp, Homo sapiens
tataacagaatacctgagataacagcattaattcattcatgagagcagagccctcatcctctaatcaccttttatttttatttttttgagacagcatctcrctctgtcacacagtctggagtgctgtggtgattgtagctcactgcagcctagaactcctgggctcaagtgatcctcctgccttagactcctgagtagctg

SEQ ID NO: 492507 - DNA, 201 bp, Homo sapiens
agctgcaggtctgttggagtttgctagaggtccactccgaccctgtttgcctgggtatcagcagcagaggctgcagaacagcagatattggtgagcagcaratgttgctgtttgattgttcctctggaagttttatctcagaggggtacccggccgtgtgaggtgtcagtctgcccctacttgggggtacctcacagttag

SEQ ID NO: 492508 - DNA, 201 bp, Homo sapiens
gctggctcaattttgtatttttagtagagattgggagtgggggcagggggttggtctcaccatgtatgccagtctggtcttgaactcctaacctcaagtgrttcacccacctcagcctcccaaagtgctgggattacgggcatgagccaccgcacctggcctgccagtttactcttaaactctgttgtaaacgctgaattt

SEQ ID NO: 492509 - DNA, 201 bp, Homo sapiens
cagatattggtgagcagcagatgttgctgtttgattgttcctctggaagttttatctcagaggggtacccggccgtgtgaggtgtcagtctgcccctactkgggggtacctcacagttaggctactcagaggtcagggacccactttaggaggcagtctgtccgttctcagatctcaagctgcatgctgggggagccacta

SEQ ID NO: 492510 - DNA, 201 bp, Homo sapiens
ttcaaagaatcacaacttaccatagaaacacacttttgcaggaactgttactggagtaggaaagtctgagctgtaattgatgaattgccagaggctcattrtggattagtttgagagttaaagattcttgggggacccaatcgtaggggggctttcacacttttgtgagttttacctccgtgaattctcagagaagatcag

SEQ ID NO: 492511 - DNA, 201 bp, Homo sapiens
agtacttccccttcatctgaagccaagagaagaaaactgctcagaaagcttgaaatgttttctctggaatctagaaaattcaagttctggtatgtgaaagaaaaaaaaattaaggcaagaagctgctgtcttactctactttctgctggtataacagaatacctgagataacagcattaattcattcatgagagcagagcc

SEQ ID NO: 492512 - DNA, 201 bp, Homo sapiens
aactgttactggagtaggaaagtctgagctgtaattgatgaattgccagaggctcattatggattagtttgagagttaaagattcttgggggacccaatcktaggggggctttcacacttttgtgagttttacctccgtgaattctcagagaagatcagagaaaaatccccaattgcttcctgcatgaggagtgtaaaagg

SEQ ID NO: 492513 - DNA, 201 bp, Homo sapiens; identical to SEQ ID NO: 365543

SEQ ID NO: 492514 - DNA, 201 bp, Homo sapiens; identical to SEQ ID NO: 365443

SEQ ID NO: 492515 - DNA, 201 bp, Homo sapiens; identical to SEQ ID NO: 365477

SEQ ID NO: 492516 - DNA, 201 bp, Homo sapiens; identical to SEQ ID NO: 365599

SEQ ID NO: 492517 - DNA, 201 bp, Homo sapiens
ttcctacctttgttcatttatgatggtgtaaaattttaaaattaggatctacatacagaacaatgcagaattatataaaaatatttgaatattgaaaaatraagtggaaattattattattatttaggtacagggtcttgctctgtcaccctggagtgcagtggcatgattacagctcactgcagcctcaaactcttgggc

SEQ ID NO: 492518 - DNA, 201 bp, Homo sapiens
tttatacatttcagatattatttgttgatcagacactcttcttcctgtcttggaccacacagtgttttaggtatctgctgtcagttgatcagagttggcawgagaaacaaaaaaaatctattggcatctctgacttagaagatcagttttgggagaatcttctggaatatctattctattcttaagtttaatgagtaattt

SEQ ID NO: 492519 - DNA, 201 bp, Homo sapiens
taccacggtttctaaaatgatagatttcaggagtagtgtgagcaggctgagattaagaattaagtgtgatagtggcaagacttggttattagacgtgtgtkcagacggatgtgtggtagaagaagactatgagcattcagacttaaaatcttggttagtaagatccatagacaggcagggtttttttgtttgtttgtttgt

SEQ ID NO: 492520 - DNA, 201 bp, Homo sapiens
caccaaatgactgtatgaaattacgttcagagtatatatggtgtgtgtgaaacataaatgaattttgtgtttaaacttggataccatccccaagacatctsagtatgtatatgcaaatatttcaaaatctgaaatctgaaacacttctggtcctaccttgggaccagcattttagataagggatactcaacctgtattgaa

SEQ ID NO: 492521 - DNA, 201 bp, Homo sapiens
aacaaaagtacactccacagtgtgggagctgccctagcagcactcccccccgacccccgctgctttaccgaatcttcttgggtccaaataccccctagaastttcccattggccattccatgctcacctcatgtaaatgaagaggtggcttgcaattggtctgattggttgccagacccacccccacatcagtccgcttgg

SEQ ID NO: 492522 - DNA, 201 bp, Homo sapiens
ctccgataagggaatgctagaaaatagatgagaagtactgaaagacctttttttttaattgattagaaaagtaagtctctagggtctttgaatgctggaatttttttttttttttttgtctttcccatctgtggcagctaaaacaaaaatcactcaaaatattcaggtttacatgttagctctctctcatagggagctgcc

SEQ ID NO: 492523 - DNA, 201 bp, Homo sapiens
tatctgttcattctggtaccacaggtaaggatttttttctttttggagaaatttgggaagaaagataatgaaaggtggagaacttgctacaagttacactkaacaatttaaattgtttagaaaacttgttaaactattgagctaattccagaaggattcattttataatgaataaatgtgtactataataagcttaagtct

SEQ ID NO: 492524 - DNA, 201 bp, Homo sapiens
gtgcacaccaccacgcctggctaatttttgtatttttattagagatggggtttcaccatgttggccaggatggtctcgatttcttgaccttgtgatccacmtgcctcggcctcccaaggtgctggtattacaggggtgagccactgcacccagccagaatacaaatatttaattgaaaaaagattaaacatgtattgatgg

SEQ ID NO: 492525 - DNA, 201 bp, Homo sapiens; identical to SEQ ID NO: 421027

SEQ ID NO: 492526 - DNA, 201 bp, Homo sapiens; identical to SEQ ID NO: 421031

SEQ ID NO: 492527 - DNA, 201 bp, Homo sapiens
gccagtttctctaactcctttcctcatcctctagactggttcaattccccagctactatggcacttggtactttaatacttacctttgtaacatttaacawtttttggtcattgtctattttccatttagactgaacctttcataagagagcttagatattaggaagaaggagtagctgatagtaccaatttttaagcaaa

SEQ ID NO: 492528 - DNA, 201 bp, Homo sapiens
tagtctcccaagtagccaggactacgggcacacaccaccatgcctggcttaattctcaaagtttttgtagagatggagtctggctatgctggccacatttrcttaagtatatctttttattaaattcaaatacagtttaaataaaagggacaaatttagggcctttgtaattagtaaacggtttgtttttgtaaagttttt

SEQ ID NO: 492529 - DNA, 201 bp, Homo sapiens
cccgcagccgccctactcctacctcgtcacacggacacccacccaccatcccagggtctacaacatccacagctggaccgtcatccgctatcctaccaacwctatcgtggtcgtgggaggctgtcccgtctgcagggtcggggggctgcaggactgcttcaccttcctgggcatcttcctggccatcatcctgttcccctt

SEQ ID NO: 492530 - DNA, 201 bp, Homo sapiens
acctggaggccggccagggcgactacgcgtgaggcccgcacggctacggcgccatccccgccgcgcccccgcagccgccctactcctacctcgtcacacgkacacccacccaccatcccagggtctacaacatccacagctggaccgtcatccgctatcctaccaactctatcgtggtcgtgggaggctgtcccgtctgca

SEQ ID NO: 492531 - DNA, 201 bp, Homo sapiens
gcgcgctgctgctgctcagcccctgcagcccgcatttggccgcttgactgctgcttccagcgcgatcctacaatggcatcgctcccccaggagactcagcraagccctactttatcttgtaagagctgtttccacattcactcgaagagaaagaccccccccacgagggcctgagttcgatgcccggcctctcccgacccg

SEQ ID NO: 492532 - DNA, 201 bp, Homo sapiens
agcttcccgttccaaactcttccctgtagccttgggacccagatcccaagcctggggcgctttacggtgggagagcgaaatggtgcccttaagacaagaaycatttctctaggcttgggcattttaaagtacataccggggatacttatcccaaagcaagtagcggcggccttttagatgttaaatattaaaagatcacag

SEQ ID NO: 492533 - DNA, 201 bp, Homo sapiens
agccctactttatcttgtaagagctgtttccacattcactcgaagagaaagaccccccccacgagggcctgagttcgatgcccggcctctcccgacccgcrgctgcgacagcccctctgaggcggaagtttatttagtacgggaaagagaacagcacggggagaggggagaggctttgccctaggatgcgtcctacccgct

SEQ ID NO: 492534 - DNA, 201 bp, Homo sapiens
agaatgaccctcttcctaggcctcgcccaccttgggacggtgggcaggaaccccagtagaactggtaaattacttgttccgtctttaaagggcctcctacragctactcttgggccatatggggttaaagaaacttcctgaacatagcactctggaggaaggagtcctcttccctccacctgtagccacagtgtggttggc

SEQ ID NO: 492535 - DNA, 201 bp, Homo sapiens
gttccccaaagaggcaggcgggcagccaagcaagggcaaagctctggtcggggaatgggtagaggtagggcagccccaggctcgaggactccctggttgcygtttccctcctacctcgatgctccactttcgcaggtcactggggaggcaggcccatggcacatgagggacagtgggggtgggggaagaggaagaagcacc

SEQ ID NO: 492536 - DNA, 201 bp, Homo sapiens
gagctcagttccccaaagaggcaggcgggcagccaagcaagggcaaagctctggtcggggaatgggtagaggtagggcagccccaggctcgaggactcccyggttgccgtttccctcctacctcgatgctccactttcgcaggtcactggggaggcaggcccatggcacatgagggacagtgggggtgggggaagaggaag

SEQ ID NO: 492537 - DNA, 201 bp, Homo sapiens
ggccacaaacctccatcctccaactcctttccaacgtcagtagctggctccaccaggctggctaaggagcgaggagaccatcacctcagaaagcagccccrctgggaggtccacggagcagttcgccgagctgtgcacaggccctttattttccatctgtcaagaaaggaagctgcctgttgcttatttcctcctcccact

SEQ ID NO: 492538 - DNA, 201 bp, Homo sapiens
gagcgaggagaccatcacctcagaaagcagccccgctgggaggtccacggagcagttcgccgagctgtgcacaggccctttattttccatctgtcaagaarggaagctgcctgttgcttatttcctcctcccactcttctcccttcccgccagcagactcttccactttcaaaatattctgatgggggatcacaggagttt

SEQ ID NO: 492539 - DNA, 201 bp, Homo sapiens
agaaagaacttccaaacgaaaggaataaggcattgttttaccaagagccttttctccctcaagaaacacaatgtaaactaggaaacttgcactttcttttmcctttgggtagatgagcagaagggaagagttactacccagggtgaggtcattcctccatggtggtagaatatctggttctttcagtttccccatggtgct

SEQ ID NO: 492540 - DNA, 201 bp, Homo sapiens; identical to SEQ ID NO: 398243

SEQ ID NO: 492541 - DNA, 201 bp, Homo sapiens
acctgagaggagaggatggggtggctttgcctcaaggcttgggcccctgctaggtgtcgctctgcctcaggcctctgtttctcctcctgacacaggcacaractcggcctcccaccccttccccaaggacatgaccttgggaaggaacatatctgaagcccgcggagggtttccgctgctgtgcatctgtgccacagatcc

SEQ ID NO: 492542 - DNA, 201 bp, Homo sapiens
atgggagcagaaggagaattgggattttagggtgcagctacgctcaccctaaacttttggtggcctggggcatgtcttgaggcccagactgttaaccaggytctgctggcctgtttactcgtcaccacctctgcacctgctgtcttgagactccatccagccccaggcacgccacctgctcctgagcctccactatctccc

SEQ ID NO: 492543 - DNA, 201 bp, Homo sapiens
aaattaaactgaaaggaaacctttcaagtgtgattgcctggccctttcctgttcatttctcgtgggtacgctttctaactttctttctttcttcctttctycaggtgttgactttaagatgaagaccatagaggtagacggcatcaaagtgcggatacagatctggtgagctggggaggaggaggaggcagatgtaggaga

SEQ ID NO: 492544 - DNA, 201 bp, Homo sapiens
aagtggggaaagaaccatcaaacctttcctcctgacttaccaaaccaggaaaacagcaggagagggtggctcaggacttagggacagggtatagcttagayggtggaaagcaaaggagagcaggaagttgtaaatcactggctaatgagaaaaggagacagctaactctaggatgaagctgtgactaggctggagttgctt

SEQ ID NO: 492545 - DNA, 201 bp, Homo sapiens
agcactcactggctgttctgcccatcctttgtccctagtacgcaccagaaggcgtccagaagatccttattgggaataaggctgatgaggagcagaaacgkcaggtgggaagagagcaagggcagcaggtaagtggagggaaaaggcaagtccaccccaggtcctctgctgggcctccagggccagtcctgagcgtgggga

SEQ ID NO: 492546 - DNA, 201 bp, Homo sapiens
atcgatttagttcaggttgcccgttctgcatcttttttcccttgtaattaaatgatgattggtcttgatggtgggaaggaagagacagaatttaatttgtytgcctttgtagaaagctggggacagcacagataagggaagatgtctcccatttggcaaataactgatgcggaggtggagtggcagtggtgatggggatgc

SEQ ID NO: 492547 - DNA, 201 bp, Homo sapiens; identical to SEQ ID NO: 398252

SEQ ID NO: 492548 - DNA, 201 bp, Homo sapiens; identical to SEQ ID NO: 398253

SEQ ID NO: 492549 - DNA, 201 bp, Homo sapiens
gtccttctcttgcagctggcgaaggagtatggcatggacttctatgaaacaagtgcctgcaccaacctcaacattaaagaggtgagagccctggtgaccargcgcccgctctctcgggctgagtccagcagaggtgggaggaggagccataagatggaccttatccctcaggccgctgcagggttgccaggggagaggagg

SEQ ID NO: 492550 - DNA, 201 bp, Homo sapiens
tttcttcaggtgttgactttaagatgaagaccatagaggtagacggcatcaaagtgcggatacagatctggtgagctggggaggaggaggaggcagatgtrggagaagaggacttctggctgctccttagctgcccctgccatgtgtaaaattcctaggcttcacctgggataactggccacctctctgatggatggaagc

SEQ ID NO: 492551 - DNA, 201 bp, Homo sapiens
gtgtaagtgctattgaatgctgactatgttccaggaactaaaccagatgctagaagacacgcagtaaacagtacagatgcaggtgcacatgtgagggtccrcacaagacctgagagaagggaggggtcttgctgcagttccccttttgtaacaaaggagagagtactgttgaccctcttcctaggaactgtgagtttgact

SEQ ID NO: 492552 - DNA, 201 bp, Homo sapiens; identical to SEQ ID NO: 398254

SEQ ID NO: 492553 - DNA, 201 bp, Homo sapiens
gtctaaggttgcttgtgcttggggtctcctcactctctactttatcccgcagttgcttcttatcacatatggctctctgaaattaggtattcattacttayatctgtcttccccactagaattaagctctgatgacaaggatctttctgtgctgttcatagcttatcttctagtacctggcttagttcctggcacattgta

SEQ ID NO: 492554 - DNA, 201 bp, Homo sapiens
cccctgccatgtgtaaaattcctaggcttcacctgggataactggccacctctctgatggatggaagcgaagtctcagaagcccatctcttcctataagcmttaatctccaacctctaagaaactttaggggattgactacaagcaccaaagggcaggaattagaaggaactggcacactaaccattgtgaatttatctca

SEQ ID NO: 492555 - DNA, 201 bp, Homo sapiens
tagctgcccctgccatgtgtaaaattcctaggcttcacctgggataactggccacctctctgatggatggaagcgaagtctcagaagcccatctcttcctwtaagccttaatctccaacctctaagaaactttaggggattgactacaagcaccaaagggcaggaattagaaggaactggcacactaaccattgtgaattt

SEQ ID NO: 492556 - DNA, 201 bp, Homo sapiens
ctgattgcgggaccccatacctagagggcctgattctataggtctgaggtaaggcccaagaatttgcatatttgcatttcgttttcttttcctttcttttytttttttttttttttgagatgaagtctcaccctgtcgcccagactggagtgcagtggcatgatctcagctcactgcagcctctgcctcctgggttaaagc

SEQ ID NO: 492557 - DNA, 201 bp, Homo sapiens
ccctgctcttaagcctcaggcatgcagcccttcttatgctctctggggtgagggggagatccccctcatggaattgcttttttttttttttttttttttttgagacagggtcctgctctgtcactcaggctggagtgcagcctcaacctcccagactcaagtgatcctcctgcctcagcctcccgagtagctgggaccaca

SEQ ID NO: 492558 - DNA, 201 bp, Homo sapiens
tttttaaaaaatgcgtgtcctgtatgccaggctctgcactgagaccgagagattccaagatgaataatacctacagtcactgttctcaaattgtgcattayctaaaacacattacatgaccatgctggccactgatcgaggcacctttcccaggggctttttttgtgaattaagaaaacaaggtaattcaccagttattgc

SEQ ID NO: 492559 - DNA, 201 bp, Homo sapiens
aggccctgcaggcctggtcagcaccagcacagatgaccaggcctctgactgcagatccctgtggggatccaagcatccctggtttttcaccctttagctcsccagtttttcctacaaggggacagctctgctcttcccctccccgtctgttcccatggtccctgctcctctgagggactggctttctcctgcagggacact

SEQ ID NO: 492560 - DNA, 201 bp, Homo sapiens
agccactgtgcttggcctttttatttatttagaatttgttttggaattgcttctttatgcctggcactatgctggcactatgtggcagagattttaaaaamgagcaaacaaaacaaatgctttgtcaaccacaaaatgtattctctgccccttaggttctttttgtgtagttgaggctagaagacaaaaatagggggcagt

SEQ ID NO: 492561 - DNA, 201 bp, Homo sapiens
cactcacctcagcctcccaaggtcttgggattactggtgtgagccaccgcgtgcggccagaatttgcatttctaacaagtcccaggtgatgctgatgctgygggtccagggacacactttgagaacagcttgttactcaggcgatatgtggacagtagcgtcatcttcacctgggagcttcctgcagcatctcaggccttg

SEQ ID NO: 492562 - DNA, 201 bp, Homo sapiens
aagttcaagaagccccttgccaggagattgctttgctggctctgggtgagggcaggtgcatctggaagcccccttctttctaagatgtttgctcctgagtytctatgtcctagtcttttcttccctgaaccttttgctaccagtcagcacagccctgcctgagaaggaggctggaggagtgagtggtcagtagcctggtgg

SEQ ID NO: 492563 - DNA, 201 bp, Homo sapiens
cagggaaaaattcaccttaatattggaagttcctctcctagcaaagtccttctcaggcacccacaggcaaaaaggaaactaagcagagttagggcttccakgcctagccaactacacgactctcctcttgcttccctaagaaccagcgcaaggggcagcgtgggttccagcatagatggacctgtgttggaatctctgcac

SEQ ID NO: 492564 - DNA, 201 bp, Homo sapiens
ggtaactggagctggcctggccctggggattgggtgtctgccttgggtttcaggtgtattaggttgttcctcgttgtggagtctcattactaatgaaaagytcaggtcgcactgctggtcctttgggctgtggttgatcctggtgataacatttggcacccagaggcagccctgtttccactgaagcatgcggagcttggc

SEQ ID NO: 492565 - DNA, 201 bp, Homo sapiens
gcagctacgctcaccctaaacttttggtggcctggggcatgtcttgaggcccagactgttaaccaggctctgctggcctgtttactcgtcaccacctctgyacctgctgtcttgagactccatccagccccaggcacgccacctgctcctgagcctccactatctccctgtgacgggtgaacttcgtgtactgtgtctcgg

SEQ ID NO: 492566 - DNA, 201 bp, Homo sapiens
cttgtttcctttccactaggctctctgagggcaggggccatgtctttttcactgctctgtctgcactgagcactgtgcagggcacataggaagttcccatraatgtttgtgggataaaggaaataaaaccttctctcttcctgtcccccttgtgatggctttgcacaaggcactgtccttggccaggtttgctaggctagt

SEQ ID NO: 492567 - DNA, 201 bp, Homo sapiens
gacactctgtgtcttgagccacacttcctccatgttttctagggctttctagggaggcagacagtgatgggaaggggtgttctttagtgtggatgtgcccygcctgctcctttctgtaagcgtcacagcacctccactgctgtactggggaggcaccaagtttttccctgtttgcccacccaaggcgagctagcttaggag

SEQ ID NO: 492568 - DNA, 201 bp, Homo sapiens
gagatactggtaatgtccctgatgaagatatttactgaggcagaaatggacgctcagtgaagcaaggtgcctgatgttatagcaatgagctatgagtggcyagagggaggagataagctcaggcctgacaccaaagcccatgctccttctagtcaaccacagtgcctcctatggtgaatgagtgagtcagcaaccaagacg

SEQ ID NO: 492569 - DNA, 201 bp, Homo sapiens
agggccctgcctgtcttcccagttctccaacagcagcgctgtcccagcaccctcgggctccagttgtggcctggcagctgctggggcagacaccatacagmcagagtcacagcaggaagaggatggggcccagggctgctgcctcaggccatggctgcatggcaccatcagttgattgaggagcttttcttgccaatgtct

SEQ ID NO: 492570 - DNA, 201 bp, Homo sapiens; identical to SEQ ID NO: 398260

SEQ ID NO: 492571 - DNA, 201 bp, Homo sapiens
aaggcagagagaacttaggaaaatctgaagaaaggaggtggcttcagaggaaaggcattcatctgggccataaaacagtggagaaggtatcctgctgagarcacaggggtggggagggggtgccctggagctgaagtcttcagtggggggacagtgataggtgaacacacatgtgaataaacagtttgctaagcagctgcg

SEQ ID NO: 492572 - DNA, 201 bp, Homo sapiens
cttcctcttcccccacccccactgtccctcatgtgccatgggcctgcctccccagtgacctgcgaaagtggagcatcgaggtaggagggaaacggcaaccrgggagtcctcgagcctggggctgccctacctctacccattccccgaccagagctttgcccttgcttggctgcccgcctgcctctttggggaactgagctc

SEQ ID NO: 492573 - DNA, 201 bp, Homo sapiens
tggacagaggactcttccctgagggaaggcagagagaacttaggaaaatctgaagaaaggaggtggcttcagaggaaaggcattcatctgggccataaaamagtggagaaggtatcctgctgagagcacaggggtggggagggggtgccctggagctgaagtcttcagtggggggacagtgataggtgaacacacatgtga

SEQ ID NO: 492574 - DNA, 201 bp, Homo sapiens
tgagaaacagagaactcttgtgctctcgctctcttgacacttcaggtgcaaaacttttgtcctaatgtcgttctcaaacttacgcatgtgtgagaatcacygtgagagcttattgaaactgattgcgggaccccatacctagagggcctgattctataggtctgaggtaaggcccaagaatttgcatatttgcatttcgtt

SEQ ID NO: 492575 - DNA, 201 bp, Homo sapiens
aaggtatgggagcagaaggagaattgggattttagggtgcagctacgctcaccctaaacttttggtggcctggggcatgtcttgaggcccagactgttaascaggctctgctggcctgtttactcgtcaccacctctgcacctgctgtcttgagactccatccagccccaggcacgccacctgctcctgagcctccactat

SEQ ID NO: 492576 - DNA, 201 bp, Homo sapiens
aaccactggaggcagagatagatggagaatatctcttcttctcacggatactaaagatgcaacaaaaagggctgactctctgggtgtgcacccaggtgggsctgatgaccgaaaagaggccagatgtggacagaggactcttccctgagggaaggcagagagaacttaggaaaatctgaagaaaggaggtggcttcagagg

SEQ ID NO: 492577 - DNA, 201 bp, Homo sapiens
gtagcgtcatcttcacctgggagcttcctgcagcatctcaggccttgccctacacctaccagatcagaatctgcattttaactcaatccccgcgtgattcycatgcacctggaagtttgagaaatatgaccttagaggagccggaatgtgaaaccactggaggcagagatagatggagaatatctcttcttctcacggata

SEQ ID NO: 492578 - DNA, 201 bp, Homo sapiens
cagataaagataattcaattagttgtactagagagtaactaggggctagcagtgggaaataaggcaggaagggtaggtgagggcaactcaacacattttaytaaattgtgaaagaccagtaagttgggattttatttggaaatcttcagtataccgggaaacgcactggattgtaatttgtctttttcttcattgtgatct

SEQ ID NO: 492579 - DNA, 201 bp, Homo sapiens
accacacctggactgagttattttttttgagacagccttgctctgtcgcccaggctggagtgcagaggcgtgatctcagctcactgcaatcgctgcctccygggttcaagtgatcccccttcctcagtcacccagatagctgggactacaggcatgggccaccacacccagctaatttttgtatttttagtagagatggag

SEQ ID NO: 492580 - DNA, 201 bp, Homo sapiens
ttgggtaatcaggaagggtgtaaagcaaggttactgacacttataaatgtctgtgatccgattttcggctgggcatggtggcttatgcctgtaatttcagyactttgggaggcccagatgggaagattgcttgagcccaggagtttgagaccggcctgggtaagatgggaagaccccatctctgcaaaaaatataaaaaga

SEQ ID NO: 492581 - DNA, 201 bp, Homo sapiens
caggcctgagccactgcccctggtctgatttacaatttttaattgagggttagggagtcataataccaacaaagatggtaaaaggaatttgaggagaaaaygaaagaacaagggacaaataaaaactgcctgggttattcattattcatactgactccctaataaagtgattttcagtttgaatgtttttgcagacattgc

SEQ ID NO: 492582 - DNA, 201 bp, Homo sapiens
tatataaatatataaatatatacacctaataatatataaatatatataaatatatacccaaataaatatatacacctactatacactcacaaaaattgttsaaaaaaaagcttaaagtgttttaaaaaattcttatcttgcaacagggtctcgctctgtccccctgcaggggtgcagtggcctgatctcactgcagcctct

SEQ ID NO: 492583 - DNA, 201 bp, Homo sapiens
gtctcgaactcctgacctcaagtgacccgcccgcctgggcttcccaaaatgctgggattacaggtgtgagccttcatgcccggccataattcatctttaaytgtaggactgaggtctgttttcttgttgacctttggctctgagttgggagctgctctcacctaggaactccctgcagttccttgttacctagtttatctg

SEQ ID NO: 492584 - DNA, 201 bp, Homo sapiens
cttgggtaatcaggaagggtgtaaagcaaggttactgacacttataaatgtctgtgatccgattttcggctgggcatggtggcttatgcctgtaatttcascactttgggaggcccagatgggaagattgcttgagcccaggagtttgagaccggcctgggtaagatgggaagaccccatctctgcaaaaaatataaaaag

SEQ ID NO: 492585 - DNA, 201 bp, Homo sapiens
ttgattacattttgagtgatacttgattaaaaagtgaaaaagctttatcataggtatttgtgttagtttttttattgttgtataacaaaataccacaagcrtaatggctcaaaaacaacacatctctcacagctgagcacagtttagctgggtcctctccttaggatctcacatagctatatattccaggtgtcagctggg

SEQ ID NO: 492586 - DNA, 201 bp, Homo sapiens
gaaaacaggaagcttaacaacacagggatttagccttgggtaatcaggaagggtgtaaagcaaggttactgacacttataaatgtctgtgatccgattttyggctgggcatggtggcttatgcctgtaatttcagcactttgggaggcccagatgggaagattgcttgagcccaggagtttgagaccggcctgggtaagat

SEQ ID NO: 492587 - DNA, 201 bp, Homo sapiens
tatggctttatagtcagtaccatagctgcttcctaaatcttaagcctttaaggaaatgcaaagtagttcctgtccacaagaaatctggtgaccctgtcttyctacagtctaagatagagaatccaaaatatagtaactacttttaatgttttcttctgccacacaggtcagctgaaagaacactttgcacagttcggccat

SEQ ID NO: 492588 - DNA, 201 bp, Homo sapiens
aagtgatcccccttcctcagtcacccagatagctgggactacaggcatgggccaccacacccagctaatttttgtatttttagtagagatggagtttcacyatgttggccaggctggtcccaaactcctgacctcaagccatccatccacctcagcctcccaaagggctgggattgagccactgcacctggcctatgtttt

SEQ ID NO: 492589 - DNA, 201 bp, Homo sapiens
attaaatagatcataaatgtggaatgatggggacttggagagatttgtaactgaagctgccttaatgcttgttaagaatggtggggtggaggctgggcacrgtggctcacgcctgtaatcccagcactttgggaggccgaggcgggcggatcacgaggtcaggagatcgagaccatcctggctaacacggtgaaaccccgt

SEQ ID NO: 492590 - DNA, 201 bp, Homo sapiens
aattaaatagatcataaatgtggaatgatggggacttggagagatttgtaactgaagctgccttaatgcttgttaagaatggtggggtggaggctgggcayggtggctcacgcctgtaatcccagcactttgggaggccgaggcgggcggatcacgaggtcaggagatcgagaccatcctggctaacacggtgaaaccccg

SEQ ID NO: 492591 - DNA, 201 bp, Homo sapiens
attttgttttttttggcaaagcacagcatgacttgaatgagactaatgaggaccagtttgtcatctacagggactagacatcttaatatctgttttctgtygaagggctggaggggcagggtacatccaagcactctagaatctgttttccgtatgcgatgtataggttgaaacttttgcacaagggaaaatagcaaaatt

SEQ ID NO: 492592 - DNA, 201 bp, Homo sapiens
ggaatgatggggacttggagagatttgtaactgaagctgccttaatgcttgttaagaatggtggggtggaggctgggcacggtggctcacgcctgtaatcscagcactttgggaggccgaggcgggcggatcacgaggtcaggagatcgagaccatcctggctaacacggtgaaaccccgtctctactaaaaatacaaaaa

SEQ ID NO: 492593 - DNA, 201 bp, Homo sapiens
gaagcagattctctcgtgttccggatccggaaattttttccggggccgcgacctcggctcgagaaggtgctttagtctgaagatggcggcctcagcagcgmgaggtgctgcggcgctgcgtagaagtatcaatcagccggttgcttttgtgagaagaattccttggactgcggcgtcgagtgagtgatggagatgtgggag

SEQ ID NO: 492594 - DNA, 201 bp, Homo sapiens
ggcaggaagggtaggtgagggcaactcaacacattttactaaattgtgaaagaccagtaagttgggattttatttggaaatcttcagtataccgggaaacrcactggattgtaatttgtctttttcttcattgtgatctgctcacagggatcatagtccacatagcacagtaactggtatgaaaacactcgatatttgctg

SEQ ID NO: 492595 - DNA, 201 bp, Homo sapiens
taatttttgtatttttagtagagatggagtttcaccatgttggccaggctggtcccaaactcctgacctcaagccatccatccacctcagcctcccaaagkgctgggattgagccactgcacctggcctatgttttaatataaacaaatttcttaatgcctttgactgtggaagtggtcacatgacaataaaggaatgctt

SEQ ID NO: 492596 - DNA, 201 bp, Homo sapiens
gtgatctgctcacagggatcatagtccacatagcacagtaactggtatgaaaacactcgatatttgctgaggatggagactgcagccaactcaacaacttytctgtccatctcaccaccaagtctggtacattatggctttatagtcagtaccatagctgcttcctaaatcttaagcctttaaggaaatgcaaagtagttc

SEQ ID NO: 492597 - DNA, 201 bp, Homo sapiens
gcgcgatctcggctcaccacaagctctgcctcctgggttcacgccattctcctgcctcagcctcctgagtagctgggactacaggcgcccgccactacgcycggctaattttttgtatttttagtagagatggagtttcgctatgttggccaggctggtctcgaactcctgacctcaagtgacccgcccgcctgggcttcc

SEQ ID NO: 492598 - DNA, 201 bp, Homo sapiens
ggggttagaattccaacttggccatttaatcgttgttatcacttgaataactgaagttagtatgggaaaagggctcacaactgggcctcagtttactcatmgataaaatggagtcaataatacccaactcataggattgttgagaggattgagtttatatgcaaacttcttagacttgtgttagatacagtgtaagtactc

SEQ ID NO: 492599 - DNA, 201 bp, Homo sapiens
attcatctttaattgtaggactgaggtctgttttcttgttgacctttggctctgagttgggagctgctctcacctaggaactccctgcagttccttgttamctagtttatctgtaggctgtcttacaatatggcagcttgcttctttaaagccagcaagggcttctccagtctgcttaagatggcatcttatacagaacat

SEQ ID NO: 492600 - DNA, 201 bp, Homo sapiens
tcaacccctggaaacaaaatggagcaagatttagtttcttctaagtttttagtggctcagatgtgagtagtagaatgggaaataggttggtttgtgccccrtgttttaaacatgtggttggtgaagaccaagcccagtaaagtctcccgtagtccctgtgaaactttatggaaaggctgaggagtttcattagcatcttgc

SEQ ID NO: 492601 - DNA, 201 bp, Homo sapiens
gagtagtagaatgggaaataggttggtttgtgccccatgttttaaacatgtggttggtgaagaccaagcccagtaaagtctcccgtagtccctgtgaaackttatggaaaggctgaggagtttcattagcatcttgcggatgcaagtttccagacaataaagggctagtttaaaacccttaaaaagagtcagcattatgta

SEQ ID NO: 492602 - DNA, 201 bp, Homo sapiens
ggcacatgcctgtagtcccagctactcaggagactgaggcaggagaacccaagagacagaggttgcagtgaactaaaatcgcgccattgcactccagcctsggcaacaagagcaaaactccatctcaaaaaaaaaaaaaaaaaaaatggggggtggtagagtgcccagttttaaaaggtccaggaaagtacaagatgaccc

SEQ ID NO: 492603 - DNA, 201 bp, Homo sapiens
atggcagcttgcttctttaaagccagcaagggcttctccagtctgcttaagatggcatcttatacagaacataatcacaggagtgacatcccattactttygctgtattcttttggttagaagcaagtcaggtttctcctacacccaaggaggggaggagattatatagggtgtaacatggggaatgcatggagatcatgg

SEQ ID NO: 492604 - DNA, 201 bp, Homo sapiens
cattattttgttctccagtatcatattctgtgagaccttgatcttgccagttggtttgacttaaccattagagcccttcaaaatttagtctctgtggattkttggaaggattagtggacttttacttattcatttagccaatattgaggccctgctgtttattggtcactgtaaacatagtggtttatatgctgagggagc

SEQ ID NO: 492605 - DNA, 201 bp, Homo sapiens
gtctgcttaagatggcatcttatacagaacataatcacaggagtgacatcccattacttttgctgtattcttttggttagaagcaagtcaggtttctcctmcacccaaggaggggaggagattatatagggtgtaacatggggaatgcatggagatcatggggcccatcttagaattctgcctactacagtattctaataa

SEQ ID NO: 492606 - DNA, 201 bp, Homo sapiens
tctttgtagaaatggggcttcaccatattgcccaggctggtctcgagctcccgcactcaagcagtctactcacctcagctcccaaagtgctgtgattacargcatgagccaccacacctggactgagttattttttttgagacagccttgctctgtcgcccaggctggagtgcagaggcgtgatctcagctcactgcaatc

SEQ ID NO: 492607 - DNA, 201 bp, Homo sapiens
agctgccttaatgcttgttaagaatggtggggtggaggctgggcacggtggctcacgcctgtaatcccagcactttgggaggccgaggcgggcggatcacraggtcaggagatcgagaccatcctggctaacacggtgaaaccccgtctctactaaaaatacaaaaaattagcctggcaaggtggcgggcgcctgtagtcc

SEQ ID NO: 492608 - DNA, 201 bp, Homo sapiens
gaaaacccagactgcattcagtgtcctcagtgtagccaccactttgctcccaaggtggctgagcaacacattcccaagtgtaagaccatcaagaactgtcwtccacctctaaggaagcattatagttgagcagacaacaatggaaacttttggatagttcagaaagctctgcttctcttcagcagtaaatgggagtagaat

SEQ ID NO: 492609 - DNA, 201 bp, Homo sapiens
atgtacaaacctatcttctccccagaatttgagtttgaggaagaatttagtagagacaggagagaggatgaaacttggggacggtctcaacaaaattcagktccattccagttctctgattatagaatccagaggctcaaaagggaaaggctggtagcaagcaataataaaattcgagacccagtctcagagccatcggtg

SEQ ID NO: 492610 - DNA, 201 bp, Homo sapiens
caagtcagttactgctgttgctcctttcctgttctctttgaccttgcagattagtacccttttcattttcttactgttattctacaagagactcaggaagragataggtgccaacttgaatgatcagtctcccttttacattacaggctgaacctcctcagaagagcaactggagatagaagcatgaatcttttatccata

SEQ ID NO: 492611 - DNA, 201 bp, Homo sapiens
agcactgaacctctcaggttctgttgggaaagtggcttgcctctcagcagtacctcctttgcaggcccttggtttgcctcaacgctggcaagtcagttacygctgttgctcctttcctgttctctttgaccttgcagattagtacccttttcattttcttactgttattctacaagagactcaggaagaagataggtgcca

SEQ ID NO: 492612 - DNA, 201 bp, Homo sapiens
ggagagagccactgctaagcagcaggaggcagaaggaagccccagcttcccactaaattacaaccttgggctggtatgctttatgttattgccctcagaaytgatgggtgaagacactgaagagtcatgagcaggctccattaaagctcttttcttgcatgcctgacttgtggtttgtgctagttaagtgcctgcatctgg

SEQ ID NO: 492613 - DNA, 201 bp, Homo sapiens
tcttgttttatggacacaatctcttctaatactcattttgttgatatggtctcatgttaaaaaaaagttttcttctgccacctgccttgttgctgcctccdttttgtttgtggactttttggctctttttcttgttagagcttttagcaaatatctgatgattcctggctgtcctttcatatttaagcttaagtggggctc

SEQ ID NO: 492614 - DNA, 201 bp, Homo sapiens
cccggctaatttttgtatttttagttaagacagggtttcaccaagttggccaagttggtcctgaactcctaacctcaagtcatctgcccacctcggcctcycagagtgctgggattacaggcgtgagccacggtgcctgttctacctggtaacttcttatggaagctgggagtgaagttctctttcatattccctctctcc

SEQ ID NO: 492615 - DNA, 201 bp, Homo sapiens
ttattttttgagacagggtcttgctctgtcgcccaggctggagtgcagtggcatgatcttggctcactgcaacctctgcctcctaggttcaagcaattctsctgcctcagcctcctgaatagctgggactacaggcgtgtgccaccacgcccagctaattttgtgtatttttagtagagatgggatttcaccgtcttagcc

SEQ ID NO: 492616 - DNA, 201 bp, Homo sapiens
gctggtagcaagcaataataaaattcgagacccagtctcagagccatcggtggagaaattctccccgccttcagaaacaccagtcggtgctttgcagggawccgccagaaattccagcctgtccatggcaccagactcctcaggttccagcggctccattgaagagccacagctgggtgagtgcagccactgtgggcgcaa

SEQ ID NO: 492617 - DNA, 201 bp, Homo sapiens
ggttggcgtcacatctgcctgtgggcgttatgctcccacataatacaacggaagctccagggccccactcagccaagcaagactcttacgaacaaggtgaytcttcccagcagtccttgaaggggcacctgaggaacaatttccagaagcagcttttgagcaacaaagagttgattctggataaagtctatactcacccca

SEQ ID NO: 492618 - DNA, 201 bp, Homo sapiens
atggtttgttttactcgtcaggccctcaatcctggtatcccaaagccaataaccaggactttatcccctttacaaagaaacgagttggagtggaccgggcrttcccattgaaacccatggtccacaggaagtcgtgcagtacaggtgaggctggcactgatggggaccataatgtctacccaaggccccctgagccgagag

SEQ ID NO: 492619 - DNA, 201 bp, Homo sapiens
ctggtctccagcggttggcgtcacatctgcctgtgggcgttatgctcccacataatacaacggaagctccagggccccactcagccaagcaagactcttaygaacaaggtgactcttcccagcagtccttgaaggggcacctgaggaacaatttccagaagcagcttttgagcaacaaagagttgattctggataaagtct

SEQ ID NO: 492620 - DNA, 201 bp, Homo sapiens
tctggataaagtctatactcaccccaaatggaacacccaaacaaaagcccggagctactcctatccccactgtactggaatcagccagcaagatccagaargtgattcccagggccaaggaaatggtttgttttactcgtcaggccctcaatcctggtatcccaaagccaataaccaggactttatcccctttacaaagaa

SEQ ID NO: 492621 - DNA, 201 bp, Homo sapiens
atgtagtactgaatgacctataatggaacccctaattcagcccccggaggcagccttcagttctgttagatggttcttctggtctgcctttccatatttcyaaataatatgcttattttcttgatttatcaattttctacattacctgtttttttttgttttgttttgttttttttgagacggagtctctgtcgcccaggc

SEQ ID NO: 492622 - DNA, 201 bp, Homo sapiens
cattactccttcctttgctgaagcttactaagaagggtgcatagcaggtatattgtcttggaatgaatgacactatctatatgacaggctcccatttgatkatttggctaggtacagaattctaggaggaaaatgattatctgttagaacttttaaagtatttcccactagcttttagcatccagtgtattgttgtgaaat

SEQ ID NO: 492623 - DNA, 201 bp, Homo sapiens
gtctccccgaggagttcgcggcgaggggcggagcttggcgcgccagtgcctcggtttccaggcaccgggaataacagaagccagctgagagcgcctgcgcrgctgtcggttgatggggaggtcaggtctgggaaactaggccctggggttttccctgagcaggagcggtgcccgagggcctcaggtacgcagaagggcggg

SEQ ID NO: 492624 - DNA, 201 bp, Homo sapiens
cactttgtacacatctgctgggtgagagtccaagagtggctccagacatcctcaaagtacagacacaaggacagcttgttcagccactcaggtgcctttaygtagagccctgacccaaaggaacttaggccttcctgactccaagtccccagctgggctccatgagggagctgcgagtctgacttcctagagggaagaacc

SEQ ID NO: 492625 - DNA, 201 bp, Homo sapiens
aatgtgtccaacttcctgtttctcatgtgttatgttcactttgtacacatctgctgggtgagagtccaagagtggctccagacatcctcaaagtacagacrcaaggacagcttgttcagccactcaggtgcctttacgtagagccctgacccaaaggaacttaggccttcctgactccaagtccccagctgggctccatga

SEQ ID NO: 492626 - DNA, 201 bp, Homo sapiens
ctcttgcctgacccggaggccaatgacagcttttctatgtgggcctaataacaaacgaaaagaagacaggacatttattacattcaacacacacgtatatwgaaatttctgtgtcaggccaaatactaccatagcactttacaagcattaacccatttaatcctcaaaagacctataaggtaggttctcttttcacctcca

SEQ ID NO: 492627 - DNA, 201 bp, Homo sapiens
atccctgcacccaaagagcagataatggcctggaccataaccgaggctgttctcccccagttctctaatcagataaatcagaagtaggtgtcagagccccmttgtgtagaatgtagggaatggtgcagagatctcatacggtaaaatacaaagggtgctctcttctggagagtgggcaggtggctgaaaggacaggctttg

SEQ ID NO: 492628 - DNA, 201 bp, Homo sapiens
agagccacttcagctcagaccccaattaggaagtccttttccggggaaagtggggcaaggaatttatgcccaatgatcaccacagcctggagatcacaggyacagctgaccaaagaacaaaaagccgaggaagggcagaattgagtatagagtcggtaaggcagcacaaagtgttcacatggctaataagacagccttcca

SEQ ID NO: 492629 - DNA, 201 bp, Homo sapiens
gcaccatcccccagatctgaagggaagagtagcttatgtatagctaagatccacatacaccagaagagctgcccttaaacagctcactgacctcttacttkgtgtattgggttgaatgggtctcaaaacagagaccatgccttcactgtcagaacctgcaaatgtgaccttacgtggaaaaaagatctttgcagatgtcat

SEQ ID NO: 492630 - DNA, 201 bp, Homo sapiens
tttgagtaatcaagtttactggcaatgagtctgtatgaagggaaccaatcatctgatcctggagcaggtggaacaagcctggcgtgggacacccaaaagcrtccctgcacccaaagagcagataatggcctggaccataaccgaggctgttctcccccagttctctaatcagataaatcagaagtaggtgtcagagcccca

SEQ ID NO: 492631 - DNA, 201 bp, Homo sapiens
taccaacctctttgcctgcctagcttcttctagatacccttcaggtctcagatgccacttctcccagggtccaccccagcccttcaagtctggaatagctkccccttttaggtgctctcaaaatatttgttattgccttatcagaatatttatcaaattgtattgcacctgcctctttatgtgtctgattcattcaaaaac

SEQ ID NO: 492632 - DNA, 201 bp, Homo sapiens
catccaaagtccgtgctctttacccttttataaaaatctatgtgacaagtgatcaaaccaggaggggtatggcaccatcccccagatctgaagggaagagkagcttatgtatagctaagatccacatacaccagaagagctgcccttaaacagctcactgacctcttacttggtgtattgggttgaatgggtctcaaaaca

SEQ ID NO: 492633 - DNA, 201 bp, Homo sapiens
cagtcaggcagcccaggcggaatccttgttctgccacatattagctctgaacagaggcaaatttctccatctataaaatgggaataatagtagtgtccatytctgaggattgatgtgaggatgagaaaaaatataaagaacttagaaaagtgttttaccaataatcagcactcgattaatcagcacttattagccataatt

SEQ ID NO: 492634 - DNA, 201 bp, Homo sapiens
gcaaagtttgagtaatcaagtttactggcaatgagtctgtatgaagggaaccaatcatctgatcctggagcaggtggaacaagcctggcgtgggacacccraaagcatccctgcacccaaagagcagataatggcctggaccataaccgaggctgttctcccccagttctctaatcagataaatcagaagtaggtgtcaga

SEQ ID NO: 492635 - DNA, 201 bp, Homo sapiens
gtctttttgtatgctaataattgactgatggcaagcagtccctaggtagcttcaggatgaggtctggtcactggaaagaccgaggcttgattagagggttkggactttcagtccactctcaaccactgggaaagagaaagggactgaaggttaagttgatcaccaatggccaatgacgtaatcaatcaatcctatgtagtg

SEQ ID NO: 492636 - DNA, 201 bp, Homo sapiens
tctgctctgacaagctcaacaaatctgtggaatacaagctgtggaaattttaatatttgctaagttcagttatcagtactaataacacctatgatataatwatgtttcataattaatttggaaatttcttaggaaatagaattatataattgccattgctatcttaaatgagatgcattttataggaattacaatattagt

SEQ ID NO: 492637 - DNA, 201 bp, Homo sapiens
ttggcccttgagcaaagtttgagtaatcaagtttactggcaatgagtctgtatgaagggaaccaatcatctgatcctggagcaggtggaacaagcctggcrtgggacacccaaaagcatccctgcacccaaagagcagataatggcctggaccataaccgaggctgttctcccccagttctctaatcagataaatcagaag

SEQ ID NO: 492638 - DNA, 201 bp, Homo sapiens
agctaatacactagaactttctaaggagggcattatccaaaagaactcagaatgagaagggatcttatattttattaaccttataataaatctgatattcrttagatgccacttcaaattcctactaaggaggaagggaagggaagggaagggaagggaaggcaacagcaaagaagaaaagggaagagtaaaggaggggag

SEQ ID NO: 492639 - DNA, 201 bp, Homo sapiens
atttaaataaaatatattattaaaattaatttccctaatttctttttgcttttctaatgtggttatgaaaaaaattttaaattatatatatggcttgcatyatatttcagttgggcagagctgatttcgagtttctagttttatgagggtagttaatgaggcttgggtaggataacattgagtcaggaaacttttctttct

SEQ ID NO: 492640 - DNA, 201 bp, Homo sapiens
catatgtatcctgtttcttctgcgtgtaattccctttcctcctttaatgcgcagcatattctgaatcatttttcaaaagtcaaatggaatattttttcctyctttgtcaagccttccagacagactgctctggaaagagtttcttcacttctcagttcccatagcatgccttttatcccttcatcatagtctctagcctct

SEQ ID NO: 492641 - DNA, 201 bp, Homo sapiens
tacctgtatacacttaaggcaacagatatctcttctgctaccccaatccctgccagccctgcatgaaatcagagggggagttgggggctggactctagatragtcaagctggagcttctgggaacactgccacaatgatctcaataccctgaagctttgcagctttctgcagaaagaaaaagttttaacctgattatggtg

SEQ ID NO: 492642 - DNA, 201 bp, Homo sapiens
atttaacccctctctaccttgattttgtcatctgtaaaatggagacgataatcatacatatttcctagagttgccacatgtctaagaggatgcacataaaraacttagtagaattgctgacctacgaaagtgctctacaaatgtgatgatgatgattttgccataattgactttttcccaatgacttcaacaacttataaa

SEQ ID NO: 492643 - DNA, 201 bp, Homo sapiens
cagaatcttgtcagaaaccccgccaaggaggaaagagaagagaagggacttgcctaaggtcacaaagtgggtgtttcttcagccgcctagcctgctgctawttctcccacactctcaggaactcaaagcacatttccttcccagcctggcaagcaaggcacatgagagttggaggagccgccctggggatggtgtgggagg

SEQ ID NO: 492644 - DNA, 201 bp, Homo sapiens
ggggtgaaaggaagggtgttaaccttggctaagaacctcctctctgtagacatgactttggttgctgcagttttcagtctttatcttacttagttctcaamactctataaagcagttattttaatgtaggtgacttttaatcatttgcccatagtcacatggctagaaactgtcacaggtggaatttaaactcagcaccac

SEQ ID NO: 492645 - DNA, 201 bp, Homo sapiens
tattcaaaagggcttggtgtaaacttgaatagttcaccatcttcctttccaaccttatatggaaattcttccaaaaataaaccctgtcttggtggggaaargctgtttaaagaaacatggtgaattactacaaagtactaggtgtgcctcacaatgcttcctcccctgatattaagaaggcttatcaccagttggctctgc

SEQ ID NO: 492646 - DNA, 201 bp, Homo sapiens
aggagaatgaatacacaaaccgtgatatattcatacagtggaatactccacagtaataaaaaggaatgaactactgttatgtgcagccatttgcatgagtytcaaaaacatattactgattgagagaaaccttacataactgagttcatactgaatggttccatttagataaggtttcagaacaggaaaatcaatcagtgg

SEQ ID NO: 492647 - DNA, 201 bp, Homo sapiens
ggccccttgtggttagcaacctgctttactggaggggtcgaggtattccctgtctgctggccacaacactccaatgggggttgctggccacagagtttcaytggggcagtggcaacgggatctgtgcttgctcatgcatgccagcagccacagcagcatgtcagggtgcacacacatcagctggggaggaactttctctcc

SEQ ID NO: 492648 - DNA, 201 bp, Homo sapiens
taattcttccttaaatgtttggtaaaattctccatgaagccatctaatcctgggcttttcttgtatggaagattttatactactgatttaatctccttacwagacaggtctgcttggattttctatttcttcataattcagtctggtgggttgtatgcttctagggacctatttcttctagactatccagttggtagacct

SEQ ID NO: 492649 - DNA, 201 bp, Homo sapiens
atcatattatctttacctttttttacacaacaaacagcatttttttctcttgctatgttccaacaaattgcaattgctattcatcatgaaatttccaacawaccttctttcggtcccttttttctttattgtgtgttactagtttctgcatctcctctcaattctgctctttttagattttaaaatttttctatgcttatt

SEQ ID NO: 492650 - DNA, 201 bp, Homo sapiens
acatcaataggagaatgaatacacaaaccgtgatatattcatacagtggaatactccacagtaataaaaaggaatgaactactgttatgtgcagccatttkcatgagtctcaaaaacatattactgattgagagaaaccttacataactgagttcatactgaatggttccatttagataaggtttcagaacaggaaaatca

SEQ ID NO: 492651 - DNA, 201 bp, Homo sapiens
gtctttaatttttgaatatttggccaggcacagtggcccatgcctgtaatcccagcactttgggaggctgaggcaggcagatcacttgaggtcaggagttygagaaaagcctggccaacatggtgaaatcccatctctactaaaaatacaaaaattatccaggcatggtagtgggcacctgcaatcccagctacttgggag

SEQ ID NO: 492652 - DNA, 201 bp, Homo sapiens
tcttttgttgttggtgagactgtgaaatcaacattcagacatctaccccttgatgcagcagttttactcctgggtatttacccaagggaaatgaaaacacrtgtctgtaaaaagatttgtacaaaattgttcttactagctttatcacaatggtcaaaaatttgaagcctaggtgtacatcaataggagaatgaatacaca

SEQ ID NO: 492653 - DNA, 201 bp, Homo sapiens
cagtgtgatatcaaagttattcagtcgtttttgtctttaatttttgaatatttggccaggcacagtggcccatgcctgtaatcccagcactttgggaggcygaggcaggcagatcacttgaggtcaggagtttgagaaaagcctggccaacatggtgaaatcccatctctactaaaaatacaaaaattatccaggcatggt

SEQ ID NO: 492654 - DNA, 201 bp, Homo sapiens
gttgtgtactttacacttatagtaggggggttcaaactttcagcttctctgggccacattggaagaagaattgtctttggccacagatgaaatacactacyactaacaatagctgatgagaaaaaaaaaaatctcataatgttttaagaaacttcaggaatttgtgttgggccacagtcaaagccatcctgggctgcatgg

SEQ ID NO: 492655 - DNA, 201 bp, Homo sapiens
cagaggttgaaatgagccaagattgtgccactgcactccagcctgggtgacagtgagactccgtctcaaaataataataataataataataataataaaayaaaataagaaaaagtaaagaaaaagtgaaaacaggcatctttttgttcctcatctttttcatatctatgttcttctgtatatatgtgtctttttttctgt

SEQ ID NO: 492656 - DNA, 201 bp, Homo sapiens
taatcccagtactttgggaggccaaagtgggcagatcacttgagatcaagagttcgagactagtctggccaacatgtgaaaccccatctctactaaaaatmccaaaaaaaaaaaaaaaaaaaagagagagagagagaaattagccaggtgtggtgttacatgcctgtaatcccagctactcaggaggctgaggcaggagaa

SEQ ID NO: 492657 - DNA, 201 bp, Homo sapiens
tttatcagcagaggattgatggcaaacagtttgttggagggagtgtgtgagtactagtgtatatatatatatatatatatatatttatttatttatttatwattcacaagtgtcagtttactaccaaagttagaaactagctggtaagtgaaacctgttgtcataatttagagtgtctttgtggctcactttttataaaac

SEQ ID NO: 492658 - DNA, 201 bp, Homo sapiens
cttcagttaaaattggggcctgctctgaaaatctacgaatatcatgtaaaacctctgcagacaaagcatttaaagaacaactcttcatagtacagtcaaaytggggtcttcgacctcaaaaaatacataatgacataatttagtttcatgtaatgaaactttgtaaacagaatacatacatgtgtatatgtaaagaatttc

SEQ ID NO: 492659 - DNA, 201 bp, Homo sapiens
aatctctaaaacgatgtctttttgtatgctaataattgactgatggcaagcagtccctaggtagcttcaggatgaggtctggtcactggaaagaccgaggyttgattagagggttgggactttcagtccactctcaaccactgggaaagagaaagggactgaaggttaagttgatcaccaatggccaatgacgtaatcaat

SEQ ID NO: 492660 - DNA, 201 bp, Homo sapiens
caaccccagctccccaagacacagaactcccagtccaactcgcttccaatttggatttactgggagaatagttcaggaatttcagatcaagtccaaaagcrttaaggaatctgttagtgaaagagctctttatctacataaaagtccatcattttgagatcagcactggtgaaagatccacatgcctgacccatgctcaaa

SEQ ID NO: 492661 - DNA, 201 bp, Homo sapiens
taaggcagcacaaagtgttcacatggctaataagacagccttccagtgcagcacagccatcccagactggagatcatgcaagacatgtgcgggacaggtcrgcgctcctttgcaggaccctgactggactaagcagagttggcccttgagcaaagtttgagtaatcaagtttactggcaatgagtctgtatgaagggaacc

SEQ ID NO: 492662 - DNA, 201 bp, Homo sapiens
cttagaatctctaaaacgatgtctttttgtatgctaataattgactgatggcaagcagtccctaggtagcttcaggatgaggtctggtcactggaaagacygaggcttgattagagggttgggactttcagtccactctcaaccactgggaaagagaaagggactgaaggttaagttgatcaccaatggccaatgacgtaa

SEQ ID NO: 492663 - DNA, 201 bp, Homo sapiens
ttatcttgagaattgtcaagttggctgattgcataaccctatagctttaagtttaaatcactctcactgtgttccatggtagaagcatcccccaggaatakgccctctacacaatcagatcttagagttcagggggtaggggaagcacagatttccttggtagatcactgggagtgatagcaagtgggaccattcttattt

SEQ ID NO: 492664 - DNA, 201 bp, Homo sapiens
gggctgctacataatgattgggtctcattcctcttgtgtggctccaccatcctcaacacatagttccctatgtagtccaacgtggctgcttgggcttcagytatcacaactgcattccagccaagaaaaagagataaagaaggacacctcatatgagaaactgtgcttatctctttccctgacatccctttaacaagaact

SEQ ID NO: 492665 - DNA, 201 bp, Homo sapiens
gttattacccaggcaccatccatggggcatctttggtcagaggggttagaggccttaagcttccagcaaagtgagataaagcaaccaaggaaagttttgcyatgagggcctccagctctgtcactggatatctgtggcaaagttttccaaattaaatgtcttctttctgaatcaaaggcagcagaagcattcagcagaagc

SEQ ID NO: 492666 - DNA, 201 bp, Homo sapiens
tcgttagtttcatgctgtagctccatgggaaattaaggagtctgggtaccatttctagccagtcatggcagtactatacagcaagaagattaaaatgatcrcatccaagttcatttggtgagtgtggctgtcttacatcttagaatcccttggaggtggtgaaccccaaggaagaattgtgtctagcctagcactggagca

SEQ ID NO: 492667 - DNA, 201 bp, Homo sapiens
gcagccacaatggaaccaccacctgtcaggtattttaaacagtgacatttaaattccctctggaatttgatatgcataggtcataagaaaagatgtggcgmgaatggaccatttataaggaaataactaaagctaagtgtctcaatttggacaaaatatcagtccttggggagacatattgtattcctagcagagaatggt

SEQ ID NO: 492668 - DNA, 201 bp, Homo sapiens
ttagttattaatcatcctcaatttttcattgcctttctttactaatggtccccagtgacacccattcaaattccatagtgcttataataaccgtttccccsacacctctcaagcatttgagattttgcccctgccaatgtattcctttctccagtatcttatcccaattcacctctgcagacggttttaacaattgtgtga

SEQ ID NO: 492669 - DNA, 201 bp, Homo sapiens
actgtaactgggaaaagtggttacaaaagagacttttttttaaatctccaagttcccacagtctacctaagacagaaaacgcaagtaaaaggcaaaatatrtagttaagtgttgtgaggagtgatggagacaaaaggtgacaactgcagctgctggagacctggataggaaagaagggattcctggatcaagcagaaggaa

SEQ ID NO: 492670 - DNA, 201 bp, Homo sapiens
ggtcccatatacaaaggctagaaaatttaatgtcatcctggggcaagaccataaatgtatgcaactgtccatccatgtgaatggaaactgcttctcttctygcttcttgatttgaaaattagatgggctttatccagcacccatgtataatcttccagcttttatatatattagctgggcctttgccactcttttggcctg

SEQ ID NO: 492671 - DNA, 201 bp, Homo sapiens
cggctactgtggtttccaggggccagaggctcctctcccaactctcagacatgcaggtttcactaatcagcaatctctaggattactacttgcctaaatargaagcaaagtactttaggattattgagtcaattcctgtgtccttaaggaattttctgctctttgtactatgaatcagctgctttttaatgttatagtctc

SEQ ID NO: 492672 - DNA, 201 bp, Homo sapiens
cccaatgtgtttaacttgctgccaagtaggtgccatatcaaggtctccctcattattggtctctactgctggaagtttggatatttgttagcaaccgttawtattagtaatggaaagccagatccctggcttttgggcccgtgtatgtcctctacctctgccaccatggctattcatgagttccttgtaccagcgctggga

SEQ ID NO: 492673 - DNA, 201 bp, Homo sapiens
ctaatccctaaagtcctttactggtttatttccatcttaaggtgaggaaattgagactcagggcagttaagtcccctacccagggtcacatagcagtttgkggagacaggattcagattgcggtttgcctgactgtaagcttcatttccattattctctattccactgtcattcctttgagctgctctagtcagggtttaa

SEQ ID NO: 492674 - DNA, 201 bp, Homo sapiens
gccagctgagattggtacactgcaaatgtgatgtgtttcatcttcatggttccttgatttttttccccagctgcactaggtagaggagttagagaagctgrattgctggactcatcctggatggggggtttgtgggatggacactgcaaaaagctaatggcttaagagggctactttatagagggctaataaaagaatagc

SEQ ID NO: 492675 - DNA, 201 bp, Homo sapiens
gaaggttaagaatggccaccaaggggaatgggagagggcaatgaccaaggataacaaaagaacagttgaggtattctactggccagctgagattggtacastgcaaatgtgatgtgtttcatcttcatggttccttgatttttttccccagctgcactaggtagaggagttagagaagctgaattgctggactcatcctgg

SEQ ID NO: 492676 - DNA, 201 bp, Homo sapiens
ctcagatctatgaaaggacttggcctattgtggaagggctttatccctagatgtgtggggatggggctagggaaggtgttaggaagacaggaagagagagyggtatgttgaggtcatatcgtaaaaggccaggtgttctgaactcagaagtatgaatatcatactctgggctgccagcagtcactggaccactctcaatgt

SEQ ID NO: 492677 - DNA, 201 bp, Homo sapiens
tatgctgtcattataaattagtttgcttcttctagagttttatataaatgaatgtgtatacatcccccgcccccacacacacacatgtagtttctgtcackcagcataattaatttgggatttatccatgttattgtgtatatcaatatatcattactttttaattactgagtaatatttcactgtttggatctacaacaa

SEQ ID NO: 492678 - DNA, 201 bp, Homo sapiens
catactacacacacaactttttatcagcagaggattgatggcaaacagtttgttggagggagtgtgtgagtactagtgtatatatatatatatatatatatatttatttatttatttattattcacaagtgtcagtttactaccaaagttagaaactagctggtaagtgaaacctgttgtcataatttagagtgtctttgt

SEQ ID NO: 492679 - DNA, 201 bp, Homo sapiens
caattccacccaaaagaattgaaaagagggaattaaacagatacttgtacttgtgctgtggttattacagcattgttcacaataaccaaaggtggaaatawcccgagtgtccatgaacagatgaattgatttttaaaatgtgctgtatacatataatggaatattattcaaccataaaaaggaatgaagttctgatatgtg

SEQ ID NO: 492680 - DNA, 201 bp, Homo sapiens
atatgtgtctttttttctgtatacttttagatattctctttatcattggtgtcttaagcaatttggttatgagacttggtgtggtttccttcatgtttctwgtgctttgtgtttgtttggtttctaagatctgtgcctgggcctagttttcatcaagtttggaaaattgtcaaccattcgttttcaaatacttttggtctc

SEQ ID NO: 492681 - DNA, 201 bp, Homo sapiens
tttacttccatgcatgagtacttgctggaacttaataagtatgtaaacattgtttattgcccaacgggaacctgaaggttaattttacataaagacacaawcaatgtcaaagttttactgacactaacaaatgattatcagttaacacacaattcccaagatgtgaaatatctttttgttttggacttcatcatgatgtac

SEQ ID NO: 492682 - DNA, 201 bp, Homo sapiens
tgtggctcccatattggacacaggattttccacttttttatctctgggctccagagcaagtacctctacctctgagacatttgaaccctttgtaagcagcrgactgagaaacttcagactggtcaccatttgtagccagacagtaaatggcaagagagttgttacaaagaaagtgctagaagatgtgagggggaagaatga

SEQ ID NO: 492683 - DNA, 201 bp, Homo sapiens
accttatatggaaattcttccaaaaataaaccctgtcttggtggggaaaagctgtttaaagaaacatggtgaattactacaaagtactaggtgtgcctcamaatgcttcctcccctgatattaagaaggcttatcaccagttggctctgcaggtacacccagacaagaacccagggaacaaagaggcatctgaggagaaat

SEQ ID NO: 492684 - DNA, 201 bp, Homo sapiens
gacattagtgcagccaagaaacatgaaaaaaactcaacatcacagattattaggtaaatgcaaatcaaaaccacaatgagataccatcttacaccagtcasaatggcaattattaaacagtcaagaaacaacagatgctggcaaggttgtggagaaataggaatgcttttacactgttggtgtgaatgtaaattagttcaa

SEQ ID NO: 492685 - DNA, 201 bp, Homo sapiens
tcccccattttgtggccatagagaaaacattaccatatactgaggatagcagggcaaagggtggaatgagcctgagtcctgatgccatgactgaattagcmattccatcctgggatagcctacttcttaaacttctgaagcaagcatgatgtcctttctgtttaagacactcttaggtattcagttacttgcagccaaagg

SEQ ID NO: 492686 - DNA, 201 bp, Homo sapiens
tcaatcattgggttcagacttggtatgaaagaggagtcagaaagggactgataaccctggagaaagtggagttgacataaaaaaaatgggtttaatgagartgaggagtgagagacagatcaggatattgggctttcagtgttgcagagataggactcttttggttgatgacatgataagaagaggttgtaaaaggaaggg

SEQ ID NO: 492687 - DNA, 201 bp, Homo sapiens
ctctcctacagtcagcataaaggcctaggacaggcaggcctgcacaccttggcaatagctcaaggtgatttcatcttcctctgtttaggggaaaaccaatstgatcaaaataggccaaaaagagaggctggaagtacttgaaattcagcaggtaggcagcctttgtctccagacagctgtaaaaaccagaaacgtctgatt

SEQ ID NO: 492688 - DNA, 201 bp, Homo sapiens
cgtgtgtccggtgctcctgcagctcgttgcacccacggacgtgggctctcactgtggagtggagtgggggcagaagcgtgccctgccccacggagagcccsggctcgcctggggctgctggcagtgctcggggagcgggacggggtggtggcacgactcggcggggaccccgagaacgccacacctccaccctccactttc

SEQ ID NO: 492689 - DNA, 201 bp, Homo sapiens
aaaattatggatacaaacttgttaaggtgaaacttaaacatcattagctttcatggcaaatctggctttgaattagaccaattaaaacctcacaaattgaraataacttgatttacttcatcagcatctaataataccaagtattgaaaatatttgaggtgctttgatgcctgataatttttaacaattgaaggttactga

SEQ ID NO: 492690 - DNA, 201 bp, Homo sapiens
aaaaaaaaaaaaaaaattccaaaattatggatacaaacttgttaaggtgaaacttaaacatcattagctttcatggcaaatctggctttgaattagaccawttaaaacctcacaaattgagaataacttgatttacttcatcagcatctaataataccaagtattgaaaatatttgaggtgctttgatgcctgataatttt

SEQ ID NO: 492691 - DNA, 201 bp, Homo sapiens
gagcctaaagtttatgcaattctaacagccctccttggtaaaaaaaaaaaaaaaaaaaaaaaaaaaaaattccaaaattatggatacaaacttgttaaggkgaaacttaaacatcattagctttcatggcaaatctggctttgaattagaccaattaaaacctcacaaattgagaataacttgatttacttcatcagcatc

SEQ ID NO: 492692 - DNA, 201 bp, Homo sapiens
caaaatatgtaatcttaaaactggtcctcaagaagtatgctttcagtgcacaacacggcacaaaaccacttgagacgcagttgaacttttgtgaatagatwttttgtttttaatggcacttgtccatgggtatggcctgcttagctttcaagagtcaaaggtacctcaagaattttactttgctaagagctttggttttta

SEQ ID NO: 492693 - DNA, 201 bp, Homo sapiens
aatttcttgatttctcctttaatctctttgtttacccaaaactcattcaggagcaggttaatttcctgtacagttttgagtgaccttcctcttactgatayatatttttattgtgctgtggtttgagagtacagttggtataatttcccttttttttaattttctgagaattgttttatgctaattgtgtggtcgatttta

SEQ ID NO: 492694 - DNA, 201 bp, Homo sapiens
gttgctgcaagaggaggaaaaggataattgagacacatatgtcaggtcttctcatttcaaatttgttgacctaaatgactgtgataaatgctaccttgagmattttaaacaaatgtcatgctggactcctctcctcaaattcatttattccttctaaagtctcccagccttgacccacaaaattcttagatctctgatgtg

SEQ ID NO: 492695 - DNA, 201 bp, Homo sapiens
atattgaataaataaatctcttaatttctctctgcgtcagttctcttaaatataaaatatagagttgttgtgaggaatcaaaaggaaacagttataaattrcagagtgaaacagcagtgataaactatatatattgcaaactttttttcaagtaagtaaacagaagctcagagaagtgaatacttaaaaatgacatgagaa

SEQ ID NO: 492696 - DNA, 201 bp, Homo sapiens
attgtaggatgtttctcagcatccccaccttctaccaatgatatgccagcattacccctctccagccttgacaatcaaaaatgtctccagacattgccaartgttccctgaggggaaaaattttcctcaattgagaaccacaggctaactcttacctgagtaatgtgtgacagggttgcttctgggcatcagaaagaagtt

SEQ ID NO: 492697 - DNA, 201 bp, Homo sapiens
tgacctcttggaagatgtcaggccattgagcaagatttatcagagggcaagatttgtcctgtgttcctgtggtatggagaagcagctggattaaggtggtkgtgtttgcctaacctccttttccctgtgcaggcaccccactgccacagaacaatgatctccattaagttttcatctgctgcaattatcttcatcaaattc

SEQ ID NO: 492698 - DNA, 201 bp, Homo sapiens
ccaggacagtatctatctttgtggtgtggtctcatagcacagtattggaaactgtatggctgtggcaactagacttggatgtggctttctagcagcgtgamctcttggaagatgtcaggccattgagcaagatttatcagagggcaagatttgtcctgtgttcctgtggtatggagaagcagctggattaaggtggttgtg

SEQ ID NO: 492699 - DNA, 201 bp, Homo sapiens
ccagaggaaataatttacattaaatgtcaaatggtttattagcagtgactaagccagtgagagtaatcatcatctgaacccaaaaaacatgaaaggcctgycccagaagacccatttgtgagcctggccacacccttgtgcaggcactgccatgacaactgtctggatttgtgttttgcagttccatggaaaatgggagac

SEQ ID NO: 492700 - DNA, 201 bp, Homo sapiens
cttattttgttattacaattgaatattctttttaaaatgttttattttaggtttgggggtacatgtgaaggtctgataactattcttggtgaggaaaggcractaactgaagtcaaccacagggagattgaattcagatgttttctgggggcacttaaaagtgtgttcgatgggactctgtgttcactaccagaagtgagc

SEQ ID NO: 492701 - DNA, 201 bp, Homo sapiens
tctcactactgcctgtttctttaatctgtcaccataccttgttcagagtttctgaacaaaaacatgcacatagtaatctgaccattagaggctttctctgrttctctgttgtcattctaaacaataactatagctattagttaaggagagcttagtgtgccaagtactatgctaagtactatgctaaatgccttaataaaa

SEQ ID NO: 492702 - DNA, 201 bp, Homo sapiens
aaggattttgaattttatcaaacactttttttatcttagacgatcgtgtgatttttatccttcattctgtaaatgtgatatgtcacattaattgattttcrtatgttgaaccgtcctaggaataaatcccactaggtcatggtgaatgatctttttaacatactgttgaattcggtttgctggtattttgttgaggatttt

SEQ ID NO: 492703 - DNA, 201 bp, Homo sapiens
actttgggaggctgaggcaggcagatcacttgaggtcaggagtttgagaaaagcctggccaacatggtgaaatcccatctctactaaaaatacaaaaattwtccaggcatggtagtgggcacctgcaatcccagctacttgggaggctgaggcaggagaatcgcttgaacccaggaggcagaggttacattgagctgagat

SEQ ID NO: 492704 - DNA, 201 bp, Homo sapiens
aatgatgcttgtccttcttagcatttagcataacttgccgctgtacatttacttgtatgattattgatcagtgtctactccccacaggactgtaaggcccktaagaataagggtggtgtctgttttgctctccagtgtattcctagttggagagaggagaggctttgtcctgagggacctccaaagcaaagttaggctatg

SEQ ID NO: 492705 - DNA, 201 bp, Homo sapiens
tttaaacaaacatacgtgaactggtgtgaagctgtaaaagggaccattatgtttccgattcagaatatatattcttctctcactttctaagaattaaacayaagcttttctcccttattgattagttgctgaagtaaaggaaccctgcagccttcccatgctatctgttgacatggaaaacaaggaaaatggctctgtcgg

SEQ ID NO: 492706 - DNA, 201 bp, Homo sapiens
ctctctaaacattcttctgtctcagtttttaaactgcccaacccttacagtggggaatttttcccaggccatctcctctttcaaactcttctcactttgtrtgtttttctggaatggtccttcttccctgtggctttacctaacaccaatctgctgtagcttcacctaccaccaatctgctgatgggccccaaatctatct

SEQ ID NO: 492707 - DNA, 201 bp, Homo sapiens
catgggcctattttttatgcatctttgttccccagtaattcagaaatccctaatttcttgaaatgtctttttcttctgcttccatgacactatcatccctygtcttccttctatctctctaaacattcttctgtctcagtttttaaactgcccaacccttacagtggggaatttttcccaggccatctcctctttcaaact

SEQ ID NO: 492708 - DNA, 201 bp, Homo sapiens
cagtgtaatgggagttttagagcaattcccaggggttaaagtggtgcttgaggttcagcagcatttctagaaatgtttgttcatttgctaagtaagaatgmatatagtccatcgggagaaactcagtcacacctcctcctgggaagagtccttttgggagtggcgtgactgaacgtgtgaataagcacatgtgtttgaggg

SEQ ID NO: 492709 - DNA, 201 bp, Homo sapiens
tgcaaaagaaagatttttcacatttcactttgctagaacataatcttttccagcttttagtgtcctcctacacacttagcagattgtggcttatctctcaragaatcatacatcctaccctttagctatctaagggaaagaaactcactgcgaattaatagaaaataagcccaattccttacctacgcatcaggtgtcaca

SEQ ID NO: 492710 - DNA, 201 bp, Homo sapiens
tacgaccttttgtaatctctccctcctgtccttttctgcccccatatcccctggcaaccactgttatgctgtcattataaattagtttgcttcttctagarttttatataaatgaatgtgtatacatcccccgcccccacacacacacatgtagtttctgtcactcagcataattaatttgggatttatccatgttattgt

SEQ ID NO: 492711 - DNA, 201 bp, Homo sapiens
cccctcttgaaactactgccacaattaagatgacaaatatttccatcacttccaaaatttccttacgaccttttgtaatctctccctcctgtccttttctscccccatatcccctggcaaccactgttatgctgtcattataaattagtttgcttcttctagagttttatataaatgaatgtgtatacatcccccgccccc

SEQ ID NO: 492712 - DNA, 201 bp, Homo sapiens
ttcttgataagcctataaaaaatgatattttttagttgcttataggtaggttttctttttactcttccacagaaaagaaaataatagtaataataataagmcaatgtagtgtggtgttgcagagtatcattgtgagtgttttgttttgttttctgagatgcttagaaaatggtgaatgtgtaacagtttccaactgaagtg

SEQ ID NO: 492713 - DNA, 201 bp, Homo sapiens
agaaaaaaaaaaaaaaaaaggagcattgttatttacactagaggattttatttgtactagaatgtacagatagaaagaggaaaaggaaaggaggctgtttrtaagatcctttgttttcagaaagatgggttgggaagacattccaggcagaggtatgccaaggacagaatgctgtatgatttcagaggaaaaccatttgcc

SEQ ID NO: 492714 - DNA, 201 bp, Homo sapiens
tctgaatagttgatatatcctttttgacagtttttgtgcacatactctatgtatccacatgtatacataacacaagaatatatacatatattcacatgcaytaaagaatgtacatatatatgggagcatacacaaaaatgtatacatatattcaaagcacacatacaaataagcttttattgaacaaatgggatcatagta

SEQ ID NO: 492715 - DNA, 201 bp, Homo sapiens
ttgtgcaggcactgccatgacaactgtctggatttgtgttttgcagttccatggaaaatgggagaccacctgatcctgcagactgggccgtgatggatgtygtcaattatttccgaaccgtgggatttgaggagcaagctagtgcttttcaggaacaggtaacttggtctagagaaacacgtgatgaacatgtgatgaacc

SEQ ID NO: 492716 - DNA, 201 bp, Homo sapiens
tcttgtgtaccattgcctcatatatttcatcttttttattaaattattgttttagttagaagagtaaatattgcccccattactccatcttgactggaagyagaagttccatttaatttatatagccacaggttcctagtggctagcactggacagggcagagttagattataatgcagactccagaaagggataacatgt

SEQ ID NO: 492717 - DNA, 201 bp, Homo sapiens
aaggaatttatgcccaatgatcaccacagcctggagatcacaggcacagctgaccaaagaacaaaaagccgaggaagggcagaattgagtatagagtcggyaaggcagcacaaagtgttcacatggctaataagacagccttccagtgcagcacagccatcccagactggagatcatgcaagacatgtgcgggacaggtca

SEQ ID NO: 492718 - DNA, 201 bp, Homo sapiens
ttaaaaacctatcacataataaaagaagcagagaaaaactacactagtgggagggacagctgtgggagtgggtggtgggggaagggtatgcatgcagattctagcttatggtagggtagaaatttctaaaagagctttagcaaaggaatgagatacctaatcaaaaagcaagttctgaaagttcagaggcctaattactcc

SEQ ID NO: 492719 - DNA, 201 bp, Homo sapiens
agtagcataatcacagctcactgcagcctcaacctccaggacttgagtgatcctctcacatcagcctcccaagaagctggaactacaggtgtacaccaccrtatctggctaacttttgtagtttttttttagagatgggatttcactatgttgcttaggctggtctcaaactcctgggctcaagcgatcctcccaccttgg

SEQ ID NO: 492720 - DNA, 201 bp, Homo sapiens
accacagcctggagatcacaggcacagctgaccaaagaacaaaaagccgaggaagggcagaattgagtatagagtcggtaaggcagcacaaagtgttcacmtggctaataagacagccttccagtgcagcacagccatcccagactggagatcatgcaagacatgtgcgggacaggtcagcgctcctttgcaggaccctga

SEQ ID NO: 492721 - DNA, 201 bp, Homo sapiens
ttaccaacattgaattcaaaggggttttgcataaattgataagcaacaataagcttatcaatttcaataaatctgcaaattttcttgaagtttattcatgwtagaaaatgtatgaaattattattgtatattgtattgcactctgaaaagttgcaattttagcctaaaattttgttcctctttagctaggtcacaagtcag

SEQ ID NO: 492722 - DNA, 201 bp, Homo sapiens
acagggacaaatccaggttctgtggagcctaaagtttatgcaattctaacagccctccttggtaaaaaaaaaaaaaaaaaaaaaaaaaaaaaattccaaawttatggatacaaacttgttaaggtgaaacttaaacatcattagctttcatggcaaatctggctttgaattagaccaattaaaacctcacaaattgagaat

SEQ ID NO: 492723 - DNA, 201 bp, Homo sapiens
attccaaaaggcctcatgacttataaaagtttaagaaccattgctctgtgtaattggtgtccaaattgttaggatcactttgatcaaactgactttgccayggtctgacaactagccacgaggcggcaggagggagaagacttggtcatttcagtgtacaactgcaatggaacagtattgtaaaagtgaaggctctaatgt

SEQ ID NO: 492724 - DNA, 201 bp, Homo sapiens
ttgtaagtgggagctgaagaatgagaacacatcgacacagggaggggaacaacacacactggggcctgtcaggggtgggttggggagaaggagagcattakgaaaaatagctaatgcatgctgggcttaatacctaggtgataggttgatagtgcaacaaaccaccatggcacacatttacctatgtaacaaacctgcaca

SEQ ID NO: 492725 - DNA, 201 bp, Homo sapiens
gcacaccaatcgagagctggagtggtcaaatcaaagggctgctgctatgataaggcctacttctgcctgcctaccctcaggtacattggccttctttaaaygttcatgattactgacactcacccctttggttgtccttcctcaggcttgtatggtttgagaagttataaaagtgaatcgatttcttagaataatactctg

SEQ ID NO: 492726 - DNA, 201 bp, Homo sapiens
tgggctcaagcgatcctcccaccttggcctcccaaagtgctggaattataggcgtgagccaccatgcccagccaggaataaatctttacctggctctacayaagaaaaatcccctttctacacatgtcttaaaatgtaaagggattacttgtctgcaagtaatgttggggagagctctcagggattttaaatgactcatgt

SEQ ID NO: 492727 - DNA, 201 bp, Homo sapiens
tttcctttttactctattgaatatttccctggctgtatagaagctttttagttttatttagccctgcttgtttatttttgcttttgttgcctatgctttttggtgtcatatccatgaaactattgccaaaactaatgtcttgaagctttccctctgtgatttcttctagaaattttacagtttcaagtcttatgtttaagt

SEQ ID NO: 492728 - DNA, 201 bp, Homo sapiens
ttagaataatactctggaaaaaatattagcaggaataatttcattctttctctttgtttctttgttgtttctttccctttctttctttcttttttcttttytttctttctttctttcttttttttcagggtcttgctctgtcacccaagccagagtgcagtagcataatcacagctcactgcagcctcaacctccaggact

SEQ ID NO: 492729 - DNA, 201 bp, Homo sapiens
ctaatatttcatgttttggatgctattttaagtggtattgcttttttaatttgaattttcaattatcttaacatatacaaatacaattgattttttatatygatgttatatgccacaaccttgctaaactcacttattacttctagtagctttttagtagattacaccacattttgtaacatagacaattatgtcttgtga

SEQ ID NO: 492730 - DNA, 201 bp, Homo sapiens
aacttagaaaagtgttttaccaataatcagcactcgattaatcagcacttattagccataattatcattgataaataataatcactcgtcaaattttgcawtaaaggataaagttactgacagagataaatacctagaatgcacaccaatcgagagctggagtggtcaaatcaaagggctgctgctatgataaggcctact

SEQ ID NO: 492731 - DNA, 201 bp, Homo sapiens
taggtgtcagagccccattgtgtagaatgtagggaatggtgcagagatctcatacggtaaaatacaaagggtgctctcttctggagagtgggcaggtggcygaaaggacaggctttgggctctgcagtcaggcagcccaggcggaatccttgttctgccacatattagctctgaacagaggcaaatttctccatctataaa

SEQ ID NO: 492732 - DNA, 201 bp, Homo sapiens
ccttcaggtctcagatgccacttctcccagggtccaccccagcccttcaagtctggaatagctgccccttttaggtgctctcaaaatatttgttattgccytatcagaatatttatcaaattgtattgcacctgcctctttatgtgtctgattcattcaaaaacagtaaactatgaaagcaggaacaagtttgatcttggt

SEQ ID NO: 492733 - DNA, 201 bp, Homo sapiens
tgatagccacccttcttatccccattcctgttcagctcaccagcataatatctggccacacgtcattgcaaactctgctttagctatgctgatctaatcayggctgcccaggtgttacatgctttttctgtgtgttggcctttggatttgctattccgtctttcttgaacactttctcctccttactacccaactaccaac

SEQ ID NO: 492734 - DNA, 201 bp, Homo sapiens
cccattttgtggccatagagaaaacattaccatatactgaggatagcagggcaaagggtggaatgagcctgagtcctgatgccatgactgaattagcaatyccatcctgggatagcctacttcttaaacttctgaagcaagcatgatgtcctttctgtttaagacactcttaggtattcagttacttgcagccaaaggcat

SEQ ID NO: 492735 - DNA, 201 bp, Homo sapiens
caaaatggagtcacttatgctaaattccacataatcaaattgaagctttaaggaagcagatagataccaaaacagaccagtttttcctgaaaacaggagaytccagtctatctgagtcagtgcgataaggaagtcccctctgctttaactcttactaaaaaagtaatctgaaacccgatgttaaccaatcagttttttttt

SEQ ID NO: 492736 - DNA, 201 bp, Homo sapiens
aattatttttataggtggatgaaaatggatattgggtggttctagatgctttgttttcaaaaggccacataaacaaaaaaacaaaaacaaaaaaaaaaaaacaaaaaacttgcatcatttaagctccctgaaaaattgttatgttgagttaagggaaatgtgctaagcaaaatgcatatacatttttattggtccccaaag

SEQ ID NO: 492737 - DNA, 201 bp, Homo sapiens
ctcatttcttctctcatccccaattttaggtattattttagccaaagatttttttgtttgctgtaggccagtgggggtcatgatttttttgaaattctaawaaaagctattgactttctctgcagacaaaagctcacatttccacatacaaaacttgcagagagttggtggactcataatttccctcttcctcctcctcaa

SEQ ID NO: 492738 - DNA, 201 bp, Homo sapiens
ctggctagccacatgcagaaaactgaaactagaccccttccttacaccttatacaaaattaactcaagatggattaaaaccttaaatgtaaaaccccaaastataaaaaccctagaagaaaatctaggcaatactattcaggacataggcatggacaaagatttcatgacgaaaacatcaaaagcaattgcaacaaaagca

SEQ ID NO: 492739 - DNA, 201 bp, Homo sapiens
cacccaagtcacctcttgaaggctttgctacttagaaatttcttttaccagataccctaaatcatctctctcaagttcaaagttccacaaatctctagggmaggggcaaaatgccaccagtctctttgctaaaatataacaagagtcacctttgctctagttcccaacaagttcctcatctccatctgagaccacctcagc

SEQ ID NO: 492740 - DNA, 201 bp, Homo sapiens
acattgtcagggtgcaaattttctgaacttttttgctctgtttcccttataaaactgaatgcctttaacaacacccaagtcacctcttgaaggctttgctrcttagaaatttcttttaccagataccctaaatcatctctctcaagttcaaagttccacaaatctctagggaaggggcaaaatgccaccagtctctttgct

SEQ ID NO: 492741 - DNA, 201 bp, Homo sapiens
aaatgggattttcatttctatcacattgtcagggtgcaaattttctgaacttttttgctctgtttcccttataaaactgaatgcctttaacaacacccaartcacctcttgaaggctttgctacttagaaatttcttttaccagataccctaaatcatctctctcaagttcaaagttccacaaatctctagggaaggggca

SEQ ID NO: 492742 - DNA, 201 bp, Homo sapiens
ccaagaagttgttcatactacttcctttcatatcttgtggactggaagtcaatcacattacttgaaatatttcatgtttttattggaaaccatgagcccartcaaaactcaaagttccattattctgtagataaaggaaagtggatattgagggacaacttgctgttaccgatgtcagctgaccactaaacactcatagca

SEQ ID NO: 492743 - DNA, 201 bp, Homo sapiens
cgaccattttttcaattgagttattagtttttttgctatagaattgtaagcattccttatatattttagaaagtaacctcttatcagatatatagtttgcragtattttctctcattccataggtttcctttttactctattgaatatttccctggctgtatagaagctttttagttttatttagccctgcttgtttattt

SEQ ID NO: 492744 - DNA, 201 bp, Homo sapiens
tcttggtgaatagcattgctgtgaatatgggagtactaatatctctttgagttcctgatttcaattcctttggataaatactctgaagtgggattgctatrtcacatagtagttctatctttaatttcttgaggaatctacagttccatagcagcttccccattctgcatttctaccatttctaccatagtatacaaaggt

SEQ ID NO: 492745 - DNA, 201 bp, Homo sapiens
agtggtttaagccaagcaagggaactgtgagaatgaccagggtaacttaaacaaaagatcttgcccagcctctctgctccacctcccagttttctgatttrgtatttaggatgatggcgggagagactatgaattttggggtgggcataatgtctttctattcatatgtaactaatatagtaccgggtactcatagattgt

SEQ ID NO: 492746 - DNA, 201 bp, Homo sapiens
ttcaacttggaagcaaaagcatattgatttcaaaactatgtctgttcaagttaaatcaatttgctaacacatgtcaatattaccaacattgaattcaaagsggttttgcataaattgataagcaacaataagcttatcaatttcaataaatctgcaaattttcttgaagtttattcatgatagaaaatgtatgaaattatt

SEQ ID NO: 492747 - DNA, 201 bp, Homo sapiens
attcacaggcgtgatcccactactgatcagtacaggagtttcatctctttttgataaagaagactgaggatcccacacaggtgcacactgttttgtgctayagatgtacaactaataaaacaaatccttgtcaatactaattgtattttaaatgaatcctagctgcttatacacattgagggcaaatcgctatataaagct

SEQ ID NO: 492748 - DNA, 201 bp, Homo sapiens
ctacatactacacacacaactttttatcagcagaggattgatggcaaacagtttgttggagggagtgtgtgagtactagtgtatatatatatatatatatwtatatttatttatttatttattattcacaagtgtcagtttactaccaaagttagaaactagctggtaagtgaaacctgttgtcataatttagagtgtctt

SEQ ID NO: 492749 - DNA, 201 bp, Homo sapiens
caatttggatttactgggagaatagttcaggaatttcagatcaagtccaaaagcattaaggaatctgttagtgaaagagctctttatctacataaaagtcyatcattttgagatcagcactggtgaaagatccacatgcctgacccatgctcaaaaaatactgctcaaaaatatttaattggttcctagattactattgtt

SEQ ID NO: 492750 - DNA, 201 bp, Homo sapiens
cccggcgtgccgcgcgcgtccggccggctgcaccggggctttgcgcgtggcggccgccgagctccgcgcggggcaaacctcccggcgcggccatgcggggrggtaagtgatctgcctgtgcgcccagggcgtgggaaggcgcccgccctctcctctctccaggatgaaaggaaacgaagaatgccgcaatgaaaaccgctc

SEQ ID NO: 492751 - DNA, 201 bp, Homo sapiens
cattttgagtgaaagtcagtaaaactccaagccaccagcagtttctgcctataataattagtgtttgggatagtattctgtctgctatacctgaacccaaygacaccagttgagatacacagtaggtagtgggtgaagtcactgaggttgcaccagatagacttgagcttgaatccagtcccgacatttacttgacatggg

SEQ ID NO: 492752 - DNA, 201 bp, Homo sapiens
caattgtcatgaggttgaaagtgacttgcacatggtgtcagtaaatgttagctcttattattatctgacctgccaatttgaccaaaaaaaaaaaaaaaaargatacttcaaatcagttccatcagtaagtggtagggagacatccttgtttatctctttctttttttcatttttagaaacaggatctcactatgttgccca

SEQ ID NO: 492753 - DNA, 201 bp, Homo sapiens
ctttcaaacgatttttttaaagaatgcagtacctttttccatagccccatctatgtttgctgggtcattctgattagcaagagaaaggttcagggtaaaawtaggagttgcagaaattatattgcaatgtttgttcatttaatgaattatgggtatggatttcatgagaaaacatgagaaaagaagctttccagtctacat

SEQ ID NO: 492754 - DNA, 201 bp, Homo sapiens
actcatgatgttctctttcctgatgaattgctttttagaactagacaagcagagaatagagtctacctcaagagaaaaaggtgtttatctcacttttttaytagagctcccaaatgaagttaataatcaccatcaccaggtgagactctcgtttttaaaagaaacccattttgcaggagaggatgtgtcagtggatgagca

SEQ ID NO: 492755 - DNA, 201 bp, Homo sapiens
atggcagcaggcaaaaagagagagagcttttgaggggaactcctctttttaaaaccatcagatctcctgagacttattcactatcatgagaagagcatgakaaagacctgccctcatgattcaattacctcccaccgggtccctccaacaacatgtgggaattcaagatgagatttgggtggggacacagccaaaccatat

SEQ ID NO: 492756 - DNA, 201 bp, Homo sapiens
atatatacttaggatagttacatcttcttgttgaattgagccctttaccattgtgtaatgcacttgtcttttttttaaaatcgttgttggtttaaagtctkttttgtctgaaattagaatagcaaaccctgctttttttctgttttccatttgttaggttgatttttcatcatccctttactttgagcctgtgcgtgtcat

SEQ ID NO: 492757 - DNA, 201 bp, Homo sapiens
ttattcctgattcaatttcagaactcattattggtttgtttagggcttcagtttcttccttgttcaatcttgggaggctgtgtttccaggaatttatccayttcaactaggttttctagtttgtatgcatacaggtgtttgtaatagtctctgagggttttttaaaaaatatttctatggggttgatggtaatgtcccctt

SEQ ID NO: 492758 - DNA, 201 bp, Homo sapiens
tgcaagccatccccactctggggccccgctcagagagtgttgagggcaataaatgcctttttaaactgccattgaaaatcttcaagtgttctaggcaggckgaactaaccagccctcccttacgtaaatacgtcctcaacagcactttgttcacccctcgattcgaatattcctcagagctagctgtttccacatctggtt

SEQ ID NO: 492759 - DNA, 201 bp, Homo sapiens
tcaaaatgattttggcctcatagaatgagttaaggaggagtccctcctcctaaatttttgggaatagtttcagtaggaatggtaccagctcttctttatamatctggtagaattcagctgtaaatccatctggtcctgggctgcttctggttggtaggctttttattcctgattcaatttcagaactcattattggtttgt

SEQ ID NO: 492760 - DNA, 201 bp, Homo sapiens
ttgcagctttctgcagaaagaaaaagttttaacctgattatggtggctagtttttccactcagctgcagccaggtgattagaattcaagctgatagcaacycttggtcattcctggaaagaacaggatataaagagaagtccgttttcttttcatgatcagcacagccctatacttggccacttgacttccacctccctgg

SEQ ID NO: 492761 - DNA, 201 bp, Homo sapiens
gtctatgtgtaccatgctattttggttactgtagccttgtagtgcagtttgaagtcaggcaatgtgattcctccagcttctttttgcttaggattcccttsgctgtttgggctcttttttggttccatatgaatgttagaatagttttctccagttctgtgaagaatgtcattggtggttttatagaaatagcattgaatc

SEQ ID NO: 492762 - DNA, 201 bp, Homo sapiens
ttcataattagtgtcaaatgggagaaatttgatgctgaagaaattgtgagttataattcaaatagtgcagaggtttgggggtcagtttagttcaaattagwgactcaatcataccaatgacttacagctccgttaagcttgtagtttctcactgatacttgatagaaagagttctgaagattcaatgccatatgataccta

SEQ ID NO: 492763 - DNA, 201 bp, Homo sapiens
ttatcttccaggatttttatacttttaggctttacatttaagtctctaaactatcttgaattgatttttatatatggtgtaagtaatgggtccagtttcartcttctgcatatggctagccagttctcccagcaccatttgttgaataggaagtcctttccccatcacttgtttttgtcaactttgtcaaagctcagatgg

SEQ ID NO: 492764 - DNA, 201 bp, Homo sapiens
gagccccctgcctgaaaaataccatctccattggtcagaaacagagattgaataatcatttttagagttggctcctatgtatctaaaaacctttgtattcmttaaacatttcctattgaaatgcaaataaatatcccttaaagaagtgactccttaagcctttgtaaggtactatgataatctacttcccatggtaagcct

SEQ ID NO: 492765 - DNA, 201 bp, Homo sapiens
atctggctttgaattagaccaattaaaacctcacaaattgagaataacttgatttacttcatcagcatctaataataccaagtattgaaaatatttgaggkgctttgatgcctgataatttttaacaattgaaggttactgaaatgcttaaaatattttgtagcataatgaacaggggaagtggcaactcaatctctgctg

SEQ ID NO: 492766 - DNA, 201 bp, Homo sapiens
ctatcagagagaacaatagccagtggttagtggtagatctgctgattaaatatgtcctgattaaagaagatattctgtgcagagtgtcccaggataatgcrgtgaaactggaaatgatccttgtttaactttccgaagtacttactggaagctacatctgaagaaggagcaagagaaagataccaacaatgccttaaagcc

SEQ ID NO: 492767 - DNA, 201 bp, Homo sapiens
atactacacacacaactttttatcagcagaggattgatggcaaacagtttgttggagggagtgtgtgagtactagtgtatatatatatatatatatatatwtttatttatttatttattattcacaagtgtcagtttactaccaaagttagaaactagctggtaagtgaaacctgttgtcataatttagagtgtctttgtg

SEQ ID NO: 492768 - DNA, 201 bp, Homo sapiens
ctcaaaaaatacataatgacataatttagtttcatgtaatgaaactttgtaaacagaatacatacatgtgtatatgtaaagaatttcaatcaaatgaaacrttatcctattggatagactaggcaattcatcagctcacctgaaatcagccaggaggagcaaggacaagatgcgcacagggtggttttcctcatggatttt

SEQ ID NO: 492769 - DNA, 201 bp, Homo sapiens
tagaacagggacaaatccaggttctgtggagcctaaagtttatgcaattctaacagccctccttggtaaaaaaaaaaaaaaaaaaaaaaaaaaaaaattcwaaaattatggatacaaacttgttaaggtgaaacttaaacatcattagctttcatggcaaatctggctttgaattagaccaattaaaacctcacaaattga

SEQ ID NO: 492770 - DNA, 201 bp, Homo sapiens
aaaagtaggtaaataaagtctgtatttctgtttttccatgcttcagtatactcctatcagagagaacaatagccagtggttagtggtagatctgctgattraatatgtcctgattaaagaagatattctgtgcagagtgtcccaggataatgcagtgaaactggaaatgatccttgtttaactttccgaagtacttactgg

SEQ ID NO: 492771 - DNA, 201 bp, Homo sapiens
aattagaacagggacaaatccaggttctgtggagcctaaagtttatgcaattctaacagccctccttggtaaaaaaaaaaaaaaaaaaaaaaaaaaaaaawtccaaaattatggatacaaacttgttaaggtgaaacttaaacatcattagctttcatggcaaatctggctttgaattagaccaattaaaacctcacaaat

SEQ ID NO: 492772 - DNA, 201 bp, Homo sapiens
gatttctaattagaacagggacaaatccaggttctgtggagcctaaagtttatgcaattctaacagccctccttggtaaaaaaaaaaaaaaaaaaaaaaawaaaaaattccaaaattatggatacaaacttgttaaggtgaaacttaaacatcattagctttcatggcaaatctggctttgaattagaccaattaaaacct

SEQ ID NO: 492773 - DNA, 201 bp, Homo sapiens
caccacagcctggagatcacaggcacagctgaccaaagaacaaaaagccgaggaagggcagaattgagtatagagtcggtaaggcagcacaaagtgttcayatggctaataagacagccttccagtgcagcacagccatcccagactggagatcatgcaagacatgtgcgggacaggtcagcgctcctttgcaggaccctg

SEQ ID NO: 492774 - DNA, 201 bp, Homo sapiens
gaagtccgttttcttttcatgatcagcacagccctatacttggccacttgacttccacctccctggctctgctaaaagtattctgggaagtcaccaatgaygcctatttactgactacatagtttctcatcagtcctctcggaaccccaacttcttaactctcctatggcagaggctaaatctacttgctcttcctcctgg

SEQ ID NO: 492775 - DNA, 201 bp, Homo sapiens
gctcagggagagcacctggatatcacagagggtcttctgcacagaggtcaagtattcacctttgtcatagggcccagcagatttctccatgacaaggtccygaatggtgtccctaaaacacaaagaaggtcactgaggatactgaaaggaattttagtaatgtgttaggaagctaagaagcagtgacctgtctgtccccca

SEQ ID NO: 492776 - DNA, 201 bp, Homo sapiens
accagtcagtacttcaggctgtctagtcagacacactgagtggtttaacattctgccatggcttaaaaaaaaaaaacaaaaaaacaaaaaaacaggagaartgtttctccaagacaaagggttgttttcaaaaaattaatttccacatcttacctctgtaattgcaattagaaacataaatactcttccatgttttcctgt

SEQ ID NO: 492777 - DNA, 201 bp, Homo sapiens
tcatggccccttcaggagcagaatcatagctctgaaaagagaagctccgttgtgtactgaggatatccatccatattcagctagctttcaaatggggtaaygatattttctgcatagattttcttttaaattggttctttgtttctgaagaaagaattttttttaacttcatggttttatttataataatttgtttctgaa

SEQ ID NO: 492778 - DNA, 201 bp, Homo sapiens
aacaaaaacaaaaaaaaaaaaacaaaaaacttgcatcatttaagctccctgaaaaattgttatgttgagttaagggaaatgtgctaagcaaaatgcatatwcatttttattggtccccaaagacttagagaagttggtttgaggcattggtgaattccaaatggatcctgtccccaatccaaaatgagtgttcaatgacat

SEQ ID NO: 492779 - DNA, 201 bp, Homo sapiens
agacaggatatcagaatcagaaggaatttaagaaagtaattgctactccccgccgcccccacatttgaacctctgattcagactctgcagaggagattgawtgaattgatttaaaggtgaggtcacaaactggccacttttcagtggaatctaagccaacatgttttactttggccaatgcagtatgtgtgtgttttaaaa

SEQ ID NO: 492780 - DNA, 201 bp, Homo sapiens
agtgtatctttgatcttttctgtttggttgcttcttcagttgggattaaggattaaggtctcctggaaaccagggaaagaaaattaagcattttttggggmaaaaactttagaggtagaaattatacaaatctatgtgtggatttatcttctttttaaagtgaatcattcgagtagatctcatttcttctctcatccccaa

SEQ ID NO: 492781 - DNA, 201 bp, Homo sapiens
ctggcaaccactgttatgctgtcattataaattagtttgcttcttctagagttttatataaatgaatgtgtatacatcccccgcccccacacacacacatrtagtttctgtcactcagcataattaatttgggatttatccatgttattgtgtatatcaatatatcattactttttaattactgagtaatatttcactgtt

SEQ ID NO: 492782 - DNA, 201 bp, Homo sapiens
ctgtacaaaaactacatcaccgcccgtgttttctgtcatcctatttcctctgaagtccaagtgaagaggatggtgtgcctttgcttccatctggattccawgactccctgccctgtcttgccctcgaaaatctgaaggtctaagaataacctccattccgtattgaaggccacagaaatgaatacattcctctcaactaca

SEQ ID NO: 492783 - DNA, 201 bp, Homo sapiens
taagaagcagtgacctgtctgtcccccagaaaacaatgttattgatgtttttagaagatattagtatcttgcaatgccaaaaacaaaacacctcacttccmattcccctacacacacacacacacacacacacacacacacacacacatacaccattcaacaaacatattgagcatcactagactgtcttcatagtttggc

SEQ ID NO: 492784 - DNA, 201 bp, Homo sapiens
gattcgccctctggaagacagatctcgagaagagatttgcccacgttcccgaagtagtctcagggctatttggacaggaaattctggggaatgcatgggcstctgcagagtatgttgctgtggccccactgattcttcacctagtggagggaggcacagccagaggaaggcctgaagggggcctgtagaatgctgagccat

SEQ ID NO: 492785 - DNA, 201 bp, Homo sapiens
cttgttcagccactcaggtgcctttacgtagagccctgacccaaaggaacttaggccttcctgactccaagtccccagctgggctccatgagggagctgcragtctgacttcctagagggaagaaccctgtgggcgcagccccccagcatgctgggattagtgcagacctgaggtgtcgggggccctcaggagccctcctc

SEQ ID NO: 492786 - DNA, 201 bp, Homo sapiens
atgaacagcctaaacatcagtcagatatctgtggtcagaactttcactcaaatttgtttcagttagaccacaaatgtgcagctatgttggatttggtttgyagtactaaacaaattaatatagggcctgaagtggtacaaagagagtgtgtgccaacagaatatcatgaaatacaaaaccagtgtttgggattattttcct

SEQ ID NO: 492787 - DNA, 201 bp, Homo sapiens
agacaagttcaagacaagcgtgtctttctataaaaagcattgaaaacgaaggaaatgagatcatgtttcaatttattaaagcggggaagagcgttctgtgsttagttcgtgtctaggatttgagtgccttactgaatgtatttagcaaacatgtagcaatctgttctctcactgtgattgtagaagaagctcatgtaaaat

SEQ ID NO: 492788 - DNA, 201 bp, Homo sapiens
ctctgtttagacaagttcaagacaagcgtgtctttctataaaaagcattgaaaacgaaggaaatgagatcatgtttcaatttattaaagcggggaagagcrttctgtggttagttcgtgtctaggatttgagtgccttactgaatgtatttagcaaacatgtagcaatctgttctctcactgtgattgtagaagaagctca

SEQ ID NO: 492789 - DNA, 201 bp, Homo sapiens
tttccttgattacaactatacatgataatggattagtttatataaacctctgtttagacaagttcaagacaagcgtgtctttctataaaaagcattgaaarcgaaggaaatgagatcatgtttcaatttattaaagcggggaagagcgttctgtggttagttcgtgtctaggatttgagtgccttactgaatgtatttagc

SEQ ID NO: 492790 - DNA, 201 bp, Homo sapiens
tcatttcctattacggcagctcagaagatagctctaaatgctcacagttctctgaagagtatttcttttcttctcttcccaacatcatatatactggctgygcaaaatatggattggaactagaaacagatgagaacaggatctacaaacaatgttttagctgcttgccatttactatgaagaaaatatactataggccag

SEQ ID NO: 492791 - DNA, 201 bp, Homo sapiens
atgatttgtcttttgaagtaaataaacgatagggtttttgctttggattttttattaaatacattttacaaagagaatttcaattaaaacttttttctaaraaaatcctgtgaggtttaaaaagattatttttgttttttggtttcttcctttcttctggagaaatgatctaccagtcaaggcaatatgtagcagatccct

SEQ ID NO: 492792 - DNA, 201 bp, Homo sapiens
attgaaaacgaaggaaatgagatcatgtttcaatttattaaagcggggaagagcgttctgtggttagttcgtgtctaggatttgagtgccttactgaatgyatttagcaaacatgtagcaatctgttctctcactgtgattgtagaagaagctcatgtaaaatgatagtcattaatgaggaagtatagagtggtacttatt

SEQ ID NO: 492793 - DNA, 201 bp, Homo sapiens
acacacagtttctttaatgtccgttgctgacccccggaaaaaaattcagcttttatacagtcaacattctttatatctgaaggatgaaaaacagcacaaawatcttgaaaactatgaagtcccagaatctattggtctccagatcttagtggtcatttcttacttagcaaactgtatgaatagacatgttcatgtgaaaga

SEQ ID NO: 492794 - DNA, 201 bp, Homo sapiens
ctctaaatgctcacagttctctgaagagtatttcttttcttctcttcccaacatcatatatactggctgcgcaaaatatggattggaactagaaacagatragaacaggatctacaaacaatgttttagctgcttgccatttactatgaagaaaatatactataggccagctttaatgactgtagttgatggaagacatga

SEQ ID NO: 492795 - DNA, 201 bp, Homo sapiens
tcaatgtgaaatcatttccttgattacaactatacatgataatggattagtttatataaacctctgtttagacaagttcaagacaagcgtgtctttctatraaaagcattgaaaacgaaggaaatgagatcatgtttcaatttattaaagcggggaagagcgttctgtggttagttcgtgtctaggatttgagtgccttac

SEQ ID NO: 492796 - DNA, 201 bp, Homo sapiens
gaaaataaaattatagatgaacagcctaaacatcagtcagatatctgtggtcagaactttcactcaaatttgtttcagttagaccacaaatgtgcagctaygttggatttggtttgtagtactaaacaaattaatatagggcctgaagtggtacaaagagagtgtgtgccaacagaatatcatgaaatacaaaaccagtgt

SEQ ID NO: 492797 - DNA, 201 bp, Homo sapiens
atgggttggcgagacagtactacaatcaacatttagcagtcagttattaaatcttgggagttattcatctattcagcctgaagaatattccagtgtagttwgtgatgttgtacttcaagacctactggcacaggtgtcctcaaaacattcctacctcagagatcttcctccgaggcagcctcagagggtgaacagtataga

SEQ ID NO: 492798 - DNA, 201 bp, Homo sapiens
gggaagagcgttctgtggttagttcgtgtctaggatttgagtgccttactgaatgtatttagcaaacatgtagcaatctgttctctcactgtgattgtagwagaagctcatgtaaaatgatagtcattaatgaggaagtatagagtggtacttattctgtaagttcagagtatgccgagtattaatagattatcatactgc

SEQ ID NO: 492799 - DNA, 201 bp, Homo sapiens
tttagcaaacatgtagcaatctgttctctcactgtgattgtagaagaagctcatgtaaaatgatagtcattaatgaggaagtatagagtggtacttattckgtaagttcagagtatgccgagtattaatagattatcatactgcctgaaaataaatttatgatgaaatgaaaaaaaaaagtgacagtttaaaaaaaaaaat

SEQ ID NO: 492800 - DNA, 201 bp, Homo sapiens
aaacatgtagcaatctgttctctcactgtgattgtagaagaagctcatgtaaaatgatagtcattaatgaggaagtatagagtggtacttattctgtaagytcagagtatgccgagtattaatagattatcatactgcctgaaaataaatttatgatgaaatgaaaaaaaaaagtgacagtttaaaaaaaaaaatctcctg

SEQ ID NO: 492801 - DNA, 201 bp, Homo sapiens
ctgctacgttccaggcattgtactaagtatgaggaaccacagggaagacattccctcagaaactgctgcagtgcttttacttatccctacctaaaaaaccrtcaatgtgaaatcatttccttgattacaactatacatgataatggattagtttatataaacctctgtttagacaagttcaagacaagcgtgtctttctat

SEQ ID NO: 492802 - DNA, 201 bp, Homo sapiens
accatgtaaaaatataacctaaataacaagtacatttttaatgctgagatggagaatttagcacctataatccttccagagatgcacaccacgcaaccacrtgagtcccctctggctctgaattccgagagcagctaccaacacaggcctccgctgcctgcactcagcacacctatcggaaagcgccagtgctggcatggg

SEQ ID NO: 492803 - DNA, 201 bp, Homo sapiens
tatacaggtgtagccaattctgcctctcccattcttggttctagtagcttagcgatttatttaacatgaagctggtgactggtgactatgcaatgggaatracacagaatttactgtggagttaatatgtaagtacatgcattacagtattgagtcacaacaaggtgctattattcatgtattatcagtggctaatttttc

SEQ ID NO: 492804 - DNA, 201 bp, Homo sapiens
gtcactaattagaactcctgctcaaaaggatgaccttacagcatggtaagtagtcattaaaaagaaaacagattcaaacattttaacatacagaatgactraggtacacaaacatattcatatacattaaggaaatgtttacctgctttactttgcattatcaaaaaaagcaaaatatcagaccaccctgtttcctaagtc

SEQ ID NO: 492805 - DNA, 201 bp, Homo sapiens
agcgatttatttaacatgaagctggtgactggtgactatgcaatgggaataacacagaatttactgtggagttaatatgtaagtacatgcattacagtatygagtcacaacaaggtgctattattcatgtattatcagtggctaatttttcctcagtaaaggaattgctcattttttttgtaagagttgcttttccttcag

SEQ ID NO: 492806 - DNA, 201 bp, Homo sapiens
aacatgaagctggtgactggtgactatgcaatgggaataacacagaatttactgtggagttaatatgtaagtacatgcattacagtattgagtcacaacarggtgctattattcatgtattatcagtggctaatttttcctcagtaaaggaattgctcattttttttgtaagagttgcttttccttcagaagaaaagtgct

SEQ ID NO: 492807 - DNA, 201 bp, Homo sapiens
atatttggaggagaagcattaggaaggtaattatgtcatgggaatacagctcataagagcaggccagagagttagctcactctatttctgtcatgtgaggmtacagggagaggtcagatgtctgcaatccagaagtggaccctccctggcactagaccatgatggtatcctgacctctggcttccagccaatggagccatg

SEQ ID NO: 492808 - DNA, 201 bp, Homo sapiens
gcaggcagtggccccaaagggaaccaactcgtggttatgacgtggggtccagttcttcatggccccaatgccatgggtttgaggtccaacggggtcacacygcctcagtgaacactggctcagataagcataggctgacgcagagtacatcagtgaggacagatggcagaggccagagccagcgagggccttacaatggca

SEQ ID NO: 492809 - DNA, 201 bp, Homo sapiens
tttttttgtttttttttggcttcttttgcattcctccaatgtgtttagcagaagctcagctgcctaatttccttgcttcataggaggtggcattgtgtgcygcagctctgcctgtggaccagttgccttctcttttctctgcctatcatttcctcagctgtggggaatacataacaagcctcactctatcccagccaccag

SEQ ID NO: 492810 - DNA, 201 bp, Homo sapiens
ttttctctgcctatcatttcctcagctgtggggaatacataacaagcctcactctatcccagccaccaggcatccagccatgcacaacaggaatttaaaamcctgctgtcaaagagtgtgtgttcttgagtagaaagacagatgattaacatgcaatgattatgtaaagtgtcaggcgatggcaacagcaatgaaaaaaca

SEQ ID NO: 492811 - DNA, 201 bp, Homo sapiens
agggacaaaggctgatggacagtgataaacacctctgatggatgagatggcattttagcagaaacctggcccaagtgaccgtggggtctgcaagtacttcytagctatgacaacaatgctacaagcaacaagggaataaataagacaaacttcattaaaattaaaatcctttgtgagttaaaggaacccatcaaaaagtaa

SEQ ID NO: 492812 - DNA, 201 bp, Homo sapiens
atggcattttagcagaaacctggcccaagtgaccgtggggtctgcaagtacttcctagctatgacaacaatgctacaagcaacaagggaataaataagacwaacttcattaaaattaaaatcctttgtgagttaaaggaacccatcaaaaagtaaaaagtcagctcatagatggggaggaaatatctacaaatcctttatg

SEQ ID NO: 492813 - DNA, 201 bp, Homo sapiens
catatcaaccttcatggtccatttggatctaaccaggtgtattagctttctcttattctctctctctatatatatatattgtctgtgatctctggagagasagagagagtgagatttattataaagaattggctcacacagtcacagaggctgaggagtctcatgatctgccatctataactggagccccaggaaaactgc

SEQ ID NO: 492814 - DNA, 201 bp, Homo sapiens
ctatatatatatattgtctgtgatctctggagagacagagagagtgagatttattataaagaattggctcacacagtcacagaggctgaggagtctcatgrtctgccatctataactggagccccaggaaaactgctgggagaagttctaatctgagtccaaagacctaagagtcagagagccaatggtgtgattttcagt

SEQ ID NO: 492815 - DNA, 201 bp, Homo sapiens
taactggagccccaggaaaactgctgggagaagttctaatctgagtccaaagacctaagagtcagagagccaatggtgtgattttcagtccaagagccagraaagaatgatgtctgagctgtagcagagagcagattgtgctgtctcccgctcctccttttgttctatcaaggcctctaacagactggctggggcccagca

SEQ ID NO: 492816 - DNA, 201 bp, Homo sapiens
tgttccctgcctccatactccattctcctgcgtcaacagtgggaatcacagataatcacctgtgaagtgttagcaaactattcaacctaattataaccaaytgaacctcagaccaaacttccattttattgatttagaatcaaccaatgtaatttcaaccacagcacagaatgaaataatcagacaaatcccaaaagtaga

SEQ ID NO: 492817 - DNA, 201 bp, Homo sapiens
actattcaacctaattataaccaattgaacctcagaccaaacttccattttattgatttagaatcaaccaatgtaatttcaaccacagcacagaatgaaayaatcagacaaatcccaaaagtagacagggtataagacaaccagcctggtcttttaaaaatgtcaatatagttttttttaagtgtgactgtttcaggtgaa

SEQ ID NO: 492818 - DNA, 201 bp, Homo sapiens
aatgaagggatgaagtaaagttacaaagccatttatgtggtgtacaccctatggagaggatatttcctgtcacagttaacgggggtgaactggccttatgytccctgcctccatactccattctcctgcgtcaacagtgggaatcacagataatcacctgtgaagtgttagcaaactattcaacctaattataaccaattg

SEQ ID NO: 492819 - DNA, 201 bp, Homo sapiens
cagcgagggccttacaatggcagtcatgtgggcagcacagcagagcaagggtccttacttactcctgcttcagagtccacattcaacctccaacctcctckaactcacacccaaaactcagacgggagaagaatgtgggaaaaggcttttaaatgatttaaaaacctaaatgaattcaagaagcagtgagtttagagaatt

SEQ ID NO: 492820 - DNA, 201 bp, Homo sapiens
aagttctaatctgagtccaaagacctaagagtcagagagccaatggtgtgattttcagtccaagagccaggaaagaatgatgtctgagctgtagcagagarcagattgtgctgtctcccgctcctccttttgttctatcaaggcctctaacagactggctggggcccagcacatgggatggcaacctgcattacttgttct

SEQ ID NO: 492821 - DNA, 201 bp, Homo sapiens
taagagaaagaaacaaatagcattccacttttccttctcaaaatataatttggaaattcacagtagatgaagtattgggagaagttttcgtgtttacaggstaacaatctggcttaaacaagatgttttcaggagcccccaggactgagggttgcctgaactgaggaaggaaggaatgtgagaaagaaggcaattcacaac

SEQ ID NO: 492822 - DNA, 201 bp, Homo sapiens
ataccacttcacacccactgcgatggctaaaataaacaagatagacaataacaaatttggtgaggatgtgaaataattacaacccttatacactgtggggwtgcaaaatgatgcagtcactttggaaaagtttttaacctttccctaaaatgttaaaaatcgagttccacataacccagctattccactcctgggtatata

SEQ ID NO: 492823 - DNA, 201 bp, Homo sapiens
tttccctaaaatgttaaaaatcgagttccacataacccagctattccactcctgggtatatacccaaaataaataaaaacatatgttcacacgtccacacyaaaacctctgcaagaatgttcatacagcattactcatgtaaaaaatggaaagaatgtaagtgaccatcagctgagtaaatgaacactcaaaagtggccta

SEQ ID NO: 492824 - DNA, 201 bp, Homo sapiens
caggctgtctccaaaaacaggcccagccctgctctcgaccaaggtgggaaccttggggatagaaaggcagggcagaaaacccccagagcaggtgcacagamtaacgcagagggtccttgtgcctgcttttgtcctagagctcagagcctgtggtacatcccaaacatcatgaacagtccaacatggcaggggacagaaatg

SEQ ID NO: 492825 - DNA, 201 bp, Homo sapiens
aaagacgccagtcacaaaaggccacatttatgtaaaatgtccagaataggcaaattcatagagacacaaaagtagatgaatggttcccagggctggggctsggggtgattgcgcatgtggatgggtttttttctggggtaatgagaatgtcctaaaattagatagtggtgatggctacaaatctctgtgaatagatcagaa

SEQ ID NO: 492826 - DNA, 201 bp, Homo sapiens
aaaaacaggcccagccctgctctcgaccaaggtgggaaccttggggatagaaaggcagggcagaaaacccccagagcaggtgcacagaataacgcagaggrtccttgtgcctgcttttgtcctagagctcagagcctgtggtacatcccaaacatcatgaacagtccaacatggcaggggacagaaatgaccaagagcaga

SEQ ID NO: 492827 - DNA, 201 bp, Homo sapiens
gccagcgagggccttacaatggcagtcatgtgggcagcacagcagagcaagggtccttacttactcctgcttcagagtccacattcaacctccaacctccycgaactcacacccaaaactcagacgggagaagaatgtgggaaaaggcttttaaatgatttaaaaacctaaatgaattcaagaagcagtgagtttagagaa

SEQ ID NO: 492828 - DNA, 201 bp, Homo sapiens
aattcaaagcaaattagagaaattaggaattcaaggcaaattaaatacagttctagaaaagtaatttttttttttacacttgcattcgagaccagtgaatkccatatttgctatacaggtgtagccaattctgcctctcccattcttggttctagtagcttagcgatttatttaacatgaagctggtgactggtgactatg

SEQ ID NO: 492829 - DNA, 201 bp, Homo sapiens
tccacgtccataataacgttcaaaataaaaagaaggaatacattcattaggtggttttagaggtgactactacaccaattccttacttcaaaagcagtaaytatagaataaaatatttcccgatttaggagattacataccagattgatgagggaaagctgtttttcagaatgacattatgacatctcaacaatatggaag

SEQ ID NO: 492830 - DNA, 201 bp, Homo sapiens
gaaaaatgcaaatcaaaaccacagtgacataccacttcacacccactgcgatggctaaaataaacaagatagacaataacaaatttggtgaggatgtgaartaattacaacccttatacactgtggggatgcaaaatgatgcagtcactttggaaaagtttttaacctttccctaaaatgttaaaaatcgagttccacata

SEQ ID NO: 492831 - DNA, 201 bp, Homo sapiens
tgatgcagtcactttggaaaagtttttaacctttccctaaaatgttaaaaatcgagttccacataacccagctattccactcctgggtatatacccaaaayaaataaaaacatatgttcacacgtccacactaaaacctctgcaagaatgttcatacagcattactcatgtaaaaaatggaaagaatgtaagtgaccatca

SEQ ID NO: 492832 - DNA, 201 bp, Homo sapiens
ctacaaatctctgtgaatagatcagaaaccacaaattgtacacttttaaaagggcgcattttatgatatgttgaacacattctcaataaaactatgaagaygaagaatgactgtgattgtttatattacattaaaaaaagaaaatccacgtccataataacgttcaaaataaaaagaaggaatacattcattaggtggttt

SEQ ID NO: 492833 - DNA, 201 bp, Homo sapiens
aaagttacaaagccatttatgtggtgtacaccctatggagaggatatttcctgtcacagttaacgggggtgaactggccttatgttccctgcctccatacyccattctcctgcgtcaacagtgggaatcacagataatcacctgtgaagtgttagcaaactattcaacctaattataaccaattgaacctcagaccaaact

SEQ ID NO: 492834 - DNA, 201 bp, Homo sapiens
catttatgtggtgtacaccctatggagaggatatttcctgtcacagttaacgggggtgaactggccttatgttccctgcctccatactccattctcctgcstcaacagtgggaatcacagataatcacctgtgaagtgttagcaaactattcaacctaattataaccaattgaacctcagaccaaacttccattttattga

SEQ ID NO: 492835 - DNA, 201 bp, Homo sapiens
gaacaaagaattgatcagaacgcacaaacaaagcaaggaaaggatgaggcaacaaaatcagagatttattgaaaatgataggacattccacagggtgggartgggcctgagcacaggggctcaggagccccattacagaattgttttgggtttaaatactttctagaggtttccattggtttcctggtgtacaccttatgt

SEQ ID NO: 492836 - DNA, 201 bp, Homo sapiens
tgtctctttgctttttcctcactgtttccaataagaaatgtgctattatttttatcttttttcctatgtacataatttcccacccctgacctctggctgctttttttttttcttgtttttggggggatggggctttgccatgttgctgaggctggtcttgaactcctgggctccagcaatcctcccacctcaacctcccaa

SEQ ID NO: 492837 - DNA, 201 bp, Homo sapiens
aaacaatacagtatacctatttatataatgtttacattatattaggtattataagtaatctagagatgatttaaagtacatgggaggaagtgtataagttrtatgcaaataatacactattttacattggggacttgaacatctgtgggtttttttatccacaggaggtcctggaaccaatcccccatgtataccaacgga

SEQ ID NO: 492838 - DNA, 201 bp, Homo sapiens
acattgaacagaaatgacaaaatgagcatcttaaccttattccagatcttagataaaaagcttttagtctttcactattgagtatgacattcactgtgagttttttatatatggattttattatgttgaggtaatttccttctattcctagttttttatgtttttgtcatgaaagcatgttgaattttgtccggtgctttt

SEQ ID NO: 492839 - DNA, 201 bp, Homo sapiens
acccctgataaatgggatttggcactgactggtaaataaattattccccattcctcctcccaaacagaatgtgctgagagtctgtcattttacagcctcttttttttttttgttttgacagggtctccctctgtcgcccaggctggagtgcaatggcgccatctcaggtcaatgcaagccaactctcgtgtttgagtgatt

SEQ ID NO: 492840 - DNA, 201 bp, Homo sapiens
aagaacacaataatctcccaaaactgaccacaaataaatgaaaaaaagccactgcactccagcctgggcgcagagcaagactccatctaaaaaaaaaaaaraaagaaagaaatgaaaaaaaactgacaaataattcaaaattcaaaataatttaaggaagctcagcaaacttcaaaaaatacagagaagtaattcagtgaa

SEQ ID NO: 492841 - DNA, 201 bp, Homo sapiens
atgttcacaagaggggctgagttgagcaaaagcaaatttcagttcagccataccctaaaatatgaatacaaatattgccgtggctaataccatgaaaactyagtctcatcaaaccgtctagcagattacaagcactctggacagtatgttactatgcagagacataggaaaatgtctacgaagaaatacaccaaaatgtta

SEQ ID NO: 492842 - DNA, 201 bp, Homo sapiens
ctttttgggcgaaggagtcaaagccccacaactcaatgtcacgaggactttaaaagcacatacagaaagatacacggatgtaataaccataattttttttwaaaaaattaatctcagtttttttctaagcaaatcaaaacttaataataatggcataggaattattttgataaaacgtaaaaatctgttaggccagttacc

SEQ ID NO: 492843 - DNA, 201 bp, Homo sapiens
ggcagatggggcgaagtggacagaccccagccccttcaggaggtgcagtttgcaaaatctggacacagtgatgcctcggaggggcttgtggcgggatggtsgggtgaccccagacctctagtctgatgtagtgcgccgatggttcctggatacagaggactcagtggggagcaggtctggggcgttgcggagtgtgtctag

SEQ ID NO: 492844 - DNA, 201 bp, Homo sapiens
ttatgcccgggccgcccgccaggggcgcccttcccagcccgcgctcgcccgctctgcctcgcccacgctcgcccccacccctgccctgagccctgcatccygggaagccccctctgcaggtactcactaaacatcgtggaatgagggaaacagagacccggagagaggagcgcggggagaagagagcccacgatgttccca

SEQ ID NO: 492845 - DNA, 201 bp, Homo sapiens
cagtgatagccccaaagaccaaacagtagcctccaagctagagtggccccgggagaccttcctgactcgggcagaggtggtccccacattgaggagtcgtwgaatgcagttgcccaggaagagtcccggctttggacagggtggctctttgcagctgaacagtctctgaagggactgagagttgaaggcaccccaagcagc

SEQ ID NO: 492846 - DNA, 201 bp, Homo sapiens
gcccgggccgcccgccaggggcgcccttcccagcccgcgctcgcccgctctgcctcgcccacgctcgcccccacccctgccctgagccctgcatcccgggmagccccctctgcaggtactcactaaacatcgtggaatgagggaaacagagacccggagagaggagcgcggggagaagagagcccacgatgttcccagccc

SEQ ID NO: 492847 - DNA, 201 bp, Homo sapiens
cctctgcaggtactcactaaacatcgtggaatgagggaaacagagacccggagagaggagcgcggggagaagagagcccacgatgttcccagcccttctcycagtgagatcatgagtcattttatgttccagcgtctatgcttcaacaccttccagattttcctccgtgagctggcatctcctccgtgagctggtggagtc

SEQ ID NO: 492848 - DNA, 201 bp, Homo sapiens
ttgaggatgacatatgtctgtggaaggccagctgacaggctctgggacagccatgacaagttaatgaattccgctgtggttactaaggcacatgtctgggmcacgaggacttctgtctgccgcactgacctttaaaagagcgcctctaatacccaccaatcactcatgctctgattgaacattcagaagatgaaacctgtc

SEQ ID NO: 492849 - DNA, 201 bp, Homo sapiens
gcaccccttgtggggagggggttccagccctgcctgcgtacatagcctttattttaatcctttaataaccttctcgttcagctttccatctatccattgaraaaacatttatcaaggatcacctcagtttaaatgtctttggccacaaggaacataaaacctgtctcaagctaaaaccataaaaacatggatcatttcatc

SEQ ID NO: 492850 - DNA, 201 bp, Homo sapiens
gtctaaccatgagaacatcagacaaatcccaactgagggacatcttacaaagcactcggccacttatcctcaaaactgtcacattcaaactgtcaccgtcragaggagcctagggaggcatgtcacctgaatgtcacgtggggtcctgagtggaatcgtggaacaggaagaggacattagggaaaaactaagggaatgtga

SEQ ID NO: 492851 - DNA, 201 bp, Homo sapiens
actagttaaaatagcttttatctaaaaggcaggaaataatgaatgctggagtgttgagaaagggaaccctcgtacactgttggtgggaatgtaaattagtrcagccacttggaaaacaacatggagcttcctcagaaaactaaaaatagacagggcgcagtggctcctgcctgcaatcccagcactttgggaggccaaggc

SEQ ID NO: 492852 - DNA, 201 bp, Homo sapiens
ttctgagacgctgggagttacgactccaacacatggattttggcagacacaattcaacctgttacagactggatttctcagagaaattccggtgctgaatmactggcctccaatgcgaccacattcgaagatagggccatcagggaggtagctaaggttatgaggccacgagggtgggccctcaagccaatagggttggag

SEQ ID NO: 492853 - DNA, 201 bp, Homo sapiens
taatgtgatggttaggagcacacacttcagagctagcatctgtatttggaaacctatattctgcctgtctagccatgtcactatggaagatctgaaactckgatttctttcatctcacagctttttactacctcaaacgttgttcaaagattagggtaagtgatctgaatgataccatgcacatatttgtttatgttaaaa

SEQ ID NO: 492854 - DNA, 201 bp, Homo sapiens
agaatacttctttgtaaagagtaatggcttcaagagaggtggcctaatgtgatggttaggagcacacacttcagagctagcatctgtatttggaaacctayattctgcctgtctagccatgtcactatggaagatctgaaactctgatttctttcatctcacagctttttactacctcaaacgttgttcaaagattagggt

SEQ ID NO: 492855 - DNA, 201 bp, Homo sapiens
gtaacacttgaacaaaaacttttttagatggagatgctctatataatccctagaatacttctttgtaaagagtaatggcttcaagagaggtggcctaatgygatggttaggagcacacacttcagagctagcatctgtatttggaaacctatattctgcctgtctagccatgtcactatggaagatctgaaactctgattt

SEQ ID NO: 492856 - DNA, 201 bp, Homo sapiens
actaaactgtcctagaagctgtttaataggcctggggcaagggaagtaaaaaatatttgtgccagaaagtaaggaagcactcaaaactgctagagacatgwcaaaagttttcaagaacacttgaagaggctatcgtctggaaaatttgtaaaaatgttatcctcaatgtactataatgcattaaattttaaaaagaaattc

SEQ ID NO: 492857 - DNA, 201 bp, Homo sapiens
taaagggtagctgcctcctttcacctaaagcccattcctgaggcaaatgctttgcacgatggttcttgccttcctcaagatctgcacagcttcctcccctmacagcttctaggacaataaataaggtaaagtctcaacttggcccatcttagattggcccaggaatcaggtcaactgtggcaaaaagcaaaaccagcgaga

SEQ ID NO: 492858 - DNA, 201 bp, Homo sapiens
cccaaaagaaaaaggctggggaggacactgtttgttcttttgagtagtcccaaaacaaattactgggaatgaaccattcaaactggacaattaatacttcragacacatagctcatggtggaggccctgctgtgttgcatacagatgtggctgtaatgatggaaggaataacagctctccaccaagagtttgttctagaaa

SEQ ID NO: 492859 - DNA, 201 bp, Homo sapiens
ccacaggctgtacaggaagcatggctggggaagtgaaggggaagcaggcacatcttcacatggttggagcaggaggaagagaacgaaggggcaggtgttamccacttttagacaaccaaatctcctgaggactcactcactatcacaagaacagcaagggggaaatccaccctgtgatccaattacctcccaccgaacccc

SEQ ID NO: 492860 - DNA, 201 bp, Homo sapiens
cttggagaacttttatgtctagctggaggattgtaaatgcaccaatcagcaccctgtgtctagctcaaggtttataaacacaccaatcagtgctctgtgtytagttaatctagtgtggacttggagaacttttaggtctagctagaggattgtaaatacaccaatcagcactctgtctagctcagggattgtaaatgcact

SEQ ID NO: 492861 - DNA, 201 bp, Homo sapiens
ttttccctttagcttagtgatttgggggcccaagatttattttccttttacagagtgaagatataatctacagaatgggagaatatatttgcaaaccataygtgtggtaagggattaagatccaaaatatataagaaactcaactcaatagtaagaaaacaacctgatatgaaaatggacaaagggcctcaatagacattt

SEQ ID NO: 492862 - DNA, 201 bp, Homo sapiens
cctctgaaagcagcctgggaggggtgacggggtgtaggagcagagacttcaagtggcccccacctgccaaaccattctcagggacaggtaccagctgggawgttggcagcagccgctcccctgcaaggagaacctcccacttcctgtcccgcacacctgcctcattggaaagtgacgcacccactgtttggcctcggcagc

SEQ ID NO: 492863 - DNA, 201 bp, Homo sapiens
aggtttaccctaagcagttcccagcttgacttttccctttagcttagtgatttgggggcccaagatttattttccttttacagagtgaagatataatctasagaatgggagaatatatttgcaaaccatacgtgtggtaagggattaagatccaaaatatataagaaactcaactcaatagtaagaaaacaacctgatatg

SEQ ID NO: 492864 - DNA, 201 bp, Homo sapiens
gacttcgaatagaatgggaggcaggtttaccctaagcagttcccagcttgacttttccctttagcttagtgatttgggggcccaagatttattttcctttyacagagtgaagatataatctacagaatgggagaatatatttgcaaaccatacgtgtggtaagggattaagatccaaaatatataagaaactcaactcaat

SEQ ID NO: 492865 - DNA, 201 bp, Homo sapiens
gttgtcaggtaaatagccctaagtctgcatattgaaggaaataactcttagaagaaaaatcaaatggcaaaatttacatctcaaggtacagagagaaaaartctggtggagctagagggagattaaagatgaatgccaaatcaaacatgaaattatagaaatctatgataggattgtataaggagaccaattttatttagg

SEQ ID NO: 492866 - DNA, 201 bp, Homo sapiens
gacagccatcgctctttcagtttggactggctagcaaaaacatagccctgttgtgtaaataaataaagccccttaagtggccaaaataaaaaatctttcctttttttttttttttttccttgtgctggctatttttctctccccaccacatcaccttttgtgtgtgggggtggggggtggaatttagccagttcagaggac

SEQ ID NO: 492867 - DNA, 201 bp, Homo sapiens
ttggcagggataagtacgcaattgcttaatcaataaatgcaaacaaaaatgtatgctggaaattcttaagacatttctaatattactttaccaataatttsaaagctagcttatttattaaagattttacttaagtcatgtaaacttgaaaaagcatttgactagtatttccttttttctggtaaagtatttgatttaagt

SEQ ID NO: 492868 - DNA, 201 bp, Homo sapiens
tcagtttggactggctagcaaaaacatagccctgttgtgtaaataaataaagccccttaagtggccaaaataaaaaatctttccttttttttttttttttyccttgtgctggctatttttctctccccaccacatcaccttttgtgtgtgggggtggggggtggaatttagccagttcagaggacctgttccccataattt

SEQ ID NO: 492869 - DNA, 201 bp, Homo sapiens
gtcctgatgacatatgcccaaggtggtcggggcacagcttggttttacatattttagggagacatgagacataaatcaatatatgtaggatgtacattggytccattcagaaagtcaggacaactcgaagcagggagggggcttccaggtcacagttagatgagagacaaacagttgcattcttttttttttttttttttt

SEQ ID NO: 492870 - DNA, 201 bp, Homo sapiens
atgtaggatgtacattggttccattcagaaagtcaggacaactcgaagcagggagggggcttccaggtcacagttagatgagagacaaacagttgcattcttttttttttttttttttttaattgagacagagtctcactctgtcgcccaggctggggtgcagtggcgcaatcgcggctcactgcaagctccgcccgccgg

SEQ ID NO: 492871 - DNA, 201 bp, Homo sapiens
gcccggctaattttttgtatttttagtagagacagggtttcaccatggtctctatctcctgaccttgtgatccgcccgcctccgcctcccaaagtgctggrattacaagcctgagccaccgcgcccagccgacggttgcattcttttgagtttctgatgagcctctccaaaggaggcaatcagatatgcatttatctcagt

SEQ ID NO: 492872 - DNA, 201 bp, Homo sapiens
tatgattctgcccctgcactccagcctgggtgacagagcaaggccctgtctctaaaaaaataagatgtacaactttaatgtaaatttaagatcacaaacargttgaaaaaaaggggtgagaaaaggcctagtaggcaaacacaaaatggaaagagcaggtacaactatgctaataccagataagatttaaggcaagaacca

SEQ ID NO: 492873 - DNA, 201 bp, Homo sapiens
cacttggaagctatgtgaccaaaaccatgatcacagggttgtccctgaacacggtggggaaataacctctcccttaaatctcccctgcgtggtgacttagrggaggagccggaagagagcagtgcttcacaataaaaggaagaattgcttgaacggaggcgtttcaggcatgagtcacaggccgggtgtggaagaggaaag

SEQ ID NO: 492874 - DNA, 201 bp, Homo sapiens
acatgcctcaacacaataaaaagcatggctttcatgttgagatatgttccttctatacccagtttttgcatccttcaactttcatatataatatatatgtrtatatatatatatatatatatatatatatatatatatatatataagttgatcatactaatatcatagtgaatgcggaaaaatgaaagccttttctctaag

SEQ ID NO: 492875 - DNA, 201 bp, Homo sapiens
aaagaggtttaattggctcatggttctgcaggctgtacaggaagcctggtgttagcatctgctcagcttctggtgaagcctcagggagttttcgttcatgrtggaaggcgaagggggagcaggcacttcacatggtgaaagcaggctcaaggtggggggaggtgccacatacttttaaataactaaatttcatgtgaactc

SEQ ID NO: 492876 - DNA, 201 bp, Homo sapiens
gtttttgtttttgttttgagaccgagtctcactctgttgccaggctggagtgcagtcacatgatctcggctcactgcaacctccgcctcctagattcaagsgattctcccacctcagcttcctgagttactgggattacaggcccccgccaccatgcccagctaatttttgtatttttagtagagacagggtttccccatg

SEQ ID NO: 492877 - DNA, 201 bp, Homo sapiens
gttccttctatacccagtttttgcatccttcaactttcatatataatatatatgtatatatatatatatatatatatatatatatatatatatatatatawgttgatcatactaatatcatagtgaatgcggaaaaatgaaagccttttctctaagatctggaacaagacaaggatgcccactttcatcgctgttattcaa

SEQ ID NO: 492878 - DNA, 201 bp, Homo sapiens
gccgcctcctgggttccagtgattctcctgcctcagccacctgagtagctggggttataggagtgtgccatcgtgcccaactaacttggggtttttttttktttttgtttaagacagagtctcactctgttgcccaggctggagtgcagtggcacaatctcggctcactacaacctctgcctccagggttgaagtgattct

SEQ ID NO: 492879 - DNA, 201 bp, Homo sapiens
aagcgagcctggcacgttgggttcttagggaggtaccacaggatgtttacgaggggcttgcctcggcatcggtggaaggaggagagagaagcaggattggwcgagggagaaggcaaacttccatgcagacccagtgatagccccaaagaccaaacagtagcctccaagctagagtggccccgggagaccttcctgactcgg

SEQ ID NO: 492880 - DNA, 201 bp, Homo sapiens
ataacaacacagaaataaaggaagttatgctttaaaaaaaataagagcaaggaaaacagacaacattaaatattgagaaagaaacaataaatattatatamaataacatagtagaatggagaccagcatatcagttatagcagtaacatgaataggtttaactcacttactaaaagaaaaagattttcaaattggcttaca

SEQ ID NO: 492881 - DNA, 201 bp, Homo sapiens
atgtggaaatgaaacaacatgctcctaaacaaggggtcaaagaagaaattaaaaggaaaattgttttaatatcttaagacaaaagaaaatggaagttcaacataccaaaagcaatcctaagagcaacaaatgcctacatcaaaaaagaaaaggaaagatcccaaataaacaacctcacattacatgtcaaaggactagaaa

SEQ ID NO: 492882 - DNA, 201 bp, Homo sapiens
cacctagcagtgccctacacttaggttccaaaagcttggtgtcttgggttctcaggcaccataggccacagtgctcacatataaagggtatatggaggttaaaaaaaaaagcctctgtgaccaaacggtctcctcaccaacacacagctcacagctgagttctgccttaaatgcaatgaggtctgcctgaccccataatct

SEQ ID NO: 492883 - DNA, 201 bp, Homo sapiens
ataagaaaaagacaaacatctcagtagaaaaacaggcaaaggaagtcattcgcaaaggcaatccacaaaggaagtcattcagtcaatgcttgtaaaaaaawaaaaaaaaaagttcaacctcaacagttaacaaagagatgcaaattaaaacggacatcttcccaccccatcaagctgactcatgccaaagaaatcagtctc

SEQ ID NO: 492884 - DNA, 201 bp, Homo sapiens
tgttctcagatatgcatagaacattcaccaaaataaacacacacacagatcacaatactcttcataaagtagaaattatacaaataatccttgttggttayagtacattaaaactagacattaaaaactaattcaaaaagcaaattttttgcctgaaaatttaaaatctctctcaaataactgtcagctgaaagttaaaat

SEQ ID NO: 492885 - DNA, 201 bp, Homo sapiens
tctctccatttacatcaggaatacccaaagtaaccagtgcaatcctctagggggtatttaaactcccaaaaattctgtaacttggcccttgagcccctackctcaggcctgcccccacactgtggagggttcttccgttttcagtaaatcccttccttccttccctgctttgtttgtgcgttttgtccacttctttgttca

SEQ ID NO: 492886 - DNA, 201 bp, Homo sapiens
tatactgttttgatactattgctttgtaatataatttaaaatcaggaagtatgatgcctctggctctgtttttctttatatatatacacacacacacacayacacacatatatgaaaagaatatgtatacacacagttttttagttttaattgacaaataatgatggtgtatattaatggagtacaatgtgatattttgtg

SEQ ID NO: 492887 - DNA, 201 bp, Homo sapiens
aagtaaggaagcactcaaaactgctagagacatgtcaaaagttttcaagaacacttgaagaggctatcgtctggaaaatttgtaaaaatgttatcctcaakgtactataatgcattaaattttaaaaagaaattctgaagggcagtgggattctgactctagccatgacagaatgacttgtagagctaatcctcttactga

SEQ ID NO: 492888 - DNA, 201 bp, Homo sapiens
gcagtgggattctgactctagccatgacagaatgacttgtagagctaatcctcttactgacaacaactgcaaaagatagttaaaacggccgggcgcggtgsctcacgcctgtaatcccagcactttgggaggccaagttaggcggatcacgaggtcaggagatcgagaccatcctggctaacacggtgataccccgtctct

SEQ ID NO: 492889 - DNA, 201 bp, Homo sapiens
ctaaagaaaaagagaaaatatcaaaagcagactataaaagatatattactttccaaaaaagcatcattcagcctctcagtacctcccacactgaattggcagtttcttctgagaggagaagcaacccaaaatggtttgtcacgtctgccaaatttggggccagtatttcttcactattttattatgtcctaataccttcaa

SEQ ID NO: 492890 - DNA, 201 bp, Homo sapiens
gccaagttaggcggatcacgaggtcaggagatcgagaccatcctggctaacacggtgataccccgtctctactaaaaatataaaaaattagccgggagtgktggtgggcgcctgtagtcccagctactcgggaggctgaggcaggagaacggcgtgaacccgggaggcggagcttgcagtgagccgagtagagatcgcgct

SEQ ID NO: 492891 - DNA, 201 bp, Homo sapiens
ggtctaatcctatcatggcggctccaccctcatgacctcatctgagcctaatttcctcccactgagggttagggctccaacacgtgaatgtcggaggaacrcaaacattcggtccatagcagccatctgttttgcttccaccaccccgctggtcaccagttctgtgtgggcaccgcctgactccacagggagtgggcagcg

SEQ ID NO: 492892 - DNA, 201 bp, Homo sapiens
agttaggcggatcacgaggtcaggagatcgagaccatcctggctaacacggtgataccccgtctctactaaaaatataaaaaattagccgggagtgttggygggcgcctgtagtcccagctactcgggaggctgaggcaggagaacggcgtgaacccgggaggcggagcttgcagtgagccgagtagagatcgcgctgctg

SEQ ID NO: 492893 - DNA, 201 bp, Homo sapiens
acaggagtgagccactgtgcccggctgaatattcatttagatttccctatctattgacacttttagttgcacttcatgccttcctgcatctctgacctctygcctgggttcatcctttgacctgaagataccttttaatattttcttttttgtaaaacccaattgtattggttctggaagtattctctttagtgtagttct

SEQ ID NO: 492894 - DNA, 201 bp, Homo sapiens
ggagtttagagctgcctaaccatctgggacttaggggataaaattctgaggtggtgggaaccatgaggaagtaagcataaaactctctgtacaattcaaaytagagttttataactagagtgttaaacgtaatcaccacagtaaccacaaataaaatagctaaataatataccaaaaaaatggaaatgagaaagaagttta

SEQ ID NO: 492895 - DNA, 201 bp, Homo sapiens
ttccacaggctgtacaggaagcatggctggggaagtgaaggggaagcaggcacatcttcacatggttggagcaggaggaagagaacgaaggggcaggtgtyacccacttttagacaaccaaatctcctgaggactcactcactatcacaagaacagcaagggggaaatccaccctgtgatccaattacctcccaccgaacc

SEQ ID NO: 492896 - DNA, 201 bp, Homo sapiens
gccgcactgacctttaaaagagcgcctctaatacccaccaatcactcatgctctgattgaacattcagaagatgaaacctgtctgagctgagagtgatcastcatccctgccgccccgtcactgtcactcctttctgaatcataataaaactttgcaaaactctttggttcactcagcagcctttgctgtgaagacggggg

SEQ ID NO: 492897 - DNA, 201 bp, Homo sapiens
gtagctgggattacagacatttgccaccacgcctggctaattttgtatttttagtagagacagggtttcaccatgttggtcaggctggtctcaaattcctstcctcaggtgatccacctgcctcagcctcccaaattgctgggattacaggagtgagccactgtgcccggctgaatattcatttagatttccctatctatt

SEQ ID NO: 492898 - DNA, 201 bp, Homo sapiens
gttccacaggctgtacaggaagcatggctggggaagtgaaggggaagcaggcacatcttcacatggttggagcaggaggaagagaacgaaggggcaggtgwtacccacttttagacaaccaaatctcctgaggactcactcactatcacaagaacagcaagggggaaatccaccctgtgatccaattacctcccaccgaac

SEQ ID NO: 492899 - DNA, 201 bp, Homo sapiens
agtttttgaaacataatttttctctctccagtttcccatttttactaaagacaaatcatgttatgattgatttgccttgttatacttggccagattatttrtataaagtacagcaagaataatgatttttctcataggctttttaaattggctttgatggagctttgttccatagaaggaatctcagattagcctttttta

SEQ ID NO: 492900 - DNA, 201 bp, Homo sapiens
ttttttttttttttaattgagacagagtctcactctgtcgcccaggctggggtgcagtggcgcaatcgcggctcactgcaagctccgcccgccgggttcaygccactctcctgcctcagcctctccgagtagctgggactacaggcgcccgccaccacgcccggctaattttttgtatttttagtagagacagggtttcac

SEQ ID NO: 492901 - DNA, 201 bp, Homo sapiens
cacaccatctttaagaactgtaacactcacggcgagggtccacagcttcattcttgaagtcagtgagactaataacccaccaattctggacacagtgtgaktggggttgtcatcaccctatggggcatgtcacagcattgccatcacaagctgtcacatatgctgaactgggagaagatacagggaaaaaaggttgtacct

SEQ ID NO: 492902 - DNA, 201 bp, Homo sapiens
gttttgttttgttttgttttgtttttgagacagggtcttgctctgttgcccaggctggagtgcgatggcacgatctcagctcactgcaactgccgcctccygggttccagtgattctcctgcctcagccacctgagtagctggggttataggagtgtgccatcgtgcccaactaacttggggtttttttttgtttttgttt

SEQ ID NO: 492903 - DNA, 201 bp, Homo sapiens
gggcagggctcaggacctgcagccggccatgcccaagccccacccctcacccctgtgggctccccagcggcccgagccacctcaacggtgccacctcctgytccggggtgcccgcctggtcccatcgactgcccaagggataaggagtgtgggccacagtgcgggactggcgggcatctccgcccacagctctggcgcagg

SEQ ID NO: 492904 - DNA, 201 bp, Homo sapiens
gggcggggctcagcaggccccgcactgggagtggccagcccacaccacctgcctgggcagtgaggggcttagcacctgggccagcagctgcggagggtgcrccaggtcccccagcactgccagcctgcccatgctgtgctccaattcacaccgggcctcagccgcctccccacggggcagggctcaggacctgcagccggc

SEQ ID NO: 492905 - DNA, 201 bp, Homo sapiens
gtggagggagaggcacaggcgggaaccagggctgcgcgccgagctcgcgggccagcacgagttccaggtgggcggggctcagcaggccccgcactgggagyggccagcccacaccacctgcctgggcagtgaggggcttagcacctgggccagcagctgcggagggtgcaccaggtcccccagcactgccagcctgcccat

SEQ ID NO: 492906 - DNA, 201 bp, Homo sapiens
ggtgttgagaggtgacaacgtgctagcagccgtcgcttgctctaggtgcctcctgggcctcggcatccactctggccatgctccaggagctcttcagcccrccactgcactgtgggggcccctctctgggctggccgaggccggagccggctccctctgcttgccaggaggtgtggagggagaggcacaggcgggaaccag

SEQ ID NO: 492907 - DNA, 201 bp, Homo sapiens
agtgggaccctggaatgagaccactagccacagggccgctggtgttgagaggtgacaacgtgctagcagccgtcgcttgctctaggtgcctcctgggcctyggcatccactctggccatgctccaggagctcttcagcccgccactgcactgtgggggcccctctctgggctggccgaggccggagccggctccctctgct

SEQ ID NO: 492908 - DNA, 201 bp, Homo sapiens
ctgcctgccttggcgtctcaaagtgctgcgattacaggcgtaagccaccaggctcagctaagatttgggttttcaaggggtggtgctggctgctgggcacrgtggaattgaaggaaagagaagtggattctggggagggcatggtggccacttcagaagctgcaggattcagagtttgagaagccccagtgtgcatcagac

SEQ ID NO: 492909 - DNA, 201 bp, Homo sapiens
tttcatatttgacaatacttcctgtgtacattttataccaaataagccaaatatgccattttgtactttagggaatctaatatcttaaaggattagttagrtcagaaagagacataatttataattttattttggaaaatgtgccaaatatcaaaggcttaaaacatttgatatcactaaataggatcacaggtcattgta

SEQ ID NO: 492910 - DNA, 201 bp, Homo sapiens
agaagctgcagcaagttattcagaagacctagctaagatcattaatgaaggcagctagattaaacaacagattttcaatgtaaatgaaacggccttatatyggcagaagatgccatctagaactttcatagctacagaagagaagtcaatgctggcttgaaacatcaaaggacacgctgacactcttggcaggggctaatg

SEQ ID NO: 492911 - DNA, 201 bp, Homo sapiens
cagctctctcctcttaggtcctctgtcctgctaacactaggaagcacctcgccttcctcagactctcagctccatctcctcaactcagagagtccaccaasctccacctaagaaactcccaaggcagcaagctggggtaataatagggtttgccccatttatttctcatgtctcaaacatgactatcctttggtgcctgat

SEQ ID NO: 492912 - DNA, 201 bp, Homo sapiens
gctgggtttattagttctaaaaggttttttggtggaatctttatgattttctacctataagaccatatcatattgaagcagatcattttacttcttttctratttaaattgtcttacttgtttttcttgcttaatttctctggctaggacttccagtaactacattgaacagaaatgacaaaatgagcatcttaaccttat

SEQ ID NO: 492913 - DNA, 201 bp, Homo sapiens
gtggaaggataccctgagcctgggaggtcgaggcttcagtaagctatgatcatgccactgcactccagcctgggttacagagtgagcctcttctcaatttaaaaaaaaaaaaaaaaaaaaagatttagtaggaaaaaaggatgaaggcaaaatatctcattaataagttttattttgatggcatgttgcgatgataatatt

SEQ ID NO: 492914 - DNA, 201 bp, Homo sapiens
aaatcaggagtgctccagctttgttttcagtattgctttttgttttcagtattgttttagctgttggggtcccttgagattccatacaaattttaggatgsgttttttctacttctgcaaaaacataattgggattttaatcaagattgcatttaatctgtagattattttgagtagtattgacatcttaacaatattaat

SEQ ID NO: 492915 - DNA, 201 bp, Homo sapiens
taattatctcataacccgcagtctttacttgtctgacttcctttttagaccatgggaactgccagggcagatccctagacgctcaataaatgcatctttayttagaatgcacaggtgcagttatccagcgggcgcagtggaagtggggatgcaggaggtgcctgtgaatgggcagccggggagattctaatgtgggcagag

SEQ ID NO: 492916 - DNA, 201 bp, Homo sapiens
atatatatattatatatatataatatatatatatgaaatcatgaaggcttcatggcaggaaaatagggtctggaggcagggaacagaaggccgattcacasttcagctatgacaggaaacaccctctccatagggcatacgccttaaatgactgtgtaactttactttgatctctccatttacatcaggaatacccaaagt

SEQ ID NO: 492917 - DNA, 201 bp, Homo sapiens
atcctatatatatatgtcctatatatatatcctatatatatatgtcctatatatatatcctatatatatatgtcctatatatatatcctatatatatatgkcctatatatatatcctatatatatatgtcctatatatatatgtcctattagttctgtccctctagagaaccctgactaatacaataggtatccctccaaa

SEQ ID NO: 492918 - DNA, 201 bp, Homo sapiens
aacttcagtaggtgaggaagttgggaaaggccagtgcagaggcaggcaagagcagaggcaggcccatgggggctggggatgccagggaggatgaggggccytgcgggatgcagagggagtggaagcaaagttggagctcagagggtcctgctggcctgctgaagagctggatgcatcttatttgtgctgtcttagtcagtt

SEQ ID NO: 492919 - DNA, 201 bp, Homo sapiens
aaaactaagagaatttgatgccagaagatcaaccctaatgggctggccaaaggaagttcttgaaacagaaagtgataaaagaagtaaccttggaacatcgsggggagaaaagggaagaatataaggagcaaaaaatgggtaaacacaaaagagtttccttctcttttgagttttctaatttatatttgatagtcaaaccaa

SEQ ID NO: 492920 - DNA, 201 bp, Homo sapiens
tccatctcaaaagaaaaatttttttcaataatctggacatggtgatacgtgcctatagtcccagtttcttggaaggctgaggtgggaggattgcttgagtycaggagtttgaggttgcagtgagctatgattctgcccctgcactccagcctgggtgacagagcaaggccctgtctctaaaaaaataagatgtacaacttt

SEQ ID NO: 492921 - DNA, 201 bp, Homo sapiens
tttctttctcttgcctgactgtcctggccagaacttccaacactgtgttgaataggagtggtgagagagggcatccctgtcttgtgccacttttcaaaggraatgcttccagtttttgcccgttcagtatgatattggccgtgggtttgtcataaatagctcttattattttgagatacattccatcaatacctaatttat

SEQ ID NO: 492922 - DNA, 201 bp, Homo sapiens
aacagaaatgacaaaatgagcatcttaaccttattccagatcttagataaaaagcttttagtctttcactattgagtatgacattcactgtgagttttttrtatatggattttattatgttgaggtaatttccttctattcctagttttttatgtttttgtcatgaaagcatgttgaattttgtccggtgctttttctgga

SEQ ID NO: 492923 - DNA, 201 bp, Homo sapiens
tggccaaaggaagttcttgaaacagaaagtgataaaagaagtaaccttggaacatcggggggagaaaagggaagaatataaggagcaaaaaatgggtaaayacaaaagagtttccttctcttttgagttttctaatttatatttgatagtcaaaccaaaaagtataacagtgcctgatgcagacatcaatgaatagagaga

SEQ ID NO: 492924 - DNA, 201 bp, Homo sapiens
atttagcccatttacatttaaggttaatattgttatgtgtgaatttgatcctgtcattatgatgttagctggttattttgcccgttagttgatgcagtttmttgctagcatcgatggtctttacaatttggcatgtttttgcagtggctggtaccagttgttcctttccacgtttagtgcttccttcaggagctcttgtaa

SEQ ID NO: 492925 - DNA, 201 bp, Homo sapiens
agagctatacacacacatgacaccaaatgtcagtatcttggttttgattttgcactataattatataaagtgtaactattgaagaaattggataaagagtrcatggatctctctgtgctatctttgcaacttacagtaaatctataattatttcaaaataaaaaggttttttttaaaatatgaggtaaaataaagacattt

SEQ ID NO: 492926 - DNA, 201 bp, Homo sapiens
gaatgaagagtatgggaaagagttaataagtgggtaaatatgtatttacattatttataaataatgtatgtcaactatttgagacaaaaatattaaggtgytatgtgatcataaaaatgaagcaaaaatatatgaaaattaacataaagagcagaaggggagccaggcaccgtgcactcacctgtattcccagctacttgg

SEQ ID NO: 492927 - DNA, 201 bp, Homo sapiens
ttcttactcgactagccaaagaagggataaatttcaaattactaaaatcagaaatgaaagagagtgcatgactgttagccttagtagaagtaaaagaactrtaaaggaatactacaaaaaactatatgccaataaattagacacattggataaaattgaaatttttctaaaaagatgcagactaacaaaatagactacaga

SEQ ID NO: 492928 - DNA, 201 bp, Homo sapiens
ttttaataatggatagaacaatcagacggaagataagtaaggaaatataggacttgaacaacacaataaaccaattaaatctaatagacatgtacagaacrctgtgcccaataacagtatacacattcttctcaagtgttcacgagatatgttccaggataaaatatatgttagactacaaattatgccttaattaatttt

SEQ ID NO: 492929 - DNA, 201 bp, Homo sapiens
ttggaaaccatcattctcagtaaactattgcaaagacaaaaaaccaaacaccgcatgttctcactcatagatgggaattgaacaatgagaacacatggacwcaggaaggggaacatcacactctggggactgttgtggggtggggggagggatagcattaggagatatacctaatgctaaatgacgagttaatgggtgcag

SEQ ID NO: 492930 - DNA, 201 bp, Homo sapiens
acaagttgaaaaaaaggggtgagaaaaggcctagtaggcaaacacaaaatggaaagagcaggtacaactatgctaataccagataagatttaaggcaagarccattactagaggaaaagaaggacttttcaccaaaacaaagaggtcaatccaccaagaatatatcaacatcctaaatctagaggccctaaagaacacaat

SEQ ID NO: 492931 - DNA, 201 bp, Homo sapiens
cctgtgttaatttcgcttccatctctttctattggtcaacaccacaatctacatttgaaatgtcattcttccatgctagaatatgtattcggaaaaaaaawtttttaatttttttctgaagttccttggctgtaatacatttcattgactctcggctgtgatctgtggacaatgactgtgcacacctacagactcactcct

SEQ ID NO: 492932 - DNA, 201 bp, Homo sapiens
tttgcagatgacatgatctcatatgtagaaaatctaaggaattcattgaaaatttgtcagaactaataaatatctccagcatctttaagattaacagggtytaatttgtgaattatgtctttcatcaattttgaaaaaattattgagcagtatcacttcaaacatcacttcttccccacccctctctaggacttcaactaa

SEQ ID NO: 492933 - DNA, 201 bp, Homo sapiens
aggcagaggttgcagtgagccgagatcaagccactgtactccagcctgggtgacagagcaaaactccatctcaaaagaaaaatttttttcaataatctggrcatggtgatacgtgcctatagtcccagtttcttggaaggctgaggtgggaggattgcttgagtccaggagtttgaggttgcagtgagctatgattctgcc

SEQ ID NO: 492934 - DNA, 201 bp, Homo sapiens
gtttgggcatttggggtggtcctagttggcttgcttccacaggggtgacttctccctttctgcttgatttgcaccaaagatgagtcttagttgctgtctartgcacaagcagttttttctggcaccactcttctcttctaagactgattgtgggaggagactagtggcatgaaccagatacagtcaggggtcagatgaatg

SEQ ID NO: 492935 - DNA, 201 bp, Homo sapiens
atggtattgagagaagaagacagaagagtacgtacaaaattattctatttatgaaaagttcaaacagacaaaattattatataataatctgtagtgttagrcatctatagagagatcaccctttgggaggtttaaaaaccataagatggcttaagtggggcccctggtggtttggtaattattatctttcttgatctgcat

SEQ ID NO: 492936 - DNA, 201 bp, Homo sapiens
gactatccagttttcccagcaccatttgttgaaaagacagccttttctctactgagtggtctgacacccttgctgaatctaatttgaccatatatgcaagrgtctcttcctaggctctgtattctatttcattggtctttatgtttttctttatgccagactaaagtgttttgattactgtagctttgtaataagttttga

SEQ ID NO: 492937 - DNA, 201 bp, Homo sapiens
ataaaactggtgagtgaaatacaaaatgaataatcatatcatagatacaaacctaagtatattagtaattacaagaaaaaaatattgtcagacgtgataamgaaacatcccaaacatacattatgtagaagagacacagccaagagctacggcctgtaatcccagcaattcaggaggctgaggcaagaggatagcttgagg

SEQ ID NO: 492938 - DNA, 201 bp, Homo sapiens
cagccatccatctccagaactcttttcattgtgtacaactaaaactctataaccattaaacagtaactccccatttccaccttcctctagcccctggcaamcactatcctattttctgtctctgtgattttgactactctaagtacctcatacaggtggaatcatacagtattttttttgtatgataggctttgtgtgatg

SEQ ID NO: 492939 - DNA, 201 bp, Homo sapiens
ttcttccttgtggtaaaatacatataacacaaaatttaccatctcaacaattttcaagtatacagttcagtggtattaaatacgttttcaatgttgtgcarccatccatctccagaactcttttcattgtgtacaactaaaactctataaccattaaacagtaactccccatttccaccttcctctagcccctggcaacca

SEQ ID NO: 492940 - DNA, 201 bp, Homo sapiens
tgagttaatgctccttaataaactatcccatatatatatatatgtcccatatatatatataaactatatatgtatatataactatatatgtatatatacamacatatatgtatatgtatatataactatatgtgtatataaactatatataaactatatatatgtcccatatacatacatataaactatcctatatatata

SEQ ID NO: 492941 - DNA, 201 bp, Homo sapiens
ttgtttaatatgatcttatttttctagtttaaggtggaagaagaggttattgatttgagaattatcactggtaatttatgtttattgctacaattccccayccccactgtggtgcttttacagcatcccacaaatctaatatgttgtgtttttatttgcattaagtttccaatattttctaatgtctgttttgataccttc

SEQ ID NO: 492942 - DNA, 201 bp, Homo sapiens
tttgcgtgcagatctgacatccacgttaaattacatgatcaaatgactgactctaataaaatccaagctgtgacagaaccgtctgtttcaatgttatgtgaaaaaaaaaagtgtcatcagaatactgggctcggctgttccatgccaaagtggctgtccaaagaatgagacttgtcgagagcttaagagctaagagaagaa

SEQ ID NO: 492943 - DNA, 201 bp, Homo sapiens
tgtttgggcatttggggtggtcctagttggcttgcttccacaggggtgacttctccctttctgcttgatttgcaccaaagatgagtcttagttgctgtctrgtgcacaagcagttttttctggcaccactcttctcttctaagactgattgtgggaggagactagtggcatgaaccagatacagtcaggggtcagatgaat

SEQ ID NO: 492944 - DNA, 201 bp, Homo sapiens
tcagcaaacttcaaaaaatacagagaagtaattcagtgaaatcagaagaacaataagcaaccaaaatgagaaatgtaacagaaagattgaaattttttttwaaaaaaagcaaacagaaattctggcacagaagaatacaatgaatgaaattttaaaatgtaatagaaagcatcagtgacagaatgatcaagcagaagaaag

SEQ ID NO: 492945 - DNA, 201 bp, Homo sapiens
gttttgatactattgctttgtaatataatttaaaatcaggaagtatgatgcctctggctctgtttttctttatatatatacacacacacacacatacacasatatatgaaaagaatatgtatacacacagttttttagttttaattgacaaataatgatggtgtatattaatggagtacaatgtgatattttgtgacacgt

SEQ ID NO: 492946 - DNA, 201 bp, Homo sapiens
aatgatggtgtatattaatggagtacaatgtgatattttgtgacacgtatacattgtgaaatgataaaaatcaggctaactaacatatctgacatctaactttttttttttttttgagacaggctctcactctttcacccaggctggagtgcagtggtgcaatcatggcttaccgcagcctcaacctcccaagctcaagca

SEQ ID NO: 492947 - DNA, 201 bp, Homo sapiens
ctacatggagcaaaactgtcctttaggaatgaaagagaaacaaaacattgtaacatgaaagaaaactaagagaatttgatgccagaagatcaaccctaatgggctggccaaaggaagttcttgaaacagaaagtgataaaagaagtaaccttggaacatcggggggagaaaagggaagaatataaggagcaaaaaatgggt

SEQ ID NO: 492948 - DNA, 201 bp, Homo sapiens
gccccacaagacctgagtccacctaggaggtgggagatatcccttgcagcatgagaataataattaccacctcgtagggttgttctagagattgtcagacygagaccacgccacacacccagaaggcacccaagtcacagagcctgatattgttcctggagcgccattgcatcatccttgaccacaagatctgcgtcattg

SEQ ID NO: 492949 - DNA, 201 bp, Homo sapiens
ttaattaattaagaaattaattgatataaaacaccatatcaatagaatttttaataacacaaaaactacagtattatctcaatagatgcaggaagactgtytgacaaaaatccagcaccctttcatgattaaaaaaacacacacacacacacttaacaaactaggaatagaagagaacgtttcatagatactctttgaggg

SEQ ID NO: 492950 - DNA, 201 bp, Homo sapiens
taacgttgtccatagtctcttcatatttacacttataagggctgacatccaaacaaaaattatgaagcatgctgaaaagtggggcagggttctgggagggwaacaaaatggctaaaaaccaagagatgaaaacaaacaatagaaacagacccacaggtgatttagatagttgatctatcagtgaagaaattttaaaataac

SEQ ID NO: 492951 - DNA, 201 bp, Homo sapiens
gcaaagggaagaaggttttacatttcactcaagctagtaaaatgttggctccgacagatctttgtggtatgaaataggtctgtaacttgattgcagtagtrgttacatgaatctacatatgccataaaatggtatagagctatacacacacatgacaccaaatgtcagtatcttggttttgattttgcactataattatat

SEQ ID NO: 492952 - DNA, 201 bp, Homo sapiens
ttaaagatctccaatctgattcaatcaaaacaagactactcctgagacataatcaatttgtcaaaaaccaaagacaaagaaaggatcctaaaagctgcaaragaaaagaaacaaatcacatgtaaagaagttccagtaaggctaacagtggatttctcagcagaaaccttacaaaccaggagagagtgggatgatatattc

SEQ ID NO: 492953 - DNA, 201 bp, Homo sapiens
tcgtcatgcaggccatctgggaagggaatatgcccaggagctccgcctctgagctgttggaaatgcatgccccagggtgggctcagagagcaggcaaacayacagggtattgtccaggtgacggagggggtcctgggccctatctgggggctgctgtagggttagcagctgagaaagggcctcacagctctagccaaggag

SEQ ID NO: 492954 - DNA, 201 bp, Homo sapiens
ctattcttatttaacgtgattattgatatatttggtttaaaatatattagtaattactgacatatttgggtttaataattctttacaatctttcacttgayctatatgcctttttctctttgactatctacttttgaatgaattatttttttattccatttttgtttgtctgttttgagatgggatttcactctgttaccc

SEQ ID NO: 492955 - DNA, 201 bp, Homo sapiens
ctttgctcctccaatgatcttgccttctacccgtgctcggccacctctcccacgctccttctctagatccctacgtgccatccaacagagtggccacaaamccctcaaaatgagcctggtccaaagtgagaggcactgtctgtgtaaatcacatgcgaggtttcaaagtcgtagtgtgggaaaaaatgtaaaatacttcac

SEQ ID NO: 492956 - DNA, 201 bp, Homo sapiens
tagtagtccctggctattcttatttaacgtgattattgatatatttggtttaaaatatattagtaattactgacatatttgggtttaataattctttacartctttcacttgatctatatgcctttttctctttgactatctacttttgaatgaattatttttttattccatttttgtttgtctgttttgagatgggattt

SEQ ID NO: 492957 - DNA, 201 bp, Homo sapiens
gaggctgggataaaggtacacacggaggctggtcccacatctgtaaaggcctcacatgcatggctacgggcatctcggccctcatgtccgagctccatccmccctgccccttaatcaactctcccaaccccaccccacctcaggtccaggatgaacattccagcagtgtggtctgcccacaggggagacccagggaagagg

SEQ ID NO: 492958 - DNA, 201 bp, Homo sapiens
ccaatgatcttgccttctacccgtgctcggccacctctcccacgctccttctctagatccctacgtgccatccaacagagtggccacaaacccctcaaaawgagcctggtccaaagtgagaggcactgtctgtgtaaatcacatgcgaggtttcaaagtcgtagtgtgggaaaaaatgtaaaatacttcactaataattct

SEQ ID NO: 492959 - DNA, 201 bp, Homo sapiens
cgattcaacaggaaaacattaaaaattctaaaataggtcaaagaagaaatagcaggggaaattataaaatactttgaaatgaaaatgaagatacaacataccaaactcatggggtgcttagaggaaaatgtatagctctaaatctatttataaaaagaaaaaagaagtcaaataacctgccaccttaagacactgaaaaaa

SEQ ID NO: 492960 - DNA, 201 bp, Homo sapiens
aacttaatcgataactgttgcgtgttctgactgctccaccgaccagccatactcccatctctccccctctccttgtgtcgctctattccctgagacacaamagtattgaaattcagtcaattaataaccctacaatggcctttaagtgttcaagggacagaaagaatcacacatctctcattttaaatcaaaagctagaaa

SEQ ID NO: 492961 - DNA, 201 bp, Homo sapiens
tgaggcagcaagtgctgatgtagaagctgcagcaagttattcagaagacctagctaagatcattaatgaaggcagctagattaaacaacagattttcaatstaaatgaaacggccttatattggcagaagatgccatctagaactttcatagctacagaagagaagtcaatgctggcttgaaacatcaaaggacacgctga

SEQ ID NO: 492962 - DNA, 201 bp, Homo sapiens
gcctgcacagtccttagaaaaaggcttagggtttgagggtgaggaatcccaggatcccagacacctggtgtgggcttcaggtgggctcgtgcccttggccytcccagctaagtggttctgctggaggaggcagaccagagtgggaccctcaaagtcacagagccctgggccgagacccccaaatgctcaactttaagggtg

SEQ ID NO: 492963 - DNA, 201 bp, Homo sapiens; identical to SEQ ID NO: 492836

SEQ ID NO: 492964 - DNA, 201 bp, Homo sapiens; identical to SEQ ID NO: 492837

SEQ ID NO: 492965 - DNA, 201 bp, Homo sapiens; identical to SEQ ID NO: 492838

SEQ ID NO: 492966 - DNA, 201 bp, Homo sapiens; identical to SEQ ID NO: 492839

SEQ ID NO: 492967 - DNA, 201 bp, Homo sapiens; identical to SEQ ID NO: 492840

SEQ ID NO: 492968 - DNA, 201 bp, Homo sapiens; identical to SEQ ID NO: 492842

SEQ ID NO: 492969 - DNA, 201 bp, Homo sapiens; identical to SEQ ID NO: 492843

SEQ ID NO: 492970 - DNA, 201 bp, Homo sapiens; identical to SEQ ID NO: 492844

SEQ ID NO: 492971 - DNA, 201 bp, Homo sapiens; identical to SEQ ID NO: 492845

SEQ ID NO: 492972 - DNA, 201 bp, Homo sapiens; identical to SEQ ID NO: 492846

SEQ ID NO: 492973 - DNA, 201 bp, Homo sapiens; identical to SEQ ID NO: 492847

SEQ ID NO: 492974 - DNA, 201 bp, Homo sapiens; identical to SEQ ID NO: 492848

SEQ ID NO: 492975 - DNA, 201 bp, Homo sapiens; identical to SEQ ID NO: 492849

SEQ ID NO: 492976 - DNA, 201 bp, Homo sapiens; identical to SEQ ID NO: 492850

SEQ ID NO: 492977 - DNA, 201 bp, Homo sapiens; identical to SEQ ID NO: 492851

SEQ ID NO: 492978 - DNA, 201 bp, Homo sapiens; identical to SEQ ID NO: 492852

SEQ ID NO: 492979 - DNA, 201 bp, Homo sapiens; identical to SEQ ID NO: 492853

SEQ ID NO: 492980 - DNA, 201 bp, Homo sapiens; identical to SEQ ID NO: 492854

SEQ ID NO: 492981 - DNA, 201 bp, Homo sapiens; identical to SEQ ID NO: 492855

SEQ ID NO: 492982 - DNA, 201 bp, Homo sapiens; identical to SEQ ID NO: 492856

SEQ ID NO: 492983 - DNA, 201 bp, Homo sapiens; identical to SEQ ID NO: 492857

SEQ ID NO: 492984 - DNA, 201 bp, Homo sapiens; identical to SEQ ID NO: 492858

SEQ ID NO: 492985 - DNA, 201 bp, Homo sapiens; identical to SEQ ID NO: 492859

SEQ ID NO: 492986 - DNA, 201 bp, Homo sapiens; identical to SEQ ID NO: 492860

SEQ ID NO: 492987 - DNA, 201 bp, Homo sapiens; identical to SEQ ID NO: 492861

SEQ ID NO: 492988 - DNA, 201 bp, Homo sapiens; identical to SEQ ID NO: 492862

SEQ ID NO: 492989 - DNA, 201 bp, Homo sapiens; identical to SEQ ID NO: 492863

SEQ ID NO: 492990 - DNA, 201 bp, Homo sapiens; identical to SEQ ID NO: 492864

SEQ ID NO: 492991 - DNA, 201 bp, Homo sapiens; identical to SEQ ID NO: 492865

SEQ ID NO: 492992 - DNA, 201 bp, Homo sapiens; identical to SEQ ID NO: 492866

SEQ ID NO: 492993 - DNA, 201 bp, Homo sapiens; identical to SEQ ID NO: 492867

SEQ ID NO: 492994 - DNA, 201 bp, Homo sapiens; identical to SEQ ID NO: 492868

SEQ ID NO: 492995 - DNA, 201 bp, Homo sapiens; identical to SEQ ID NO: 492869

SEQ ID NO: 492996 - DNA, 201 bp, Homo sapiens; identical to SEQ ID NO: 492870

SEQ ID NO: 492997 - DNA, 201 bp, Homo sapiens; identical to SEQ ID NO: 492871

SEQ ID NO: 492998 - DNA, 201 bp, Homo sapiens; identical to SEQ ID NO: 492873

SEQ ID NO: 492999 - DNA, 201 bp, Homo sapiens; identical to SEQ ID NO: 492872

SEQ ID NO: 493000 - DNA, 201 bp, Homo sapiens; identical to SEQ ID NO: 492875

SEQ ID NO: 493001 - DNA, 201 bp, Homo sapiens; identical to SEQ ID NO: 492874

SEQ ID NO: 493002 - DNA, 201 bp, Homo sapiens; identical to SEQ ID NO: 492877

SEQ ID NO: 493003 - DNA, 201 bp, Homo sapiens; identical to SEQ ID NO: 492876

SEQ ID NO: 493004 - DNA, 201 bp, Homo sapiens; identical to SEQ ID NO: 492879

SEQ ID NO: 493005 - DNA, 201 bp, Homo sapiens; identical to SEQ ID NO: 492878

SEQ ID NO: 493006 - DNA, 201 bp, Homo sapiens; identical to SEQ ID NO: 492883

SEQ ID NO: 493007 - DNA, 201 bp, Homo sapiens; identical to SEQ ID NO: 492882

SEQ ID NO: 493008 - DNA, 201 bp, Homo sapiens; identical to SEQ ID NO: 492881

SEQ ID NO: 493009 - DNA, 201 bp, Homo sapiens; identical to SEQ ID NO: 492880

SEQ ID NO: 493010 - DNA, 201 bp, Homo sapiens; identical to SEQ ID NO: 492885

SEQ ID NO: 493011 - DNA, 201 bp, Homo sapiens; identical to SEQ ID NO: 492884

SEQ ID NO: 493012 - DNA, 201 bp, Homo sapiens; identical to SEQ ID NO: 492887

SEQ ID NO: 493013 - DNA, 201 bp, Homo sapiens; identical to SEQ ID NO: 492886

SEQ ID NO: 493014 - DNA, 201 bp, Homo sapiens; identical to SEQ ID NO: 492888

SEQ ID NO: 493015 - DNA, 201 bp, Homo sapiens; identical to SEQ ID NO: 492889

SEQ ID NO: 493016 - DNA, 201 bp, Homo sapiens; identical to SEQ ID NO: 492890

SEQ ID NO: 493017 - DNA, 201 bp, Homo sapiens; identical to SEQ ID NO: 492891

SEQ ID NO: 493018 - DNA, 201 bp, Homo sapiens; identical to SEQ ID NO: 492892

SEQ ID NO: 493019 - DNA, 201 bp, Homo sapiens; identical to SEQ ID NO: 492893

SEQ ID NO: 493020 - DNA, 201 bp, Homo sapiens; identical to SEQ ID NO: 492894

SEQ ID NO: 493021 - DNA, 201 bp, Homo sapiens; identical to SEQ ID NO: 492895

SEQ ID NO: 493022 - DNA, 201 bp, Homo sapiens; identical to SEQ ID NO: 492896

SEQ ID NO: 493023 - DNA, 201 bp, Homo sapiens; identical to SEQ ID NO: 492897

SEQ ID NO: 493024 - DNA, 201 bp, Homo sapiens; identical to SEQ ID NO: 492898

SEQ ID NO: 493025 - DNA, 201 bp, Homo sapiens; identical to SEQ ID NO: 492899

SEQ ID NO: 493026 - DNA, 201 bp, Homo sapiens; identical to SEQ ID NO: 492900

SEQ ID NO: 493027 - DNA, 201 bp, Homo sapiens; identical to SEQ ID NO: 492901

SEQ ID NO: 493028 - DNA, 201 bp, Homo sapiens; identical to SEQ ID NO: 492902

SEQ ID NO: 493029 - DNA, 201 bp, Homo sapiens; identical to SEQ ID NO: 492903

SEQ ID NO: 493030 - DNA, 201 bp, Homo sapiens; identical to SEQ ID NO: 492904

SEQ ID NO: 493031 - DNA, 201 bp, Homo sapiens; identical to SEQ ID NO: 492905

SEQ ID NO: 493032 - DNA, 201 bp, Homo sapiens; identical to SEQ ID NO: 492906

SEQ ID NO: 493033 - DNA, 201 bp, Homo sapiens; identical to SEQ ID NO: 492907

SEQ ID NO: 493034 - DNA, 201 bp, Homo sapiens; identical to SEQ ID NO: 492908

SEQ ID NO: 493035 - DNA, 201 bp, Homo sapiens; identical to SEQ ID NO: 492909

SEQ ID NO: 493036 - DNA, 201 bp, Homo sapiens; identical to SEQ ID NO: 492910

SEQ ID NO: 493037 - DNA, 201 bp, Homo sapiens; identical to SEQ ID NO: 492911

SEQ ID NO: 493038 - DNA, 201 bp, Homo sapiens; identical to SEQ ID NO: 492912

SEQ ID NO: 493039 - DNA, 201 bp, Homo sapiens; identical to SEQ ID NO: 492913

SEQ ID NO: 493040 - DNA, 201 bp, Homo sapiens; identical to SEQ ID NO: 492914

SEQ ID NO: 493041 - DNA, 201 bp, Homo sapiens; identical to SEQ ID NO: 492915

SEQ ID NO: 493042 - DNA, 201 bp, Homo sapiens; identical to SEQ ID NO: 492916

SEQ ID NO: 493043 - DNA, 201 bp, Homo sapiens; identical to SEQ ID NO: 492917

SEQ ID NO: 493044 - DNA, 201 bp, Homo sapiens; identical to SEQ ID NO: 492918

SEQ ID NO: 493045 - DNA, 201 bp, Homo sapiens; identical to SEQ ID NO: 492919

SEQ ID NO: 493046 - DNA, 201 bp, Homo sapiens; identical to SEQ ID NO: 492920

SEQ ID NO: 493047 - DNA, 201 bp, Homo sapiens; identical to SEQ ID NO: 492921

SEQ ID NO: 493048 - DNA, 201 bp, Homo sapiens; identical to SEQ ID NO: 492922

SEQ ID NO: 493049 - DNA, 201 bp, Homo sapiens; identical to SEQ ID NO: 492923

SEQ ID NO: 493050 - DNA, 201 bp, Homo sapiens; identical to SEQ ID NO: 492924

SEQ ID NO: 493051 - DNA, 201 bp, Homo sapiens; identical to SEQ ID NO: 492925

SEQ ID NO: 493052 - DNA, 201 bp, Homo sapiens; identical to SEQ ID NO: 492926

SEQ ID NO: 493053 - DNA, 201 bp, Homo sapiens; identical to SEQ ID NO: 492927

SEQ ID NO: 493054 - DNA, 201 bp, Homo sapiens; identical to SEQ ID NO: 492928

SEQ ID NO: 493055 - DNA, 201 bp, Homo sapiens; identical to SEQ ID NO: 492929

SEQ ID NO: 493056 - DNA, 201 bp, Homo sapiens; identical to SEQ ID NO: 492930

SEQ ID NO: 493057 - DNA, 201 bp, Homo sapiens; identical to SEQ ID NO: 492931

SEQ ID NO: 493058 - DNA, 201 bp, Homo sapiens; identical to SEQ ID NO: 492932

SEQ ID NO: 493059 - DNA, 201 bp, Homo sapiens; identical to SEQ ID NO: 492933

SEQ ID NO: 493060 - DNA, 201 bp, Homo sapiens; identical to SEQ ID NO: 492934

SEQ ID NO: 493061 - DNA, 201 bp, Homo sapiens; identical to SEQ ID NO: 492935

SEQ ID NO: 493062 - DNA, 201 bp, Homo sapiens; identical to SEQ ID NO: 492936

SEQ ID NO: 493063 - DNA, 201 bp, Homo sapiens; identical to SEQ ID NO: 492937

SEQ ID NO: 493064 - DNA, 201 bp, Homo sapiens; identical to SEQ ID NO: 492938

SEQ ID NO: 493065 - DNA, 201 bp, Homo sapiens; identical to SEQ ID NO: 492939

SEQ ID NO: 493066 - DNA, 201 bp, Homo sapiens; identical to SEQ ID NO: 492940

SEQ ID NO: 493067 - DNA, 201 bp, Homo sapiens; identical to SEQ ID NO: 492941

SEQ ID NO: 493068 - DNA, 201 bp, Homo sapiens; identical to SEQ ID NO: 492942

SEQ ID NO: 493069 - DNA, 201 bp, Homo sapiens; identical to SEQ ID NO: 492943

SEQ ID NO: 493070 - DNA, 201 bp, Homo sapiens; identical to SEQ ID NO: 492944

SEQ ID NO: 493071 - DNA, 201 bp, Homo sapiens; identical to SEQ ID NO: 492945

SEQ ID NO: 493072 - DNA, 201 bp, Homo sapiens; identical to SEQ ID NO: 492946

SEQ ID NO: 493073 - DNA, 201 bp, Homo sapiens; identical to SEQ ID NO: 492947

SEQ ID NO: 493074 - DNA, 201 bp, Homo sapiens; identical to SEQ ID NO: 492948

SEQ ID NO: 493075 - DNA, 201 bp, Homo sapiens; identical to SEQ ID NO: 492949

SEQ ID NO: 493076 - DNA, 201 bp, Homo sapiens; identical to SEQ ID NO: 492950

SEQ ID NO: 493077 - DNA, 201 bp, Homo sapiens; identical to SEQ ID NO: 492951

SEQ ID NO: 493078 - DNA, 201 bp, Homo sapiens; identical to SEQ ID NO: 492952

SEQ ID NO: 493079 - DNA, 201 bp, Homo sapiens; identical to SEQ ID NO: 492953

SEQ ID NO: 493080 - DNA, 201 bp, Homo sapiens; identical to SEQ ID NO: 492954

SEQ ID NO: 493081 - DNA, 201 bp, Homo sapiens; identical to SEQ ID NO: 492955

SEQ ID NO: 493082 - DNA, 201 bp, Homo sapiens; identical to SEQ ID NO: 492956

SEQ ID NO: 493083 - DNA, 201 bp, Homo sapiens; identical to SEQ ID NO: 492957

SEQ ID NO: 493084 - DNA, 201 bp, Homo sapiens; identical to SEQ ID NO: 492958

SEQ ID NO: 493085 - DNA, 201 bp, Homo sapiens; identical to SEQ ID NO: 492959

SEQ ID NO: 493086 - DNA, 201 bp, Homo sapiens; identical to SEQ ID NO: 492960

SEQ ID NO: 493087 - DNA, 201 bp, Homo sapiens; identical to SEQ ID NO: 492961

SEQ ID NO: 493088 - DNA, 201 bp, Homo sapiens; identical to SEQ ID NO: 492962

SEQ ID NO: 493089 - DNA, 201 bp, Homo sapiens
acccctccgggacactaacctggcttctctccagcccgcgtggtgcgtcagtgtggccttgccgctcccgcagccctggtggtgggcttcccgccccgtcycctccctctccgcaggttacctgctcaactggtgcctcctgcaggcaggacgcaacctcagtgctggccccgggcatgcgggcctcgagagggcaggtgg

SEQ ID NO: 493090 - DNA, 201 bp, Homo sapiens
ggaatggaggaggctgcacttgggctggctcgggggcagggtgcctgcccttcactggtgtgtccctccatccagtggccaccagtaaccctgcaggagaycccgtgggcagcacgcgctgtcccgcctctgagcccggccttgatgctacaacagccagcgagtcccggggctgggaccttgtagacgccgtgacccccg

SEQ ID NO: 493091 - DNA, 201 bp, Homo sapiens
gctgccccgggacctggaacagccctcgcaagcagcagggtaggtagctcctgccagcccgcccacctcagccaggtgggggcctgacttctgtccccagscagtgaggtggctgcccgccagggctgggtctcacagctgcagcgcagccccggcgccacggagccctgcccaatagaacacttcccttttgggacagga

SEQ ID NO: 493092 - DNA, 201 bp, Homo sapiens
agcccgcccacctcagccaggtgggggcctgacttctgtccccaggcagtgaggtggctgcccgccagggctgggtctcacagctgcagcgcagccccggygccacggagccctgcccaatagaacacttcccttttgggacaggaccgggtctgccgtggcctatccccttctgacttaagcgaggaaacaggcctagag

SEQ ID NO: 493093 - DNA, 201 bp, Homo sapiens
gtggatcctggggcccgagtttccccaggtgtgcatggtcagggcacaggcccctgctccttctcagagaccaccgtcctcagggcctgtccctgtggccrtcaccctcccgcaactcagggcctcaccccgggtggtgcccgcgcggggctctcacgggactgtcacgtgcccttgcccccaggccagcatctcggcctt

SEQ ID NO: 493094 - DNA, 201 bp, Homo sapiens
ctgagagcacagccgtcttcctcagtcccccccgggcagggtgcgctgccgtcctcccagtccgcccccaccgggcagggtgcgctgccgtcctcccagtcccccccccgggcagggcgcgctgccgtcctcctagtccgcccccccgggcagggtgcgctgccgtcctcccagtcccccccgggcagggtccgctgtggg

SEQ ID NO: 493095 - DNA, 201 bp, Homo sapiens
ctaccccaagggatgccatgtcctccccagctgggtggggacgtttgtggcagcagcgctgaccacggctgcgggggtggtttctgaacctccactgcacraacaccacgctgtctggttaataagcaccggtggtgacctgtggaaccaaccgctgcagcgcggttctgtgttcgccgcccctcgtccgagcgttccccc

SEQ ID NO: 493096 - DNA, 201 bp, Homo sapiens
tggaggccacataggagccagtctctggagggtggtccccaggggccacagcagacccaggcctagtggacacctaaagtcaaagactaagttctaccaayggtgggaaggagagagggcaggggcacgggctccccgtcgctggaggggtgagcagggtccaaccacctggccccctgttagagaggcttccactcctgc

SEQ ID NO: 493097 - DNA, 201 bp, Homo sapiens
gctgcagcgcggttctgtgttcgccgcccctcgtccgagcgttcccccctcccctccctttttccatcacgtgagttttgaacgtgcagtaatccttcacwgccactgccgtgcatttgatggggaccagcgggggccctgagcacttcccatctttggcacaagcccctgttcctagctcaccccagacttgctgatccc

SEQ ID NO: 493098 - DNA, 201 bp, Homo sapiens; identical to SEQ ID NO: 349662

SEQ ID NO: 493099 - DNA, 201 bp, Homo sapiens
agggccccagaggaaggcgccatctcgggcctgccaccacctgccccttcaatggacacaggcctcagaacgcctgggggtcaaccctggaccgttctcakttgtgagactggccaggcagtggagccggacagggggcctgagacctcgttctagccctgccagttctggcagtgagccctgagtaagcatcactgtgtg

SEQ ID NO: 493100 - DNA, 201 bp, Homo sapiens
gtctctggagggtggtccccaggggccacagcagacccaggcctagtggacacctaaagtcaaagactaagttctaccaatggtgggaaggagagagggcaggggcacgggctccccgtcgctggaggggtgagcagggtccaaccacctggccccctgttagagaggcttccactcctgccagcctcaccctaggaggga

SEQ ID NO: 493101 - DNA, 201 bp, Homo sapiens
ttcctgtcctccaggaagtctccccaggctgtgcccaaagttagtcccggtcccttgagagaaacccttgctgtgccactccatggctgctgccaggtccyaccgatgcttggggacgagctagggtgggcagtgatgggcggggctgggcccatgggggcggcagttacctgtgcaggcaagcaagccagaggcgcctcg

SEQ ID NO: 493102 - DNA, 201 bp, Homo sapiens
gttggtggggcaggaataggcccgccctccaggcaaccacctgtgtcactccagagcagcccatgcagacagacaactgcccaagggccagcctggacccyggagccctcccagccagtcggcctgggtcacagcctgggtggaatgaccagtgtggtcacagcccagatgggatgactagcgtgaaggccctgaggacct

SEQ ID NO: 493103 - DNA, 201 bp, Homo sapiens
cgtgttttctgcctttgcgtcctccaaggtcctgcgccgctaagcctttaagccccagctcactttcctgtcctccaggaagtctccccaggctgtgcccraagttagtcccggtcccttgagagaaacccttgctgtgccactccatggctgctgccaggtcctaccgatgcttggggacgagctagggtgggcagtgat

SEQ ID NO: 493104 - DNA, 201 bp, Homo sapiens
ggccctcctcacctttcaggatcaacctggagatcatccgctcagaggccagctccaacctgaagaagcttctggagaccgagcggaaggtgtctgcctcygtggccgaggtccaggagcagtacaccgagcgcctccaggcaagtgggcacctgggcctggggctggcgggagaggctgccctgatagagtgagctgggc

SEQ ID NO: 493105 - DNA, 201 bp, Homo sapiens
ccacagtccttagtccaccagggaggggccggctgctgacctgcaccccacactcgcccgtccaggtgagctgctccccggtgtctgcccagctcctgtcrgtgctgcagggcctcctgcacctggagcccaccctccgctccagccagctgctctgggaggccctggagagcctcgtgaaccgggccgtgctcctggcca

SEQ ID NO: 493106 - DNA, 201 bp, Homo sapiens
cccctgtgcccctctctgttgtgtggctctgccccacccttcctccccgtcctgtgctggctcccaccctctgggctctctgcccttgtccacacctcggyggcaggagtcactgagtcagagatgcgaatccacccgagtggctccctacatacacctgcctagctccaagcccttcagcctcagcccagacagagccct

SEQ ID NO: 493107 - DNA, 201 bp, Homo sapiens
gtccatattgtccactggggcgggggaagtgccctggggtgagataaggcagcctcagatgcgccgttttgtcgcatcattaccgtgggtaatgttccagycaggggagcctcccgctcccccgagtcctccccaagctcatccggtcccgtcactctgcaggggccgtgctggcctcgtgctgcaggtttctgagccggc

SEQ ID NO: 493108 - DNA, 201 bp, Homo sapiens
ccggtgactctgggagatgctcaggccctgaagcccctcaagttctccagcaaccagccccctgcagccggaagttcaaggcaagatgccaaggatcccaygtccttgctgggcgtcctccaggccgaggccgacagcacaagtgaggggctggaggacgctgtccacagccgtggtgccagaccccctgcagcaggccca

SEQ ID NO: 493109 - DNA, 201 bp, Homo sapiens
ggtgcaacccgcctgtcctgctgttctgttttggggaaaggcacgtgttggggctcttctgggctgggcctgttacctacccgggtgttcccagggctggwgtcagacctgttgcgactgaatcctggtaaaaccctgagtgccaagggtttccgtcttcctgttggtgtgggccccctacccacatgcagacgggcagac

SEQ ID NO: 493110 - DNA, 201 bp, Homo sapiens
ttgatgctacaacagccagcgagtcccggggctgggaccttgtagacgccgtgacccccggccctcagcccaccctggagcagttggaggagggtggtccvcggcccctggagaggcgttcttcctggtatgtggatgccagcgatgtcctaaccactgaggatccccagtgcccccagcccttggagggggcctggccgg

SEQ ID NO: 493111 - DNA, 201 bp, Homo sapiens
ttcaaggcaagatgccaaggatcccacgtccttgctgggcgtcctccaggccgaggccgacagcacaagtgaggggctggaggacgctgtccacagccgtrgtgccagaccccctgcagcaggcccaggtggggatgaggacgaggacgaggaggacacggccccagagtccgcactggacacatccctggacaagtcctt

SEQ ID NO: 493112 - DNA, 201 bp, Homo sapiens
acgctgaggccgggtcctgctctgagacatcagaggaggctttctggggaggaggttttgcagggcgttcaggtagacagcggaatggaggaggctgcacytgggctggctcgggggcagggtgcctgcccttcactggtgtgtccctccatccagtggccaccagtaaccctgcaggagaccccgtgggcagcacgcgct

SEQ ID NO: 493113 - DNA, 201 bp, Homo sapiens
tccaccacagctctgcctgcccttcagcccagcaaggtttaatcaaaatgcaatgctttgcaagtctttactgcttggaggtggctgagttgggggccctrggcaggggtaagctggcaggcagtgccatggcaggccagggtcccctcccatggggtctggcccccgttccagcatgtccagcccctgaagttggagtgg

SEQ ID NO: 493114 - DNA, 201 bp, Homo sapiens
aggtactgtatgggacatgcagttcattcaggtttcagatacacaacagacgatattttggtgtaagtatatcccagatgttgcatgggatatacttatgycaaaagttattcattgtttgtctgaaattcaaattgaacaggtactctgtagtttcatttgctaaatcttgcagccctgctgggaacccacatagctgag

SEQ ID NO: 493115 - DNA, 201 bp, Homo sapiens
cctcgtgaaccgggccgtgctcctggccagcgatggtgagggggcggggcaggggcgtaggcacagcctggtgggcagacactgaggtcttagaccatggrggggggagcctgcccttggccccaacccatcctctgcccaggggaggtggccgctttttcctgcctcttcctcaagcccccatccctccctctccggctc

SEQ ID NO: 493116 - DNA, 201 bp, Homo sapiens
gctcccgtgacctcaaatgcccttcagcctggggtcccctgacttaccgggttgggcagcacttgaagcaaagccatgtgggacctccagtcacagcccakccgtgcccaggtgtgggactgtgggcacagacccagcttctctaggacccagccgcctccagttccccacctgttgtgggaggtataaagtgcctgcctt

SEQ ID NO: 493117 - DNA, 201 bp, Homo sapiens
gagggcccgggctggggacatgcagatcagaaccctggcttacacctgtcaggctgcctcctggaaggagcccactggccccctggggcagttggacaggyggagggctgaggggcggtgcggggagtaggggctggactgccggaaacaccaggcttggtcgtggaccaggctggggagtgggcctgagacctcaagggc

SEQ ID NO: 493118 - DNA, 201 bp, Homo sapiens
cgttctacagtgcccagaccaggaccccctgcagggaggaggggcatcccaaggacagcctctcaggatgctcctggcagcctggtgctggaggtgcagargaagaaactgaggcccaggcaggatgagtgactgggccaaggtctgctggtgagggcccgggctggggacatgcagatcagaaccctggcttacacctgt

SEQ ID NO: 493119 - DNA, 201 bp, Homo sapiens
ggggctccgggctctccgttctacagtgcccagaccaggaccccctgcagggaggaggggcatcccaaggacagcctctcaggatgctcctggcagcctgrtgctggaggtgcagaagaagaaactgaggcccaggcaggatgagtgactgggccaaggtctgctggtgagggcccgggctggggacatgcagatcagaac

SEQ ID NO: 493120 - DNA, 201 bp, Homo sapiens
tactgcagcccaggaatgcaccctggaggaagtggttgagcggctcctgtctgtcaaggggcgacccagaccgagccccctggtcaaggcccataaaagcrtccaggccaacctagaccagagccagaggggcagctccccgcaaaacactacaacccccaagcccagcgtggagggccagcagccagcagcagctgctgc

SEQ ID NO: 493121 - DNA, 201 bp, Homo sapiens
gcagttggaggagggtggtccgcggcccctggagaggcgttcttcctggtatgtggatgccagcgatgtcctaaccactgaggatccccagtgcccccagyccttggagggggcctggccggtgactctgggagatgctcaggccctgaagcccctcaagttctccagcaaccagccccctgcagccggaagttcaaggca

SEQ ID NO: 493122 - DNA, 201 bp, Homo sapiens
tgtgtgaggacgcccagcagctgtccctggaggacacgttcagcaccatgaaggctttccgggaccttttcctccgcgccctgaaggtggggcagcccggygggacacagcctgtctggctagagtggggtcccgaggcccctggccttcctccggcaggatgggcagaggcacctttcgtcgggccgacacagccatgtg

SEQ ID NO: 493123 - DNA, 201 bp, Homo sapiens
gggcagaggtggccggaaggtcttgcgcatctgggtgagtggacggccactgggtgaccaagagggccgggcctgggagggtggcttaaaaccacagtgcrccgggggctccgggctctccgttctacagtgcccagaccaggaccccctgcagggaggaggggcatcccaaggacagcctctcaggatgctcctggcagc

SEQ ID NO: 493124 - DNA, 201 bp, Homo sapiens
agtccttggcctcggggtccgcttggagcttcaggggaaactgagtccgggaggaggcaggggcgtgcttgggtccaggagcgaggttccgggctgcggcrtgtgtgcccaggtggcggcgggcggtccggcggcgcagggtacagttcccgggcggggaccccagggcgcccctggcccccccggctccgcgcgccccgc

SEQ ID NO: 493125 - DNA, 201 bp, Homo sapiens
cgatgcatggcacaacctgctggacagtggcgatgaggggttcagggacctgggcacccagaagcgggcacctgatattgtacccagcaaaactgctcctrataatgtcattttttctctctcttacaggcctcaggcccaggcccaaggccaagtgagagagcccaggccacaggacatgctgccattctgccaagagag

SEQ ID NO: 493126 - DNA, 201 bp, Homo sapiens
ccgcccgagcgcgcactggccgcagagtggtgggcccagggtcggccgggcctactcccagggcaggcgggatttccgcgcctcgcggctgccacatcctraccatgaatcagccacagttgggaaaataaacttcaacttcgggtccgccgcccgggtggcaccccgaggtgcgcgccggcctgcggccccaccctgact

SEQ ID NO: 493127 - DNA, 201 bp, Homo sapiens
agttagtgattgggcaggtgtcccggtggtatcgcacccaccatgtgattgaaatccgtcaccatgcggcctgcttcccatctttgtcttctgatcatgaygctgctgagagcgcctttctgcccacctgctcccagggggcccttctgtcctgctgtgggtcctcacagtggcccgggggccctctttgcacaacaagcg

SEQ ID NO: 493128 - DNA, 201 bp, Homo sapiens
tatgaccacagtggatctcactggacgtgtcccattgcaggaagcggaaaagagccaccccgacctcctgcagctgccccgggacctggaacagccctcgmaagcagcagggtaggtagctcctgccagcccgcccacctcagccaggtgggggcctgacttctgtccccaggcagtgaggtggctgcccgccagggctgg

SEQ ID NO: 493129 - DNA, 201 bp, Homo sapiens; identical to SEQ ID NO: 349644

SEQ ID NO: 493130 - DNA, 201 bp, Homo sapiens
ggcagcgggcagccgtcttgtcttggcacaggcagggtgggggctggacaccctggggcccagctaggcacacagcaatcaggacctgaaccctgaagccrgggcctggctccaatgagctgctgcccttccccctcccaggttgagagaggctttttctgaggacagaggagggacctggggcctcggaggaggcatctc

SEQ ID NO: 493131 - DNA, 201 bp, Homo sapiens; identical to SEQ ID NO: 349647

SEQ ID NO: 493132 - DNA, 201 bp, Homo sapiens
atgtcccactagcatgggtggggtgagcccctcagacctcagagtcttcatctgcaaaagaccctgccctgtgcagttccattggtgctggtggactgcckgggggggtggatgggacgccccttcttggtgccctgacccttttgctgtccaaggcatggggtctggcctgagccatgggtactgggccctgcagagcct

SEQ ID NO: 493133 - DNA, 201 bp, Homo sapiens
actgtccctggcagctgcccacagaaactagggttgcagcagccatagaaaggacagaatgagctcatatcctttgcacaccgtggatggagctggaggcsgtgatcctaagtgaaccaacccagaaacagaaaatgaaatgccaataagagggaactacagggtggttcacgtggacgcaagatggagacagggacacgg

SEQ ID NO: 493134 - DNA, 201 bp, Homo sapiens
aatgcccttcagcctggggtcccctgacttaccgggttgggcagcacttgaagcaaagccatgtgggacctccagtcacagcccagccgtgcccaggtgtgggactgtgggcacagacccagcttctctaggacccagccgcctccagttccccacctgttgtgggaggtataaagtgcctgccttggaggtggtgggaag

SEQ ID NO: 493135 - DNA, 201 bp, Homo sapiens
gctgcgtgcgcgccgtcatgaactcgcggcagggcatcgagtacatcctcagcaaccagggctacgtgcgccagctctcccagggtgagccgcagtgtggragggccgcccaggcggacgctggggacctggtatgaggcttcaggcccaaaaggccccgggaggcctggggaaccaccaggaggaagcgcagccaggcag

SEQ ID NO: 493136 - DNA, 201 bp, Homo sapiens
gtggcctccgaaccctctgaccctgtccgtcccttcccagggctgcagctgctggacgtcctggctcgcctgcggtgagtccccactgtagcggtcctgcyggctccccctcctgctcccaaggccaggcccacctgccctttggctcccagccacctcacctaagcagcacctccagatggcagggaggtggctccctcg

SEQ ID NO: 493137 - DNA, 201 bp, Homo sapiens
ccggaccccccagccacctccaccgacacttgccagagtgccatgaaggacccctggcccccagctctgctctctgggtgacccaagcaggggctaccacygctctgagcccagcttccctctgtgagatgttgctgtcttttgatcattttgcttgctttcttcctcagtatgaaacgaccatattcatccgagatgcag

SEQ ID NO: 493138 - DNA, 201 bp, Homo sapiens
attaccgtgggtaatgttccagccaggggagcctcccgctcccccgagtcctccccaagctcatccggtcccgtcactctgcaggggccgtgctggcctcktgctgcaggtttctgagccggctcctcccctcccagccctgagcctcggggtcctcatgcgcgcagtagggcccttcctgcctgccgcctcggttgctga

SEQ ID NO: 493139 - DNA, 201 bp, Homo sapiens
cctccagagcctcaggtctctggtgtcccatgagtgcagcagggcagggtcaggtgctctgggtggcagaagtgaaatggggaaggcggggagtggcctcygaaccctctgaccctgtccgtcccttcccagggctgcagctgctggacgtcctggctcgcctgcggtgagtccccactgtagcggtcctgccggctcccc

SEQ ID NO: 493140 - DNA, 201 bp, Homo sapiens
tccatctcaaaaaaaaaaacagaaatggcctcagcaaagtttgcccacatgggtgcctgtgccccgccagtgtgggctgaagggggccggccctgcctgcrgagggctgtgctcattgaccagactgagatgactggcaagtcctaggcccagtgaacactaagtttcctcctgctcaggccagagccccgcccctcctgt

SEQ ID NO: 493141 - DNA, 201 bp, Homo sapiens
ggaggcccaggaaagcagtgtcacctcctgggtcacacaacccaggcaggagggcagcctgggccaccccactacacagtccgggcccctagcacggagtycttcccgggctccacctgccctggaaggttctctggctcaggagctgctcagccttggggagaactaggcaagcaggacaggctgaccgttagggtcccc

SEQ ID NO: 493142 - DNA, 201 bp, Homo sapiens
gcctcgtgaaccgggccgtgctcctggccagcgatggtgagggggcggggcaggggcgtaggcacagcctggtgggcagacactgaggtcttagaccatgsgggggggagcctgcccttggccccaacccatcctctgcccaggggaggtggccgctttttcctgcctcttcctcaagcccccatccctccctctccggct

SEQ ID NO: 493143 - DNA, 201 bp, Homo sapiens
cccagcagtgccctctgcaggccgccatgggaagtgcacactgcatcccctaggcaggattgtaggcgggtaatagccccatgctgccccagctaggggcwtccaggctcccagggacagagcgctgggacctccccccacaaggccacagacaagtagtggctaaaccagtgggccctgactctcagcccccgagtcctt

SEQ ID NO: 493144 - DNA, 201 bp, Homo sapiens; identical to SEQ ID NO: 349664

SEQ ID NO: 493145 - DNA, 201 bp, Homo sapiens
accactgcactccagcatgggtgacagagcgagactccatctcaaaaaaaaaaacagaaatggcctcagcaaagtttgcccacatgggtgcctgtgccccrccagtgtgggctgaagggggccggccctgcctgcagagggctgtgctcattgaccagactgagatgactggcaagtcctaggcccagtgaacactaagtt

SEQ ID NO: 493146 - DNA, 201 bp, Homo sapiens
ccccctcccctccctttttccatcacgtgagttttgaacgtgcagtaatccttcactgccactgccgtgcatttgatggggaccagcgggggccctgagcrcttcccatctttggcacaagcccctgttcctagctcaccccagacttgctgatccccccatccctgcacgggccttggtcttggccatttctccaggttc

SEQ ID NO: 493147 - DNA, 201 bp, Homo sapiens
tcgcacccaccatgtgattgaaatccgtcaccatgcggcctgcttcccatctttgtcttctgatcatgacgctgctgagagcgcctttctgcccacctgcwcccagggggcccttctgtcctgctgtgggtcctcacagtggcccgggggccctctttgcacaacaagcggagttcaagatcttggagggctttggaggca

SEQ ID NO: 493148 - DNA, 201 bp, Homo sapiens
aagtacaaaaattagctggccgtggtggcatgtgcctgcaatcccaactactcaggaggctgaggcaggacaatcattggatcccaggaggtagaagttgyagtgagctgagatcgtaccactgcactccagcatgggtgacagagcgagactccatctcaaaaaaaaaaacagaaatggcctcagcaaagtttgcccaca

SEQ ID NO: 493149 - DNA, 201 bp, Homo sapiens
ggaggaggcatctctgagtatgtctggtccggggggaggaaacccaggtgggaggattctggtgacgagctcctggccacctgccctcattgcccagcagwccccctgcagggtacgtctggggcctgcgataggccagccctgggctcatgccacctgcagggcctgatcaggccctgtgcccttcccagtccctaacca

SEQ ID NO: 493150 - DNA, 201 bp, Homo sapiens
ggcatttcctgtttgctgcatccccctaccccccctacagagtcaccctcctccctgtggcttccacagggctctgttcctaacccaggaagatgtacctyccccaggcccattgtctgccccagatcctggggacacagagagcccagctgtagcctggctcccgggccagtggtgtcccctggcgttcagtgctggcca

SEQ ID NO: 493151 - DNA, 201 bp, Homo sapiens
ttgccaagcagtggaaaaattggggctctcggaggagctaaaaatacagtgtggcagcccctgcctcctagttccggaatcctctcctgccgttctgcccrcccaccccgtggaagacaagctccctccctgcacccccaccaccaacgctggctcagggcccagaagcacccagccctgtgccagtgccagaagggcgac

SEQ ID NO: 493152 - DNA, 201 bp, Homo sapiens
ggcctcagcctccggggcctcagccggagccctgtctatgccgggccgcagcccagcgagaccctgttacactcactgcccccagacagcacccggtgggrcacggccagctggggcagctcagacacagagccaggcacccaggcacgggggtataggaacctgatgggcaggagggccagtttcctcccaccgtggctc

SEQ ID NO: 493153 - DNA, 201 bp, Homo sapiens
tctcgtcaatctgtcagtaagctgtgggggtggcattgacacactcatccgcatttgaggacaggaaccaggagatcctatgggtcacaggccggtcagcrgaagagcccagtctcaccctgaatcagagccgtcccccaccctgggccctggtagcagcccctggccgtgctgggtgcgcaggctcagcctctcccccac

SEQ ID NO: 493154 - DNA, 201 bp, Homo sapiens
accgggcagccctcagagggtgttggcatggctgtcccgggccccccagccccacccactccgagtcagggttgcttctgtgtgataagccgttgagtgcrtttcttttatttggaagcagaggttccccctgattctgatgataataaaacaaagaaactgtgtgtgatccagtaaggtatgtacgcagccggcgctccg

SEQ ID NO: 493155 - DNA, 201 bp, Homo sapiens
ctgcaccagcggtccccctgtgcccctctctgttgtgtggctctgccccacccttcctccccgtcctgtgctggctcccaccctctgggctctctgccctygtccacacctcggcggcaggagtcactgagtcagagatgcgaatccacccgagtggctccctacatacacctgcctagctccaagcccttcagcctcagc

SEQ ID NO: 493156 - DNA, 201 bp, Homo sapiens
ccaggaagtctccccaggctgtgcccaaagttagtcccggtcccttgagagaaacccttgctgtgccactccatggctgctgccaggtcctaccgatgctkggggacgagctagggtgggcagtgatgggcggggctgggcccatgggggcggcagttacctgtgcaggcaagcaagccagaggcgcctcgtttctgtcgg

SEQ ID NO: 493157 - DNA, 201 bp, Homo sapiens
tcctgcctcagcctcccgagtagctgggaccacaggcacacgccaccacgcgcggctaattttttgtatttttagcagagacagggtttcaccatgttggycaggctggtctcgaactcctgacctcaggtgatccacccgcctcggcctcccaaagtgctgggattacaggcgtgagccaccgtgcccagcccccacctt

SEQ ID NO: 493158 - DNA, 201 bp, Homo sapiens
tgaggcaggacaatcattggatcccaggaggtagaagttgcagtgagctgagatcgtaccactgcactccagcatgggtgacagagcgagactccatctcaaaaaaaaaaacagaaatggcctcagcaaagtttgcccacatgggtgcctgtgccccgccagtgtgggctgaagggggccggccctgcctgcagagggctg

SEQ ID NO: 493159 - DNA, 201 bp, Homo sapiens
gggagggctgctcggggcccctgctactgccagtatcataatggctgctaagagcacctaagggtgccagccttcaccaccactccggaaaccaccctgcygccaccacctcggtgcacacacctactggacgcacagacacacgcatgcccaccgccactcgggcacgtgcacacacacaagcacactgccactctccgg

SEQ ID NO: 493160 - DNA, 201 bp, Homo sapiens
gaggtgggccgtggtggcgggggcataatgggagggcttcaagtccccccggacctggggtgtagaggcgtagaggccatacccccatgcccaccactcaggccgccggtctccctgtctcagggctccgtctagagccagcagcctcagtcagagccacgcccccacccctcccagcaccccttccttcctgcagcactg

SEQ ID NO: 493161 - DNA, 201 bp, Homo sapiens
cccacccactccgagtcagggttgcttctgtgtgataagccgttgagtgcgtttcttttatttggaagcagaggttccccctgattctgatgataataaarcaaagaaactgtgtgtgatccagtaaggtatgtacgcagccggcgctccgtgggggctaacagcagctgcagggcagtggggctggagcttgctgcccac

SEQ ID NO: 493162 - DNA, 201 bp, Homo sapiens
acagccgtcttcctcagtcccccccgggcagggtgcgctgccgtcctcccagtccgcccccaccgggcagggtgcgctgccgtcctcccagtccccccccygggcagggcgcgctgccgtcctcctagtccgcccccccgggcagggtgcgctgccgtcctcccagtcccccccgggcagggtccgctgtggggcgcttca

SEQ ID NO: 493163 - DNA, 201 bp, Homo sapiens
ctcatccggtcccgtcactctgcaggggccgtgctggcctcgtgctgcaggtttctgagccggctcctcccctcccagccctgagcctcggggtcctcatkcgcgcagtagggcccttcctgcctgccgcctcggttgctgaaattcggtcagggatgggtacagggaagcctaagatatagtgggggacacagtgctacc

SEQ ID NO: 493164 - DNA, 201 bp, Homo sapiens
ctgttgggtggggggttttctagatcactttcctcgatgccaagaagagcctgaacctcaacatcttcctgaagcaatttaagtggtgagtgagggaggtrgcccccatcccaggccacggagcctcgcctccacctgagccttctgacttgggcccagcagtgccctctgcaggccgccatgggaagtgcacactgcatc

SEQ ID NO: 493165 - DNA, 201 bp, Homo sapiens
gacagcccccatcccctccccgctgacggctccctgccctctgcctgcagctcggcaagatgtcggtgaaggagggcgcacagcgcaagtgggcagcgctraaggagaagctggggccacaggattcggaccccacggaggccaacctggagagcgcggaccctgagctgtgcatccggctgctccagatgccctctgtgg

SEQ ID NO: 493166 - DNA, 201 bp, Homo sapiens
cggtgaaggagggcgcacagcgcaagtgggcagcgctgaaggagaagctggggccacaggattcggaccccacggaggccaacctggagagcgcggacccygagctgtgcatccggctgctccagatgccctctgtggtcaactactccggcctgcgcaagcgcctggagggcagcgacggcggctggatggtgcagttcc

SEQ ID NO: 493167 - DNA, 201 bp, Homo sapiens
gctgaaactctcatctctagggatccgtgggaatagagggggtgatggggctggacaccctggcagacaggccacagtccttagtccaccagggaggggcyggctgctgacctgcaccccacactcgcccgtccaggtgagctgctccccggtgtctgcccagctcctgtcggtgctgcagggcctcctgcacctggagcc

SEQ ID NO: 493168 - DNA, 201 bp, Homo sapiens
tgatccccccatccctgcacgggccttggtcttggccatttctccaggttccctgagtggggaatggtgctgagaccctcctttgagtgattgttttggayagtttttgttttcttgctgtctgtttagagtagtggttctcaaaccctgcttgggccatcccactggggagctgggacaccacctggcactgtggtggca

SEQ ID NO: 493169 - DNA, 201 bp, Homo sapiens
aggctttccgggaccttttcctccgcgccctgaaggtggggcagcccggcgggacacagcctgtctggctagagtggggtcccgaggcccctggccttccyccggcaggatgggcagaggcacctttcgtcgggccgacacagccatgtgggccctgcgctgctgcggctcagggagggggacgcccaggcccatggagcc

SEQ ID NO: 493170 - DNA, 201 bp, Homo sapiens
tgggcaggggtaagctggcaggcagtgccatggcaggccagggtcccctcccatggggtctggcccccgttccagcatgtccagcccctgaagttggagtkgggggcggtctgcctttgctgccactgccaggcctctgccctgcagctgaaacttggccatcacatcaacagaaaacccctcccagtgccagctgcccag

SEQ ID NO: 493171 - DNA, 201 bp, Homo sapiens
cctcacctaagcagcacctccagatggcagggaggtggctccctcggagtaaccccaggggtccagccagaagccaggtctcaggctagaatccagctcaytgtccctggcagctgcccacagaaactagggttgcagcagccatagaaaggacagaatgagctcatatcctttgcacaccgtggatggagctggaggccg

SEQ ID NO: 493172 - DNA, 201 bp, Homo sapiens
acagcctgtctggctagagtggggtcccgaggcccctggccttcctccggcaggatgggcagaggcacctttcgtcgggccgacacagccatgtgggcccygcgctgctgcggctcagggagggggacgcccaggcccatggagcccctgagggatgccacgctggggtgacggggccacatctgccagtgcaggagaaca

SEQ ID NO: 493173 - DNA, 201 bp, Homo sapiens
aactcagggcctcaccccgggtggtgcccgcgcggggctctcacgggactgtcacgtgcccttgcccccaggccagcatctcggccttccgggcactggaygagctgtttgaggccatcgagcagaagcaacgggagctggccgactacctgtgtgaggacgcccagcagctgtccctggaggacacgttcagcaccatga

SEQ ID NO: 493174 - DNA, 201 bp, Homo sapiens
cacctgcgtcagctgcgtgcgcgccgtcatgaactcgcggcagggcatcgagtacatcctcagcaaccagggctacgtgcgccagctctcccagggtgagycgcagtgtgggagggccgcccaggcggacgctggggacctggtatgaggcttcaggcccaaaaggccccgggaggcctggggaaccaccaggaggaagcg

SEQ ID NO: 493175 - DNA, 201 bp, Homo sapiens
gagctgggcgagtggctgtgctgtctcctggctccagggtggatcctggggcccgagtttccccaggtgtgcatggtcagggcacaggcccctgctccttstcagagaccaccgtcctcagggcctgtccctgtggccgtcaccctcccgcaactcagggcctcaccccgggtggtgcccgcgcggggctctcacgggact

SEQ ID NO: 493176 - DNA, 201 bp, Homo sapiens
cctcctgcagctgccccgggacctggaacagccctcgcaagcagcagggtaggtagctcctgccagcccgcccacctcagccaggtgggggcctgacttcygtccccaggcagtgaggtggctgcccgccagggctgggtctcacagctgcagcgcagccccggcgccacggagccctgcccaatagaacacttccctttt

SEQ ID NO: 493177 - DNA, 201 bp, Homo sapiens
ctccagagcctcaggtctctggtgtcccatgagtgcagcagggcagggtcaggtgctctgggtggcagaagtgaaatggggaaggcggggagtggcctccraaccctctgaccctgtccgtcccttcccagggctgcagctgctggacgtcctggctcgcctgcggtgagtccccactgtagcggtcctgccggctccccc

SEQ ID NO: 493178 - DNA, 201 bp, Homo sapiens
agtgagccctgagtaagcatcactgtgtgtccagcatgatgtctcccctccagagcctcaggtctctggtgtcccatgagtgcagcagggcagggtcaggkgctctgggtggcagaagtgaaatggggaaggcggggagtggcctccgaaccctctgaccctgtccgtcccttcccagggctgcagctgctggacgtcctg

SEQ ID NO: 493179 - DNA, 201 bp, Homo sapiens
gccagttctggcagtgagccctgagtaagcatcactgtgtgtccagcatgatgtctcccctccagagcctcaggtctctggtgtcccatgagtgcagcagrgcagggtcaggtgctctgggtggcagaagtgaaatggggaaggcggggagtggcctccgaaccctctgaccctgtccgtcccttcccagggctgcagctg

SEQ ID NO: 493180 - DNA, 201 bp, Homo sapiens
cacacccctccgggacactaacctggcttctctccagcccgcgtggtgcgtcagtgtggccttgccgctcccgcagccctggtggtgggcttcccgccccrtcccctccctctccgcaggttacctgctcaactggtgcctcctgcaggcaggacgcaacctcagtgctggccccgggcatgcgggcctcgagagggcagg

SEQ ID NO: 493181 - DNA, 201 bp, Homo sapiens
acagagttgtgttctggaggggtgagtgcagagctgtgttccagaggggtgttcccacacacggagttgtgttccggaggggtgtgtattcccacacacasagttgtgttctggaggggtgagtgcagagctgtgttccagaggggtgttcccacacatggagttgtgttccggaggggtgtgttttcccacacacagagt

SEQ ID NO: 493182 - DNA, 201 bp, Homo sapiens
tgaggacggaatcttgtattcagcatcctccttccctggcgtggtctcacggagcaatctcctctcggggtttctatggtggatgcgatattgcagggagtgtttgctttactcccccaaggcttcccatagaaggccccttgaataggagacagaggaagcagaattgtggcatgatgggtgtttaatacatggcacttc

SEQ ID NO: 493183 - DNA, 201 bp, Homo sapiens
ggcatctaagaaaacttagcatgcctttatgtttgagaatcccattccatttcttattaatctctgaagaagaaaacaagatcctataaatcttgtcacargtttggactggtattttagatggtggcaaccaccctgatggcttttagttagccatttagaatgtttattttttgccttcagactatactcagagtgttc

SEQ ID NO: 493184 - DNA, 201 bp, Homo sapiens
cacaccaggtccaagaatcactggtgctttctgatggtctttttcaaggtcgcacttctgacaccatttatgtcaccctaaataacacatagacatgggcrctctaaagaaaaatgatatttatttgaagatgggcattgcaatgggaatacatgtgccatagtaaactatgggcatatttgggaaactaaaataagacaa

SEQ ID NO: 493185 - DNA, 201 bp, Homo sapiens
tgggcgctctaaagaaaaatgatatttatttgaagatgggcattgcaatgggaatacatgtgccatagtaaactatgggcatatttgggaaactaaaatargacaaaggtttttaaaggaaaaatgcaggagaatgacataattgttttgcaataattatccttgggtacaaaggatcaataataaagatgatgctattct

SEQ ID NO: 493186 - DNA, 201 bp, Homo sapiens
aactaaaataagacaaaggtttttaaaggaaaaatgcaggagaatgacataattgttttgcaataattatccttgggtacaaaggatcaataataaagatkatgctattctgagactggaaaggcagttgctgggcagatgtcctcacagaagcattttttgtgtaagtttgtgatggctctgtgcaaggttttgttttag

SEQ ID NO: 493187 - DNA, 201 bp, Homo sapiens
ttgttttgcaataattatccttgggtacaaaggatcaataataaagatgatgctattctgagactggaaaggcagttgctgggcagatgtcctcacagaarcattttttgtgtaagtttgtgatggctctgtgcaaggttttgttttagtagtcttttgtgacagttttgttaccaggcctgcaagcatgagaaccccttc

SEQ ID NO: 493188 - DNA, 201 bp, Homo sapiens
tgagaaccccttcatatccttccccagatcaatttgtcagggttctgtttttgtttttgttgttttacacaaatgacttcattttgattctgaaaactttyacaaggtacagtttgatcaggggtccaggttaattgtttcccaggacgctgggctctgtcctgctttatattatggcttttctcttagcctgtcttccat

SEQ ID NO: 493189 - DNA, 201 bp, Homo sapiens
ctcttaatattcctattttggcctagagctcaggagcaggtagaacatgagcgtttgataacctgcctcagatcatgtaagtataaggcacttatgagccrcaggagacagaaggggaagactctgcgtttaaggttcagtgatggagatcagatccaagcacatgtttttacatcattaaacaagtaggtcgtgcatttt

SEQ ID NO: 493190 - DNA, 201 bp, Homo sapiens
actccttcagaccagccccttctcagcagggctattgctgtacccaagagcatttctcttggcctgggaggggacaatgctttgtcacctggaaagcaatscctctctccaagctagtagtgggagatcattatgcgcttgaataactaacagtagcaattgtatcatattcagaactagatatcttttcttttcttttct

SEQ ID NO: 493191 - DNA, 201 bp, Homo sapiens
atgcattgactgccacgccacctgactgtcagtgctggacgctggcaccgtgtttgtgccactctccgtaaccaaccatggctctctgctcccagatcacrcctccccagtatggcggctcagggacattccctcaatccctcctgccctgttggcagtgcctccacccactccccacagcccatgagggctctgcttagc

SEQ ID NO: 493192 - DNA, 201 bp, Homo sapiens
tgcctgggaacaaagagagagccccattgcattgtgggctgctggccagatcccgcaataagctggcatctaagaaaacttagcatgcctttatgtttgasaatcccattccatttcttattaatctctgaagaagaaaacaagatcctataaatcttgtcacaagtttggactggtattttagatggtggcaaccaccct

SEQ ID NO: 493193 - DNA, 201 bp, Homo sapiens
gttaagagttcttttgcagtcctgggtggctctgcgcctccacgcccagggaccagggcctcttctcttccagctcttgttgtgttacatagaagatgccrgctggatggcacaggggagggccgtacagtgtagatgcggacaatgtggcataggtgaggactggacagcagagacagtggctgcatgatggaggtgagg

SEQ ID NO: 493194 - DNA, 201 bp, Homo sapiens
aaggcggtgacccccctggacccagctttcactatcttgtgtgtgtctattatttctcgacctgctgatctgcctgggaacaaagagagagccccattgcmttgtgggctgctggccagatcccgcaataagctggcatctaagaaaacttagcatgcctttatgtttgagaatcccattccatttcttattaatctctga

SEQ ID NO: 493195 - DNA, 201 bp, Homo sapiens
aaagaagtccattgcattgcttatgggatgagctacgtttcccatagaaggggcagtagtgagggttttcttatctgaagcaaaatctctgacagatgatragaaatgcagttttatgtcattttttttctgataagaattctattttttttttctgagtgactgtaatgggccttccatttattttagacaaaaaagaca

SEQ ID NO: 493196 - DNA, 201 bp, Homo sapiens
gaaggcggtgacccccctggacccagctttcactatcttgtgtgtgtctattatttctcgacctgctgatctgcctgggaacaaagagagagccccattgmattgtgggctgctggccagatcccgcaataagctggcatctaagaaaacttagcatgcctttatgtttgagaatcccattccatttcttattaatctctg

SEQ ID NO: 493197 - DNA, 201 bp, Homo sapiens
aaaaaaaaaaaaaaaaaaaggccgggcctggtggctcacgcctgtaatcccagccctctgggaggctggaggttgcagtgagtggagattgcgccactgcrctccaccctccagcctgggcaacagagtgagactccatctccaaaagaaagtttgagatggataaagttaagatccattaaatgctgtatggactttatg

SEQ ID NO: 493198 - DNA, 201 bp, Homo sapiens
tggcagcatcacatcaagaccatcggacttttataaattctatataacttttagaatacatcaacaatattcatataaatataacttaaaagaaggtttarcaaccaaaattatgactgataacatactagatctctaggaatttatatagtttttgaaacattcatatcagtaccattcccataaatgtaactgaaagaa

SEQ ID NO: 493199 - DNA, 201 bp, Homo sapiens
ggatggtcagtgggatgcaacttgctgatgatgagagatgaggtgtaagatattatcaggcaaacaccaacgaaacaggctttactataactcagatcacygcgctttttgagtgtgtcagtgagtaatccataatcacatttatagatacttctttcacatttataataatgtccccaacataaacatgtaatcatgatc

SEQ ID NO: 493200 - DNA, 201 bp, Homo sapiens
ttatgcacaattaattgtaatatataagtgcaaaagtgcacatgctgggtattttacatgtatgttcttatttaattgtcacaacagctctgcaaagtatrgtccttgccattttaatgaagcatcaaaaatagacatgttaaacaatttgtatagtgacacagtgatggtaagtggcatttttcaaaaagcatttgaact

SEQ ID NO: 493201 - DNA, 201 bp, Homo sapiens
ggatgcaacttgctgatgatgagagatgaggtgtaagatattatcaggcaaacaccaacgaaacaggctttactataactcagatcaccgcgctttttgartgtgtcagtgagtaatccataatcacatttatagatacttctttcacatttataataatgtccccaacataaacatgtaatcatgatcaacatatatgct

SEQ ID NO: 493202 - DNA, 201 bp, Homo sapiens
gaaactaaacccaacaatgaattgaattgggtttggaaaagcatgtgtggaattcagccgttcctcctaatctcatttctcttcaccacagatcgttgggkgctgcacgtcgctcatcactgttgttgagaattagttttttcatcaatagtccatatttctaaattggaaaatatggattggccaggcacggtggctcat

SEQ ID NO: 493203 - DNA, 201 bp, Homo sapiens
agatcaccgcgctttttgagtgtgtcagtgagtaatccataatcacatttatagatacttctttcacatttataataatgtccccaacataaacatgtaawcatgatcaacatatatgcttagcagttaggatcctatagttatcaataaaaagtggaagctgtctttaaaaacagagagaattaattgactcaagtcatt

SEQ ID NO: 493204 - DNA, 201 bp, Homo sapiens
tgggttatcagcaaacggacggcagaaccggggtgtgttatgaagttcgccttgctctttcatgataacttttgctcttttcctgtctgatgggatgcctkttcctttatcagtgagtttctctagttagcaatctccctaagaaagggttggtcaatctcttaagaatgtggtatgtcttctacttattttaatttcaac

SEQ ID NO: 493205 - DNA, 201 bp, Homo sapiens
tagcccagaaaaattgaaaaatggttctactttccttttagatattctattcaacatgctgaccgattttatgcatcaacttggctgggtttggggtgccyagataattggttgacattattctggatgtttctgtgagggtgctcttggatgagatgagcactccagttagtggagttgagtggagcagatagccctccc

SEQ ID NO: 493206 - DNA, 201 bp, Homo sapiens
ttgacattattctggatgtttctgtgagggtgctcttggatgagatgagcactccagttagtggagttgagtggagcagatagccctccctaatgtgggtkggcctcatcctgtcagtgaaggcctgaatacaacaagactcacctcccccgagcaagagagaattctccagcacacggcctttgggcttaactacagatt

SEQ ID NO: 493207 - DNA, 201 bp, Homo sapiens
cccgagcaagagagaattctccagcacacggcctttgggcttaactacagattttggacttgccagccttagtaatcacatgagccaattccttaaaatarattgatctccctgtacacacacacatcctattggttctgtttctctggagaaccctgactaatccatcccctgtgagtcaacatcgtctgttcggtgcac

SEQ ID NO: 493208 - DNA, 201 bp, Homo sapiens
aattctccagcacacggcctttgggcttaactacagattttggacttgccagccttagtaatcacatgagccaattccttaaaatagattgatctccctgyacacacacacatcctattggttctgtttctctggagaaccctgactaatccatcccctgtgagtcaacatcgtctgttcggtgcacgcaggcgcccacac

SEQ ID NO: 493209 - DNA, 201 bp, Homo sapiens
gcctcgctcccagccccatcccttagtcgaatgacacctttccctagatgcttggacacctgattccgtatttctttttcttttaaaaagacttaagtttrcaggaaatttgcaagaatggtgcaaagaattgttttccccctgaaacacttgagaacaagttgttgacatgatgtacatcacccctagatacttagggca

SEQ ID NO: 493210 - DNA, 201 bp, Homo sapiens
tgtattaaaattctcaccaaagtaaaatgcaagcacaagaccaaagagaggaggatgcgtgttgtgctctaacagctaatgcacagatcattgcatccctrtcatctgctgtgtgagtcccttcagaggactgggaaaagcctgattcttagcgtggagttaagataggaggctgccctgggtgttacccgcctaaggctg

SEQ ID NO: 493211 - DNA, 201 bp, Homo sapiens
ttagcgtggagttaagataggaggctgccctgggtgttacccgcctaaggctggcctccaaggcttcagaattcatcctgagaagcttcattcctggcgtkctgggggactgatgggtctcctcctttgctgacctatagtggtgtttctagttccatttatcccatatttttgtgatgctgtgataacatcttttcacaa

SEQ ID NO: 493212 - DNA, 201 bp, Homo sapiens
agctacttgagcatagtaggtgttttgaaaatatttaacctgaattgagaaaagatagtcagcagtggcccaaagataacaacatacatcaaaagtcatgyacaagattcagccagtcaccaagatgctcccaatattcaggggcttggtacctcactaatcaaaactgaaatgtcacccgattggtttttctctgaatgt

SEQ ID NO: 493213 - DNA, 201 bp, Homo sapiens
actagcttcacgctctggaagttttatttcttactcatgtccctgtccagtgctgttgctcctggtactaggcagcactccgcataatgaatcaggagccsaggctcgtcagtgctccacggggtgactcagggtgcaaggcttcttgtgtccagtggctccgtcatctctctttcaccttattgctgggctgcatctttt

SEQ ID NO: 493214 - DNA, 201 bp, Homo sapiens
tatttgggcatagggcatcgcaatgggagtatgtgtgccatagtaaactgcgtattcaggggggtaaaggaggacaaaggtttttaatgggaaaatacaaraggattacttcactgttttaagataattatctttggctgcaaagatgaataacaaggatgatgccagtccagggcgggatgggcagtggctggtcaaatg

SEQ ID NO: 493215 - DNA, 201 bp, Homo sapiens
ctccctgcaatttagaagataactattgaagaaaccgatttcaaagttaaaaatcaaaacctctttacagttttactaagagcaaatcagtatttctttcttttttttttttttttttttttgagacagagtctcactctgtcacccaggctggagtgcagtggtgcgatctcggctcactgcaacctccacctcccgggt

SEQ ID NO: 493216 - DNA, 201 bp, Homo sapiens
attaattagaattttaactcttaataaccttaatttttagcaagtaattttaaactgtcacatgctggtattttatagatgagaaccattttataattttaaaaaatgcttttccacaacataaattttatgtacattaatagaaccaaatatatttagtcataaaatttaagaagcaaagaacaaacatttatgttcaga

SEQ ID NO: 493217 - DNA, 201 bp, Homo sapiens
gacctgttcacatgactacactttgtttgcccaaataggtaatataataaaagctgtggaccagaattttgagtaaaacagtttggtttttaaaaagaacaaaaatacctcttttaatcctttttttagtttcaatctttatatctttataaacatttatctagttcttttagttttataagtagtttatagttttatagt

SEQ ID NO: 493218 - DNA, 201 bp, Homo sapiens
agggctataaacgccctcatcttgccacagctcttctaggcctctttagggttaaggcatactaccttctgagaatttcttcacgtcctgtttctatggaktgtttgtaaccggcttttgctgcaactgttactgctgattaatatcttgctaatcataggttatggaaagactgtttttccgttttaaggctctgttaga

SEQ ID NO: 493219 - DNA, 201 bp, Homo sapiens
gtggatattaagagagataagtctcatatgatgtggagtctcattctgatgtcatgtctacagcatgaaaaacatcagcttatccaagtttactgtttgcrtgtcactgggttatagcatcgagcagtttggtgcactttctatggctcatatatcagactttcagaacaaagcagtttccatttatagtaattctgtgga

SEQ ID NO: 493220 - DNA, 201 bp, Homo sapiens
ttataaggacaagtggtccctttcttacaggcactattaagagctggagattctaatagaataagtaattttatatgttatgcacaattaattgtaatatwtaagtgcaaaagtgcacatgctgggtattttacatgtatgttcttatttaattgtcacaacagctctgcaaagtatggtccttgccattttaatgaagca

SEQ ID NO: 493221 - DNA, 201 bp, Homo sapiens
tctacattgatccacatatactacaagccgtaggttcacaccagtgcttttaattctaatctaatactgcagagatcattctagttttctttctgtccatrtttgtaactttccctaatattgataaacctggctcccattgtcttcacttattttattgatctatgtgtatgttaccaagctgtgctgctgtccctcctg

SEQ ID NO: 493222 - DNA, 201 bp, Homo sapiens
gtttgcatgtcactgggttatagcatcgagcagtttggtgcactttctatggctcatatatcagactttcagaacaaagcagtttccatttatagtaattytgtggaggacagtgagattggaggaatctaaaggaattcagatctagtttagcctataggcagataaaaagaactttcaaataacgaacggggctacagt

SEQ ID NO: 493223 - DNA, 201 bp, Homo sapiens
ccccctcagtgctgacatgccctgccaggcctctgccatcctccactgtcagttcctcattccactggaacctaacaccctagaacgaagaagggagggarggaagaaagagggaaggaaattttaccacgcttcaaagcattataatgttttcacttttacaatctgtaaactccattcatgtgcacatttatgtattaa

SEQ ID NO: 493224 - DNA, 201 bp, Homo sapiens
gtcactgggttatagcatcgagcagtttggtgcactttctatggctcatatatcagactttcagaacaaagcagtttccatttatagtaattctgtggagkacagtgagattggaggaatctaaaggaattcagatctagtttagcctataggcagataaaaagaactttcaaataacgaacggggctacagtctaacagc

SEQ ID NO: 493225 - DNA, 201 bp, Homo sapiens
actttgggttttccttacagccttaaggctcctgggcctgccaggaagtgacactttttcctcaatcacttaaaactgggaactcttgaagacagacattstatacacattcttgaatatgaaatttggtcaaatccttggtaatataatcaaggtttacaattttatcctgctataaagataacagatttttattgaact

SEQ ID NO: 493226 - DNA, 201 bp, Homo sapiens
tcaagggaaaggctaagtgagcaggcaatgttccctctccaacagcaaggcatgagagaatgtccttgagagcgggagagaaaaatcacattgctgcactratgtttgcacttcaaagagctcacgcgatgctgtgtaaagctctagctgtttgcccaggtcccgataaagttctgtgcccatggatgaggacggaatctt

SEQ ID NO: 493227 - DNA, 201 bp, Homo sapiens
gctataaagataacagatttttattgaacttaggcacactgtcttaaaaagtaagaatatgaatagttaccaaattttggaggaatcaaatagggagaaaragcaaatgttttcacctttattcacaaaagtatactttaccaaattgctgtagaccatagatagcttaagatagaatgttgtcttaaatctggtgaacaa

SEQ ID NO: 493228 - DNA, 201 bp, Homo sapiens
tctgctggctgcagtaaaggctgtgagcaaaaggagggaggctgaaggccagtaaaatagaatcatatttacagtgatacaaagccacgtgccacactttmtactcggtggtgggaatgacagcataagggtttaatgcctacatacagttaggatcaggctggaatttgggtgtttggctccccatgttttaactcacat

SEQ ID NO: 493229 - DNA, 201 bp, Homo sapiens
ggctaagtgagcaggcaatgttccctctccaacagcaaggcatgagagaatgtccttgagagcgggagagaaaaatcacattgctgcactaatgtttgcamttcaaagagctcacgcgatgctgtgtaaagctctagctgtttgcccaggtcccgataaagttctgtgcccatggatgaggacggaatcttgtattcagca

SEQ ID NO: 493230 - DNA, 201 bp, Homo sapiens
atacgacagttcacaattgacaagaaaatttatttctttctattgcggcatcttaagagaacacccagaatcatgaatggcagcatcacatcaagaccatyggacttttataaattctatataacttttagaatacatcaacaatattcatataaatataacttaaaagaaggtttagcaaccaaaattatgactgataac

SEQ ID NO: 493231 - DNA, 201 bp, Homo sapiens
gaatttatatagtttttgaaacattcatatcagtaccattcccataaatgtaactgaaagaagatccaataccacttatcatttgatgatgtttcccataygatttactaaataagtctaatcatgtaatatctctgtaagatgagagatacattctttcaggctccccagggacctaactggaaatctcaaagttaattc

SEQ ID NO: 493232 - DNA, 201 bp, Homo sapiens
ctccaacagcaaggcatgagagaatgtccttgagagcgggagagaaaaatcacattgctgcactaatgtttgcacttcaaagagctcacgcgatgctgtgyaaagctctagctgtttgcccaggtcccgataaagttctgtgcccatggatgaggacggaatcttgtattcagcatcctccttccctggcgtggtctcacg

SEQ ID NO: 493233 - DNA, 201 bp, Homo sapiens
gctgcactaatgtttgcacttcaaagagctcacgcgatgctgtgtaaagctctagctgtttgcccaggtcccgataaagttctgtgcccatggatgaggayggaatcttgtattcagcatcctccttccctggcgtggtctcacggagcaatctcctctcggggtttctatggtggatgcgatattgcagggagtgtttgc

SEQ ID NO: 493234 - DNA, 201 bp, Homo sapiens
gtgtttaatacatggcacttctgctgtgtgcgtgccatcttatgttggtttcactccaaatgaaatcccagtgaggagacactgattcctttgtgagtcaytggagaatctgccacctgccagaggttccgcaggtgcacggtcaggcagacactcagacctaggcccccggccccagccagctctccccgactgtcgtgt

SEQ ID NO: 493235 - DNA, 201 bp, Homo sapiens
ccaaggacagacacaaaaggcagccaccaacactgcccagtccccatcctcttgccttcattatcttacaagggtttctcatgtgctctgcatgggagatrtgctgggccaaaatgaaacaggaagtcccaggcaagcacagtgcagctaagtttgtgtttcgtagaaaaaccacatgaatcaataatattcaagggctat

SEQ ID NO: 493236 - DNA, 201 bp, Homo sapiens
cagaagccatgtgagtgtgcaggagacagggagccctttcgagcctccatggaaagccagctcgcttgggctgtgctggaggcagtgcccctctctgctgsctgcagtaaaggctgtgagcaaaaggagggaggctgaaggccagtaaaatagaatcatatttacagtgatacaaagccacgtgccacactttctactcgg

SEQ ID NO: 493237 - DNA, 201 bp, Homo sapiens
aggcggccagggaaggcttcctcggaacctgaagaaagggagacagcaactgcagggaaggatctgtgggccctaatggccacgtcacactacaaaggccmggactttgtccaactcgcttctgtgctccatgagtgcacctgtgtctgaggcacatcagctctaagccagtgttctctagtgatggagtgaataaatgaa

SEQ ID NO: 493238 - DNA, 201 bp, Homo sapiens
gacaaaggttgaagcagagggctatcatcacacgtcttctcaaagagaaagagctgaaggccatggtgtgagacctgcaaatgatgtgctgttgagatagrgcaaaagttgagcttctcagataggaatcggagaagctttaagacgaaaattttgccataagaaaggaaatttccattctgaatgaaaaagatggcattt

SEQ ID NO: 493239 - DNA, 201 bp, Homo sapiens
tgagacagagtctcactctgtcacccaggctggagtgcagtggtgcgatctcggctcactgcaacctccacctcccgggttcaagcaattctctgcctcaycctcttgagtagctgggattacaagttcctgccaccatgcccagctaacttttttgtatttttagtagagacaggctttcaccatcttggccaggctggt

SEQ ID NO: 493240 - DNA, 201 bp, Homo sapiens
tttgcttgatcttgattagcattccatgaatgcttcagtttttggttagagttctgaaaattgttatttagtccattgatcttaaggttttcagaaatctrtgttcaagagtgcttgttagggtcctttccatagaaagcaattttagactatagctaattgcaaatgcttttagagaaaaattcaaacagtaaatgtgga

SEQ ID NO: 493241 - DNA, 201 bp, Homo sapiens
aaatttcttcataaattcatccttcattaacttttatttacctgcttggaaattttacagcatgtttagactctctgctttgtcctatactttcttttttwaaaaaaaccaaccagtcattttattttagtacaaaaaattatcacacaagattctcatacaaaattattatcttgtcttttcaacctttctaaccaaaag

SEQ ID NO: 493242 - DNA, 201 bp, Homo sapiens
aggccagtaaaatagaatcatatttacagtgatacaaagccacgtgccacactttctactcggtggtgggaatgacagcataagggtttaatgcctacatrcagttaggatcaggctggaatttgggtgtttggctccccatgttttaactcacattcctttaattgggtcatagtcctgccctcgctgtcatttttgcca

SEQ ID NO: 493243 - DNA, 201 bp, Homo sapiens
ccaaaagtacatcttcatactcataactttctttacatctttcctgcttactgatttctttgtatcttgtttctgttttctttctaactccgtattttaawcaacctttaaccttcaaattagacaaaattattctttaaataacacatgcttaatgcctttttaaaatgatttttattattaaaacatcttaggtgcact

SEQ ID NO: 493244 - DNA, 201 bp, Homo sapiens
agtattgctacggaataaaaagtgaaatgctcctgattgttgtaaatacaggattgcatgcaggattgtgtaaagacaatgccaggttggactgccagaaygagccagcagcgcgtgttgtgcttccccctgcagagagcctatgaatggatgtgcagtcagggaggtttcacatcaccaagattcctatcccagaaaagc

SEQ ID NO: 493245 - DNA, 201 bp, Homo sapiens; identical to SEQ ID NO: 151263

SEQ ID NO: 493246 - DNA, 201 bp, Homo sapiens; identical to SEQ ID NO: 151264

SEQ ID NO: 493247 - DNA, 201 bp, Homo sapiens; identical to SEQ ID NO: 351273

SEQ ID NO: 493248 - DNA, 201 bp, Homo sapiens
ttctgctatattctaaatttgtaaaaacataaatttgtggatctttgttcttctaacacattttagggtatcaaggcagaaaggaaaatgttgaaaactaytgatagggaaaataaggaaacaatgaaaggcatttggcaaagaaaaagctatccaccagcatttagtttctcccagaagtctgctaaggaacatcaaaac

SEQ ID NO: 493249 - DNA, 201 bp, Homo sapiens
agatttttttctttttatatcacctacagtactacctaaccttaaggaattttctgctatattctaaatttgtaaaaacataaatttgtggatctttgttyttctaacacattttagggtatcaaggcagaaaggaaaatgttgaaaactattgatagggaaaataaggaaacaatgaaaggcatttggcaaagaaaaagc

SEQ ID NO: 493250 - DNA, 201 bp, Homo sapiens; identical to SEQ ID NO: 351272

SEQ ID NO: 493251 - DNA, 201 bp, Homo sapiens
aggccatcacagaatatggccaccatactgtgatctgccaacccaattaagatactggccatggcttctaatttgtgttttacactgttcagacataaatrtttaaaatttgttgcattgcaatctgtttggttgtaaagatttgacctatgaagcaagaagtgttcatgaatgaggtttaaggatgtcaggggtgactca

SEQ ID NO: 493252 - DNA, 201 bp, Homo sapiens
cgccacgctccatggaggcgccaaggagaaggcctgggaagggaagagtgaaccttccctggtggagggcccactcctcaggcagtggggagaccgccttytgcatgcgacaggacttaccaggtagcgctcctcctgcctcatgctgggggtgcggatcatgtgattttgttcccctctccagtctccaaagcgacggaa

SEQ ID NO: 493253 - DNA, 201 bp, Homo sapiens
ggctgtaggtttcttgaggatgggggccactctgtattggatttagtatttccaatggctagaacagaacccacagggacacaattggccctcggtgaatrtttcagttgattggtaggttctgactgccttgctgggtgagacggcacttcctctatattgtaattcaaacagttccgggtcaggtgctctgcagtaagg

SEQ ID NO: 493254 - DNA, 201 bp, Homo sapiens
tacctcatgtaaccagcttgctgaagccccataacacgtcaatggagtagaaaaaataattatcctcatttacacttggggaaactgaggcaggaataagkttcataacttgtagctgaactaggatatgggtccaggcaatctggctctagaatctatgctcttaattatggaaaagtgatttctggagttgaggaaatt

SEQ ID NO: 493255 - DNA, 201 bp, Homo sapiens
tccactaaaaatagaaaaattagccaggtgtggtggtgcatgcctgtaattccagctactcgggaggctgaggcaggagaatcgcttgaactgaggttacrgtgagctgagattgcaccgctgcactccagcctgggcgacagagtaagactccatctcaaaaaaaagtaatgtcaaaggcctcttaagaagttccagctt

SEQ ID NO: 493256 - DNA, 201 bp, Homo sapiens
atttctggagttgaggaaattttgtgtgggatatcaagaatgaaacaaaattcaacataattatcctcaagtgatggcaagtggcttcagataaaaataawgcaaatagccaggtgttccattttaattccttccatgaaaggattagatgaatccactaaatcttggcccaagaacaaggtcttcccgaagcagagtgat

SEQ ID NO: 493257 - DNA, 201 bp, Homo sapiens
tagacaacatctccccttccctctaggttaacttattgaaagatgacctcctatgctaaggtgccaatgacacgtaataagcaaacggtgtttcctgatargcattttattatcatgcaggaagtggggaggatgatacctgttccaggtacctgttgaggggctgtgaggacatttcatagtatagcacggtacaaacca

SEQ ID NO: 493258 - DNA, 201 bp, Homo sapiens
aaggtccagtgggggccagcatggtggggaggtctggcttctgtcctcacaccccctgcagtgggcacttccatctcctctgcccaggactagactccccyccgcccaccatccatcacaaaacacaagcagaagagacagctgtgctctgctctccggtctgtcccaaggcaggagagatggaaacatttgctgtgagaa

SEQ ID NO: 493259 - DNA, 201 bp, Homo sapiens
aaccagtttctctcgccaagacctccttcctgcggaagcaccctctctgcgccacgctccatggaggcgccaaggagaaggcctgggaagggaagagtgarccttccctggtggagggcccactcctcaggcagtggggagaccgccttttgcatgcgacaggacttaccaggtagcgctcctcctgcctcatgctggggg

SEQ ID NO: 493260 - DNA, 201 bp, Homo sapiens
aatcatggggtggtttcccccatactgttctcgtggtagcgaataagtctcacaagatatgatggttttatcagggatttccgcttttgcatcttcctcattttctcttgccgccaccatgtaagaagtgcctttcgactcctgccatgattctgaggcctccccagccacgtggaactgtaagtccaattaaacctattt

SEQ ID NO: 493261 - DNA, 201 bp, Homo sapiens
ccctggatctgattgagcctctcttacagctgttgccagtatctaacgtggtgagcgtaatggtatgtattggggttacttgaatccaagatctggtagtyggattgtatgggacagcagtcctgagccctcagatgtacccttagttgagagccagcaggtggtggtgtgtggcctcagggcccaaccaatctaggtgtg

SEQ ID NO: 493262 - DNA, 201 bp, Homo sapiens
tggtggagggaggagttggggctctgagggatggaccacaagctaagcagggctctggtactcactcacataggctggagggcagcatgcggaccctggtygggctcctgaccagcaaccaggccctgctgcagcttgaggcggctcggtgcctgcatgagctctctcactccgagcagtccactgttgctgaggcctgcc

SEQ ID NO: 493263 - DNA, 201 bp, Homo sapiens
tccttggacaaatcaactaaccaccttaagcttcagtctcctcacttataactgaggataatcttgcatcatagggtagttgtaggagtatgagaacatgyatgtagaagagcttggcatggtgcctgggcatgtggtcaccatgtcatatattttagctattgttatgatctttgtgtttcattctttgtagactatata

SEQ ID NO: 493264 - DNA, 201 bp, Homo sapiens
gggtagttgtaggagtatgagaacatgtatgtagaagagcttggcatggtgcctgggcatgtggtcaccatgtcatatattttagctattgttatgatctktgtgtttcattctttgtagactatatatgtgtctatctgcaggtgctcacagttctgtgcaatgttgcagaaaagggtcctgcttactgccagcggctgt

SEQ ID NO: 493265 - DNA, 201 bp, Homo sapiens
ctgttgcccagccaggtcagcaatcctctgctcattggccatggggctctgtctactctggggttgctgctgttggacttggctggggctgtccagaaaascgaggatgcaggactggagctggtaggtgaagatgtcaggtgaaattctgggagatgtttcttgatactctggaatgcaggtaacctcttccttcttaca

SEQ ID NO: 493266 - DNA, 201 bp, Homo sapiens
ccctcacccagcacccaccccgctcctcgcgccctccccgcctgttcccgccctgtgctgaggctgcgcagtcggtgccatcttctacgcccctgggagcrttgtggctgctgtttccttcggctttcctcctcctgctccaccatgtggagccgacggcagggccgcctcaggcccacggtctgcggggtggaggagcta

SEQ ID NO: 493267 - DNA, 201 bp, Homo sapiens
tcctgcggcaagcccagcgggggacagaggaaaaggagagagagggggctctggtcagccttcgtcgaggcttgcagcaccctgaaacacagcaaaccttsatccggtcagtgtggatggtgtggtggagggaggagttggggctctgagggatggaccacaagctaagcagggctctggtactcactcacataggctgga

SEQ ID NO: 493268 - DNA, 201 bp, Homo sapiens
tctgtgcaatgttgcagaaaagggtcctgcttactgccagcggctgtggccagggcccctgcttcccgccttgctgcacacactagccttttctgacactraagtagtaggccagagtttggagctgctgcatctgctgttcctgtatcagccagaggtataggtttctggcccacatcctcagtcacccctgttctgaag

SEQ ID NO: 493269 - DNA, 201 bp, Homo sapiens
atccagtcctaactatagttgtttctctgggcctggctaacctatataggttccatgtcagaaacttcatcctcttgttggggaatgcaccctctggagtrggctgacccatgaggctgtgggaattgagtcttaggacacagagaccaggtgtgttgaattttcttccctgcccctaggctgttcaggtcttcctgcagc

SEQ ID NO: 493270 - DNA, 201 bp, Homo sapiens
gtcgaggcttgcagcaccctgaaacacagcaaaccttcatccggtcagtgtggatggtgtggtggagggaggagttggggctctgagggatggaccacaarctaagcagggctctggtactcactcacataggctggagggcagcatgcggaccctggtcgggctcctgaccagcaaccaggccctgctgcagcttgaggc

SEQ ID NO: 493271 - DNA, 201 bp, Homo sapiens
gtttctggcccacatcctcagtcacccctgttctgaagccacacagtggctcccttcccatccagtcctaactatagttgtttctctgggcctggctaacytatataggttccatgtcagaaacttcatcctcttgttggggaatgcaccctctggagtaggctgacccatgaggctgtgggaattgagtcttaggacaca

SEQ ID NO: 493272 - DNA, 201 bp, Homo sapiens
aaagctgttgcacattttaaattcatgtgtctggctaggaagggctttgggtttggacactttcccatctgggcagggctttgggtttggacactctcccrcctgctatcagggtttggtaagaaccactggcatcttcgtggttcctacttacagccctgcttctgccagcagctccatcttggcctccactctccctca

SEQ ID NO: 493273 - DNA, 201 bp, Homo sapiens
gcctaggcaactgcttctcttcttaaaggtggaattgactatatacctagggactgcttgcttcctgttgcccagccaggtcagcaatcctctgctcattrgccatggggctctgtctactctggggttgctgctgttggacttggctggggctgtccagaaaaccgaggatgcaggactggagctggtaggtgaagatgt

SEQ ID NO: 493274 - DNA, 201 bp, Homo sapiens
tgagttctggcaatgtaccaggaattgtactaacttaaaaatgagaggactgaggtctgagaggttagtttgccaaaaatcacatatgtagcaagagccasatcaagattcagcactgggtatagagttgcattctcaatctccacttgcactatcttagtctttgtaatccctctatcccctcacttcgaactgtcactg

SEQ ID NO: 493275 - DNA, 201 bp, Homo sapiens
tttgcacttataccttttttaatagttctgaacttcactcttgtgtattcttttattttaaaagctataatgactaatcctgatcttctgctggaatatgkttaaataggattccattaaaaacaagagctagaattcatgtttcttgagtaatctgtccctaaaaagatgttcattcatgcatctgatggcaatttgtaa

SEQ ID NO: 493276 - DNA, 201 bp, Homo sapiens
atgatcagtccatcacagaaccttcctgggtcaaccaacaaagagtcagttaatgcccaatcctcatggagtactgatcacacttggtttgtttttgaggmtgtaactttaacacactacattataagatacataaaaaaccatatttttcttatatgttttctcatccatccagtggcatctagtgtgggaagaactgtt

SEQ ID NO: 493277 - DNA, 201 bp, Homo sapiens
ggctctgtttggaagtgttgagctgcatgaaaagtagggcacttgatggggtggtggagatttttcaaaacctcaacaggaatttcaattgttcatttggrcaagagtttgggtttggttcctacgtaagcccaagtagtttgttttatactgactttagatttttttgattcaaatctttgctgttattatcacgtaaga

SEQ ID NO: 493278 - DNA, 201 bp, Homo sapiens
aagaatcttgaaggccgggcacggtggctcacgcctgtaatcccagcactttgggaggccgaggcgggtggatcacaaggtcaagagattgagaccattcyggctaacacagtgaaaccccgtctctactaaaaacacaaaaaaattagccgggcgtggtggcgggcgcctgtagtcccagctactcttgaggctgaggca

SEQ ID NO: 493279 - DNA, 201 bp, Homo sapiens
tcctgggggagtcagtcacatttcccagcattaagtataatattatgggcaaggcctttgtgctgttgtgcaatggaaacaggaattgctgtattgcctcrcaggtagaagagtctttccttctgaactgctattaagtcagactggctaaaaataaggaaagagccacatatagacatgcctggataaaacttaaaacaa

SEQ ID NO: 493280 - DNA, 201 bp, Homo sapiens
aactagatttaaaataattatccattttcattctgatatatgtgtcttccaatttttcaagattaacattccacattagaatacatgggtttgaattttasttagttcttcatgcctggttcctcaattccaaactgggttgaaaattctcaaagggaagggctgtaattggtatgtcttcctatccctctccaagcttgg

SEQ ID NO: 493281 - DNA, 201 bp, Homo sapiens
tggtctcctacggattccttcttttgagcagcttgttcctagcctggcattcaatgaacttgccaccaacagagaagcaggtgggtagcttttgcatttawgagattaaaaaactgaagtttttatttttgcctactgtttggtaatttttggctccttgtgcacagagagaaaataatcgtaagtaatttggcttgtttt

SEQ ID NO: 493282 - DNA, 201 bp, Homo sapiens
gttagaccacccctggcccaaagcacaggtcaacttgacctgtcaacacacttcatgccaaacaactgttcagactgactcattcataattcatgcatctraaaagacataatcatggattatgtgtatttaagttgctgactctctaatcctatttctgctatttccatagcagaacctaaaaggcttactttctattaa

SEQ ID NO: 493283 - DNA, 201 bp, Homo sapiens
caagagtgatcagtcttgattcctaaaaagcagtggttggaattctaatggcaatgtgttatagattgtctttttgcattattaaattgtgagcagaggcrggcgcagtgcctcatgcctgtaatcccagcacttttaaaggtcgaggcagaaggattacctgaggtcaggagttcgagaccagcctggaaaacatggtga

SEQ ID NO: 493284 - DNA, 201 bp, Homo sapiens
ggaagcattgcttcttaatttttctctttccattttaaagactataatggcaggtatgcccatgatgggattagcagcatgtgttcggcatgctgtgggtggggggggggctgtaccctaactttatacacccacaagaactgagctctgggtggagacttgcacttttcccacatggctgcactcttccatggggagcca

SEQ ID NO: 493285 - DNA, 201 bp, Homo sapiens
gactcaggctacgtttcatcacatatttgagtgcgcaaacttgaaatctctgttacaaatgttttaaacagtgactgtttccttctcacttctgtatgtatttttttattacacttcttatatttgaatgtttctttgtagtgaccttacctgacttccttttcctgggtgctctaggcctgcctgtctgcctgtcccttc

SEQ ID NO: 493286 - DNA, 201 bp, Homo sapiens
gctttaattccagaggttaagaagcattaaaattctaattattgcatgatatgtgtcttattacccttagttatttaattttccttttcgatacctttacrgaagatttacgttcattcccatcatagctctagctgtgattttattttacaattttctggctcctgtacctttcaatttctactaccacattcatgcaac

SEQ ID NO: 493287 - DNA, 201 bp, Homo sapiens
atgagatgtacctagtatgtattatcaagagtactgaaaattaaagagtggaaaaaatcagatagaagacagtacacagtttcagttactttcgtgagttaaaaaaaaaaaaacttgaaactttcgggcttttcacaataaagctactaatttttttttttggaattggtctgatgcaaaagtcaatgcttttctgtccag

SEQ ID NO: 493288 - DNA, 201 bp, Homo sapiens
agctactaatttttttttttggaattggtctgatgcaaaagtcaatgcttttctgtccagttgaaccagccttgtttaatttttttttttaaagggaaagaagaaaaaagaaactgtttgcagagaacgagcagagatcttgggaataccatcctccattgagagccagcccctcaaaagctcattcgtagggctgggtaa

SEQ ID NO: 493289 - DNA, 201 bp, Homo sapiens
tgagagccagcccctcaaaagctcattcgtagggctgggtaaacacacaccttttgcactctatttttgaaattatgttcaggagtctacagactgttatytgtagaagaagccacttttgaaattttagtttatgtaaagtgttccaaaatgcatgaacagagtaattattttaaaagtctataaatgcatgcatttgct

SEQ ID NO: 493290 - DNA, 201 bp, Homo sapiens
gattctaaataccaacagcatcactctgtcaaaaccacccttgcaacctttctcagaaaaggaaatgtaatgacaagatgaaagttagccagaacggccaygtccagaaaagctctcagtagtacagccatctgtccgaaatactctaaccttcaaggtggccacggtctcttcagagggtcatggagctctgcaaagctt

SEQ ID NO: 493291 - DNA, 201 bp, Homo sapiens
tcagaaaaggaaatgtaatgacaagatgaaagttagccagaacggccacgtccagaaaagctctcagtagtacagccatctgtccgaaatactctaacctwcaaggtggccacggtctcttcagagggtcatggagctctgcaaagcttgtcttaaaactgattaaggtaaaatagttattagaagacatctttttctttc

SEQ ID NO: 493292 - DNA, 201 bp, Homo sapiens
agaagtatgcctaatgatagggccaaaggggaggggcttagggaaatagaaggctattaatttttcataagattaacaaaaaagaatacaaaccagaaccmcaaacataaaaaagatggagtcggccaagcgcggtggctcacgcctgtaatcccagcactttgggaggccgaggcaggtggatcacctgaagtctggagt

SEQ ID NO: 493293 - DNA, 201 bp, Homo sapiens
agaaccacaaacataaaaaagatggagtcggccaagcgcggtggctcacgcctgtaatcccagcactttgggaggccgaggcaggtggatcacctgaagtytggagtttgagaccagcctggccaacatggcaaaaccccgtctctactaaaaatacaaaaattagctgggtgtggtggcaggtgcctgtaatcccagcta

SEQ ID NO: 493294 - DNA, 201 bp, Homo sapiens
aagaatactttcaaggtttactactggaaaggcaaatccacatgttttacagcacagaagttagagtacatcatctccctgcccttctcactccccacacrtaaaacatgttctgctaattccatcatgggcatatctaccattataacctttaaaatggaaagagaaaaattaagaagcagtgctcccttttagatagca

SEQ ID NO: 493295 - DNA, 201 bp, Homo sapiens
ctttggaaattatactttctggaatcttttagtcttcccctcttctccttccttatcttgcaggatcattgtccagtgtcttactaatacaaagaaagaascttgttctttgtacaaaggagcaagaaccttgtttcgtttctgctgttaatctggttcctttagaccccgcccccttgcccatgccacatgggcagccct

SEQ ID NO: 493296 - DNA, 201 bp, Homo sapiens
attggttacgggaccaatttagaagctctgtgtaatgtctttgaacaccttaatgttgacataaaatccataattcacaatttcaggatatgcttcttgcrgggaagagaggagagcctcctcgcaggggctaaacaatgcgagagttcaaaagggttgaagatgcactgtgggtatttggactggcactcaagaactcgc

SEQ ID NO: 493297 - DNA, 201 bp, Homo sapiens
agatgcactgtgggtatttggactggcactcaagaactcgcggatgctcgcgattgcttatctgacttatctaaactgctgacgtcaaaagaattaggctrgaaatcttatgattacagcttttcttgtgatcttttctggtatttcctgtttcctgtgaggccaaatatacttcgagagagggttattttatggcatttc

SEQ ID NO: 493298 - DNA, 201 bp, Homo sapiens
tcaggagtctacagactgttatctgtagaagaagccacttttgaaattttagtttatgtaaagtgttccaaaatgcatgaacagagtaattattttaaaastctataaatgcatgcatttgctctaaaattttgtaattatcagtagattacaagttctctataggaagagagagctgtctcatattagttttgcacttat

SEQ ID NO: 493299 - DNA, 201 bp, Homo sapiens
gagtttcaccatgttggccaggctggtcttgaactcctgacctcaggtgatccacctgcctcggcctcccaaagtgctgatgttatagccgtgagccaccrcgcccagcccatcatctcctttcttgacacctcctttaccaccatcatacaggcagaattaatcactgtcttatgtgttggcaattggcacagactttgt

SEQ ID NO: 493300 - DNA, 201 bp, Homo sapiens
tgcctcgcaggtagaagagtctttccttctgaactgctattaagtcagactggctaaaaataaggaaagagccacatatagacatgcctggataaaacttaaaacaaacaaacaaaaaaagcctttatggaaatcactggattgtgaactttgaggaagccattggcagtggtgtgtaaaattggtgaccttgttgtaaac

SEQ ID NO: 493301 - DNA, 201 bp, Homo sapiens
gcctcgcaggtagaagagtctttccttctgaactgctattaagtcagactggctaaaaataaggaaagagccacatatagacatgcctggataaaacttaaaacaaacaaacaaaaaaagcctttatggaaatcactggattgtgaactttgaggaagccattggcagtggtgtgtaaaattggtgaccttgttgtaaacc

SEQ ID NO: 493302 - DNA, 201 bp, Homo sapiens
cctcgcaggtagaagagtctttccttctgaactgctattaagtcagactggctaaaaataaggaaagagccacatatagacatgcctggataaaacttaaaacaaacaaacaaaaaaagcctttatggaaatcactggattgtgaactttgaggaagccattggcagtggtgtgtaaaattggtgaccttgttgtaaacca

SEQ ID NO: 493303 - DNA, 201 bp, Homo sapiens
ctcgcaggtagaagagtctttccttctgaactgctattaagtcagactggctaaaaataaggaaagagccacatatagacatgcctggataaaacttaaaacaaacaaacaaaaaaagcctttatggaaatcactggattgtgaactttgaggaagccattggcagtggtgtgtaaaattggtgaccttgttgtaaaccac

SEQ ID NO: 493304 - DNA, 201 bp, Homo sapiens
tcgcaggtagaagagtctttccttctgaactgctattaagtcagactggctaaaaataaggaaagagccacatatagacatgcctggataaaacttaaaacaaacaaacaaaaaaagcctttatggaaatcactggattgtgaactttgaggaagccattggcagtggtgtgtaaaattggtgaccttgttgtaaaccacc

SEQ ID NO: 493305 - DNA, 201 bp, Homo sapiens
acagatgggcaagtcaagagtgggtcgaaggttcaacatgctcttttccaaacctctctggtttggaaatctaactcgaaacctcctggagtcaaggcttmtgatgagattcctggagcttcttggtccaggcgtgggtttggaatacttgggaaagggccgaccacagggatctcagggctcctcatgctggctctgttt

SEQ ID NO: 493306 - DNA, 201 bp, Homo sapiens
cccgccgggccctcccggggagcgcgcccgccctcgccgccgcggctcccgccccccgcgcagccgtcgcgctccatcgtggccccggccgctccggcccsgctgcccggccgcgcctttaataggccccgcgccgcccgccccgccccgcccctccccgccgcgcccgcccctcgcggtcagatccttggctccccgccc

SEQ ID NO: 493307 - DNA, 201 bp, Homo sapiens
acgacgggctatagcaataaaagatgctttgaatgaaaattctcaacttcagacaagccataaacagctttttcagcaagaagctgaagtatggaaaggasaagtgagtgaacttaataaacagaaaataacatttgaagactccaaagtacacgcagaacaagttctgaatgataaagaaaatcacatcaagaccctgac

SEQ ID NO: 493308 - DNA, 201 bp, Homo sapiens
tatgaaggctatgaagtagagtcatctttagaggatgccagctttgagaaggcggcagcagaagaagcacgaagtttggaggcaacctgtgaaaagctgarcaggtccaattctgaacttgaggatgaaatcctctgtctagaaaaagacttaaaagaagagaaatctaaacattctcaacaagatgaattgatggcggat

SEQ ID NO: 493309 - DNA, 201 bp, Homo sapiens
ttcaaaaagtatacagtctctagaagatgagtcaaaatccctcaaatcacaaatagctgaagccaaaatcatctgcaagacatttaaaatgagtgaagaaygacgggctatagcaataaaagatgctttgaatgaaaattctcaacttcagacaagccataaacagctttttcagcaagaagctgaagtatggaaaggaca

SEQ ID NO: 493310 - DNA, 201 bp, Homo sapiens
catctctccctgctgaaaatgaagcaactggccctggccttattcctccacctcttgctccagtcagcggtccattgtttccagtggatacaaggggcccrttcatgagaagaggacctcctttccccccacctcctccaggaaccatgtttggagcttctcgaggttattttccaccaagggatttcccaggtccaccac

SEQ ID NO: 493311 - DNA, 201 bp, Homo sapiens
agaaaatcacatcaagaccctgactggacacttgccaatgatgaaagatcaggctgctgtgcttgaagaagacacaacggatgatgataacctggaattaraagtgaacagtcaatgggaaaatggtgctaacttagatgatcctctgaaaggagctttgaagaaactgattcatgctgctaagttaaatgtttctttaaa

SEQ ID NO: 493312 - DNA, 201 bp, Homo sapiens
actgaattctatcaagaaaatgaaatgaaactctacaggaaattaacagtggaggaaaattaccgaatagaggaagaagagaagctttctagagtggaagraaagatcagccgtgccactgaagagctggagacctatagaaagctagccaaagatcttgaagaagaattggagagaactgttcatttttatcaaaagcag

SEQ ID NO: 493313 - DNA, 201 bp, Homo sapiens
gatcaggctgctgtgcttgaagaagacacaacggatgatgataacctggaattagaagtgaacagtcaatgggaaaatggtgctaacttagatgatcctcygaaaggagctttgaagaaactgattcatgctgctaagttaaatgtttctttaaaaagcttagaaggagaaagaaaccacattattattcagttatctgaa

SEQ ID NO: 493314 - DNA, 201 bp, Homo sapiens
attctatcaagaaaatgaaatgaaactctacaggaaattaacagtggaggaaaattaccgaatagaggaagaagagaagctttctagagtggaagaaaagmtcagccgtgccactgaagagctggagacctatagaaagctagccaaagatcttgaagaagaattggagagaactgttcatttttatcaaaagcaggttat

SEQ ID NO: 493315 - DNA, 201 bp, Homo sapiens
gctgctgtgcttgaagaagacacaacggatgatgataacctggaattagaagtgaacagtcaatgggaaaatggtgctaacttagatgatcctctgaaagkagctttgaagaaactgattcatgctgctaagttaaatgtttctttaaaaagcttagaaggagaaagaaaccacattattattcagttatctgaagtggac

SEQ ID NO: 493316 - DNA, 201 bp, Homo sapiens
caagaaaatgaaatgaaactctacaggaaattaacagtggaggaaaattaccgaatagaggaagaagagaagctttctagagtggaagaaaagatcagccrtgccactgaagagctggagacctatagaaagctagccaaagatcttgaagaagaattggagagaactgttcatttttatcaaaagcaggttatttcctac

SEQ ID NO: 493317 - DNA, 201 bp, Homo sapiens
atgaaactctacaggaaattaacagtggaggaaaattaccgaatagaggaagaagagaagctttctagagtggaagaaaagatcagccgtgccactgaagrgctggagacctatagaaagctagccaaagatcttgaagaagaattggagagaactgttcatttttatcaaaagcaggttatttcctacgagaaaagagga

SEQ ID NO: 493318 - DNA, 201 bp, Homo sapiens
tttgaagaaactgattcatgctgctaagttaaatgtttctttaaaaagcttagaaggagaaagaaaccacattattattcagttatctgaagtggacaaawcaaaggaagagcttacagagcatattaaaaatcttcagactcaacaagcatctttgcaatcagaaaacatatattttgaaagtgagaatcagaagcttca

SEQ ID NO: 493319 - DNA, 201 bp, Homo sapiens
agactctcacctgtgcttccagggggaggaggaagaggcccaagcagcccagggaatcccctggaccatcagattaccaatgaaagaggagaaccaagctrtgacaggttaatcgatcctcacagggctccttctgacactgggtccctgtcatctccggtggaacaggaccgtaggatgatgtttcctccaccagggcaa

SEQ ID NO: 493320 - DNA, 201 bp, Homo sapiens
tccagtagaaatgatgccaaagatgatcttggtaatttaaatgtgcctgattcatctctccctgctgaaaatgaagcaactggccctggccttattcctcyacctcttgctccagtcagcggtccattgtttccagtggatacaaggggcccgttcatgagaagaggacctcctttccccccacctcctccaggaaccatg

SEQ ID NO: 493321 - DNA, 201 bp, Homo sapiens
aaaggaagagcttacagagcatattaaaaatcttcagactcaacaagcatctttgcaatcagaaaacatatattttgaaagtgagaatcagaagcttcaayagaaacttaaaataatgactgaattctatcaagaaaatgaaatgaaactctacaggaaattaacagtggaggaaaattaccgaatagaggaagaagagaa

SEQ ID NO: 493322 - DNA, 201 bp, Homo sapiens
atgaaaaaagatatattacacaaacattaatgaaaggaaagcaagagtgtctgtgtgcatatcagataaagcaaagaaaactaccaaaaccagagattatrtaatgatcaaaggtttaatccatgaagaagacagcaattttaaaagtgtattcaccaaaaaataaagcttcaaaatatgtgatgtgaaaactgccagaac

SEQ ID NO: 493323 - DNA, 201 bp, Homo sapiens
ctcgaggttattttccaccaagggatttcccaggtccaccacatgctccatttgcaatgagaaacatctatccaccgaggggtttacctccttaccttcayccgagacctggattttaccccaaccccacattctgaaggtagaagcgagttcccttcaggattgattccgccttcaaaggagcctgctactggacatcca

SEQ ID NO: 493324 - DNA, 201 bp, Homo sapiens
gactcaacaagcatctttgcaatcagaaaacatatattttgaaagtgagaatcagaagcttcaacagaaacttaaaataatgactgaattctatcaagaaratgaaatgaaactctacaggaaattaacagtggaggaaaattaccgaatagaggaagaagagaagctttctagagtggaagaaaagatcagccgtgccac

SEQ ID NO: 493325 - DNA, 201 bp, Homo sapiens
aactaccaaaaccagagattatataatgatcaaaggtttaatccatgaagaagacagcaattttaaaagtgtattcaccaaaaaataaagcttcaaaataygtgatgtgaaaactgccagaactaaggcgggccgggctcagaccagcgctgcctcaggatgtgaagtgtaacaagagggccaggggaggtggtgggggac

SEQ ID NO: 493326 - DNA, 201 bp, Homo sapiens
atttcccaggtccaccacatgctccatttgcaatgagaaacatctatccaccgaggggtttacctccttaccttcatccgagacctggattttaccccaaycccacattctgaaggtagaagcgagttcccttcaggattgattccgccttcaaaggagcctgctactggacatccagaaccacagcaagaaacctgacaa

SEQ ID NO: 493327 - DNA, 201 bp, Homo sapiens
tgcaatcagaaaacatatattttgaaagtgagaatcagaagcttcaacagaaacttaaaataatgactgaattctatcaagaaaatgaaatgaaactctayaggaaattaacagtggaggaaaattaccgaatagaggaagaagagaagctttctagagtggaagaaaagatcagccgtgccactgaagagctggagacct

SEQ ID NO: 493328 - DNA, 201 bp, Homo sapiens
aaaataatgactgaattctatcaagaaaatgaaatgaaactctacaggaaattaacagtggaggaaaattaccgaatagaggaagaagagaagctttctaragtggaagaaaagatcagccgtgccactgaagagctggagacctatagaaagctagccaaagatcttgaagaagaattggagagaactgttcatttttat

SEQ ID NO: 493329 - DNA, 201 bp, Homo sapiens
ccatttgcaatgagaaacatctatccaccgaggggtttacctccttaccttcatccgagacctggattttaccccaaccccacattctgaaggtagaagcsagttcccttcaggattgattccgccttcaaaggagcctgctactggacatccagaaccacagcaagaaacctgacaatattgttgctttcttcaaaagta

SEQ ID NO: 493330 - DNA, 201 bp, Homo sapiens
ttaccccaaccccacattctgaaggtagaagcgagttcccttcaggattgattccgccttcaaaggagcctgctactggacatccagaaccacagcaagamacctgacaatattgttgctttcttcaaaagtaattttgactgatctcattttcagtttaagtaactgctgttacttaagtgattgcacttttctcaaatt

SEQ ID NO: 493331 - DNA, 201 bp, Homo sapiens
cattcgggttccagacccaaggctgcgtgttctccaccgcttgttgtggccagtgttactgcggtgaccgccagagcagcctcgacgctatggaggagccyggtgctacccctcagccctacctggggctggtcctggaggagctacgcagagttgtggcagcactacctgagagtatgagaccagatgagaatccttatg

SEQ ID NO: 493332 - DNA, 201 bp, Homo sapiens
tagataatagaagagtgtatttaaaagtatgaccctttcttatatgtttcttgtatgctgtgtacaagaaactcacttgaattttaccaatacagggcagrccaaattaacaggatgaaaaaagatatattacacaaacattaatgaaaggaaagcaagagtgtctgtgtgcatatcagataaagcaaagaaaactaccaa

SEQ ID NO: 493333 - DNA, 201 bp, Homo sapiens
taaaagtgtattcaccaaaaaataaagcttcaaaatatgtgatgtgaaaactgccagaactaaggcgggccgggctcagaccagcgctgcctcaggatgtraagtgtaacaagagggccaggggaggtggtgggggacaacatgggcctgtgaggcctgtgggtgcccgcgttccccagctccccccgcagcccgctccac

SEQ ID NO: 493334 - DNA, 201 bp, Homo sapiens
ctaccaagagatagataatagaagagtgtatttaaaagtatgaccctttcttatatgtttcttgtatgctgtgtacaagaaactcacttgaattttaccartacagggcaggccaaattaacaggatgaaaaaagatatattacacaaacattaatgaaaggaaagcaagagtgtctgtgtgcatatcagataaagcaaag

SEQ ID NO: 493335 - DNA, 201 bp, Homo sapiens
aaactcacttgaattttaccaatacagggcaggccaaattaacaggatgaaaaaagatatattacacaaacattaatgaaaggaaagcaagagtgtctgtrtgcatatcagataaagcaaagaaaactaccaaaaccagagattatataatgatcaaaggtttaatccatgaagaagacagcaattttaaaagtgtattca

SEQ ID NO: 493336 - DNA, 201 bp, Homo sapiens
aatttttatctccagcctagacattttccctgaagtcctcctttgtttctccaattccccactcaaatctctacttaattgtctacaagccatctccaatwtaacatgttcaaaactgagttcctaatttcctctttaaaactttctcccttgtattctatctcatctcagaaaatggcagctctaccttccagttgctca

SEQ ID NO: 493337 - DNA, 201 bp, Homo sapiens
ggcaaatttttatctccagcctagacattttccctgaagtcctcctttgtttctccaattccccactcaaatctctacttaattgtctacaagccatctcyaatttaacatgttcaaaactgagttcctaatttcctctttaaaactttctcccttgtattctatctcatctcagaaaatggcagctctaccttccagttg

SEQ ID NO: 493338 - DNA, 201 bp, Homo sapiens
aaaactttgggtgaagtgcacactttctatgctgcatgtgttcagctacgttattacattcttccttttcagttctaaaatacaagaagaatgacgaggaygaatcacttaaagacaaattgtctaaactaaatattcattcaattagcaagaaatcaaaaagagtgacaaatcatctgaagattctgaccagaggagaat

SEQ ID NO: 493339 - DNA, 201 bp, Homo sapiens
ccttgaatgctcttccccaaaataacttcatagcttgctacttcatgtccgtcaagactttactcagtaaatccttccttcaccacctcaatctatcttakactggattcctcagaagcagagcctgataaaaggattttagatggtattgatttgggagatgataccctgaaatagcagtaagggaacagggaaatgaga

SEQ ID NO: 493340 - DNA, 201 bp, Homo sapiens
agtccccactccagggctcacgcttgtttccatcatcctgggcatacccagcaaaatccaaactcggctgagttttgagaatcttctggaactcaggtgamctaacattgatttgggcaccttggatttttgacaaaggtagttgttcaaaaaaaagagacaagtgagaaatttttagcaatttaaaaatgttcccagaac

SEQ ID NO: 493341 - DNA, 201 bp, Homo sapiens
acccagcaaaatccaaactcggctgagttttgagaatcttctggaactcaggtgacctaacattgatttgggcaccttggatttttgacaaaggtagttgytcaaaaaaaagagacaagtgagaaatttttagcaatttaaaaatgttcccagaactggctctgcttcctaaaatcagcactcactcctgctcccttcctt

SEQ ID NO: 493342 - DNA, 201 bp, Homo sapiens
ttttatttttgttatttatttctacattaatttcatggtagttgtggttctcaatttactaattctttgaaatgttataacttaatttataatgtatttcwtcaagtgtccttaaaaatactatgtaatctctaattattggagtaaatattttctgtcctaacagtctatcagttactgacagttatgtttaaaatatca

SEQ ID NO: 493343 - DNA, 201 bp, Homo sapiens
atctgttcttatatagctcatgtggattatgatttatgattatgattattattttgagacagagtctcattctctcgcccaggctggagtgcagtggcacratctcggctcactgcaagctccacctcccgggttcatgacattctcctgcctcagccttcaaagtagctgggactacaggagtccgccaccacgcccggc

SEQ ID NO: 493344 - DNA, 201 bp, Homo sapiens
actttctgcctgtacagattttcctattctgggcattttgtataaatgaaatcatacagtacatggttatttgtgactggcttcttctatttagcataacrtttcagggtttcttcatgcctagcatgtttcattatttcattcattttatcgccaaataacattccattgtatgaatataccacactttacttattcatt

SEQ ID NO: 493345 - DNA, 201 bp, Homo sapiens
ccaagctgtcctgtccaccaaatctcttatcctctccccagcgtcctcctacctggccacacattgctctgcttcctgttccttaaataggccatgcacaygctcaccttaaggttttccactgaccaattcatctgctaaaaaccacctctcccagatatctgcatgactctctcacctttcaactctatttcaggcctt

SEQ ID NO: 493346 - DNA, 201 bp, Homo sapiens
atcctctccccagcgtcctcctacctggccacacattgctctgcttcctgttccttaaataggccatgcacatgctcaccttaaggttttccactgaccarttcatctgctaaaaaccacctctcccagatatctgcatgactctctcacctttcaactctatttcaggcctttcctgccatcttatttaaaattgcacac

SEQ ID NO: 493347 - DNA, 201 bp, Homo sapiens
cagctttcatagcattatttttctctatatcacttatcaccttttagtatactaaataacttgtttaaattatttatgttcttcttccccaactagaagtwaagttccataaggaaaggaattttttttttattgctgtatccccagagcctaagatgattttgggctcatagtaagcccttactatttatttgctaagca

SEQ ID NO: 493348 - DNA, 201 bp, Homo sapiens
ggtgattggcaaatttttatctccagcctagacattttccctgaagtcctcctttgtttctccaattccccactcaaatctctacttaattgtctacaagscatctccaatttaacatgttcaaaactgagttcctaatttcctctttaaaactttctcccttgtattctatctcatctcagaaaatggcagctctacctt

SEQ ID NO: 493349 - DNA, 201 bp, Homo sapiens
ctgcattccagcctggttgacaaagtgagaacctgtttctgaaaacaaaaaacaaaaaaacaaattagcaagcacccccaaattctcataatatagatcargattggagggctacaggatatctcatgcattcattctctctccttgaatagattatctgttcttatatagctcatgtggattatgatttatgattatgat

SEQ ID NO: 493350 - DNA, 201 bp, Homo sapiens
ccatctacatgctggtgattggcaaatttttatctccagcctagacattttccctgaagtcctcctttgtttctccaattccccactcaaatctctacttrattgtctacaagccatctccaatttaacatgttcaaaactgagttcctaatttcctctttaaaactttctcccttgtattctatctcatctcagaaaatg

SEQ ID NO: 493351 - DNA, 201 bp, Homo sapiens
agtaaaaacaaaacaaaacaagtcattttatttaagtgaaaattggatgaaggaagttgaaaactgaggaaagtaccagaagttcctggcttaactgagtsaccttgtatgagtgaatcagtgtacaaatgagtgattagatctagcccttgactgacaactgttctgtgacaatcgtgctgtaaactttaatcttaactt

SEQ ID NO: 493352 - DNA, 201 bp, Homo sapiens
aacgctagaagtgatcatgacagaaggcagtcatgattagttgtgctcattagttatgcaaacaattaattgctttagacattagcaaaaggaggcactcrcttccctgacctgttggcagcatttgacaaaaacagtgccttctgtcttccaggactctacacactctttgttctccccctaccactctggctgctgctt

SEQ ID NO: 493353 - DNA, 201 bp, Homo sapiens
gtcagacctttaccgaactgataatacatcaaactcagcagttacacatcttctttaatagcagcactgtgagaggttttgcaaagaaggcaaacgttatycacatcagttagtgttgaaacatttagtgggaaaacaggttctagttatttattatccaaacagggcagtgagagatactctatgtttttggctataagt

SEQ ID NO: 493354 - DNA, 201 bp, Homo sapiens
actggaggcaatagtacctatcccatatggtttttatgaagatttgacaaaattatgtgtacagaatgatagcccagtgcctatccctaattaatatccartagatgatgttataaattattatcccaagaatattagatttactcatctatttaaaatgcctgattttttctgtatgtaacaagtgaataaaatgtgact

SEQ ID NO: 493355 - DNA, 201 bp, Homo sapiens
gaatagaatagaatagaatagaatagaatagaatagaatagaaaagtttctttccccagatctctgcaagagcagatttttatcactgaagtctctgttcrtcttttttgggagtccctccctgaccatccgacctaaagtgatgtaggtaagggaatacctttcctctaccctcttaaattctgtgactaggacctgtga

SEQ ID NO: 493356 - DNA, 201 bp, Homo sapiens
taagggaatacctttcctctaccctcttaaattctgtgactaggacctgtgaattgtatagacaaaagacatactaacaaaagaaaaagcatacacatttwacttgaggttaacatttttatgtgtcgtaggaggctttgtaggaagaaagaagtaaaaacctcaaagaagcagttagacctaggggtttacataacattt

SEQ ID NO: 493357 - DNA, 201 bp, Homo sapiens
atattcatttttgactcctacaagagtaaatagatcatgtgcattgtacagattcaattcagttcaaatttttaaacttttactgagtaactctgcacatmcccagaaccgtgttagacacagtagagtactcataaaggcaattcttagaggaattcacagttttgtcatagagacagataaattagtaaatatttctga

SEQ ID NO: 493358 - DNA, 201 bp, Homo sapiens
cagaaattatttgatgaaaggatggataaatgaataaataaattattataaacacttgctataagatctaagaataattacactggttgttaagggtgtgyatgaaataacaaaatataatgaatccttaattagtagaatatatttaatgatttccatttacatttatatcaagaaaaaaaaaggaaaaagcaacccagc

SEQ ID NO: 493359 - DNA, 201 bp, Homo sapiens
aaaaacacacaaaaatgaaaatgtgttaataaaacatatgtttgtgaaactgatattatttatctgtattgtagaggcaaaccaaacttattggacatggkctctttgatgatcaaaccaattcaacgtgtgatgaaataccccctattactgtgcgaacttcggaattccacccctccctctcacccagattacagagca

SEQ ID NO: 493360 - DNA, 201 bp, Homo sapiens
acttgatccttaaagaattaattatttaaatattctaatagctttactgatttctcattacaatgttttttagatcttatgcccatcaatcaatttttttrgattataaacttcttacctgaggaatgtaaaactattaaaggaatgtaagttattaaaaatttacacaagttctactttttttcatgctctctttttttc

SEQ ID NO: 493361 - DNA, 201 bp, Homo sapiens
agaatgcctcacctgtatatgttttcatttaacagaaaagatgactccacagggtgagtgttctgtagctgagaccttaaccccagaggaagagcatcatrtgaagaggatgatggcaaagcgggaaaagatcattaaggagctgatacagacagaaaaggattatctcaatgatctagagctgtgtgttagggaagtggt

SEQ ID NO: 493362 - DNA, 201 bp, Homo sapiens
ctcagtaacttttgtcttactgcatatatagaaaccagtgtaaaacacggtattttactttcctatttttttcagtagagacatcttgcagtttttagaaggaccatttgtgtcaaataatgtgtgagtcacagaaattgagactgtttgagctattctactactaccatattgtgatgggcaaatttattcctatgtttg

SEQ ID NO: 493363 - DNA, 201 bp, Homo sapiens
gaaaattatttttagggtgagggcaagtgctgttaagtaaggcattaaacaaaaccttaagcttggtatatgaaattattcactacaactattctttactragagatcagtaagatttcaatacaattaagaaaatctaaattcaggattatttattggtagctattgaaaaacaatatcagaggggaaccttaatctaaa

SEQ ID NO: 493364 - DNA, 201 bp, Homo sapiens
taattccctttctttttaaagcttgaataatattccattttctgaatattacacattttgttcatctatttatccattaatggatacttgggttgcttccrtgctttagctattgagaataatgcaatcctaccaacaatactcaagaattccaattccaatttctccacatccttgccaacacctctggcttatatttta

SEQ ID NO: 493365 - DNA, 201 bp, Homo sapiens
attcaggttgtttattttgttgttgttattgttgagttttggagctctttctacattctgggtgttaatcttttatcagatatacaaatattttctcctaygctgtaaactgcttttttattttgttgatagtgtcttctgatgcacaaactttaaaattttcataagtccaacttttctgtttcttcagaaaagaagaaa

SEQ ID NO: 493366 - DNA, 201 bp, Homo sapiens
cttttagggttttagtcataaatactttgcctaggccaacgtccagaagagttttttcaaagttatcttctagaatttttatgctttcagccctagacttragtctttgatccatcttgagtttatttttgtataaggtgagagatagggatccagtttcattcttctacatgtggatatctagttttcccagcaccattt

SEQ ID NO: 493367 - DNA, 201 bp, Homo sapiens
gtagcagtctttgctgtttttgctttttccagccaaggagggcaatttcctgatagatggtcaatctcccctcttgcccttggaacatttccaaggaaaaraaaaagagggaaagcaggtgtagccattcacaaccagatacagaataatggcaagtaaatcatggtcgtaaaaacaatgactgacattttttgagaggtt

SEQ ID NO: 493368 - DNA, 201 bp, Homo sapiens
ctactaccatattgtgatgggcaaatttattcctatgtttgaccgatatgactttaggtataactttcttaaaagtagcaaacacaatttctagttgtgctttttttttttgtttataaaaattatgggtttatcaaaatgagacatcaagaggaagaaggaatgaaagaaaggaaggagagagagaaggggaggggagag

SEQ ID NO: 493369 - DNA, 201 bp, Homo sapiens
ggcagaagttacagtaagctgagatcatgccactgcactccagcctggagtctcaaaaatagagtagaatagaatagaatggaatagaatagaatagaatrgaatggaatggaatggaatggaatggaatggaatggaatggaatggaatggaatggaatggaatggaatggaatagaatagaatagaatagaatagaata

SEQ ID NO: 493370 - DNA, 201 bp, Homo sapiens
gtccccagagtgtgatgttccccttcctgtgtccatgtgatctcattgttcaattctcacctatgagtgagaatatgcggtgtttggttttttgttcttgygatagtttactgagaatgatgatttccaatttcatccatgtccctacaaaggacatgaactcatcattttttatggctgcatagtattccatggtgtata

SEQ ID NO: 493371 - DNA, 201 bp, Homo sapiens
gggaatttccaagggaatatgtgctatgaattccttaaaggcagtttgcacttcgagacatcatacagtgtcatgtaggctaagagttttttaaaattatsgtttctctatttcacacttaatatacaataactcctcattacaaaagtactaaaacaattcaggagcacgtagagtaacggtaaaatttcctttcatata

SEQ ID NO: 493372 - DNA, 201 bp, Homo sapiens
gtgtccagctccatccaggttgctgcaaaagacattatttcattcttttttatggctatattccatagcacatatatatatgcacacacatatatatagcatatatatatatgtacacacacacacacacatatatacacacacacacacacacacaccatattttctgtatccactcactggtcagtgggcacttaggtt

SEQ ID NO: 493373 - DNA, 201 bp, Homo sapiens
acagtgcttctccatcagctcaatgttttttgtttcttcagactgataggctggatgtggatagcttgtttagcaacattgagtccgtgcatcagatatcrgccaagctgctgtcattgttggaagaggccacaacagacgtggaaccggccatgcaagtaattggtatgtttattctcttctcgagttctacaatacaac

SEQ ID NO: 493374 - DNA, 201 bp, Homo sapiens
ttcatataatttttaaatgaaatgtaaaaatgggtagtatagagggggccttaactcatcaggatttctcccaaaatattttcctgtcaaagagaaaacaraacaaaacacagtgagtagattagaattaagttcagctgggagaaacagaaacaaaaacaaaacattactagcataataagacagatgttgatttctcta

SEQ ID NO: 493375 - DNA, 201 bp, Homo sapiens
tgtccagctccatccaggttgctgcaaaagacattatttcattcttttttatggctatattccatagcacatatatatatgcacacacatatatatagcatatatatatatgtacacacacacacacacatatatacacacacacacacacacacaccatattttctgtatccactcactggtcagtgggcacttaggttg

SEQ ID NO: 493376 - DNA, 201 bp, Homo sapiens
ttgctgcaaaagacattatttcattcttttttatggctatattccatagcacatatatatatgcacacacatatatatagcatatatatatatgtacacayacacacacacatatatacacacacacacacacacacaccatattttctgtatccactcactggtcagtgggcacttaggttggcttcatatctttgcaat

SEQ ID NO: 493377 - DNA, 201 bp, Homo sapiens
tacagtgcttctccatcagctcaatgttttttgtttcttcagactgataggctggatgtggatagcttgtttagcaacattgagtccgtgcatcagatatyagccaagctgctgtcattgttggaagaggccacaacagacgtggaaccggccatgcaagtaattggtatgtttattctcttctcgagttctacaatacaa

SEQ ID NO: 493378 - DNA, 201 bp, Homo sapiens
ttcctgctttcctgatgaaggagggattggtaggcgataaatggttccaaacatactcacctgtgggtctggattgtccaaagatcaacctagtatagctyccaaactgatgctggaattactctccacagatgtttgaatattgagtctctgccttaaatgctgaagttagtggaccagagagagagctcattacttttt

SEQ ID NO: 493379 - DNA, 201 bp, Homo sapiens
gctgcaaaagacattatttcattcttttttatggctatattccatagcacatatatatatgcacacacatatatatagcatatatatatatgtacacacayacacacacatatatacacacacacacacacacacaccatattttctgtatccactcactggtcagtgggcacttaggttggcttcatatctttgcaattg

SEQ ID NO: 493380 - DNA, 201 bp, Homo sapiens
catctatgctttatttcagcagtgttttgtagttctctttgtagagaattttcacctccttggttaagtatattcttagttattcaattttcttttcttctttttttttttttttgcagccattgtaaaagggattgagttctttatttgattctcagcttgctcattgttggtatatagcaagcagcactgctgatttgt

SEQ ID NO: 493381 - DNA, 201 bp, Homo sapiens
acttcctgctttcctgatgaaggagggattggtaggcgataaatggttccaaacatactcacctgtgggtctggattgtccaaagatcaacctagtatagyttccaaactgatgctggaattactctccacagatgtttgaatattgagtctctgccttaaatgctgaagttagtggaccagagagagagctcattacttt

SEQ ID NO: 493382 - DNA, 201 bp, Homo sapiens
ggtcgtttagcactataaactttccttttagtgttccttttgctgtatcccagggctttgataacttgtgtcattatgatcattaatttcaaagaatactyaaatttctatcttgatttcatcagtaacctcaaaatcattcaggagcagatcgtttaatttccatgtgtttgtatagctatgggggttccttgtggagtt

SEQ ID NO: 493383 - DNA, 201 bp, Homo sapiens
acatatatccttaatttaaaaacatctaaagttcattaatgtctttagcttttctgcaatatcacaaaaatgtttaaatgtttaaaatacttagaagtctycacaatctctcccaagctgtcctgtccaccaaatctcttatcctctccccagcgtcctcctacctggccacacattgctctgcttcctgttccttaaata

SEQ ID NO: 493384 - DNA, 201 bp, Homo sapiens
tggaattatgtcatctgcaaacaggaatactttcactatttggatcccatttatttctttctgttgcctgattgttctggccaggatttccaatactatgwtgagttagagtggtgagagcgggcattcttgtcttgtgccagtttttaaggggaatgctttcagcttttgcccatttagtatgttgttggctgtgggttt

SEQ ID NO: 493385 - DNA, 201 bp, Homo sapiens
tggaggaggcgtttcccggctagaattgggtctgaaagtgagtttaaaatgagcccagtgaattttttttttaaataaataaaatttcaactttattgccstctactggtcattaaattactgcagttttaaaccattcttcatgctatggaaaagaattcaagtcaccaaatcttaagcatttatttagtgtttgtgctg

SEQ ID NO: 493386 - DNA, 201 bp, Homo sapiens
aatttcaagtcttgtatgatttatggagaaaaaaatcatacacattatagcatgaaaatgaaatattaaggtgaaatagttggttactaggacaatatagwaattattttagaaaaacagcgtatacaaacactctgaaagaggtccattattctagaagaaaatgtatccaggctgattaatgctgaaaggatgaaattg

SEQ ID NO: 493387 - DNA, 201 bp, Homo sapiens
ttccacctctagacaggacttcgggaaaatcatttatttgtttcaaattcagatttattcatcctgaattaatatggataaataaccttttatctcttcaygcaagtaggaagttaatgtgtgaaaaacatgttgaaaatactaagggcacttttatttctgtggaaagaatgacttactcctgttaactataataggtcc

SEQ ID NO: 493388 - DNA, 201 bp, Homo sapiens
tgttgcagccaaaagggcatttaagagtacaagatgtgggtttttacatggcattcaataatccctcacttatggcaatcaaaaattatccgttttttagkttttttttacaacctaccttcttaaaaatacaaagtgaaagatatttgtaatttctaaaatgtttactttgaattataacctcacgcaaacatcagacag

SEQ ID NO: 493389 - DNA, 201 bp, Homo sapiens
cttaaaacaatacaaacatatttctcaggggctgttgtcaggagtccaagcacggtttagctggatgccctgcttaagatctcatgtagctgcaatctagstgtttgctggttgtattgcttctgaaactgagggttctcttcccagctcatggtcattggcagaattaaatttcttgttctggtcggactaaggactcct

SEQ ID NO: 493390 - DNA, 201 bp, Homo sapiens
tttgaaaagaagaaacctgtgcagattctggtgagtttggcagcattcatgacaatgataactttcacctctttgccttatccaagttgtagtatcatatyattttccagatcacttatctcattctaatatcctataatttacatatgtgtagaatttcttgtacatttctatcctatataccataagctccataagatc

SEQ ID NO: 493391 - DNA, 201 bp, Homo sapiens
agaagttaagttccataaggaaaggaattttttttttattgctgtatccccagagcctaagatgattttgggctcatagtaagcccttactatttatttgytaagcattcaataatttcagatctcaaatccatatgagagccagttagtgtccttgaattgttaagggatgctatttttttttctattgatcaccaccaa

SEQ ID NO: 493392 - DNA, 201 bp, Homo sapiens
attaagtgataattgggcagtgtccatactggtttgtcagctctcttacgcatgagatttcctcctgtgctctatttcacatactccaggagtaaaggacstccctcacacctctctgccctcagtctcccccacccccacccaatcatttcactatgtataatacatcaaaatattatgttgtacatcttgaatatacac

SEQ ID NO: 493393 - DNA, 201 bp, Homo sapiens
cttttatttagaaattttagatatacaaatgaaaaaaagagaaaatgttttagaagtaatcataaaaacacacaaaaatgaaaatgtgttaataaaacatrtgtttgtgaaactgatattatttatctgtattgtagaggcaaaccaaacttattggacatgggctctttgatgatcaaaccaattcaacgtgtgatgaaa

SEQ ID NO: 493394 - DNA, 201 bp, Homo sapiens
taataactatttgctgaatggatgaaattagagataatagtaagcgtgcagtgcattggctggcacacagagggtccaggaggtgattgttgttactgtcrtcactgagtctgtctgtggtcagtgtcattgtcaaatgtcactttcaaaagtcaatgtcattgccagagattgctaagtaatatagagcaactagctaca

SEQ ID NO: 493395 - DNA, 201 bp, Homo sapiens
tcacagaaacatacacatggtattttaccctcatatttcattaattatgtaagtttcgttaaagtaatataattacaaagaagtacaactgacataatgargtcagctgttgaacacaattaagtcttgaaaaatatgccccttgattgttaagtggagaagtacatagacatcagtttgtgtattttagggagataatgg

SEQ ID NO: 493396 - DNA, 201 bp, Homo sapiens
aggaggtgattgttgttactgtcgtcactgagtctgtctgtggtcagtgtcattgtcaaatgtcactttcaaaagtcaatgtcattgccagagattgctargtaatatagagcaactagctacagcagaggcaagctttctcaagagaggtatttactaacgtgagttaaatggaaaatcatggattggtctaagacaggg

SEQ ID NO: 493397 - DNA, 201 bp, Homo sapiens
ccagagctttttcctctccaaacattgaccctctccacagcccactagcaccccccagtttgtcctgctcagctgctagccacctcccatggccagatgtrctgagtggatgccaccttagcttcagaacagccccttctttgagagccccaccacaattatgacattgtcttccctggcactggacacagagatgatcac

SEQ ID NO: 493398 - DNA, 201 bp, Homo sapiens
ctatcttttgtaatggtttcagtaggattgatgccaatttttctttgaatgtctgatagaattcagctgtgaatccatctggtcctgggtttttgttgttrttgttgttgttgttggcaaatttctagttaacttctcccatctcgctgcttatcggtctaatcagggttcctatttcttcctgacttaatctaagagggt

SEQ ID NO: 493399 - DNA, 201 bp, Homo sapiens
cctttctctgtttctctctttagggtccagctcccttcattggtccctcttcttcatctctcattccctcctaaacccaaccctctaaaaatgctattacygcatcaccagggacctcagaattgtcaaatccaatggacacatattttttctgaacttatcttacgctagtgcttctgaaaaaaaatttttaccagaata

SEQ ID NO: 493400 - DNA, 201 bp, Homo sapiens
tggaatggaatggaatagaatagaatagaatagaatagaatagaatagaatagaatagaatagaatagaatagaatagaatagaaaagtttctttccccaratctctgcaagagcagatttttatcactgaagtctctgttcgtcttttttgggagtccctccctgaccatccgacctaaagtgatgtaggtaagggaata

SEQ ID NO: 493401 - DNA, 201 bp, Homo sapiens
ttaggtaagtctctggaagacagttgatatttggtttgtgatttttttaatccattatgccaatctgtatattttaagtggagcatttagccacttacatktaacattgagatgtgaggtatagtttcatttatcatgtcattgttacctagatactttcagtttttctcattatgttactgttttataagccctgtggat

SEQ ID NO: 493402 - DNA, 201 bp, Homo sapiens
gttttccagtctactcttctaggaaaccagagtttttttcttcaaatttcttaataaaatggatactcaagggatacacttgttttaatcccatggctgcrtgtcccacctgctgcctgtatttggtttgaatattataaccctagccagggtctcttgggtatccacagcagcagttttatcccctaggctaggtggaag

SEQ ID NO: 493403 - DNA, 201 bp, Homo sapiens
ctacttgatagctcttactgtttgtgttgttatcagtgttgaagaacaaatccatatgacctacactagttgaaggatgaactctataggatatcagaaamaaaacaagaatcctgtgtccttcagctccaaagatgctcacagttattgagttttcttataggcccccagaaagcactactaaaacaaacaaacaaaaat

SEQ ID NO: 493404 - DNA, 201 bp, Homo sapiens
acatatagtgcagaggaactctatcaagctaagcgcaagtgcaatgctacacaagaatatgacatcaatcttctggaaggagacttggtggctgtgatagwacagaaagatccactggggagtacaagcaggtggcttgtggacacaggaagtaagtttttccccagaactaccactcttctttaaactgagatttttctg

SEQ ID NO: 493405 - DNA, 201 bp, Homo sapiens
cttgatttctcccttaatttcattatttacccaaaagtcattcatgaacaagttgtttcatttccatgtaattgtgtggttctgggcaattttcttggtcrttaattctaattttattgtactatggtctgagagagtggttggcaaaatttcaaggatttttgtacatgtactgagcataattatatgtctgattttgtg

SEQ ID NO: 493406 - DNA, 201 bp, Homo sapiens
tgtgttgtgatgaaattatatattagttaatggccagattcttgtgttgtattatctttgtgttctccacagtcaaatgactgtgaaagttgctcaataastaagtatcaaatggtgtatgtgtgcctgcctggttggttgttgggagtatgagaatgttccaacattcttgaagtatgtctttgttagcagcatgagaac

SEQ ID NO: 493407 - DNA, 201 bp, Homo sapiens
actgacataatgaggtcagctgttgaacacaattaagtcttgaaaaatatgccccttgattgttaagtggagaagtacatagacatcagtttgtgtatttwagggagataatggaaaatgttgatttatctcatgacttcaataccctgtctttacttctagattatacatatcttgatggtaagagctgttgtttattca

SEQ ID NO: 493408 - DNA, 201 bp, Homo sapiens
agcgggcattcttgtcttgtgccagtttttaaggggaatgctttcagcttttgcccatttagtatgttgttggctgtgggtttgtcatagatggctcttaytattttaagatatgttccttcaatacctagttcattgacagtttttaacatgaagggatattgaaccatatcaaaagccttttctgcatctgttcagatg

SEQ ID NO: 493409 - DNA, 201 bp, Homo sapiens
gttggctgtgggtttgtcatagatggctcttactattttaagatatgttccttcaatacctagttcattgacagtttttaacatgaagggatattgaaccrtatcaaaagccttttctgcatctgttcagatgatcatgtggtttttgtctttagttctgcttatgagatgaatcacatttactgatttgcatatgttgaa

SEQ ID NO: 493410 - DNA, 201 bp, Homo sapiens
caccaaggatattggcctgaagttttctttatttgttgtgtctctgccagtctttggtatcaggatgattctggcctcatagcaggagttggggaggagtkcctcctcctcaattttttggaatagcttcggtaggaataatatcagcttttattcgtacatgtgtttgaatttggctgtgaatccctctggtactgagct

SEQ ID NO: 493411 - DNA, 201 bp, Homo sapiens
ttattggtctgttcagaaattgaatttcttcctggttcagttttgggagggtgtatatgtccaggaatttatccatttcatctagattttctagtttgtgyacatagtgtgttcagaatagtctctgatgattgtatttctgtgaggtcagtggtattacctcttttgccattgccaattgtgttcatttggatcttttct

SEQ ID NO: 493412 - DNA, 201 bp, Homo sapiens
tattggtctgttcagaaattgaatttcttcctggttcagttttgggagggtgtatatgtccaggaatttatccatttcatctagattttctagtttgtgcrcatagtgtgttcagaatagtctctgatgattgtatttctgtgaggtcagtggtattacctcttttgccattgccaattgtgttcatttggatcttttctc

SEQ ID NO: 493413 - DNA, 201 bp, Homo sapiens
ggtctgttcagaaattgaatttcttcctggttcagttttgggagggtgtatatgtccaggaatttatccatttcatctagattttctagtttgtgcacatwgtgtgttcagaatagtctctgatgattgtatttctgtgaggtcagtggtattacctcttttgccattgccaattgtgttcatttggatcttttctctttt

SEQ ID NO: 493414 - DNA, 201 bp, Homo sapiens
tgtgtctttgtttgtttgtttttttgagacagagtcttgctctgttgcctaggctggagtgcagtgacactatttcagttcactacaacctccaccttccyggttcaagcgattctccaccactaagcccggctagtttttgtatttttagtagaggcggggtttcaccatgttggccaggctggtctcaaactcctgacc

SEQ ID NO: 493415 - DNA, 201 bp, Homo sapiens
tttgtttgtttttttgagacagagtcttgctctgttgcctaggctggagtgcagtgacactatttcagttcactacaacctccaccttcccggttcaagcrattctccaccactaagcccggctagtttttgtatttttagtagaggcggggtttcaccatgttggccaggctggtctcaaactcctgacctcaaatgatc

SEQ ID NO: 493416 - DNA, 201 bp, Homo sapiens
ttttctgcatctgactcatggtatcgtgtttccgtgtgtgttttaggatttcttaaaatctcgtattcctatggccgggtgtggtggctcacgcttgtaaycccagcactttgggaggccgaggtgggtggatcacgaggtcaggagctcgagaccagcctggccaacccagtgaaaccccgtctctactaaaaatacaaa

SEQ ID NO: 493417 - DNA, 201 bp, Homo sapiens
gttttcttttgtgcttctcgtgggggaaaaggtaaacctatggatagcagaactggacaaggtatgggctgatcctctctctgaaatgggctcattttttmttttggcaggcatctcacttacagagactcatcctgacccccttgtcagccctgctgtccttattcccagggcctcacaagctcatccagaaacgctatg

SEQ ID NO: 493418 - DNA, 201 bp, Homo sapiens
ttggctgggtgtggtggcgggcgcctgtaatcccagctactcaggaggctgaggcaggagaatcacttgaaccaaggaggtggaggttacagtgagccaaratcatgccactgcactccagcctgggcgacagagctagactccgtctcaaaaaaaaaaaaaaaaaaaaatctcgtattccttgcaatgtagctgcaagga

SEQ ID NO: 493419 - DNA, 201 bp, Homo sapiens
ttagttgtcggggaacaaaattacaaaggtaggttaagcaaaactgtcttatagtaatagcttaatgatctccatttcctgcttcattgcgtatcttgacrctgaaactcatctttctttaattttatgcctgttgtcatttatttgcatctcaataaaacttaatatatatcagaataactgagagtcctattctacagc

SEQ ID NO: 493420 - DNA, 201 bp, Homo sapiens
tgcataatacttatctttaagtaatgaagtgtggatcaaatcaaactatcgtccaatatctaatttagtcaccagttatagaccctatttcatcataataycaaaaaggattcattaaatgcctggatacaattagtctaagttgctttacgaagatacagtcataacctttgttcatggtattaaactgatttttaaaat

SEQ ID NO: 493421 - DNA, 201 bp, Homo sapiens
ggctggagtgcagtggtgcaatctcagctcgctgcaacctctgcctcccgggttcaagcgattctcctgcctcagcctcccgagtagctggggctacaggkcgcctgacaccaagctgatttttgtatttttagtagagacggggtttcaccatattggccaggctggtctcaaactcctgacctcgtgatccacccacct

SEQ ID NO: 493422 - DNA, 201 bp, Homo sapiens
gctgggagctctgctttgcattccctttataaaaagctgacatgccagaagccctgattgactttttttccccctgcgagaatgactaaaaataacatggragaagatttagagctctgcagcgattgaaaaatgcaatatcaaaatataaaatgtggaagaaaagcctcttcttaaagctattgtaacttgcctggcccc

SEQ ID NO: 493423 - DNA, 201 bp, Homo sapiens
actgtggggagatgggtgaagacaagtcaggccttgttaaagttagtttcagaacaattactcatgccttcctttctcatccctaaaacattggtgggggwgctacacaatgtactttttcttttctagaggaagtatctattcactgtgaaaatctgaaaaatataacaaagtatgtgtaagataaaaaccccttgctat

SEQ ID NO: 493424 - DNA, 201 bp, Homo sapiens
attagtctcaaatctgcaatgttttgagagctgaccctgtcacatattgcttggatatctgccaaataatttctatagtgttgggttgagtagtggatgcmtaatacttatctttaagtaatgaagtgtggatcaaatcaaactatcgtccaatatctaatttagtcaccagttatagaccctatttcatcataataccaa

SEQ ID NO: 493425 - DNA, 201 bp, Homo sapiens
atcattagtctcagctcagtacttttcttttacaattttttgagtattcttgcatattccctttttataaagaactttttattaaaaatgatatatagccytgtttcaatagccaaatcgttctgcaagatttgtcaagaaaaatagtaatcccctcttctcctgccagcccctaaattctcattagaatacattactttc

SEQ ID NO: 493426 - DNA, 201 bp, Homo sapiens
aataattcttaatcttttaaatttgtctcattcaactcctaatataacagcagtgctttggcaacttgactttataaaattatgtcaaaacattaaagcasttttcacagaaacatacacatggtattttaccctcatatttcattaattatgtaagtttcgttaaagtaatataattacaaagaagtacaactgacataa

SEQ ID NO: 493427 - DNA, 201 bp, Homo sapiens
tatagagtcttctttttgtccttagcactctgaagttcatgaattccaaggtgtgactccatttcttccattgtgctggacacttagtgagttcttttaamctgcaaattcctgtctttttcttgaattatttcgctcactatttactcctcatatttgctttgttttacctttctgtgattcttattagtagatgatgaa

SEQ ID NO: 493428 - DNA, 201 bp, Homo sapiens
cctatttccatgggtaaccagtgactgtaattgattaacatttgcaaaatgattaaacattgcctcaccatttcactggttctatctggtctgttacatcrgttactattcatttatctcccttatgtattctaatttaataattattatgatgtatttattttcactattatcttttatttatgacaaatgctgtttatt

SEQ ID NO: 493429 - DNA, 201 bp, Homo sapiens
tagagacaagatttctccatgttggtcaggctggtcttgaactcctgatcttaggtgatcctcctgccttggcctctgaaagtgctgagattacacacctsgcctgccatccttttactatctatcttcatgagttcagttgttttaatttttagcacccacagataagtgagaacatgcaaagtttgtctttctgtgcct

SEQ ID NO: 493430 - DNA, 201 bp, Homo sapiens
tttcactggttctatctggtctgttacatcggttactattcatttatctcccttatgtattctaatttaataattattatgatgtatttattttcactatyatcttttatttatgacaaatgctgtttatttgtgtaacaatatacagtttcctttaaaattgacttaggtgttttaaaaggagagtaaattgaaaaaagt

SEQ ID NO: 493431 - DNA, 201 bp, Homo sapiens
caccttgtgctacctgtttcagatttcaactgtgtcacttctccataggactgatgtccaggctgtgctatgcttgcatgggtcacaggttatcataattmtatttatactaactacagttttaatttttttatttttaatttttgtgggtacataataggtgcatatatttatgggttacatgagatattctgatacagg

SEQ ID NO: 493432 - DNA, 201 bp, Homo sapiens
tatatcacacataggactcatctgcctcgcatggttaccagaactgaatcttactgtgggagattagatggggtgaattttgtggcactgaaagcatggaktattattatcttataacactccctctatcttttctacgatattgcttgtctgtgcgatgcagttttctgaatatcattgctcatcacttgggcaactctc

SEQ ID NO: 493433 - DNA, 201 bp, Homo sapiens
tacttttggcactaaatacttgccaaagtatttatgataagacagaggaagatgaaatagaattacaaattaataagtagtttagtttttggcccaatatrtatgagcaattgttacacgtttgtttacttactgtggggagtcatgggataattgacttcctggctgagatgggttatatcacacataggactcatctgc

SEQ ID NO: 493434 - DNA, 201 bp, Homo sapiens
agatggggtgaattttgtggcactgaaagcatggagtattattatcttataacactccctctatcttttctacgatattgcttgtctgtgcgatgcagttwtctgaatatcattgctcatcacttgggcaactctctcaagtatatctccagacacaaaagtgtctgggagatttctcatttttgagaacgccttttttag

SEQ ID NO: 493435 - DNA, 201 bp, Homo sapiens
tgcctgactgggacatgggtggacagtggggctggagcatatggcctctgcagcagaggctcaaaaatcatatacatatttatcttgaatataaatactcrtcttgaaaactttgggtgaagtgcacactttctatgctgcatgtgttcagctacgttattacattcttccttttcagttctaaaatacaagaagaatgac

SEQ ID NO: 493436 - DNA, 201 bp, Homo sapiens
gccaccacacccggctaatgttgtatttttagtagagatggcgtttctccatgttggtcaggccggtatgaaactcctaacctcaggtgatccacccaccycggcctcccaaagtgttgggattacaggcatgagccactgcgccaggccccctcggttgcttcatccagaaataaaagacgggctatagctgactgctga

SEQ ID NO: 493437 - DNA, 201 bp, Homo sapiens
actgtctcagtaaatgccatagtaatgagttaattatcctagcccagtggttgctggggctttctgccaacatcctttttttccacttgctgcaatttctrtctcacaagcagtcctcttctcaacttccttactaaaaaataaaacaaaacctactttatcctctcagaatgtccccagtgagtctccacttctcaaatg

SEQ ID NO: 493438 - DNA, 201 bp, Homo sapiens
aattatcctagcccagtggttgctggggctttctgccaacatcctttttttccacttgctgcaatttctatctcacaagcagtcctcttctcaacttcctyactaaaaaataaaacaaaacctactttatcctctcagaatgtccccagtgagtctccacttctcaaatgtttggtaacccatggcagctttcttccactt

SEQ ID NO: 493439 - DNA, 201 bp, Homo sapiens
tttgttctagtaaaatttcattttgatgttgatattgggcagcattttaagtcttttcttcggtacttgttatgtggtcctccagaacttgcctctcctgmttttagcacaaggtgtgtctgaactctcatcatcccactgtgagctgtcgttttggatttaaaaactatgatgaggtcagaaagaccgataggacatgct

SEQ ID NO: 493440 - DNA, 201 bp, Homo sapiens
tttccacttgctgcaatttctatctcacaagcagtcctcttctcaacttccttactaaaaaataaaacaaaacctactttatcctctcagaatgtccccastgagtctccacttctcaaatgtttggtaacccatggcagctttcttccacttccaccttactgcagtctcaatatcattgggttttgatggcttcagcat

SEQ ID NO: 493441 - DNA, 201 bp, Homo sapiens
ttggggtacaaatgatctcatcacctgggtactgagcatagtacccagtaggtggtttttcagcccttgcctctgtccgtttctcgccactccagtagtcyccagtatctattgttgccacctttatgtccatgtatgtctaatgtttagctctcactcataagtgagaacatgcagtatttggtttgctgttccagcatt

SEQ ID NO: 493442 - DNA, 201 bp, Homo sapiens
agtgagtctccacttctcaaatgtttggtaacccatggcagctttcttccacttccaccttactgcagtctcaatatcattgggttttgatggcttcagcrttaataatggatcaatctaatttagaggatgcatccaggcctcaccaaaatgttgtgtgtggaactgtcctacagaaggagtagagggcaccaaggttct

SEQ ID NO: 493443 - DNA, 201 bp, Homo sapiens
cactccagtagtctccagtatctattgttgccacctttatgtccatgtatgtctaatgtttagctctcactcataagtgagaacatgcagtatttggtttkctgttccagcattaatttgcttaggataatggcctccggttgtatccatgttgctgtaaaggacatgattttgttctttcttctggctgtgtagtattcc

SEQ ID NO: 493444 - DNA, 201 bp, Homo sapiens
tcatagtaaaacaatgattttattaaaataaaaatctatagagcagacgtgtagttgaaaatgattggtgtatatatgatgaagttgtggaatttattaaytgaagtaaaaactgtagtgaaaatttgcatttatttttatatacacaaaattagagtgaataacactacctgaagaataaatttgatattgaattaaaaa

SEQ ID NO: 493445 - DNA, 201 bp, Homo sapiens
gttgccacctttatgtccatgtatgtctaatgtttagctctcactcataagtgagaacatgcagtatttggtttgctgttccagcattaatttgcttaggwtaatggcctccggttgtatccatgttgctgtaaaggacatgattttgttctttcttctggctgtgtagtattccatgatgaatatgtaccatgagaattt

SEQ ID NO: 493446 - DNA, 201 bp, Homo sapiens
ttaaatggaaaatcatggattggtctaagacagggttttcctcagtgttgtcaaccttacattaaaaaaaagttatgtaccttttcctgatccagccagcaaaactttcactttctcagagaaccaatgttgccttaagatgtcagttgttaaagaatcctgacctggagttaaagtatctagaagtcaacaaggttcagg

SEQ ID NO: 493447 - DNA, 201 bp, Homo sapiens
gtctgaactctcatcatcccactgtgagctgtcgttttggatttaaaaactatgatgaggtcagaaagaccgataggacatgcttatatttaacaaatctytttccacaaatatgagcttagatttagttatgcaaattaattaagttaaataagttaaattaaatgcatttaaattaaatctaaaaattattactataag

SEQ ID NO: 493448 - DNA, 201 bp, Homo sapiens
aacagaaaataatttttgctattcacaaatttttgcttactaaattttcctaaaaaaataagtctatgaccacacaagagagcagacatgggttggttacyttgcagaagacctcagacttcttacgcacttcatttgatttgtggctttcctgtgctctgttggattctttgaaggtggaaggcaaaactcagcagttaa

SEQ ID NO: 493449 - DNA, 201 bp, Homo sapiens
catcaggtttaaagagtaaaaataacttgctcaagtcaaagtgccagtctgtagcacagcctgactcaaatccgtgcacaccaactctaaactgcaactcttttttttttttttttgagatagagtcttgctctgtcacccaggctggagtgcagtggtgcaatctcagctcgctgcaacctctgcctcccgggttcaagc

SEQ ID NO: 493450 - DNA, 201 bp, Homo sapiens
gttatgtggtcctccagaacttgcctctcctgattttagcacaaggtgtgtctgaactctcatcatcccactgtgagctgtcgttttggatttaaaaactrtgatgaggtcagaaagaccgataggacatgcttatatttaacaaatctctttccacaaatatgagcttagatttagttatgcaaattaattaagttaaat

SEQ ID NO: 493451 - DNA, 201 bp, Homo sapiens
cttctattagtgacaagagccatcttaacttccactagctcaattcctcatttccattctactgggagccatagaaattacctaaatacaagaaatttagwggttgagttgtaaaaactcagaaagggtttcataaatacttatatacatgatctctacatttgaaatatgcctaatttaaatagttatacagaactgtgt

SEQ ID NO: 493452 - DNA, 201 bp, Homo sapiens
taatattgttgtgacaccaagagaacatttttattgtacacattaccttggaataacatttttgccaggaaatttgatgcagcatacatatggtgcctgawagaaagaagccaggcgaaagtacattagtcctgtgtgttgtacatgatatatagtcaaacagcctgtgagatagaaggatatcattaactatgaaggtca

SEQ ID NO: 493453 - DNA, 201 bp, Homo sapiens
agtgataaatatattaaattactttatcccataaaagggtaaatggacacattttaaattcttccttcctgaattgcccttggttgggattagcttctgcaaagtttcagcctaaaagagatttttttaaaaatgatgaacaaataaaaagatgttataatatagtgccactactccacagattgttgttttatcctactg

SEQ ID NO: 493454 - DNA, 201 bp, Homo sapiens
cacttttttaggacaaaataataaagtctaattcttatttgttctaacaacaattcctaagtaaaggtgaatcattttgtgtctgtgagtcactggatatrtatatatatataatactgtaattagattacctgtagaatccagtcaagtcacaaacatagtaatttatcccagatacagtaaatagattctttgtttatc

SEQ ID NO: 493455 - DNA, 201 bp, Homo sapiens
gtgataaatatattaaattactttatcccataaaagggtaaatggacacattttaaattcttccttcctgaattgcccttggttgggattagcttctgcaaagtttcagcctaaaagagatttttttaaaaatgatgaacaaataaaaagatgttataatatagtgccactactccacagattgttgttttatcctactgg

SEQ ID NO: 493456 - DNA, 201 bp, Homo sapiens
tgtctccatacatttgccttttctgtatcttttgtataaacaaaattgtacaatatgtggtgttttacagctgctttttttcacttagcaaaatttattgagagtctttcatgttgtagtatgtatatgtactttgttgctttttatcgcctactaatattccattctgtgggtatattttgttaatccactcaccagttg

SEQ ID NO: 493457 - DNA, 201 bp, Homo sapiens
ataggactcatctgcctcgcatggttaccagaactgaatcttactgtgggagattagatggggtgaattttgtggcactgaaagcatggagtattattatmttataacactccctctatcttttctacgatattgcttgtctgtgcgatgcagttttctgaatatcattgctcatcacttgggcaactctctcaagtatat

SEQ ID NO: 493458 - DNA, 201 bp, Homo sapiens
cccccgaccctttctaatgatgcaacttttctaattttgttcaacatttttatagctgttttactattctaataatatggtcagtcatttatccatagcawtactttaaaaaattattgaagtataaaacatccacctattgggatttgaaaacagtgtctgtatttcctatctacagtgtatctttattggtctctgcat

SEQ ID NO: 493459 - DNA, 201 bp, Homo sapiens
aaagtgtctgggagatttctcatttttgagaacgccttttttaggatttgtatttatgacttttttaggagaaacaacaatcatgtataaatactattatwgtcatttgaaatataaaagggagagatagaactttaatcccaaagagtgatgaataaaaagtaatgatacaatctagacacaacagagcctaagttggtt

SEQ ID NO: 493460 - DNA, 201 bp, Homo sapiens
ttttttaggatttgtatttatgacttttttaggagaaacaacaatcatgtataaatactattattgtcatttgaaatataaaagggagagatagaactttratcccaaagagtgatgaataaaaagtaatgatacaatctagacacaacagagcctaagttggttttttgatagatctggataagaaagaaatgagagcag

SEQ ID NO: 493461 - DNA, 201 bp, Homo sapiens
tctactttctacttaagtgactaaactgttgtattattgaagaacctctgcttacaatatataagaaaatgtccttcatatttaaaggttttgctactgayacaccatcagttagaaaatatcttttgggttttttgttagtttttttttttcagtataaatactgaaaacagttttcagtatttataatagatttatttt

SEQ ID NO: 493462 - DNA, 201 bp, Homo sapiens
gggactgtggtagaacctacaaaacattgtaaatgcaacttctcaatttggtggaagagagaggccaagacttccttttaactatacctttgcaagcctcygttaagatttttaaatggttattctcctcaataataatcaccaaaatgccatcaggaaaatgcatttttctttgttgtcatggtaaaatacgttctgaaa

SEQ ID NO: 493463 - DNA, 201 bp, Homo sapiens
agaagactggaaacaaagcaaaatgttaagactggacaaggttttagataatggctgttacattattctttatatttttctgtttgcttaaactatttcaragttttgaagagtaaaattcttcccttcccaccatgattccagtttgcatagctaacattttattgttttcttcagacgtactctgtcttcttttctctt

SEQ ID NO: 493464 - DNA, 201 bp, Homo sapiens
cttttctggcactggggaatggaaagtcaggcttacatctgagctaatatgatagagaaacaggtcaacgacagatgaatggatggatggataggtacagrcagatagatgatggtgatgatgagatagatagatgatagatagatagatagatagatgatagatagatagatagatagatagtttttacagtatatgttt

SEQ ID NO: 493465 - DNA, 201 bp, Homo sapiens
ccccttgtcagccctgctgtccttattcccagggcctcacaagctcatccagaaacgctatgacaaactgctggattgcaacagctacctgcagcgatcarcgggagaggagtcagacttggccaaaaaggagtatgaggccctcaacgcccagcttgtggaggagctccaggcattcaaccaggctgctcggaagattct

SEQ ID NO: 493466 - DNA, 201 bp, Homo sapiens
tcttgaatttcccttgatctgctctgttctttctatcttcttggcaattagactaagcttaactccctccttctttcccctagtgactggactgtccatgsgaagagccacttcactacccacaggcttcctcctcaccctcccctctcaaatctagttcagtggaggccaaagtgatcttgctaagagaatctaatcatg

SEQ ID NO: 493467 - DNA, 201 bp, Homo sapiens
taaaaaatatctgtttcatttgagttatgaaaataatttcatatatattttaggttaaagacaatacctttaacagagaagaaaagctgtttagagctttrgaaaagactgtgaggctttgtgtgaagaacatttcactctgtcttcaacacatacaggtaggtgagacacaactgttttcagtgttctacaggaacatct

SEQ ID NO: 493468 - DNA, 201 bp, Homo sapiens
aaatttgactactttaaatacctcatgtaaatggaatcatacagtgtttgtctctgtgactgccttattttgcttaatataatgtcctcaagattcattcrtgttgtagcatgtgataggatttctttcatttttaactgtgaatatttcattatatataaaaaacacattttgggctggatgtggtggctcacgcctgta

SEQ ID NO: 493469 - DNA, 201 bp, Homo sapiens
ctaggttcaaagaaatatggggagggagcagtcatagcaatgtgtagagagagaggtgtgtggagagggtgacttgataggagctgtgtatttctgtcaawactactgaaagcaaaattaggaaataaatatccttatctcattttcttcccccattctaatttcctacaggtgctccttaatgatggattgattgaatcc

SEQ ID NO: 493470 - DNA, 201 bp, Homo sapiens
gaaggagacttggtggctgtgatagaacagaaagatccactggggagtacaagcaggtggcttgtggacacaggaagtaagtttttccccagaactaccaytcttctttaaactgagatttttctgagggcacatgtttgggaagagtatacccatgaacttggttcttctttctttttatttcctatccagatgtgaaag

SEQ ID NO: 493471 - DNA, 201 bp, Homo sapiens
tctgctgtgttttctttattttattaacatataaaccagatgtatttgatataactgctattctggcagatatcaatggttactaacatgttcatttacayacttattcaaatgttgattttaaatgcacatagcatcagactctgtcactacctttccttatggtacagtcctccctgtcaactcttattctttgaaaaa

SEQ ID NO: 493472 - DNA, 201 bp, Homo sapiens
aagattctgtattatcttttaaaatccacttgatcatttttatattctcttgtttcttgcttataatttcaaaccattacttgttttttaaacctattaartaccctttttatatctctaataatttcagtaacttaagactttgtggatataattatgctatcaattttattttctgcatctgactcatggtatcgtgtt

SEQ ID NO: 493473 - DNA, 201 bp, Homo sapiens
ctaaattagaagttggcctttcagattgttataaaatatatttatcaagacagaaggaaatatcacattttatttaatagtttgccagcttcatttataayttttaaatatgtagatctggtatgctggcctccatctgtatccttgctccaggtcccacaaaggaggcagctatgtgtggtttttgactgtaatctattt

SEQ ID NO: 493474 - DNA, 201 bp, Homo sapiens
actgagtggttagagaggaacttcatgtgctacaaattctgcttaggtttccttttctaaagcttgcattaggtctttggaaccaagaaacaagaagagargagagagagattcagaggagaaaaagggagatattcttcttagtacaatttgcatgcacggacttctacatacagaatacttaaacagttcattgtattg

SEQ ID NO: 493475 - DNA, 201 bp, Homo sapiens
agtgagtccctcacttcaccatacttttttcttcacacacatacattgactaaaataggaacactatacgtttcttgtatgtcgacttgctacctcattcatcatcaatatgttgtgaatatctttccatgtcagtaaatataaatccacattgttttatacttgcataatattctgtctgatatatatgccataatttag

SEQ ID NO: 493476 - DNA, 201 bp, Homo sapiens
gaacctctgcttacaatatataagaaaatgtccttcatatttaaaggttttgctactgatacaccatcagttagaaaatatcttttgggttttttgttagtttttttttttcagtataaatactgaaaacagttttcagtatttataatagatttatttttaaaatctacttcactcagtcgtcttggaaaccaataatcc

SEQ ID NO: 493477 - DNA, 201 bp, Homo sapiens
atacactacaataccacaagaagataaaaattaactaaataaaaaagtaggtgtatcaatgggttaatctcaaaaacacaatccagagggttttttttttaaagtaaatttgcaagtggtagaagaatatgtgcaatatgatactattttataaagttttaaaacattcaaaatgtattttataattccaaacatccacag

SEQ ID NO: 493478 - DNA, 201 bp, Homo sapiens
ggttattcagcttgccccaaatctctcagccagtgaagaggtgctctaggatctgaggtctccttacattgggcacagttgtcttgtcttttcttttctatttttttttttttttttttgagacagagtcttgctctgtcatccatgctggaatgcagtggcatgatctcggctcactgcaacctctgcctcctgggttca

SEQ ID NO: 493479 - DNA, 201 bp, Homo sapiens
cagtgtgattcttgaaccttctactttggaatcatctgggtcctagccagatgatatacaaaataaaatatctggtgacgcctccttggaaactgcatttaaaaaaaaatctgccccagcatattgttatacacactagactgagttggagcatagcaaccctaaggcacagaatgttggattttgtggggattccaaaga

SEQ ID NO: 493480 - DNA, 201 bp, Homo sapiens
cgacctaaagtgatgtaggtaagggaatacctttcctctaccctcttaaattctgtgactaggacctgtgaattgtatagacaaaagacatactaacaaargaaaaagcatacacattttacttgaggttaacatttttatgtgtcgtaggaggctttgtaggaagaaagaagtaaaaacctcaaagaagcagttagacct

SEQ ID NO: 493481 - DNA, 201 bp, Homo sapiens
agaaggccatctcagcataatgaaagatgcaggataacattcaaaccatgctttgttttgatttcatttttccccaagaaagagaagcctggttttgtgtktgtgtgtgtgtgtgtgtgtgtgtgtgtgtgtgtagcttcgcctcccattaggatataattttataattattttcctgatgaggaagaaagatatttacaa

SEQ ID NO: 493482 - DNA, 201 bp, Homo sapiens
aatgactatttattgaatgactttaaaatatccagtgaataattacaactatattgatccttatgacatacttgcttttacaattctgtcattttcacttwcccactatgtaatggtagttaactttcagttaatttctttacattctttttctgtaaagaaagattataaataaataaatttaattaaagaagagactag

SEQ ID NO: 493483 - DNA, 201 bp, Homo sapiens
gataacattcaaaccatgctttgttttgatttcatttttccccaagaaagagaagcctggttttgtgtgtgtgtgtgtgtgtgtgtgtgtgtgtgtgtgtstagcttcgcctcccattaggatataattttataattattttcctgatgaggaagaaagatatttacaacttatatcaacttttgaaaaattagcttggtt

SEQ ID NO: 493484 - DNA, 201 bp, Homo sapiens
attatatataccattctgcacttgctctttaacaatatattctgagaatgcatctataatagtacataaagagcttcctcattcttttttttttttttggkggggggggatggagtttcacttttgttgcccaggttggagtgcaaaggcccaatctcggctcactgcaacctccaccttccgggttcaagcgattttcct

SEQ ID NO: 493485 - DNA, 201 bp, Homo sapiens
tcctggttcatgttgtaaaatatggatttaattttatctttttccaaatgactttccagttgctccaacactatttatttaaaaataatctcttgttactrctttctcaatgaaacacatttaatttgcaaattatttcgataatttcattctgaggtcatggtagaaggtgggttcataagttcagaacaaagttgagct

SEQ ID NO: 493486 - DNA, 201 bp, Homo sapiens
aattattatgatgtatttattttcactattatcttttatttatgacaaatgctgtttatttgtgtaacaatatacagtttcctttaaaattgacttaggtrttttaaaaggagagtaaattgaaaaaagtaacagcataaatgcttgtggctactgtaaaataaatattaaatttaggatgcttgtgatcatgaaataaag

SEQ ID NO: 493487 - DNA, 201 bp, Homo sapiens
taatcaagttaatacctttcatatccttgacttgtttcttatttaagggaattatttctactttctacttaagtgactaaactgttgtattattgaagaayctctgcttacaatatataagaaaatgtccttcatatttaaaggttttgctactgatacaccatcagttagaaaatatcttttgggttttttgttagtttt

SEQ ID NO: 493488 - DNA, 201 bp, Homo sapiens
gcaccatgacccagttaacaagtcagaaatctgagagtcagctttgacttctcctttaccctctgcattgattactcaccagttcatgctaatttcacctsttgaatttcccttgatctgctctgttctttctatcttcttggcaattagactaagcttaactccctccttctttcccctagtgactggactgtccatggg

SEQ ID NO: 493489 - DNA, 201 bp, Homo sapiens
ggtataaaaagatttgctgaaattcacttaggtgattatttcctttgagtaaattgaataatactcaaatatggtaagaaatgtttagcatgcttattttsaatgacatttgaggaaataacttcagtttattttgtgatggtacaaagataatttggcacagttatgatagcacatcatttgtttcagggccttaatcta

SEQ ID NO: 493490 - DNA, 201 bp, Homo sapiens
tggttaatggagacagcatgcgctggcatttaaaatgcttactgtttaggaggagaaaacatcctaaatacagtgcttctccatcagctcaatgttttttstttcttcagactgataggctggatgtggatagcttgtttagcaacattgagtccgtgcatcagatatcagccaagctgctgtcattgttggaagaggcca

SEQ ID NO: 493491 - DNA, 201 bp, Homo sapiens
cactctaggtattttgaagccaatgattttaaagtaagttatcaacagaacacacttgcaattctttgagaatcacaagatagaaagttcatggtcctgasatggtaatatagtgggcttctaaccaaaattagggaagatagttcttagtatactatctagtccttattttttccttctcatttgcctgtttttatcact

SEQ ID NO: 493492 - DNA, 201 bp, Homo sapiens
gggatattaattagatttttccccttaatcttttgagaggatgtcctgtcagcaatgaagcattttactgttaatcagaaaatcagctgcataggctggaygggaaaagagataaatctcaaatcaatcaattttgcacttgtcagcagctcaggtgaaatattggtagagttagggtataaagctattaccgaagaggaa

SEQ ID NO: 493493 - DNA, 201 bp, Homo sapiens
cctcatctctactaaaaatcaaaaaaattagccaagagtggttgcccacatctgtagtcccagctactggagaggctggggtgggagaattgcacaagccrgggcggttgaggctgcagtgagccgtgatcatgccactgcactccagcctgggcaacagagggagatcctgtctttagaaataataataataataataaa

SEQ ID NO: 493494 - DNA, 201 bp, Homo sapiens
tctgggtcctagccagatgatatacaaaataaaatatctggtgacgcctccttggaaactgcatttaaaaaaaaatctgccccagcatattgttatacacrctagactgagttggagcatagcaaccctaaggcacagaatgttggattttgtggggattccaaagaactctgctgcctatttaatcaaaagctttgtaga

SEQ ID NO: 493495 - DNA, 201 bp, Homo sapiens
tttttttttggtttggtgttttttttcaaaagcagcttatcaatatcttatattcatgtcatataattaatccatttttaagtgtacaatcatgacttttmgtatatattacaaagttgtacaagtttagtatatttacaaagttgtgcaaccatcactttaatccaattttaaaacatttctttcactccaaaaaaccct

SEQ ID NO: 493496 - DNA, 201 bp, Homo sapiens
gcacctgttggaaacttcactacaagggagaagagaaggccgcatggaaatatctcccttaatgtcttaactctagccaatagatgcacatgggccagtgstttccagactccccctgtaatgcataatgcataatattgaaaacagagagaaaggagtatattatgtgcctaatccttgccccagggccgatgtttctat

SEQ ID NO: 493497 - DNA, 201 bp, Homo sapiens
tccatgctgcataacaaattaccacaaatttggtggcttaaaacaatacaaacatatttctcaggggctgttgtcaggagtccaagcacggtttagctggrtgccctgcttaagatctcatgtagctgcaatctaggtgtttgctggttgtattgcttctgaaactgagggttctcttcccagctcatggtcattggcaga

SEQ ID NO: 493498 - DNA, 201 bp, Homo sapiens
aggcagtttacaacatggctgtttgcttcttcaaagtcagtaggtgagcatctctctggcttcaaatctctcccttcagaggaggcctgaatgcacttcaraagtctcatatgagtaggtcaggcccatccaggataatccctcttttgactaactccgagtcaatttcctagggactttaataagcacctctgcagaatc

SEQ ID NO: 493499 - DNA, 201 bp, Homo sapiens
gtgtctgagaatcagtgttgttttctttttccacataagtaatattgaaaatataatttttgacttctaaaaaaagtagtcgttttgctaccaatcccacrttcatagtctggcccttcatctttacattttccagctacctatgatgatgatgctatatacctactgtgtcattgtttagaaagtgcttaaaaaagtcag

SEQ ID NO: 493500 - DNA, 201 bp, Homo sapiens
tttgtataccttatttctctttttcaattcttttttgtcctttgataaagagaccacatctagaaattcaggaaaagcccattgctttatccctaatgacrtgttttttctgtctgagtttcactaattcagcatctatcagagtctccattagcaaaataaaaacagaaaataatttttgctattcacaaatttttgctt

SEQ ID NO: 493501 - DNA, 201 bp, Homo sapiens
gggaaggaagagattgagtattagtgttatgttatctgctaggagctatgctagccagatgctgtcacacacactgttactgaatcccaacttctcttctrttcagttctgattttatcattgagaaaaataggtggtaggccttgggtttgagatgtcacatgcttgaaatatttgcaaaatggaatgaatttaactagt

SEQ ID NO: 493502 - DNA, 201 bp, Homo sapiens
atgcctctcaacaaaatgttctatgtgcttggaaattagaaagatatgtacttgcattgaataaggtccatacttcacagaaacactagaatattctgctstaaaaatacaaaactgattatctgaattatctagtctttgaaaactccttgtcatcactaactacagagtacttacctggattagggtactcggtgaaaa

SEQ ID NO: 493503 - DNA, 201 bp, Homo sapiens
gatgatcaaaccaattcaacgtgtgatgaaataccccctattactgtgcgaacttcggaattccacccctccctctcacccagattacagagcactggacsatgcctttgctgctgtgaaggacattaatgttaacatcaatgaacttaaaagaaggaaagatttaggtaggaagagacatgatgaattggttgttttcca

SEQ ID NO: 493504 - DNA, 201 bp, Homo sapiens
agagatgctttgtttttgagaaatttctagtgtcttaaagtaaaaggcattttggagaagttatcctcattaaaatgattttattctttattttatatgtwctgtatatttaaactttttattttgtgatacttagagattcatatgcagtggtaagaagtattacggagatcctgtacaaccctcacacagcttacccaa

SEQ ID NO: 493505 - DNA, 201 bp, Homo sapiens
gattgtttatctcaatgggtagatatgtgatattacaccatgagatatatctaggtaatggtactgaactatgattgtggttatcttaaataggggcatgmaactataatcgtgtctgtgacaaagaaggaatgttatagtcagagagacggtataaaaagatttgctgaaattcacttaggtgattatttcctttgagta

SEQ ID NO: 493506 - DNA, 201 bp, Homo sapiens
agatggaagagtttatatttcgcttgagagaattgtgctaaagtaaaaaactaccactatttagaaatgttctattagtaggcaatctaacctgctaaaawaatctatagttgcataggtaaagcattacctattatttataaaaattataaaagatgattaccaaccactaatgcaggctcttacagatgtttcagatgt

SEQ ID NO: 493507 - DNA, 201 bp, Homo sapiens
cagtctactcttctaggaaaccagagtttttttcttcaaatttcttaataaaatggatactcaagggatacacttgttttaatcccatggctgcatgtccyacctgctgcctgtatttggtttgaatattataaccctagccagggtctcttgggtatccacagcagcagttttatcccctaggctaggtggaagctaaat

SEQ ID NO: 493508 - DNA, 201 bp, Homo sapiens
ttactattctctgatgcccaagcctactcccactggtacgatttctgacaaccttctgatggcaccgagacctccaaactatggacattactaccatttcwctcttcatcgggcccaaagatgctttaatttctatgggtccttcattataatcgctccttgcacacgacctcaattcctttttctctctttctttccatt

SEQ ID NO: 493509 - DNA, 201 bp, Homo sapiens
aatggcaatcattaaaaagtcaggaaacaacaggtgctggagaggatgtggagaaataggaacacttttacactgttggtgggactgtaaactagttcaaycattgtggaagtcagtgtggcgattcctcagggatctagaactagaaataccatttgacccagccatcccattactgggtatatacccaaaggtctataa

SEQ ID NO: 493510 - DNA, 201 bp, Homo sapiens
cattttaagctatatttactgctaaagtattcagtgaaacttgtatatccctttgctgtgtttttcatggctcttccttcaccagagtgagcccattgccrtcctatacaacaggaactgcagcttcagcacgtcatgggaatcttcctgagttccatatcctgccctctcttccgatgtttttagctggttgggcatccc

SEQ ID NO: 493511 - DNA, 201 bp, Homo sapiens
tcatgggaatcttcctgagttccatatcctgccctctcttccgatgtttttagctggttgggcatccctggtgaccgtcatgacacctcaaagctaggttstacctctatatccagcccctggctgccttgctgtggaacagcactcccagaaattatacagtgcatagcggctctgcagcagccctgatgcactgcttac

SEQ ID NO: 493512 - DNA, 201 bp, Homo sapiens
tggcctttctgaactaaggtgctgacttgaaaatgttatactcttgctggaagtctgctttaactatcaatacaaatattcttcaatcctttacaaatacygattttcatgaagaataagatacattacaacaaaaaatcctgtaatctgtatgaccaggttagaactccattttttttttaatcaaagacttgattttca

SEQ ID NO: 493513 - DNA, 201 bp, Homo sapiens
tcagatatcagccaagctgctgtcattgttggaagaggccacaacagacgtggaaccggccatgcaagtaattggtatgtttattctcttctcgagttctrcaatacaacaggaaataattttttaataacctccctttgctttggttttttgttcctgactcaccatgcttcccaggagatatataaatgctaaacccat

SEQ ID NO: 493514 - DNA, 201 bp, Homo sapiens
tcaaagacttgattttcacactttctgtggaatcctagcatttattatatagtctgggccattgtttctccataataaggccagatacctgaggtctcatwaagtcagaaaaaaaaaactcaataaaatttttcttgattttatgtaagtgtgttaataagggcagttcctatgtgttggaggttaaaaatgtgaaatgtt

SEQ ID NO: 493515 - DNA, 201 bp, Homo sapiens
atgatggccaaggagaatttgccctatattaattctaatgtaattactacataagttcagagcccagaattggggccctatttgaacctggatttactgcraaactacaccaaatccaaacactgaagacttttctagaaacaatttccagaggatgatttggttggtggcaatcaccgtgacccttgaaagcagtgctgt

SEQ ID NO: 493516 - DNA, 201 bp, Homo sapiens
gacttttctagaaacaatttccagaggatgatttggttggtggcaatcaccgtgacccttgaaagcagtgctgtttattttctcccttcttctacaattgktgtattaaatatatatgtcatgcacatatatatggaatttttaagttgtgtgattttgaccatcaaattaagagcccaaaaatatagttccaaattgagg

SEQ ID NO: 493517 - DNA, 201 bp, Homo sapiens
ggaacatgaatgcagatatttttgtgaggttttgttttgtgaggactatttctagaatactgagaatcaaggtaattgccctatgctgttctcttgtctcyctctctctctctctctctctctctctctttctctctctctctctctctctctggaaaacaggggtgggagtgggaataggattgacactgtcttagctgt

SEQ ID NO: 493518 - DNA, 201 bp, Homo sapiens
gaaagcagtgctgtttattttctcccttcttctacaattgttgtattaaatatatatgtcatgcacatatatatggaatttttaagttgtgtgattttgaycatcaaattaagagcccaaaaatatagttccaaattgaggtcagaacagcaatatccaattgacaattttaaatccattggttgtcagaagaaaaaagca

SEQ ID NO: 493519 - DNA, 201 bp, Homo sapiens
cttttcacaatggagctaccatatacctcctcaactgttcatcacaactcaatacatttaacacctgatatgattatctaggtgtctggaaacaatgccayattatttctacctatagatgccactgttggtttcaagcatttctgagattcagaatcaagtactagaagagatccaaaatttgaattgtgtgaaagaaaa

SEQ ID NO: 493520 - DNA, 201 bp, Homo sapiens
ccttaaaatttatatgcaaccacacaagaccctgaagcgccaaagcaaccttgagcaaaatgaacaacgctggaggcatcacattacctgattttaaaacytagtaattatttaaatgtaatgggaactggctatttgaagtatatcttgcgataagtacttttgtaaagcaataaattaaattgccagttgaaacactgg

SEQ ID NO: 493521 - DNA, 201 bp, Homo sapiens
agtgtcattttcacatttggtagagtgaacagcaatggcagtaattagtctccaaagatggccctcaatggaccatgcctcctagttcacattgttatatgagtctagtgtcatattgactctggactggccctctgattcactattacaatgtggtgaaaatgacactgtatcagtaattgggcccaagccttagaaaag

SEQ ID NO: 493522 - DNA, 201 bp, Homo sapiens
ggctcaaaaatcatatacatatttatcttgaatataaatactcgtcttgaaaactttgggtgaagtgcacactttctatgctgcatgtgttcagctacgtyattacattcttccttttcagttctaaaatacaagaagaatgacgaggatgaatcacttaaagacaaattgtctaaactaaatattcattcaattagcaag

SEQ ID NO: 493523 - DNA, 201 bp, Homo sapiens
cacttggtgggagatgtttctcctgcttgcatgtagttggccatcttggaatgaactcaggaatagcatctttcaaaaattctgaaaagctcccagctttkagcacttcaaataatgttcttccttacattctctattataccctctagacctcctagtaaacattagttgaaccttcttattcaatcctcaacatctcct

SEQ ID NO: 493524 - DNA, 201 bp, Homo sapiens
tgatgatgtcattttgcctttgttttgcatttatcaggagaagtattcttgcagattaaagggccactggaagatatttataaaatctactgctatcaccrtgatgaagcacatagtatactggagtcctatgaaaaggaagaagagctgaaggaacatttgagccactgtatccagtccttaaagtaaggccttttcaaa

SEQ ID NO: 493525 - DNA, 201 bp, Homo sapiens
cctccctgaataacctggggataaagtagatcccatccaagtttttgacacgagtcgacattgttgaaaataatcatgtgaagtgccagctttgtctgatkatgtcattttgcctttgttttgcatttatcaggagaagtattcttgcagattaaagggccactggaagatatttataaaatctactgctatcaccatgat

SEQ ID NO: 493526 - DNA, 201 bp, Homo sapiens
tggccttcttgaggtctagactctatatgctggagagaaggaagactgacactgtggttgagagcagtgtttctggggaccactctggcaccttgaggagragccaatctgacaggaccgaatacaaccagaaattacaaggtaaccaaaaagaaatcaattgtcccagttactgcactcccagctccatttctgctacgt

SEQ ID NO: 493527 - DNA, 201 bp, Homo sapiens
aaaaaaaaaggcaagagagagcttgcttctctctgctctcagccatgtcaggatacaagaaggtggccatgtgcaaaccagggagtgggctctcagcaggwataagatcttccgcattaggaataagatcaacttgattctggattttctagcctgcagaactgtgaaaaataaatttttggtaaacttaagccacctaat

SEQ ID NO: 493528 - DNA, 201 bp, Homo sapiens
tgattttaaaacctagtaattatttaaatgtaatgggaactggctatttgaagtatatcttgcgataagtacttttgtaaagcaataaattaaattgccarttgaaacactggcctttaatctagaaccagaaataccatttgacccagcaatccaattactgggtgtatacccaaaggaatattaatcattctactataa

SEQ ID NO: 493529 - DNA, 201 bp, Homo sapiens
tttacatttatatcaagaaaaaaaaaggaaaaagcaacccagcacatctacttatcatcacttttcaaacatctgtggtttaaaaaacagctttgaaaatmgttacttgcctcgggtaaggtctgacttctgctgtataagcagtaaactattctaaatccttacacactagtacatatcctcatagagggcagttaatac

SEQ ID NO: 493530 - DNA, 201 bp, Homo sapiens
ttttatatatggcttttattatgttaaggcggtttctttctatcccttgtttgttggattaaaaaaattttttatttctatagcttttggggtacaagtcktttttggttacatagattgattatatagtagtgaattctgacattttagtgcacctatcacctgaataacgtatgttgtatccaacatgtagttttgtat

SEQ ID NO: 493531 - DNA, 201 bp, Homo sapiens
agtcattctaatcattgttttcacacactatggaaatcattagaataaaaatgttgaagattgatttaaaatgaaagtttccaagttttgttatataatayttagcattttaaggtaagaaacaatagaaatttgattatgaagacttttattaaattacagtgtattacagattatatcataataataagcctttcatct

SEQ ID NO: 493532 - DNA, 201 bp, Homo sapiens
ttttctgattttgggggttgaggagtggaaagggtcatgtgttctttataaagtaacaaaagaatctgtggcaaggtacaacttacctacaaacaacgcargccaatcccatctccatggcaaaatcatcagcactggtctcctcaaaactggaaaggtcagccataggtaaatccttgctactttggacagtaatgggag

SEQ ID NO: 493533 - DNA, 201 bp, Homo sapiens
tcttgttttatctatattagaattagataaaactaaaaagagaaaaatgcacataacatggtctggtctttagcaatagaaatattaatcacatgtacatrctatacatataaataaataatcagcttatattatttattttttcaatatcttaaatattcaaatctttgttttgaaagcacataccaacaaaaacattga

SEQ ID NO: 493534 - DNA, 201 bp, Homo sapiens
taatgatataaatgttccctttctacctaatataatagtagtaaagtcttaatttctaaaatatagccatttagtatataaagtttctcattaaatttttwatcaagcaactattttttagtcaactaaactttaagatataatcttagataaaaatagaatctactataccttgacttctgttctcttaaacgctagaaa

SEQ ID NO: 493535 - DNA, 201 bp, Homo sapiens
aaactacataaaccatttattcctagaggaatatataccagcaatgagagaaaaagttagtcaagaagtaaacctttaattttcagttatgaaagacctawttttttttccttttcttgctattaaacataaaactgtctgccatatggttaaatgatctttcaaaaaacttcacaaaagaaaacccacctttagtaatta

SEQ ID NO: 493536 - DNA, 201 bp, Homo sapiens
gatctctgaggcatagattaaagtttacactcaaagttactatactccctaggactcaaatatttattgacaataacttttaaccacttaactttaaaatytgtaaattttactcattttttgaaaagtcaaaatctatagctatcaatatatattcactgagtgttgattattatatacctatacccattattatataaa

SEQ ID NO: 493537 - DNA, 201 bp, Homo sapiens
caatgaatacatgctcttactgataaattagatattatttgcaaagcagataaaagaataaacagtatcccagatgaagagaagaagctgagaagcagaamatatgggaacatgaaagttctccacatattcagggaatgacacacttagtctgtgtcagagtggccagagtgtatgaatgtgtatgctgaagcagtgaga

SEQ ID NO: 493538 - DNA, 201 bp, Homo sapiens
tttgaaaagtcaaaatctatagctatcaatatatattcactgagtgttgattattatatacctatacccattattatataaaagaaataggcataaaacaytgtttctttctgcttatggaacaactaatttactttcttttaacaagattaaaataaaatcttactttatcagcaggtctcttttcagcttccttcttta

SEQ ID NO: 493539 - DNA, 201 bp, Homo sapiens
gtatggaggttacattaactgttatagttgcggagctgagtttttatgtcaggtaattttgtttagtccaaactggttttgaactataaacaattatggayatgtattttttggtttctttgaccccaaagggaaattggggtttatgtcaaattgatgttttatcaaaataaatctgtttctcaaagcaaaagtctctgt

SEQ ID NO: 493540 - DNA, 201 bp, Homo sapiens
ggcgtagtgctgttattggaacctattttggaacctattccacctttggatgatgttgccagaccagtcaaacccacaggtttctggttagctgacgaagyagcaggtttcccagtattgttttgtgttgttgaactcaattttgctgttgaaggaccagcagaggaagttttggctgcaaaagctgcccatccagttaag

SEQ ID NO: 493541 - DNA, 201 bp, Homo sapiens
cttgatctatttctgttccacttcgtcttctaccatcttgccgactttcctgagcaactgctttgtcgactctctctacctgaccaattgccagatcgacmacctgactggcctgaccagccactcctctgtctggaattaaaagatgtttccatcataatattctttaatttcaggtaatttagctggcactgagagtat

SEQ ID NO: 493542 - DNA, 201 bp, Homo sapiens
actataaacaattatggatatgtattttttggtttctttgaccccaaagggaaattggggtttatgtcaaattgatgttttatcaaaataaatctgtttckcaaagcaaaagtctctgtaggattgagataattcattatttacatatagggtaaacagacatttactgcctattgagatcataattgagataatggatta

SEQ ID NO: 493543 - DNA, 201 bp, Homo sapiens
acaaagagccatactcagtgaaagataaattacctcctaaactaaagtcccctctgaggtacaacagaaattaaaataattgcttctcttctcaactctaygtagcacgtattttccatgatgggataaatgttttcatttcaagtgccaatgtgtgaactgtaataaacattactgctttcattttttgtaggtatggag

SEQ ID NO: 493544 - DNA, 201 bp, Homo sapiens
atgttgccagaccagtcaaacccacaggtttctggttagctgacgaagtagcaggtttcccagtattgttttgtgttgttgaactcaattttgctgttgarggaccagcagaggaagttttggctgcaaaagctgcccatccagttaagccactagttactgacgaggaaacgctggcactagaagaatttcctgaaataa

SEQ ID NO: 493545 - DNA, 201 bp, Homo sapiens
taatgattccaaaagaaaatatatgaaattcctttttgggaattgcttttagattcaattctaagctatatctgaaaaccagatttagtgctttaacatastttttacccaacaaagtattatcgaccttagttaaacatctaattcttttagacttttctccaaataactagggatcatttcaaaaatttaattcactct

SEQ ID NO: 493546 - DNA, 201 bp, Homo sapiens
aataataagcctttcatctttaggctaatatgatacaaaaacctacttggccacattacttcttgagtttcttttgggcagctttcttcttgaccatctgyaatcgcttcatagcattgagctgtgattcttgtgaagttgggcctttaagggatgctgagggagagctgctggattctgaagtagttttgctggtagtac

SEQ ID NO: 493547 - DNA, 201 bp, Homo sapiens
ggggctggtttctgcggtggtttctgagttttttgagcctgcaaaaatcagtggattaaatcagatacaaaatcttaactgaatatacagaaagataatartccctcacaggactcatcactgaaatgaaatacagttgaacattttaaaaaatagtgtgatgataatgaatatatatgctctttgacaaattattatcat

SEQ ID NO: 493548 - DNA, 201 bp, Homo sapiens
ttcctggaactaaactacttggactaggaagacctactttgctgacattgtcacaactaactgagcgactaaggccagttttacccaaggttagaggtggrggtggttttaaaggtacagtgggcgtagtgctgttattggaacctattttggaacctattccacctttggatgatgttgccagaccagtcaaacccacag

SEQ ID NO: 493549 - DNA, 201 bp, Homo sapiens
taaagaaaaatatgattcctaccattcttttcatttgtctggtacatcgggcacaataccacaccaggcgagggtcattcgcttccttgtctgtcacctgsggtttatgacaatctcggtggtagagattatggcactcctgacattctactaattgattgccagatgccaccatcatttgcctaagaaaacataccatta

SEQ ID NO: 493550 - DNA, 201 bp, Homo sapiens
aacaattagatcaagaatattaagaatgttcgaagtaattcactgttgattacttgattactggtactagcaggaaagcagagccatcttatccttcattscaaaaccatgttacgagaatgcatccctcacagtaaaacagaaacatatggctccaaaaccatggctttcaatcttaacactgccttccacccacatcta

SEQ ID NO: 493551 - DNA, 201 bp, Homo sapiens; identical to SEQ ID NO: 493532

SEQ ID NO: 493552 - DNA, 201 bp, Homo sapiens; identical to SEQ ID NO: 493531

SEQ ID NO: 493553 - DNA, 201 bp, Homo sapiens
ataaaaatgtattctttgtgttcaatcctttgatcaatatactatggcttgaaatcttctatccttgaggttaatattgtattaatgcagcacacttgcaytgctatagttagggaactgtcagcaattccacagttatctcccattttcaggggtttataacaccattaaaacttgctgtaggttgaatcctagcatatg

SEQ ID NO: 493554 - DNA, 201 bp, Homo sapiens; identical to SEQ ID NO: 493533

SEQ ID NO: 493555 - DNA, 201 bp, Homo sapiens
ctaaggcagctgagtgcagtctattttactgtgataatatgtaaaagtacaaaagtataaatgggaataatacacaacaatttcagaatagtggttacctstgaggggggaagagaagaaaaaggaaggaggaatgggtcctcagatctagtggtggcagggcttgatatattattatgctgattgtttagacaacgggtt

SEQ ID NO: 493556 - DNA, 201 bp, Homo sapiens; identical to SEQ ID NO: 493534

SEQ ID NO: 493557 - DNA, 201 bp, Homo sapiens; identical to SEQ ID NO: 493535

SEQ ID NO: 493558 - DNA, 201 bp, Homo sapiens; identical to SEQ ID NO: 493536

SEQ ID NO: 493559 - DNA, 201 bp, Homo sapiens; identical to SEQ ID NO: 493537

SEQ ID NO: 493560 - DNA, 201 bp, Homo sapiens; identical to SEQ ID NO: 493538

SEQ ID NO: 493561 - DNA, 201 bp, Homo sapiens
taggaagtgacgttacttccctttttccggtccgccggattatgaatgacggccggcgcgagtattttccacataaggtggctgtcgtttttctcctggcstctgtggaggcgagtggtctgcgggcagcagctcccagaggcagccttggaattccagctcggactgggcgggaaggcgcaggcggcccaggtcgccgac

SEQ ID NO: 493562 - DNA, 201 bp, Homo sapiens; identical to SEQ ID NO: 493540

SEQ ID NO: 493563 - DNA, 201 bp, Homo sapiens; identical to SEQ ID NO: 493544

SEQ ID NO: 493564 - DNA, 201 bp, Homo sapiens; identical to SEQ ID NO: 493545

SEQ ID NO: 493565 - DNA, 201 bp, Homo sapiens; identical to SEQ ID NO: 493546

SEQ ID NO: 493566 - DNA, 201 bp, Homo sapiens; identical to SEQ ID NO: 493547

SEQ ID NO: 493567 - DNA, 201 bp, Homo sapiens; identical to SEQ ID NO: 493548

SEQ ID NO: 493568 - DNA, 201 bp, Homo sapiens
ttacttgaactatggcaataacctcgttattttccttgacttcaacattgttgccatatgaattttcctgaaacccagttttcttctttttcattaaaataaaaaaaaaaattcttgctgagaagttagggctttctaccaccttcgaaataaagaccaaatttcttggcctagcatttaagaagattcagtaactggcac

SEQ ID NO: 493569 - DNA, 201 bp, Homo sapiens; identical to SEQ ID NO: 493549

SEQ ID NO: 493570 - DNA, 201 bp, Homo sapiens; identical to SEQ ID NO: 493550

SEQ ID NO: 493571 - DNA, 201 bp, Homo sapiens; identical to SEQ ID NO: 276137

SEQ ID NO: 493572 - DNA, 201 bp, Homo sapiens; identical to SEQ ID NO: 55203

SEQ ID NO: 493573 - DNA, 201 bp, Homo sapiens
tcaggctgctataataaaataccatcaactatgtggtgtattaacaaaaatttatttctcacagttctgggagctgggaacttcaagatcaaggtgccagyagacttggggtctggtgagggcccacttctgttcataaagacagtgctttcttgctgtgtcctcacatgggaaaagtacaaggcatctctgtgggtcctt

SEQ ID NO: 493574 - DNA, 201 bp, Homo sapiens
ttgttttttttgtggggggtggggttaaggaagaagatagtaatttcaggactaggcattgtagctcatgcctataattcctgcactttgggaggccaagrcaagaggatcacttgctgccaggagttcaggaccagcctagttaatagagagaggctaaggtaggaggattatttgagcccaagagtttgaggctgcagt

SEQ ID NO: 493575 - DNA, 201 bp, Homo sapiens
catgtatattttgacttcttataaaactataaaactgtttttctagcattccttaaaggtagctcattagtatcaccttctccataaccttttttttttttattttttgtattttttttttgagacagagtctcgctctgttgcccaggctggagtgcagtggcgcgatttctggctcactgcaagctccgcctcctgggt

SEQ ID NO: 493576 - DNA, 201 bp, Homo sapiens
aataaaaaaaaatacagggaagcatttcctaaatacactttccctgagaatgacaacaaagtacctttatcttggtcaagccttagaaagtaaatattgartgagataaagtgtacattatctcattactttatcttatttaatatttactttctcctccaataacctggtaagtagacattaatttttgccactctacat

SEQ ID NO: 493577 - DNA, 201 bp, Homo sapiens
ggatgcccacaaacaccctgcaaggctttctctagactaagtggctttcaggctggaagcctgaaatttttttttcttcttttattttgtatgcatgtgtrtgtgtgtgtgagtgtgtgttccttatggagcagggctaacccataggcagtgtacccgaagtatcctggaagagtatcattttaagatattctctgtaga

SEQ ID NO: 493578 - DNA, 201 bp, Homo sapiens
tgcttttttcccaggtgtggctccacaaggcgctgcagctccctgaacaaccttccctccaacattcccaggcctcagacccagccaccctcaggctcccrgcctccctcccagcacagaagcgtcagctcctgggcatcatccattactgtccctcggccattccgcatgacgctgcgcgaggcccggaagaaggccgag

SEQ ID NO: 493579 - DNA, 201 bp, Homo sapiens
gtatatttataggtctccaagcattaggatgcccacaaacaccctgcaaggctttctctagactaagtggctttcaggctggaagcctgaaatttttttttcttcttttattttgtatgcatgtgtgtgtgtgtgtgagtgtgtgttccttatggagcagggctaacccataggcagtgtacccgaagtatcctggaagag

SEQ ID NO: 493580 - DNA, 201 bp, Homo sapiens
aaaatggcagttgaggtaaattacatgccccattcattaaaaacaccaacttactttccagaaaaggttactaagattgctttattttatttatttatttwttattattttttgagacggagtctctcactgtcgcccaggctggagtgcagtggcacgatctcggctcactgcaagctccgcctcccaggttcatgccat

SEQ ID NO: 493581 - DNA, 201 bp, Homo sapiens
gcaaacttgacgagttcctcagcccagaggaggagatagattctacttctgactcaactgggagcatttaccagaacttacaggaactgaagcagaaaggsagatggtgtctgttggagtctctctttcagtctgacccagagagtgatgaaaacctctctgaagatgaggaggacctggagagtttcttccaagacaagg

SEQ ID NO: 493582 - DNA, 201 bp, Homo sapiens
tgcggtggcttactcctgtaatgcagcactttgggacctgaggtcaggagttcaagaccagcctgaccaacatggagaaaccctgtctctactaaaaaaaatacaaaattagctggacgtggtggcacatgcctgtaatcccagctactcgggaggctgaggcaagagaattgcttgaacctgggaggtggaggttgcagt

SEQ ID NO: 493583 - DNA, 201 bp, Homo sapiens
aaaattcctcccaaagtgttgggattacaggtgtgagccagtgcatctggcagaccccaaattctccccagtccctaatatacagaagcttattcaaagcsaaattaagttatgatttgaatacctttgaaattattgtttgacccacagcctatttctattctattttagatatttccccccgagtccttcgcagacaca

SEQ ID NO: 493584 - DNA, 201 bp, Homo sapiens
ttgtgaaatttctttagaccaagaaacacaccttatttttaaaaattcctcccaaagtgttgggattacaggtgtgagccagtgcatctggcagaccccarattctccccagtccctaatatacagaagcttattcaaagcgaaattaagttatgatttgaatacctttgaaattattgtttgacccacagcctatttcta

SEQ ID NO: 493585 - DNA, 201 bp, Homo sapiens
aaggctggaaaacaagggttaaataattttcttgcaaatctatgccccacaataagggtggtggtggttgtggcagtattgtaacaatactgattaagtartttagaattgtctggtaattcataagacagctacaacagattaatttccatcccacaggatctagccaagaaagaagcagaacagtggtatctagacacc

SEQ ID NO: 493586 - DNA, 201 bp, Homo sapiens
ggataaaagcccatgggtgagaggaagggagtagtgaggaacaagaattcagagaagcatgctagcaggtggctgaagttgccgcaaatatgagacatccrttgcatagatttgagattctctgagattcatcttgggaagatgtcagagtctgttgggcagcaagagcctgcttatttttaactcttcaactgacctgat

SEQ ID NO: 493587 - DNA, 201 bp, Homo sapiens
catagctctcgctgccaccgctgctgccactatcgctgtcactgtcgctgctgcctctgtccagctgaaatgaccgtggggaggcctgagggagcccccgsaggcgcggaggggagccgtcaggtgaggagagaaaagagactgcccccgggaaaggaatcccggagaggaaactgttgggcgttgccttggagacagaca

SEQ ID NO: 493588 - DNA, 201 bp, Homo sapiens
cggaggcgcggaggggagccgtcaggtgaggagagaaaagagactgcccccgggaaaggaatcccggagaggaaactgttgggcgttgccttggagacagrcagcaggggcgtgtcacggaggggcgtgggattaaaatgagcgtttagggaccaggaggcggactctgacttacagacctgaacctctcggactttatac

SEQ ID NO: 493589 - DNA, 201 bp, Homo sapiens
acaaaaaacaggccaggcgtggtggctcacgcctttaatcccagcactttgagaggccgaggagggcagatcatctgaggtcaggagttcgagaccagcayggccaacatggcaaaaccccatctctactaaaaatacaaaaattagctgggtgcggtggcgggcacctgtaatcccagctacttcagaggctgaggtagg

SEQ ID NO: 493590 - DNA, 201 bp, Homo sapiens
cagagagaacatggataaaagcccatgggtgagaggaagggagtagtgaggaacaagaattcagagaagcatgctagcaggtggctgaagttgccgcaaakatgagacatccgttgcatagatttgagattctctgagattcatcttgggaagatgtcagagtctgttgggcagcaagagcctgcttatttttaactcttc

SEQ ID NO: 493591 - DNA, 201 bp, Homo sapiens
gacactggaaagtatcaaatcctgctggaatataggctcagagttactacatcaactacattttcatcaagccagaaatttgtatgctatcaactaatttwaaaattacttagaaatattgtatgggcaaaataaaatacatctgcatatcagatctagcccatgggggatgaaaaacttacaacttctagtacaggattt

SEQ ID NO: 493592 - DNA, 201 bp, Homo sapiens
caggcttctgagctgaagtaggcaagagaggtcatggtgtaacagcagcttaggccagggagaggactaatgtcttactgccttcccatggggcatgtagsggagtactcagaacctacttggatcgttaagccccacagcagggattgtagaagagtatttacggtccaagggatactcctttcttcttcagacttcagt

SEQ ID NO: 493593 - DNA, 201 bp, Homo sapiens
tcagacttcagttagacctactaaatcagggctaattaattgctcagtatcctgagggcccaagaacacaggcctcctgaacaaagaggctggccttcctrtagaggacatccacatctgctttccagccacagggaatctgacatattaacagattaaattttcatgtccttcttcccagtatgtccatttgaatataaa

SEQ ID NO: 493594 - DNA, 201 bp, Homo sapiens
atagtctgcactgagggaggctcatttccagttctctctgaatgtgcagatttgtattcccaaaggaccatgaacccagacaccttccagcccactgtttmcagcagagtggtcaaggccagaggcttcggagtcagaggtcctggtccaataggggcttttccactggcatgctgggtagctttgagcaaggggcttacc

SEQ ID NO: 493595 - DNA, 201 bp, Homo sapiens
gaccgccaacctgcgccaccctcagcggccctgtgatgctgccaccaccggaaggaggcaggtgagagcccaggcagctgtgggagggtcagggctgcggyctgaaatacagggtggggccaggtcttcctggaaagcacttctcaacaaggttttcctatcttttttttaaacaccagctcagttgtaagcagattcact

SEQ ID NO: 493596 - DNA, 201 bp, Homo sapiens
caatgtcactcagttttcgcttatcctcttagtactctatgaccagtagtacaattgtcgtctcatttttgtagaagagaaaactgaggcacaaagagatkaagaaaattgctccccaaatttggccgggcgtggtggttcacgcctgtaatcctagcactttgggaggccgaggcgggtggatcacctgaggtcaggagt

SEQ ID NO: 493597 - DNA, 201 bp, Homo sapiens
cattaaaaacaccaacttactttccagaaaaggttactaagattgctttattttatttatttattttttattattttttgagacggagtctctcactgtcrcccaggctggagtgcagtggcacgatctcggctcactgcaagctccgcctcccaggttcatgccattctcctgcctcagcctcccgagtagctgggacta

SEQ ID NO: 493598 - DNA, 201 bp, Homo sapiens
tgtttgacccacagcctatttctattctattttagatatttccccccgagtccttcgcagacacagaggcaggagaggagctgtccggggatgggctggtwttgcccagggccagcaaacttgacgagttcctcagcccagaggaggagatagattctacttctgactcaactgggagcatttaccagaacttacaggaac

SEQ ID NO: 493599 - DNA, 201 bp, Homo sapiens
aggatctagccaagaaagaagcagaacagtggtatctagacaccctgaagcaggctgggctggaggaagactttgtgagaaacaagggtcaaggcacccgrgctgttcaagagaaagagaccaaaatcaaggattttcccaggtaacctgaaatgttgctgtcattctgcagctctctaaattgtcatacccagtaatacc

SEQ ID NO: 493600 - DNA, 201 bp, Homo sapiens
gccttgcttccctctctgccaacactctccctgtgcacatcacagatgccaccaggaagagggaatctgcagtcaggtgagtggtcaggctgcacgagacycatgctctgattctggccccaaatgctggaaacctccctgccaaggggcctcctttcctgttatcagagatacctcaaggggtcaaagggaattttctga

SEQ ID NO: 493601 - DNA, 201 bp, Homo sapiens
ttgggaggccgaggcgggtggatcacctgaggtcaggagttcgagaccagcctggccaacatggtgaaactccgtctaaaaatttaaaaaaaaaaaaaaaattggccaggcgcgctggctcacgcctgtaatcccagcactttgggaggccaaggaaagcggatcatgaggtcaagagatcgagaccaggctggtttccat

SEQ ID NO: 493602 - DNA, 201 bp, Homo sapiens
gcctctgtccagctgaaatgaccgtggggaggcctgagggagcccccggaggcgcggaggggagccgtcaggtgaggagagaaaagagactgcccccgggmaaggaatcccggagaggaaactgttgggcgttgccttggagacagacagcaggggcgtgtcacggaggggcgtgggattaaaatgagcgtttagggacca

SEQ ID NO: 493603 - DNA, 201 bp, Homo sapiens
ctgtaatcctagcactttgggaggccgaggcgggtggatcacctgaggtcaggagttcgagaccagcctggccaacatggtgaaactccgtctaaaaattwaaaaaaaaaaaaaaaattggccaggcgcgctggctcacgcctgtaatcccagcactttgggaggccaaggaaagcggatcatgaggtcaagagatcgaga

SEQ ID NO: 493604 - DNA, 201 bp, Homo sapiens
tatacgaggctcttgataggcaatgtcactcagttttcgcttatcctcttagtactctatgaccagtagtacaattgtcgtctcatttttgtagaagagaaaactgaggcacaaagagattaagaaaattgctccccaaatttggccgggcgtggtggttcacgcctgtaatcctagcactttgggaggccgaggcgggtg

SEQ ID NO: 493605 - DNA, 201 bp, Homo sapiens
ttttttgtatttttagtagagatggggtttcacagtgttagccaggatagtctcgatctcctgaccttgtgatccgcccgcctcggcctcccaaagtgctrggattacaggcatgagccaccatgcccggctattttattttattttattattattattatttttgagacggaatttgatctgtcgcccaggctggagtgc

SEQ ID NO: 493606 - DNA, 201 bp, Homo sapiens
ttatacgaggctcttgataggcaatgtcactcagttttcgcttatcctcttagtactctatgaccagtagtacaattgtcgtctcatttttgtagaagagaaaactgaggcacaaagagattaagaaaattgctccccaaatttggccgggcgtggtggttcacgcctgtaatcctagcactttgggaggccgaggcgggt

SEQ ID NO: 493607 - DNA, 201 bp, Homo sapiens
ttgcactccagcctgggcaacaagagcaaaactctctcaaaaacaaaaacaaacaaacaaaaaaatacaaaaaattatctgggcatggtggtgcgcgcctrtagtcctagctactcgggaggctgaggcaggagaatcacttgaacccgggaggtggaggttgcagtgagccaagattgcaccactgcactctagcctggc

SEQ ID NO: 493608 - DNA, 201 bp, Homo sapiens
ccaccagaaggattcccaagtccattctggagccagcccttggggataaactccagggtaaagacatccttgccaccttgctgcctcctgcctcggggaaycaatcccaccatagggatttagtcagggcccagggatctgcctggcttggagatttgctgcttgggtggacccactagaggctgcacgcttagtgcaggc

SEQ ID NO: 493609 - DNA, 201 bp, Homo sapiens
tttatacgaggctcttgataggcaatgtcactcagttttcgcttatcctcttagtactctatgaccagtagtacaattgtcgtctcatttttgtagaagagaaaactgaggcacaaagagattaagaaaattgctccccaaatttggccgggcgtggtggttcacgcctgtaatcctagcactttgggaggccgaggcggg

SEQ ID NO: 493610 - DNA, 201 bp, Homo sapiens
ctttatacgaggctcttgataggcaatgtcactcagttttcgcttatcctcttagtactctatgaccagtagtacaattgtcgtctcatttttgtagaagagaaaactgaggcacaaagagattaagaaaattgctccccaaatttggccgggcgtggtggttcacgcctgtaatcctagcactttgggaggccgaggcgg

SEQ ID NO: 493611 - DNA, 201 bp, Homo sapiens
aggcactccatctttttataacctcacagttgtttatggttttcacagaatttatcatcatcttatattgtctgtctcctcttactacagtgtaagcttcrtgagagtaaggaccttgtttgtcttgttctcagccaaatgcccagtgcacatcaggcacccagtaaatattttatgaatgaatggagtactgaaaaagtt

SEQ ID NO: 493612 - DNA, 201 bp, Homo sapiens
actttatacgaggctcttgataggcaatgtcactcagttttcgcttatcctcttagtactctatgaccagtagtacaattgtcgtctcatttttgtagaagagaaaactgaggcacaaagagattaagaaaattgctccccaaatttggccgggcgtggtggttcacgcctgtaatcctagcactttgggaggccgaggcg

SEQ ID NO: 493613 - DNA, 201 bp, Homo sapiens
ccccggaggcgcggaggggagccgtcaggtgaggagagaaaagagactgcccccgggaaaggaatcccggagaggaaactgttgggcgttgccttggagasagacagcaggggcgtgtcacggaggggcgtgggattaaaatgagcgtttagggaccaggaggcggactctgacttacagacctgaacctctcggacttta

SEQ ID NO: 493614 - DNA, 201 bp, Homo sapiens
tagaatagccactggtattttgagatcataatcctgtatttatgtaacattaataagtaatccagagatctccaagtaacacatttgaatttagagagtgrtgcagttgtgaataaaatctgacaaattatgtttcgttttcttccattttgaaacagatcattttccaattccagttccaatttcatgagctgaaactat

SEQ ID NO: 493615 - DNA, 201 bp, Homo sapiens
accgtgtttacgcctctaattccagcactttgggaagccgaggtggctggatcatgaggtcaggagttcaagaccagcctggccaagatggtgaaaccccrtctctactaaaaatataaaaaaattagccgggcatggtggcaggtgcctgtaatcccagctactcggaaggagaggcagagaattgcttgaatctgggag

SEQ ID NO: 493616 - DNA, 201 bp, Homo sapiens
caagttgtgaaatttctttagaccaagaaacacaccttatttttaaaaattcctcccaaagtgttgggattacaggtgtgagccagtgcatctggcagacyccaaattctccccagtccctaatatacagaagcttattcaaagcgaaattaagttatgatttgaatacctttgaaattattgtttgacccacagcctatt

SEQ ID NO: 493617 - DNA, 201 bp, Homo sapiens
aggttcaggctgcagtgaggcatgattgcaccactgcactccagaacctgggtgacagagcaagaacctgtctcaaaaaaaaaaaattgctcagtcattcrcttaactaaattgtccccacttcatgacagcaccattccagagttgatacctggttccctgaatcaatcagggaagccaaccctataaaaatcacaccct

SEQ ID NO: 493618 - DNA, 201 bp, Homo sapiens
gcactttgggaggccaaggcaggcggatcatttgagctcaggagttggagaccagcctgggaagcatggtgaaaccccatctgtacaaaaaatacaaaaaytagccaggtgtgatggtgtgtgctgtagtcccagctactcgggaggctgaggtgggaggatcatcacctgagctcaggaggttcaggctgcagtgaggca

SEQ ID NO: 493619 - DNA, 201 bp, Homo sapiens
agtcatggtggcgtgtgcccgtaatcccagctactcaggaggctgacgcatgagaatcccttgagcccaggaggtggtggttgcagtgagctgagatcacrccactgcactccagcctgagcaacagagcaagactctgtctcaacaaataaaaataaaataaaatttaaaaatgggccgggcaccgtgtttacgcctcta

SEQ ID NO: 493620 - DNA, 201 bp, Homo sapiens
aaatgtaatggtacttggttcataataaggagctcagtaaatggtagctattagtattattttgtatccagataggcgaagacctattgaatgttggactrtttaagtaaggatatatatattttttttcgagacagagtcttgctctgtcgcccatgctggagtgcaatggcgcaatctcagctcactgcaacctctgcc

SEQ ID NO: 493621 - DNA, 201 bp, Homo sapiens
ggtaggctcctgtaatcacagcagggtcatgattttccaagtcagataggaatttacagtgtacacgagagttacactgctttactggaaatgaagggtaytctggattagaaaagatgaaattctttctaaaagtcttgctaattccaggaacaatgaccgtaaaagagcgaaagaatataagaaagaactggaggaaat

SEQ ID NO: 493622 - DNA, 201 bp, Homo sapiens
ccgtggggaggcctgagggagcccccggaggcgcggaggggagccgtcaggtgaggagagaaaagagactgcccccgggaaaggaatcccggagaggaaaytgttgggcgttgccttggagacagacagcaggggcgtgtcacggaggggcgtgggattaaaatgagcgtttagggaccaggaggcggactctgacttaca

SEQ ID NO: 493623 - DNA, 201 bp, Homo sapiens
acaggtgcaggaatagagaaccagtgagacacctgaggaccagcttgggctcatgccaccaccagcacactgccctgagatgctcccccatggctccttcrtcctggtgaggtagtgtcaatcgccgaaattacctgggggatgattatttacacatttccaaaagtatagctccaaataaggggctcaggctttattcac

SEQ ID NO: 493624 - DNA, 201 bp, Homo sapiens
tatcttttttttaaacaccagctcagttgtaagcagattcactttcctataaactccagaccacagcccagcctgggcaacagagaccccatctctaaaaraaaaatacaaatatttgccacatgtggtggtgtgtacctgtagttccagccattcaggaggctgaggtgggaggaccttctggctgcagtgagccaagat

SEQ ID NO: 493625 - DNA, 201 bp, Homo sapiens
ctgtttttctagcattccttaaaggtagctcattagtatcaccttctccataaccttttttttttttattttttgtattttttttttgagacagagtctcrctctgttgcccaggctggagtgcagtggcgcgatttctggctcactgcaagctccgcctcctgggttcacgccattctcctgcctcagcctcccgagtag

SEQ ID NO: 493626 - DNA, 201 bp, Homo sapiens
cacacagacatggagtttgtagatatgtgaggaaaacagataaagacaaatacatacaaatgtggcgagttatttacaaggattaaaaggggaagcatggragcatatatcagagggacctaacccggggattggtgaagcaagggagcagttagggaaggtcccctgagaaagtgggccctggggctgaactgaaggagg

SEQ ID NO: 493627 - DNA, 201 bp, Homo sapiens
aggttggtaatctatactctttttctgcctccttcctttagaagtgcacttgaaaaaaagaacaaagcagatgagagtattcagtggctggagatacacaraaagaagtctcaagcaatgtccaaatctgtgaccttgcgtgcaaaagccatggatccccataaaagcctggaggaagtgttcaaagcaaagctgaaagag

SEQ ID NO: 493628 - DNA, 201 bp, Homo sapiens
tgcccaggctggagtgcagtggcgcgatttctggctcactgcaagctccgcctcctgggttcacgccattctcctgcctcagcctcccgagtagctgggaytacaggctcccgccatcacgcctggctaatttttgtgtatttttagtagagacggggtttcaccatgttagccaggatggtctcgatctcctcacctcgt

SEQ ID NO: 493629 - DNA, 201 bp, Homo sapiens
gagtttgtagatatgtgaggaaaacagataaagacaaatacatacaaatgtggcgagttatttacaaggattaaaaggggaagcatgggagcatatatcaragggacctaacccggggattggtgaagcaagggagcagttagggaaggtcccctgagaaagtgggccctggggctgaactgaaggaggggcgaagaggga

SEQ ID NO: 493630 - DNA, 201 bp, Homo sapiens
tgggatcagttgttgatgtctctataccaattccaaggaactcttctcatttgactaaaaactttaggattgatatccaagtcttggcttggttgtgaaayttgagatctctttatccttgccttattcccaggaaaaaaaatgaagattctcattttcagtccttcagtgaagctgaatcctagtaaagatagaaaatgg

SEQ ID NO: 493631 - DNA, 201 bp, Homo sapiens
ttctcctgcctcagcctcccgagtagctgggattacaggctcccgccatcacgcctggctaatttttgtgtatttttagtagagacggggtttcaccatgwtagccaggatggtctcgatctcctcacctcgtgatctaccctcctcagcctcccaaagtgctgggattacaggcgtgagtgaccgcgcccggccctccat

SEQ ID NO: 493632 - DNA, 201 bp, Homo sapiens
cgctgtcactgtcgctgctgcctctgtccagctgaaatgaccgtggggaggcctgagggagcccccggaggcgcggaggggagccgtcaggtgaggagagraaagagactgcccccgggaaaggaatcccggagaggaaactgttgggcgttgccttggagacagacagcaggggcgtgtcacggaggggcgtgggattaa

SEQ ID NO: 493633 - DNA, 201 bp, Homo sapiens
agagaagagggagtgggaaggaagaggcaggcatgggccagacatgaggagctttgcaagccacgttggcgagtctggacttcatcccaagggcacagggragccactgagggagtgaggcagggtggcccatgatcagaaatatagttcagaaggatccttctgattgctgtatagataatctgagagggcagcaagact

SEQ ID NO: 493634 - DNA, 201 bp, Homo sapiens
tctataccaattccaaggaactcttctcatttgactaaaaactttaggattgatatccaagtcttggcttggttgtgaaacttgagatctctttatccttrccttattcccaggaaaaaaaatgaagattctcattttcagtccttcagtgaagctgaatcctagtaaagatagaaaatggctgggcgcggtagttcacac

SEQ ID NO: 493635 - DNA, 201 bp, Homo sapiens
ggctcccgccatcacgcctggctaatttttgtgtatttttagtagagacggggtttcaccatgttagccaggatggtctcgatctcctcacctcgtgatcyaccctcctcagcctcccaaagtgctgggattacaggcgtgagtgaccgcgcccggccctccataacccattttgatattgagtcaaagggagaaaatagt

SEQ ID NO: 493636 - DNA, 201 bp, Homo sapiens
agagacggggtttcaccatgttagccaggatggtctcgatctcctcacctcgtgatctaccctcctcagcctcccaaagtgctgggattacaggcgtgagygaccgcgcccggccctccataacccattttgatattgagtcaaagggagaaaatagtatcttctctccattattctcaattgttttgtatcttaaatcct

SEQ ID NO: 493637 - DNA, 201 bp, Homo sapiens
ccccacgggagccctgattctcttgcaaggtaaatcacacacacacacagggcacgccagagtcccaggaaaggttttaattccagtccttggaatctgaraagcagacaccaagaactgccctgagaacacctggggggcctggcatcttgcctccagatccagccagggtggacagacccccagataatcacgtctgac

SEQ ID NO: 493638 - DNA, 201 bp, Homo sapiens
tggcaggcggctcagggatggagacagcagccttgcctggtcaggtcagctccacggccacagctgtgcaggcctcgaggagggcagaggaggagtccagrccagtgccagatggagtgggagggcccagcagcaccacaggagcctggctgggcagaccctgaggggcctgtgggtccgcctgtctgcaggaggaagacg

SEQ ID NO: 493639 - DNA, 201 bp, Homo sapiens
gggatatgagcaaaggctccccagggaaagctggggacccgctcggacaaccccgggagatggaaaggcctcaaaggccaaacctcactcaggctcaagtrcagtggcaccatcacggctcactgcagccttgatctctcaggctcaagcaatcctcttacctcagccttcagagtagctgggactataggtgcacaccac

SEQ ID NO: 493640 - DNA, 201 bp, Homo sapiens
caaaggctccccagggaaagctggggacccgctcggacaaccccgggagatggaaaggcctcaaaggccaaacctcactcaggctcaagtgcagtggcacsatcacggctcactgcagccttgatctctcaggctcaagcaatcctcttacctcagccttcagagtagctgggactataggtgcacaccaccacgcctggc

SEQ ID NO: 493641 - DNA, 201 bp, Homo sapiens
agagtcccaggaaaggttttaattccagtccttggaatctgagaagcagacaccaagaactgccctgagaacacctggggggcctggcatcttgcctccaratccagccagggtggacagacccccagataatcacgtctgactcagagttcccgcacagtggaaactggctccctggccctgaggccggacagcctgcat

SEQ ID NO: 493642 - DNA, 201 bp, Homo sapiens
ggctccccagggaaagctggggacccgctcggacaaccccgggagatggaaaggcctcaaaggccaaacctcactcaggctcaagtgcagtggcaccatcwcggctcactgcagccttgatctctcaggctcaagcaatcctcttacctcagccttcagagtagctgggactataggtgcacaccaccacgcctggctaat

SEQ ID NO: 493643 - DNA, 201 bp, Homo sapiens
ctcaaaggccaaacctcactcaggctcaagtgcagtggcaccatcacggctcactgcagccttgatctctcaggctcaagcaatcctcttacctcagcctycagagtagctgggactataggtgcacaccaccacgcctggctaatttttgttattttttctagagatgggtttcaccatgttgcccaagctggtctcgaa

SEQ ID NO: 493644 - DNA, 201 bp, Homo sapiens
accacgcctggctaatttttgttattttttctagagatgggtttcaccatgttgcccaagctggtctcgaaaagaactcctgggcccgagcaatctacccrccttggcctcccaaagtgctgggactgtagatgtgagccacggagcccagcccgtttctgttttcctagggttcacatagcccagagagacccaggaccc

SEQ ID NO: 493645 - DNA, 201 bp, Homo sapiens
ccttgggtgaaaggataccagaaaccagaggtgccttcttcctcttgctgggcggcagggagtcccaagacctggagctgcctctggcgtgcagtttgtcrtcccaccattctgccccgagacccagagttagaattggggtgctggcccacaggatactcccttttctgtagcctctgcctccaccatgggccggcctgg

SEQ ID NO: 493646 - DNA, 201 bp, Homo sapiens
gtaggcgctgtatgtgcatgtgcgtgcatgcttgtgtgtaggggctgtgtgtgtgcatgtgtgtgtgtaggggctcttgtgtgtgtgtgtgtgtgtgtgtstgtgtgtgtaggggctcaccggagctctcctcttctgactctgtctggctgccgctccgctcctcctcactctcttcctcctccccattcatctcagcag

SEQ ID NO: 493647 - DNA, 201 bp, Homo sapiens
ggccaaacctcactcaggctcaagtgcagtggcaccatcacggctcactgcagccttgatctctcaggctcaagcaatcctcttacctcagccttcagagwagctgggactataggtgcacaccaccacgcctggctaatttttgttattttttctagagatgggtttcaccatgttgcccaagctggtctcgaaaagaac

SEQ ID NO: 493648 - DNA, 201 bp, Homo sapiens
gtctttgcttggaggctggacaggcatctggactctgggagaaggaatggagctatcacttatggctgcccacagctcagagggggaaagaggcagcaggragctgaacacaactcgatcccagatggggaaagccagggaagtaactggcctggccacaccttgagcacaaactgggtgacaagggtgcaaatggccatc

SEQ ID NO: 493649 - DNA, 201 bp, Homo sapiens
tctttgcttggaggctggacaggcatctggactctgggagaaggaatggagctatcacttatggctgcccacagctcagagggggaaagaggcagcagggwgctgaacacaactcgatcccagatggggaaagccagggaagtaactggcctggccacaccttgagcacaaactgggtgacaagggtgcaaatggccatct

SEQ ID NO: 493650 - DNA, 201 bp, Homo sapiens
catcttgcctccagatccagccagggtggacagacccccagataatcacgtctgactcagagttcccgcacagtggaaactggctccctggccctgaggcyggacagcctgcatccaacatcagcaagaggatgtggctttgacttcggctgtcttctctgtcaggggagccccaagagatggatcttcaggagtgggagg

SEQ ID NO: 493651 - DNA, 201 bp, Homo sapiens
cccagtaccaggcccaccacctcctcatcccagatcctcgcagacccagcccaaggtgtccccacgctcacttctcctttagctccgagaactgcttctcyaggtccagcatctcactgacacactcgctgcggcgtcgctcatagtcctcatcatccatctctgggacaagaggccagtaagggctagctctggggagga

SEQ ID NO: 493652 - DNA, 201 bp, Homo sapiens
cgaaccaaaagccatgcatgacgatacgcaccgcggggactggagcctctggcctcacgacggagattccctgagagctgcccgtggttgccggtaccggmtgctgccgccggactcccgtaggcgctgcgcggctcccttttcttcgggaggcagagcctatcggtgcttccgtgtgcgtcatcaggaggcgaccgtcgg

SEQ ID NO: 493653 - DNA, 201 bp, Homo sapiens
aaactgctgacagctggatttgcctggacatattcacatgacaccaagcaaccacgagtgcatctagtgtgactgtcctccatgtcccctccaaccccctmccctgggtctggagttgacccttacatcctgcccacttttaggccaccttgggtgaaaggataccagaaaccagaggtgccttcttcctcttgctgggcg

SEQ ID NO: 493654 - DNA, 201 bp, Homo sapiens
ccgattttctcttctgaggggacacagctgccctagcctgggtgggtgagaagaaaagctcccctgagagcccacctccagcttggcaatccctgccccaycccccacctctgtggcttgtgggctgttgcctcagtgctgtgcccccaggaccgggagcataggccccacccaggcagagctcccatgctcctgactgct

SEQ ID NO: 493655 - DNA, 201 bp, Homo sapiens
agtctcagtgagaaatctgagctgcagggatttggtcgtcagcatacagcaagttcttcatgccacaggagaaggtgcaaccagcaaggcacaatgtgtgygatcagaagacgcccagggtcaccaaaggggcagatgaggagacccctacaaaggaggaggcaaaacccgaagtggtggagaaagagagttttagaagaa

SEQ ID NO: 493656 - DNA, 201 bp, Homo sapiens
ccctgaacaacctgcgtggtaaaaaggcagccgtgcacccatttgctcacccatcgctcttgggcaaacacatacccagcacccattccacagcaagcccsgtgttaggcgcgcacttcctgggcaccaaccacgcctgcccagtaccaggcccaccacctcctcatcccagatcctcgcagacccagcccaaggtgtccc

SEQ ID NO: 493657 - DNA, 201 bp, Homo sapiens
cagacaccaagaactgccctgagaacacctggggggcctggcatcttgcctccagatccagccagggtggacagacccccagataatcacgtctgactcaragttcccgcacagtggaaactggctccctggccctgaggccggacagcctgcatccaacatcagcaagaggatgtggctttgacttcggctgtcttctct

SEQ ID NO: 493658 - DNA, 201 bp, Homo sapiens
aactctccctcccccagtgctccctacttgatgtctccatgccttcaccttccattcactcaagtcatggccttccagattcctccctccctgcctgggcmtgctctccagcaccaggttgccacaatgactaagactggctgctgcaggaataccctcaggggtgcaggaggactcagctctgccaggacagatgaaagc

SEQ ID NO: 493659 - DNA, 201 bp, Homo sapiens
tacttgatgtctccatgccttcaccttccattcactcaagtcatggccttccagattcctccctccctgcctgggcatgctctccagcaccaggttgccayaatgactaagactggctgctgcaggaataccctcaggggtgcaggaggactcagctctgccaggacagatgaaagcacagcaggccctggactaagctta

SEQ ID NO: 493660 - DNA, 201 bp, Homo sapiens
gggtgagaagaaaagctcccctgagagcccacctccagcttggcaatccctgccccaccccccacctctgtggcttgtgggctgttgcctcagtgctgtgmccccaggaccgggagcataggccccacccaggcagagctcccatgctcctgactgctggccagctcagcggctctcccgcctccccgccaccctcccacc

SEQ ID NO: 493661 - DNA, 201 bp, Homo sapiens
ccttagggctgttcaggtcctgcctgcacagctgcacaaccctgggaagaggtcactgcacttctgtgagcctcatctgtttagtggagagtgggatgacracaattcctgccaccccaggactccacatgaacacaggtactatgaacatggaggggactagagctattgcatgtgactgcatgtcacactgatacctgt

SEQ ID NO: 493662 - DNA, 201 bp, Homo sapiens
cagctgcacaaccctgggaagaggtcactgcacttctgtgagcctcatctgtttagtggagagtgggatgacgacaattcctgccaccccaggactccacrtgaacacaggtactatgaacatggaggggactagagctattgcatgtgactgcatgtcacactgatacctgttttggaaagagcaggggcagaagaggca

SEQ ID NO: 493663 - DNA, 201 bp, Homo sapiens
gagattccctgagagctgcccgtggttgccggtaccggctgctgccgccggactcccgtaggcgctgcgcggctcccttttcttcgggaggcagagcctakcggtgcttccgtgtgcgtcatcaggaggcgaccgtcggggatgctcacagttggacagtttggtcccgaggcatgctgggataccgcgggccggtctcca

SEQ ID NO: 493664 - DNA, 201 bp, Homo sapiens
cggtgcccacataggagggctgagagcaaagggcaaggccgggcaggaacgagagaggaaggggacagggtgccacgggttctgggaggggaagagggtayagaaccacccacagacctgccacctgaatgcgaatcttgaggctccgctgcagccccccaaggggctccgtgtattcaggggctctctcagcccccactt

SEQ ID NO: 493665 - DNA, 201 bp, Homo sapiens
gtcaaggtcctgtgcatatgtgggaagaagaaaactgtcaccagttaggaagctgaaaggaaggaggcagccacttactgagtggctttgggctggcccaraacaggcctcctgggcagctccacagccctccctgacccctcctgagtgggagctccatcaacccagagcttccccagccccatcctggttcctgctcct

SEQ ID NO: 493666 - DNA, 201 bp, Homo sapiens
actgtcaccagttaggaagctgaaaggaaggaggcagccacttactgagtggctttgggctggcccagaacaggcctcctgggcagctccacagccctccytgacccctcctgagtgggagctccatcaacccagagcttccccagccccatcctggttcctgctcctcaaactcccacaagcccctcaaatctagaccat

SEQ ID NO: 493667 - DNA, 201 bp, Homo sapiens
agttaggaagctgaaaggaaggaggcagccacttactgagtggctttgggctggcccagaacaggcctcctgggcagctccacagccctccctgacccctyctgagtgggagctccatcaacccagagcttccccagccccatcctggttcctgctcctcaaactcccacaagcccctcaaatctagaccatcctaacttt

SEQ ID NO: 493668 - DNA, 201 bp, Homo sapiens
gtacttattcctgatcacatccagacagaagcccttgtagatccctgcagagaaagggaggagggtccctgcttggctggggagcccggtgcccacatagragggctgagagcaaagggcaaggccgggcaggaacgagagaggaaggggacagggtgccacgggttctgggaggggaagagggtatagaaccacccacag

SEQ ID NO: 493669 - DNA, 201 bp, Homo sapiens
tgcagcctccacctcctggggctcaggtgatcctcccacctcagtctgtcaagtagctgggaatacagatacatgctgccacacctggctaattaaaaaartacatatatttttgtagagatggggtttcaccatgttgcccaggctggtcttgaactcctgggtttaagtgatccacctgcctcggcctcccaaagtgct

SEQ ID NO: 493670 - DNA, 201 bp, Homo sapiens
aatttttcactgtggagtataatgttagttattggcttataatatatgctttttattgtgttgaggtacattccttctgtacctaatttgttgaggatttwtattatgaaataaaatttgatcaaatgatgtttctgcatctaatgagatgatctgcaataagccaggcacagaaaggtaaatactgcatgttttcactac

SEQ ID NO: 493671 - DNA, 201 bp, Homo sapiens
ccttcccaatttggatgctctttatttctctcttctctgattgctgtagctaggactttcagtactatgttgaataacagtggtgaaaatgagcatctttkttgtgttctaaatataggaggaaccatccttgcatccctgagataaatctcacttggtcatgatggatgatctttttaatgtgttgttgaattcggtttg

SEQ ID NO: 493672 - DNA, 201 bp, Homo sapiens
tgttgggatggaattatattggttgaatgaaatttacagtattataagaccatcaagaaaacagtggaaaacatgtggctagagtctaaaaagaatacaayctcagtttttcattcctaggagattgctatcagtgcttccaaaaatcacgtgtgcctgtcttgctctaagcaggaccaggtgtgagggatgctctctggg

SEQ ID NO: 493673 - DNA, 201 bp, Homo sapiens
taaattctgggaaaatgagaggcactgttgttgttttctcacttaagttctatgcctttttacagtcacatcagaaatagaacatcatctccttatctcasaaaactatattctcagtgactttctgaaatactttttgatctcaacagtcattacaaacttttagtatatggttgattatacctatggcaggtaaaacat

SEQ ID NO: 493674 - DNA, 201 bp, Homo sapiens
gggatggtggcctgtagttttcttttttaaatgcattttttgtctggttttggtattaggataacactggcctcatagaatgagtttagaagtatttgttyctcctctactttttggaatagtttgagcaggattggtattagttcttctttcattgtttggtagaattcaacagtaaagccatcaggtttcaggtttttc

SEQ ID NO: 493675 - DNA, 201 bp, Homo sapiens
cattgctggaaaacatagtttggggcaagatttcacactaaaaagaacagggcttatgataaaaatagaattcaaccaaaccactctaaacctaggaaackttgtaaacagagacctaacgaaaacaattctaataagatagaagtacaattaaaaaggcatgtcaaattctaataaggaaatgctggagtaatcttggcc

SEQ ID NO: 493676 - DNA, 201 bp, Homo sapiens
tacaggcgtgagccacagtgcctggccttgttaatcttttgtattttctttgtttcaatttcatttatttctgctctgatctttatttcctttctcctacyaactttgggtttggtttgctcttgctcttgtaggttgcataataggttgtttatttgaagtttttcttctttactgatgtaagcacttttagttataaac

SEQ ID NO: 493677 - DNA, 201 bp, Homo sapiens
tgcctggccttgttaatcttttgtattttctttgtttcaatttcatttatttctgctctgatctttatttcctttctcctactaactttgggtttggtttrctcttgctcttgtaggttgcataataggttgtttatttgaagtttttcttctttactgatgtaagcacttttagttataaacttcccttttagtactcct

SEQ ID NO: 493678 - DNA, 201 bp, Homo sapiens
tcttgtaggttgcataataggttgtttatttgaagtttttcttctttactgatgtaagcacttttagttataaacttcccttttagtactccttttgctgyatcccattggttttgttataggttgtgtttccattatcatttgtttcaagacatttttcaatttgcttcttaatctcttcattgacccattggtcattga

SEQ ID NO: 493679 - DNA, 201 bp, Homo sapiens
tataaaatctgtcccagctgtagttctttataatgttataactgtacacctactaaaagaaaagtaaaatggagagcagggatactcagttttgaagatayagagtagaaggttttctattttgcccatttgtacactagagacaagaacgtggatcattgcaaagcacattcccattttaattcacacttttaccattcc

SEQ ID NO: 493680 - DNA, 201 bp, Homo sapiens
aggaatttaagaatttttccatcacaaaaataatgtatactttttgatatgaagtatttgaaaaataggaaaacagaatgaagaaaaaaaatcttccaggmcgggtgcggtggctcatgtctgtaatcttagcactttgggaggctgaggcgcgcggatccctgaggtcaggagttcgagaccagcctggccaacgtggtg

SEQ ID NO: 493681 - DNA, 201 bp, Homo sapiens
gcatcccattggttttgttataggttgtgtttccattatcatttgtttcaagacatttttcaatttgcttcttaatctcttcattgacccattggtcattsaggagcatattgtttaatttacatgtgtttgtatagtttccaaattttctcttgttactgatttttagtttcattcaattgtggtcagagaagatacttg

SEQ ID NO: 493682 - DNA, 201 bp, Homo sapiens
cttgagtaaaggtaaatggtagattaatttttgagatcttgcatgcctaaaagtgccttggtgctgctctcacacttgatggtggtttggctggatatagmgttctaggttgaaaataatttctataatttcgaaagtattgtttcattgtcttctaatttttggattactaatgagaaatcctatgtcatccttattctt

SEQ ID NO: 493683 - DNA, 201 bp, Homo sapiens
ccatttgtgttcctgcaaaggacatgatctcattctgttttatgactgcatagtatccatggtgtgtatgtaacacattttctttatcaaatctgtcactratgggcacttagattgagtctatgtctttgctatataatcagcaatcttacaattttatacaaggtaagtttcctttgtaaaataagttcaaaaagaata

SEQ ID NO: 493684 - DNA, 201 bp, Homo sapiens
atcagggaaatgcaaatgaaaaccacaatgtgatacaccttagtcctgcaaaaatggccataataaaaaagtggaaaaatagtagatgttggtggagatgyggtgaacagggaacacatctacactgctggttggaatgtaaactagcacaaccactatagaaaatagtgtggagattccttaaagaactaaaagtagaac

SEQ ID NO: 493685 - DNA, 201 bp, Homo sapiens
ttgagaccagcctggccaacatggtgaaactccatctccactaaaaatacaaaactagccaggtgtggtggtgcatgcctgtaatcccagctactcaggarggtgaggcaggggaattgattgaatctaggatgtggaggttgcagtgagccaagatcacaccattgcactccagcctgggcaacagagtgaaactccatc

SEQ ID NO: 493686 - DNA, 201 bp, Homo sapiens
gtttacacttattcaagcacctccatgtcatttacaaacttctcttttaggtgttaacagctccgttttggaggatgaaactaagatgggtgatcgcactstcaggtagctctggaatttgtgccaaagatggtctctgtcctttggatttggaggcagatcaccctttgagataattagtaaatggaaagctcctgagac

SEQ ID NO: 493687 - DNA, 201 bp, Homo sapiens
ggtcatcaattacattatactcaaatgcatctgattgtgcagttttatacagcactttataacttgattgtttaagccataaattaaacactcaattctgcttttttttgggtaggtgtagttagagcaaatgaataggaaatatatctttgctggcatgtgttgaggcaggagtgaattagggaatttttttttcttgct

SEQ ID NO: 493688 - DNA, 201 bp, Homo sapiens
acattgatgatgatgatgatgatattgttgataaattgatcttccccctggccacctatttgaaattatagcctctgatgctccctaaattccttctttaytttacttttctccttagcacttaatgccatctaacatatcctatatttatttatttatattgtctatcccaacatcccttgaatacatacttcccaaggc

SEQ ID NO: 493689 - DNA, 201 bp, Homo sapiens
agccaacaaagtaatttcaacagaacagcaattggtcctctggtcacttgggaaactcagaattaattgaatgggcatcaacaagggagaagcaattcttytgtaaacaaacaaaactgtactcgtatgaaatgacctagaaaatagatgacaggagacctctccaatttgtgatttggtagagaataggacttctgtttc

SEQ ID NO: 493690 - DNA, 201 bp, Homo sapiens
caaatagacctggaataattgaaaactggctataagtgttatatattattttctatggtagtaagtagatgattttagaaatacttaaaacctaaagaggyactataagtaaagatgtataactgaagtctacatttatttgacagctacttaattttttttcttgtaaaaaaagaacttccagtttcccaagacgcaaca

SEQ ID NO: 493691 - DNA, 201 bp, Homo sapiens
gctcaagcaggaagctattttatccaccaacagaaacagaatataattttccttatcactgtagagtaacaacaaaccatgggacagaacctagagaaatmtgacagaaatcctgttctataatacaaagagcacttggattagagtagaaagccaggtggaacttcagtcttatcaaaatagaaaagcatttccccgtca

SEQ ID NO: 493692 - DNA, 201 bp, Homo sapiens
tcctctcccagcatctccagccaagagcttgactgcaacctcatatgagattttgagccataaccattcagctaaactgcttctggatacctgaccatagwaactgtgagattataagtatgtgttatttcaaaccactaaattgagggtaatttgctatgtaacaatagataactaatacagcattcagattcattttaa

SEQ ID NO: 493693 - DNA, 201 bp, Homo sapiens
gcctacactgtacagggttggtctttgtgaccacttacacatgaaagaagcgatggcataacacttctgagcttatgtcataaaagactgcagcttctctstgcgtactctctcagctctctctgggggaagccagctgcatgtcatatggacattcaggcaacctagggtgtgaataatgtggcaaggaaataaaaggcc

SEQ ID NO: 493694 - DNA, 201 bp, Homo sapiens
acgttttataactctttgtgttgaacacagcagaattttgtattaagaaacaaatatttcacaattcaataggcatatggatgaataggaaagggaaagtkgttattccaggatatttacctgcagaaaaagaacttagcaacatagtaattcaattaatcataagtatgtctctgaatcacgttgttcaagattttcacc

SEQ ID NO: 493695 - DNA, 201 bp, Homo sapiens
tgagatgtgcatactatgaaagaagtatggaataaaggattcttcttaacagtgcccatggatggtgatacactttcttccttaaatccactctgcccccmccatagggaacaggagtaagggaggaaactgagaagattacgcaacaattcctgactcctaaaacaaaacagaaaacctgtggtagctgtagaagatagc

SEQ ID NO: 493696 - DNA, 201 bp, Homo sapiens
ccacttttatgctaaacactccaaatttatatctctaggccagaccacttttctgagttcccaattcacatatctgcagttgacagttccatttagatgtcacacagtcatttaacttaatgtgtctaaaacagaactcttatttctaccaaatatattccttcctgtcttaaccaagagctccaccaatctatccacttg

SEQ ID NO: 493697 - DNA, 201 bp, Homo sapiens
cacttttatgctaaacactccaaatttatatctctaggccagaccacttttctgagttcccaattcacatatctgcagttgacagttccatttagatgtcacacagtcatttaacttaatgtgtctaaaacagaactcttatttctaccaaatatattccttcctgtcttaaccaagagctccaccaatctatccacttgc

SEQ ID NO: 493698 - DNA, 201 bp, Homo sapiens
tggcaacaactgaagtgagatgtagagggcaagaactcccaggaatctctgacttgaagggaggctttccaggatgtacttctgcatgtttgtagagaggktgagactgaagagggaaggggtggcggcttcctgatggggtaaagtacccaagaaggaattcggttaagggcacagttggaggggttagcccaggcagtg

SEQ ID NO: 493699 - DNA, 201 bp, Homo sapiens
tcaggcttccgggatgatcacatttcactgaatgcaagggacctgaacagccagcaactgaacccccagcctcaataactttctcccctctgatttcaaakgagctagggatgtttcctggttaaagcaaaggggccttttgttggcagcttaggcttgggaaggatctggcaacagggtggcagttttgtccccctctat

SEQ ID NO: 493700 - DNA, 201 bp, Homo sapiens
gaacattttccttggaggcaacaaggcaggtggtgacgtcagaaatgctttcctgtaagcctgcagggttagggtgcagagtttctggcctgggcagatgyttgatggctgggagaggaggtgggatctgtaaagttgttggggctgctggcttgggtgccgtatttatttggtttgcaatggtgttggtggctgccactg

SEQ ID NO: 493701 - DNA, 201 bp, Homo sapiens
ggaatggcttatgttctgatgaccacatgtgggactatttcaaccaccacgagaaacccttagaagggttattgttttgtattatttatatacactatacttttttttttttaaataaaagtaaatgtaacacataaactaaattcaggattgatcccaaccttctagagccagttcctctggggtcagggaggaaacagc

SEQ ID NO: 493702 - DNA, 201 bp, Homo sapiens
gctaagtagccggagccaagaatgctgactacttattagttactggatacaggcagccaggaaagagcttgcttcagatcatacagccaaagctgagggcagattttcagactggataaaaaatcagtttttcgtaaaccaaggaaatttacttttgggttaattgcaaatgtttggggaaggcagcagggttataataaa

SEQ ID NO: 493703 - DNA, 201 bp, Homo sapiens
gagaatggcttgaacccaggaggcggaggttgtagtgagctgagactatgccatttggactccagcctgggtgatagagggaaactctgcctcaaaaaatwaaataaaataaaataaaataaaataaaataaaataaaataaaatagaataaaataaagtaaagtaaaataaaataaaataaataaggacattatagtact

SEQ ID NO: 493704 - DNA, 201 bp, Homo sapiens
atactttccaaaatacatttaaatgggaattcggaacacttgatttttttttttttttttttttgagatggagttttgctcttgtcgcccaggctggagtrcagtggtgcaatctcggctcactgcaacctttgcctcccggctcaagtgattctcctgcctcagcctcctgagtagctgggattacaagtgtgtgccacc

SEQ ID NO: 493705 - DNA, 201 bp, Homo sapiens
gatataagtgggtattctagagccagattgcctggctaaaattcaagctctaccacttagtagctgtatgacattcagcaactaactccgtctctctttgyctcaaattcttcaactgtaaaatggggataataaaaatatctacctcataatgctgtggagacaacatcaaatgagtcaacattttcaagacacaagagt

SEQ ID NO: 493706 - DNA, 201 bp, Homo sapiens
ccagggtatgctagtgattgaattaatgaaatccttgaactatgtaatacttctaatgctaaaaatgaagatagtgatatcaagaagcagaactaaaacargatggggaaaatgtactctctaggtgtatagctgcaaaacacctacggatttatgccatgatctaagaatatgtttatagctctttgatgtaaaacatca

SEQ ID NO: 493707 - DNA, 201 bp, Homo sapiens
ggccagctgagcatgcagcaattcatctagtccagatcttgattgcgtgtgtgtgtgtgtgtgtgtgtgtgtgtgtgtgtgtgtgtggtgggaaaggtcayggaaaaggtaaatttaagttgctaggtatactctcttagctctctgccatcagtagaggaagcaaattaagatcagcctttaacaattacatttcagata

SEQ ID NO: 493708 - DNA, 201 bp, Homo sapiens
ttttgtctccatagccaatagttgtcaatgtaatctagaaacaaaataaatagaatgtgcagcttaagtacttgagaggaaagttaggacctatgaacagraggcaagcaacgtttccactaaatcattattcaacaaatcttgttcgtgctttttattactgtgctttaattttccgtgacgcatgacagaacttctctt

SEQ ID NO: 493709 - DNA, 201 bp, Homo sapiens
tcctgcttatgccaggacatttggcactccagttgtgagtactcatattataagggatcccaagaaaatcccaaatgtggcctgagcccccgaacactacygtgtagtaatttttctttttcatggaaacagatgacaccaatatgtccattgttcttaacaaatgacagatatatgcccattgttcttaggtatgccaag

SEQ ID NO: 493710 - DNA, 201 bp, Homo sapiens
aattacaatgccaaaaattcttcattagggaagaattccaaaatataaaaaaggcttaatatccacaatgtataaggaacttatctgaatgaatcacaatycaaaatatatatgtacaaataagtcagtcaggaaagactagcaaaaaatgactgaaaattattcagccttactagaaattttaaaattgtaaattaaaag

SEQ ID NO: 493711 - DNA, 201 bp, Homo sapiens
tttttttgtatttttagtagagatggggtttcgccatgttaggcaggctttttttgaactcctgacttcaggtgatccgcccacctcagcctcccaaagtwctgggattacaggcgtgagccacctctcccggctgaagtgtttttatttataagtttgtagaatgcttgcttatcttgttcagctgctcaatttcttctt

SEQ ID NO: 493712 - DNA, 201 bp, Homo sapiens
tttcttggagattttcccaagcaattaattcttctcttttgccttcctgccctcatctgctgcaaaccccaaactttgagatctacctgtctatcaactatctatctatctatctatctatctatctatctatctatctatctatctatctaatctatctatctatcatctatctatctatctatcgctttcagttgatgg

SEQ ID NO: 493713 - DNA, 201 bp, Homo sapiens
ttaatttcttgatttgcatatatgtacctgttatgattacattccagatctttccaacagaactataaaattcctctggtcaaatgcatcatgaaatctgwgaactccattctttcgcttccttgaagatctttctcctggagctctcagcctccttctcattctgttctcaaggcctgcatagctgttgtcttgggactt

SEQ ID NO: 493714 - DNA, 201 bp, Homo sapiens
ttggaggacagagttctttttgcccatcctggctcttataagctgtgttcaggtccctcctggaacatgtgcacagctgcctgcaatgggcctgggcgtargggatgggtagctatcactgtgctaagagctgaaatggacaaaattaactgcaacttaccatctaagccttcctctgtaagttgcaaacattcaatagat

SEQ ID NO: 493715 - DNA, 201 bp, Homo sapiens
ctctgtaagttgcaaacattcaatagattccagagttccatccattgaattacatcaaattctgccagtgcaattgttgtttaggtggggagacagaatcytggtgattcctactctgtctttcttctagaatcctcctattcacttttaacagataagacaactaaggcacagtggagtgattttccaagtcgcacagct

SEQ ID NO: 493716 - DNA, 201 bp, Homo sapiens
tcaaacatcagcaacaaccattgatgtttattagacacagtaccaggcctgttacatgttatgaattacatgcattaacttgttcaatcctcatgacaacyctataaggcaagaactaactttcttcccatttttacagataaggaaaatgagacagttggatgctttgaatgcctgagttatatctatgttaaaagcaaa

SEQ ID NO: 493717 - DNA, 201 bp, Homo sapiens
agattaattcgtggactgaattgtcccacctttactttagggtcttttatggatatactcaacatgtgaaaaatttcaaggtgacttctagaccagtaatrttcaataaaattttctgtgacatgggaaatctttcgtttctttgtctaatgaagtagccactggccacctgtggctatcgaacagttgaaatatgaatgg

SEQ ID NO: 493718 - DNA, 201 bp, Homo sapiens
gagttttggaaaaaaaaattaaatacagttatcttcaatttatgtaagatgaaataagaaagaacttgttccagttgatatgcttatttgaacatgagatyacacatgaaattaattttctcattattctggtccaagatgaaatcacttatgggtgatcttctggaagtaaaagtgtcctaaactacaaagtaatatgtt

SEQ ID NO: 493719 - DNA, 201 bp, Homo sapiens
taagccttcctctgtaagttgcaaacattcaatagattccagagttccatccattgaattacatcaaattctgccagtgcaattgttgtttaggtggggaracagaatcctggtgattcctactctgtctttcttctagaatcctcctattcacttttaacagataagacaactaaggcacagtggagtgattttccaagt

SEQ ID NO: 493720 - DNA, 201 bp, Homo sapiens
actaatatgccttggggctttatgaacctgcaaggcttggagttaccaccgactttgctccataccttagcatgatggcttccaaaaagcagtaaagcctrttattggagaagacagacaaacagactgcattcgtgagggccaaacaaggtattttaagatagatttaactgagaattccactagattcactattgtaac

SEQ ID NO: 493721 - DNA, 201 bp, Homo sapiens
atagccaaagaaaaggtttaatatctcacatgctacaaagtaagtgcatcttcagtgaaaacactactttaacacagcctcggagcaaatgtagccacaastaattaccttcaaaacaaaaacaagcaaaaacaacattccagggagtatattagctgattttaaagatatgtgctaaatgatccataaaatgttctttag

SEQ ID NO: 493722 - DNA, 201 bp, Homo sapiens
actatccacatcagcaatacagcaattagtgctcatagctatagaatgttattatgacagaagagtcttaggggagagataaaaattgaacacatagatakgaggaagaattttatgttctagataagattttactaattttcaaagcaaatgcttaaaaccaagcagacatacatcaatgtacagtagtaatgaaacaaa

SEQ ID NO: 493723 - DNA, 201 bp, Homo sapiens
ggagattgccctaggtcagaatgaagagttttggaaaaaaaaattaaatacagttatcttcaatttatgtaagatgaaataagaaagaacttgttccagtygatatgcttatttgaacatgagattacacatgaaattaattttctcattattctggtccaagatgaaatcacttatgggtgatcttctggaagtaaaagt

SEQ ID NO: 493724 - DNA, 201 bp, Homo sapiens
gcagctgggttccttcttttctcaaagtgtttctggcggtgttgttcttgtacttttaatgcaaaacctgagccaagaatgccctggaacaaaatacaaawatggcactcaaaaatttcaaaagcactgttaaataatacaaatattaaaaagtcactaaaatgagtctgagagaagacaaacggtatgtaacctgtccat

SEQ ID NO: 493725 - DNA, 201 bp, Homo sapiens
aagattcatgtatatatatgtaatgactacaaagccaagtactagcatgaaaagtaatagtctgttaccttcagatagtcccaattagccagatacttgayattttgaaggaacatatctaggtaatttatgggctatatttttaagacagtgatagaaaaatgggtgatctactacgaaataggtatatgtgagtgtgta

SEQ ID NO: 493726 - DNA, 201 bp, Homo sapiens
atggcaatagtacatatagctacacacaacaacatggatgaacttcatgtgaataacgttgagtgagaaaaagaagacaccaaggagtacatttccataaygtacaaaaaccagggaaaactattctacgctgttagaaggtagcacagtggttatccttatgggatagtgattgcgaaggggtacacaggaggtcctgct

SEQ ID NO: 493727 - DNA, 201 bp, Homo sapiens
ttgtatttccccccaaaaccatttaagcaaaattattcagcagaaagtaaagaaaattagtgttttaatttaacctcttagtattgagctttggttccaarttggtttaccagcatttaggtttcatagagtcttagtgtcctgtatcaaaaaaactgagaaaaataacaaaatatgttacatgtgaaatttctggtcctg

SEQ ID NO: 493728 - DNA, 201 bp, Homo sapiens
tacaagcatggtgcaagacaatggttgctgcgactgtgagctctgataggatttgagagtttcatttgtccagagcttggagctctctagataagctccaygtggctgcctcccctagtgatgcctgatgagtgggactcgagaatttgtccattcattcattcattcattcattcatcaaacatttattgagtgcctatt

SEQ ID NO: 493729 - DNA, 201 bp, Homo sapiens
gagagtttcatttgtccagagcttggagctctctagataagctccatgtggctgcctcccctagtgatgcctgatgagtgggactcgagaatttgtccattcattcattcattcattcattcatcaaacatttattgagtgcctattatatgccagcttctgtgctagatgccagggatacagcaatgaagaaacaaatcc

SEQ ID NO: 493730 - DNA, 201 bp, Homo sapiens
agagtttcatttgtccagagcttggagctctctagataagctccatgtggctgcctcccctagtgatgcctgatgagtgggactcgagaatttgtccattcattcattcattcattcattcatcaaacatttattgagtgcctattatatgccagcttctgtgctagatgccagggatacagcaatgaagaaacaaatcct

SEQ ID NO: 493731 - DNA, 201 bp, Homo sapiens
gagtttcatttgtccagagcttggagctctctagataagctccatgtggctgcctcccctagtgatgcctgatgagtgggactcgagaatttgtccattcattcattcattcattcattcatcaaacatttattgagtgcctattatatgccagcttctgtgctagatgccagggatacagcaatgaagaaacaaatccta

SEQ ID NO: 493732 - DNA, 201 bp, Homo sapiens
agtttcatttgtccagagcttggagctctctagataagctccatgtggctgcctcccctagtgatgcctgatgagtgggactcgagaatttgtccattcattcattcattcattcattcatcaaacatttattgagtgcctattatatgccagcttctgtgctagatgccagggatacagcaatgaagaaacaaatcctat

SEQ ID NO: 493733 - DNA, 201 bp, Homo sapiens
aattctgccaatctctgtcttttactagaaacttttatccacttacatttaaagtaattaatgataaggagacgctttcatcattttgctctttgttttayatatacttcatagctttttttgtctctcatttcctgaattgctaccttcttttgtgtttagttcattttttttttgtagtgaaatgtttgaattcctttc

SEQ ID NO: 493734 - DNA, 201 bp, Homo sapiens
gcctggaactgcctctgtctctatgatgcaatgaacttaacctgggcacccactatccatctgctggacacagagctggatggcggggatacaaaggtgarcaagacatagatcttgctctcttcaacttaatgttgagtgggtctccaagagttgtgcttggctggatggctggtgcagtgctaagtactttacctgcat

SEQ ID NO: 493735 - DNA, 201 bp, Homo sapiens
gagttagaaaaatcatctcactgagttcccatagaaataaaagataatgctataataacaattttgatgcatctgtgaacacactctcactacattttttytaggctgtagaaatgatacaatatttgaaaaaaattctgaaaattagtttttattgaaaaaaaagcctctaggtatccatatctgcagcacatattggtt

SEQ ID NO: 493736 - DNA, 201 bp, Homo sapiens
tcttctgggagactcagtagcaaggtgccatcttgaacttccaaccttcagaaccgtgagaaataaatttctagtctttattggttatccagtctcaggcrttttttatagtagtgcaaatagactaagacaaatagcaactgctcattgaaatttacaccaggtacttaggtgcagcttctgcatatattaattttcata

SEQ ID NO: 493737 - DNA, 201 bp, Homo sapiens
gggtgatgaggcagtcagttcgttttctagaaacatttctcacagatcttcaagaacccagcagcatcctgatggcatggcatgggaagatgacttattcrattgtatctcatcatctctgtattgcagatgcttacaaactgcgtacgtcagtgactcccaggcagaagggcaggtggctattatcacttaacagtatac

SEQ ID NO: 493738 - DNA, 201 bp, Homo sapiens
gctctcaggaagtcacatccataggaacagggggagagtactacaccaagggaacaccctgtggtacaaaagaatctgaacaacagccttcagccctagaycttccctctgacagagcctacccaaataagaaggaaccagaaaccgattctgttaatatgacaaaacaaagttctttacaactcccaaaaaatcacacta

SEQ ID NO: 493739 - DNA, 201 bp, Homo sapiens
cagaagaggggtgtttaacccagactggtagaggtgatcagaaatgatttctggaggagatgacagtgctttacctactctgcaccctcatttatggggatattattaagtttctgaaggttgctgaatggcccccttgtgattgcagatcttatgtttgtggggtggatgtgggtttctcccccttaacccctcacttta

SEQ ID NO: 493740 - DNA, 201 bp, Homo sapiens
agaagcacaaagaacacctgggaaattcattgcaaaaagatcatcacctaggcacattgtcatcaggtaatctaaagttaagacaaaggaaagaattttargagcagtgagacaaaagtacctggtaacctataaataaaaacctattagattaacagcagatttctcagcagaaaccctataagctagaaggtattgggg

SEQ ID NO: 493741 - DNA, 201 bp, Homo sapiens
agaagaggggtgtttaacccagactggtagaggtgatcagaaatgatttctggaggagatgacagtgctttacctactctgcaccctcatttatggggatattattaagtttctgaaggttgctgaatggcccccttgtgattgcagatcttatgtttgtggggtggatgtgggtttctcccccttaacccctcactttat

SEQ ID NO: 493742 - DNA, 201 bp, Homo sapiens
gaacaaatagacttaacagatatatacagaacattccatccaacaaccatagaatatacattctattcagtgcatggaactttctccaaggtagaccataygacaggccacaaaatgagcctcaataaatttaagaaaattgaaattatatcaagcactctctcagaccacagtggaataaaactgaaaatcaactccaaa

SEQ ID NO: 493743 - DNA, 201 bp, Homo sapiens
gaagaggggtgtttaacccagactggtagaggtgatcagaaatgatttctggaggagatgacagtgctttacctactctgcaccctcatttatggggatattattaagtttctgaaggttgctgaatggcccccttgtgattgcagatcttatgtttgtggggtggatgtgggtttctcccccttaacccctcactttatg

SEQ ID NO: 493744 - DNA, 201 bp, Homo sapiens
tcctcccagctcagcctcccaaagtgttgaaattataggcatgagccactgcacctggcccctcctgtagatttttgttggattttcttttaagggtataagagtagtaaaacccaagcaagaacttccagatccgaagaagtctttcctgccaggaatttgtaagcattgatatggcgactaaatttggggattttgtgt

SEQ ID NO: 493745 - DNA, 201 bp, Homo sapiens
ctatatcctccttagtaacctggctagttcctacatatctaccagatttcttcttttctttcttttagagtcttcccaaatgccaccttccccaaaagtgccgatataggttggcccaaaccgtcctgtcactgtagtaatatgctgctctgcattgtaattgactctacttttctggtagttcctcacaactctaagcag

SEQ ID NO: 493746 - DNA, 201 bp, Homo sapiens
attacaggcatgaggcactgcacctggcctggtttggatatttttaactttcttctagtttttcaccaacaggcagaggtatttcttttcttttcttttcttttttttttttttgcaatatagttactcagcattccttgacaaatacaaattctcccaaaagggttaaactgggccagctgagcatgcagcaattcatct

SEQ ID NO: 493747 - DNA, 201 bp, Homo sapiens
atagttactcagcattccttgacaaatacaaattctcccaaaagggttaaactgggccagctgagcatgcagcaattcatctagtccagatcttgattgcgtgtgtgtgtgtgtgtgtgtgtgtgtgtgtgtgtgtgtgtggtgggaaaggtcatggaaaaggtaaatttaagttgctaggtatactctcttagctctctg

SEQ ID NO: 493748 - DNA, 201 bp, Homo sapiens
aaatagaatgtgcagcttaagtacttgagaggaaagttaggacctatgaacaggaggcaagcaacgtttccactaaatcattattcaacaaatcttgttcrtgctttttattactgtgctttaattttccgtgacgcatgacagaacttctctttgtttaaggaaaggaataacctacatacttgttcctcccttataaca

SEQ ID NO: 493749 - DNA, 201 bp, Homo sapiens
tagttactcagcattccttgacaaatacaaattctcccaaaagggttaaactgggccagctgagcatgcagcaattcatctagtccagatcttgattgcgtgtgtgtgtgtgtgtgtgtgtgtgtgtgtgtgtgtgtgtggtgggaaaggtcatggaaaaggtaaatttaagttgctaggtatactctcttagctctctgc

SEQ ID NO: 493750 - DNA, 201 bp, Homo sapiens
tgatttgtggtaatttgggatggcagcccaagaaatgaatacagctgggaaaactttccctgatggcttccaattctttactccaggacaataatgatgattgatagtaataagagtttttttttttttttagagaaatctaattatgtgccaagaactttaattaattgtatcaaaaccccatgaagcagtttttttttt

SEQ ID NO: 493751 - DNA, 201 bp, Homo sapiens
gggatggcagcccaagaaatgaatacagctgggaaaactttccctgatggcttccaattctttactccaggacaataatgatgattgatagtaataagagtttttttttttttttagagaaatctaattatgtgccaagaactttaattaattgtatcaaaaccccatgaagcagttttttttttttattttgagacagag

SEQ ID NO: 493752 - DNA, 201 bp, Homo sapiens
agcgtgtattagctatttttcctaatgctcatttaatcttttaaaagatttttctcaatttttttattgtggtaaaatatatgtaatataaaatttacagyttaaccattttaaagtatggttcagtgtggtattaaatacattcgtaatgttacagaaccatccccaccacccatctccctaactcttttcttcttgtaa

SEQ ID NO: 493753 - DNA, 201 bp, Homo sapiens
cctttcttttctatcccctcttttttctctctttccaggtgatcttaaatgttctcatagatttaaatgccacttttatgctaaacactccaaatttatayctctaggccagaccacttttctgagttcccaattcacatatctgcagttgacagttccatttagatgtcacacagtcatttaacttaatgtgtctaaaac

SEQ ID NO: 493754 - DNA, 201 bp, Homo sapiens
ttatatctatttcacttactcaatgaactaggtattgctattcactaatatgaaactgctttcagggatcaaagttttttgggcagcactgatcccaccaygatatccctccaaatgttgatctaggggacagatctcactatcttaatggaaggagttccagagttagtattgaaaattcactggcacagcgtatctgtg

SEQ ID NO: 493755 - DNA, 201 bp, Homo sapiens
gtgaggacatagcatttgtctcttctgggagactcagtagcaaggtgccatcttgaacttccaaccttcagaaccgtgagaaataaatttctagtctttaytggttatccagtctcaggcattttttatagtagtgcaaatagactaagacaaatagcaactgctcattgaaatttacaccaggtacttaggtgcagcttc

SEQ ID NO: 493756 - DNA, 201 bp, Homo sapiens
gttttgttcacaattgtatcctgagtacctagaacagtgcctgaaatatagtaggcactcaataaatatttaaataagataaattagattaaaaaacactyaaaagttggctgagctttgttctcttaccacatcaatggcttgttgactgggatatcaacctaaaatactcaggttaatcaaaggatcacttcaatttct

SEQ ID NO: 493757 - DNA, 201 bp, Homo sapiens
cttcttagagtcactcaaatactcacttatttgaatgcctcaaacacttgcttattgctgaactgtgattcagcaataacgattttaataatgtcataccstttgcctctgtgatgcctctcatttgtgtgtgggctttttaaaacccccaaacaatttttattaataaagcttaattgattcctgaataattaaatagta

SEQ ID NO: 493758 - DNA, 201 bp, Homo sapiens
agcctcttgagtagctgggattacaggcatccgccaccacacccagctaatttttgtatttctagtagagacagggtttcaccatgttggccaggctggtyttgaacttttgacttcaaatgatccccctgccttggcctcccaaaatgctgggattataggagtgagtcactgcacccagccacaccacaaaaattgata

SEQ ID NO: 493759 - DNA, 201 bp, Homo sapiens
gttctttatatattctaatcagatatgtcatttgtacatattttctctcagtttgcagcttgttttttcatccccttagtctcatttgcagagcaaaggtwtttaattcaatgagatccattctatcagcttgccttccttccttccttccttcctccctccctctctctctctctctctctttttttttttttttcggag

SEQ ID NO: 493760 - DNA, 201 bp, Homo sapiens
taatgatgattgatagtaataagagtttttttttttttttagagaaatctaattatgtgccaagaactttaattaattgtatcaaaaccccatgaagcagttttttttttttattttgagacagagtctcactctgtcacccaggctcaagtgcagtggcatgatctcggctcactgcaagctctgcctcccaggttcacg

SEQ ID NO: 493761 - DNA, 201 bp, Homo sapiens
tttgggaggccaaggcaagcggatcacttgaggtcaggagtttgagacaagcctggccaacatggtgaaacctgtctctactaaaaatacaaaaattcgcyggtcttggtggcgcatgcctgtaatcccatctacttgggaggctgaggcacgagaatcacttgaacccaggaggcggaggttgcagtgagctgggagcat

SEQ ID NO: 493762 - DNA, 201 bp, Homo sapiens
gtggcatgatctcggctcactgcaagctctgcctcccaggttcacgccattctcctgcctcagcctcccaagtagctgggactacaggtgcccgccaccaygcccagctactttttttgtattttttttagtagtgtcggggtttcaccatgttagccaggatggtctcgatctcctgacctcgtgatccacctgccttgg

SEQ ID NO: 493763 - DNA, 201 bp, Homo sapiens
gcccgccaccacgcccagctactttttttgtattttttttagtagtgtcggggtttcaccatgttagccaggatggtctcgatctcctgacctcgtgatcyacctgccttggcctcccaaagtgctgggattacaggcgtgagccaccacgcccggcctgagtgtgttttaccattacctcttgttttatagattatgaaa

SEQ ID NO: 493764 - DNA, 201 bp, Homo sapiens
ttgacttcttttcttttggatatcttctttgcatttcttgatgaaatgattacagtgggtttcaaccttggctgcacattaaaatcatttggggagtgttaaaaaaaaaatcccaataatgaggatgctctcaagaccaataacattagaaaccaaaggctaggacccaggcgttggagttcccagctctctggaagaatg

SEQ ID NO: 493765 - DNA, 201 bp, Homo sapiens
cttgcagtgagccgagatcgcgccagtgcactccagcctgggcgacagagcgagactctgtctcaaaaaacaaacaaacaaacaaacaaacaaacaaaaamaaccatagcggaaacacttgttttgtctgtggaggaataataacgtcctcacatttggggcaatagaagaaattataaaggagagagctggcagctttga

SEQ ID NO: 493766 - DNA, 201 bp, Homo sapiens
atgaaaatcttagtaagaggtttggatgataatattagctaaaactcctagaaagtaggacaaaaagacaaagaggtagaaaatgaaagaggaaggataaraaaatcggggccagtatgcaagtccaactttcaaataacagattttcatatctttattatgagaaatatcttcatattttctctcttctttcagagaaaa

SEQ ID NO: 493767 - DNA, 201 bp, Homo sapiens
agagccacacctcctccctcccagctcccaccatgattactggcaaccactaatatgatatgcatttctataatttcaagaatgttacataaatggatatmcacacacacacacacacacatatatatatatacacttcccacactacattaatgtatacagtaatacttaataattaatgatatgtgatcttttgggatt

SEQ ID NO: 493768 - DNA, 201 bp, Homo sapiens
tttcatccccttagtctcatttgcagagcaaaggtttttaattcaatgagatccattctatcagcttgccttccttccttccttccttcctccctccctcyctctctctctctctctttttttttttttttcggagtctcccactgtcgcccatgctggagtacagcggcccaatctcggctcactgcagcctccgcctgc

SEQ ID NO: 493769 - DNA, 201 bp, Homo sapiens
caaaaaacaaaaaactatttttcctgaggtttattacttgctcccttctcagtgcttccctaggaggtgaccagaactgcacacagtctgcatttctacgtaacatgagtcctaagagagcaagggcaggctcaacagccagttgaaataaattctgggaaaatgagaggcactgttgttgttttctcacttaagttctat

SEQ ID NO: 493770 - DNA, 201 bp, Homo sapiens
atcaccattctaactggtgtgcatgggatggcattcttttttttattgcacatcactcctttattatactgatctggaaaaaggatttagtacagttatgstcaaatgaacactagacctatgtggcagggccaagcaactgcaacatgattcagaaatcagtgaaaaacacacttggagaggaccaagaggcatttcact

SEQ ID NO: 493771 - DNA, 201 bp, Homo sapiens
aaggtgaaaggatgggaaggaggagagggataaaagactacaaatagggtgcagtgtatactgcttgggtgatgggtgcaccaaaatctcacaactcaccrtgaaagaacttacttatgtaaccaaaaaccacctgttccccaataatttacagaaaaataatcgctgggggacactgtataataataacagtcattttct

SEQ ID NO: 493772 - DNA, 201 bp, Homo sapiens
agggcaagcacatatggcttatcactttctctttttctatgtcagttgcagtttggtactaagaatgcccttagaaaccatgtgctgaagatggcactgcytttgtcagcctgggttcctgaataactgcatggaacagagcctttaccatataccccaaccccaaacaaagaacaccttcattggactattacacaagta

SEQ ID NO: 493773 - DNA, 201 bp, Homo sapiens
atgatgatgacacaatgaataaatcatctgacatgtttaacaccctttaaggtcatatgcttttcactcaaatggatctgaagagaaaaatactccattgkgcacatctgtctcttaagtagcacacattataaaccaaattggaaggatcagttttaaaagaatatagctttaaatctttgcaaatattttaaatgtctt

SEQ ID NO: 493774 - DNA, 201 bp, Homo sapiens
gtgttaagatttgtagtggaacaaaaatgagggcatagttcttgtcctaagatatttatggcctaataagagaaacatgccacacatgaataattaaaatrcaaaacaggatgagagaggtattataatggaggtacaaataacctgctatgggaattcaaggaagagattagttattataagcttgaggtgttgagggag

SEQ ID NO: 493775 - DNA, 201 bp, Homo sapiens
tgaggaaacttggattcagataatttaaacagtttgcttatgagtatacaactataaattgcccactagtgtgtcctattacaaagtctgcctttaaaackaaaatagagaggacccacagaccccctgcaggaagcagattgctcctgaaggacctaggagacaccctaaatactgtgctagcatccacggctgagaaac

SEQ ID NO: 493776 - DNA, 201 bp, Homo sapiens
tatttatccatgaaattttcttccaaagcaattaatttcctagaggtaaaatatctaaataaagaaaaggtctgaagggttaacaaaactgcaattatgcstaaaccatgtcatactagtatttttttgagacagggtcttactctttttactcaggctggagtgtagtggcaggaacatggctcactgcagcctcaaact

SEQ ID NO: 493777 - DNA, 201 bp, Homo sapiens
attcaaaaggtgggatctggaatgaagccaaagcgagggctgaggcagagcctttccgaaggacctgttgatagatgtctagtaggcagtccagcttggaytctatggactgtacctagaagtgaggaaaatggttacacatgagtataatctgttattaagaatggacttcattttttaattttgaaaaatgaagtcaag

SEQ ID NO: 493778 - DNA, 201 bp, Homo sapiens
ttgttttcccttttaatttaattttatttttactgacaggatacacattttgaacattgatgtctgcttgctactcacagatttccttttcccttctttgytgttagtcttttaccatttctttctgttgcagtgtttgttctatcatcttcctctatatttattgtttataatcttcaaagaattgtgaaaccatatagg

SEQ ID NO: 493779 - DNA, 201 bp, Homo sapiens
tattacattggtccgcacaaaatttctctgggctcaataattcttcctccattctattaaaaaagaaacttattcagggtcactgttcaggctgaattgcrtccttccaaaattcatatgttgaagtcctaatccccatgacctcagaatgtgaccttgtttgaaaatagggtccttacagaggtaatcaagttaaaacga

SEQ ID NO: 493780 - DNA, 201 bp, Homo sapiens
ggaggccgaggcgggtggatcacgaggtcaggaaatcgagaccatcctggctaacacggtgaaaccccatctctactaaaaatacaaaaaattagctgggygtggtgacgggcacctgtagtcccagctacttgggaggctgaggcaggagaatggcatgaacccgggaggcagagcttgcagtgagccaaggtcacgcca

SEQ ID NO: 493781 - DNA, 201 bp, Homo sapiens
gccccccggggttcacgccattctcctgcctcagcctcccgagtagctgggactacaggtgcccgccacctcgcccagctaattttttgtaattttagtasagatggcgtttcaccgtgttagccaggatggtctcgatctcctgacctcgtgatccgcctgcctcggcctcccaaagtgctggaattacaggcgtgagcc

SEQ ID NO: 493782 - DNA, 201 bp, Homo sapiens
ataggagtgagtcactgcacccagccacaccacaaaaattgatatgtatttgaagtggtggatatgttaattagcacgatgtaatgattccacattgtgtytgtaaatcatagcatcactttctaccccagaaatatatacaactataatttctcaatttacaatgaaagaaaagtaaaggattagtaaagagaaggttaa

SEQ ID NO: 493783 - DNA, 201 bp, Homo sapiens
gatgaccaaagctaataataatcagtgttcttgaggaagaagagaaatctaaaagtttggaaaacatatttcagggaataacagaggaaaacttccccagyattgctagagacctagacatccaaatacaagaagcacaaagaacacctgggaaattcattgcaaaaagatcatcacctaggcacattgtcatcaggtaat

SEQ ID NO: 493784 - DNA, 201 bp, Homo sapiens
acaaaagtacctggtaacctataaataaaaacctattagattaacagcagatttctcagcagaaaccctataagctagaaggtattggggccttgtcttcrgcctcctcaagcaaaagaattaccagccaagaattttgtatccaacaaaactatgcttcatatatgaaggaaagatacagtctttttcagacagacaaat

SEQ ID NO: 493785 - DNA, 201 bp, Homo sapiens
tggcatgggaagatgacttattcgattgtatctcatcatctctgtattgcagatgcttacaaactgcgtacgtcagtgactcccaggcagaagggcaggtkgctattatcacttaacagtatacagttaacacagtaatatgggccaaatgaagttaaagagccagagctgattttggaaaaaatggattactgttataaa

SEQ ID NO: 493786 - DNA, 201 bp, Homo sapiens
acgctgaatcgagtaaccacaatcatgagtgatgaatattatgacagaagaaatacaaggagcacattgcagggacaattaacttagttaagaggccaggkaagccttctgggagaaacatagatgaagccataatgaacaaccagtctacaagaaagcttcaaaagcccttctaattaaaccacatcctttaggtaccat

SEQ ID NO: 493787 - DNA, 201 bp, Homo sapiens
tatagtggttcccagaggttaggattgaagagagggagtacctgtaaaggaataatacaaagtatatcattccaagtttatttagggtgatggaaaagttytgtattttgattgtggtggtggttaaatgcatatatacatgtgagaaaattttataggagtgtatataaaaattgagcgcatgtaaaaactggtgaaatt

SEQ ID NO: 493788 - DNA, 201 bp, Homo sapiens
atgataagtactccatggatgttagcttttaatattaatcaaatattgcaaaacaggagatagaagacaagaatgttggtgtcatagtccaggtatctgasactctgatattcacctataacacagaagggctttcgagcaaacctcagtcttccttgccatcctctatatcgacaacagcaacccgcagaccagattcga

SEQ ID NO: 493789 - DNA, 201 bp, Homo sapiens
gcaagaacttggaaatgggggcaaactgtaatattttgaacagctgcctttaaagacacaagagaataaaagcatgagaaaggcaggcttcattcactaargagaaaataatcagaagcttgggggcagataaatgtgccctttattctgataagatacagaaactgctcattaaaaaaatcaatgatgatgacacaatga

SEQ ID NO: 493790 - DNA, 201 bp, Homo sapiens
ttactgtgctttaattttccgtgacgcatgacagaacttctctttgtttaaggaaaggaataacctacatacttgttcctcccttataacacagttttccrtcttttctaagtgtatttaaggaaagattatttaagtaagtggataaccatcagtgatacagaaatgatagcaccatggatttaggactggatcagtaca

SEQ ID NO: 493791 - DNA, 201 bp, Homo sapiens
ggatttaaaaaggattagtgacttcttcaatttatttttttaatattttatagactactgtgtacaggtctttcagctccttggttaaatttattcctaartattttaatttttgtagctactgtaaatgggattgctctcttgatttcttttttggaaagtttgttgttagtgtatagaaatgctagtgatttttgtggt

SEQ ID NO: 493792 - DNA, 201 bp, Homo sapiens
gaacacatcacttttatgattctgtttgctaccactaagagttatggagtattgattaaacaccaggcattaagctaagcactttacatgtatcatctcaytgcatcttcttgggcaatcctttgaaaagttacaactaaaattctaagtttaaaattaaggaaatatatgaagagcaaattaaggcaaataataaagcac

SEQ ID NO: 493793 - DNA, 201 bp, Homo sapiens
cttcagatatcaatgtactgctcttgggaacccaccaccaccatgtgaaccagcccagcctgctggaggatgagagaccacatgagcaaagagcagtaatyctaactgagaccaccttagtccagtcagcaccagccaacacagcagctgaacacagagcatgagtcagttcacttaagaccagaagaactgcctaacaga

SEQ ID NO: 493794 - DNA, 201 bp, Homo sapiens
agaggccttcagatatcaatgtactgctcttgggaacccaccaccaccatgtgaaccagcccagcctgctggaggatgagagaccacatgagcaaagagcrgtaattctaactgagaccaccttagtccagtcagcaccagccaacacagcagctgaacacagagcatgagtcagttcacttaagaccagaagaactgcct

SEQ ID NO: 493795 - DNA, 201 bp, Homo sapiens
gaactaggatttaaaacaagttctgttttactccaaaaccatgcactgtgtcggattaattcaattttcataagaatttccttgagaacatactatagtcrtagcactattagtatcccaatagaaaacaaagacataaaactcacagcctggtgaaaacaattttttaaaactcacatacaaaaaccaatttttatggat

SEQ ID NO: 493796 - DNA, 201 bp, Homo sapiens
cctattaggtaggtatcatttctaccaccctaaagagagagagagaacaaattaaagtggcagtgaggttaagtcgtttgtctcatctcacccaacctagwgggggaactaggatttaaaacaagttctgttttactccaaaaccatgcactgtgtcggattaattcaattttcataagaatttccttgagaacatactat

SEQ ID NO: 493797 - DNA, 201 bp, Homo sapiens
aattaataaataataacaatatatttaatatattgagcacctattctgtgctgggcattgtacaagaattttacacacattatatcttattattactcacrtaaccctattaggtaggtatcatttctaccaccctaaagagagagagagaacaaattaaagtggcagtgaggttaagtcgtttgtctcatctcacccaac

SEQ ID NO: 493798 - DNA, 201 bp, Homo sapiens
agtgtgtctcacccactggaatttattcatgccaggaactgtgctctttacttcagcatctgcataatccctggcaagtattagggggttcattaaatgcyagctgaagaaataaatgaggatttgctattccatagttcaaagatgtttgtgttctgtgacaaggcagactcttgtacagatcttctaaaaagaatgcct

SEQ ID NO: 493799 - DNA, 201 bp, Homo sapiens
ctaactttcttcccatttttacagataaggaaaatgagacagttggatgctttgaatgcctgagttatatctatgttaaaagcaaaataaaatcaatgttwaaagcaaattccatttgcccactaaaaatgaatgaaaaatatggagttcagaggtttactctactaaagagaagttcttcctagataggttctatgccca

SEQ ID NO: 493800 - DNA, 201 bp, Homo sapiens
ccattgcttaccgtgtttgaaggcttttaattctacacaacatgtccagatgaccagcagaatattgttcaatgacatcttttacatcatatggacgtaaygtttccttaaacttccgttttgcaacatgaaatttcataattctgtatgagaacatattacatattaatctttataactctgttaatataagttaccaaa

SEQ ID NO: 493801 - DNA, 201 bp, Homo sapiens
gttgagggcaagcacatatggcttatcactttctctttttctatgtcagttgcagtttggtactaagaatgcccttagaaaccatgtgctgaagatggcastgcctttgtcagcctgggttcctgaataactgcatggaacagagcctttaccatataccccaaccccaaacaaagaacaccttcattggactattacaca

SEQ ID NO: 493802 - DNA, 201 bp, Homo sapiens
cagtaaatataataagaaactctggggggaaaagtcatgcatcaaattatttttggcttctgcagatgtgtaatataaaagcctgagattacagtggacawtttaagaacatctcatgtgagacaacaccttaagaatagaaaaacacactaaaaaagaggctgaacactaagtgttttgcctttttaatgtccgttgaaa

SEQ ID NO: 493803 - DNA, 201 bp, Homo sapiens
atcatgttgagggatttactcctgagactagtggtttacaaacagacattacttatatgaccctgttggacatacattttgcttttatttcattgtaatcytgctttctcccaagtgtagaaagaaaagaaaaagatatactacctcatttactatgctaaaatattggaaatactagaaataagtacatggctagtaggg

SEQ ID NO: 493804 - DNA, 201 bp, Homo sapiens
tgcatcaaattatttttggcttctgcagatgtgtaatataaaagcctgagattacagtggacaatttaagaacatctcatgtgagacaacaccttaagaayagaaaaacacactaaaaaagaggctgaacactaagtgttttgcctttttaatgtccgttgaaaccctgaatgtaagttaaagtcaaaatgcaattctaac

SEQ ID NO: 493805 - DNA, 201 bp, Homo sapiens
taaacataatacactttttttttttttttgagatgaggtctcactgtgttgcccaggctctaactcttgggctcaagcaatcctcctgcctcagcctcccyaagtgctgggactacaggcatgagccactgggtcctgccataacacatttcttaactaagcttgggagcctaagcttttcagaaccagggacctcttata

SEQ ID NO: 493806 - DNA, 201 bp, Homo sapiens
gaagctgaaattatggcagcaaatgtacaggagagattgaaataggaagaaatgagaggtgcagagaccagttaagacactatgagagtggagagtaaagrgaaatgtttaggaagttcaatagaaataaatttattgattgaggtaaaaggaaagactaagttaacagtgacttgaaaattttaagtgggaagatggttg

SEQ ID NO: 493807 - DNA, 201 bp, Homo sapiens
taactagttcctgcaataacttgatgcaatttctgatgaaagcagagaaacataacatttgaattagtttgtgtagccttattgcaggtaaatttaaatcygttggtgtttttcagctactaaatggcccatagacttccattatcacacttgtagattccaggctgggaatcagtcactaagagacaaaatttgttgtca

SEQ ID NO: 493808 - DNA, 201 bp, Homo sapiens
tgataagtactccatggatgttagcttttaatattaatcaaatattgcaaaacaggagatagaagacaagaatgttggtgtcatagtccaggtatctgagrctctgatattcacctataacacagaagggctttcgagcaaacctcagtcttccttgccatcctctatatcgacaacagcaacccgcagaccagattcgaa

SEQ ID NO: 493809 - DNA, 201 bp, Homo sapiens
actgagagtagacttgttctcctaatgcttgccattattgtcctttatatgcaggatctagtaggctctcctgcagagtttttgtttttttttaatgtttrtagagatgggtcttgctatgtttcccaggctggtttcaaactcctgggctcaagccatcctcccagctcagcctcccaaagtgttgaaattataggcatg

SEQ ID NO: 493810 - DNA, 201 bp, Homo sapiens
ttagagccacacctcctccctcccagctcccaccatgattactggcaaccactaatatgatatgcatttctataatttcaagaatgttacataaatggathtacacacacacacacacacacatatatatatatacacttcccacactacattaatgtatacagtaatacttaataattaatgatatgtgatcttttggga

SEQ ID NO: 493811 - DNA, 201 bp, Homo sapiens
ggaactaatttctatgagtggataaaaagaaacttaacattgtttgaactgaatcactaaaatatggggcttttgttaaaaataagtacaatcttcactcytaaaggtgagtttgaaaacacatttccagcacatttttgcatttccctgaaataatattttgagaaaaatctatgataattctggaagaaatatacaaaa

SEQ ID NO: 493812 - DNA, 201 bp, Homo sapiens
gttatgaagagactaggagtctaataaacccattgcacaaaactgatatgccccagcagtaccactagagggtgtaaaagattcatcacaaacctaaactrgtacctcctcttgaaactgaagtctgctcatacaattttctgagcatgaagaaataactaaagcaaagtgaaactctgggtagacgacatctatatatac

SEQ ID NO: 493813 - DNA, 201 bp, Homo sapiens
atacagcagcaaagagcaaaagacctctaaggttagtctcctttgatgctgttggttatgaagagactaggagtctaataaacccattgcacaaaactgayatgccccagcagtaccactagagggtgtaaaagattcatcacaaacctaaactagtacctcctcttgaaactgaagtctgctcatacaattttctgagca

SEQ ID NO: 493814 - DNA, 201 bp, Homo sapiens
tgcatcactgggattaatacagcagcaaagagcaaaagacctctaaggttagtctcctttgatgctgttggttatgaagagactaggagtctaataaaccyattgcacaaaactgatatgccccagcagtaccactagagggtgtaaaagattcatcacaaacctaaactagtacctcctcttgaaactgaagtctgctca

SEQ ID NO: 493815 - DNA, 201 bp, Homo sapiens
tgttatttcaatatactcacataatgataagtatgcaaaacagagtagattttaaaactcttaataggtttatcatttatttttatacatcataccactcytcaggtggtattgccttttttccagtgctttacttacagattttcctactttatgtatgagaattaaatagtgaaaattggattaataaatatcatttca

SEQ ID NO: 493816 - DNA, 201 bp, Homo sapiens
gacaaaaatcataactatagagatcttacattaatagaacagattattctatgagcatctattgtacatgtgtgaaagataagcagataagaaagccatgrtctttttctttcggagttcaagttggagaagatacatgagctagaaacccaagattggttctataaattctgtagcagttcaactttataaaaccttggg

SEQ ID NO: 493817 - DNA, 201 bp, Homo sapiens
cttattttgttctggatcttagaggaaaggatttcaatttttcactgtggagtataatgttagttattggcttataatatatgctttttattgtgttgagktacattccttctgtacctaatttgttgaggatttttattatgaaataaaatttgatcaaatgatgtttctgcatctaatgagatgatctgcaataagcca

SEQ ID NO: 493818 - DNA, 201 bp, Homo sapiens
tttgtataagcatataacttttaacgttccatttaccacaggtagaaattgccatcaagtactggaagaagggaagacaaatacatgcaaattaagcaagyccaggatttcaattagtcaaaattaatgcagaaatcagcattaattaattaataaataataacaatatatttaatatattgagcacctattctgtgctgg

SEQ ID NO: 493819 - DNA, 201 bp, Homo sapiens
agccagcacagcactagatcttgctcaagtgggcatccttattttgttctggatcttagaggaaaggatttcaatttttcactgtggagtataatgttagytattggcttataatatatgctttttattgtgttgaggtacattccttctgtacctaatttgttgaggatttttattatgaaataaaatttgatcaaatga

SEQ ID NO: 493820 - DNA, 201 bp, Homo sapiens
tagctgacaccagagagaaaaccctatgccaacactgagaaaagctaagaacaacaagatttacactttggaaaactcaaaaggctcaggaattggcaacrttaggtacttcttgatccaagcataaagaggggataactaagataaggaaggttgcgtgcaatctctcccagactcctgggcatatggtcctctcctatt

SEQ ID NO: 493821 - DNA, 201 bp, Homo sapiens
cagctcccaccatgattactggcaaccactaatatgatatgcatttctataatttcaagaatgttacataaatggatatacacacacacacacacacacayatatatatatacacttcccacactacattaatgtatacagtaatacttaataattaatgatatgtgatcttttgggattggtatattttcacttaacata

SEQ ID NO: 493822 - DNA, 201 bp, Homo sapiens
ttctcaaaaccttaaatatcatcctagatttagagttaccattttagacatgtgctagtccaaagacaattcctttaatccaactagagtttagagtaacygcttgggccctgatgcagtagcacaatttcatttcactaagtccttggctagggacttttcttcctgttccatgttagatgctgctaagtaaccaagaga

SEQ ID NO: 493823 - DNA, 201 bp, Homo sapiens
tagagccacacctcctccctcccagctcccaccatgattactggcaaccactaatatgatatgcatttctataatttcaagaatgttacataaatggatayacacacacacacacacacacatatatatatatacacttcccacactacattaatgtatacagtaatacttaataattaatgatatgtgatcttttgggat

SEQ ID NO: 493824 - DNA, 201 bp, Homo sapiens
cagactgatctcgatctcctgacctcaggtgatctgcgtgccttagcctcccacagtgctgggattacaggcatgagtcactgcgcccaacctcacaattyatttttattttaggaatttaaataaagtatgtgatgattctatttcattatgctatggggaacacatattaaaatggctactattaatggtggtgataac

SEQ ID NO: 493825 - DNA, 201 bp, Homo sapiens
tcatcatcatgccttctgtcatcatgtcatctttttatgtaaaaaaaattggatttttactgtctgaaataatggagtgaatcaagaaagacaaaaacacragatcctgaaagctgagaatccaatctagaagaaaataaaagggaattcaaaagataatggctgtgcagtaggcttagagagcagccagctcaggtaaaa

SEQ ID NO: 493826 - DNA, 201 bp, Homo sapiens
agcaacaggtcctggcccccggtggttcatcctgcctggcctctctctgctcgcctcgcccctgcacccaccacgcttcagggaggcccgagcccccagcyccgtggccccacacgcttccagactcagcgcctgcctccacccaacagatagatggcatttgccttttcctttcaaattgggcttctctgctcctatctc

SEQ ID NO: 493827 - DNA, 201 bp, Homo sapiens
taggtatacttcaaaatcctactgtgaaaaaaacccaaaatttccacataatgtttactttttataaacattttaaatagaatcttcccctattagcccaygaaaatatttaagaggcaaaagaagtttaaagtaaaagaatgagtaacttttatagtagaacttgggaaatatttgttgaataaatatagtatgctgcgt

SEQ ID NO: 493828 - DNA, 201 bp, Homo sapiens
gagatttacttggaacattggctcatgattgctcttcatggttgaaaaaattgctcttctagaccaggcgcagtgactcatgtctgtaatcccagcacttwgggaagccaaggggggggcagatcacctgaggtcgagagttcgagaccagcctgaccaacatggagaaaacctgtctctactaaaaatacaaaattagcc

SEQ ID NO: 493829 - DNA, 201 bp, Homo sapiens
tacttcatcgctcgggacccctatgacctgatgggggctgctctgatgcctgcatgcccagaggcctgggcccttatcctttgtacaccacagagctgacmccagccatcacccatgctgcgttcacctacccagctgccactaccgttgccgccgccctccatgccaggtgcgctggttcccttcctctgacaccaccca

SEQ ID NO: 493830 - DNA, 201 bp, Homo sapiens
tatccaaatcctatctgaaatccatccttgactattctccatcatgactgcccagctcaggccccagcagatccaggtattgtaataatagttctctcttyccaatacattccttacattgcaatcagagtcatctttccaagttttcaaatgaagcactgcgttagtccattcttgcactgctgtaaagaaatacccgag

SEQ ID NO: 493831 - DNA, 201 bp, Homo sapiens
gctcatttcattgcatttctgttttcagtaacaaaatattagaatgaagttaaaattcctgtgatggaggataggtcaaatgaatattggtaggtttatayaatggaatattagacaactttaaaaaatgatgttgaagactaatgactgggaaagtgtcacagtatattgttaaagaaaaaaactctctgcatatctgaa

SEQ ID NO: 493832 - DNA, 201 bp, Homo sapiens
cagttcactgatcagatctgagctattttagaagagttgatgagcctttgctagttacaaagaaattcttgacacttcatctatgttcatattagagtgaragattctggtaatttaaaaaagtgttctatttaccatctggcttcaaacccttttccttctactgaatttttctccgaagtcacagatgacctccttgtt

SEQ ID NO: 493833 - DNA, 201 bp, Homo sapiens
gttcccatctcctgcattacatttttcttcacagggctggtgcacttggcatggtgtggaccccatatcaaatccagaggagatttgattttgagcaatgyggtcaccatggccatgtgctgggccaggccacacccaaaggagccttggaaatatacagaccctggaaattcaagggggttgtgtaagggatgtggaaag

SEQ ID NO: 493834 - DNA, 201 bp, Homo sapiens
acctgaatgtaccaaaaagaactgatgaaacagtattttcactattgctcagttgagctatatttaaaaagctcttcttcagattgatggcttgtattttwttttattttttattttttgagatggagtcttgctctgtcgtccaggctggagtgcagtggtgtgatctcagctcactgcaacctctgcttcccaggttca

SEQ ID NO: 493835 - DNA, 201 bp, Homo sapiens
actattgctcagttgagctatatttaaaaagctcttcttcagattgatggcttgtatttttttttattttttattttttgagatggagtcttgctctgtcrtccaggctggagtgcagtggtgtgatctcagctcactgcaacctctgcttcccaggttcaagtgattctcctgcctcagcttcccaggtagctgggacta

SEQ ID NO: 493836 - DNA, 201 bp, Homo sapiens
ccaatggtatgcattctgctgcatcacaaacctccattaagacggtactgccagggaatgtcatggaggtttcctcagctgatatctcccaagatcagtamgaacaggtggttttttgtgagtcacagtagttaggtgtcccgaatcccatgaagccactaggattaaggttttgttgggctatgaagaaaagcagctggt

SEQ ID NO: 493837 - DNA, 201 bp, Homo sapiens
ttgattctttttaattatttcaatttatttgttaaatttatctgataaaattctgaattcattctctgtgttatgttgagtgtctcatgttttcctggatkatcttgaggttgtggtgtttgtcagtgtctgggcattgaagagttaggtatttattgtagtctttgtaatctgggcttgtttgtagccatcctccttggg

SEQ ID NO: 493838 - DNA, 201 bp, Homo sapiens
tagctccccagcaatggacccaaaccaagaagaaatccctgatttgcctgaaaaagaattgaggaggttaattattaagctaatcagggagcaccagagayatgtgaagcccgatttaaggaaatccaaaaaatgatacaagaagtgaagggagaaatattcaaggaaatagatagcataaataaaaaacagtcaaaactt

SEQ ID NO: 493839 - DNA, 201 bp, Homo sapiens
cccttatagaaatgcaaaatgctctggaaagtctcagcaatagaattgaacaagtagaagaaagaagttcagagctctaagacaaggtctttcagttaacscactccataaagacaaagaaaaaagaataagaaaatacgaacacagcctccaagaagtctgggattatgttagatgaccaaagctaataataatcagtgt

SEQ ID NO: 493840 - DNA, 201 bp, Homo sapiens
tgcagatgtaattatgtaaggttcaaaatgagatcacactggattaggcggggaccctaaatgcagcaaaaatgtctttatgaaacagaaaaggcaaagayatagggacacagagaagatggaagcagagactggagtaatgcatctacaagctaaggaacaccagggattgttggcccccaccaatcgttaggagagagg

SEQ ID NO: 493841 - DNA, 201 bp, Homo sapiens
acttaaggtaaaggtgtggaaaaagacatttttggaatatggacaccaaaagcaaacgggagtacctattcttagacaaacaaactttaaagcaacagcaktttaaaaagacaaagagggcattatataatgataaaaggcctagtccaacaggaaaacatcacaatcctaaacgtatatgcactgaacactggaactatc

SEQ ID NO: 493842 - DNA, 201 bp, Homo sapiens
ttcagctccttggttaaatttattcctaagtattttaatttttgtagctactgtaaatgggattgctctcttgatttcttttttggaaagtttgttgttartgtatagaaatgctagtgatttttgtggtgttgattgtgtctcctgtaactgtactgaatttattagttctagcagtttttttctggaatctttagggtt

SEQ ID NO: 493843 - DNA, 201 bp, Homo sapiens
taaggtaaaggtgtggaaaaagacatttttggaatatggacaccaaaagcaaacgggagtacctattcttagacaaacaaactttaaagcaacagcatttwaaaaagacaaagagggcattatataatgataaaaggcctagtccaacaggaaaacatcacaatcctaaacgtatatgcactgaacactggaactatcaaa

SEQ ID NO: 493844 - DNA, 201 bp, Homo sapiens
agaaaatgcaaattagctcaagaagaaatgaaatgggagatattacaactgacaccacagaaatacaaaagatcattcaaggctactatgaacaccattaygcacataaactggaaaatctagaagagatggataaatttctggaaaaatacaaccctcctactttaaatcaggaagaattagatagcctgaatgaccaat

SEQ ID NO: 493845 - DNA, 201 bp, Homo sapiens
attttccaaatataactttttgttattaacttaaaggttgatctgagtttccattattctttcttttatttgtctattctcctgagcatgttaatgggcawtggaatgctgaaaatatgtgaggagagcagaggagaagaaaacagccccagaagtgaatgggcaaatagacctggaataattgaaaactggctataagtg

SEQ ID NO: 493846 - DNA, 201 bp, Homo sapiens
tctaaaattatgtgaagagggttacatactgtcaatgaatagagtatttctatcttttattatagaatttatcagttaaaaatatgattcatatcatagcrgtcaaaataaatttggtatgataacaccacatcagtcctttagagtttactttctttcgtttgtcatttgtggcttcagcatctgcctgctactttctac

SEQ ID NO: 493847 - DNA, 201 bp, Homo sapiens
aaaaatatttctatattacctaatttctaaaattatgtgaagagggttacatactgtcaatgaatagagtatttctatcttttattatagaatttatcagytaaaaatatgattcatatcatagcagtcaaaataaatttggtatgataacaccacatcagtcctttagagtttactttctttcgtttgtcatttgtggct

SEQ ID NO: 493848 - DNA, 201 bp, Homo sapiens
ggaaagttaggacctatgaacaggaggcaagcaacgtttccactaaatcattattcaacaaatcttgttcgtgctttttattactgtgctttaattttccrtgacgcatgacagaacttctctttgtttaaggaaaggaataacctacatacttgttcctcccttataacacagttttccgtcttttctaagtgtatttaa

SEQ ID NO: 493849 - DNA, 201 bp, Homo sapiens
ctttaagttctaaggtacatgtgcacaatgtgcagatttgttacacatgtatacatgtgccatgttggtgtgctgcacccattaacttgtcatttacattmggtatatctcctaatgctatccctccccccttccccccaccccatgacaggccccagtgtgtgatgttccccaccctgcatccaagtgttctcattgttc

SEQ ID NO: 493850 - DNA, 201 bp, Homo sapiens
aaaaaacatttgaaggtagtcctgcgagtaatgttacttgctctccagaggtctccaatttggaaatacacagggagcctcatgataacaacaactgaagrgtatatgcaagtttgatacaggtaagtaagtctattttaggtcctaatttcccattcaggttagagagcagcaataggtaacataatttagttgatataa

SEQ ID NO: 493851 - DNA, 201 bp, Homo sapiens
cttggcctcccaaagtgctgggattacaggcgtgagccaccacgcccggcctgagtgtgttttaccattacctcttgttttatagattatgaaagtgaggracagaaggctaagaaacttgccgagcgacacctggagaataaatgacagaatgagaactttaaccccagcagttgggttctggagctgtctgaccctgag

SEQ ID NO: 493852 - DNA, 201 bp, Homo sapiens
tttaaagtgtaaaaaaaaaaaccaaataataaagtgtgaaatgaataagtaaataaataaattgactatacatgttgactactttaaaatatttttaacayggaataggagattctatatttttagcaaataatagaaaactcagtttaaattatagccaaagaaaaggtttaatatctcacatgctacaaagtaagtgca

SEQ ID NO: 493853 - DNA, 201 bp, Homo sapiens
gacaggataattttatatctgttgaaatagttttaaaaattgaaaaaaaaaaaaaagagtagccttgatcctagatgtagtaattcattgaaaacaatacyggtaagaagcaggtaagctttgcattgcactgttttaacaaagctctttccccaaatggtgaatcctttacacagtacttatacgttgcattggtgtgca

SEQ ID NO: 493854 - DNA, 201 bp, Homo sapiens
gtgcttagaaacttttaatagcaatttgacaggataattttatatctgttgaaatagttttaaaaattgaaaaaaaaaaaaaagagtagccttgatcctasatgtagtaattcattgaaaacaataccggtaagaagcaggtaagctttgcattgcactgttttaacaaagctctttccccaaatggtgaatcctttacac

SEQ ID NO: 493855 - DNA, 201 bp, Homo sapiens
ttgtgtttacagtatttaaactctgacagttttataatctgcaaagcaagttataaaattatatatctaagattcctctactcttctttcatcttagatcrggttactagacaagaccaaggaaccccaggagtccctggatgcactgatctgtctcattttcttggttttaactcttgatagagaaatgtaaattagctc

SEQ ID NO: 493856 - DNA, 201 bp, Homo sapiens
agtttcatgcaagaagtagttaagaagttctactaatttttcaaaggattaccttagaagagaaagggagtgctgaagtgactgattcatcctttctttcrtgaatattcattaagtacctatgacgagccctttggaggaccagcaaaaggctgaggaataagttacatactcatctgcttcttttcttcatgagggtag

SEQ ID NO: 493857 - DNA, 201 bp, Homo sapiens
tcttttcttttttttttttttgcaatatagttactcagcattccttgacaaatacaaattctcccaaaagggttaaactgggccagctgagcatgcagcarttcatctagtccagatcttgattgcgtgtgtgtgtgtgtgtgtgtgtgtgtgtgtgtgtgtgtgtggtgggaaaggtcatggaaaaggtaaatttaagtt

SEQ ID NO: 493858 - DNA, 201 bp, Homo sapiens
tacaattctgtacagaatacagattggagcaagtcataaaaataattaaaaaatccaattgcatcaataaactaaatgtccttaaagtagcaaatacacaygacaagccaagactcgtgtaatctctctaatatgacctggcttttcaaatcccacccacgttttataactctttgtgttgaacacagcagaattttgtat

SEQ ID NO: 493859 - DNA, 201 bp, Homo sapiens
aagaggaatgaattaatggcatttgcagccacctagatgagattggagactattgttctaagtgaagtaactcaggaatggaaaaccaaacatcctatgtkctcactcataggtgggagctaaactctgaggatgcaaaggcataagaatgtcacaatgaactttggagactcaaggtgaaaggatgggaaggaggagagg

SEQ ID NO: 493860 - DNA, 201 bp, Homo sapiens
agccacctagatgagattggagactattgttctaagtgaagtaactcaggaatggaaaaccaaacatcctatgtgctcactcataggtgggagctaaactmtgaggatgcaaaggcataagaatgtcacaatgaactttggagactcaaggtgaaaggatgggaaggaggagagggataaaagactacaaatagggtgcag

SEQ ID NO: 493861 - DNA, 201 bp, Homo sapiens
ttggcaacaactgaagtgagatgtagagggcaagaactcccaggaatctctgacttgaagggaggctttccaggatgtacttctgcatgtttgtagagagkgtgagactgaagagggaaggggtggcggcttcctgatggggtaaagtacccaagaaggaattcggttaagggcacagttggaggggttagcccaggcagt

SEQ ID NO: 493862 - DNA, 201 bp, Homo sapiens
ccccggcccttctctatttctgcataacactcctccaacataatatgttgggatttctctttcttttgaggttgcatttgatgttattcatacttgatttyacctgatttaaaaaataacgttcaggagagtaaggggtggggagtgagaaccagagtgagtcctccctactgccctgcactcctaggggtggtcctcttt

SEQ ID NO: 493863 - DNA, 201 bp, Homo sapiens
gtaggaagcatttaatatatatttgagttaaaattgcatgagttaagggactggagctggagaaattagaagaggaagtaagcagaacccagggaaatatrtgaaaatctatagaaatccacaggatcagagaccaagtgggaaatccagagttgggatatgtaggccagagcaagatggcaggtctcaatcaatcagaga

SEQ ID NO: 493864 - DNA, 201 bp, Homo sapiens
atcctcccagctcagcctcccaaagtgttgaaattataggcatgagccactgcacctggcccctcctgtagatttttgttggattttcttttaagggtataagagtagtaaaacccaagcaagaacttccagatccgaagaagtctttcctgccaggaatttgtaagcattgatatggcgactaaatttggggattttgtg

SEQ ID NO: 493865 - DNA, 201 bp, Homo sapiens
ttccctaccccaggtggagcgaacaaaagcaagaacttggaaatgggggcaaactgtaatattttgaacagctgcctttaaagacacaagagaataaaagyatgagaaaggcaggcttcattcactaaggagaaaataatcagaagcttgggggcagataaatgtgccctttattctgataagatacagaaactgctcatt

SEQ ID NO: 493866 - DNA, 201 bp, Homo sapiens
gacgttattcactctttctggttttttttggtgtccattaaccatctccgcttccctctctgctcactctctccactacccttctcatactctggtacccrtcattctactctctatctttgtgagtttaactgttaattttttttaattattatactttaagttctagggtacatgtgcacaatgtgcaggtttgttata

SEQ ID NO: 493867 - DNA, 201 bp, Homo sapiens
gtcaaggagcttaccccatattggtatgaggaatggcttatgttctgatgaccacatgtgggactatttcaaccaccacgagaaacccttagaagggttawtgttttgtattatttatatacactatacttttttttttttaaataaaagtaaatgtaacacataaactaaattcaggattgatcccaaccttctagagcc

SEQ ID NO: 493868 - DNA, 201 bp, Homo sapiens
cctcattggtcgtagctcagcatggctcctcctcacaagtccttagtaaacaaagcacttgcaaaaacccaagtcactatctttgaactctcttggataasgggggcttttccacagcttagactgagaacctgtgccctagaagtgctattctgactagaatgtatgaagggagtgggtgcagaagacaaaatggctaaa

SEQ ID NO: 493869 - DNA, 201 bp, Homo sapiens
tgagctgtgtctggagcaagactggatctattttccttaagcacttctgctcccaccgcgttaaccctcctttttattggctcctccttccctaccccagrtggagcgaacaaaagcaagaacttggaaatgggggcaaactgtaatattttgaacagctgcctttaaagacacaagagaataaaagcatgagaaaggcag

SEQ ID NO: 493870 - DNA, 201 bp, Homo sapiens
ctgcaaggcttggagttaccaccgactttgctccataccttagcatgatggcttccaaaaagcagtaaagcctattattggagaagacagacaaacagacwgcattcgtgagggccaaacaaggtattttaagatagatttaactgagaattccactagattcactattgtaacaccagtgcctcacacacagccacattt

SEQ ID NO: 493871 - DNA, 201 bp, Homo sapiens
tattgagtgaatctcttctctgttctgaattgttgagattgccagatgaagttgccttggatacgtaagatttttttttttaattctcctggatttcatcrttttgttccaggaaacatgtatttctagattcatacaggcaaagggaagtaacatttattgagagttctcttcatgacaagcacttgacttacattatta

SEQ ID NO: 493872 - DNA, 201 bp, Homo sapiens
ttcaacagcccagaggttgcctacctccttgttcatagtttttcactgaatcatagaggttgctctacatgtggcctcaggataaatataaacacaaaagytgcaattattttgtgccattattttgggaaaaaacccaagactgcgttgtattgtttctaaaggtattttcctgtagggaatctgattattgagtgaatc

SEQ ID NO: 493873 - DNA, 201 bp, Homo sapiens
aagaagacaataaatcatttcactagcagttaacatacagctggtttatactgtttcattagcagcatgaattatatgaaagaaaacatgctaagcagcawgcatggtagaacataaaaagctttgaacttagacctaagtgcaacttcaaaccccagttttggcatttagactgaattatgtgggcaagttatttacatt

SEQ ID NO: 493874 - DNA, 201 bp, Homo sapiens
catgattactggcaaccactaatatgatatgcatttctataatttcaagaatgttacataaatggatatacacacacacacacacacacatatatatatayacacttcccacactacattaatgtatacagtaatacttaataattaatgatatgtgatcttttgggattggtatattttcacttaacataattctcacaa

SEQ ID NO: 493875 - DNA, 201 bp, Homo sapiens
ggcggcctgtgcagagctgccgctgccccccagaaattgtgaatcctaagcctgacacagtggactccttcctgtttccccttcctcctcttcctcagccyttttctgcacactcaagcctttctccaacgcctcccaggaggatttggggaccttctcgctgaggcgctcagatccagctcggaggatcacttggaccct

SEQ ID NO: 493876 - DNA, 201 bp, Homo sapiens
taagcctgcagggttagggtgcagagtttctggcctgggcagatgcttgatggctgggagaggaggtgggatctgtaaagttgttggggctgctggcttgrgtgccgtatttatttggtttgcaatggtgttggtggctgccactgctgagccatcgctttgactaattggcacctgtgttgcttgactgtgcatagtagg

SEQ ID NO: 493877 - DNA, 201 bp, Homo sapiens
ggaaaataagcataaaagaggattagtgtaagatgaaagctcgtgtgcataaattagtcaaatagaaaatactgatagtctgtgatttatactgcttggargaaaataggccattatggatacaagagactgttagttcaggatagttgtcaaaaccattgcattaaaatgctgcctttttgtcactgttttcagtgatct

SEQ ID NO: 493878 - DNA, 201 bp, Homo sapiens
cgctgaatatagagttaaatatgaagaataaatttctagagtttagatccagtcattctcaataaatccttttgttcttaacattaaagaaaaccctcagrttttgttacaaatagaggatgacaggaatgggtgccctactcagtcagaatcccaggccagaaatctgcacaaacaggttaagtggaagccctaatagga

SEQ ID NO: 493879 - DNA, 201 bp, Homo sapiens
aataatgatgattgatagtaataagagtttttttttttttttagagaaatctaattatgtgccaagaactttaattaattgtatcaaaaccccatgaagcrgttttttttttttattttgagacagagtctcactctgtcacccaggctcaagtgcagtggcatgatctcggctcactgcaagctctgcctcccaggttca

SEQ ID NO: 493880 - DNA, 201 bp, Homo sapiens
tcagagataatcttgaactaatttaataatctcttctgcttgttgttcaattgaaccattaaacaatagattaagaatcaatatgtttctatactggcttaaaaaaaaaaaactgagttgaggataaaaacaagagaactacctgggcaatttccaagtgttttagaatgcattttttttaatgctccctaagcataacac

SEQ ID NO: 493881 - DNA, 201 bp, Homo sapiens
gaggcaattatgattggcccagtaattattggaaagagaattgacatttgggagtgatgctagtatcctgcaaacaatgatatttatgtagataaaaaacmtaaaccttccaaggtgctccatttcttggagaattccatccctttgtcctttgaaaaaattggcagtagcaggttactgcaattaccctaaagatttctg

SEQ ID NO: 493882 - DNA, 201 bp, Homo sapiens
agaacatgtttatgtagcaagcttccataattaacagtgattgcggtgagaaaactcttacacagatacttgttttctattataaaatataatatttcctyaagtgtagcattttcaaatgttccacagttcacctgtacttgtgtccctatgaggtctccattaaacatggaagatcccatgatgatcatatttgctatc

SEQ ID NO: 493883 - DNA, 201 bp, Homo sapiens
aagttccggggtacacgtgcaggatgtgcaggtttgttacataggtaaatgtgtgccatggtggtttgctgcatctatcaacccatcacttaggtattaascccagcgtgtattagctatttttcctaatgctcatttaatcttttaaaagatttttctcaatttttttattgtggtaaaatatatgtaatataaaattta

SEQ ID NO: 493884 - DNA, 201 bp, Homo sapiens
gttttcttccattcctagtttgtggagtatatatatatattttaatcatagaagggtactgaattttttcaaatgttttttctggcttcaattgagataaytatgtggcatcttcccttcattctgttaatgtggcctataacactgatcaatttttgtgtgttgaattattctttcattgaaggactaaatcccctttga

SEQ ID NO: 493885 - DNA, 201 bp, Homo sapiens
aggttaaaagcctactttctacccaaagggaaagcttgcaaatggaacagatctctgatgtgctctttggtctatctgttctctaccttgggctttgaaayggtaaccttaacatgagcaatatgctgctggagcacaatttgtatgcaaatgaattgagagagatttattacagattcaaaatgaggtctccctgatatt

SEQ ID NO: 493886 - DNA, 201 bp, Homo sapiens
aatggtcttttatggaactacatgcatttttgagatacaaatgtgtttgcaaaacactctattctctctagagaaatgtacattaatatggaaatttgtgtttttttttcccataaattattcctgcagaatactgctggattagctagccaagttctttttgttttaaacataatacactttttttttttttttgagatg

SEQ ID NO: 493887 - DNA, 201 bp, Homo sapiens
actgtacattaagttctgacttcattttatgaaaaggaacaaagcagtagttctaccaagcaatgaagcacagagattggaaaatgacccatcaagcactrtggacacaaatgttgccatctacctattacattgacatttacctgaatgaggttggcagctgggttccttcttttctcaaagtgtttctggcggtgttgt

SEQ ID NO: 493888 - DNA, 201 bp, Homo sapiens
aatccaagactgtccaaatccaagactgtacattaagttctgacttcattttatgaaaaggaacaaagcagtagttctaccaagcaatgaagcacagagawtggaaaatgacccatcaagcactatggacacaaatgttgccatctacctattacattgacatttacctgaatgaggttggcagctgggttccttcttttc

SEQ ID NO: 493889 - DNA, 201 bp, Homo sapiens
ccatttgctaaaaatacatgtgtttcagtttgggagaggaggaacaaatccaagactgtccaaatccaagactgtacattaagttctgacttcattttatraaaaggaacaaagcagtagttctaccaagcaatgaagcacagagattggaaaatgacccatcaagcactatggacacaaatgttgccatctacctattac

SEQ ID NO: 493890 - DNA, 201 bp, Homo sapiens
tttctgtgacatgggaaatctttcgtttctttgtctaatgaagtagccactggccacctgtggctatcgaacagttgaaatatgaatggtgcgactgatcmactaaattttaaaatgtatttcattttaattaattcaaatttaaatagcctcagtagcctcaagtagccagtggttatcatattggacagtgcagttcta

SEQ ID NO: 493891 - DNA, 201 bp, Homo sapiens
tcataaagagacccaagaggaacctcgccctttccatcacgtggaagtgggccctctccagacacagaatcttccagcaccatgatcttggacttccagcytccagaactgtgagaagtaaatatttgttgtttataggctgcctagtttatggtatgttttttatagcagtccaaacaaactaagacacaactcttctca

SEQ ID NO: 493892 - DNA, 201 bp, Homo sapiens
agagccctaataaatgggattagtgccctcataaagagacccaagaggaacctcgccctttccatcacgtggaagtgggccctctccagacacagaatctkccagcaccatgatcttggacttccagcttccagaactgtgagaagtaaatatttgttgtttataggctgcctagtttatggtatgttttttatagcagtc

SEQ ID NO: 493893 - DNA, 201 bp, Homo sapiens
actgtcaattaggtaaaggcagacatagatgtctttttttttttttttttttttttgagacagagtctcgccctttcacccaggctggagtgcaatggcaygatctcagctcgtagtaatttctgcctcccaggttcaagcgattctcctgcctcagcctcccgagtagctgggattacaggcacgtgccaccatacctgc

SEQ ID NO: 493894 - DNA, 201 bp, Homo sapiens
ttgttcaacagtcagtgcttaataaaagttagctattgttgttaccacttctactatgacattgtgtgcttagagcttcgcacagtttctgacacagtaawaaatatttgttgaataagaggaggaaggaaagaaagagataaagagaagatctctaacctgagtcatattaagaataaaaccagaagagctaatctaaca

SEQ ID NO: 493895 - DNA, 201 bp, Homo sapiens
gacacagtaaaaaatatttgttgaataagaggaggaaggaaagaaagagataaagagaagatctctaacctgagtcatattaagaataaaaccagaagagytaatctaacagcctagaacccttctttgctgtcttcaaagtagctaatgatgactgggtgggcaggaaaaaaggaaaatcatcttcatatatcccaaggt

SEQ ID NO: 493896 - DNA, 201 bp, Homo sapiens
agagaagatctctaacctgagtcatattaagaataaaaccagaagagctaatctaacagcctagaacccttctttgctgtcttcaaagtagctaatgatgmctgggtgggcaggaaaaaaggaaaatcatcttcatatatcccaaggtggttttgctgttgttgtgtggttgtttgtgttttcataacatctgtctaccac

SEQ ID NO: 493897 - DNA, 201 bp, Homo sapiens
accagaagagctaatctaacagcctagaacccttctttgctgtcttcaaagtagctaatgatgactgggtgggcaggaaaaaaggaaaatcatcttcatayatcccaaggtggttttgctgttgttgtgtggttgtttgtgttttcataacatctgtctaccacttgttatgtgaagtactttgtatgtcttcaatagcac

SEQ ID NO: 493898 - DNA, 201 bp, Homo sapiens
tttgtgtccccccagaatttatatgttaaatccctaaccctcaaagtgatagtattaagaggtgggggctctgggagatggttaggctatgagggcagagycctaataaatgggattagtgccctcataaagagacccaagaggaacctcgccctttccatcacgtggaagtgggccctctccagacacagaatcttccag

SEQ ID NO: 493899 - DNA, 201 bp, Homo sapiens
acattacctcctggttttcccatggcatcaattctggagaattgagaagtctgagtgggatctttggcagttctttctttcctatggtggtagaagaggcrcaagctacagcatacgtcagtgtgttctctctggctgtagctcacacatttgtggtttgggacgcatctgcccagatgtgaacctacatacttccaactg

SEQ ID NO: 493900 - DNA, 201 bp, Homo sapiens
taattggtacactggctgagaggagaaaggaacatgaagggtagtgaagagagaggaattaccatcagtgcctggaacaaaggcactagccttgagggacycccacaatcggaagatattctgcatcttcatctcacccagatcccaccctggtgaaccctaaacatctcctgaacccaggctgtgccagtttttcccata

SEQ ID NO: 493901 - DNA, 201 bp, Homo sapiens
aggacctttgagtaagctgagagggacccgtggactgcggttccagggacttcactgcagggatcctcagatcattgtgattatgacccctggttgttaaytttattcctcgagctttgagggcctgggaaaatacacgttatttaggaaaagggaacagaaggactgatagcctttgtagtttttatgcattaatgggaa

SEQ ID NO: 493902 - DNA, 201 bp, Homo sapiens
gagagggacccgtggactgcggttccagggacttcactgcagggatcctcagatcattgtgattatgacccctggttgttaattttattcctcgagctttsagggcctgggaaaatacacgttatttaggaaaagggaacagaaggactgatagcctttgtagtttttatgcattaatgggaaatgctatttgattttggt

SEQ ID NO: 493903 - DNA, 201 bp, Homo sapiens
actgcagggatcctcagatcattgtgattatgacccctggttgttaattttattcctcgagctttgagggcctgggaaaatacacgttatttaggaaaagrgaacagaaggactgatagcctttgtagtttttatgcattaatgggaaatgctatttgattttggttccttgcccagtataagagatcccagggggcctag

SEQ ID NO: 493904 - DNA, 201 bp, Homo sapiens
tttattttcaagttcaattggaaattattgttgcacagtttagtagtcaataatgacaagttagatcaggagatttcctgcagttattctctatatttctyttgtatggtatggcagccgatagccacctgtagctattgaacacttgagaagtggctagtgccattggcaaacttggtttttaattttaattaatttaaa

SEQ ID NO: 493905 - DNA, 201 bp, Homo sapiens
cgattttacttcattgttacctgcatttgtacaagttcaattactgatcacaatatatgttacataacccagttccataaaataaaattctaggcctccargtaaaactgttcaattagcctgtcctccacagggttacctgtgagggaggccttgcctcattttgactgtagacatataaatgcctctgctccaatgatt

SEQ ID NO: 493906 - DNA, 201 bp, Homo sapiens
tagtggtgactctagatactgtgaaaaattcttttcctctggccaaacagtacaagtagaatttgttttccaaattaaaaatccagattctatgaattttwtatttaaatatgctcagccaacagtaaggaccttacactacaaagttgaatgctttttgaagcacatgttagaagaatatggatccattgcaatatgtaa

SEQ ID NO: 493907 - DNA, 201 bp, Homo sapiens
tggtacactggctgagaggagaaaggaacatgaagggtagtgaagagagaggaattaccatcagtgcctggaacaaaggcactagccttgagggacccccrcaatcggaagatattctgcatcttcatctcacccagatcccaccctggtgaaccctaaacatctcctgaacccaggctgtgccagtttttcccataaaca

SEQ ID NO: 493908 - DNA, 201 bp, Homo sapiens
actaaatatttagtaaataaatgaataatactttgaagaacattggcaacaactgaagtgagatgtagagggcaagaactcccaggaatctctgacttgargggaggctttccaggatgtacttctgcatgtttgtagagagggtgagactgaagagggaaggggtggcggcttcctgatggggtaaagtacccaagaagg

SEQ ID NO: 493909 - DNA, 201 bp, Homo sapiens
taaatttttttcctaaaaccctgaaatgttggttaatttagttctctcaccaaccaaatgatgaagcaatttgggcatctcagttgcccttttaagaagayagtgactctggcctaaaataaatgagacgcttttgggcttgatggtttgtgtgttcagcagaccaagtcaggtttattgggtaagaaggtgaaaggatga

SEQ ID NO: 493910 - DNA, 201 bp, Homo sapiens
ttttatagtagtgcaaatagactaagacaaatagcaactgctcattgaaatttacaccaggtacttaggtgcagcttctgcatatattaattttcatactyagagcaactttacaagttgttagtggtattatgaccaattttcagatgcagaaattaaggcttggagagggtaagtacctcatctgaggccatgaaggtg

SEQ ID NO: 493911 - DNA, 201 bp, Homo sapiens
tccctcattggagaggcctttcctacctatcttcagtagagactctgattactctatattacagctccttgtttcgtaataacattaacgtgagtgatagyctgttgtatttttctttgggtagggattcttatttccttaactagaaagtggaacctcagcttgctctttatttccccaacatctagcataatgcttgcc

SEQ ID NO: 493912 - DNA, 201 bp, Homo sapiens
catccttcaggtcttatccaaaatactccctcattggagaggcctttcctacctatcttcagtagagactctgattactctatattacagctccttgtttygtaataacattaacgtgagtgatagtctgttgtatttttctttgggtagggattcttatttccttaactagaaagtggaacctcagcttgctctttattt

SEQ ID NO: 493913 - DNA, 201 bp, Homo sapiens
agcatggggctgggagctctgctgctttcaagtctgtggattttacttgctagctataaattattagttttttattaaacttcaaggagtctaaccctttsgttagagatggacattttataagcactaagtcagtatttgctacaggtaaggaatggttgcttttcttttctttttatttttagagtagctcaaagatgg

SEQ ID NO: 493914 - DNA, 201 bp, Homo sapiens
tttcccatggcatcaattctggagaattgagaagtctgagtgggatctttggcagttctttctttcctatggtggtagaagaggcgcaagctacagcatamgtcagtgtgttctctctggctgtagctcacacatttgtggtttgggacgcatctgcccagatgtgaacctacatacttccaactgccttttttgccctaa

SEQ ID NO: 493915 - DNA, 201 bp, Homo sapiens
ggaataaaggattcttcttaacagtgcccatggatggtgatacactttcttccttaaatccactctgcccccaccatagggaacaggagtaagggaggaarctgagaagattacgcaacaattcctgactcctaaaacaaaacagaaaacctgtggtagctgtagaagatagcctaaactattttgtaaattaaaaaccta

SEQ ID NO: 493916 - DNA, 201 bp, Homo sapiens
cattattttaatctttaaccccagtctgtggattgtgaggaatgatactgattccatttagttttgtgccagaactgctactaaataggtttgaatctctytaggagcaacagagaataagagaagccaaacattaacacctttttttgtgtgtgtgggtatggtttgtttaacagacttgaaaagactcaactacagtgg

SEQ ID NO: 493917 - DNA, 201 bp, Homo sapiens
tctctgtggtaatcattaggactgtccataatgtccttggttcttgcctgcttctaggcacatggtaaaaggtaaaattgtacttccccattttctttgartttaggcatggctgagtgatttactttggccaatgaaatgtgaagaaaagtagtcttactttaaaattgtgaatgcaaattccaaattttaatccgctgg

SEQ ID NO: 493918 - DNA, 201 bp, Homo sapiens
acggtactgccagggaatgtcatggaggtttcctcagctgatatctcccaagatcagtacgaacaggtggttttttgtgagtcacagtagttaggtgtccygaatcccatgaagccactaggattaaggttttgttgggctatgaagaaaagcagctggtgctctcaaatgtcggatgagcaatttaataacttttgaaca

SEQ ID NO: 493919 - DNA, 201 bp, Homo sapiens
ttcctttttgtgtgtgtgcatatacttaaagtaacatagggctagcaggtcaacatgcctctttacataatccctgcagggaaagaatttgtgatgtaaastgcatcataaaatgcaaaaaaaaggcatcagtcagaagagttgcagttataattctatgtaatttggaaaattctactagtataacacatattaggggaa

SEQ ID NO: 493920 - DNA, 201 bp, Homo sapiens
acaacctctgatgggtgacggcctctatccacagcaggatgaattgccattgcttgaattgatttggaaaatcacttagtataggagggaactgatctgcyacagtaacttgaaaccctcctctactctcctgctcctttatttggttgtagacttattcctacctggcaacacgacacttgatttggagaccatggtagt

SEQ ID NO: 493921 - DNA, 201 bp, Homo sapiens
tgaaccaccacatggggctgcccttcttgtatctcttattggtatctgggttcccatctcctgcattacatttttcttcacagggctggtgcacttggcayggtgtggaccccatatcaaatccagaggagatttgattttgagcaatgtggtcaccatggccatgtgctgggccaggccacacccaaaggagccttggaa

SEQ ID NO: 493922 - DNA, 201 bp, Homo sapiens
ggtccatgcttggcattagggagaaaaataaatataaaatacaactgtttatcttccccaagcctttcctgtttcctattgattagcagtgttaaggattkgctttcaagtactctgttccctgacatttaaaaagagctaagctggctgggtgcggcagctcacgcctgtaatcccagcactttcagaggctgaggcagg

SEQ ID NO: 493923 - DNA, 201 bp, Homo sapiens
gcatggtggtaggcacctgtgatcccagctacttgggaggctgaggcaggagaattgcttgaacgtgggagaaggaggttgcagtgagccaagatcgcacsattgcactctagtctgggtgacaagagtgaaactccatctctaaataaataaataaataaaaataaaataaaaagatctaagccaaattttgaattttga

SEQ ID NO: 493924 - DNA, 201 bp, Homo sapiens
caggtagaaattgccatcaagtactggaagaagggaagacaaatacatgcaaattaagcaagtccaggatttcaattagtcaaaattaatgcagaaatcakcattaattaattaataaataataacaatatatttaatatattgagcacctattctgtgctgggcattgtacaagaattttacacacattatatcttatta

SEQ ID NO: 493925 - DNA, 201 bp, Homo sapiens
taaaagatggggatggggctctttgagtcacttgagtagacctcagcactcagtgggctggagatctggagatgtcacagagaggtggtttcatcttgccaaaaaaaaagattatatgtataggtatatatacatatacatataatgtatgtatgtgtatatgtatatgatatatatatgtgtgtgtatatatatatatat

SEQ ID NO: 493926 - DNA, 201 bp, Homo sapiens
ctttcagttaacccactccataaagacaaagaaaaaagaataagaaaatacgaacacagcctccaagaagtctgggattatgttagatgaccaaagctaakaataatcagtgttcttgaggaagaagagaaatctaaaagtttggaaaacatatttcagggaataacagaggaaaacttccccagtattgctagagaccta

SEQ ID NO: 493927 - DNA, 201 bp, Homo sapiens
tggtttcatcttgccaaaaaaaaagattatatgtataggtatatatacatatacatataatgtatgtatgtgtatatgtatatgatatatatatgtgtgtrtatatatatatatatatatatatatatatatatatatatatatatcactccaaaagaaggaccctagtgaaggggagtgtatcctagactgctgcctgga

SEQ ID NO: 493928 - DNA, 201 bp, Homo sapiens
catataattacacctggcatacataagacaaagtatttttatgtgatcctcaccatcaaagtgtgaattaagattcctgttttgtaggtgagaaaaaaagrgctcagataaatgaagaggtttatacaaagttggtggagttgagacaatatctcagattgcctggctgtcagtcatagaatccctccacggagacttgct

SEQ ID NO: 493929 - DNA, 201 bp, Homo sapiens
ttatctgagtgctggttatgcaggtgtgctcagttctcctaagatatgtgctcttttctgcatgcacattgtacttcaatgaaatttcagaaagtgacataaaaaaactagaaaaatatagtggtagaaactgagggactttttatatttttgaggaaggtttaaatgattgaaccaaagttccttgccttcattacatgg

SEQ ID NO: 493930 - DNA, 201 bp, Homo sapiens
ctctgggctttgtctttaactcttgagtttattagcatggggctgggagctctgctgctttcaagtctgtggattttacttgctagctataaattattagttttttattaaacttcaaggagtctaaccctttcgttagagatggacattttataagcactaagtcagtatttgctacaggtaaggaatggttgcttttct

SEQ ID NO: 493931 - DNA, 201 bp, Homo sapiens
ttatactaatttacattcccaccaacagtgtacaatggttcctttttctccaaatccttgccagaatttgttattgcctgtccttttctccaaatccttgycagcatttgttattgcctgtctccaaatccttgccagcatttgttagtgcctgtcatttactggagtgagatgatatctcattgcagtttgatttgcata

SEQ ID NO: 493932 - DNA, 201 bp, Homo sapiens
atctcttgtcagatggataatttgcaaatattttctcccattctgtgggttgtctcttcattttgttgattgtttcctttgctgtgcagaagctttttcaygtgatgtgatcccatttgttcatttttgccttggttgactgtgcttgtgggatattactcaagaaatccttgccctggagaatttccctcatgttttctt

SEQ ID NO: 493933 - DNA, 201 bp, Homo sapiens
tgcaaatattttctcccattctgtgggttgtctcttcattttgttgattgtttcctttgctgtgcagaagctttttcacgtgatgtgatcccatttgttcrtttttgccttggttgactgtgcttgtgggatattactcaagaaatccttgccctggagaatttccctcatgttttcttgtagtagtttcatagattgagg

SEQ ID NO: 493934 - DNA, 201 bp, Homo sapiens
tgtcctttcctcgttgcatgttcttggtacttttgtcgaaaatgagttcactgtggatgtacggatttgtttctggtttctctcttctgtcccattggtcrgtatatgtttttatgccagtaccattttgttttggttactatatctctgtagtataatttgaagtcaggtaatgtgatttctccagtttttctctttttg

SEQ ID NO: 493935 - DNA, 201 bp, Homo sapiens
gcagtccagcttggattctatggactgtacctagaagtgaggaaaatggttacacatgagtataatctgttattaagaatggacttcattttttaattttraaaaatgaagtcaaggtgtgccaacacatttaaagaaatattgaatataaagtacgatgcagtcttgacccttagtgaatgtaacatttagcaatgatgg

SEQ ID NO: 493936 - DNA, 201 bp, Homo sapiens
acagaattcacaagagtgttttatgctgtccttcaaaacagaggcatatgactgctttccctcatctgaaactgaatgagaggtacttctatcttagtctyttctcatatctcagaaagttggggaacactggagtggttacaagacagatcctgcaagcctatattaataatttctgtatttgaaaacactgtataacca

SEQ ID NO: 493937 - DNA, 201 bp, Homo sapiens
caggaattattaaaatttacagattaaccctgaatattttttttttctctattatactatctttcaattgcaagtctattattttccaaatataacttttwgttattaacttaaaggttgatctgagtttccattattctttcttttatttgtctattctcctgagcatgttaatgggcaatggaatgctgaaaatatgtg

SEQ ID NO: 493938 - DNA, 201 bp, Homo sapiens
tagtgtgtatgcctgtagtcattcaagctactcaggaggctgaagagggagaatagcttcagcccaggagttcaacggtacagttagctatgattgtactrcttcactccagcctgggcaacagagtgagacccactctcttaaaaaaaaaaaagattcccagtacagaattcacaagagtgttttatgctgtccttcaaa

SEQ ID NO: 493939 - DNA, 201 bp, Homo sapiens
taaagagtcattaaattatgaaaacactactgtctgtagtaaagagtatcagatttgtcaggaattattaaaatttacagattaaccctgaatattttttktttctctattatactatctttcaattgcaagtctattattttccaaatataactttttgttattaacttaaaggttgatctgagtttccattattctttc

SEQ ID NO: 493940 - DNA, 201 bp, Homo sapiens
gggagatgcccagatgttagctccccaaaggaaatattgaataacaaactttatcaggagtcccagtacagctgggcatggtggttcattcctttaatccygcactttgggaggctggggcaggaggattgcttaaggccaggagtttgatatgagcctgggcaaccctgtctctacaaataataatattaataaaaataa

SEQ ID NO: 493941 - DNA, 201 bp, Homo sapiens
aggaccttacactacaaagttgaatgctttttgaagcacatgttagaagaatatggatccattgcaatatgtaatgtatgatttctaatgcagtgtgaaaycagggccggggatgaagatatggacacatctcagctttccagggatgctgtgatgtgggtgagcatgagctttgtctatgggctgaattgcatccctcca

SEQ ID NO: 493942 - DNA, 201 bp, Homo sapiens
agtcttattccaatcctctaaattagggtaaaaatattgcatatgaatatgcagagataagaacgatgagaaaacagaagcagcagtgactgctgccaccrccaaacagatggacggacccagccagcagccaaaccatgtgcaagggcggagagggctcagccaactgtgaactgaagaggcagtttgattgactgtcaa

SEQ ID NO: 493943 - DNA, 201 bp, Homo sapiens
gtaaaaagcatagtacctgataggtagtttttttatgctctccctcctcccactttccatcctcaagtaggcttacgcgtctgttgttctcttgtttgtgmccatataactcaatgcttagctctcacttgtaagtgagaacatgtgtatttggttttctgttcctgtgtcagttcgcttaggtgaatggcctccagcctc

SEQ ID NO: 493944 - DNA, 201 bp, Homo sapiens
tacctatgacgagccctttggaggaccagcaaaaggctgaggaataagttacatactcatctgcttcttttcttcatgagggtagattgcatcactgggaytaatacagcagcaaagagcaaaagacctctaaggttagtctcctttgatgctgttggttatgaagagactaggagtctaataaacccattgcacaaaact

SEQ ID NO: 493945 - DNA, 201 bp, Homo sapiens
gcacaatctcggctcactgcaacctccgcctcccgggttcaagcaattctcctgccccagcctcccgagtagctgggattataggtgcccaccaccacacmcggctaatttttaaatatttagtagagacggggtttcaccatgttggccaggctggtctcgaactcctgacctcaggtgatctgcccacctcagcctccc

SEQ ID NO: 493946 - DNA, 201 bp, Homo sapiens
cacttcaatttctagcactgaattctatagcaacataattgttatagctatcatccattagagtttattttaaaatctccctattatttaaagtatatgcmtatatattaaattgggggagtagcttaagctgtgcagttagttaattgtctaaaatattttttgaaacataggaagcttgtttttagtgaagataacaca

SEQ ID NO: 493947 - DNA, 201 bp, Homo sapiens
tatatgctttttattgtgttgaggtacattccttctgtacctaatttgttgaggatttttattatgaaataaaatttgatcaaatgatgtttctgcatctmatgagatgatctgcaataagccaggcacagaaaggtaaatactgcatgttttcactacatggggaatctgaaacaatgaaacccatggtagaagagagta

SEQ ID NO: 493948 - DNA, 201 bp, Homo sapiens
cctgcatactattcttgtagtagtaagtctcccaagatctgatggttttataaatggacattcccctgcacaagtccttttgcatgcccccatgtaagacktgactttgttcctcatttgccttcagccatgattgtgaggcctccccagccatgtggaattgtgagtcaattaaaccgctttcctgtccaaattacccag

SEQ ID NO: 493949 - DNA, 201 bp, Homo sapiens
agcatttaggggaagtttttaaacacagtgccagattctcttgaagtatataggttacagaatcctagtaacacatttagagaaactacagggttcaatgsacatttacttaacagtcttgaaaataacttgggttgcttttaagcaaatggtgtcatcttttaaaactgcactgacattttaaatgtggcaggtgttcct

SEQ ID NO: 493950 - DNA, 201 bp, Homo sapiens
tattgtgtagatttgaagttagtaatatgttataggatacatataggtagtaagtggttactatagtgaagcacattaacatatctatcatctcatatagytacatttttggtgacaagagcaactgaaatctgcttacttaataaaaatctctaatataatttattaactttagttttcatgctgtatattagctctcta

SEQ ID NO: 493951 - DNA, 201 bp, Homo sapiens
tgactttctgtggtgttgattgtaaagtctgctttttttttttttatctctgattttatttggagtgctctttttttttaagtctggccaaagtttgtcarttttgtttgtcttttcaaattgatcatttgtattattttctttgtttcaatttcatttacttctgatctatatgatttcttctaattttgggtttggttt

SEQ ID NO: 493952 - DNA, 201 bp, Homo sapiens
tttaagccttctatgtaaaccacaccaagtggctaatcttttcttacagttttaagccaaataaacaaaacaaggaaaatatagcttagctgtcaaacatratttttttttttaagtcttatagggacatatacatattgtgcactctaatgtggatgtagtctaccttccaaattaggatagattctgggaagagaaacc

SEQ ID NO: 493953 - DNA, 201 bp, Homo sapiens
catgtactaaaattatgctttggagtttaattcaagtaaaacatggagatttgcttgataatagacctaaatgctggtgttaatttcaagggagtaatatggggggggggggtcacaatatttattatattaataagttttttgggggaatttgttagtcatattaattctttttaagtgcacaattcagtgctttttagt

SEQ ID NO: 493954 - DNA, 201 bp, Homo sapiens
gtcttaacacagaatatcataaaaggcttttgatcaccattgacttctggagttttattgaaagtgagtgggcctggcttatgccttgtaatcccagcackttggtaggctgacctgggaggatcccttgaggccaggagttcaagaccaacctgagccacatagcaagaacctgtctctacaaaaatgtttttaaaatta

SEQ ID NO: 493955 - DNA, 201 bp, Homo sapiens
tgaatgcagtgacagctgtgatctgatcagcccagaaggagtagtacagtcggcacctcccccattaatatgggtcaaagggctgggcgcggtggctcacrcctgtaatcccagcactttgggaggccgaggcgggcggatcacgaggtcatgagatcgagaacatcctggctaacatggtgaaaccccatctctactaaa

SEQ ID NO: 493956 - DNA, 201 bp, Homo sapiens
tttgtgggtaaaaacatttaatttcatgtcctgctttttaacctactgttaggtaccactttcccattctcacaatgcatcttaataactatcattataartgattgtaaaatgttctgtgcagtgaacatatgttattcccctatgtgaagaacatatttatacatgtttcttgtatatagtattatctctctcttgtat

SEQ ID NO: 493957 - DNA, 201 bp, Homo sapiens
gtttatagtcacttttttgtggtgtggtaaaaagaacatggacttggaatcagatagactttgatttaaatcctggctctagcactgagagcactgtaactttttttttttttttttttgagacagggtcttgctctgtcacgcaggctggaatgcagtggtgcgatcatatgagctctataattttaagcaagttactta

SEQ ID NO: 493958 - DNA, 201 bp, Homo sapiens
tggcttgtgcctgtagtcctagctactcaggagatttaggtgggaggattgcttgagcccaagagttcaaggttgcagtgagctatgatcgtgtcactgcrctctagcctgggcaacagagcaagacctcgtctggaaaacaaaaaaaattccttgttagcaatttgaaactataatcaagagatgaaaagggggtgtctt

SEQ ID NO: 493959 - DNA, 201 bp, Homo sapiens
agttctgtatgtggtcttatttttcagtaggtttacctgctagaccaaaaagtcctttagatcctaagaaggatggagagtccctttcatattctatgttrcctttgagtgatggtccagaaggctcaagcagtcgtcctcaggtaagcagtgtgaaatattggagtaggagaatttgaattttagacaaaacaatttaac

SEQ ID NO: 493960 - DNA, 201 bp, Homo sapiens
ttcagctgttttattgtgtcttcatcctgttctgatacgagtaacctgagaaatcctataactcaacctgatttgtaccttgagatctcaacacttagacrtttttctcatggcattcatggttttcaagaactcctaggaggggacatcaaataaaagccttctttgttttaaactctgtggtagacctttttttgtgtt

SEQ ID NO: 493961 - DNA, 201 bp, Homo sapiens
ggtattacagttacccgacactctgcctggctaatttttgtttttttagtagagacggggtttcactatgttggctagactggtctcgaggtctgacctcrtgatctgcccacctcagcctcccatagtgctgggattacaggcatgagccactgcgcctggcctctgtaccattgttaactgtatggtgttctgagtgat

SEQ ID NO: 493962 - DNA, 201 bp, Homo sapiens
tttcagatttagtacgtcaggagaccacactttgagtagcactacttgggtatagtcaggacttctgcattaaaaaacaaaatgaacagacaaaaaccctrcaagtgattctgttacatatcctagatgagagaacctttgatcaatagttctcaatacagtatatggttctgggcatagcagcagagcatcacttgggaa

SEQ ID NO: 493963 - DNA, 201 bp, Homo sapiens
ggagtgcaatggcacgatctaggctcaccgcaacctccgcctcccaggttcaagtgattctcctgcctcagcctcccgagtagctgggattacaggcatgygccactgcgcctggctaattttgtatttttagtagatacaggatttctccatgtcggtcaggctggtcttgaactcccgacctcaggtgatccacccacc

SEQ ID NO: 493964 - DNA, 201 bp, Homo sapiens
tttttgtcaaaaataaaattataagtagtgaaacttatgtcctttcatgtctcactaacctgaactaaatgtgactcataaatttggctctaaagaattckagcagaacaactccataggcattttgcatacgcaccatatagcatgtaacacttagtggactgttaatttaaccatcttttttcctagattgtgagattg

SEQ ID NO: 493965 - DNA, 201 bp, Homo sapiens
ttttttgtagagatggggtctctctttgttgcccaggctggtcgtgaactcctgggcccaagctattctcctccctcagcctcctaaagtgctgggtttayagggatgagccaccatgctcagcaagaacattatcattttagtgcttacatttaggtctttggttcatcctaagttaatttttgtatatggtgtgaggta

SEQ ID NO: 493966 - DNA, 201 bp, Homo sapiens
ccggctaattttgtatttttagtagagatggggtttctccatgttggtcaggctggtctcaagctcccgacctcaggtgatccgcccaccttggcctcccaaagtgttgggattacaggcatgagccaccatgcccggccaggaaaagttttttatagttatcttcatatttaccatttctggtgctctatattcctttgg

SEQ ID NO: 493967 - DNA, 201 bp, Homo sapiens
aagaagaaagaaggcttttgattagggagataacattaaataatgagaaatacccaaattctgttttacttttaagtgtaggagaagggttttcatactgsaagggagacggttaaaaaaaagctgtctaaagacaaagttttattccttggtatgttacatgataaaaagcatctactttcattaaagaaatttagagct

SEQ ID NO: 493968 - DNA, 201 bp, Homo sapiens
tgcagtcccactactgatcagcatggaagtttagacctgctctgtttctgaccttggcccattctgccgtccttaggcgacctggtcataccctgctcccyggagatcaccatattgatgccgaacttaatgcagacacctgattgacatagtgcactacaacttagaactcctggactcaagcgatcctcctccctcagc

SEQ ID NO: 493969 - DNA, 201 bp, Homo sapiens
aaaccagtctggccaacacagtgaaaccccatctctactaaaaatagaaaaaattagctgggcgtggtggtgcacacctgtaatcccagctactcaggagsctgaggcatgagaatcacttgaacccgggaggcggaggtttcagtgagccgagatcataccgctgcactccagcctggacgacaaagtgagactgtctgg

SEQ ID NO: 493970 - DNA, 201 bp, Homo sapiens
gaaaatgttttagtcagaggctagcaggaacttcactctgaatttctcttgtattgagtatttgataattcagtgctcatggcaactttatgagaatcaaytatatatgatctgttatggcacttagggattttgaaatactgaaactagcttgggaactgctttacctgtcctgtagattcttagaggtgacggagagtc

SEQ ID NO: 493971 - DNA, 201 bp, Homo sapiens
aggctgaggcaggagaatcacttgaatccaggaggcagaggctgcattgagtcgagatcgcaccgttgcactccagcctgggcaacaagagcaaaacgccrtctcaaaaagaaaaaaaaaaaaaagaaagttatttctgtctttgaccatatctttatgctttttacaactgacgttgaatgtctctttcttataaaatca

SEQ ID NO: 493972 - DNA, 201 bp, Homo sapiens
agacatgcgccaccatacccggctaattttgtatttttagtagagatggggtttctccatgttggtcaggctggtctcaagctcccgacctcaggtgatcygcccaccttggcctcccaaagtgttgggattacaggcatgagccaccatgcccggccaggaaaagttttttatagttatcttcatatttaccatttctgg

SEQ ID NO: 493973 - DNA, 201 bp, Homo sapiens
atttctgtgattcttgttcagactggtaagtgttttcttcattgtcagtcttcaacttagacaagaaaagagcttctcagccattagtgaatttgatttcyaaacatagaaaatattaatacccacacttagtgaattaaattttgttgttctaggcaattaatttttttctgtaatcataccacatgtcaagtaactttc

SEQ ID NO: 493974 - DNA, 201 bp, Homo sapiens
ggtttgaggaattagatcttgggaattaatataacaattattagcattttgatatatttcttccattattttaatgtatattttttatgtatttgtgggtraaaacatttaatttcatgtcctgctttttaacctactgttaggtaccactttcccattctcacaatgcatcttaataactatcattataaatgattgtaa

SEQ ID NO: 493975 - DNA, 201 bp, Homo sapiens
cattgcttccttaaccagtatttggatagttttaactatggtattaactctctgtttctcaaccatagtcatcatacagtggtctgaggtacctttcaagyagatgattacaaataacaaaacacccaagttggagatgatttacttttaaaaatttttaaataaatttaagctgattgaagattatcccttccaatgttc

SEQ ID NO: 493976 - DNA, 201 bp, Homo sapiens
ctccctttttttttcaatggggtataaatgaagtgactgattatgttggaattttttactcaggaggcattgtgaaattccttgacttccttttcctgatygtcttttaaagtgtgtgttcatttacttttgtctatctgtctgtctgtctgtctgactgtccgcttatctgcctgcctacctacctacctacctacctac

SEQ ID NO: 493977 - DNA, 201 bp, Homo sapiens
acagggttatttcctgagataatttgtaaataagttcatttttattccttaacaatatttggcagaaatataattttgtactctaagcttctttattgtaktcttaagaaacattttgcaatgcagctaaaatgaggaaaacaactgctttagtctataatattttgctaagcttggcaaaacaatgttgagacttggttg

SEQ ID NO: 493978 - DNA, 201 bp, Homo sapiens
tattgtctatacagtttcatgttttacacattaaaaaaaaattttttttaaccgagctttggaagcttgttttaatttgccaattgttttaaatattttgrgtttcccaccaaatatagcacaacctgtgtagatttgtagagttcatcctataactgtggaatattggaaccttacattaacctgtgtttaatgtaagag

SEQ ID NO: 493979 - DNA, 201 bp, Homo sapiens
ggcctgtcaaggcaagttcataccatcctatacttatctggttgttttgtaattcaatgccatattttttgtttatgtagttaaatgttatcttgttgttrgtctagttttctagcttgcctgttatttcttaatcctgatttttttaatctatagtatttgctatccttctcagcttcatgttcataaatttggcaagtt

SEQ ID NO: 493980 - DNA, 201 bp, Homo sapiens
ctcatctctacttaaaaaaaaaaaaaattagctgggcatggtggtgcatgcctgtaatctcagctactcaggaggctgaggcaggataattgcctgaaccygggaggcagaggttgccaggagctgggattgcaccactgcactccagcctgggcaacaagggcaaaaactccagctccaaaaaaataaattaaaaaatgc

SEQ ID NO: 493981 - DNA, 201 bp, Homo sapiens
gtgaagatggtacttgaagtatggataaaaattggccagatgaagagtggtggtggagtacttaaaaaaagtacaatttggctaggtgtggtggctcacarctgtaatcctagtactgttggaagctgaggcaggaggatcgcttgagcctgggagttcaagaccagcctgggcaacatagtgagaccccatctctacaaa

SEQ ID NO: 493982 - DNA, 201 bp, Homo sapiens
ttttgaaagagaatttaaaaatcgtaaaagacatactagaagagttaagctagtttttgataaaggtaagaaatcatatgataagaatttaagtagaaaamtatctggcaatgttttgctttaacagttctgtatgtggtcttatttttcagtaggtttacctgctagaccaaaaagtcctttagatcctaagaaggatgg

SEQ ID NO: 493983 - DNA, 201 bp, Homo sapiens
ttgatttgaaagtagataaatactgtgtgggatttggaacctttagaacaagaaatttatctagtaacatattcccctgtatattgatttacagtatattwaacttattaaaatttattttttctcaaagcttaaaaaagtgatatatagtgttaggattattggaactttatttcttttcatgtttcacatttttgcact

SEQ ID NO: 493984 - DNA, 201 bp, Homo sapiens
aattagctgggtgtggtgacgggcacctgtagtcccagctacttgggaggctggggcaggagaatggtgtgaacccagaaggcagagtttgcagtgagccragatcgcgccactgcgctccagcctgggtgacagagtgaaactctgtctcaaaaaaagaaaaaaaagaaaaactgaggataacacttagatttctgactt

SEQ ID NO: 493985 - DNA, 201 bp, Homo sapiens
tgtttacttgatataaaataaacatagcacttaatacctaatgtagcaggaggaatgggtggggtagggcttgtctggtccgggattgggaatttacagarcatggatcagagaattggggatgcttttaggaaataagtgagcacgggatcagtcataaggtagcaaagaaaagaaatggaacctgggtggcagagcaca

SEQ ID NO: 493986 - DNA, 201 bp, Homo sapiens
tacagtggattgtttcatagaataggtaatctaaaattctggagtagggaaatatcaagggaatcttgatctgactggttgtcaggggtttttttctagakgattgtgaaatttttattctgttagctataatatagttgcatttagctttctattttaagagagaaaactcaagaattctgtggcatatatttagaaaag

SEQ ID NO: 493987 - DNA, 201 bp, Homo sapiens
tccaatgttcctctcactcacccatatcttgatattgagtggatggaattttacctagtttgctagaaattgtctctaacacataaccatttgtgtgttayattactgtcctgtgcatggagagagaagagaagatgtctgtgtgcacatcatgtgtttccttgtggaaaataaaaaagatcgtggaacagtataacttaa

SEQ ID NO: 493988 - DNA, 201 bp, Homo sapiens
ttgatgtcgagaatttgggaagtcctctaggacaagagtacgagatgatattataaattctgttatgagaaatgctatcaagggcaacctttatcaccgcaaaaaaaaaaaaaaatactcccttagagcaatgtctagaaaagagcaagtcacattttgactcagttcaaactaatattgagttgtaaggatttggtatat

SEQ ID NO: 493989 - DNA, 201 bp, Homo sapiens
atattaatcagtgttttcatattttatttaacttttgtattaatcagtgttttcatattttaatcagtggaatggtgaaaaattaagataggcctcactawacgtgatttttttttttttttttttttttcaagacagggccttgctcccatcacccaggctgaagggcagtcacatcactacacccttgacttcccaggc

SEQ ID NO: 493990 - DNA, 201 bp, Homo sapiens
atcagtgttttcatattttatttaacttttgtattaatcagtgttttcatattttaatcagtggaatggtgaaaaattaagataggcctcactatacgtgwtttttttttttttttttttttttcaagacagggccttgctcccatcacccaggctgaagggcagtcacatcactacacccttgacttcccaggctcaagt

SEQ ID NO: 493991 - DNA, 201 bp, Homo sapiens
cattttttttttctgtagagacagggtcttgccaagttacccaagctggtctcgaactcctggcctcaaagtgatccttctgcctcggtctcttaaagagmtgagatgaccagcgtgagccattgtgcccagcccgaacactaaagttttagaagaaactgatgtagttttttcaaagtatgatcatcactgggagcccat

SEQ ID NO: 493992 - DNA, 201 bp, Homo sapiens
ggtcccaggcacagaagctttttttcctgtggagtttgggtcagcaaccctcatagctcgtagatgtgttcaccaatctagtagctctctaaactttgtctttttaggggtttttcaaaatggagcttcatttctcaggcatgcatgattattaactcaatctccagctcttctaacctccccagagcacacaagggttgg

SEQ ID NO: 493993 - DNA, 201 bp, Homo sapiens
tacagtttagaattgttttttggctaatggctagggttgttagtgggtgaagtttgaggcacatctttgtctcatatggctattaaccccacagctatacrtttaacagtttataaaaagctttgggaaatctatttatttcaagcatccagatttttctgcatctttaggactatgagaagatacaggagacaagaagga

SEQ ID NO: 493994 - DNA, 201 bp, Homo sapiens
cttatgcttccattagtggtaaagtagatagtctttgacttgtgtataaggggtgtgtatgtattttaatgattttgaaagctggtttgaggaattagatyttgggaattaatataacaattattagcattttgatatatttcttccattattttaatgtatattttttatgtatttgtgggtaaaaacatttaatttcat

SEQ ID NO: 493995 - DNA, 201 bp, Homo sapiens
ggtttaattctgtttgtttagtttttctaagttagatttaaataaatttaagtttttacctcatctggcattggtgtgaaatgagaatctaaatgttttcytccaaattggtaattttctcaactctgttaaataatgctttatttaattttttaatttttctcatttttttgttatgcttcatttttacattttaatcat

SEQ ID NO: 493996 - DNA, 201 bp, Homo sapiens
aaaacaatgttttataattccttttcttgtcagccagaatttgaaataagatttttccataccacataatttggttgcattaaatgaaaatttcccccttyttgaacagagataaaatgtgaaactacttaaaagtactatgctggccacagtggctcatgcctgtaatcccaacactttgggaagctgaggtggaaggat

SEQ ID NO: 493997 - DNA, 201 bp, Homo sapiens
agaatttgacaatcctagcactagggctttgttctagttattgagtgaaataaaagcatttttagggtacagaagaaatggaaagaaccttaatcttttadattaatcagtgttttcatattttatttaacttttgtattaatcagtgttttcatattttaatcagtggaatggtgaaaaattaagataggcctcactata

SEQ ID NO: 493998 - DNA, 201 bp, Homo sapiens
cctcaagcagtgattcccattctaatttttatgataccatgtagtatcttcagttatttcaaagcatgttgtgagcctccccaccaagaaaaagattccartttaagtttaagccactttactttcaaaatacttaacatttatgaacagtacaacttttatatttatgaacagtacaacattgtggtgtgtagattataa

SEQ ID NO: 493999 - DNA, 201 bp, Homo sapiens
atgtggccagaggagactaataatttgtgcaggaccctctcaggcaagattttctgtggtgtgctgtgattgaattttcacatgtctactaatcttgggarttggattatagacattgtacatatgttgctgagggtcaggattttgttttctttccttaaaaaatgttgacatttgttctgacaggcagttaatttgggg

SEQ ID NO: 494000 - DNA, 201 bp, Homo sapiens
cggaactggtggcatgattgcactatgtcttaatgtttaaccagaaataaatggcaataaatttgctaacataaaaaggtaaattttaaattaatcagacrggatctcttaaattgtgatatttcaactggtgcaatcttaaatatgtaccttaactaaatactttctcatttgctgttccaagataaagcaatagtggct

SEQ ID NO: 494001 - DNA, 201 bp, Homo sapiens
acttgaagtcaggagttcaagaccaacctggccaacatggtgaaaccctactaaaaatacaaaaattagccgggtgtgatggcgtgtgcatatataatccyagctactcgggaggctgaggcaggagaattgcttgaacccaggaggcagaggttgcattgagccaggatcatgccactgcactccaggctgggcaacaga

SEQ ID NO: 494002 - DNA, 201 bp, Homo sapiens
tgttttcatttttatgagcactttctgtttcttgaaccttactatgctatgggacagcattaaagatgtagaaaaatggctttcctcttaaaaaatcacasaatataataaaataagacattcattttaagaactaaagggataggtgtacctaaaaatttttgccttcaggcagtatactgtttagtgacctagggaaca

SEQ ID NO: 494003 - DNA, 201 bp, Homo sapiens
aggcaggagaattgcctgaacccgggaggcagagcttgcagggagccgagatcacaccactgcccactccagtctgggcaacagagcgagactctgtctcaaaaaaaaaaaaaaaaaaaaaagggtcaaagttggagttgatttttaaacattcattgtggagaatttaaaacataaaaaactagatggactagtatggtg

SEQ ID NO: 494004 - DNA, 201 bp, Homo sapiens
cctgtaatcccagcactttgggaggctgaggtgggcagatcacctgaggtcaggagttcaagaccagcctggccaacatggtaaaacctcatctctacttaaaaaaaaaaaaaattagctgggcatggtggtgcatgcctgtaatctcagctactcaggaggctgaggcaggataattgcctgaacccgggaggcagaggt

SEQ ID NO: 494005 - DNA, 201 bp, Homo sapiens
gctgaggtgggagaatcacttgagcttgggaggtcaagtctgcagagagccccaccattgcactccagcctgggtgacagagtgaaaccctctctcaaaawaataataataataataaaataataaaaataaaaataaaataacaggaaaaagtgggagataagatagatgaagtgtgaaattgtgaagaatcttttattc

SEQ ID NO: 494006 - DNA, 201 bp, Homo sapiens
ctttaatgttttctgtttacagatttttctggttacaataatgctagtaagaaaagccagatttaagtaactttgagtgtgaaaaaataataaatatttgaaaaaaaaaaaagtgtgtcctgtgcttgaagaacacctacagagaactgaagatgaacaattcgatgtgatgtaatttccttctgtcttgggttatggtga

SEQ ID NO: 494007 - DNA, 201 bp, Homo sapiens
cataagaattcagtgcagccagcatttgactgccaagagtatgataaatgctggggatacaaatataagctagatattaaacatgtggtccattttaccgytgttggggtatttcccctacatttaaaaaaaattttttaaagctagttatgctttaaaaacgcagaaaacagaaaaagcaacaacataagagtatgctaa

SEQ ID NO: 494008 - DNA, 201 bp, Homo sapiens
gaataatttttgtttggcctagattttaaaatatatgtgtatttggtggcagtttattgttaattctagattcatgatgagtattgaattcttagcattcrttagatactcatgtacgttttaatttttaaaaacgactcaggtattgtatgtcatctcattgtgttaagagacttgtcatgtttccttaggttgccagcc

SEQ ID NO: 494009 - DNA, 201 bp, Homo sapiens
ccctcctcagcctcccaaagtgcagggatcacaggcgtgagccaccctgcctggccgtaaagtgcaactttcttctcaggagttctccttttgtattttcytctcatttcactttcttaattttaaggaaagtcatagtgaaagatttatgactgtattcctgcacataatttttctttcatataagtcctatggttatga

SEQ ID NO: 494010 - DNA, 201 bp, Homo sapiens
ttttatatttttgattcttgtaatgatttttcactgaaccaattaaaaatttgttttcttacttagtcttcaacaagcagacgacagcaccctcttaatargcatctctttaagccttccactttcatgacttcacatgaaccgccagtgtatatggatgaagatgatgaccgatcttgttttcatagccacatgaacact

SEQ ID NO: 494011 - DNA, 201 bp, Homo sapiens
ggtgaatgtcagtgaggaagggccacttaattctgcagtagttgaagaaatcacaggctatttggctgtcaatggtgttgatgacagtgattcagctgttrtaaactgtgatgactgtcagcctgatgggaacactaaacaaaatagcattggttcctatgtgttacaggaaaaatcagtagctgaaaatggggatacgga

SEQ ID NO: 494012 - DNA, 201 bp, Homo sapiens
tacctaaataacaggctttctaaaagaaaataatgtttatttgggaatagggctttgcagtgggaattctgttgttacagtaaaccatgtgcatatacagrgaggtaaaagaagaccaaagtttttaaaggaaaaatgaggaggatttcataattattttgagataattattcttggctacaagggtcaataaagtgcctc

SEQ ID NO: 494013 - DNA, 201 bp, Homo sapiens
aggtgcgtaccaccacacgtggctaatttttatattttcttgtagagatggggttttgtcatgttgcccaggctggtctcaaactcctgggctcaagccawccgcccaccttggcctcccaaagtgctgggattgcaggtgtgaggcaccatgcctggactttttttttttttttttaacttaaatttaaatttaaatttt

SEQ ID NO: 494014 - DNA, 201 bp, Homo sapiens
aaaaaaacagtgttactgtgttgcccaggctagatgtaaactcctgggttcaagcaatcttcctgcttcttgggtagctgggattataggtgtgtatgtaycatgcacctggcttgtttttgtttcacgttttgtataaggttgtagtttttgcagagtcttttgtgatagtttttatcatgcatacccgcatgacagccc

SEQ ID NO: 494015 - DNA, 201 bp, Homo sapiens
gtaaaacatggagatttgcttgataatagacctaaatgctggtgttaatttcaagggagtaatatggggggggggggtcacaatatttattatattaatargttttttgggggaatttgttagtcatattaattctttttaagtgcacaattcagtgctttttagtaaaattacagtgccatgcaactattacctcaatcc

SEQ ID NO: 494016 - DNA, 201 bp, Homo sapiens
gctaggaaatgttctttcattcacttaatggaccattcacaatctatgtaatgtatgaagaggaaatggggagaagagaaagagaagataagagaaacttratatctatagttccatgatgatactgacaacctcagagttcttgtctgtggtggttatttggattctggaaaactactgtgtgtttctgttgtcttgatc

SEQ ID NO: 494017 - DNA, 201 bp, Homo sapiens
tggcctgttccctcacttctgtggttcaaatgttacctcagctagaaaggttttccctgagggagtttttaagggacatcatttacatagacttcaatgtkaatggtgctctttggtgtgaacctcattttactacctaaaatagtatcttcttccttcactttccctggtttttcttaatagtaatgatcatacctgatg

SEQ ID NO: 494018 - DNA, 201 bp, Homo sapiens
aaacaacttgtaagttctgtctgaaactacaggcagaaacctatagtgtgagctgcttaaaagtgtggaattaaaaaaatatggaattcagatagaaaaarttacatgagtaaaattttgttcaattaatgttaaggcactgtatgtactaagagaataaaaaatgtattgctctattccttcgaggagcctataattgaa

SEQ ID NO: 494019 - DNA, 201 bp, Homo sapiens
gaaatttttcctaccatgaggatttctaattacgtaacccccaaaggtgggagagagtattacattttgaaatgaaatgtgaatgtatttatttagaaatycaatatttaaaattaaatacatattttcttaaatttggtcttgggtatggcttagaaaaagctggaacagctactcatcaaataccctcctgaagaagta

SEQ ID NO: 494020 - DNA, 201 bp, Homo sapiens
tatgaggtatttagagtagttaaaatcatagaaacagaaagtagaaaggtagttgccagaggctagaggtgggggatatgcggagttaatgtttaaggagygtagagtttcagttttacaaaatggagttttggagatggatggtagtgatgattgcattatgaatgtattggattacactgaaccatacacttaaaaatg

SEQ ID NO: 494021 - DNA, 201 bp, Homo sapiens
tgtaatacacagactaaaatgcatccactaccatgtaatgatgtgtgtctttttttctttacagtctacatgaaacagatattcacaaggaagatcaccarttagaacctatttataggtcagagacattcttagacagagactactgtgtgtctcagggcaccagttacaattaccttgacccaaactactttccagcaa

SEQ ID NO: 494022 - DNA, 201 bp, Homo sapiens
tttacagtatattaaacttattaaaatttattttttctcaaagcttaaaaaagtgatatatagtgttaggattattggaactttatttcttttcatgtttyacatttttgcactgagtttgtcttgtaatataattagaaaatatttaaataatgaaaaacaaaatttagtctcataaagatattataggggatttaaaaa

SEQ ID NO: 494023 - DNA, 201 bp, Homo sapiens
aaataatgaaaaacaaaatttagtctcataaagatattataggggatttaaaaagaaaccaactttagttttcttgtgctgatgaggaaacagaactaagytacagaatcaagagacgttaatgggggtcttagcccttagctgggtaatcatgaaggagtcaatctctttgaacttcattttttcaattgtgagatgaag

SEQ ID NO: 494024 - DNA, 201 bp, Homo sapiens
cttgaaccttactatgctatgggacagcattaaagatgtagaaaaatggctttcctcttaaaaaatcacacaatataataaaataagacattcattttaaraactaaagggataggtgtacctaaaaatttttgccttcaggcagtatactgtttagtgacctagggaacagccagtctcttcataaaccagccataatat

SEQ ID NO: 494025 - DNA, 201 bp, Homo sapiens
cttttatattaatcagtgttttcatattttatttaacttttgtattaatcagtgttttcatattttaatcagtggaatggtgaaaaattaagataggcctyactatacgtgatttttttttttttttttttttttcaagacagggccttgctcccatcacccaggctgaagggcagtcacatcactacacccttgacttcc

SEQ ID NO: 494026 - DNA, 201 bp, Homo sapiens
aacacattttattgagtatagaatttttggttgacaacttttttcagtacgtcaaagatatacctcactgttttctggcatgtgcttccaccgagaagtcrgctgtcattcttatttttctctctgtgcctgtaatgtgttgtttttctctgcttttaagatattctttatattattgatttttaagcagtttggttatga

SEQ ID NO: 494027 - DNA, 201 bp, Homo sapiens
tctctttcagtaaagtctctttcctcccccataccttcattgtctagagccaagagatggttggatataatgttggctctttttaatccaagttgccatcrctaaaagtagcatcatgacacctgtctggtgctttcaagtctcaagtaaatttctggcagtttgaaaatgatgttaaaaagcacttgggttttaaaaaaa

SEQ ID NO: 494028 - DNA, 201 bp, Homo sapiens
ttaaccttttctttttgatttaggttcatctttttgacagaggttatgaagtaatacttttctggcatcattgccagaataggtctgtttttttcctgtgrtaaattattttgggctacttggttttttatgttcttataatctgtttcttttctatgttcttttctaagttctgtgactttttattgttttcttcatttt

SEQ ID NO: 494029 - DNA, 201 bp, Homo sapiens
gatcagaaaacaaattcgaggcagacctcatgaaattataacctgtcagtattcaagattatatatactctctcaccactgcttgtctttgtacagtacargctagtttttcttattttattaatgttttttgcacactttcttcctttcccctgaaatttcattttgcagatggcattggcttcctactgtgcttgtcat

SEQ ID NO: 494030 - DNA, 201 bp, Homo sapiens
gtgtgatctcggctcactgcaacctctgcctcctgggttcaagcaattctcctgacttagcctcctgagtagctgggactacaggcacacgccactatgtrcagctcatttttgtatttttagtagagacggggttttgccatgttggggagactggttttgaactcctgacctcaagtgatctgcccacctcggcctccg

SEQ ID NO: 494031 - DNA, 201 bp, Homo sapiens
gtcttttgtgatagtttttatcatgcatacccgcatgacagcccttccttcatagccttccctggctgtttgtcagggtgttttttttttgttttgttttktttaaaaaaaaacagaacaaacactactactactccagtttgattctgataactttcatataagtctgttcatcaaggtgttgttatccatccaaactct

SEQ ID NO: 494032 - DNA, 201 bp, Homo sapiens
caggagaatcgcttgaacccaggaggcggaagttgcagtgaaccgagatcatgccattgcactccagcctgggtgacagagcgagactctgcccccccccaaaaaaaaaaaaattgcatgttgtatgttcaaggacagtactggtttattaaagaggacaacaatgcaattcagtatctggaggctcccatgtactaaaat

SEQ ID NO: 494033 - DNA, 201 bp, Homo sapiens
taaaaatcacccttttaaattatacaatttggtgatttttagtatatttacaaagtaggacaaccatcagtagtacctaattgcagaatacttgcatcacyctaaaaagaaaccccatacctatagcactcactttctaccatttcctccctcccacagtctctgcaatcacttatctcctttttgtctctatggatttgc

SEQ ID NO: 494034 - DNA, 201 bp, Homo sapiens
ataggcctcactatacgtgatttttttttttttttttttttttcaagacagggccttgctcccatcacccaggctgaagggcagtcacatcactacacccytgacttcccaggctcaagtgatcctcccactcagcctccctagtacctgggactacaggcaggcttcactacacctggataaattttttgtatttttagt

SEQ ID NO: 494035 - DNA, 201 bp, Homo sapiens
gtgaattgcattgaaccaaccttatgtacatgtaagccagtcttacattttggggataaacatcatttggtcatggtgtattattttaaaaatattattakatttggtttgttaaaaagttgtttggagttttacatctatgtttatgaggaatataggtttgtagttcaaatttcttgtaatttttttgtctggttttga

SEQ ID NO: 494036 - DNA, 201 bp, Homo sapiens
agatttgtcaattttattgatttttcttaaggaatcagcttttggttcattgatttttctctattgcttttttgttttctatttcattgatttctgctcaytgttattttttcttctttttctgtggattatagtatcctttttttttttttctagtttcttaaggtagaagctgacatcattgagaccttcctttttttc

SEQ ID NO: 494037 - DNA, 201 bp, Homo sapiens
acaaaacaatgttttataattccttttcttgtcagccagaatttgaaataagatttttccataccacataatttggttgcattaaatgaaaatttccccctttttgaacagagataaaatgtgaaactacttaaaagtactatgctggccacagtggctcatgcctgtaatcccaacactttgggaagctgaggtggaagg

SEQ ID NO: 494038 - DNA, 201 bp, Homo sapiens
aaattctgtacggtgcttttggtcatcaatgtaagtgtgtagatctatttctccaacttgtaaccgtcaaccaagtctgtttttaagaagcttacctttarggaatgtttgtatacctacatgtcagtttattttaaataacatttattttctgtttacttccaaaattacttaagaaagatatcagatgtttaaagtgac

SEQ ID NO: 494039 - DNA, 201 bp, Homo sapiens
aattatttatctacaattttgacactaattgaagcttagcttttagttgcagaaacttaattttggtaattttttatagaagtgtacagaaaacccaactwttttccttctatactcactctgtctcagtacttcacttctgacaccagatctataggaaacctcaactgtttttctctctactcacactcaacacttctg

SEQ ID NO: 494040 - DNA, 201 bp, Homo sapiens
ttttcccgatgggcaaaaacttgatattcacaaaaccagatttatgaggaagtctattcaagcaaagaagtacaaatgacctcagtgacatataacgtcaygtaagtttctggggcaaacttggaggtaggattttgctccagaatgaagaacagaaaggagaggccatttctgacaagcatgctctgctgctgagagaaa

SEQ ID NO: 494041 - DNA, 201 bp, Homo sapiens
gtggctcacgcctgtaattccagcactttgggaggccaaagcaggcagaccacctgaggtcaggagttcaagaccagcctgaccaacaaggtgaaaccccrtctctactaaaaatactaaaattagatgggcgtggtggtgtgcacctctaatcccagctactcagggggctgaggtaggagaatagcttgaacctgggag

SEQ ID NO: 494042 - DNA, 201 bp, Homo sapiens
gccagtgctctccatcctgggtgacagagtgagaccttgcctctaaaaagaacaaaaaaagagatgaacaacgaaaatgagagacaaagaggaagaacatkagaatatacggcattcaaatgtgagttccaaaccggtagagatttttatctgttttgtttcatgaaatcccttatgccaagaataattactgacacacaa

SEQ ID NO: 494043 - DNA, 201 bp, Homo sapiens
aaaaaattagccaggcatggtggcacctgcctgtagtcccagctacttgggagactgaggcaagacgatcccttgaacccaggagttggaaggtacagtargctatgattgtgccagtgctctccatcctgggtgacagagtgagaccttgcctctaaaaagaacaaaaaaagagatgaacaacgaaaatgagagacaaag

SEQ ID NO: 494044 - DNA, 201 bp, Homo sapiens
aaaaaacaaacaataataagtaccattttaaattcatcaaattggcaaatattacaaactgaggtattaacacgtcctcgcaggattatgggtaactgacwagccttataatgaagttaaattagtacattttcagagtaactttttagtggaaacaaaaattgtaggcctacctactatttggctcacatacagaaaggc

SEQ ID NO: 494045 - DNA, 201 bp, Homo sapiens
aaaagcacaatctgtaaaggaaaaaattaatagatatgactacattaaaattaaagatgtgtcttcaatgaaggattcaacttacaaagttaacagaggtktcaggctgggaaaagacatttgcaacttttataacttataaaggattaatatttagaatagacaaggaactgccaatcaacaacttaaaaacagaaacag

SEQ ID NO: 494046 - DNA, 201 bp, Homo sapiens
ctcccgagtagctgggaatacaggcatgtgccaagacacccagctaatttttgtatttttagtagagacagattttcaccatgttggccaggatggtctcraactcctgaccttgtgatctactcgcctcagcctcccaaagtgctgggattacaggcgtgagccaccacgcctggtcaggataattatcttaaacaatta

SEQ ID NO: 494047 - DNA, 201 bp, Homo sapiens
cccttgaaaaccagcacaagacaaggatgccctctctcaccactcctattcaacacggtactggaagttctggacagggcagtcaggcaagagaaagaaakaaaggatattcaaatagagaagaagtaaaactgtctgtttccagatgacatgatcctctatctagaaaaccccactgtcttagcccaaaagcttctcaag

SEQ ID NO: 494048 - DNA, 201 bp, Homo sapiens
ttttattcatctgttagatacgagttctaaatttctcttcaaagaatcagcatgtcagtacgttcaattctttgccttctacttttaaacttaacttcttygtaaagcaccttttccgattaccctctccactctgactcattctgattacctactccaccctgactcattccgattacctgctccaccctaattccaatt

SEQ ID NO: 494049 - DNA, 201 bp, Homo sapiens
acattaaaaagtcacatcatactacccaaagtgatccacaaattcaacgcaatccctatcataataccaatgacattcttcaagaaatagaaaaacaatcytaaaattcatatggaaccgcaaaagagccagactagtcaagcaatcctgagcaaagagaacaaacctggaggcatcacactacctgacttcaaaatatgc

SEQ ID NO: 494050 - DNA, 201 bp, Homo sapiens
gaaagacctttttaatgtgttgttgaattcagtttgttagtattttgttaaggatttcacatcaatgttcaccagcaatactgacctctagttttcctttkttgatgtgtctttgtctggttttggtatcagcataataattgccttgtagaatgagtttggaagtattccctcttcctctactttttgaaagagtttgag

SEQ ID NO: 494051 - DNA, 201 bp, Homo sapiens
ctcaccatgttgacaggctggtctccaactcctgggctcaagaaatcctcctaccttggcctctaaactgctgggattacaggtgtgagccaccacacctrgccaagatctaagttcttcttaatttttctcctctgaagagaaagttcaagttctaaacctttagttatttctaatataattcttccacagcctcccata

SEQ ID NO: 494052 - DNA, 201 bp, Homo sapiens
ttgcccaggctagagtacagtggtacaatcatggctcactgcaggtcctcgcaggctcaagcaatcctcccaccttagcctcccaggtagctgtgactacrgccacacaccactacacccagctaatttttttattttttgtagagatggagtctcaccatgttgacaggctggtctccaactcctgggctcaagaaatcc

SEQ ID NO: 494053 - DNA, 201 bp, Homo sapiens
aatgtaaagaataatcctaggacagaggagaatttctaaaataagattttaaaaaaagcacaatctgtaaaggaaaaaattaatagatatgactacattaraattaaagatgtgtcttcaatgaaggattcaacttacaaagttaacagaggtgtcaggctgggaaaagacatttgcaacttttataacttataaaggatt

SEQ ID NO: 494054 - DNA, 201 bp, Homo sapiens
cacaatctgtaaaggaaaaaattaatagatatgactacattaaaattaaagatgtgtcttcaatgaaggattcaacttacaaagttaacagaggtgtcagsctgggaaaagacatttgcaacttttataacttataaaggattaatatttagaatagacaaggaactgccaatcaacaacttaaaaacagaaacagcaaat

SEQ ID NO: 494055 - DNA, 201 bp, Homo sapiens
cccgggaggcggaggttgcagtgagttgagatcaggccattgcactccagcctgggcaaaaagagcaaaactacttctcaaaaaaaaaaaaaaaaaaaaaaggagggtggagcaaggtggcaaaatagaaagttccccccacgcaccctgcaaggacaccaagttaacacctatttatacagaaaaaaacaccttcataag

SEQ ID NO: 494056 - DNA, 201 bp, Homo sapiens
tgaccatggtggtgtatgcctgtaatcccagctacttgggaggctgaggcaggagaatcacttgaacccgggaggcagaggttacagtgagcagagatcaygccactaaagtccaggctgggcgacagagggagactccataaaaaaaataataaaaaataaaaaaataaaataataaagttcctcttgttattgattttt

SEQ ID NO: 494057 - DNA, 201 bp, Homo sapiens
attagctgaccatggtggtgtatgcctgtaatcccagctacttgggaggctgaggcaggagaatcacttgaacccgggaggcagaggttacagtgagcagrgatcatgccactaaagtccaggctgggcgacagagggagactccataaaaaaaataataaaaaataaaaaaataaaataataaagttcctcttgttattg

SEQ ID NO: 494058 - DNA, 201 bp, Homo sapiens
tcacagatgccttcaagctgaatcctctcttgaccattctacatgccaaagagagccagtgtcttcaacgaattacagaagccaaatgctgccatctgatrttgtaacagagccattgaaataaatcctgattcagcccaggcttacaagtggtgagccttacaagcgcttttcacacacagacttctgggccactgggaa

SEQ ID NO: 494059 - DNA, 201 bp, Homo sapiens
tcaggagttcaagtccagcccggccaacatggtgaaacccagtctctacaaaaatacaaaaattagctgaccatggtggtgtatgcctgtaatcccagctrcttgggaggctgaggcaggagaatcacttgaacccgggaggcagaggttacagtgagcagagatcatgccactaaagtccaggctgggcgacagagggag

SEQ ID NO: 494060 - DNA, 201 bp, Homo sapiens
gggaggccgaagtgggtggatcacttgaggtcaggagttcaagtccagcccggccaacatggtgaaacccagtctctacaaaaatacaaaaattagctgascatggtggtgtatgcctgtaatcccagctacttgggaggctgaggcaggagaatcacttgaacccgggaggcagaggttacagtgagcagagatcatgcc

SEQ ID NO: 494061 - DNA, 201 bp, Homo sapiens
aaagtaccttttcattttattgatcttttatattttttcatttcaatttcatttatttctgctctgatctttattatttcttttcatctactaattttggstgtggtttgctcttgcttttctagttttttaagatgcatgcttgggttctttatttgatgtctttctactgttttcatgtagatagttattgctataagc

SEQ ID NO: 494062 - DNA, 201 bp, Homo sapiens
gtgatccatctgcctcagcctcccaaagtgctgggattacaggtgtgagccactgcgttttcagccaacctcagtttctttcatcaatgttttatagttaycttcatagagatctttcacttctttggttaagtttattcctaggtttttaattttatttgtagctattgaaaatgggattactttcttgatttctttcag

SEQ ID NO: 494063 - DNA, 201 bp, Homo sapiens
gagaacgcggatcgaagggaggccttcccggccgcgtcctaggtgacaggtgtgtgaaattcggttggggaggtagttctgtaaactgcgtctccccgccrgctaaggaagttgagtgaagggagcgttgccgtctgggaatcgtagtcctcacaaaggcgtgagtaggcggcaaataaggatttgggtttagccttgggg

SEQ ID NO: 494064 - DNA, 201 bp, Homo sapiens
gtttactgtttgactgcatattgattatgcatgctcttaactattatttttgctattattatttcagaaggacgtggctaatctggcttgtatttcctgtrtcataaatcagctcattgatttcctgaaagtaaaaataaagcaatgttttataataagcaccaataccccaaaagaagtgctttataataatggtcctaa

SEQ ID NO: 494065 - DNA, 201 bp, Homo sapiens; identical to SEQ ID NO: 268736

SEQ ID NO: 494066 - DNA, 201 bp, Homo sapiens
gtgcagcaaaccaccatggcacatgtattcctatttaacaaacctgcacgttctgcacatgtatcccagaacttaaagtatagtaataataataataatawtaataataataaagaaaatctagaagaaatggataaattcctagacacatacaccctcccaagactgaaccaggaagaagttggatcctgaatagactaa

SEQ ID NO: 494067 - DNA, 201 bp, Homo sapiens
ctggctaacacagtgaaatcctgtccctactaaaaatgcaaaaaaaattagctgggcatggtggcgggcgcctgtagtcccagctactcgggaggctgagstaggagaatggcgtgaacccaggaggcggagcttgcagtgagccgagattgcaccactgcactccagcctgggcgacaaagcgagactccgtcttgaagt

SEQ ID NO: 494068 - DNA, 201 bp, Homo sapiens
caaatattaaagattactataaattaacttaaaatgtctttcatttagaacaataccctagagatatataaagtatatgatttggggaacaaaacatactktacttaaatgtgcatttattatgtaggttgtgtgacacatgacatactgtacattataaatttatgtttttacagagtatatagaataataactaattgg

SEQ ID NO: 494069 - DNA, 201 bp, Homo sapiens
acactacgaatggttattgctggacagtaagttattcagtttacattttttctgttttccacatctcctctcataaacattagtgctttttttttttttttctttttgagatggagtctcactctgtcacccaggctagagtgcaatggcacaatcttggctcactgcaacctctgacccgctaggttcaagtgattctcc

SEQ ID NO: 494070 - DNA, 201 bp, Homo sapiens
atttagagatgacttgtacttaaaaagcttaatggtcatcagtggaaaatagtgtgacttcaccaagtgtgaaacataccagatttccttactgaaaggaytcctaatgttaagtgatgaggggaattccatagagataatgtttggcaaaaaatgtgacagacttgcatattattgttattattattattattgaaacag

SEQ ID NO: 494071 - DNA, 201 bp, Homo sapiens
ctacaggtatgaaaatcacaaaaacttagaagtaggtttgtttgaagtttatatgcagaaaatggatttgaaagcatattcatagtataaatcacatttaagtagccaggtgcggtggctcacacctgtaatcccagcactttgggaggccaaggtgggcagatcacttgaggtcaggagttcaagacaagcctggccaac

SEQ ID NO: 494072 - DNA, 201 bp, Homo sapiens
aaatcaaagaaatgtagtcatgctgcatgcatcaatgtaactgaacagtataagacttaaggaagttttctatttatgggaagttatggtgtgcattttgyttcttaccaccacttttgtagcttgggctggtttccactgtacaagcgtaactccagcacacagcataaaaactgaaacccactgtaatttgctgagtgt

SEQ ID NO: 494073 - DNA, 201 bp, Homo sapiens
ctatttcttacagaatgtcattggtattttgataaggattgcattgaatctgtagatgcttgagtagtatgaacattttaacaatattaatttttccaatmcattaacatgttgctttgtgtcctcttcaatttcttttcttttttttttttttttttgagatgttgtctcactctgtcgcccaggctggagtgcagtggc

SEQ ID NO: 494074 - DNA, 201 bp, Homo sapiens
gtaagtagtctataccatctagatttgtgtaagtatactccatgatgtttgcacaacagtgaaatcacctaatgatgcatctctcagaaccctgaacttayattctttgttaagcgatgcatgactgtataacaagtctccggtatgcagaacaaaggggtaattaccaaactgtgcctcgtattacttagacaacattgg

SEQ ID NO: 494075 - DNA, 201 bp, Homo sapiens
atagaagactagagcatatagaacaagtattttaaaaccagtatataactcacaatttttctgacagagaggtcatggagggaattagtagaaatagaagsataaaaagacatgtatgcctcgaacaccagtccccaaaatttggatttcatcttacagacaaaaaacggaagagttttgaattcagagtaaaatgaatgg

SEQ ID NO: 494076 - DNA, 201 bp, Homo sapiens
atttccacacctgatttcagttaaagagatggataaaatatactaaaaaggggctacagacataaaatattttattttttccatactataaatatttgttgtttaaaatgacaagataccataaagaggggatggtgggggtaatttcactcagttggacagggatgagagtttcaaagacaggctttaagggtaggtatc

SEQ ID NO: 494077 - DNA, 201 bp, Homo sapiens
gactataaagctttcccactcccctgcatgctttgagtctaccaaacacaagtgacagtgtctgactcccttgctacagtaagctctaaataaatagcctygctttgttctcatttgggtaggcattgtttatttccacacctgatttcagttaaagagatggataaaatatactaaaaaggggctacagacataaaatat

SEQ ID NO: 494078 - DNA, 201 bp, Homo sapiens
atgggtaaggagaagtttagaatgaacacagtgatgttagatcaaaattgtggtatcaatcaatgtagaactctttgttatacacacacacacacacacamaactagatttagataggtgtctatgcatacacatgcatatatatttcatagctctgctaaaagggtctaaagtaatgatactccagtatcaatgtgtata

SEQ ID NO: 494079 - DNA, 201 bp, Homo sapiens
taaaatgccctgcttctagttagcctgcttccagctttctcatgttaacaaactacaatcagagaacatctgaaggcttcccccttttctgactataaagmtttcccactcccctgcatgctttgagtctaccaaacacaagtgacagtgtctgactcccttgctacagtaagctctaaataaatagccttgctttgttct

SEQ ID NO: 494080 - DNA, 201 bp, Homo sapiens
aaatgcaactgtgtaataaaattataaatcactgtactctttaagataaatacaattgtcatttgtaaagaagttaattctccctaagcaaaagtcttacraacttagacagtagactttagatagacatttaactcataaattatgagaaaataaacttgcattttatttcaaagcattttattttagtacgattattat

SEQ ID NO: 494081 - DNA, 201 bp, Homo sapiens
gttccaaattagtaaggttttgttacatatcagtttaatccatgttaacatttaatagctaacagagctgaaaatattgattaggttttaagtttgtaacrtttaacattaaatatggtttagaaatagacttctattccagtaataatcttatatttatatctaaatgttatcataatttcaatcttaatgctgacaaat

SEQ ID NO: 494082 - DNA, 201 bp, Homo sapiens
agcactttgggaggccaaggtgggcagatcacttgaggtcaggagttcaagacaagcctggccaacatggtgaaaccccatctctactaaaaatacaaaarttggccaggcgtggtagtgcacacctgtaatcccagctacttgggaggctgaggcaggagaatcacttgaacccaggaggcagagattgcagtgagccga

SEQ ID NO: 494083 - DNA, 201 bp, Homo sapiens
tgctacctgcccaatttccctgcccttccttccttactaacagagcctcaatttggattggggcaaggatttattcatctaagaaagaaaaaagaagtgaatgtccctgggtcacttacaatatcattctggtcaataaatgttaagtagatgggagggattctgggaaaattattattttctggatagaaggtgatagac

SEQ ID NO: 494084 - DNA, 201 bp, Homo sapiens
acctcccaaattatctttgtgcagcccaaattcctatcacctctgctttactatccttgtcatctcttaaactcaaattttctagtgctgaacatgttatyctttttgaccaaccagctccccttctcagttatcctttatctcctagggcagaaagcctgaggtcatactttgaatttttcttccttttcctgagatatt

SEQ ID NO: 494085 - DNA, 201 bp, Homo sapiens
ggaagcgatggttgcagcaagtcaagatcacgctactgcactccagcctgggtgacagagtgataccctgtctcaaaaaaaaaaagttgactttgttcctytgttccaaggcaatatgaaagtgttttcacttccttttctttatactaacaatgacaggtttaaatctaaactgttagtgttaacagctgtgatagagtc

SEQ ID NO: 494086 - DNA, 201 bp, Homo sapiens
agctgacataaaactaaatataagcaagaagatcaagtttaatgggaataaaactgagaaagcaagataaactagactggtgtctaaagtttgatgttttygaaaaatatgacaaaagaataaaacaatgctttcatgatttacctgcaaatcctgagcacaatacagcaatagctatagcgccaaaccctaataatggat

SEQ ID NO: 494087 - DNA, 201 bp, Homo sapiens
ctaataatatgctaaagaaaaaaggcctatctataaggcaaaagttattttaaatcaaagaaatgtagtcatgctgcatgcatcaatgtaactgaacagtwtaagacttaaggaagttttctatttatgggaagttatggtgtgcattttgtttcttaccaccacttttgtagcttgggctggtttccactgtacaagcgt

SEQ ID NO: 494088 - DNA, 201 bp, Homo sapiens
gtagaaaaataatttaacacactataagtatttatactcacttagctaaaattcccacacttagcaataactttataacttctgtgatacacacggctgtsgttgaaaagtagagttctttgtctgatgtccttgtgtatcttaaagctatggtatagactgcagccatcagggtcatcactgccaagcagtataacttga

SEQ ID NO: 494089 - DNA, 201 bp, Homo sapiens
aacatatcagttatgcttttattttgctaaaatgttataattatcattttaatttatacatttttaaatgatatgtgaaatacatactaattatatttttmtgttaaagtatgattttaaactgtattttatgtaaaaatactttccactatccagatataataattgtaaaaatcttttatgaaaagccacttactcatc

SEQ ID NO: 494090 - DNA, 201 bp, Homo sapiens
gaactcgtggactcaagcgatctgctcacttcggcctcccgaagtgctgggattacaggcatgagccactgttcctggcccttccactcctttttttttttgagacgaagtcttgctctgtcacccaggctggagtccagtggtgtgatctcagctcactacaacctctgcctcctggattcaagcagttctcctgtctca

SEQ ID NO: 494091 - DNA, 201 bp, Homo sapiens; identical to SEQ ID NO: 268760

SEQ ID NO: 494092 - DNA, 201 bp, Homo sapiens
caattatctcgttatgcttcaactgaaaaacatttatgaaagcctcacagaatttaacggggaaaatggacaccacatcttaaaaaacctcttaataaaayagtaatcacaaaaatatttcttcttaccataaaagcaatcagagtttcagaaacaatctctccatgggctgcacattcttgtcctatttctcgtataata

SEQ ID NO: 494093 - DNA, 201 bp, Homo sapiens
agcccaataccaacaggacaaatctgccaaactatagtctgacaaagttgagcttactgatgccttctgatataaagtgggtatttgtccctgcccagatstgatgttgaattgtaatcctcaatgttggaggtggggcctggtgggagctctggatcatgaggacagaaccctcaagaatggcttgggccatcgccttgg

SEQ ID NO: 494094 - DNA, 201 bp, Homo sapiens
ttaccaccacttttgtagcttgggctggtttccactgtacaagcgtaactccagcacacagcataaaaactgaaacccactgtaatttgctgagtgtccgrtttaacattaaaacagtgcataaagcagtacacggaatcttcaactggtaggtcacctaaaaaaaagagaatgaattaataaattcagttaatgttagtc

SEQ ID NO: 494095 - DNA, 201 bp, Homo sapiens
acatgctctataaactttttaaaaatgttttcacaaatttgtccaattatctcgttatgcttcaactgaaaaacatttatgaaagcctcacagaatttaamggggaaaatggacaccacatcttaaaaaacctcttaataaaatagtaatcacaaaaatatttcttcttaccataaaagcaatcagagtttcagaaacaat

SEQ ID NO: 494096 - DNA, 201 bp, Homo sapiens
gtattgttaaccaaaagcaagaacagagaaaccacagcaatgagtaatttttaacaacggcaaacaaaaatacacgtcaaaaaattcccacacaggagaayattattgatgtttccaaaactcatcaaggtcttctaaatgtctctataaatctagaactcacatgctctataaactttttaaaaatgttttcacaaattt

SEQ ID NO: 494097 - DNA, 201 bp, Homo sapiens
taagtataatttctaaatgctcaatttgttccaaaaggcacttgtaagcctgcctctgttttcaagtctgcaccagctgtttttactttttttttttttttgtctttttttcttcttgtagagattgtgggtgggggcgtctcactttgttgcccaggctagttctcgaactccccacctaaaacaatcctcccacctcag

SEQ ID NO: 494098 - DNA, 201 bp, Homo sapiens
tggtgctagaaaagttatatggggaaataagttgaaagcaatggctaggttttcaattgggaaactatggtatattttattgtatttttattgtgtattgktaaccaaaagcaagaacagagaaaccacagcaatgagtaatttttaacaacggcaaacaaaaatacacgtcaaaaaattcccacacaggagaatattatt

SEQ ID NO: 494099 - DNA, 201 bp, Homo sapiens
tcttttgaccaccagatgaccatattgcaaggatggtgtgccccaggaagccaggaagaatggtctatgtctctccagattttgtgttatgagaaaaatayctcgtgtatactactattttgtgggcttttgtttcatgcagctgaaggcaataatgactaatacaaatattgtatttacaactgagaataagtaattgca

SEQ ID NO: 494100 - DNA, 201 bp, Homo sapiens
gggagataatgtaaaattcaatgtctggattaggaattaaacatgagtaataatcatgtgtatccagacatttcatatttgagcttaactatcccttgcckctcttttcttttttcattaccgtaatccctctttccttttcctgccagtcactgatggtttgtacctatttctaccattttatgcttgctttgcatcaat

SEQ ID NO: 494101 - DNA, 201 bp, Homo sapiens
gttaatgtttgcaatgtaagacattagtaacaaggtttcactaaaatactgtagcagatgctgctacctgcccaatttccctgcccttccttccttactarcagagcctcaatttggattggggcaaggatttattcatctaagaaagaaaaaagaagtgaatgtccctgggtcacttacaatatcattctggtcaataaa

SEQ ID NO: 494102 - DNA, 201 bp, Homo sapiens
actcacgattgttttacatttttaaatggttgataaaaaatgtaataacatcttgtgatatgtgaaaattgcaggaaattcaaattctagtgtccatgaayagttttattagaacacagccatgctcatttgtttctaaattatccaggctacttttttttccctacaacagcagatctgagtagttatgacaagagacta

SEQ ID NO: 494103 - DNA, 201 bp, Homo sapiens
tctccctcacttttcacataaaaagaagggcttatgaaacaaattagcagccaatctgagtattcctttccttcagtggagcaaaaagtaaagtacagtgygtcaggattaaccttcagatctgtctcttttggccatatcctttttgttggatgcttaggagctattttttcacggtcaggatggccaaggtatcttttt

SEQ ID NO: 494104 - DNA, 201 bp, Homo sapiens
acatacaaatcgccaaaaagcatgaaaaaaatgctcaacatcactcagcattagagaaatgcaaattaatttagttctatttaacttcacagtatatgacraactagttaatgtttgcaatgtaagacattagtaacaaggtttcactaaaatactgtagcagatgctgctacctgcccaatttccctgcccttccttcct

SEQ ID NO: 494105 - DNA, 201 bp, Homo sapiens
ttcactgctttgggagcctaatcacaattcaaagatggttttcatagggaaataaaacaggagtttcaaacagattatctttagatacagtatggttggawcttacaaggaaacaggttcttcaatataaatattttcccgagtgcattaaagaatattttctgaattgtaggcaatttttaaaaaccatatcaggtttta

SEQ ID NO: 494106 - DNA, 201 bp, Homo sapiens
aatcttaatgctgacaaatttttctaacaaataaaagataaatggacagttttatttttcaatttcaacagaatgaaaaatgtgttacagaaaacagtttkataaaatatgggaacccaataaacagtcacacaaccaatgaatgtgccacccctacaaaattaatttgtatagatgttaatatacctttaagtacttgct

SEQ ID NO: 494107 - DNA, 201 bp, Homo sapiens
acattgagcaaatgttactaatttttacactaactctgcagtatttttctggaaatatgggggaaatacactattttaatcatcaggatctaagttcttcwaatttttttttttctttttctgagacagagttttgctctgttgcccaggctagagtacagtggtacaatcatggctcactgcaggtcctcgcaggctcaa

SEQ ID NO: 494108 - DNA, 201 bp, Homo sapiens
atctacgaggaactcaaacaactcgacaacaacaaataaccccattataaagtgggcaaaggccatgaatagatatttttcaaaagaagacatacaaatcrccaaaaagcatgaaaaaaatgctcaacatcactcagcattagagaaatgcaaattaatttagttctatttaacttcacagtatatgacgaactagttaat

SEQ ID NO: 494109 - DNA, 201 bp, Homo sapiens
cagaaggacaccaggtgactccagcctgctactttaactacattatatgctaagtaagattttgttcactgctttgggagcctaatcacaattcaaagatrgttttcatagggaaataaaacaggagtttcaaacagattatctttagatacagtatggttggaacttacaaggaaacaggttcttcaatataaatatttt

SEQ ID NO: 494110 - DNA, 201 bp, Homo sapiens
gacaaatttttctaacaaataaaagataaatggacagttttatttttcaatttcaacagaatgaaaaatgtgttacagaaaacagtttgataaaatatggsaacccaataaacagtcacacaaccaatgaatgtgccacccctacaaaattaatttgtatagatgttaatatacctttaagtacttgctattgttcataat

SEQ ID NO: 494111 - DNA, 201 bp, Homo sapiens
attgcctgcaagtatatctgagcagcagccatctctcaggcaccagagcctgtccaagacctttggtaaaaccataagcagtgggtaccaagtctccctcrtacttccttattcccagacctgctcgggtactgccatcacccaaggatcaaactatttctactttcctcacccacctcccacctattgtcccccagttcc

SEQ ID NO: 494112 - DNA, 201 bp, Homo sapiens
cattccagttaaaatgcctattataaaaaagacagaaaacaacaaatgctggtgaggacgtagagaaagggaactctttttttttttttttttttttttttgagatggagtctcactctgtcacccaggctggagtgcagtggtgcgatctcggctcactgcaagcttcgcctcctgggttcatgccattctcctgcctca

SEQ ID NO: 494113 - DNA, 201 bp, Homo sapiens
ctttagatagacatttaactcataaattatgagaaaataaacttgcattttatttcaaagcattttattttagtacgattattataaagttagtttacttyaaaaagccaaacacatgtgatcacctaagaaagatttatggactcttcacctcaaaaaaccaagggaaaaatgtcttaagaaaaaaaaaaaatacggcca

SEQ ID NO: 494114 - DNA, 201 bp, Homo sapiens
aatgtggaagaagtaaatgagaaaacacaaaaaacacatagcacagtgcctagcacttaacataggaaacactcaagaaatgttattattattatattcawccaaaacacaagtcaataattgttttctgtaagggccaaacagtaaatattttaggctttgcaagccagtcagtctccattacaccaaaaccagggagca

SEQ ID NO: 494115 - DNA, 201 bp, Homo sapiens
gattttcattacccatgtgttctttcattctacacacatcagttttcacagtcgctccattaagatgacattgcatcactctctcaggaaagtatagttcrtgagcacccaagaatggctgaatgtgagtgaataaattactgaggacaccaaccacaatagtttcgtcttgcaagctggtccacagagtagaaagtgcaa

SEQ ID NO: 494116 - DNA, 201 bp, Homo sapiens
gatagccatgcttgcagttgcattatcaactgtctcatcacacattgctgaagctgaagcaatcacaatgtcgtgtaacatttcaatatttaaatgtaatrtctgtttctacataaaagcctacacacaacactattcctccctgcttcccttcactcaccaacacacatcttgaaacctgtatgacttcttaactgcccc

SEQ ID NO: 494117 - DNA, 201 bp, Homo sapiens
ctgaccagctactatgaatacattttcaaccacagtacaatgattatttctgttgtcacagccaatactgatatggttatcatactatacagttgcagttyctttagtagcagttgcttatgtgggggaattctctcatccaacttatagcacactattacggcaaagtaaccataaagaacaggatcaatttatacaaaa

SEQ ID NO: 494118 - DNA, 201 bp, Homo sapiens
caatattatagggctcaaaaggaaattcaccttaaggtcaaagtttatgacaaatacttacaaagacttgtgatgttgggaccgctatctttgattttatrgtcatttttagttgttccagatgggctcctaactgttttgtcatcatttccacttcttgagcaccagtaattatatctgactgtgaaaacaacataattt

SEQ ID NO: 494119 - DNA, 201 bp, Homo sapiens
taaatgacccctttacaggatggctagaaaagtggttcggtaaatggaaaggaataacagcctcaattcttacttccctcacagctgtaatgggtgtactyattcttgtcgggtgctgtgtcataccatgcatctgtgggttggtgcagagtaagtgctcatagaaatggcacttactaaaacctcccttaactatcctcc

SEQ ID NO: 494120 - DNA, 201 bp, Homo sapiens
tactgttcctaccactagcaactctaaccccactttagagcgtttctatggtttaggagcagaagtcactggaaaggaccctataggcttctttaagatgygctttgttctccctgctctacctcctacaactgcccctttcacaaacctacgaaataaaactatgcctcgcctcatgccaaatgacaaaagcaaggtctc

SEQ ID NO: 494121 - DNA, 201 bp, Homo sapiens
aaccagggagcaagctggatttggcccatgagacatagtttgccaacttctattctacagcagcgttcttcaacctcagcagtactgacatttggggctgrataaatctttgttgtgaggctgtcatggggattgcaggatgtttagcagcatccttggtctccacccactagatgccagtagcatctctcaagttgtgac

SEQ ID NO: 494122 - DNA, 201 bp, Homo sapiens
ttaccatatttttcaactctctagggatactgtttggcttgttcattagatctaaaaacaccagatataaaaatcttatctggctaggtatggtggcttaygcctgttaccccagcactttgggaagctgaggcaggaggattgcttgaggccagatgttcaagaccagcctggacaacatagcaagactccaatctatat

SEQ ID NO: 494123 - DNA, 201 bp, Homo sapiens
tttttgccataagtagctttgagactttttgtggtaagtggctatatcatagctccaaaattacacacacacacacacacacacacacacacacacacacmttttcatttattcaaaggaaatatatacacacatttataaagaaatggtacattaaaaagtcacatcatactacccaaagtgatccacaaattcaacgca

SEQ ID NO: 494124 - DNA, 201 bp, Homo sapiens
ttttttgccataagtagctttgagactttttgtggtaagtggctatatcatagctccaaaattacacacacacacacacacacacacacacacacacacacattttcatttattcaaaggaaatatatacacacatttataaagaaatggtacattaaaaagtcacatcatactacccaaagtgatccacaaattcaacgc

SEQ ID NO: 494125 - DNA, 201 bp, Homo sapiens
gctttgtatggtttatcttgtcccattttggactatcattatagtgtcagcttacatcaattaagtataatttctaaatgctcaatttgttccaaaaggcmcttgtaagcctgcctctgttttcaagtctgcaccagctgtttttactttttttttttttttgtctttttttcttcttgtagagattgtgggtgggggcgt

SEQ ID NO: 494126 - DNA, 201 bp, Homo sapiens
ggattcaaggctggttcagtatatgcaaatcgataaacgtaattcatcacataaacagaacaaacgacaaaaaccacatgattatctcaatattgaattcygtagaattcaacatctcttcatgttaaaaactctcaatcaactaggtattgatggaagatacctcaaaataataagagccatttatgacaaacccacagc

SEQ ID NO: 494127 - DNA, 201 bp, Homo sapiens
agcagctcatcaaaaagcttatccaccatgatcaagtcggcttcatccccaggattcaaggctggttcagtatatgcaaatcgataaacgtaattcatcasataaacagaacaaacgacaaaaaccacatgattatctcaatattgaattccgtagaattcaacatctcttcatgttaaaaactctcaatcaactaggtat

SEQ ID NO: 494128 - DNA, 201 bp, Homo sapiens
ggcattggcctacgcaaagaattcatgacttaaaagtaaatgcaacagaaatagacaaattggatttaaataaactaaaaagcttctacacatcaatgaayaatcaacagagtgaaaagacagcctgcagaatgggagaaaatatgtacaaactatgcatctgacaaaggactaatattcaggatctacgaggaactcaaa

SEQ ID NO: 494129 - DNA, 201 bp, Homo sapiens
cttattcacagatgccttcaagctgaatcctctcttgaccattctacatgccaaagagagccagtgtcttcaacgaattacagaagccaaatgctgccatstgatattgtaacagagccattgaaataaatcctgattcagcccaggcttacaagtggtgagccttacaagcgcttttcacacacagacttctgggccact

SEQ ID NO: 494130 - DNA, 201 bp, Homo sapiens
ctcaagattgattaaagacttaaatgtaagacctgaaactataaaaataacagaaaaaaacctagggggctgggcattggcctacgcaaagaattcatgayttaaaagtaaatgcaacagaaatagacaaattggatttaaataaactaaaaagcttctacacatcaatgaataatcaacagagtgaaaagacagcctgca

SEQ ID NO: 494131 - DNA, 201 bp, Homo sapiens
gtggtattttactttctgagttatttcacttaagatagtagcctccagttccatccatgttgccacaagacatgatttcattattttttatggctcaataraactccattgtgtgtatgtgtgtatacattttctttatccaatcatctgttgatggacacttaggttgattccatatctttactaccaataacatttgtt

SEQ ID NO: 494132 - DNA, 201 bp, Homo sapiens
agtagcagaaatatatatgtagtatatatgttcctttcggttacgtgtatttttatttcagttctagataaatttcctctgaaaagcattattgataataygatgttgcatcgagaactgtatccctcctcattcctcctgtgatatgctgagggacaggcttcactttggcaggacactatgttccctgagttgttgcaa

SEQ ID NO: 494133 - DNA, 201 bp, Homo sapiens
aatttcaggggctgaacctcaaagaactgagaaatccccattacgaggggttgaacctcaaaagaggtgaaaaatcccaataggggtacattgaacctcartgaggtgagaaatccccattgtggggggctgaacctcacagaaacctccagtagtaagaaaaatattcagaactcccctttcgcttcttctcgggggaaa

SEQ ID NO: 494134 - DNA, 201 bp, Homo sapiens
taacattttttgtaacaattattttctgatatttagaagcctctccatcacagcaaataaaacactgacatccaacctgtgttttaacagactagataacrtcctgtttgcctttcatctacttactctttttgaattaccaattttaatatgtgtacaaagaattgacaacactcagagtacctggaaaatattttactt

SEQ ID NO: 494135 - DNA, 201 bp, Homo sapiens
taagaactagagaaaaactggattggatatggcaattctacttcaggaaaacaagtaatttcttaagctgtaataatgaaataaaaaacagtggccagcaygtagcctcaagacaaaaatccaggagggaagatttattacagtgacttaaatggaatactttgtcaaaacacctaagactttaaacagccaaactaaaca

SEQ ID NO: 494136 - DNA, 201 bp, Homo sapiens
atctttaacacttctaatttaacatgttttataaaatacaatgaccatatattttcacttatgaaatggaaattggttatactttttacctgttacctctytgacagtcttgatgtctgtaggggatccaaggccagagcggagtaacacatagctgataatcttccggtagaggctttccaattcttctttagcacatgc

SEQ ID NO: 494137 - DNA, 201 bp, Homo sapiens
tcagtctaggattaaaattaggtctatctcctccaatgcccctaattcttaaccctctcttataccacatccttagctaaacaattcttgcatgatgtttytgattcaaagcccagtgctgccacatattaacagtgtaatcttaaggaacctcagatgctgcgtcaataaaacaggggtaaagtacttaccttgaaaatg

SEQ ID NO: 494138 - DNA, 201 bp, Homo sapiens
cttgtggcgtcctcaggggtgagaaatcaggacccgcccagtgcaaggaataacccgagctctcagcaacacagaaagaaaccaaaccggctggcaacctsaggtaaaggatcctcacataccacagcaatgactgtgcacagaccaatgaagaagaaaccacgggagccagtaaagtacttccttggtggtcaaagtctg

SEQ ID NO: 494139 - DNA, 201 bp, Homo sapiens
tattattattcatggactgtacgtgtgaattctccactcattaaaatgtatctgtaacccccaaatcaatgctggtaacacttgcagtcattggcagacaygtgcagagtggcaaaaaatttgattcaccaagtgtgcacattcctggctgacgctgaacaagttaacattctgccttgtttccgctttcagatcataaac

SEQ ID NO: 494140 - DNA, 201 bp, Homo sapiens
tatataaagagattgcattatatagaaaaggtcaggtcttatgaacttaactcaccaaaatgatctgaaggaagacctcatattgtcgtatattatatagygcttcttttaacatatatggctgaagttcagccctcatgagtgggtcgttggctgccttctcaaggatggctgtgtagcggtatacctggctccgggcag

SEQ ID NO: 494141 - DNA, 201 bp, Homo sapiens
tctactagaaatataaaaattagccaggcgtggtggcacatgcctgtagtcccagctactcaggagactgaggcaggagaatcgcttgaaccttggaggcsgaggttgcagtaagccgagattgcgccactgcactccagcctggatgacagagcaagactccatctacaaaaaaaaaaaaaaaaaaaaaaagctcacagt

SEQ ID NO: 494142 - DNA, 201 bp, Homo sapiens
tataggtaatgatgaagtatcaggaagttatcatttgacaacagtatcagaccacaaaaccagtaggtgaaagtgtgatgagaaagagaatatttatctcrtctcaaagtatctctccaaaagacacttgttaataacaaagagaaaactggtaactttatgtggagaaacctagcaggcactaccttaatcaagaaacca

SEQ ID NO: 494143 - DNA, 201 bp, Homo sapiens
actttgggaggctgaggcaggcggatcatgaggtcaggagatcgaggccattctggctaacacagtgaaaccccgtctctactaaaaaatacaaaaaaaawtagccaggcgtggtggcaggcacctgtagtcccagctcctcgcgaggctgaggcagaagaatggcatgaacccaggaggcggagcttgcaatgagctgag

SEQ ID NO: 494144 - DNA, 201 bp, Homo sapiens
gcagcggctcacacctataatcccagcatgctgggaggccatggcagacggattgcttgagtccaggaatttgagaccagcctggacaacatggcgaaacyccatgtctacaaaattagctgggtgtggtgctacgcacctataatcccagctactggggaggctgaggcagaaggattgcttgagcccaggaagcgatgg

SEQ ID NO: 494145 - DNA, 201 bp, Homo sapiens
aaactttaaattatacctacccaaaatcaaactgttgatatctttttcccccaaatctgtttttcctgtttcaaaaaacaaaaataataataactctaccsaattgtttatactaggaaacacagatatgcttcctgatacctccctttccttcccctactatagttgattattattattcatggactgtacgtgtgaatt

SEQ ID NO: 494146 - DNA, 201 bp, Homo sapiens
agccaggctggtctcgaactcctcacctggtgatctgcgaccagccacataatatttttatagacaacacagaactgtagtgaggataaaggtacaatccrtaagtgtgtgaatgctcatacagaaaaatggtagttaattgaacaaaatcaagctaggccatcaaccaataccaacttgccaggcatatagataagccac

SEQ ID NO: 494147 - DNA, 201 bp, Homo sapiens
ggctgggcattggcctacgcaaagaattcatgacttaaaagtaaatgcaacagaaatagacaaattggatttaaataaactaaaaagcttctacacatcaatgaataatcaacagagtgaaaagacagcctgcagaatgggagaaaatatgtacaaactatgcatctgacaaaggactaatattcaggatctacgaggaac

SEQ ID NO: 494148 - DNA, 201 bp, Homo sapiens
ttttccacagtctctgttaaataaacgaattccagtaacaatcatggtgagttctttcagctggcgttctttgtccttcttagaaagagttagaaatgtcscaagctctgcctgaggaaaaacactctgtagagcagctaaaataaaccagaaaaaaaaaaaaggaaaacaaaatgatagaataaagatatcagacgttaa

SEQ ID NO: 494149 - DNA, 201 bp, Homo sapiens
atctagaaatgcccttcaggagctaaggcccagaatcaggaactataggagtttgatttgtgctttattatactgtgactgagctggtacccaagttgcaagataaagccgtttttactatccctctcctttcctcaagcagaaagagtctctccttgtggccaccacagctatgaatgtgctggatcacacctgaagcca

SEQ ID NO: 494150 - DNA, 201 bp, Homo sapiens
ataccaaaaataccacagattttccaccaaaaaatctatgtaggagagttttccaggcttctgaagattggctctttaaactaatgtttgcctttttttttaactgcttaatgcaaatctaagatgccccatatactttccttacatctttgttgttttgttttgtcttttttgagacggagtctttctctgtcacccaac

SEQ ID NO: 494151 - DNA, 201 bp, Homo sapiens
aatgaccatatattttcacttatgaaatggaaattggttatactttttacctgttacctctctgacagtcttgatgtctgtaggggatccaaggccagagyggagtaacacatagctgataatcttccggtagaggctttccaattcttctttagcacatgctctgttatctgtaatttctcgggtaacagagcctaatct

SEQ ID NO: 494152 - DNA, 201 bp, Homo sapiens
cttgatgtctgtaggggatccaaggccagagcggagtaacacatagctgataatcttccggtagaggctttccaattcttctttagcacatgctctgttayctgtaatttctcgggtaacagagcctaatctagactctaggacccggtgatgttcttcgagaaattccactaaaattgccaaataacaatgttctatata

SEQ ID NO: 494153 - DNA, 201 bp, Homo sapiens
ctgatgtttattcaaggctcaagggctctttagtcagcaagtgatagatcctgccaggaccgggcctcccctttcagggaagcggaattttttttttttttcttttgagatggagtctcgctctgtcgcccaggctggagtgcagtggcactatctcggctcactgcaagctccgccagggaagcggatttcttactggcc

SEQ ID NO: 494154 - DNA, 201 bp, Homo sapiens
gctcattgatttcctgaaagtaaaaataaagcaatgttttataataagcaccaataccccaaaagaagtgctttataataatggtcctaactgcagctcaygatatccttaagaaaaccataatactttgttggtgaaatagctctgttccaactcaaagtttgataattacaatgagattctgtatttttggttaatata

SEQ ID NO: 494155 - DNA, 201 bp, Homo sapiens
ctcacgcctgtaatcccagcactttgggaggccaaggcaggcagatcacctgaggtcgggagttcgagaccagcctgaccaactcagagaaaccccgtctstactaaaaatacaaaattagccgggagtggtggcacacgcctgtaatcccagctacttgggaggctgaggcaggagaatcgtttgaacccgggaggcgga

SEQ ID NO: 494156 - DNA, 201 bp, Homo sapiens
tattatcaagtaccaatgaaaaaatacaaattcaacttctaccaaaatattttcattaaaatcaaaacccaacttttctgtttctattttgattcctaacyctaccaaagcaatataaaccgagcagttactgaggttttctccttaattagtgacctggttctacctgatgtggccttatataaagagattgcattatat

SEQ ID NO: 494157 - DNA, 201 bp, Homo sapiens
ttctatccctcaagaaattagcattcactcatacaaaagacagttccactaaccgagaatctcatagttactggaaaacagaggttgtgtaaaagtaaacrgtgacaagtgggaacataacctgccatcatgcagtaattaacagactgtgtttcttacaaccctagagtgtcaaggggatatcccttagtgaaaaggtcc

SEQ ID NO: 494158 - DNA, 201 bp, Homo sapiens
accacactcatcatttctacattttactcactgtcctctccagctgtgagaagtagaacgccaatgagaatttaagacttagttggtggattcatgattgmaagctatgagaagattctatataatgaatgacatcttctgcaacatccttacagttgtgtgacagtttctcaaggttctttcttataatatcacctctga

SEQ ID NO: 494159 - DNA, 201 bp, Homo sapiens
ggtgaagactatgaataaccccattttacagatacggaaaccaaggcacagggaagttaagcagcttccttacggacacagatttagtaagtggcaaagtyatgattagaattcatgtagtctggttgcaaagaccacactcatcatttctacattttactcactgtcctctccagctgtgagaagtagaacgccaatgag

SEQ ID NO: 494160 - DNA, 201 bp, Homo sapiens
taattcactatcttacccaggctatatattggattttttttttctttttgagacagtgtctcactctgtcgcccaggctggaatgcagtggcacgatctcrgctcactgcaacctctgtctcctgggttcaagcgattctcctgcctcagtctcctgaatagctgggattacaggcacccaccactatgcccggctaattt

SEQ ID NO: 494161 - DNA, 201 bp, Homo sapiens
gaggtgggcggatcacaaggtcaggagatcgagaccatcctgatttacacggtgaaaccctgtctctactaaaaatacaaaaaattagccgggcgtggtgrcatgcacctgtagtcccagctactcgggaggctgaggcaggaggatggcatgaacccgggaggcagagcttgcagtgagccaagatcgcaccactgcact

SEQ ID NO: 494162 - DNA, 201 bp, Homo sapiens
tcttgaactcctgacctcaggtgatccgcctgcctcggcctcccaaagtgctgggattacaggtgtgagccaccacgcccggcccatctagagtttttaaktataatattagtcctctaaaaatgctatcacttaaaaaaattttatcataacattcaaatgtttggcaaaagcatgtgatcccagcatgtttctttgtct

SEQ ID NO: 494163 - DNA, 201 bp, Homo sapiens
tcaccatgttagccaggctggtcttgaactcctgacctcaggtgatccgcctgcctcggcctcccaaagtgctgggattacaggtgtgagccaccacgccyggcccatctagagtttttaattataatattagtcctctaaaaatgctatcacttaaaaaaattttatcataacattcaaatgtttggcaaaagcatgtga

SEQ ID NO: 494164 - DNA, 201 bp, Homo sapiens
cgggtggatcacgaggtcaagagataagagaccttcctagctaacacggtgaaaccccatctctactaaaagtacaaaaaattagccggacgtggtggcgrgcgcctgtagtcccagctactcgagaggctgaggcaggagaatggcgtgaacccgggaggcggagcttgcagtgagcggagatcacgccactgcacccca

SEQ ID NO: 494165 - DNA, 201 bp, Homo sapiens
attcatcccctgctactttaactatttcatcaagttcaccctgattactttttaattgatcagtttgcatatccatttttatttttatatttatttttgasatggagtcttgttgtgtcgccccggctggagtgcagtggcgctatctcagctcactgcaacctccacctcccgtgttcaagtgattctcctgcctcagcc

SEQ ID NO: 494166 - DNA, 201 bp, Homo sapiens
ccactctttccactgttgcagtctccagtgtctactggtcccatctttatgtccatgtgtacccaatttttagctcccacttataaatgataacatgcagygtttggttttctgtagaacatgtattttggaaggagaaaacatccctcattcccaagtcaaatatccctccccactttgcacaactgataacatgagtaa

SEQ ID NO: 494167 - DNA, 201 bp, Homo sapiens
ggaggcggaggcgggtggatcacgaggtcaagagataagagaccttcctagctaacacggtgaaaccccatctctactaaaagtacaaaaaattagccggrcgtggtggcgggcgcctgtagtcccagctactcgagaggctgaggcaggagaatggcgtgaacccgggaggcggagcttgcagtgagcggagatcacgcc

SEQ ID NO: 494168 - DNA, 201 bp, Homo sapiens
catctaggagaaaaatataaggaaaagtgtaggggcagaaggcagggatcaggaagtctgtctagaaaccatattatagaaagaaacagtagggttttaaytggggaaggaggggacctggagggtggggatatgatactgttcacaagcactgtacatcccagccgccttccattcctaagagaaccatagtctgtttgc

SEQ ID NO: 494169 - DNA, 201 bp, Homo sapiens
attggctctttaaactaatgtttgcctttttttttaactgcttaatgcaaatctaagatgccccatatactttccttacatctttgttgttttgttttgtyttttttgagacggagtctttctctgtcacccaacctggagtgcaatggtgcaatctcggctcactgcaacctccatctcccaggttcatggattctccta

SEQ ID NO: 494170 - DNA, 201 bp, Homo sapiens
tcatgtaccacataatgacatttcagtccatgatgaaccacatataaaacagcggtcctgtaagataaaactatatttgtgccttttctatgtttaggtaygctaaacttaccactgtgttacaactcgctacagtattcagcacagtaacatgctgcagaagtttgtagcctaggaacaataggctatatactgtacagc

SEQ ID NO: 494171 - DNA, 201 bp, Homo sapiens
aactcaacctgcattctggtttagaataagccagagtttgagttctagtgtcaatgagagtctattccagtcctgacacttggaacccacttaaccagtaktggaggagtgcatggcagtgcagacagattgagggaacagtggggtgagagggatacaagatacatttgagacaaactatttgggtgacacagttacatg

SEQ ID NO: 494172 - DNA, 201 bp, Homo sapiens
atgtgatgggaactttggcagaaagcaaccatgtgatctgagcatgagccaaacacagcacagttaagagacatgtgctccagtcctgaataaatcaaaaytcaaaaatgtaaaacttcaagttagaattccatggctcgtgagaagaacattcaagagagattaagagttactgaagaaggaggttctggtgaaaagtaa

SEQ ID NO: 494173 - DNA, 201 bp, Homo sapiens
gggaggcggagcttgcagtgagcggagatcacgccactgcaccccagcctgggcgacagagcgagactccgtctcaaaaaaaaaaaagaaaaataaaaaaataaaaataaaaaaatattctaaggctgggcgcagtggctcacgcctgtaatcccagcactttgggaggctgaggcaggtggatcacttgaggccaggagt

SEQ ID NO: 494174 - DNA, 201 bp, Homo sapiens
atagatagaataaaatcatagtgtgagataccacctatcccaacatctgctgggaagctccaactgctaaaaatagagtgcctgataaattcttgacttastttcctgccagttgaatgtctctacagttaggaaaaatagtgatggaaacagcttatctggacttgattctgacaagaaactgctgggtgatgaagtaga

SEQ ID NO: 494175 - DNA, 201 bp, Homo sapiens
gtgcttatctttgtcttaatcaaaaatacttaattacttcatttttctgaaagactcataatttgaaaatcagagttcaagaaacttgtcttctaatcctrtcattgtcaattactttctaggttcctttggcaaattaaaatttccctcagcctaagatttctcatcaaagaagaggaaataatagtttcagccaaaatg

SEQ ID NO: 494176 - DNA, 201 bp, Homo sapiens
ccttccatttctctaaacagagcacacctatcatgtgttcctctttatattagtcctggggtttctggttatcctgtccagaaaacagcaatctttaaggkacatggagtcaaatgacattacaaataagattgtttttacacgatcattgttttttaacaatgtcttccaattccatgagattaaatacttttatgtgat

SEQ ID NO: 494177 - DNA, 201 bp, Homo sapiens
cctgtaatcccagcactttgggaggcggaggcgggtggatcacgaggtcaagagataagagaccttcctagctaacacggtgaaaccccatctctactaaragtacaaaaaattagccggacgtggtggcgggcgcctgtagtcccagctactcgagaggctgaggcaggagaatggcgtgaacccgggaggcggagcttg

SEQ ID NO: 494178 - DNA, 201 bp, Homo sapiens
tttaagtataaaaataggtagtatacattacctcgattcgtataattcatatcgaagtagacttgcatcttaatagtgtccagggatggatttttagtatycaatagccgagtcatacaaagctagaaaagaatgtcccatgaatacttctagttatagtttttgagacagtcaagtatttcctaaagttattttcaaaaa

SEQ ID NO: 494179 - DNA, 201 bp, Homo sapiens
acaactaacaaatttttattcataaatgtaacgtgtatcctgtttaattttacccatactgctgtttaagctttactcctcctcctgctttattcctccawacactattatctattatatcaaataggtctcttgtctaccctcatagagttttttcccccttgcttgttaagttttgttttaggaatcaatacgaaaatg

SEQ ID NO: 494180 - DNA, 201 bp, Homo sapiens
tgggcttttgtttcatgcagctgaaggcaataatgactaatacaaatattgtatttacaactgagaataagtaattgcaaatttgaggactgttgggtaawcaccttaacaagattctgcacatcacttttcatgagggttctatccatgttaaagccattacttggatccaggacaacagctttcacctagaaaaaagta

SEQ ID NO: 494181 - DNA, 201 bp, Homo sapiens
accacattaaatacttacaaatacaaaaagggataagtacaaatgagaaaatcaaagaatagtaaggtaagtaaattgtctaagtatatgcagctaataargggtagcaatcttggtggatcccaaaccatctgagcccacagcccagctcttaaccattatactgtgttgcccaagatgtcaccagaaatggttgtggtg

SEQ ID NO: 494182 - DNA, 201 bp, Homo sapiens
atgggctgcacattcttgtcctatttctcgtataatactccttataacactttcggcctgagttggaggcattctggctaaataaaacaacaatttttttwaaaaaaccgtggttttatgcaaatttatttttttcctcttttgatttctgcaatattgtatttgtaaacagtcataatatcatctattagcttattagca

SEQ ID NO: 494183 - DNA, 201 bp, Homo sapiens
gctgaggcaggagaatcacttgaactcgggaggcggaggttgcagtgagccaagatcgagccactgcactccagcttgggcaacagagcgagactctgtcycaaaaaaataaaaaaaaataattatatttattcttactatgtgctaagcaccacattaaatacttacaaatacaaaaagggataagtacaaatgagaaaa

SEQ ID NO: 494184 - DNA, 201 bp, Homo sapiens
tttggacaacagtaaactgaaaggttattaaaggtagtgaactggtttgtgatccttctaaggagatgatatagaaaaatacggttctttgtaagaatttktatctgtcttaaaagaaaatttgtctgaatattcttttcttcttataacaagagtgattatttttcaagaaactaaaagtttcacgtgaatgcttgttgg

SEQ ID NO: 494185 - DNA, 201 bp, Homo sapiens
catgggctgcacattcttgtcctatttctcgtataatactccttataacactttcggcctgagttggaggcattctggctaaataaaacaacaatttttttaaaaaaaccgtggttttatgcaaatttatttttttcctcttttgatttctgcaatattgtatttgtaaacagtcataatatcatctattagcttattagc

SEQ ID NO: 494186 - DNA, 201 bp, Homo sapiens
gcaggttggcaagctagtgagatctcacctgtgatgtatgccatgtggtttaggggatgccagaatccttgtactgagcaggggatattcttgaagacccygtcatagagttcatcattgaaatgactcacaaggcaatgtgaattggaagatgaggttgagtacaagtttacaatattgttttcttgatttgaagggacc

SEQ ID NO: 494187 - DNA, 201 bp, Homo sapiens
tgtatttgtttatcagttgtattagttttttggtggagtcttaagatttttccaaatgtaagatcatatcatctgcaaacaagcataatttaacttcttcytttccgaggtggatgccttcatttctattgtctgattgctctagctaggaattccagtactatgttaaataacagtgttaaaagtgggcatatttgtctt

SEQ ID NO: 494188 - DNA, 201 bp, Homo sapiens
atcttttgaaatacaataggtataatttttcttaaatgtatacaggtattcttagatttaaatataattgcattcttgagaaatggatcctcaagaatccrtttttgtatagctgttattttcctattcctcaatgataaaattaattaggggttcctctgaaaattatgttgataacaagatttaataaaatcacattga

SEQ ID NO: 494189 - DNA, 201 bp, Homo sapiens
tctgttctccgcaagatcctcaacacctagaacagtaccagcatatgtatggggctcccaagatatttgtgagatggatgaatcttttgaaatacaatagrtataatttttcttaaatgtatacaggtattcttagatttaaatataattgcattcttgagaaatggatcctcaagaatccgtttttgtatagctgttatt

SEQ ID NO: 494190 - DNA, 201 bp, Homo sapiens
ggagtgcagtggcacaatctcagctcactgcaagctccgcctcctgggttcatgccattctcctgcctcagcctcctgagtagctgggacaacaggcaccygccaccacgcgtggctaatttttttgtatttttagtagagacggggtttcactgtgttagccaggatggtttcgatcttctgaccttgtgatccatctgc

SEQ ID NO: 494191 - DNA, 201 bp, Homo sapiens
gccaatactgatatggttatcatactatacagttgcagttcctttagtagcagttgcttatgtgggggaattctctcatccaacttatagcacactattayggcaaagtaaccataaagaacaggatcaatttatacaaaacattatatttttagaaattaaatataattataatgacttgcgatccaatattatagggct

SEQ ID NO: 494192 - DNA, 201 bp, Homo sapiens
gctggagtgcagtggcacaatctcagctcactgcaagctccgcctcctgggttcatgccattctcctgcctcagcctcctgagtagctgggacaacaggcrcctgccaccacgcgtggctaatttttttgtatttttagtagagacggggtttcactgtgttagccaggatggtttcgatcttctgaccttgtgatccatc

SEQ ID NO: 494193 - DNA, 201 bp, Homo sapiens
aatacattttcaaccacagtacaatgattatttctgttgtcacagccaatactgatatggttatcatactatacagttgcagttcctttagtagcagttgyttatgtgggggaattctctcatccaacttatagcacactattacggcaaagtaaccataaagaacaggatcaatttatacaaaacattatatttttagaa

SEQ ID NO: 494194 - DNA, 201 bp, Homo sapiens
tatgtgtgtattcgtctgtgtgctactttcacattttgtaattggttttatataatgtttgtcagcatctctcatctaaagaagtggagttttgtagttastgcttgtaaaaaataaacattatttactgataactaaaatatttagctaaaactaacaaaacacttaaaaaacaataatttttggacatggaatatactt

SEQ ID NO: 494195 - DNA, 201 bp, Homo sapiens
atgatcacagacaaccctgcttgtggtgttgtgtggatggtgacaagtcctactgctggatggagtgagtgcgtcctctctgcagttccacagctacctcrtatggcttagggcggatcctgctgtgggatttataccagcacgccaacactaagaagggcctaattctcccttgggggagcagccagagaggacaacatg

SEQ ID NO: 494196 - DNA, 201 bp, Homo sapiens
gtcaaatgacattacaaataagattgtttttacacgatcattgttttttaacaatgtcttccaattccatgagattaaatacttttatgtgataagaactyccaaatttatatctctagcccagacctctcttctgagttccagacccatttaatccaactgcccatttggatgtctcaagacattaaaaactttaaatta

SEQ ID NO: 494197 - DNA, 201 bp, Homo sapiens
ccaaataaacttctgttttttatgagttacccactctgcgtattctgttatagcagcagaaaatggactaagatacatactaaatgaataaagaagattayaatacacagctctgttatgtataggcaaaattgacaagtatatataaccaaaatagtgtgagaccagtgctcacagatccaagtatatgggtcctaaccc

SEQ ID NO: 494198 - DNA, 201 bp, Homo sapiens
aatacctcgtgtatactactattttgtgggcttttgtttcatgcagctgaaggcaataatgactaatacaaatattgtatttacaactgagaataagtaaytgcaaatttgaggactgttgggtaatcaccttaacaagattctgcacatcacttttcatgagggttctatccatgttaaagccattacttggatccagga

SEQ ID NO: 494199 - DNA, 201 bp, Homo sapiens
tacagaataagacaactaaacaaaaagaccattccagaaattaaccagggcacttggcttaagtgaaaaatgtgtccctcaaatcacagccatagtatatrcttaatataatatgtgcccactgtttcctaataccaataagcactctagcatgaacttttgaacaggccaagtcagcatactacttaattttaatttcta

SEQ ID NO: 494200 - DNA, 201 bp, Homo sapiens
aaaggaagcaacaaacatcaaacttgaatatggtgctagaaaagttatatggggaaataagttgaaagcaatggctaggttttcaattgggaaactatggyatattttattgtatttttattgtgtattgttaaccaaaagcaagaacagagaaaccacagcaatgagtaatttttaacaacggcaaacaaaaatacacgt

SEQ ID NO: 494201 - DNA, 201 bp, Homo sapiens
agtgtaggggcagaaggcagggatcaggaagtctgtctagaaaccatattatagaaagaaacagtagggttttaattggggaaggaggggacctggagggkggggatatgatactgttcacaagcactgtacatcccagccgccttccattcctaagagaaccatagtctgtttgctaaaagttagagtaaatattcaact

SEQ ID NO: 494202 - DNA, 201 bp, Homo sapiens
tctgaacttagttgaacaatgctatacatttactggaaaaacagctgacataaaactaaatataagcaagaagatcaagtttaatgggaataaaactgagraagcaagataaactagactggtgtctaaagtttgatgttttcgaaaaatatgacaaaagaataaaacaatgctttcatgatttacctgcaaatcctgagc

SEQ ID NO: 494203 - DNA, 201 bp, Homo sapiens
ttcactttctagaggtgctacttgagttttagaatggatacacagtgtaaaaggagactgggtacattttaactcatttgtgctgatttttttttttttttcagataaaaagggaacttcaatctttaacacttctaatttaacatgttttataaaatacaatgaccatatattttcacttatgaaatggaaattggttat

SEQ ID NO: 494204 - DNA, 201 bp, Homo sapiens
taatcacatccctgtaatatctgcctactaatgaatactcctaattctgcaatataatctataatcaccactaggaatcttttcagagtaacaaccaaaaytgaagtagaatttgctgtgtaaagccattttcctttaaagcagggttccacaagccaagttcatacacaaggtcagaaggatcatgaactccccaactgg

SEQ ID NO: 494205 - DNA, 201 bp, Homo sapiens
tttcactttctagaggtgctacttgagttttagaatggatacacagtgtaaaaggagactgggtacattttaactcatttgtgctgatttttttttttttttcagataaaaagggaacttcaatctttaacacttctaatttaacatgttttataaaatacaatgaccatatattttcacttatgaaatggaaattggtta

SEQ ID NO: 494206 - DNA, 201 bp, Homo sapiens
ctcactttcacatagaactagcacccctcgtcttaacctctaagaccacctaaacaaccaaagtactgcttagccacatcccacacaactatgaacagctrtactggtggaataaactgtagtaacaaagctaggaatttctgtaaacagtatgaccaactgccacttttaaataagggattaaatgaatcaaggaaatgg

SEQ ID NO: 494207 - DNA, 201 bp, Homo sapiens
tatagaaggaaactgccttgctgggaagaaaaaaagaaaattttatattcgagtgctatttcttttgcagcaccaaaactttataacaatttaggggctcrtctgggattacattcccctccagaggcggtctctggttctctcttgtgaggaggtgcaccccgcccccttgtggcgtcctcaggggtgagaaatcaggac

SEQ ID NO: 494208 - DNA, 201 bp, Homo sapiens
atttcactttctagaggtgctacttgagttttagaatggatacacagtgtaaaaggagactgggtacattttaactcatttgtgctgatttttttttttttttcagataaaaagggaacttcaatctttaacacttctaatttaacatgttttataaaatacaatgaccatatattttcacttatgaaatggaaattggtt

SEQ ID NO: 494209 - DNA, 201 bp, Homo sapiens
ttccttcacctctttggggactgtcatccataaaatggaggggatggaacacattatttctaaggtatgttccatctgtaacatattttatgcatattctyctctgagaaacaaccaataagtattattatccctaataatatgctaaagaaaaaaggcctatctataaggcaaaagttattttaaatcaaagaaatgtag

SEQ ID NO: 494210 - DNA, 201 bp, Homo sapiens
actctggcatttcatcaaccagaggaaggaaaaataagacatcataaagtgagagaagctccttataggtcattcaactctcatgtctatttagatgcaaytggagtcccacggggaataccagatcaatttaaagcccgaaatcaaatagctgcaggatttgagtcaatattttggtgggtcacaattaataaaaacata

SEQ ID NO: 494211 - DNA, 201 bp, Homo sapiens
agtcctacatgaatgatggcatcactacaaaggatgtcactcatgagagtggaaatagtgacctaatactaggttctgccacactgttaaatccttgtggrtatttaatcaatggaatgaaataggatggaatttaccagactattcacatcactccagaaacagaattttttacgttggcttcaaaaccaccttaagtca

SEQ ID NO: 494212 - DNA, 201 bp, Homo sapiens
gctgttaaaggaatagctgagcaattagggactaactgccagatggcttgggaaaataggatagccttagacatgatattagcagaaagaggaggagtttrcatcatgattaaaactgaatgttgtgccttcatcccaaacaacactgcccctaatggaagtataacaaaggcattgcaaggtctgactgctctgtccaat

SEQ ID NO: 494213 - DNA, 201 bp, Homo sapiens
tctggtgaggaagcgcattttacacacacacacatgcacacacacgcacacgcacacacacacacacacagagatcccaattaaagtggtgggtcaaatgytgctgagccatttttgtggcatttctggttcacataacatcatgctgttgaatcctacttttcttatacattttcattgcctcaaaagactattatactt

SEQ ID NO: 494214 - DNA, 201 bp, Homo sapiens
catagaatgatgttgaattttatcaaatgctttttcagcatttgataaagcatatgaccaattaaaatggtcatatggtttttgtccttcattctgctgayatgatgtatcacattgatttgcatatgttgaactatccttgcatctatgggatgaatcccacttggtcataatgaaagacctttttaatgtgttgttgaa

SEQ ID NO: 494215 - DNA, 201 bp, Homo sapiens
agttttgctaagaagcagccaacagcagagctgattaagaaaaatgaaaaatgagaacacacatagaagggtggtggttgctttctagagactgatacccyagggccatgctttctgtaaccaccaccttgccattgtaaaaagctccacatgtactatagtttaatcattttgaattttatgcattagtatatcaaagag

SEQ ID NO: 494216 - DNA, 201 bp, Homo sapiens
ggctggagtgcagtggcacaatctcagctcactgcaagctccgcctcctgggttcatgccattctcctgcctcagcctcctgagtagctgggacaacaggyacctgccaccacgcgtggctaatttttttgtatttttagtagagacggggtttcactgtgttagccaggatggtttcgatcttctgaccttgtgatccat

SEQ ID NO: 494217 - DNA, 201 bp, Homo sapiens
tgtgtattcgtctgtgtgctactttcacattttgtaattggttttatataatgtttgtcagcatctctcatctaaagaagtggagttttgtagttagtgcwtgtaaaaaataaacattatttactgataactaaaatatttagctaaaactaacaaaacacttaaaaaacaataatttttggacatggaatatacttgtaa

SEQ ID NO: 494218 - DNA, 201 bp, Homo sapiens
actgaagaccattttttgtttgttttcctgactgatcatctaataaaatataacaatattaagaaagtaaaaaataaattaaaaagctaaatatgactcaytataattagattttttctggccaaatcattgcaaaagaacctggaaagtatagagatatatcttgggccatgttttgtgagctgcaagttaaatatttga

SEQ ID NO: 494219 - DNA, 201 bp, Homo sapiens
ttgtcagcatctctcatctaaagaagtggagttttgtagttagtgcttgtaaaaaataaacattatttactgataactaaaatatttagctaaaactaacraaacacttaaaaaacaataatttttggacatggaatatacttgtaaataccaataaagaaaataaacacataattaatgagctgaatataattgtttttc

SEQ ID NO: 494220 - DNA, 201 bp, Homo sapiens
aagtcttacgaacttagacagtagactttagatagacatttaactcataaattatgagaaaataaacttgcattttatttcaaagcattttattttagtaygattattataaagttagtttactttaaaaagccaaacacatgtgatcacctaagaaagatttatggactcttcacctcaaaaaaccaagggaaaaatgtc

SEQ ID NO: 494221 - DNA, 201 bp, Homo sapiens
ggagagtttccccaatgttttcctgtagtattaatagtttcatagtttgaggtctcagatttaagtctttaatccactttgatttgattcttgtatatggygagagatagggtctagtttcattcttctgcacatggatatccagttttcccagcaccatttattgaagagactgtcctttccccaacgtatattcttggc

SEQ ID NO: 494222 - DNA, 201 bp, Homo sapiens
tttgttgttttctttgctgtgcagaagctttttaacttgatgtgatcacatttgtccatttttgctttggttgtctgtgctggtggggaatgacccaagawatctttgcccagtccaatatcctggagagtttccccaatgttttcctgtagtattaatagtttcatagtttgaggtctcagatttaagtctttaatccac

SEQ ID NO: 494223 - DNA, 201 bp, Homo sapiens
aagattgtttttctgtaagaatcaatgcatcttctaaaggacctaaataagctcaattaattttacagggataacatttattggtttgtaaattcccaacwtgaatctgaggtagatatataacaaataacattctaaagaaatggagctttatttgcaacaaaatagcaatgattaatattcttttctccaacaaatcaa

SEQ ID NO: 494224 - DNA, 201 bp, Homo sapiens
gccaatatggttagcttaatatacactgttggagatactttaacttttcaatttcatttaatatttgcttacatatgctgctttaatgaaatgaaatgagyaataaaaaacttgaactgaaaggatattttttagtttctggtttagttttcagtttttatgtattctaatagtttgggaaatgactgctatatttttatt

SEQ ID NO: 494225 - DNA, 201 bp, Homo sapiens
tatgagtcatcccctttcaatggtactgcagcatccatatttcataacacatatacactttccattactaatcacttataatttcttgcttatgtcagtcyaccagagcacctccaaaatgaagactttgtctggatcatctttgtagatcctttgttagttcaccattagattccataaagtttttaaagtgaatattca

SEQ ID NO: 494226 - DNA, 201 bp, Homo sapiens
caaatagttattgaccatgttcatggtgctaaggctatagaagataacaaattccctgctctcaaaaaatcacaaatatatcataggtcacagagtgacaygtgctacatgaaaaaaataataaagcaggttaaatacatagtaaaaggaagaagtgtgcaattgatattttaaattgagtgattagggaaggctgaataa

SEQ ID NO: 494227 - DNA, 201 bp, Homo sapiens
tctcagctcactacaacctctgcctcctggattcaagcagttctcctgtctcagcctcctgagtagctgggattacaggtgtgcaccaccacacccagctwatttttgtatttttaatagagacggggtttcatcaaattggtcaggctggtcttgaactcctgacctcaggtgatccacccaccttggcctcccaaagtg

SEQ ID NO: 494228 - DNA, 201 bp, Homo sapiens
tggcagccacatcttaaccctgcattgttccctgcttctcacgaaattctattagctcccatatagtgtttgtgtggaaatgtcccccaaaagaaacttayagtttaaaatgttttttttcggttatgttttactatagtttatggggacattatttgtaatacttaagaacttagaaattctgtaagtcccagataaatc

SEQ ID NO: 494229 - DNA, 201 bp, Homo sapiens
agttttctgaaatctgccacatttactctatcttctaaaatgaaggagaagaagaaaagctttaattcagtgagaaggttaaatttccaaaataaatcagyagtagctcattctaaacattacctttttattgctttgtacttttcccgatgggcaaaaacttgatattcacaaaaccagatttatgaggaagtctattca

SEQ ID NO: 494230 - DNA, 201 bp, Homo sapiens
gaaatgaaacagaaagaagacataagagaagcatatgcaactaaagacaatgcccctgggcagggcctgatgagaaacatggaccccgcaacagggaaaayaacttgaaacccacgcaagaagatattccttatgtattcgttcaatatttattcaagggtgaagccaagtgctctatggaggaagggtggagcaagaatc

SEQ ID NO: 494231 - DNA, 201 bp, Homo sapiens
aattcagtgagaaggttaaatttccaaaataaatcagcagtagctcattctaaacattacctttttattgctttgtacttttcccgatgggcaaaaacttkatattcacaaaaccagatttatgaggaagtctattcaagcaaagaagtacaaatgacctcagtgacatataacgtcacgtaagtttctggggcaaacttg

SEQ ID NO: 494232 - DNA, 201 bp, Homo sapiens
agtagagacggggtttcaccatgttagccaggatggtctcaatctcctgacctcataatctgcccacctcggcctcccaaagtgttgggattacaggcgtragccaccgcgcctggcccaggaaagggaactcatacactttttatggaaatgcaagtttgatgggaatgcaagccattatggaaaatagtatgaaggctc

SEQ ID NO: 494233 - DNA, 201 bp, Homo sapiens
attacacacagcatacaggtgggaactgttaacgactgttatcttcctttcgttacgatttcagtgctgttttgacgccccagtgatgtctttagtggttrttgcatggcccagccgccgcatgggatctgcgcccggagcctgcctttaagcctctgagcatccacagggtaggaggcgcagaggagaccggagccgcgg

SEQ ID NO: 494234 - DNA, 201 bp, Homo sapiens
agaccaatgcaacagaatagaaggcctagaaacaaacctatttcatatgaaagttgttaatacaatagaggtgcactgtattttgtgggaaatacatttayattatttagtaaatcgtgttaggaaaactggcttactacatgaagaaaaataaaattagaatcctttattatctccaaatagactaaagatctcaatgta

SEQ ID NO: 494235 - DNA, 201 bp, Homo sapiens
gtttgcacaacagtgaaatcacctaatgatgcatctctcagaaccctgaacttatattctttgttaagcgatgcatgactgtataacaagtctccggtatkcagaacaaaggggtaattaccaaactgtgcctcgtattacttagacaacattgggagacagtggggttttaggatatattgagaaataatgacagatgaa

SEQ ID NO: 494236 - DNA, 201 bp, Homo sapiens
cttggaggcggaggttgcagtaagccgagattgcgccactgcactccagcctggatgacagagcaagactccatctacaaaaaaaaaaaaaaaaaaaaaaagctcacagttgagcaggctgagaagttcaagggcatggccctggcttcttcgagggctttcctgctgcatcacatggcagagaaggtctaaggggaggtg

SEQ ID NO: 494237 - DNA, 201 bp, Homo sapiens
ctccagaaagtaaaccaaccaactctgtttattcaactttatttgccagtacttcctcaaaaataatctccttttccctctttaccatttttctccctctycttttgcaataactactttattgctgaattctattagctcccaccttgactattcaaataatcactcaacgaataccctgcttccagtttgccctttcat

SEQ ID NO: 494238 - DNA, 201 bp, Homo sapiens
ggctacagacataaaatattttattttttccatactataaatatttgttgtttaaaatgacaagataccataaagaggggatggtgggggtaatttcactsagttggacagggatgagagtttcaaagacaggctttaagggtaggtatctatattgtaattaaggtgactgagaatcagaaggatgagagtgcccagggt

SEQ ID NO: 494239 - DNA, 201 bp, Homo sapiens
gctccgctgcccgacaggggctgaccagcgcagatgctcgcccgccgccgccccccgcggactccccactcccagcagacccagttctcacctctcggggmagccatggttccccgacagccccgcgcggaactgacgcccgccccctccgcgcccccgcgcaggacaccggggaccgccccttgtggtcatagagacgaa

SEQ ID NO: 494240 - DNA, 201 bp, Homo sapiens
atagtttttttaggaacttctatactgttctccatagtggcttactaatttacattcccaccaacagtgtactagggttccctttctccatatcctcaccrgcattcgttattgcctgcctttttgatataagccattttaactggggtgggatgatatctcattatagttttgatttgcatttccctgatgatcagtgat

SEQ ID NO: 494241 - DNA, 201 bp, Homo sapiens
ttttctagaatatttcaatgtgttcactgcagaagataaaggcctgattaaaacaaaataattcactatcttacccaggctatatattggattttttttttctttttgagacagtgtctcactctgtcgcccaggctggaatgcagtggcacgatctcagctcactgcaacctctgtctcctgggttcaagcgattctcct

SEQ ID NO: 494242 - DNA, 201 bp, Homo sapiens
tactaaaaatacaaaaaattagccgggcgtggtggcatgcacctgtagtcccagctactcgggaggctgaggcaggaggatggcatgaacccgggaggcasagcttgcagtgagccaagatcgcaccactgcactccagcctgggcgacagagctagactctgtctcaaaaaagaaaaaaaaaaaaagactttgaggggct

SEQ ID NO: 494243 - DNA, 201 bp, Homo sapiens
caggcacacactaccatgctcgaccaattttttgtgtgtttttggtagagacagggtttcaccatgttggccaggctggttttgaactcctgacctcaggkgatccgtccacctcagcctcccaaagtgctggattacaggcatgagccactgtgcccagccctttcacagattttttaaactcatttagttgggtttctc

SEQ ID NO: 494244 - DNA, 201 bp, Homo sapiens
ttggattgaatcatcatgatctatgtgaggcatccatcctggttttggaagagctcaaatcagaagttcccagcagggcttttatgttgctctggccatgkaatcaagccagacatacgtaactggttagaccagctgcaaataatcaataaaaggagtgaccagtggagcttcagactttatttatttatttacttattt

SEQ ID NO: 494245 - DNA, 201 bp, Homo sapiens
gatctatgtgaggcatccatcctggttttggaagagctcaaatcagaagttcccagcagggcttttatgttgctctggccatgtaatcaagccagacataygtaactggttagaccagctgcaaataatcaataaaaggagtgaccagtggagcttcagactttatttatttatttacttatttatcgaaatgaagtctct

SEQ ID NO: 494246 - DNA, 201 bp, Homo sapiens
tttagataaggcagcccatagagcatttcaggccaagatcttttgtgtgtgtgtgtgtgtgtgtgtgtgtgtgtgtgtgtgtgtgtgtgtgtgtgtgtgtggcagagtcttactctgtcgcccgggctggagtgcagtgatcttggctcactgcaacctgcacctcccaggttcaagcaattctcctgccttggcctcctg

SEQ ID NO: 494247 - DNA, 201 bp, Homo sapiens
atttagataaggcagcccatagagcatttcaggccaagatcttttgtgtgtgtgtgtgtgtgtgtgtgtgtgtgtgtgtgtgtgtgtgtgtgtgtgtgtgtggcagagtcttactctgtcgcccgggctggagtgcagtgatcttggctcactgcaacctgcacctcccaggttcaagcaattctcctgccttggcctcct

SEQ ID NO: 494248 - DNA, 201 bp, Homo sapiens
aatttagataaggcagcccatagagcatttcaggccaagatcttttgtgtgtgtgtgtgtgtgtgtgtgtgtgtgtgtgtgtgtgtgtgtgtgtgtgtgtgtggcagagtcttactctgtcgcccgggctggagtgcagtgatcttggctcactgcaacctgcacctcccaggttcaagcaattctcctgccttggcctcc

SEQ ID NO: 494249 - DNA, 201 bp, Homo sapiens
gaatttagataaggcagcccatagagcatttcaggccaagatcttttgtgtgtgtgtgtgtgtgtgtgtgtgtgtgtgtgtgtgtgtgtgtgtgtgtgtgtgtggcagagtcttactctgtcgcccgggctggagtgcagtgatcttggctcactgcaacctgcacctcccaggttcaagcaattctcctgccttggcctc

SEQ ID NO: 494250 - DNA, 201 bp, Homo sapiens
atatttagttttctgattcattttgagttaactcctgtgaaaggtataggggtctgtgtctagatttatctttttttatatgttggatgtctagttccagyaccatttgtaaaaatactatctctgatccattgtattgcttttgcttttttgtcaaagatcagctgactatatttgtgtgtgtctttttctggcctctct

SEQ ID NO: 494251 - DNA, 201 bp, Homo sapiens
ctggggctgagcacagtgttgcctgaaaaaaagtgggattctgttaacaaaggagaaggggaagtagtgatatgtaggatgagtaagtctagacgtctaawgtactacatgaggactatgcataataaaatcatactatatttgggattcttgcaaaatgagtagattttggttcctcttgccacaaaaatgggtaactgt

SEQ ID NO: 494252 - DNA, 201 bp, Homo sapiens
tggtctcgaactcctgaccttaggtgatccccccatcttggcctcccaaagtgctgggattacaggcgtgagccaccgcgcacagcccaaagtgattattratataatctccttcacttttgaaggacaattttataggggtacagatttttaggttggtcttttttttctctttcttcttgcttatatggtttcttcact

SEQ ID NO: 494253 - DNA, 201 bp, Homo sapiens
tcatttctttttattgctgaataatattccattgtatggaaataccacattttattcatcagttagggctgtttccactttttggctactataaataatgktgttgtgaacattcatgtgcaaattattgtgtggaaatatgctttcatttctcttgggtatttatagggatggaattgctgggccaaatggtagctgtat

SEQ ID NO: 494254 - DNA, 201 bp, Homo sapiens
tgagagatagatgtcaaaaaaaaatagaagaaagtaatttgtagtatcacacaagtcatggaagaagagtttcataaaggaggaggatgtgatctaatataattgaatgttgctaaaatgtcagatgaagttaggaccaaaaagtgtccattagttttaacaatatggaagttatcagtgacttgaaacaagaatggtggg

SEQ ID NO: 494255 - DNA, 201 bp, Homo sapiens
atgagagatagatgtcaaaaaaaaatagaagaaagtaatttgtagtatcacacaagtcatggaagaagagtttcataaaggaggaggatgtgatctaatataattgaatgttgctaaaatgtcagatgaagttaggaccaaaaagtgtccattagttttaacaatatggaagttatcagtgacttgaaacaagaatggtgg

SEQ ID NO: 494256 - DNA, 201 bp, Homo sapiens
tgtagacagaaaagtaaattggttttcattaaatgagaacatgatttaatgttgattgtgagcattatggggagagggagtgatagagaattactatagcrtgaacaactgggtagatgatatagagaatagagaagaaaacattgattagtatgaaaatagatgtatgtgttgagatgtgtgtggagcatggagacattg

SEQ ID NO: 494257 - DNA, 201 bp, Homo sapiens
gcattaaaagatacatgaagtctgtttcagtatagtcttttttttttttccctccaaggcagagtctcactctgtcgcccaggctggagtgcagtggcccratctcagcacactgcagcctccgcatcatgggttcaagcaattctcctgcctcagcctcccgagtagccgggactataggttcgcggcagcaagtccagc

SEQ ID NO: 494258 - DNA, 201 bp, Homo sapiens
gcatacccagttatcctgataggaatctgcccatgatatttgtttacgtggaaggagatatcaaggctcagtttattggtcctctggtgtttggcggcatkaacctgacaagagatgagttgcagtgaaaactgtctgaatctggagcaattaagagggacctggaggaaaaccctaagaagccagttgaagatgtattgc

SEQ ID NO: 494259 - DNA, 201 bp, Homo sapiens
aagtttaatacctaaaaagcacttggaagagtgtctggtacatagtaagtggtcaataaatattattattccctctcttcttttctgcaaaatagacacartgttttttatttttattttggacacagagtattaatgtattaactagtttatgaaagtttttgataaatgcaatagcattaaaagatacatgaagtctgt

SEQ ID NO: 494260 - DNA, 201 bp, Homo sapiens
ggaggttgaggcaggagaattgcttgaaccgggaagaaggaggttgcagtgagccgagatcgtgccactacactcaagtctgggcaacaagagcaaaactytgtctcaaaaaaaaaaaaaaaaaaaaaaaaagatacacactaatgactcagtaattgtgcatcttaatgtcttaatgtttatcttcaaacacacacgcac

SEQ ID NO: 494261 - DNA, 201 bp, Homo sapiens
ggaaagagaagctagtggtagggctcagcccaagtttgaaagcctcaaaagcaggaaaaccaacagtgcagccctcaatctgaggcctaaggcctgagagmcccccagaaggctgctagtgcaagtcttagaatccagagcccaaagaacctggagtctgatgtacatgggcaggaggagaggatataagcatctggcaag

SEQ ID NO: 494262 - DNA, 201 bp, Homo sapiens
gcctgtaatcctagccactcaggaggttgaggcaggagaattgcttgaaccgggaagaaggaggttgcagtgagccgagatcgtgccactacactcaagtytgggcaacaagagcaaaactctgtctcaaaaaaaaaaaaaaaaaaaaaaaaagatacacactaatgactcagtaattgtgcatcttaatgtcttaatgtt

SEQ ID NO: 494263 - DNA, 201 bp, Homo sapiens
aaaaatacaaaaattagctgggcgtggtggcaggggcctgtaatgccagctactcaggaggctgaggcacgagaattatttgaacccaggaggcagaggtwgcagtgagccgagatcgagatcacgccactgcactccagcctgggtgacagagagagactctgtctcaaaaaaaaaaaaaattatgacatattatttgtt

SEQ ID NO: 494264 - DNA, 201 bp, Homo sapiens
tttgctggaaataagtggcagttggccgaccctaatctgacccccctggaaactcctttcctatcatctgctactctttccctcccttaatctgtgctttrttcttgctgtccctctgtttttaactaccttcctctgaattcccagattgctccctgacatccagatcttgatgtgactcagtgagactttctctggctg

SEQ ID NO: 494265 - DNA, 201 bp, Homo sapiens
gtctctactaaaaatacaaaaattagctgggcatggttgcaggcgcctgtaatcctagccactcaggaggttgaggcaggagaattgcttgaaccgggaaraaggaggttgcagtgagccgagatcgtgccactacactcaagtctgggcaacaagagcaaaactctgtctcaaaaaaaaaaaaaaaaaaaaaaaaagata

SEQ ID NO: 494266 - DNA, 201 bp, Homo sapiens
tgagtgaatggatacaggtaattaattttaaaacaaaagcatattaggcacatcattttggagggtaatttgtcagtatcaaaaaaaaaaaaaaaaaaaaaggatacacatggccgggtgtggtggctcatgtctgtaatcccagcattttgggaggccaaggcaggtggatcacctgaggtcaggagatcgagaccagcc

SEQ ID NO: 494267 - DNA, 201 bp, Homo sapiens
tggaatactatggcgccatacaaaagaatgagaccatatgctgtgcaggaacacggatggagctggaggccgttgtacttaggaaactaatgcaggaacasaaaaccacataccacgtgttcttacttataagtgagagctaaatgatgagaacacacagacacaaagaggggaacaacggacactgggtcctactggagg

SEQ ID NO: 494268 - DNA, 201 bp, Homo sapiens
cttgaacccgggaggcagaggttacagtgagccgagatcacgccactgcactccatccagcctaggcaacagagcaagactccgtctcaaaaaaaaaaaamaaaaaaaaaaaaaactaggccgggtgtggtggctcacgcctgtaatcccagcactttgggggagaccaaggtgagcagatcacctgaggtctggagtttg

SEQ ID NO: 494269 - DNA, 201 bp, Homo sapiens
atgaaaaaataagtcttgtttaatagatttaatctaagaaaccccgtgttaggccagccgcggtggctcatgcctgtaatcccagcactttgggaggccarggcgagagcatcatttgagctaaggcgttcaagacaagcctgggcaacatagcaagaccctgtctcttaaaaaaaaaaaaaaaaaagcagggcatggtgg

SEQ ID NO: 494270 - DNA, 201 bp, Homo sapiens
agatctccactagaccatgccttgcattagctccagatagcccagataatgatctcagagctggtcagtttggaatttctgccagaaagccattcaccackctgggtgaggtggctccagtatgggtaccggattctcaggctccaaattgcatgaaatgtgaagccaggtttacattcaccaaaaggaggcatcactgca

SEQ ID NO: 494271 - DNA, 201 bp, Homo sapiens
ctgaatttatttttctactcctacataatagttttcagacactgagtcctcacttgatgtctttgataagttcttggaaactgtgactttaagcaaattgrtacactgtatgccggagaaccttaactgttgtttatatcaattagcttatagtaaaattggcttctttatacagtgagttgttttgcttataattgcagt

SEQ ID NO: 494272 - DNA, 201 bp, Homo sapiens
tgagccaccgcgcacagcccaaagtgattattaatataatctccttcacttttgaaggacaattttataggggtacagatttttaggttggtctttttttyctctttcttcttgcttatatggtttcttcactcctctttctccttgtttaggtttcttaggataaattagttgtaattcttttctttactcctccgtagg

SEQ ID NO: 494273 - DNA, 201 bp, Homo sapiens
gcacagcccaaagtgattattaatataatctccttcacttttgaaggacaattttataggggtacagatttttaggttggtcttttttttctctttcttcytgcttatatggtttcttcactcctctttctccttgtttaggtttcttaggataaattagttgtaattcttttctttactcctccgtaggtatagtgtttt

SEQ ID NO: 494274 - DNA, 201 bp, Homo sapiens
tttttttttttttttttttttttgagacagagtctctgttgcccaggctggagtgtatggcgtgatctcagttcactgcaacctctgcctcctgggctcargcaattctcctgcctcagcctcctgagtagctgggaccacaggcatgcgccaacgggcctggctagtttttgtatttttagtagaggcggggtttcacca

SEQ ID NO: 494275 - DNA, 201 bp, Homo sapiens
atctggaatttaatatagtttctcctcccattttacatggacattgaggctcagagaagtaacttgccccagatcccacaacagtgaatgatcaaactagyattcaaacccatatctctgggactccaaaatctgcaatttatttttcaaaatgccatactgctacgttgatatgacaattgttttgttttcatagatctg

SEQ ID NO: 494276 - DNA, 201 bp, Homo sapiens
cataaaatcacctatctctttaataccttcactaggtggaagagagacatactatgagtattaattaggagaagctgcattatttatccaatattgtggasgtcttgatgtccatattttgcaatccattcacattgattgtgtctgtatttgctttagctcaagcctgggagaacatgatgagtgcctcaagccagagcc

SEQ ID NO: 494277 - DNA, 201 bp, Homo sapiens
ggagtgtatggcgtgatctcagttcactgcaacctctgcctcctgggctcaggcaattctcctgcctcagcctcctgagtagctgggaccacaggcatgcsccaacgggcctggctagtttttgtatttttagtagaggcggggtttcaccatgttggccaggctggcctggaactcctgaccttaagtgatccacttgcc

SEQ ID NO: 494278 - DNA, 201 bp, Homo sapiens
ttatcttgtgatgaaagtatatgtgtgtatggcgtggtggtagacagttctataattctgttggcaaagataatccaagagatgtctaacatctcaaaatkggagatacagactttggctaatatggtattaattaatatttcagtcatggataaacaatttatataccactttagtttctccagagaaacagaaccagaa

SEQ ID NO: 494279 - DNA, 201 bp, Homo sapiens
aaacctgcatgttgtgcacatgtaccctagaacttaaagtataataattaaaaaaaaaaaaaaaaatatgcccttaggatattgacaagggccagctctgrcatttgaaggcacgactaggccccataatgagagtatgtttaggtaaatttgaagcttgttggatgaccattcccacagaatgctaattaacttgacagg

SEQ ID NO: 494280 - DNA, 201 bp, Homo sapiens
tttcacccaagaaaatttgaattttgagacccattctcttggataactatgttgatgagaagtgagtatatatagacctcatttcgtaagcccagtataahacccgtgatcatgttctgtacatgactacaaaaagtgcaaacggtagccagttcccatttttctaccacttatcaacttggagctgctactttttgtttc

SEQ ID NO: 494281 - DNA, 201 bp, Homo sapiens
gtggctcacgcctgtcgttccagcactttgggaggctgaggagggaggatcactttagccccaagatttgaaaccagccttggcaacatagtaagaaagaycccatccatacaaaattaaaaataaaagaattaggctgggcgtggtggctcacgcctgtaatcccaacactttgggaggctgaggcgggcggatcatgag

SEQ ID NO: 494282 - DNA, 201 bp, Homo sapiens
tctgctttttgtttggtgtgaactaggtgaaaacactcaccttgttctttatagctcttgactgggaatttgatgtttgtgaaagatgccagatggatatsctggaaattgaagccctgtgtgaatgtggggaagcaacaatgtcagcttcccagatcctattctcttaatgtattttggtcttgatctgcaggaataaag

SEQ ID NO: 494283 - DNA, 201 bp, Homo sapiens
gaactttctgataagttgtgattgtgaatagacagcacaaaaccttgagaaaacatggtttaagtctgaattgttcttcttttttttttttttttgagacrgagttttgctcttgttgcccaggctggagtgcaatggcgtgatcttggcctggcgcgatctcagcccggcgcaatcttggcccaccgcaacctctgcctc

SEQ ID NO: 494284 - DNA, 201 bp, Homo sapiens
gaaagtaattggcttttatatattaaccttgtatcctgtaaccctgctatagtcacttattcctggagggtttttggtaatttttttttttttttttttttgagacagagtcttgctctgtctccaggctggagtgcagtggcgcaatctcggctcactgcaagctctgccccctgggttcatgccattctcctgcctcag

SEQ ID NO: 494285 - DNA, 201 bp, Homo sapiens
gtagaattcttttgttgtttggaatagtctgagatattaccatttggtgacatataattgcagagaattgtctgaaatatattttcttattttttagcccygaattagaaatctaatatccttggaatatttaattttcaaacgatagttagaaatgttattaacttagtcataagcttttccagtgttacaagcaaactt

SEQ ID NO: 494286 - DNA, 201 bp, Homo sapiens
attgcttctcacaacactttcagtaagaggttcagctcaaagagcaaaacctctgtatcagtcagctttggaaagcagagctaaggtttacatttaactcrgaggaatttgctagatgccaggtgctgtgtttcatttgcctctcctttggctttgtactgattcttagatggtgttatggtccagattactgcagagaac

SEQ ID NO: 494287 - DNA, 201 bp, Homo sapiens
gagtatcttatcataatgcctgtttgccatctgtgtaccttctttggtgaagtgtctgtacaggtctttggcctgttttttgatccagtttttttttttttattattgttttaaaagttctttgtacattttggataatagacctttatcagataaatctttttcaagtatgttctcccagtctgtggcttgtcttttcat

SEQ ID NO: 494288 - DNA, 201 bp, Homo sapiens
gtgctgggattacagacatgagccactgcgcctggccaatctactgactttctaattatgatttcatttatgtcttatctaagtttattatttgtttttgyaattcagttccaagcttgatgagggtaaggattttttctgccttgattgctgctgtatcctcagccctagaacatacgggtgctcagtagatatttgtta

SEQ ID NO: 494289 - DNA, 201 bp, Homo sapiens
gtctcaaactcctgacctcaggtgatctgcctgccttggcctcccaaagtgctaggattacaggcgtgagccactgtgcttggcctttttttttttttttwaaagcaacagggtcttgctctgtagcccaggctggagtgcggtggcttgattgtggctcactgtggccttgacctcaggctcaaacaagcctcccatctc

SEQ ID NO: 494290 - DNA, 201 bp, Homo sapiens
cattgcttctcacaacactttcagtaagaggttcagctcaaagagcaaaacctctgtatcagtcagctttggaaagcagagctaaggtttacatttaactyggaggaatttgctagatgccaggtgctgtgtttcatttgcctctcctttggctttgtactgattcttagatggtgttatggtccagattactgcagagaa

SEQ ID NO: 494291 - DNA, 201 bp, Homo sapiens
tacagaactctgaggaatttcaacatttaagattgggtagaagaggaggagtcagggatgaagatgagagatagatgtcaaaaaaaaatagaagaaagtartttgtagtatcacacaagtcatggaagaagagtttcataaaggaggaggatgtgatctaatataattgaatgttgctaaaatgtcagatgaagttaggac

SEQ ID NO: 494292 - DNA, 201 bp, Homo sapiens
aaaaagtcaattaataacagatgctgacaaggttgtggagaaaagggaattcttatacactgttggtgggagtgtaaattagttcagccattatggaaaaygattcctttccacagtgattcccttgttttgtgattcctcaaagagctaaaaacagaactatcatttgaccaagcaatcccattactgggtatataccca

SEQ ID NO: 494293 - DNA, 201 bp, Homo sapiens
gagccaaattagaaacgcaatcccattcacaattggcacaaaaagaataaagtattaatacgtaggaatacagttaaccagggaggtgaaagatctctacratgagaattacaaaatattgctcaaagaaatcagagatgacacaaacaaatggaaaaacattccatgattatggataggaagaatcaatatcattaaaat

SEQ ID NO: 494294 - DNA, 201 bp, Homo sapiens
atgtgctttgttaaacagatgcttgaaggcagcatgcttgttaagagtcatcaccactccctaatctcaagtacccagggacacaaacactgcggaaggcygcagggtcctctgcgtaggaaaaccagagacctttgttcacttgttaatctgctgaccttccctccactattgtcctgtgacccagccaaatccccctct

SEQ ID NO: 494295 - DNA, 201 bp, Homo sapiens
ggatgtgaggagcgcctctgcctggctgcgaccccgtctgggaggtgaggagcgtctctggctggccgccccgtctgagaagcgaggagcccctccgccckgcagccgccccgtctgagaagcgaggagcccctccgcccggcagccaccccgtctgggaagtaaggagcgtctccgcccggcagccaccccgtcggggag

SEQ ID NO: 494296 - DNA, 201 bp, Homo sapiens
gggctggtctccagctcctaactgcgagtgatccgccagcctcggcctcccgaggtgctgggattgcagacggagtctggttcactcagtgctcaatggtscccaggctggagtgcagtggcgtgatctcggctcgctacaatctccacctcccagccgcctgccttggcctcccaaagtgccgagattgcagcctctgcc

SEQ ID NO: 494297 - DNA, 201 bp, Homo sapiens
catgaaatgatcaccaagtcagccttttatatttagttatattttgttgattgtcagcttacaggtttttagaatttattagcttaaagatcttataatayatccagtgggatgccaggttttgtagtttaccattatctggaaagatttataagagattttatccttgtgtatatacttaagatttataaattatatttt

SEQ ID NO: 494298 - DNA, 201 bp, Homo sapiens
tagttttgtacaaattatgtttcaaatctttacattttagaaataatcattgctgggccgggcgcggtggctcacgcctgtaatcccagtgctttgggagsctgaggcaggcagatcacctgaagttgggagttcgataccagccttaccaacatggagaaaccctgtctccactaaaaatacaaaaatagccgggcgtgg

SEQ ID NO: 494299 - DNA, 201 bp, Homo sapiens
caaaaaaaaaaaaaaaaaaaaaaaaaaggaataaccaggtcagagtcatcattagcattttggaactagtatccgttactcctgtacttaaacttccctgwcatttcccatttgaaaaaaattctgtaagcttcgttctttaatagaaacacaattttataccaaacaatgattcctttcccagcatctgaaatgtgtctg

SEQ ID NO: 494300 - DNA, 201 bp, Homo sapiens
taaagtaagaatgaattcttctggtttttagttttgtacaaattatgtttcaaatctttacattttagaaataatcattgctgggccgggcgcggtggctyacgcctgtaatcccagtgctttgggaggctgaggcaggcagatcacctgaagttgggagttcgataccagccttaccaacatggagaaaccctgtctcca

SEQ ID NO: 494301 - DNA, 201 bp, Homo sapiens
gccagttgaagatgtattgctgtcctcagtgcaatgctctgtccccatgaagagggacagtgattctgagggtgactgaggctgcagctgctatcactttyttgtgacaaattgtctggattttttaaaaaaggataaagtaagaatgaattcttctggtttttagttttgtacaaattatgtttcaaatctttacatttt

SEQ ID NO: 494302 - DNA, 201 bp, Homo sapiens
tccttcagctagagttatcagtttttaccattttgtcccttttgcacacctttcttcccttcccacacatatactctcacatcatttaaaagttagttgcwgacaacacaacacttcttccctaaacacttcagcaggcatctcctaagagaacaagtaagggcattcccctacaaaatcagaatgccattatcacatcta

SEQ ID NO: 494303 - DNA, 201 bp, Homo sapiens
ttcttcataaattatccagtctccagtagttcttcataacaatgtgaaaacagactaatacacttgtcaacacttgttttctattgttttgatatagccayattaataggtgtgaagtggtatctcattgtggttttggtttgtatttctctgatggttagtgatgttgagcctcttttcatgtacttactggtctctata

SEQ ID NO: 494304 - DNA, 201 bp, Homo sapiens
gatatttagggtttgaattgttaggattgattggtgggtagagtggttcttagatgtctgggtttggatgattgagtgtatcattcaggcttagatgaggygatggagtgcagaagacatactaggttttagggagtagttaaagccacaagggtgaatgagatcatccagtgaaaccatgtagagtgaagagacaagagg

SEQ ID NO: 494305 - DNA, 201 bp, Homo sapiens
ttaaatgaaaaaatgtctaaatgctatccaagtttcaaattcttaaagtttgatgttgtttgactccctcttaaggaaatgtttggtctcctataaagaarccaggctccaacctttaactcagattgatctgctatcagtctatcagaagtatcctataattcttttttatttttaatttttttgagatggagtcttgct

SEQ ID NO: 494306 - DNA, 201 bp, Homo sapiens
gaaagcaactaaattgaagaataaatttgaagaagttttggagatctcagggaaggattatgttcaagaagttaccaaagccagtgagggtttgtgggtcrtcttgcacctttacaaacaaggaattcccctctgtgccctgataaatcagcacctcagtggagttgccaggaagtttcctgatgtcaaatttatcaaagc

SEQ ID NO: 494307 - DNA, 201 bp, Homo sapiens
ctgtacatgtggctggcagagaagggaagatggagcctccatcttgagcatgtctagtccctagttcctgctggcattcacccgtgcaagctcccagcttycttgtctgtgtctgcagctcgacttcacagactgctctttgttagaaaatgatttccagcctggccaacgtggtgaaaccccatctctactaaaaataca

SEQ ID NO: 494308 - DNA, 201 bp, Homo sapiens
tacattcaaaggaatagtccatagagtcgggcaccgtgttagccaggatggtgttgatctcctgacctcgtgatccgcctgcgtcggcctcctgcagtgckgggattacaggcgtgagccactgtgcccggccttgatgacatttttctaagttgctttgattctttatgaataaaaaccttttagacatttttcttattt

SEQ ID NO: 494309 - DNA, 201 bp, Homo sapiens
gctggagtgtggtggcacgatcttggctcactgcaaccttcacctcctaggttcaagcgattctcctgcttcagcctcctgagtagctgggattacaagcrtgcaccaccacgcccagctaatttttgtatttttggtagagacagggtttcaccatgttggccaggctggtctcaaactcctgaccttaggtgttctgtc

SEQ ID NO: 494310 - DNA, 201 bp, Homo sapiens
atctttgtttatttcatcctgctataattcctttccaaacggaaatagcacatgtaactatctttcaacacccatgttaggtgattgtgtgcatagaaatsttgcctaggggtaattcaggtggttttttccccactgctgtatatttgccacgtgatcttagttaagatttttattttcagccaatgtttcccatttctt

SEQ ID NO: 494311 - DNA, 201 bp, Homo sapiens
tttatattcacttgtatggtttttctttttctttctttcttttttttttttttttttgagacagggttttgctgtgttacccagacaggagtgcagtggcyattcacaggtgcagtcatagtgtagtgtgtcttcaaactcctggcttcaagccatcttcctgcctcagcctcccatgtagctgggacaataggtgtactc

SEQ ID NO: 494312 - DNA, 201 bp, Homo sapiens
tttttaattgggttgtctttttgctgctaggttaaatttgttatatattctggatattaactccttttcagatgtatggtttgcagatattttccatttckgtaggttgtgtcttcactctgttaatagtttccttttctgtgcaaaatctttttagtttgatgtaattccatttgtctatttttgcttttattgcctgtg

SEQ ID NO: 494313 - DNA, 201 bp, Homo sapiens
tttataccaaacaatgattcctttcccagcatctgaaatgtgtctgttgaagcatgaaatgatcaccaagtcagccttttatatttagttatattttgttrattgtcagcttacaggtttttagaatttattagcttaaagatcttataatatatccagtgggatgccaggttttgtagtttaccattatctggaaagatt

SEQ ID NO: 494314 - DNA, 201 bp, Homo sapiens
gatggctggctacttataagcatttgaaaaacagtttaaattccaaattaaagatggaaaattgtaaattactgtatctgtatattttttgaaaggctgcrtgacatacaaagactaggagattgaaagatctgctttctgctttctaggttttactttgccacttatttacctcgtcttttcagagttacttcacctcta

SEQ ID NO: 494315 - DNA, 201 bp, Homo sapiens
cctggtagaaggaagcatatttgtaacttacttcttgtttctttggttaacaatatttatttaatcatagtgtaaatgctaatgaatattcaaatttcaamaacaattagcatacatgactatggcttcaaaataaattgtaaatattaactgtaacaacttaaaagtaaaagcatagaggttagaagctgggaaagacta

SEQ ID NO: 494316 - DNA, 201 bp, Homo sapiens
atggttctttcctttcctgagaagagaataactaggatagacattaattcagcccaagtgtacagttgtggctccagagactgtccagtttgatctgcgaytccaaaagggtcgtctaacagtggtttgagttccttttttagatttctaacctctgaactagttaagggggcatttacaaagccaatatcccctcctcct

SEQ ID NO: 494317 - DNA, 201 bp, Homo sapiens
attgtgtcttattaaatcaggagtatgctttttttcaaaaagatttgacttaaattcagaggaaaagggtatttaaaaatcactgttattttgtgtcacartggtcacaatgttaatttccctcccagtgctggctccttcgttttagagtttgttgaccatagaaaggtaatttcagaaaaaatatggatttgagcaata

SEQ ID NO: 494318 - DNA, 201 bp, Homo sapiens
gcctgtagtcccggctactcagggggctgaggcaggagaatcgcttgaacctgggaggcggcggttgcggtgagccgagatcgcaccattgcactccagcytgggcaacaagagcaaaaccatctcaaaaaaaaaaaaaaaaaagtaattttaggctggatgcagtggctcatgcctgtaatcccagcactttgggaggcc

SEQ ID NO: 494319 - DNA, 201 bp, Homo sapiens
agcgattctcctgcctcagcctcctgagtagctgggacagcaagcacgcactaccacgcccagctaattttttgtatttttagtagagacagggttttgcyatgttgcccaggctggtcttgaactcttgagctcaggcaatccgcctgcctcagcctcccaaagtgctaggattaccggtgtgagccactgtgcctagcc

SEQ ID NO: 494320 - DNA, 201 bp, Homo sapiens
aaaagcaaattctagatgaggtatcaggtttcttttaatgtattgaaattttgttgtattgatttttgctggaaataagtggcagttggccgaccctaatmtgacccccctggaaactcctttcctatcatctgctactctttccctcccttaatctgtgctttgttcttgctgtccctctgtttttaactaccttcctct

SEQ ID NO: 494321 - DNA, 201 bp, Homo sapiens
ggcacatgcctatagtcccagctacttgggaggctgaggcaggagaatcttttgaacccgagaggtggaggttgcagtgagctgagattgtgccactgcaytccaacctatgcaacagagcaagattgtgtctcaaaaaaaaaaaagtcacatttaagtgacacagtggaataaagtccacaaaaggagacaaagaaaaga

SEQ ID NO: 494322 - DNA, 201 bp, Homo sapiens
tgggctggtacagcctcagttggatataatattgaaagtctgaattagagatctcttttaaccctttctgtaatggacacttaaaatgactctgataattattattgttttctattaataacagtgaagtttaaacaggtgtttagacagaggcaagggtctggatttgtttgaactgctttagatcttatgatactgatt

SEQ ID NO: 494323 - DNA, 201 bp, Homo sapiens
gtggtctcagctcactgcaacctccacctccccgtgttcaagtgattctcctgcctcagcctccccagcagttgggatgacaggtgcccaccaccacaccyggctaatttttgtatttttagtagagacgggggttttcactatgttggccaggctggtcttgaattcctgaccttaagtgatccacccacctcagcctcc

SEQ ID NO: 494324 - DNA, 201 bp, Homo sapiens
gattcttgcaaaaatctaggcaacagaaagatggaggcattatgggatatggcagtgggaatggagagaagtggatggatttgaaagatttaagaggtaarattgataagacttgatgttcgattgaatgtagagttgggaggagaggatagtatctagaattgtacttaagtttctgagtttatgagacaagtggatgat

SEQ ID NO: 494325 - DNA, 201 bp, Homo sapiens
ctttcccttcctttatttttctgaactatttctttatttattagggcattagcaactttaagtctacttttaagaatgaatgcaataattttattttattrtatgtcacttctcaaaggtaagaatggagacttacaattaaacaggatgaggccaggtgcggtggctcacgtctgtaatcctagcactttgggaggctga

SEQ ID NO: 494326 - DNA, 201 bp, Homo sapiens
ctggcgcctgtagtctcagctacttgggaggctgaggcaggagaatggcatgaacctgggaggtggagcttgcagtgagcccagatcccgccactgcactscagcctgggtgacagagcaagactccatctcaaaaaaaaaaaaaaaaaaaaaaaaaggtaggctacttgggcatatttgggctttttttttttttcgttt

SEQ ID NO: 494327 - DNA, 201 bp, Homo sapiens
tgagctgtggtgtgctccacccagttcgagcttcccggctgctttgtttacctaagcaagcctgggcaatggtgggcgcccctcccccagcctcgctgccrccttgcagtttgatctcaggctgctgtgctagcaatcagcgagactccgtgggcataggaccctccgagccaggtgtgggatataatctcctggtgcgcc

SEQ ID NO: 494328 - DNA, 201 bp, Homo sapiens
actgctctcttcaaagctgtcagacagggacatttaagtctgcagaggttactgctgtctttttgtttgtctgtgccctgcccccagaggtggagcctacrgaggcaggcaggcctccttgagctgtggtgtgctccacccagttcgagcttcccggctgctttgtttacctaagcaagcctgggcaatggtgggcgcccc

SEQ ID NO: 494329 - DNA, 201 bp, Homo sapiens
aacatggaagcaatctaaaggcttattgatagggataagagctaaattgtagtattatatgtctatttaatggaatgctattcagctatttaaaaagacarcaagtctagatgtacatgcatgacttatttaatactgcactgtgtagtgctgattgattataatgctatgctaaatagcatgtatgaatatattataata

SEQ ID NO: 494330 - DNA, 201 bp, Homo sapiens
ggagtatctttgtggcgttctctgtatttcctgaatctgaatgttggcctgccttgctagattggggaagttctcctggataatatcctgcagagtgtttkccaacttggttccattctccccgtcactttcaggtacaccattcagatgtagatttggtcttttcacatagtcccatttttcttggaggctttgttcgtt

SEQ ID NO: 494331 - DNA, 201 bp, Homo sapiens
tttttgagatggagtctcactctgtcacccaggctggagtgcagtggcatgatcctgaccttgtgatccacccacctcgacttcccaaagtgctgggattrcaggcgtgagccaccgcacctggccaagcttttctttttataaaaataatttttaaaagacacagtaaggtagagtagggctgcagagaggacatcatgg

SEQ ID NO: 494332 - DNA, 201 bp, Homo sapiens
gcttagtttggctggatatgaaattctgggttgaaaattcttttctttaagaatgttgaatattggcccctactctcttctggctcgtagagtttctgccragagatcagctgttagtctgatgggcttccctttgtgggtaacccgacctttctctgtggctgcccttaacattttttccttcatttcaactttggtgaa

SEQ ID NO: 494333 - DNA, 201 bp, Homo sapiens
tccttcacttatgaagcttagtttggctggatatgaaattctgggttgaaaattcttttctttaagaatgttgaatattggcccctactctcttctggctsgtagagtttctgccgagagatcagctgttagtctgatgggcttccctttgtgggtaacccgacctttctctgtggctgcccttaacattttttccttcat

SEQ ID NO: 494334 - DNA, 201 bp, Homo sapiens
aaagtattttatttctccttcacttatgaagcttagtttggctggatatgaaattctgggttgaaaattcttttctttaagaatgttgaatattggccccyactctcttctggctcgtagagtttctgccgagagatcagctgttagtctgatgggcttccctttgtgggtaacccgacctttctctgtggctgcccttaa

SEQ ID NO: 494335 - DNA, 201 bp, Homo sapiens
ttccccctgcctttctttacaagttgctcaccttctcaaatgtcataactttaactgaaaatatttagctaaatttccatgttttgaaagtatcttagcayttcagaattcctgtgcctaatttaatgaataaatgctaaagccaggtaagttttgcaggaataatggaagttctttggaaatctggtgcgaggtagttat

SEQ ID NO: 494336 - DNA, 201 bp, Homo sapiens
ttctgttgatttggggtggagagttctgtagatatctattaggtctgcttggtgcagagctgagttcaattcctgggtatccttgttaactttctgtcttrttgatctgtctaatgttgacagtggggtgttaaagtctcccattattattgtgtgggagtctgagtctctttgtaggtcactcaggacttgctttatgaa

SEQ ID NO: 494337 - DNA, 201 bp, Homo sapiens
tacagagatcccaaccaccaaggaatactttgttgccccaatagtgacgtttcttaccttggtctatgcacagagttatctggtcactgaggaattcttarggatcctccctatagcccatgttgctgagagtccggatttattcgtcactttgggcgagattcgatcctccactcctggggccaccacaacgaggcagtg

SEQ ID NO: 494338 - DNA, 201 bp, Homo sapiens
gaagctagagtgtgtgtaatctgccattcagtgctaatgaatggtaagtattaaaacaggttgatttcatagttattgagacaaaacaagggaattacgaygagaagacttttttccccctgcctttctttacaagttgctcaccttctcaaatgtcataactttaactgaaaatatttagctaaatttccatgttttgaa

SEQ ID NO: 494339 - DNA, 201 bp, Homo sapiens
aaaaaaaatgaacttcaagatttattttattacatagtaaatgaaaaatgatgacattttatcaaagttgatttttttcccttttttattgtggaaaaatrttaacatatataacaaatgatttacaattttaacaatttttaagtgaattcattggcatcaagtacattcacattgttttgcaactatcaccactgtttt

SEQ ID NO: 494340 - DNA, 201 bp, Homo sapiens
gagccgtctatgaccaacccacagccaacctcatattgaatgggcaggagctggaagcattcccttgaaaactggcacaagacaaggatgccctttttcaytactcctattcagcacagtattggaagtcctggccagggagatcagggaagagaaagaaagggcatccagataggaagaaaagaagtaaaactatcatcc

SEQ ID NO: 494341 - DNA, 201 bp, Homo sapiens
attctgttgatttggggtggagagttctgtagatatctattaggtctgcttggtgcagagctgagttcaattcctgggtatccttgttaactttctgtctygttgatctgtctaatgttgacagtggggtgttaaagtctcccattattattgtgtgggagtctgagtctctttgtaggtcactcaggacttgctttatga

SEQ ID NO: 494342 - DNA, 201 bp, Homo sapiens
aaaaaggtggaatggctgttctaaggagggcaaggccagaatgggggctgttacaagtaggtgttttatttcttctacctgttggatctctgatggggtcyagaggagggtttacagggtctggtctttcttgagtgagtttttgatataggggctttgtttttaaggcataagagttaatccacagatgacaatatccaa

SEQ ID NO: 494343 - DNA, 201 bp, Homo sapiens
tacagcacaagtcttaaaaaacactgcagataagtctctttgggtggttattaaaatggaacaacaaggtgagaaatgtgtcaagactatttctgggcaartagagaataatatttgtgttgcttggtattttagaggcacctcagaatatatgtcagtctcctctccaacttaagaatggagtaattacactgcttgtcc

SEQ ID NO: 494344 - DNA, 201 bp, Homo sapiens
tctttttttctttgttagtcttgctagcggtctatcagttttgttgatcctttcaaaaaaccggctcctggattcattaattttttgaagagtttttttttgtctctatttccttcagttctgctctgattttagttatttcttgccttctgctagcttttgaatgtgtttgctcttgcttttctagttcttttaattgtg

SEQ ID NO: 494345 - DNA, 201 bp, Homo sapiens
gctaaagcagtgcgtttgtttatgattgagttgtatatattgacccttggccttcatagcaaaaacagtgaaaacagctggtatagttattattccacatrtaaggatagtaacaaacagaagttaaaacacagaaattccaatctttgtttatttcatcctgctataattcctttccaaacggaaatagcacatgtaact

SEQ ID NO: 494346 - DNA, 201 bp, Homo sapiens
attcccctctgtgccctgataaatcagcacctcagtggagttgccaggaagtttcctgatgtcaaatttatcaaagccatttcaacaacctgcatacccarttatcctgataggaatctgcccatgatatttgtttacgtggaaggagatatcaaggctcagtttattggtcctctggtgtttggcggcattaacctgaca

SEQ ID NO: 494347 - DNA, 201 bp, Homo sapiens
tagtagagatgaggtttcaccgtgttagccaggatggtctcgatctcctgacctcgcaatccgcccgtcttggcctcccaaagtgccttttttttttttttgagacggagtctcgctcttgtcacccaggctggattgcaatggtgcaatctcggctgactgcaacctctgcctcctgggttcaggcgattctcctgcctc

SEQ ID NO: 494348 - DNA, 201 bp, Homo sapiens
aaacttctggcctcaagtgatttgcctcactcagcctctgaaagtgctgggattacaggtgtgagccaccgcacttggccttaggttgtttttttttttttaaacttgtgcttttggtgtcatattgcttagtgcaagtccacaaagatttgctcctatgttttctttgaagagttttagctcttatatttggatctctta

SEQ ID NO: 494349 - DNA, 201 bp, Homo sapiens
aaggtattaaagattaagaaattatgaaataatattgaagttttgtttcttttgccactacagttttttaaaaatatttttctcttatggcaaaagaaacytgggtaaaggaagctttaatgcaggttttaaggcctcttctgtcattaccatgatttgatgataccaaaaggagaaacttacacatttgaaaacattttc

SEQ ID NO: 494350 - DNA, 201 bp, Homo sapiens
gtagacttgactgtcttattgcccacttgacatctccacttgcatacacatttcaagcttagcaagttcacctttgacatggtcatcttacaggcttctcyatctaaattaatgacagtgctgtcatctttccagttacccaagcccaaaactttagagtcatctttgaatcttcttttcctcattccttgatagacaaat

SEQ ID NO: 494351 - DNA, 201 bp, Homo sapiens
agcccaagagttggagactgcagtaagctatgattatgccactgcactccagccggggcaacagaacaagaccctgtctcaaaaacacacacacacacacrcacaaaaacaaaaacaaaaacaaaacaaaacagattgaatgaagactcatagttgtcaatatgtagattcataggacttgaagatggggtctagcctctg

SEQ ID NO: 494352 - DNA, 201 bp, Homo sapiens
agtcccagctactcgggaggctgaggcagaagaattgcttgaatccgggaggcaagaggttgcagtgagccgagatggtgccactgcactccagcctgagygacagagggagacttgtctcagaaaaaaaaaaagtcttcatgctgaaattggcattttcaggggactactttttcaggtgcttggccatgggagaagaaa

SEQ ID NO: 494353 - DNA, 201 bp, Homo sapiens
gagaagacaggctcaaacaggtcatgtgactgtaactttgtgactgatgttggttaatggcagagcaggggccagcgctcaggtctcctgactcccactckgtcatttcatgccaccactctccagtgcatccaggtacggggcttcggagctgcctcctttgtagtcctctcagtgtaagttccttatggagcagtaagc

SEQ ID NO: 494354 - DNA, 201 bp, Homo sapiens
agatggtcaaactccgtctctactaaaaatacaaagaattagcccgggtggtggcgggcgcctgcagtcccagctacttgggatgctgaggaaggagaatygcgtgaactcaggaggcagaggccgcagtgagccaggaccacaccactgcactccagcctggccaacagagcaagactctgtctcaaaaagaaaaaaaaa

SEQ ID NO: 494355 - DNA, 201 bp, Homo sapiens
agtctccctgtgttccccaggctggagtgtagtagcgcaatcttggctcactgcagcctccacctgttggggtaaagtgattctcctgcctcagcctcccragtagctggaattacaggcacccgccaccacacccagctcatttttttgtacttttagtagagatggggttttaccatgttggccaggctggtctcgaac

SEQ ID NO: 494356 - DNA, 201 bp, Homo sapiens
gagaatcacttgaacacgggaggtggaggttacagtgagccgagatcgcaccattgtactccagcctgggtaacgagcaaaactccatctcaaaaaaaaaataaaataaaaacaaataaaaattgaggtactgatcctgaaatttatatggggataaaaagaacctagaagagccaaaacaactttgaaaaagaacataat

SEQ ID NO: 494357 - DNA, 201 bp, Homo sapiens
ttgcattagctccagatagcccagataatgatctcagagctggtcagtttggaatttctgccagaaagccattcaccactctgggtgaggtggctccagtrtgggtaccggattctcaggctccaaattgcatgaaatgtgaagccaggtttacattcaccaaaaggaggcatcactgcagagcatgtgggaaggtaagtt

SEQ ID NO: 494358 - DNA, 201 bp, Homo sapiens
cccgatgtgggcggatcacatgaggtcaggagtttgagaccagcctgaccaacatggtgaaaccccatctctactaaaaatacaaaattagctgggcgtgrtggcgcatacctataatcccagctactcaggaggttgaggcaggagaatcacttgaacacgggaggtggaggttacagtgagccgagatcgcaccattgt

SEQ ID NO: 494359 - DNA, 201 bp, Homo sapiens
ggagaaggaagaaagcaattttattattttcttggtagctgtgcccaagctgcttaaggcaggtaaagatatatgctgaagaaaaagaacagtatatgtaygtgtatatatatatatacacacacacacatatacatatatattcatatgtatacacacacacacacacacatatatatattcttttgcaaacatgaagtg

SEQ ID NO: 494360 - DNA, 201 bp, Homo sapiens
tgtctgttgaagcatgaaatgatcaccaagtcagccttttatatttagttatattttgttgattgtcagcttacaggtttttagaatttattagcttaaakatcttataatatatccagtgggatgccaggttttgtagtttaccattatctggaaagatttataagagattttatccttgtgtatatacttaagatttat

SEQ ID NO: 494361 - DNA, 201 bp, Homo sapiens
taatcctaacactttgggagcccgatgtgggcggatcacatgaggtcaggagtttgagaccagcctgaccaacatggtgaaaccccatctctactaaaaayacaaaattagctgggcgtgatggcgcatacctataatcccagctactcaggaggttgaggcaggagaatcacttgaacacgggaggtggaggttacagtg

SEQ ID NO: 494362 - DNA, 201 bp, Homo sapiens
atattagtaactaatttcattgaagatctcaaacataagttagtaaaattaagaaacaatttgaatttcatatgtttttagagggaagttcactcctttgraagttgaaaaagaaagcagatgtacttaaatatgggacattcttttgaacttagaatttcagattatatatcctcagagaatccagtatataggagaaac

SEQ ID NO: 494363 - DNA, 201 bp, Homo sapiens
gcttgaatctgggaggtggaggttgcactgagccgagatcacgccactgcactccagcctgggcgacagagtgagactggtctcaaaaaaaaaaaaaaaaactaaatgggtagaaaagatagcatagtaatattaattaaagctgaaatggctatattaatatctaggttatttcagaacatatattacaaccagggataa

SEQ ID NO: 494364 - DNA, 201 bp, Homo sapiens
tggtagctgtgcccaagctgcttaaggcaggtaaagatatatgctgaagaaaaagaacagtatatgtatgtgtatatatatatatacacacacacacatayacatatatattcatatgtatacacacacacacacacacatatatatattcttttgcaaacatgaagtgaaatggtacaggattccagcgcctgattatac

SEQ ID NO: 494365 - DNA, 201 bp, Homo sapiens
taaaaaactcatatcagacttagtggtgaaatactgaaagaatttttattaaagtcagaaacaaaagaaaatgtccaccttcaccattttcagaggaactrtcagtgtaattagacaagaaagaaagagatcactagaaaaaggcaagtggtttggtggaggggcctcattgagatctttcaatatgaattagagaaaagg

SEQ ID NO: 494366 - DNA, 201 bp, Homo sapiens
gggaaaggggtggggaattcctggaactgagggttccttcctttttagatcatatagggtaacttcctgacattgccatggcatttgtaaaactgtcatgyatgggtgggagcgtcatttagcatgctaatgcattataattagtgataatgagcagtgaggacctccagtggtcactttcatcaccatcttggttttggt

SEQ ID NO: 494367 - DNA, 201 bp, Homo sapiens
atacatttacttcattttttagcttgacattctagtaaatcttttgctccatttatttttggttatgatagcagaagatctacctggatgatttaagagcrtcatttgtcaatgagcacctcttattttctctttattggcagtagtgcttacagctactattaatgctgctttccattttgtcgtttcgggttcaaacat

SEQ ID NO: 494368 - DNA, 201 bp, Homo sapiens
ttctaagtaagcacttgcttttggcttttatctgccagtaatcagctgggtgatcttggaaaagtgactcagcctttcaggatttgagattcttagcagtraaataatatgattgggaagtttgtagagacaaagcagaatggtgtctgtcagaagctatggggaaggggagatggggatcagtgtttaataggtagagag

SEQ ID NO: 494369 - DNA, 201 bp, Homo sapiens
cagcatgcctgactgtgtgcagtggccggaacccacgcttgctttctcacacaccccttgctgctccatgcctggctcacccttgacagacatgggatccrggctggtagtgtaagcctagcacagcctgccaggctgagtggccggaacaagcccagcaggcctgagcaaaactcaggcaaaggcaccactggccacaga

SEQ ID NO: 494370 - DNA, 201 bp, Homo sapiens
gctctcatgaccttcacattaccaatacattcaaaggaatagtccatagagtcgggcaccgtgttagccaggatggtgttgatctcctgacctcgtgatcygcctgcgtcggcctcctgcagtgctgggattacaggcgtgagccactgtgcccggccttgatgacatttttctaagttgctttgattctttatgaataaa

SEQ ID NO: 494371 - DNA, 201 bp, Homo sapiens
tcctgaccttaagtgatccacccacctcagcctcccagagtgtgctgggattacaggaatgagccacattgcccagcctgcaccatattctcttaactatytccacagctccctgaaagttaagtcttattggctgtctttcaacatgaatcataatggtaagagttcactagcttctggtgtttaagtgccaccacctgg

SEQ ID NO: 494372 - DNA, 201 bp, Homo sapiens
gtaaaagtgttcctatttctccacatcctctccagcacctgttgtttcctgactttttaatgatcgccattctaactggtatgagatggtatctcattgtrgttttgatttgcatttctctgatggccagtgatgatgagcattttttcatgtgtcttttggctacataaatgtcttcttttgagaagtgtctgttcatat

SEQ ID NO: 494373 - DNA, 201 bp, Homo sapiens
aaacagtggaaataatactaaaaataaaaatgatattcttgggaaagcaaaattaggggaaaactcagcaaccaatgtatgcagtccatctttgggaaacrtctctaatgtcgatacaaatggggaacatttagaaagttatgaggctgagatctccactagaccatgccttgcattagctccagatagcccagataatga

SEQ ID NO: 494374 - DNA, 201 bp, Homo sapiens
ttggttgtggaaccccttttttccacgtaggccttagtaattaacaccctttactgatgtaggtcaacttttacctgttttttaaagtctcaccctcaccrtatccgagactttgaactctcagatgataggccctgattacttcctgaaggtgctcattctgcacgttattagaatattagcagtattatttctttttat

SEQ ID NO: 494375 - DNA, 201 bp, Homo sapiens
ggctggagtgcaatggtgcgatctcagcttactgcaacctctgctgcccaggttcaagcagttgtcctgtctcagcgtcctgcattgctggggctacaggygcacaccaccacacccggctagattgtgtattttcaatagagacggggtttcaccgtattggtcaggctggtctcaaactcctgacctcaggtgatctgc

SEQ ID NO: 494376 - DNA, 201 bp, Homo sapiens
ccacgcccagctaattttttgtatttttagtagagacagggttttgccatgttgcccaggctggtcttgaactcttgagctcaggcaatccgcctgcctcrgcctcccaaagtgctaggattaccggtgtgagccactgtgcctagccaaagttttaagagatgtattttaaatacatctttcataggagtctgcaagctt

SEQ ID NO: 494377 - DNA, 201 bp, Homo sapiens
agttatcagtttttaccattttgtcccttttgcacacctttcttcccttcccacacatatactctcacatcatttaaaagttagttgcagacaacacaacrcttcttccctaaacacttcagcaggcatctcctaagagaacaagtaagggcattcccctacaaaatcagaatgccattatcacatctaagaaaatgataa

SEQ ID NO: 494378 - DNA, 201 bp, Homo sapiens
ctcctgcctcagcctcctgagtagctgggacagcaagcacgcactaccacgcccagctaattttttgtatttttagtagagacagggttttgccatgttgsccaggctggtcttgaactcttgagctcaggcaatccgcctgcctcagcctcccaaagtgctaggattaccggtgtgagccactgtgcctagccaaagttt

SEQ ID NO: 494379 - DNA, 201 bp, Homo sapiens
gcaaatgtttattgttaggatgattttgatgacatttttctttttctttttttttttgagatggagtctcgctctgtcacccaggctggagtgcagtggcragatctcggctcactgcaagctccgcctcccaggttcacgctgttctcctgcctcagcctcctgagtagctgggactacaggcacccgccaccatgcccg

SEQ ID NO: 494380 - DNA, 201 bp, Homo sapiens
aggacttcagctgtataaaaggctgtcttctattaatatgaatatttctttcttttttttttttgagatggagtcttgctctgttgcccaggctggagtgyggtggcgcagtcttggctcactgcaacctctgtctcccagattcaagcgatcctcctgcctcaacctccctggtagcggggactacaggtgcgcgccacc

SEQ ID NO: 494381 - DNA, 201 bp, Homo sapiens
gatggctaggcctactagggaggctgaatggggaggaccccttgatcctaggagttccagtcctgcttgggcaacgtaagcaagatgcccctctccgaggygggtggatcatgaggtcagaagttcaagaccagcctggtcaatatggtgaaaccccgtctctactaaaaatacaaaaattagctggcatggtggtgccca

SEQ ID NO: 494382 - DNA, 201 bp, Homo sapiens
acttatttaatactgcactgtgtagtgctgattgattataatgctatgctaaatagcatgtatgaatatattataataatatataacaatagacatgtatrtatttttaaaatccatggtagtaacctgttaacctatacctctctccctgctctgtagtgcttactgcatctgtagtgggagtattaataaattcagata

SEQ ID NO: 494383 - DNA, 201 bp, Homo sapiens
ccaggaaaataattttgaagtcagccttttccatttttgggtggcgggtggtggggagcgggggtgggcgggggtgggtcctcaatcagatacttaatgtracaacaaagaaacaaattcctctttgactatccaggacgattattccagatgaccatcctttagatttaaatagctgctaatgttcagtgtaaaagaatt

SEQ ID NO: 494384 - DNA, 201 bp, Homo sapiens
ctttggaatctttgccatggtagtgtgttatatgctatacttaattaaataattaaatcattccacatattttgaatactactatgtgaaaagaattgtgytggggccttggaataaaagtatgaataaaaagggtttcctgtcttgggtgaacttatggtttagtgtagtcgttttgtaaagagagaaattacatgtaat

SEQ ID NO: 494385 - DNA, 201 bp, Homo sapiens
attttatcatgcttgcttatcctctagatcagtaatcttgacagggcaatgcagggatggcttaacactgcttcatgatgtttggagtcttagttgggatsacttgaagttatctgatgactgggagctagaattatatgaaggtttgttcacacacacgtctgaggcctggcctgggatgatttaaagactaggagtggt

SEQ ID NO: 494386 - DNA, 201 bp, Homo sapiens
cttggcactacagaattccttaatatgacagagcatttctctgaatctcaggacatgactaattggaagttgactaaactaaatgagatgaatgatagccmagtaaacgaagaaaaggaaaagtttctacagattagtcagcctgaggacactaatggtgatagtggaggacagtgtgttggattggcagatgcaggtcta

SEQ ID NO: 494387 - DNA, 201 bp, Homo sapiens
ggttaacttattgaacttgtgttacaaacttctcattttcatgtgcttgtaggatgtatctaacttcccaatatagctaaattcccttaggatgtagaggrcatctgggtaaatctataagaaggtgaagtggcgaagactcaaaacatcatttaacaaaatatatattgaatctaactgtaggtatttaatataaggaaa

SEQ ID NO: 494388 - DNA, 201 bp, Homo sapiens
tgcttgtagtcccacctactcgggaggctgaggcaggagaatcacctgaacccagaaggcagaggttgcagtgagccgagatcctgccattgcacttcagsctgggcaacaagagtgaaactccatctcaaaaaaaaaaaaaaaaaaaaaaaaaaagaaaagaaaccacagccgggtgcagtggctgatgcctgtaatccc

SEQ ID NO: 494389 - DNA, 201 bp, Homo sapiens
ctggattccatgtctgttgattaagtgctgtataagtctatatttagtggtactggctaggtctctatggacaggaaaggcaaacccatacctggaataartgtctaatcctgtgaagatcaatcactggcccatccaagatggaagaggcccagtgtagtcagcttaccacttaatagtctgttggtctgcctgaggcat

SEQ ID NO: 494390 - DNA, 201 bp, Homo sapiens
ttatagctactgtaaatggaattgttttctttattttttattagcgtatagaaacactactgattttacatgctgattttgtatcctacaactttaccgartttgttcattagctctaacaggtttttggtggcatctttagggttttctatgtatagggtcatgtcatttgcaaacaagcacaatttgactttccagttt

SEQ ID NO: 494391 - DNA, 201 bp, Homo sapiens
atcccagtagtttgggatgccaaggcgggtggatcatctgagctcaggagttcgagaccacctagggcaacgtggtgaaacctggtctctactaaaaatasaaaaaaattaaccgggtgtggtggcgcgcgcctctagtcccagctacttgggaggctaaggcaggagaatcacttgaggcaaaggttgcagtgagccgag

SEQ ID NO: 494392 - DNA, 201 bp, Homo sapiens
aatatgtttgtttaagatcagaaaaatgatgagccatagtgaaagaagaagagatgttagaatcaaatagaccttggattgatttttttttttttttttttgagatggagtttcactcttgtcacccaggctggagtgtggtggcacgatcttggctcactgcaaccttcacctcctaggttcaagcgattctcctgcttc

SEQ ID NO: 494393 - DNA, 201 bp, Homo sapiens
ggcacggtggctcatgcctgtaatcccagcactttgggaggacaagggggaggattgtttgagctcaggagttcaagaccagtctgggcagcatactgagkctctatctctaagctaaacaaaacaaaaaaagaattgataaaatgttttgccaagtctgatgacgtacaacattttttgtttgtttgcttgggagtggaa

SEQ ID NO: 494394 - DNA, 201 bp, Homo sapiens
ctcactctgtcacccaggctggagtgcagtggcatgatcctgaccttgtgatccacccacctcgacttcccaaagtgctgggattacaggcgtgagccacygcacctggccaagcttttctttttataaaaataatttttaaaagacacagtaaggtagagtagggctgcagagaggacatcatggagttatgtcataaat

SEQ ID NO: 494395 - DNA, 201 bp, Homo sapiens
tatctcctacaatctcatacagttaaattgtgttgtgtctaataattccacttcatagttgaaaaagtaatttcttttttcttttcttttctttttggaarcagggtcttattgtgtcaccaaggctagagtgcagtggcacaatcatggatcactgcagtctcaacttcctgggctcaagtgatcctcccacttcagcct

SEQ ID NO: 494396 - DNA, 201 bp, Homo sapiens
atatatctttatacatctatctatctatctatctgtttgcaccgagccaacaatgaatatatatctttatacatctgtctgcgcccagctgacaatgagtrtatatctttgtccgtccgtccatccgtccatccatccatccatccatccatcctttgcagacatgcactagaccaaggctaacaaggcattgaggcagaa

SEQ ID NO: 494397 - DNA, 201 bp, Homo sapiens
gcagccagcatgcctgactgtgtgcagtggccggaacccacgcttgctttctcacacaccccttgctgctccatgcctggctcacccttgacagacatggkatccaggctggtagtgtaagcctagcacagcctgccaggctgagtggccggaacaagcccagcaggcctgagcaaaactcaggcaaaggcaccactggcc

SEQ ID NO: 494398 - DNA, 201 bp, Homo sapiens
caggtggatcacctgacgtcaggagtttgagaccagcctggccaacgtggtgaaaccccgtctctactaaaaatacaaacattggctgggtgcctgtaatsccagctactcgggaggctgaggcaggagaattgcttgaacatgggaggcagaggttgcagtgagctgagatctcaccattggactccagcctgggcgaca

SEQ ID NO: 494399 - DNA, 201 bp, Homo sapiens
gtattccagcccagatgacagagtgagaccctgtcttaaaaaataataaagcccatgatttccatattggtttacaaacctttgctatattcagtgaatcrggctattctttgatagcagttgggaagacagattagttttgactttgttactttagatatttaatgctctccagccttaaattgaatatggaatcatgac

SEQ ID NO: 494400 - DNA, 201 bp, Homo sapiens
tctcctgggttcaagcaattcttgtgcctcagcctccccagtagctggaattacaggcacgaaacaccatgcccagctagtttttgtatttttagtagagrcgcatgttggccaggctggtctcaaactcatgacctcgagtgatccacccacctcagcctcccaaagtgccttttgcctgttttttaattgggttgtctt

SEQ ID NO: 494401 - DNA, 201 bp, Homo sapiens
attaaaataaaacactgccagtttgaaacttgaacttcacagtacatcatgtaggcctttttgtgattctggtgataattgtctttttttttttttttttrgtagtagtagccgaggtaaattatttttgaagttattgtgaggtcactcatggaaatttctgctcagtgtttaaaaagcaaggttgagattctttaacct

SEQ ID NO: 494402 - DNA, 201 bp, Homo sapiens
ttgtagtttaccattatctggaaagatttataagagattttatccttgtgtatatacttaagatttataaattatattttaataattcaaaatgtaatacrcatttactttttaggtttaaacaagtctcttaagtggtgtttcctcaccgatggagaattacttccaagcagaagcttacaacctggacaaggtgttaga

SEQ ID NO: 494403 - DNA, 201 bp, Homo sapiens
gcacactaccacacccagctaatttttgtattttttgtagagagagcgttttgctatgttggccagactgatctcaaactcctggcctcaatgattcaccygcctcagcctcccaaagtgctggtattacaggcatgagccactgctcccagctgcaaagctcattgtttttacaaactaccttgccctggttgaactacc

SEQ ID NO: 494404 - DNA, 201 bp, Homo sapiens
taactttgggcaagtcacccaagttctctgattgtgtttcttttgtaaactggaaataataatgcttgccttctattttatattgggttgttaacaggatsaaatgagagaataaatgaaacataattttataaaccataaaacagtttatgttctcagcaagtcaacttcattcttccaccaattatttatttattcagt

SEQ ID NO: 494405 - DNA, 201 bp, Homo sapiens
tttttttttttttttttttttgagacagtgtcactctatcgcctaggctggagcgcagtggcacaatcttggctcactgcaacctccgcctcccaggttcragcaattctcctgcctcagcctcctgagtagctgggattacaggcgcacaccactacgcctggctaatttttgtatttttagtagagatggggttttacc

SEQ ID NO: 494406 - DNA, 201 bp, Homo sapiens
ttcctggaccagggactttatggtgtcctgttcctgtcatgtcttcttgcacatcttggagaatcagggtgctcatatacagtgagctaatctacttctcycaaaatctaggcacaagtttaaaagtctcttttgtttggggaacaggtgtttttcctagaaaacgatgaccagcacaattgcctcagtgatcctgcagat

SEQ ID NO: 494407 - DNA, 201 bp, Homo sapiens
gatcttggctcactgcaacctgcacctcccaggttcaagcaattctcctgccttggcctcctgagtagctgggactacaggcaccagccaccacgcccggmtaatttttgtatttttagtagagacggggtttcaccatattggccaggctggtctcgaactcctgaccttgtgatccaccctccttggcctcccaaagtg

SEQ ID NO: 494408 - DNA, 201 bp, Homo sapiens
atggcatatggtaagatatttcagcagtataatttaagttcaggtgtgcaaatatgtaattttcttaatttttagaactgactttacttttttactctaarcctgtagcttagagaactggggaaggtacttagatggtatatggaatatagtggggtatttttagttgtcagaatgactgaggttgctactggcatttag

SEQ ID NO: 494409 - DNA, 201 bp, Homo sapiens
aattttacttaattgatttttataaaatgttccgcacaacagcatcagaatgcacattcatttccagtgcacacagaacatttacaaaatagaccattttstgtggtgtaaaagaggtctcaataaatgtaagatgattcaaatcatacagaatgtggtctgtgaccacacagctttaaataagaaaccaatgccagaaag

SEQ ID NO: 494410 - DNA, 201 bp, Homo sapiens
ctcccaaggtgcagctgcccaagttatggctgcagacctgggccttctgctccatggagcaggcaggagctccccccttgcaggcacagctgtagctaccsgagttgtggctacggacccaggcatcctcgtgcttgggaaggcccccctcccttacagccctggaaatgcctgctcctactgcctggcttttccctgctg

SEQ ID NO: 494411 - DNA, 201 bp, Homo sapiens
gtgctcttttgttcatggcttttgcagagctggttccttattgattcatacttcccctactcttcacctgcctaacccccactcattattcaggtgtcacygtaaatgacatttttttcacatatactttgatttaactcccaactggggtaactctattatatgcattcctagaattctatgcatactatttgtaataat

SEQ ID NO: 494412 - DNA, 201 bp, Homo sapiens
gtgaaagccatggccagttgaatcagagcacaagtgccactccagttgcttggcagtgtaccaaatattggtcccccacaataccaccatacatcctctcrgggatggactagggctgactgattggttatctcttgaaaaggtttaggcccactacatcccatcaggtttccaaggaatgtcaaattttccccttgttgt

SEQ ID NO: 494413 - DNA, 201 bp, Homo sapiens
aaaaaaaaaaaaaaaaaaaaaaaatcatgttactcttatttgctccaaccaaatagtttacttggctaaatggtctcctttattacataaaatcacctatstctttaataccttcactaggtggaagagagacatactatgagtattaattaggagaagctgcattatttatccaatattgtggaggtcttgatgtccata

SEQ ID NO: 494414 - DNA, 201 bp, Homo sapiens
ctcaagcctgggagaacatgatgagtgcctcaagccagagccctaaccctaacaatcctgctgaatactgttctactatccctcccttgcagcaagctcargcctcaggagctctgagctctccacctcccactgtgatggtacctgtgggagttttaaagcaccctggagcagaaggtaggggatcatgtgctattctct

SEQ ID NO: 494415 - DNA, 201 bp, Homo sapiens
agattgtgccactgcactccaacctatgcaacagagcaagattgtgtctcaaaaaaaaaaaagtcacatttaagtgacacagtggaataaagtccacaaarggagacaaagaaaagaagaggaaaatcaatagagagtatcaagtttttataggagcggaggaggagagttttaaaaaagagtgttcctgtggataggcta

SEQ ID NO: 494416 - DNA, 201 bp, Homo sapiens
atttctctgaatctcaggacatgactaattggaagttgactaaactaaatgagatgaatgatagccaagtaaacgaagaaaaggaaaagtttctacagatyagtcagcctgaggacactaatggtgatagtggaggacagtgtgttggattggcagatgcaggtctagatttaaaaggaacttgcattagtgaaagtgaag

SEQ ID NO: 494417 - DNA, 201 bp, Homo sapiens
ttccctaaaaatgcacaaaagcaaatccttgagatcgcccagtttgctggttgtaaaccacattggcaccattcaaaggtccatatcaagaacatacttcrcgaagatctctgtctgttgtgtacaaactaaggccaaacactctaaggcaagtgttgggatctggatttgcccttctgccagtgtgtcttctctggttag

SEQ ID NO: 494418 - DNA, 201 bp, Homo sapiens
aagtactgggattacaggcatgagccagtgtgcctggctatattacccaaacttatttggttgtggaaccccttttttccacgtaggccttagtaattaayaccctttactgatgtaggtcaacttttacctgttttttaaagtctcaccctcaccgtatccgagactttgaactctcagatgataggccctgattacttc

SEQ ID NO: 494419 - DNA, 201 bp, Homo sapiens
gtgtagcagtatgtggaacaacatatgctatctaattggggaactgcaaatagtgtgttatgctagttttgtaggctgaaaggaattgagggcaagaggtraagtagatacttagacacaggagctagattatgaaagacttcatatactatgaaaagtagtttttttttttttttttttagcagggcatggggaaccaat

SEQ ID NO: 494420 - DNA, 201 bp, Homo sapiens
gcccttgaatctttgagatccttaaaggtgacactcatcattgccattccctttacctctgccccctacacaattttggttttgatttacacccaggggayggagagctattttcagaaggtttcacttggccattctctgtctgatagctcttactcctcaggtcaaagacccggggtgggagttacccccaactgccaa

SEQ ID NO: 494421 - DNA, 201 bp, Homo sapiens
atgaattacacacataacactattctctggagtagctgtgaagctctacgaggctgtgaggttggaggcgcttctccctgcctgttaagctgctcccatcrcatcacgacaggatggactttatttttctcttttcaattaaatctttacaacagttcgaatgctctttccagaatgcatcagttcaaaggctttgttgat

SEQ ID NO: 494422 - DNA, 201 bp, Homo sapiens
cggactctggaattggaaaatatatttctctgagttttgaaaaaaagaggttgaaagattgttaattatttatgtagtttactattaataagtaaaatcarcataatctaattttgaagtattagagattgctaaattaaggaggaaccaaggtgtcagtagaattagcatttagttatgtagtagaataccttatatttt

SEQ ID NO: 494423 - DNA, 201 bp, Homo sapiens
tgtgttggaaacaagtgcttgatgtagccaaaagaaacccgcacttagacagaaattttctcagcaaggcacttttacttctgcagaagggtgctgcttgyacctattacaaatgcaagagcacaccgaacaaaggaaggaaggggtttttaaccctaacacagttcctgtttctgtatcttttccctattggctagggtt

SEQ ID NO: 494424 - DNA, 201 bp, Homo sapiens
tctacattcttccatcctccaaaggcagtgcctttctatgtgtgacctgttaccagctggaatggacgagtggcagtttcttcacctgaagcggctactcyaaccaccacgctgatgccccagcccttgtgacacgcctcaagtgctgctctcatgaccttcacattaccaatacattcaaaggaatagtccatagagtcg

SEQ ID NO: 494425 - DNA, 201 bp, Homo sapiens
tacattcttccatcctccaaaggcagtgcctttctatgtgtgacctgttaccagctggaatggacgagtggcagtttcttcacctgaagcggctactccarccaccacgctgatgccccagcccttgtgacacgcctcaagtgctgctctcatgaccttcacattaccaatacattcaaaggaatagtccatagagtcggg

SEQ ID NO: 494426 - DNA, 201 bp, Homo sapiens
aaatatgtttagcataaattttttttttttttgagatggagtctcgctctgtcacccagcctggagtgcagtggcgctatctcagctcactgcaagctccrcctcccaggttcacgccattctcctgccccagcctcccaagtagctgggactacaggcgcccgccaccacgcctggctaattttttgtatttttagtaga

SEQ ID NO: 494427 - DNA, 201 bp, Homo sapiens
aaatggaaagatgttccatggattagaagacttaatattgttaagatgtcaatattaaaagtgatctacaaatgattcattgcaagccgtatcaaaatttyaatggcctttttgcagcaatggaaaagccaatattcaaatcatctgtaattgcaaggggcccttaatagcccttcgtggatgttcttgaaaaaagaagaa

SEQ ID NO: 494428 - DNA, 201 bp, Homo sapiens
gatttttattttaataaatcttagattaataaggaactaaattggcctactctgttgttaaaaagagtcagattgttggattctattgttagtaaaatacctattgttagtaaaattatctattgtaaaaatatctattgttagtaaaattgctgcttagggttcagatttttattttaataaatcttagattaacaggga

SEQ ID NO: 494429 - DNA, 201 bp, Homo sapiens
tggaataaatgagtgaatgatggattcttggttttgtctctttattagaaaggttattgaaggattttaagaaatttaacattattagatttattttttaraaagttcagtctttgtttggaagattaattggaaaggcagatgtgaagattaggagaacagttaggttatcatcatgatcgtttagtcctcagataataa

SEQ ID NO: 494430 - DNA, 201 bp, Homo sapiens
agatttttattttaataaatcttagattaataaggaactaaattggcctactctgttgttaaaaagagtcagattgttggattctattgttagtaaaatacctattgttagtaaaattatctattgtaaaaatatctattgttagtaaaattgctgcttagggttcagatttttattttaataaatcttagattaacaggg

SEQ ID NO: 494431 - DNA, 201 bp, Homo sapiens
atactatggcgccatacaaaagaatgagaccatatgctgtgcaggaacacggatggagctggaggccgttgtacttaggaaactaatgcaggaacagaaaaccacataccacgtgttcttacttataagtgagagctaaatgatgagaacacacagacacaaagaggggaacaacggacactgggtcctactggagggtgg

SEQ ID NO: 494432 - DNA, 201 bp, Homo sapiens
catccccattgggtagcttggtgcccagtacatagtaagagttcatatatttgtggaataaatgagtgaatgatggattcttggttttgtctctttattaraaaggttattgaaggattttaagaaatttaacattattagatttattttttagaaagttcagtctttgtttggaagattaattggaaaggcagatgtgaa

SEQ ID NO: 494433 - DNA, 201 bp, Homo sapiens
cagatttttattttaataaatcttagattaataaggaactaaattggcctactctgttgttaaaaagagtcagattgttggattctattgttagtaaaatacctattgttagtaaaattatctattgtaaaaatatctattgttagtaaaattgctgcttagggttcagatttttattttaataaatcttagattaacagg

SEQ ID NO: 494434 - DNA, 201 bp, Homo sapiens
ttttgtatttttagtagagacagggtttcaccatgttgcccaggctgcgtctcgaactcctgacctcaagtgatccaccccctcagcctcccaaagtgctrggattacaggtgtgagccaccacaccctatcaggattggataaaaattttactcctgatgttttcatagaattgttagttactaattatttatattaatg

SEQ ID NO: 494435 - DNA, 201 bp, Homo sapiens
acagtggcgtgatcttggctcactgcaacctctacctcccaggttcaagcaattctcctgcctcagcctccaaagtaggtgggattacaggcgcctgccaycatgccaggctaatttttgtatttttagtagagacagggtttcaccatgttgcccaggctgcgtctcgaactcctgacctcaagtgatccaccccctcag

SEQ ID NO: 494436 - DNA, 201 bp, Homo sapiens
ggaggaggctttcggctcagggacgacccccgtggccatgctgaagcggaggcggccgctgctcgaggtgagtgtggcgcggcgtggtccggggctcgccsgcctcccgccgcctgtgggggccctggcggcagaccgcgggccgggcggacggggcgtcctgccactgcggtcgcctcccccaccctgcggtcctggggc

SEQ ID NO: 494437 - DNA, 201 bp, Homo sapiens
atagagtctctgttgcccgggctgcagtacagtggcgtgatcttggctcactgcaacctctacctcccaggttcaagcaattctcctgcctcagcctccaragtaggtgggattacaggcgcctgccatcatgccaggctaatttttgtatttttagtagagacagggtttcaccatgttgcccaggctgcgtctcgaact

SEQ ID NO: 494438 - DNA, 201 bp, Homo sapiens
ctgggaggcagacgttgcagtgagccaagattgggccactgactctagcctgggcaacagagcgagactccatctcaaaaaaaaaaagttgaatacagttmtcagtgtgtccctcaagaccaccaacattagaatcagttgagagtgcttgttatatatataagtattatatgtaatatgcagattcttggtcccttgaat

SEQ ID NO: 494439 - DNA, 201 bp, Homo sapiens
gtgatccacccgcctcggcctcccaaagtgccgggattagaagcatgagccaccactcccggtctaattctttaaaaaaaaaaaaaaaaaaaaaaaaaaaatcatgttactcttatttgctccaaccaaatagtttacttggctaaatggtctcctttattacataaaatcacctatctctttaataccttcactaggtgg

SEQ ID NO: 494440 - DNA, 201 bp, Homo sapiens
ctcagtgtttgtcatgtaggaggtgctcaataaatgtacatttctttcttccttttgggaaaaacaaaaatcaggcattgggatttctgcatgacttaaarcttggttgctttattttttttagactaagtctacttttgggatttggaattttttatggaaaacaatttcgattttagtatgttttccatttcattttta

SEQ ID NO: 494441 - DNA, 201 bp, Homo sapiens
ccaggatggtcttgatttcctgacctcgtgatccacccgcctcggcctcccaaagtgccgggattagaagcatgagccaccactcccggtctaattctttwaaaaaaaaaaaaaaaaaaaaaaaaaaatcatgttactcttatttgctccaaccaaatagtttacttggctaaatggtctcctttattacataaaatcacc

SEQ ID NO: 494442 - DNA, 201 bp, Homo sapiens
accatttaccacttttgaaacacgtgatttatattcacttgtatggtttttctttttctttctttcttttttttttttttttttgagacagggttttgctrtgttacccagacaggagtgcagtggccattcacaggtgcagtcatagtgtagtgtgtcttcaaactcctggcttcaagccatcttcctgcctcagcctcc

SEQ ID NO: 494443 - DNA, 201 bp, Homo sapiens
agggctgtttccactttttggctactataaataatggtgttgtgaacattcatgtgcaaattattgtgtggaaatatgctttcatttctcttgggtatttrtagggatggaattgctgggccaaatggtagctgtatgtttaacctttcgagaaactatcagattgtttttacaaagtagctgcacctttttacaatccca

SEQ ID NO: 494444 - DNA, 201 bp, Homo sapiens
ggttattaaaatggaacaacaaggtgagaaatgtgtcaagactatttctgggcaagtagagaataatatttgtgttgcttggtattttagaggcacctcakaatatatgtcagtctcctctccaacttaagaatggagtaattacactgcttgtccttaaaaagaggtgcagaatttgaagtcaatctgtaaattcctagc

SEQ ID NO: 494445 - DNA, 201 bp, Homo sapiens
tgtagtttaataaggttcactgacaatcagtgtttgtcaatattggttcactctctttgcatggcaatcccaagtaaattttgtgtgttcttccccccccscccccacaggttttctgtgcttcctgctgtagcctgaaatgtaaactgttatacatggacagaaaggaagctagagtgtgtgtaatctgccattcagtgc

SEQ ID NO: 494446 - DNA, 201 bp, Homo sapiens
tgggacactttctacattcttccatcctccaaaggcagtgcctttctatgtgtgacctgttaccagctggaatggacgagtggcagtttcttcacctgaarcggctactccaaccaccacgctgatgccccagcccttgtgacacgcctcaagtgctgctctcatgaccttcacattaccaatacattcaaaggaatagtc

SEQ ID NO: 494447 - DNA, 201 bp, Homo sapiens
gcctgctttgttttagtgcactggcagctgattgtatggtgcccacccccattgagagtgggtcttcttctcccagtccactgactcaaatgtcagtctcytctggcagtaccctcacagagacacccagaaacaataccagccatctaggcattcctcaatccagtcaagttaacacttaatactaatcatcacatagtg

SEQ ID NO: 494448 - DNA, 201 bp, Homo sapiens
ctatggcgccatacaaaagaatgagaccatatgctgtgcaggaacacggatggagctggaggccgttgtacttaggaaactaatgcaggaacagaaaaccrcataccacgtgttcttacttataagtgagagctaaatgatgagaacacacagacacaaagaggggaacaacggacactgggtcctactggagggtggagg

SEQ ID NO: 494449 - DNA, 201 bp, Homo sapiens
tatggcgccatacaaaagaatgagaccatatgctgtgcaggaacacggatggagctggaggccgttgtacttaggaaactaatgcaggaacagaaaaccayataccacgtgttcttacttataagtgagagctaaatgatgagaacacacagacacaaagaggggaacaacggacactgggtcctactggagggtggaggc

SEQ ID NO: 494450 - DNA, 201 bp, Homo sapiens
tattgtagtttaataaggttcactgacaatcagtgtttgtcaatattggttcactctctttgcatggcaatcccaagtaaattttgtgtgttcttcccccsccccccccacaggttttctgtgcttcctgctgtagcctgaaatgtaaactgttatacatggacagaaaggaagctagagtgtgtgtaatctgccattcag

SEQ ID NO: 494451 - DNA, 201 bp, Homo sapiens
atgagaggactggctgctaatttttctatcttataattgaagatgagttgcattggtttatatagtagactgaggtacatggtagaataccaatgttaagktcaggcggatcagaattacagtatttctagttttagttcttgtttttaagatagctttttttttatgtttttaagatagctttataacaaaattcacctg

SEQ ID NO: 494452 - DNA, 201 bp, Homo sapiens
gactggctgctaatttttctatcttataattgaagatgagttgcattggtttatatagtagactgaggtacatggtagaataccaatgttaaggtcaggcrgatcagaattacagtatttctagttttagttcttgtttttaagatagctttttttttatgtttttaagatagctttataacaaaattcacctgttcaaag

SEQ ID NO: 494453 - DNA, 201 bp, Homo sapiens
aagaccgtgtaccaggtatttaggagacaagagtagataagttagaaattgctcctaagcctttggcttatactgtcagttgcttagagggtatttgctayctccttcccttaaatctaagtaattacaaaccttttaaagtagagagcaggacttgaaattctcttggcaaaacagtagtcaattctgccatccttgtga

SEQ ID NO: 494454 - DNA, 201 bp, Homo sapiens
ggacagagtatgtgacataatcatagatgtatttaagaactcttaatatttcaaagcaaagtattttactctttgcatataagttaaacaagtaaagaatwtatttaaatttgtatttttaattcatttataaccacttttatatacagttacatttctgatgtttctgattgtaagttgccaagtaatgatttctttgta

SEQ ID NO: 494455 - DNA, 201 bp, Homo sapiens
aaaaaaaaaaaaaagatacacactaatgactcagtaattgtgcatcttaatgtcttaatgtttatcttcaaacacacacgcacgcgcgcacacacacacaygtgtccaaggaggcatatacaagggtgttaatgggagcattcttggtaatcgttgaaaaataggggaaaatgtaaatgcttattcgtgctttatataact

SEQ ID NO: 494456 - DNA, 201 bp, Homo sapiens
ttttttaaatttttttctaatttaaaaagtacagaaaaaactaatcaaaataaaataaaaatatcccaatacaacatttaaaaaattatataaagtaaaargagagaaaagatagccagctgtggtggctcatgcctgtaatcccagcactttgggaggcccaggcgggcagatcacttgaggtcagaagttcgagaccag

SEQ ID NO: 494457 - DNA, 201 bp, Homo sapiens
tgatatggttatattttagaattctatgtgtacaattaaagtagttgtaatcccagcttctcgggcggctgaggcacgagaatttcttgaacctaggaagygaaggttgcagtgagctgagatcgtggcactgcactccagtctgggcgacagagccagactccatctcaaaaacaaacaaagtagtttatctggaaagat

SEQ ID NO: 494458 - DNA, 201 bp, Homo sapiens
tttaaaaatattttattgtaattttgataaatttgggtcatattatctttaacatgtaataaagctcacatattttacattactaaaaaaaaaaaaaaaaagccatatgtgtggctgggcgtggtggctcacacctgtaaatcctagcactctgggaggccgaggcaggcagatcgcttgagcccaggagttcaagagcag

SEQ ID NO: 494459 - DNA, 201 bp, Homo sapiens
cctatgaagaactggcccacctaaaatgccaagagtgcccctgttgagaagcactgactaacctggctcatggtagacaatttcatcttgatctttttagrcaaaattgactattatccagtaatttcaaattcaggattatttaaactatcccaaacctggctcaaatctcttagattctgcccatctcctctgtgatac

SEQ ID NO: 494460 - DNA, 201 bp, Homo sapiens; identical to SEQ ID NO: 420324

SEQ ID NO: 494461 - DNA, 201 bp, Homo sapiens
aaaaggttaatggtaagttaagtacaatacatatatttgcttcagccattaaaaattattacaaggcagtgtagaaaatgcttatgatgacatatgaataraacagaatgcaagcttatgctttgtttacaattaaattattcttgggcataaaaacagatatgtctgaaggaaacatatttttaaaaagtaattttagag

SEQ ID NO: 494462 - DNA, 201 bp, Homo sapiens
gattttctttgggttgtcattaaataatattgtagtgtttttttttgttttttttttttttttttttgagatggagtctcactctgtcacccaaactggarttcagtgatgctatctcggctcactacaacctctgcctcccgggttcaagcgattctcctgcctcagcctccacagtagctaggattacaggcacccaac

SEQ ID NO: 494463 - DNA, 201 bp, Homo sapiens
gctaaatttccaatactatgttaaatagatatggcaaaagtatgtatccttgtcttgtttctatcttaaagcaaaagttctttcagtctttttttttttttgagacagggtgtcattctgtcacccaggcttgagtgcactgccatgatctcagctcaccgcatcctcaacctcctgggctcaaggtatcctcccacctca

SEQ ID NO: 494464 - DNA, 201 bp, Homo sapiens
gctgaggcaggagaatcactcctgaggtccggagttcacaaccaccctgactaacgtggtgaaaccccgtctctactaaatacaaaaaaaaaaaaaaaaaagccaggcgtgatggcgcatgcctgtaatttgagctacttgagaggctgagacaggagaattgcttgtacctggttggcggagattgcagtgaactgagat

SEQ ID NO: 494465 - DNA, 201 bp, Homo sapiens
gaaaatgtttgcactaagttcatgctattttttgtttttttgcatctcttctcctgaaagccatctccctttcaatatctagtctgctgatacattctaartactagtcacaattttttattgtaaaatatgcataacataaaatttaccagtgtatatgggtttgagggtatatggttcagtggcgttacatgcattcac

SEQ ID NO: 494466 - DNA, 201 bp, Homo sapiens
cctcagccctagaacatacgggtgctcagtagatatttgttagatgaattaaacaataagtgaatactgtttcttaatgcagcagtactttttttttttttaaatccagtgccttcaatctttagatgatggtatcaaatttagatataacgggtgtaagaactttggaaaatattttaaattagtcatgtgtattgttcc

SEQ ID NO: 494467 - DNA, 201 bp, Homo sapiens
gggttcaagtgattcttctgtacctcagcctcccaagtagctgggagtacaggcgcctgccaccaagtccagctaattttttttttttttttttttttggkattttttagtagagatggggtttcctcatgttggccaggctggccttgaactcctgacctcaggtgatccacctgcctttttctcccaaatttctgggat

SEQ ID NO: 494468 - DNA, 201 bp, Homo sapiens
tggcgcgatctcagctcactgcaaactctgcctcccaggttcacgccattctcctgcctcagcctcctgagtagctgggactataggcgcctgccaccgcrcccagctaattttttgtatttttagtagagacagggtttcaccgtgttagccaggatggtcttgatctcctgacctcgtgatccgcccatcttggcctcc

SEQ ID NO: 494469 - DNA, 201 bp, Homo sapiens
cagcacctcagtggagttgccaggaagtttcctgatgtcaaatttatcaaagccatttcaacaacctgcatacccagttatcctgataggaatctgcccaygatatttgtttacgtggaaggagatatcaaggctcagtttattggtcctctggtgtttggcggcattaacctgacaagagatgagttgcagtgaaaactg

SEQ ID NO: 494470 - DNA, 201 bp, Homo sapiens
ttagttggcagctttaaattaggtcatttcatggttctatttgtccttttggcatttctttaatgacaagtgtcattatatatatatatttatatatatakatatatatatatatattttgagatggattttcactcttgttgcccaggctggagtgcagtggcatgattttggctcactgcaacctctgcctcctgggtt

SEQ ID NO: 494471 - DNA, 201 bp, Homo sapiens
gaagagtttgagaaggattggtgttctttaaatgtttggtagaatttgccaccaaaatcatctgatctagggctttactttgttgggaagtttttgattamtgattcagtctccccactagttataggtttattcagattttctgtttattactgattcagtcttggtaggttttgtgtttttagaagtttatccatttaa

SEQ ID NO: 494472 - DNA, 201 bp, Homo sapiens
atagataaatatctattatattttatggatattcattcccttcctccctcccttccttccttccttccttcagctgtagtacagtggcatgatcccagctyactgcagcttcaacctccgtggctcaagtgatcttcctgccttagccccctaacgcctccagtgggtgggactataaatgcatgccaccatgcctggcta

SEQ ID NO: 494473 - DNA, 201 bp, Homo sapiens
gagagactaaaacatgaaaaatattaaatggacatggtcttaacagcatctagacaggcttaggacacagtaattggcaggggctttttttttttttctaraacaagcacctgaaacacagtgaatttaagaggaagatacccaaacatcagactctgtgcagagctacctgccactgcaaatcagggtgtaatcttagag

SEQ ID NO: 494474 - DNA, 201 bp, Homo sapiens
ggaggtgaacaacacacaccagggcctgttgcgggggtggggatcgtacttagaggatgagtcagtaggtgcagcagaccaccacagcacacatatacctrtgtaatctgcatgttctgcacatgtatcctggaacttaaaaaaaaaaaaaaaaagaatcagttggaaaagggcaggcttcatccaggatgggcaatttgg

SEQ ID NO: 494475 - DNA, 201 bp, Homo sapiens
tagtaataaaggcaatgtaaggtgaatatatgtctggttgagttgacctaaatagcatttttgaaaacccagttctagtaaatttctatataaaaaatgaygtcactgattcttagatagtatttgtaattttttttgttgccacgatttatgctgaatcagtttttatgaagagatgagaattgaggaagtgtaaacttt

SEQ ID NO: 494476 - DNA, 201 bp, Homo sapiens
ccacaatgtggattgatgaaaatgctgttgcagaagaccagttaattaagagaaactatagttgggatgatcaatgcagtgctgttgaagtgggagagaasaaatgtggaaacctggcttgtctgccagatgagaagaatgttcttgttgtagccgtcatgcataactgtgataaaaggacattacaaaacgatttacagg

SEQ ID NO: 494477 - DNA, 201 bp, Homo sapiens
gcattccgacagtctgtgtcttttcattggtgcatttagaccattgaccttcaaagcaatttttaaaaaaaaaattattttatgtatttatttatttattyttttgagatgaagtcttactctgtcacccaggctggagtgcagtggcacgatcttggctcactgcaacctccgcctcccaggttcaagcaattctcatgc

SEQ ID NO: 494478 - DNA, 201 bp, Homo sapiens
attctcaggctccaaattgcatgaaatgtgaagccaggtttacattcaccaaaaggaggcatcactgcagagcatgtgggaaggtaagttgcatgtatacrctcagaaatcgggcatgcacattttgtaatgctgaattaaatagtaataaaggcaatgtaaggtgaatatatgtctggttgagttgacctaaatagcatt

SEQ ID NO: 494479 - DNA, 201 bp, Homo sapiens
tttctttattgttgacagacttgtaatctcactcttgcttttgaattacccaacttcctgaactacattttctttgaaactttagtattgtagtttaatamggttcactgacaatcagtgtttgtcaatattggttcactctctttgcatggcaatcccaagtaaattttgtgtgttcttccccccccccccccacaggtt

SEQ ID NO: 494480 - DNA, 201 bp, Homo sapiens
gttgcacccacatcctctctagcatttggtggtgtcagtgtttctgattttggccattctaataggtgtgtggtggaatctcatagttattttaatttgtrttttccttataacaaataatgtggagtatcttatcataatgcctgtttgccatctgtgtaccttctttggtgaagtgtctgtacaggtctttggcctgtt

SEQ ID NO: 494481 - DNA, 201 bp, Homo sapiens
aagaggtcatgagagagaacatgagactggattaaaagtcacatttaaggccgggcgtggtggctcatgcctgtaattccagcactttgggaggctgaggygggcggattgtgtgaggtcaggagttcaagaccagcctggctaacgttgtgaaacctgtctctactaaaaatacaaaaattagttgggcgtggtggcaca

SEQ ID NO: 494482 - DNA, 201 bp, Homo sapiens
agaaaacatggttagggttttgatagagattgcgttgaatctgtagatcactatgggcattgttgacatcttaataataagccttctagtccatgaacatrgaatgtttttccatttatttgtatgttctttaatttcttttagcaatcttttgtcttttgtagttttcactgtacagtattttacctccttggttaagtt

SEQ ID NO: 494483 - DNA, 201 bp, Homo sapiens
atttacctaccattcacctactgaaggacatcttagttgcttctaagtttggcaattatgaataaagctgctataaacatctatgtgcaggtttttgtgtrgacatgttttcagctcctttgtgtaaatactgaggagcacgattgctggatcatattttaagagtatatttagttttgtaagaaacagccaaactgtctt

SEQ ID NO: 494484 - DNA, 201 bp, Homo sapiens
ggaggaagaaagcaagaaaggcactgagtgcattgttccttatttctctaatttacttagacatatgcagtagccctataacttgagagaataacttagccattgtagttatgatctgttaaaaagtaaacagaaacattatatgaaattatgcttattggtagactataagaatgttgatttaatatgataaatgaacac

SEQ ID NO: 494485 - DNA, 201 bp, Homo sapiens
aggattacaggcacccaaccaccacgctcagaaaatttttgtatttttagtagatgtggggtttcgctggtctcgaactcctgaggtcaggtgatccaccygcctcgacctcccttacaggcatgggctactgtgcccagcctgtagtgttctttaatataagtaatttgagcatggatttgtttcatctaactgttgtcc

SEQ ID NO: 494486 - DNA, 201 bp, Homo sapiens
agtatatctgtaaaagctgaggcgctcatagttatttctttttttttgttttgttttgtttttgagacagagtcctgctctgtcacccaggctggagtgcrgtggcacaatcttggctcactgcaacctacgcctccaggattcaagcaattctcctacctgagcctcctgagtagctgggactacaggcatacaccacca

SEQ ID NO: 494487 - DNA, 201 bp, Homo sapiens
agggagccaaactggaagagcacctataggcagagattttctttgggttgtcattaaataatattgtagtgtttttttttgttttttttttttttttttttgagatggagtctcactctgtcacccaaactggaattcagtgatgctatctcggctcactacaacctctgcctcccgggttcaagcgattctcctgcctca

SEQ ID NO: 494488 - DNA, 201 bp, Homo sapiens
aagggagccaaactggaagagcacctataggcagagattttctttgggttgtcattaaataatattgtagtgtttttttttgttttttttttttttttttttgagatggagtctcactctgtcacccaaactggaattcagtgatgctatctcggctcactacaacctctgcctcccgggttcaagcgattctcctgcctc

SEQ ID NO: 494489 - DNA, 201 bp, Homo sapiens
aagactttggaagaaaagggagccaaactggaagagcacctataggcagagattttctttgggttgtcattaaataatattgtagtgtttttttttgtttkttttttttttttttttgagatggagtctcactctgtcacccaaactggaattcagtgatgctatctcggctcactacaacctctgcctcccgggttcaag

SEQ ID NO: 494490 - DNA, 201 bp, Homo sapiens
agagacccctccatgtctgcgattacaagtttaacggttgattcagtaatctcatcccagggaacagatggatgtcctgctgttaaaaagcaagagaactrtataccagatgaggacctcactggcaaaatcagctctcctaggacagatctagggagtccaaattccttttcccacatgagtgaggggattttgatgaaa

SEQ ID NO: 494491 - DNA, 201 bp, Homo sapiens
tctaagaagagttgttgatatttcagtttttttactttgttgttcggatagaatagtgacttccaagctacttaaatgctgcactagaaactggaagtctrtgtatactcttgttgttactcttggttcacacaatttgtggtatacaaattatatctccctgttagattgccacctagaatgatccgaaatataagaccc

SEQ ID NO: 494492 - DNA, 201 bp, Homo sapiens
aaattggagatacagactttggctaatatggtattaattaatatttcagtcatggataaacaatttatataccactttagtttctccagagaaacagaacyagaaggagatagaggtttctgttttgttgttgttgttgttttgttttgttttgttttttgagacagtctcgtggtgtcacccaggctggagtgcagtggc

SEQ ID NO: 494493 - DNA, 201 bp, Homo sapiens
tgagctcctattttctttagagaaaggtctacgtgggagaagatggggatcgcagctggagggggaaacaaagggatagatggaaaatgggtgccttttcrgaagaggcagcttgcttagctgtttgatctgcaaggttatttccctggctttcaaaagatggattcttttggtgtcctgggacatggacaactgcaattt

SEQ ID NO: 494494 - DNA, 201 bp, Homo sapiens
atctggtaatgcctgctttccctctgggctctcctgagctcctattttctttagagaaaggtctacgtgggagaagatggggatcgcagctggagggggaracaaagggatagatggaaaatgggtgccttttcggaagaggcagcttgcttagctgtttgatctgcaaggttatttccctggctttcaaaagatggattc

SEQ ID NO: 494495 - DNA, 201 bp, Homo sapiens
tattttccagtcttcttcttgttagctgaagtactatttgtagattaggttcatcatttttatgttgttctgtattttgcttactgtaacactttctgaartgtttgctttcttaagtaaataatgaaaacatttttggtataggccagcacatccagctataatgagtaaataggtaccttagatggattcagaaagaaa

SEQ ID NO: 494496 - DNA, 201 bp, Homo sapiens
ttttttaaatttatatataatatgtaaattattaaatatataaaatatatatatttttaaatttatatatatataaagttatatatatatagttttttttwagaagtcaggtggtcttgctctgtcactcaggccagagcacagtggcatgatcatagctcactgcaacctcagacccctggactcaagcgatcctcctgc

SEQ ID NO: 494497 - DNA, 201 bp, Homo sapiens
aggccaggtgtggtggctcactcctgtaatcccagcactttgagaggccaaggcaggtggatcacctgaggtcaggaatttgagaccagcctggccaacayggtgaaaccccatctctactaaaaatataaaaattatatttgggtgtggtgatgggcgcctgtaatcccagctacttgggaggcggaggcaggggaatcg

SEQ ID NO: 494498 - DNA, 201 bp, Homo sapiens
tgagtaggagacattttcaattggccatgtaatggcaaagtcgtatcagtgatctaaaagtcaaaatttctctttgattttgtttttggtgtttgtttgtytgtttgtttgttttgagatggaatcttgctctgtagcacaggctggagtgcagtggcgcgatctcagctcactgcgacctccacctcccaggttcaggcg

SEQ ID NO: 494499 - DNA, 201 bp, Homo sapiens
tttagatgccaccatagtggtttatatcattagtgcatggctctcaagttgggaattttattctgtgcatatatatatgtgtgtgtgtgtgtgtgtgtgtrtatatatatatataattttttttttttttttttttttttttttgaggcagagtctcgctgtgtcgccaggctggagtgcagtggcatgatcttggctgac

SEQ ID NO: 494500 - DNA, 201 bp, Homo sapiens
aagctcaggcagtatatgcacaaggccagactaaagcttcatctgtctgtaggagagcatcacctggattgaaacagagttccccagttgtttgctgactragggagtgtaacaggcagtggggcataagctaggtttgtggactcagatgtgggcatcagcatttactagctatatgacattgagcaagtaatttaacct

SEQ ID NO: 494501 - DNA, 201 bp, Homo sapiens
gtggtttatatcattagtgcatggctctcaagttgggaattttattctgtgcatatatatatgtgtgtgtgtgtgtgtgtgtgtgtatatatatatataattttttttttttttttttttttttttttgaggcagagtctcgctgtgtcgccaggctggagtgcagtggcatgatcttggctgaccgtaacctccgcctcc

SEQ ID NO: 494502 - DNA, 201 bp, Homo sapiens
tgaggcaggagaattgcttgaacctgggaggcagaggttgcagtaagctaagatcacgccactgcactccagcctgggtgacagagtgagactccgtctcaaaaaaaaaaaaaaaaaaaaaaaaggactgaatttaatatttagtttcctcatctgtaaaaaaagatattgtaatatctacttcataggacagttataaaa

SEQ ID NO: 494503 - DNA, 201 bp, Homo sapiens
gaggcaggagaattgcttgaacctgggaggcagaggttgcagtaagctaagatcacgccactgcactccagcctgggtgacagagtgagactccgtctcaaaaaaaaaaaaaaaaaaaaaaaaggactgaatttaatatttagtttcctcatctgtaaaaaaagatattgtaatatctacttcataggacagttataaaaa

SEQ ID NO: 494504 - DNA, 201 bp, Homo sapiens
aggcaggagaattgcttgaacctgggaggcagaggttgcagtaagctaagatcacgccactgcactccagcctgggtgacagagtgagactccgtctcaaaaaaaaaaaaaaaaaaaaaaaaggactgaatttaatatttagtttcctcatctgtaaaaaaagatattgtaatatctacttcataggacagttataaaaat

SEQ ID NO: 494505 - DNA, 201 bp, Homo sapiens
ggcaggagaattgcttgaacctgggaggcagaggttgcagtaagctaagatcacgccactgcactccagcctgggtgacagagtgagactccgtctcaaaaaaaaaaaaaaaaaaaaaaaaggactgaatttaatatttagtttcctcatctgtaaaaaaagatattgtaatatctacttcataggacagttataaaaatt

SEQ ID NO: 494506 - DNA, 201 bp, Homo sapiens
tgcttttcttaaccaaagcaaacttgatctgttctttagtattaacttagttttttttttgtacgtgtgtgtgtgtgtgtgtgtgtgtgtgtgtgtgtgtkttttgagacagtctcgctctgtcgcccaggctggagtgcagtggcgcgatctcggctcactgcaagctccacctcccaggttcacgccattctcctgcct

SEQ ID NO: 494507 - DNA, 201 bp, Homo sapiens
agcagtagggccatatgaggtgtgtcccctcaggttgcaactttcttgtgtacagtgtggaaggtacatgaagaagaaattaactggtatatctcctttayctcttttatatccaaccaactttttccaaaaaagatatctcttttgagagtttatatgtttattattgttgttgttgatctttggcgaagcttttatatg

SEQ ID NO: 494508 - DNA, 201 bp, Homo sapiens
gacaaaaggtttcctcataatggtaataggtgtcattttttgagcacttactttgtgcattgtatatccattttgtcttttaattaaagtttccttagccaaaatcatttgagaaacattgatatattaaggttctgagaagtcttacaatatatacatttgtgtaaaattgtttaatccagcattttacattcctgcttt

SEQ ID NO: 494509 - DNA, 201 bp, Homo sapiens
aactgaaggaagaggtctcttttggagccatgagctgtgcagcctggggttagggcaggggtgatgccaccactcccttggctgatgtctcagtagtccaygtgccccccgaatccactgtctctgggcctagttcagcactaggactcacctaagtgttgcagtccttatggcctagacggactttcaagctgatttaaa

SEQ ID NO: 494510 - DNA, 201 bp, Homo sapiens
ttagcctgtatagtgacttttaacatttgaattagttcctattttagaatattgaagtttcacttaaaaatctgaatttctagccactcttgaaaaatggaaaaagtctgacaatacttaggcaagtggtaactacttgctggagctgagaagtagtttactccagtgtgttactgcctgcctgctaacccaaatgtggct

SEQ ID NO: 494511 - DNA, 201 bp, Homo sapiens
catcatacctggcatctcctagatgtttttggtacccttgaattgaatccaaaaaaagtctcctgaggcaaaccagataagtcctctgacctgaaagccaragtcagagagaatgtttgggacagactgcctgtaccaaaaaaagtctgaactcaggcagctctggctagagcagtgccctttaggtttctctaggaaggt

SEQ ID NO: 494512 - DNA, 201 bp, Homo sapiens
cagtctgattttttctggatcagggttcttctttggcttgttcatctttgcaacctcagtacttagcatcatacctggcatctcctagatgtttttggtamccttgaattgaatccaaaaaaagtctcctgaggcaaaccagataagtcctctgacctgaaagccaaagtcagagagaatgtttgggacagactgcctgta

SEQ ID NO: 494513 - DNA, 201 bp, Homo sapiens
aagtaatcagcctctgggtcagatatggcctttgctctttggtgttccctgatgtttggacaaatctgctccctttttttctccccagtgtcctgtaggasatacctccaacatagtgcttttaatgttgcttattagttattgacagtctgattttttctggatcagggttcttctttggcttgttcatctttgcaacct

SEQ ID NO: 494514 - DNA, 201 bp, Homo sapiens
tgcagaagttttttaacttgatgtgatcctatttgtccatttttgctttggttgtctgtttgttggggggttttgctcaagaaatttttgccaagaccaaygtcctaaagatttttcccagtgttttcctttagtagcttcatagtttgaggtcttagatttaagattttaatctattttgatttatatatatatttttag

SEQ ID NO: 494515 - DNA, 201 bp, Homo sapiens
ccttgactagaaatagttttttaaagggagtttgggttatctaaaggaaggtaaagatctttgaatggaatagaaccttttgtccatgctctccttccacrtcctgacttctgactctcctgtcctcctctgttctttcatgtctcctcccttggacttgtgatcatttttaatatgaaaactctttacagtgatttaaat

SEQ ID NO: 494516 - DNA, 201 bp, Homo sapiens
catatgacttgatagatatgaaaaatttgtttataaaaatctggggcaactcctgctgccccccaacacaaccattgtctagctcagcttggtcatgttgwccgctagaaatttgtaaatcagatctttacaactttaaatgcatcatgcagtagacattggttatagtttcccaatacatcccatagaaatatttttact

SEQ ID NO: 494517 - DNA, 201 bp, Homo sapiens
ttgaatatcccttagcctagcaaaaacatatgacttgatagatatgaaaaatttgtttataaaaatctggggcaactcctgctgccccccaacacaaccaktgtctagctcagcttggtcatgttgtccgctagaaatttgtaaatcagatctttacaactttaaatgcatcatgcagtagacattggttatagtttccca

SEQ ID NO: 494518 - DNA, 201 bp, Homo sapiens
cttaccacaacgtgtgcctcatgggttcaagcgattctcctgcctcagcttcctgagtagctgggtttacaggcatgtgccactacacccagctaattttrtatttttagtagagacagaatttctccatgttggtcacgctggtctcaaactcctgaccttaggtgatccacctgcctcggcctcccaaagtgctgagat

SEQ ID NO: 494519 - DNA, 201 bp, Homo sapiens
agagaggcccctgccctcaaagcagtaccagtgtcatggtggcagatggccattgccatgggaagagaccaactgtagatagtgacgtggggagatacagracggtttaaacctgtgttcttattccagaaccgctccatctcttgtttgcctgtggttcccaaaggaacagcatttctgatacagagctgagggctaaag

SEQ ID NO: 494520 - DNA, 201 bp, Homo sapiens
actgcgcccagccggactaatttatttatttattttttgctttttaaagatcccaaactacgtgcttggctgtaacggaataaggtaataatctcctgggktttttttttttttttttttttttttttttttactatgtcttacatatacttttcttttcgtttgagagaatgcctcagagatgagaaaggaggcttttga

SEQ ID NO: 494521 - DNA, 201 bp, Homo sapiens
ctcatggtcgtcaggtcaggtttgattaatcatattctcccaactctagaaggatagtaaggaaataccaactatagcacattgagcagagaagtaagatygtataccctaactggggaagcccagtatagcaggcatcttggcaaaaacagggaggagttactttttcttcatcccatgcaatttccctcttacagcaga

SEQ ID NO: 494522 - DNA, 201 bp, Homo sapiens
tttaggttatctctaaaatatatatttcacatctccttggtctgacatgcaaccaatgagtactgctgagaaccactggcagtgcttgatgatgcaggtcytaagcctctccatgcatatttttttctagattgctagtatccctgccttttggcagggttagggagatggtcttagagacaataagaattccaaagtatc

SEQ ID NO: 494523 - DNA, 201 bp, Homo sapiens
agtaaggcacacgtacaaatagggtattattactgctacatttgggaagtaggaagcatagtcttacccagagaagatacttctaaagagttaatttttcyttttttgaagatcatagctttgtaatataacagagattcaatattgtttaaattaaaagttttcctgccattccttttccgagatctttgatgtaattag

SEQ ID NO: 494524 - DNA, 201 bp, Homo sapiens
tttttcttccttcctccttcttctactttgaaacctttatttactttcccatatcaacaaacatgagtaggccaggcacagtggctcatgtgtataatccmagcattttgggaggccaaagtgggaggagcacttgagcccagaagttcgagaccaacctgggcaacatacggagaccccatctctacacacacagagttt

SEQ ID NO: 494525 - DNA, 201 bp, Homo sapiens
gaggacattgaaggtagactcttagcaaaccaagtgcttctagtaatgtagttgaagcagtaataatgagaaatgagaagaatgacatgaaagaataagattgaaaataaatatcaattacatatagtttaaaaatacccaattatatttcccatttatatctattttgaatttgttccagtagacaaaccttgatttcat

SEQ ID NO: 494526 - DNA, 201 bp, Homo sapiens
ggtctgatgtttaagtctttaatccatcttgaattaatttttgtataaggtgtaaggaagggatccagtttcagctttctacatatggctagccagttttcccagcaccatttattaaatagggaatcctttcccccttgcttgtttttgtcaggtttgtaagatcagatagttgtagatatgcggcattatttctgaggc

SEQ ID NO: 494527 - DNA, 201 bp, Homo sapiens
ccatgttgttgcaaatggctggatcttattcttttttatggctgaatggaactccattgtgtatatgttccacatttgctttatctattcatatgttgttkttttttttttttttttttgagacagaatttcgctcttttcacccaggctggagtgcagtggcgcgatcttggctcactgcaacctccacctcccgggttc

SEQ ID NO: 494528 - DNA, 201 bp, Homo sapiens
taatttttgtaattttagtagagacaggttttcaccatattggccaggctggtcttgaactcctgacctcatgatcctcctgccttggcctcccaaagtgstgggattacaggtgtgagccaccatgcccagctgagatattttgatataggcatacagtatgtaataatcacatcagggtaaatggggtattcatcacct

SEQ ID NO: 494529 - DNA, 201 bp, Homo sapiens
ttttatgtgtgtgtgtgtgtgtgtgacaatgtttcacttttgttgctcagggtggagtgcagtggcatgatctcggctcactgcaacctctgcctcccggkttcaagcaattctcctgcctcagcctcccgagtagctgggattacaggcgtccgccaccacgcccggctaattttttatatttttagtagaagcagggtt

SEQ ID NO: 494530 - DNA, 201 bp, Homo sapiens
atcataatgtcctccagttccatccatgttgttgcagatgacaggactcttttttttcgtggctgaatactactccactgtgtatatgtaccacatattcttttttttttttttttttatgtgtgtgtgtgagatggagtttcactcttgttgtctaagctggagtgcaatggcacaatcttggctcacttcaacctccac

SEQ ID NO: 494531 - DNA, 201 bp, Homo sapiens
ctctctttaggggaacatttctactctgcattcacttatttggtggtgttatgacctaaggtctgttcctactattgtaacctaatgaaaggagtggaaartagagctggggaaagtagtaggagttggtgatttctggagcagaggggcatctgtgagaggcctagttcctgggtctcactggtagactttcaactcaga

SEQ ID NO: 494532 - DNA, 201 bp, Homo sapiens
gagccaaagatggcacctgtacacattctttctgttctagtggtatttttagaagtgatgccaaatgaactcttaagatgtaaaagctttgctaaatccasttttttaaatgtaatggaaatctaggtcatttacatatgaaagatttttgtagtatgaaaatgagatcattgaaaatgggtaattcttttatgtggctgg

SEQ ID NO: 494533 - DNA, 201 bp, Homo sapiens
acagtgatagagcaaacagaggcacagagattttaagaatttgtctaatatcacgcaagatgtaaatcaaggagcttattccaaagcccatgctctcaacyaccatccagtatcagcagagttgaaagcagcgtctgattgagacatacgttgaagctatagtgtaaactctcaaaagcaagacatgtaaggaagctttgc

SEQ ID NO: 494534 - DNA, 201 bp, Homo sapiens
aaatgttctataaatatctgttagatccctttgttcaatagtgtagattaaatctgcatctttcatcaataaagatgtttctttattgatttttggtctakaagatctagccagtgatgaaagtagggtgttaaagtctccagctattattgtatcggagcctatctttctctttagcactaatatttgccttctatatct

SEQ ID NO: 494535 - DNA, 201 bp, Homo sapiens
tttctgtctacttacttatttagttagtagagatggggtccaggctggtcttgaactcttggcttcaagcaatcctcctgccttggcctcccaaaatgctrggattacagatgtaagtcaccgtgcctggccaatttatttcttttttaccctcattttatttttctttaaaatgcttattatgacctgaaaaattagatg

SEQ ID NO: 494536 - DNA, 201 bp, Homo sapiens
gaccaatgtcttggagattttccccagtgtttttgtttgtttgtttgtttgtcttagtatttcttttagtagtttcatagtttgaggtcttaatttgaagttttttttttattattatactttaagttctagggtacatgtgcataatgtgaaggtttgttacataggtatacatgtgccatgttggtttgctgcacccat

SEQ ID NO: 494537 - DNA, 201 bp, Homo sapiens
gccacatgcagctcaggaaaaatttgtatactttcttaaaacattatgttttttatttttgccatttctttttagcctatcagctatcagtgttactataytgtatgtgtggcccaagacaattcttcttcaagtgtggcccagggaagccaaaagattggatacttctgaagggttattagaagtaatgcttctcttggt

SEQ ID NO: 494538 - DNA, 201 bp, Homo sapiens
tttgttttaaatgtagagaatctcattaataattttgtttgcatgttaaaataactttatggagatattggattaaataagatattaaaattaacttcacytgtttctttttaccttttaaaatacagatactggaaaaattttaattacatatgtgagtcatattacatttctgttagacagtgcttctctagaacaagg

SEQ ID NO: 494539 - DNA, 201 bp, Homo sapiens
attcagtatgatattggctgtgggtttgtcgtaaatagctcttattattttgagatatgttccatcaatacctaatttattgagagtttttagcatgaagrgctgctgaattttgtcaaaggcctttcctgcatctattgagataatcgtggtttttttgttgttgttggttctgtttatgtgatggattatgtttattga

SEQ ID NO: 494540 - DNA, 201 bp, Homo sapiens
ctttcccttccccctttcctcctcctcctttcttctctctctttcctcctcctcctctttctcccctcctcctcctctttctccttctttttcttccttcytccttcttctactttgaaacctttatttactttcccatatcaacaaacatgagtaggccaggcacagtggctcatgtgtataatcccagcattttgggag

SEQ ID NO: 494541 - DNA, 201 bp, Homo sapiens
tatgacatgccttaaaagatttttcccgctgcaagacaataagaaaatactacacatgttgttttctttttgttgttgttgcttgtattactttacttttkacattgacatcttgttttggtctggaatttatattggagtaaggcatgagaaaggatccagctttattttttcaggtagcttgacagatcccccagtttt

SEQ ID NO: 494542 - DNA, 201 bp, Homo sapiens
tcaaacaaactcgtgtgctgagttaaagttgagtatttctgtcaaaagcctgctcgagggaagagagatcagctattccagggagaccatgctagaagcaygccatcctgctaattcaaacccagttgtatgagcttgcttgtttaaaggtatggatgattctagaataaaacatggacgtgaatcggagaattttctgaa

SEQ ID NO: 494543 - DNA, 201 bp, Homo sapiens
cacttagaaaacagtcaccaataggcaatctggtatgtaaagaacttttggagaagtgtaaacatagcctctctgatgtagcaacacagtttttcttactkcctcagcagtttcatagtacagaaaccagtaatgcttggctttccttttgttcatagacatctagtggagttcttatactattcagcccttcaccctttg

SEQ ID NO: 494544 - DNA, 201 bp, Homo sapiens
gtctcaatctcctgacctcgtgatcctccttcctcggcctcccaaagtgctgggattacaggtgtgagccaccgtgcccggcctagcaatttggttttttktttgtttgtttgtttgtttgtttgtttttgtatttttagtagagacagggtttaaccgtgttagccaggatggtctcaatctcctgacctcgtgatctgc

SEQ ID NO: 494545 - DNA, 201 bp, Homo sapiens
caggtgatccacccaccttggcctcccaaagtgttgggattacaggcatgagccaccacgcccagcttgttaatatgaatttaatttgatttcttgagtaytcattgatggtagagacttgaaaagcatgctgggagtcaaagttgcagaatttattgtgaatcatcatattgataaatcaattaaatatgttaaatttag

SEQ ID NO: 494546 - DNA, 201 bp, Homo sapiens
ggatggtctcaatctcctgacctcgtgatctgccctcctcggcctcaccaaagtgctagggttacaggtgtgagccaccgcacccggcgtagcaatttggtttttttttttttttttttgtatttttagtagagacagggtttcactgtgttagccaggatggtctccatctcctgacctcgtgatccgcccgcctcagcc

SEQ ID NO: 494547 - DNA, 201 bp, Homo sapiens
ctgtgttagccaggatggtctccatctcctgacctcgtgatccgcccgcctcagcctcccaaagtgctgggattacaggcgtgagccaccgcgcctggcgyaatttgttttttttttaaatccaagatccactcaagggatacaacaacttgcacttagatttttttctttaatgagtattttaatttagtttcagaaaaa

SEQ ID NO: 494548 - DNA, 201 bp, Homo sapiens
ttccggtgaattctgttttggttggaaggcctaaagtgggaagtagagttagaagaaattgttgaactacagcccagattttggggggttggggggagttyagccatgtctcttatctacagtgctgagagaatattgccattacagaaaatggcagcttggtgacctcagagtaaagataattgttttgacacaggatta

SEQ ID NO: 494549 - DNA, 201 bp, Homo sapiens
ttatagatatttctcttgataatagtatttgtagcaggcttttacttgtgactcccagttgtttttactctatctactgccagtgtagatattttatggctgtgagatgggcctaagtgaaaatctgcgtgcttttgtgggagctgctcagctgctatagggagacaaccgccttttctttggatgcccaaggtcaatgca

SEQ ID NO: 494550 - DNA, 201 bp, Homo sapiens
aataaaaaatttaaacaagataagaaaaaataaaaataatagatttattgagatataattcacatatcatgaagttcactcttaaaatatacaatgtagcrgtttttagtataatgactaaattgtgtgtcagtcattatgatctaattctagaacatttttatcaccccaaaaagaaaaaaaatcaaactcactagcagt

SEQ ID NO: 494551 - DNA, 201 bp, Homo sapiens
tagtgcagaagggacctgacatatttcccaataacatatactgagtagaaaataagagcagtaggatggaaatttagaagcagctagttttgtgagtttgkcctttttttttttttttttttttttgagatggagtctctgtcacccaggctggagtacggtggcgtgatctcggttcactgcaaccgccgcctcccaggt

SEQ ID NO: 494552 - DNA, 201 bp, Homo sapiens
tttcaccgtgttagccaggatggtctcgaactcctgacctcttgatctacttgatccagcctgccaaagtgctgggattataggcatgagccaccgcgccyggcctttttttttttttttttttgagacagagtttcacttttgttgcccaggctggagtgcaatggcatgatctcggctcaccgcaacctccacctcctg

SEQ ID NO: 494553 - DNA, 201 bp, Homo sapiens
ggattacaggcatgcgccaccatgcctgactaattttggattttttgtagagatgaggtttctccatgttggtcaggctggtctcgaactcccgacctcargtgatccgcctgcctcagcctcccaaagtgctgggattacaggcgtgagccactgcgccctgccagttaatcgtttcttatgtgttagatgcatttaact

SEQ ID NO: 494554 - DNA, 201 bp, Homo sapiens
gccactccagactggtatagctggggaatcttcaggccttttcctaggtctcacatcaagtgtcagaccccattccaggtatgatacatgagagggaagaygagtgcaaacttagctgtgtggatcagtgctggccccagacacagggacttcaccagctccaaataagactcaaagttcccagggagtaacagggctgac

SEQ ID NO: 494555 - DNA, 201 bp, Homo sapiens
caggctttgcctctcgggctcaagagattctcctgtctcagcctcccgagtagctgggattacaggcacctgccaccatgcccagctattttttgtatttytagtacagatggggtttcatcatattgtccagggtggtctcgaactcctgacctcaagtgatccacctgccatggcctcccaaaatgctgggattacagg

SEQ ID NO: 494556 - DNA, 201 bp, Homo sapiens
tgtaaaacttaagatatacaatgtattaagttaaaaaattatgaaataatttcaattttagaaaagaaacctttacacatatacactccctaacgtggaaractgtaaatcaaaatgttaacagtgcttatccttggtgagcttgttttctccatttttttgcattatgtgatttttctccaatgaaaatatattgcattt

SEQ ID NO: 494557 - DNA, 201 bp, Homo sapiens
aataagactcaaagttcccagggagtaacagggctgacatgccaaaaagagaggcccctgccctcaaagcagtaccagtgtcatggtggcagatggccatygccatgggaagagaccaactgtagatagtgacgtggggagatacaggacggtttaaacctgtgttcttattccagaaccgctccatctcttgtttgcctg

SEQ ID NO: 494558 - DNA, 201 bp, Homo sapiens
aattcatttcagttttaataaggtggctgacaaggaacaggcactccataaatactagtcatgtgggtgaatccacttgacccaaaataatcacccttcartacgagccaacctaaacacccatctccttcatgcagctacttctcttttgtttttttgtttgtttgtttttggttccttatgtccttttattctttaaca

SEQ ID NO: 494559 - DNA, 201 bp, Homo sapiens
actgtaacagaggccagtctttggctgtccttaatagaacttttagtacataactcaaacttagcctgaccttggccaatgcctcctttctattactacarcttttgaggtctgagaaggaattctgcacctgcgaatagtttacggtctccctagtgtctattctctgccactaagagttgtttagccattgctttattt

SEQ ID NO: 494560 - DNA, 201 bp, Homo sapiens
tatagatatttctcttgataatagtatttgtagcaggcttttacttgtgactcccagttgtttttactctatctactgccagtgtagatattttatggctgtgagatgggcctaagtgaaaatctgcgtgcttttgtgggagctgctcagctgctatagggagacaaccgccttttctttggatgcccaaggtcaatgcaa

SEQ ID NO: 494561 - DNA, 201 bp, Homo sapiens
tattaagtgacttagcctgtttgggagcagagggcaaactagcaaaagacactccatatgaccttgcttccctgatttttggggaggctcatttgataatwtatgagtgcatgaaaatatattgctttgttcatagtttgtcatttctgcagaatctagggaactttactggtgatattcatttgggtgtgttcctagatt

SEQ ID NO: 494562 - DNA, 201 bp, Homo sapiens
ttcaaccaataagggaaattcattaatgactgcaattaacaattaattttgccttcagtttcttgatctctgttactgcagtaacattagccgtatgaggmgattctcaaaccatcagaggttgttgggatgaagtataaggacctctaatatttagggttatgcacacaattcctgttacattgtttgaatgaatgtgat

SEQ ID NO: 494563 - DNA, 201 bp, Homo sapiens
atctgggtaatgctggagtaagttaatgttttttttttgagacagggcctcactctgtcacccaggctggtgtgcactgatgtggtctcagctcactgcarcctctacctcctggactcaagcgatcctcccacctcagcttccccagtagctggaactacagatgtgcatcaccatgcccggctaatttttgtatttttt

SEQ ID NO: 494564 - DNA, 201 bp, Homo sapiens
tcaagatccgcccaccttggcctcccaaagtgctgggattatagccgtgagccaccgtgcccggcgatcctgaagattttttggagaccactgtggtgtaraaaaatctgtggttacagtaactctcctgcttagctggagtttcaagcttaccactcatgtgccttctttctaaatcaggcactttattgagtccttcct

SEQ ID NO: 494565 - DNA, 201 bp, Homo sapiens
acgcctgtaatcccagcactttgggaggccgaggcaggtagatcacctgaggtcaagtttgagaccagcctggccaacgtggtgaaaccccatctctactaaaaaaaaaaaaaaaaaaaaaaatcagccaggtgtggtggcacactctagctactcaggaggctgaggcaggaaaattgcttgaacctgggaggtggaggt

SEQ ID NO: 494566 - DNA, 201 bp, Homo sapiens
acaaatccaatcagctgtacatcagcctcctaataaccactattaatgccagtggagtataacaaaatcatttctaagatctaagtttttgaagcacttaraataattaagtttatttttttaaagtaagacaaaaaaagttactgttgccactgtgaaagtacatttcttttgtgttatttatatgcacatagacttagt

SEQ ID NO: 494567 - DNA, 201 bp, Homo sapiens
gattctcatgcctcagtctcccaagtagctggggttacaggtgtgcgccaccacacctggctaatttttttatatttttggtagagatggggtttcaccaygttgaccaggctggtctcaaattcctgacctcaagtgattcacccacctcggcctcccaaagtgctaggattacaggagtgagccactgcattcagctga

SEQ ID NO: 494568 - DNA, 201 bp, Homo sapiens
tctggcccctgtgccaccacctacagaaagcctttcctgatttctctattcatgtcttctctgaaagtgatctttcttctttctgtgaagtccaacttttwaaaatatgtttacaaaaatacttcttaggatcattaatgcattgttcctaagtcagagttctctgtgaatttattctatacaatcttctagtgctagtat

SEQ ID NO: 494569 - DNA, 201 bp, Homo sapiens
gggaaagatcaagagctgttttgacagtacttgctctgtggcttcttgttcctttacttcagaaactcccactctgacaagattctgctcaaaattgcccwcctgtgaaaatactctaaaaatctctccccgccaatctccaggagggcagtaagttgtgttcttgtgtcacttggtaaagtcttctcttagcacatctct

SEQ ID NO: 494570 - DNA, 201 bp, Homo sapiens
tttcccttccccctttcctcctcctcctttcttctctctctttcctcctcctcctctttctcccctcctcctcctctttctccttctttttcttccttcctccttcttctactttgaaacctttatttactttcccatatcaacaaacatgagtaggccaggcacagtggctcatgtgtataatcccagcattttgggagg

SEQ ID NO: 494571 - DNA, 201 bp, Homo sapiens
aatgttaaagatatccaatacattttcattgaaattatagtcaccctttggtttttcaggaaaatgattccgtttgagttcttaactgtggtctttatcgyttgcactcaggaattccagaccagcctgggcaacatagtgagaccccatctcttaaaaaaaaattttttttaattagctgggcatggtggcaagtgtcct

SEQ ID NO: 494572 - DNA, 201 bp, Homo sapiens
aaggctgagctgggaggactgcttgaggccaggagtttgagaccagcctgggcaatgtagcgagatctcattctcttaaaaaaaaaccatttttttaattaaaaaaaaatagttaaaaagagaggtggctcagatgggaagaccttttaaaccattctttcacatatccaactgtccaccagagagcactttgcacagctt

SEQ ID NO: 494573 - DNA, 201 bp, Homo sapiens
ataaatgttttgggttaaatataaggcagaaagtctcaaagttagcaatattaggacttcctgtttttacagcctgtgtaaattcaggatagatgttggtrtttaattcataattacagatagttctttttatgggttataggactttttagataccttaagatatttaaaaatactgtaatgcaaattacctatggaaat

SEQ ID NO: 494574 - DNA, 201 bp, Homo sapiens
gctgtattgagatgtggttccatttgtttttgtgtgaatctttttctctggatgaaatactttctattacttgactttggaacatgcaaatgtgcactgtytttggatcctactggcctttctcagttgttaaatatcttgtgatgttggcactttaaaaagtgtcacacgctgctgtttggaatgtattaataaaatgat

SEQ ID NO: 494575 - DNA, 201 bp, Homo sapiens
gttccttatgtccttttattctttaacaatttattttattttctatttttgttggcaattttagctgggattataggtgtgtgccaccatgcctggctaatttttttttttttttttttttgagacagggtctcactctgttgctcaggctggagtgcagtggtgtgatctcagctcactgcaacctctgcttcccaggtt

SEQ ID NO: 494576 - DNA, 201 bp, Homo sapiens
aacactcgacgtttgcataatgtattttaatttttcccattggagaaggaggctgctaagagttcttctagctacatatgtggtagtagttctaccatccrtatttttctaatactaatagtagcttgtgtttcctttttctttttcttttttacattctaggtcagggatgtccaaccttgtggcttccctgggccacat

SEQ ID NO: 494577 - DNA, 201 bp, Homo sapiens
tcctgggccacaaataaaatacactaactcatattgttttaaatttgtcttaaaacaaatctcataatgttttaagaaagtttacagatttgtttgggccrcattcaaagccgtcttgggccacatgtggcttgcgggacgcaggttcgacaagtttgttctaggtgtagagttggtttagcattcgtggtcttgtgtagg

SEQ ID NO: 494578 - DNA, 201 bp, Homo sapiens
aagcaagttcaaaaccgaatcttttaatctcttggggcatgatcataatattcatgatgccccgaagacacttcgtttgttctaaaccatcaaagaaagtrtgttcaacataatttgcattgcacatattattaataatctggactgatggctttttacagtagtcagtattataaaaagatatatagaaaagttatgcac

SEQ ID NO: 494579 - DNA, 201 bp, Homo sapiens
agctagcatagctgtattgagatgtggttccatttgtttttgtgtgaatctttttctctggatgaaatactttctattacttgactttggaacatgcaaaygtgcactgtctttggatcctactggcctttctcagttgttaaatatcttgtgatgttggcactttaaaaagtgtcacacgctgctgtttggaatgtatta

SEQ ID NO: 494580 - DNA, 201 bp, Homo sapiens
ggatgaaatactttctattacttgactttggaacatgcaaatgtgcactgtctttggatcctactggcctttctcagttgttaaatatcttgtgatgttgrcactttaaaaagtgtcacacgctgctgtttggaatgtattaataaaatgatacggccactttggaaaacaatttgacagtttcttgcaaagttaaacata

SEQ ID NO: 494581 - DNA, 201 bp, Homo sapiens
attcaaagaattggtaattgaccggaggaaggcatgcctcaataaatggaatgctctgaatgggaagagcccataacagaatgacctatattacaaccgayataaaacctaggtgtaggatattcttcaagcaaatttgtggatggtagatgaagtactttgcggtgctctgttatatattgtgaaatttattttatatag

SEQ ID NO: 494582 - DNA, 201 bp, Homo sapiens
cacgctgctgtttggaatgtattaataaaatgatacggccactttggaaaacaatttgacagtttcttgcaaagttaaacatacaactatcatatgatgcrggagttctcctgggaatttacccaagagaaaaaatgaaaacgtatgtccacacaaagacatatgtgcgaatattcaaagcagcattgtggataaacaaat

SEQ ID NO: 494583 - DNA, 201 bp, Homo sapiens
ctgaagcactgcgatgccaagaaatctcttgtgcggcagaattggagacaagaaaattggggaataagcagaaaaaccataatccttagagtaacaagaarcaagcacttccaaacgtttcagtaggtttttacttctttaaaaacgttttttttaaaattaactgtctcctaacaaaatggagtagctgcagctactggg

SEQ ID NO: 494584 - DNA, 201 bp, Homo sapiens
attgaaggaagataatcatactaccagtcttcttgcttattgtttcggcctctaaaaagtcttttttgtttgtttttttgttttttgacacagagtttctstctcttgttgcccaggctggagtgcaatggcacgatcttggctcactgcaacctctccctcctgggttcaagcgattctcatgcctcagcctcccaagta

SEQ ID NO: 494585 - DNA, 201 bp, Homo sapiens
caggacggtttaaacctgtgttcttattccagaaccgctccatctcttgtttgcctgtggttcccaaaggaacagcatttctgatacagagctgagggctraagtgggctcggaggcaatgtcgaccaacatgtctcagcaagagtgcagccatcttgggttccacattcagttgttacatctctttaatctcctttaatt

SEQ ID NO: 494586 - DNA, 201 bp, Homo sapiens
tgatcactgactcttttgcaattatgtaatataaaactgtgtatgttgtaaaaatcaatcattttaaccttatctccagctttttctgtatactttctccscaaaatactgttgacatttatttaaacaatggtagtgaaataagattaacattttttgagaatttcatgataacccttgacataattgaacattaaaacc

SEQ ID NO: 494587 - DNA, 201 bp, Homo sapiens
gatcaaggtggtggtaggagataacacttgttgccaactataattttcagggactctaaaatgacttaggaactgaaaaaacgtaaggcacgtagaacaattatatatagatacagtacatgtatcttttaacaatggggtagtttttgaaattcctaataattagcttctagtaaatatgaaaacgtttatgaaatctat

SEQ ID NO: 494588 - DNA, 201 bp, Homo sapiens
ggaaaagcagagtgatattaaaattataatcaaatgcctatttcagccatgatgatatggctattataaagacaattctagctcactggaagtgactcaartctcagattataatggtttactgcagcaccgtttaaaccaagtatgaaaatgtctctttctgtgaccatcttctgtggcagcaatagaactttgtgctgt

SEQ ID NO: 494589 - DNA, 201 bp, Homo sapiens
attggggaataagcagaaaaaccataatccttagagtaacaagaagcaagcacttccaaacgtttcagtaggtttttacttctttaaaaacgttttttttwaaattaactgtctcctaacaaaatggagtagctgcagctactgggaggccagagaatgattgtgcagctgagtccttctaacaaatgccaaggattcctc

SEQ ID NO: 494590 - DNA, 201 bp, Homo sapiens
gatggcagtatacctcaatgggcagtgtgtctcctgccaaaaccatgatccctttttctcctttgttgacaaatttctgaacctctttcaccccgcgccgwatctgcttctgcttcaccgctttcttaatgcatttgtagagcttccgcttgaggcggcgagaagccaggagctgcgcgatggggttctggttgaccagca

SEQ ID NO: 494591 - DNA, 201 bp, Homo sapiens
tctttggttacaaaagcagtccagatccttttcccagctatttaagaccttcccaatctggcttcaattttttccaactttgcttttttctgctttccttytgaaccccatattttaaccaaacagaaatatctatgctctcatcttgattcctttcttccttccttcctttttctttttttcttttttctttctttcttt

SEQ ID NO: 494592 - DNA, 201 bp, Homo sapiens
ctacatctctgtaaggtaattgggacaaatatttggtttcttcatttgacagagaagagagccaggattcagaaatgttaatattcaagttcatggttccrccacttactgggtgatcttgaacaagtcgcttaatcactctgtgtaatttccttaaatataaagcagaattcaaaatagggcttaccacatagggtgtgt

SEQ ID NO: 494593 - DNA, 201 bp, Homo sapiens
atgatcactgactcttttgcaattatgtaatataaaactgtgtatgttgtaaaaatcaatcattttaaccttatctccagctttttctgtatactttctcygcaaaatactgttgacatttatttaaacaatggtagtgaaataagattaacattttttgagaatttcatgataacccttgacataattgaacattaaaac

SEQ ID NO: 494594 - DNA, 201 bp, Homo sapiens
gtagagtcataggttgatgagctttgaggcagaggtgggtaaaagggtacaggagccatcagaactgcattttatgtctccatttgtatttccagggagaraagtgagctgtaacattcattaaattttcaaaggggtccataacttaaaaatggttaagaattacagatacagagtaaaagcactgctacatggcaccca

SEQ ID NO: 494595 - DNA, 201 bp, Homo sapiens
caccgtgttagccaggatggtctccatctcctgacctcaagatccgcccaccttggcctcccaaagtgctgggattatagccgtgagccaccgtgcccggygatcctgaagattttttggagaccactgtggtgtagaaaaatctgtggttacagtaactctcctgcttagctggagtttcaagcttaccactcatgtgcc

SEQ ID NO: 494596 - DNA, 201 bp, Homo sapiens
aaccctagggacccatgttccacagaacacactttgggaaaccttgaaaaggaatattagtgatttcactactaactgttgatattattaatgttaagttmttttagatttcttgaaggctgatgttaaagtcactatatggtataaattattatatttataccactcagcactgtgtttggtttttgtctttattcctaa

SEQ ID NO: 494597 - DNA, 201 bp, Homo sapiens
cttgtaattaactatttaatgttggtgtttttctttaatgtgtatgtttcaagagggcagagactagcttttattcacagttggtccctggcttgaagtayaatgcctggcctgttgaatacgcactcaatatgggtgatcagaagagagagaaggaggactgggaaaacatctcagtgtgactgtgaaaagcacagtcta

SEQ ID NO: 494598 - DNA, 201 bp, Homo sapiens
ctacttgggaggccaagacaggagaatcgcttgaacctgggaggtggaggttgcagtgagccgagactgcaccattgcactctagcctgtgcaataagagmaaaactccatctcaaaaaaaaaaacaacaaaacctgctcaagactcagtaatttataaaggaaagaggtttaggccaggcacggttagctcacgcctgtg

SEQ ID NO: 494599 - DNA, 201 bp, Homo sapiens
acaggcatgagccaccacgcctggccaaaaatgcattttatatttaattttaactaagaggttctggtcaattgtcaatgaaattttcattttaggaaatratgttatcatatagcattctgtttaaagaaataatgcatagtagaggtcaggcacggtggctcatgcctataatcctagcactttgggaggctgaggtgg

SEQ ID NO: 494600 - DNA, 201 bp, Homo sapiens
ggtttcaccatgttggctagactggtctggaactcctgacctcaggtgatccacctgccttggcctcccaaagtgctgagattacaggcatgagccaccaygcctggccaaaaatgcattttatatttaattttaactaagaggttctggtcaattgtcaatgaaattttcattttaggaaatgatgttatcatatagcat

SEQ ID NO: 494601 - DNA, 201 bp, Homo sapiens
tggtgcagtctcagcttactgcaacctctgcctcccgggtttaagcaattctcatgtctcagtctcccgagtagctgggactacaggtgtgcgccaccacrcctggctaatttttatattttttagtagagacagtgtttcactatgttggccaggctggtctcaaactcctgacctcaggtgattcacctgcttcggctt

SEQ ID NO: 494602 - DNA, 201 bp, Homo sapiens
tcatctatacctagaatgatgaaagaaaacttcctggatgaagtgtcatttgaattaggcttgaaggatgaggagaatgtggagttggccaagagaagggkggaagtatagggaataaaaatttcagagaaaggcaaaaacatgaacacaaaaatgggaaatggtgtgacatgaatggagaatatttaggttggttagatg

SEQ ID NO: 494603 - DNA, 201 bp, Homo sapiens
ggaaaaatggagtcagccaggaggccttcttgaggcaaggaataagagaaagccccaactcactgggcattccctatcaccaggcctttttgatgtgtacrtaatacaatatatacatagatggagtactctgactgcagggtgttcaatatgcttatgatctttgtggatatctgtaccagtatttaacttggtaagaga

SEQ ID NO: 494604 - DNA, 201 bp, Homo sapiens
aatctcttgacctcatgatctgcctgccttggcctcccaaagtgctgggattacaggcgtgagccactgggcccggctggtgtctgactgatttatttggwtgttcccaccaccaaagacagactgtaacagaggccagtctttggctgtccttaatagaacttttagtacataactcaaacttagcctgaccttggccaa

SEQ ID NO: 494605 - DNA, 201 bp, Homo sapiens
atcttgctctgcctgtcttctgttgatttcagtccagaaatactgtttgactgttgctgtttgagaggtcgtagtagctaacttgcacatctgtgtttgtrgagcatcgtggtgtgtgtcttgtttttgggcaagcctctgctcttcagacaacacctcatgaacaggtgcaggagcagctctgcagggacagcaccctcg

SEQ ID NO: 494606 - DNA, 201 bp, Homo sapiens
gagtgtgcttacatgttcaaattaatgtttgaaaatggtacctttggctgttttgtggagaaagcattgtggggtacgaggtagaagtcagtagactaaayagactatttactctgcttgaattggcaggatttagtgagagatggatttgacgtggagtataagagaaagggagatgtcaaggatgatttctaggtttct

SEQ ID NO: 494607 - DNA, 201 bp, Homo sapiens
caacaacaaaaccaacaacaacaaaatccccaatgcctttagtcttaaatattttctaggtttccagtcagctatacatagtctccaaaaagaaggctgtyatcattttcactgagctttttcaggattaaaggttttctcccaaaatgctctattttgttatggtgcaaaagtgaatttcattaaacagttatgttgaca

SEQ ID NO: 494608 - DNA, 201 bp, Homo sapiens
tattttctaggtttccagtcagctatacatagtctccaaaaagaaggctgtcatcattttcactgagctttttcaggattaaaggttttctcccaaaatgytctattttgttatggtgcaaaagtgaatttcattaaacagttatgttgacaaaatgaattctatttagtgctttcctatttaattgcttatataaaaaat

SEQ ID NO: 494609 - DNA, 201 bp, Homo sapiens
gtaagtaatacatggccagctgttgcttttccagagcacatatgctattggaatagctgacctcctctttctgataatggaaatgctggtaactaggatcytcttacccagcttggccttgctatgcagtagagttggactttcgttggtgatgggaaactaacaacaaattactcagtattcattttatacctttgggac

SEQ ID NO: 494610 - DNA, 201 bp, Homo sapiens
aagacaggagaatcgcttgaacctgggaggtggaggttgcagtgagccgagactgcaccattgcactctagcctgtgcaataagagcaaaactccatctcaaaaaaaaaaacaacaaaacctgctcaagactcagtaatttataaaggaaagaggtttaggccaggcacggttagctcacgcctgtgatctcagtactttg

SEQ ID NO: 494611 - DNA, 201 bp, Homo sapiens
cagtggttaggaaccataaggctgtaatatctctgaagtatccctgtattttaattcataatctaacagttctaagtgtaataattagtagaaaacaatartgttgtgttagtaataatgaaataaaatttaaaaaagaaaattggggtgagaagtttattttcttaaattttggattgtgctgctgaaaaacaggataat

SEQ ID NO: 494612 - DNA, 201 bp, Homo sapiens
agagaataactgcttctagtcccagagtaggcaagttgtgggcaaaaaatgggaatttttgcagccaccccatctttagaaacaaggggaaaactagaccsttttccactcttatgttctacaaggtactctactgctccaaggggatctgaaagtgcaaaaggatctaaacaaataaggagaacttttcccaggctggag

SEQ ID NO: 494613 - DNA, 201 bp, Homo sapiens
aaaaacatagctgctgaatatactcctagtagctatgatagagactgaatgagtaaaatgcagtgattttttagcaaggaaaccactgaaattttgatgcttttttttttttttttgagactgagttttactcttgttgctcaggctggagtgcaatggcacgatcttggctcactgcatcctccacctcccgggttcggg

SEQ ID NO: 494614 - DNA, 201 bp, Homo sapiens
tgggtcatgttcattgtgaaatgcacaaatcagtgggtttgtctttagtcatcttattctcatttggggttgatggaaatgaagtaaggaccaagtaaacractttttttcaggtgcaaattcgaccatggaacctaagtgacagtgactttgtaatggatggttctcagcctttggaccccagaaaaactatctttgttg

SEQ ID NO: 494615 - DNA, 201 bp, Homo sapiens
acttctctagccactcatctaaggctccatatcaatccatcttatccttagtggttacaagctcatcagtaaattacatgtattcttcagcatctttgggwatagtcatctccattaggcttatgagtaggaatctaaatgtctctccataggtagttctcatctcctttgcctgcaaggccctttgaaacagaggttcag

SEQ ID NO: 494616 - DNA, 201 bp, Homo sapiens
ggtagcagccagttgtagtggaaagagtagggaatttggagcaagaacagattccaatacatttaaacctttgctgcttcaatcagtcactgtcaagtccragcaagttacttaaggccagaagcctcaggtcctcatctgtaactccttcctggggatggtctgaagattaaatgaaattttacttctcttaaggcaggt

SEQ ID NO: 494617 - DNA, 201 bp, Homo sapiens
gtcatggtggcagatggccattgccatgggaagagaccaactgtagatagtgacgtggggagatacaggacggtttaaacctgtgttcttattccagaacygctccatctcttgtttgcctgtggttcccaaaggaacagcatttctgatacagagctgagggctaaagtgggctcggaggcaatgtcgaccaacatgtct

SEQ ID NO: 494618 - DNA, 201 bp, Homo sapiens
aaaattagccaggcatggtggcggacgcctgtaatcccagctactggtgggctgtggcagaattgcttgaacccgggaggcagaggttgcagtgagctgakattgggctgctgcactccagcctgggagacagagcaggactcagtctcagaaaaaaaaaaaaaaaaaaaacccacaaaacaagtatataaatacacagta

SEQ ID NO: 494619 - DNA, 201 bp, Homo sapiens
gcccaacatcctttctttattatgagagacgcaagccaacttccatcttgagttgggctctttttcactgttcatctgtgaacattacattcccttccccmgaactgttactctgtccccttcgttttcttcttgcttagaatatagccagtagtactttattttattgcctctggcattttgagcttctgttaactacac

SEQ ID NO: 494620 - DNA, 201 bp, Homo sapiens
tttcccagctatttaagaccttcccaatctggcttcaattttttccaactttgcttttttctgctttccttctgaaccccatattttaaccaaacagaaawatctatgctctcatcttgattcctttcttccttccttcctttttctttttttcttttttctttctttcttttttttttttttttttttttttttgagaca

SEQ ID NO: 494621 - DNA, 201 bp, Homo sapiens
actagttattggctgattggtaatttgtccctgtgttgacaatgtcaatgttgtatgatactcagcacataattctcagcatttcttctgcctccgcatayttgaggtgtatgttacactcgtgcgtaacagaggctccctagaactctaatagagtggggcagtcacaggcatgatcattagtatgtaagtgggggatac

SEQ ID NO: 494622 - DNA, 201 bp, Homo sapiens
atattaatagattgaacctgaaggttcaagacagcaagctaatagagcaagggacctagaaggtctagcagagataggggctgaaaaagagtaatcttgaraagaaggtggagaaggagctatttaaggttctagaacatgttggccagagatgtgggatagcaaacaccttgaaaggattatcagaggagtttcctgctt

SEQ ID NO: 494623 - DNA, 201 bp, Homo sapiens
cccaacctcaggtgatccacctgcctcggcctcccagagtgctggaattacaggcgtgagccaccgtgcctggtcacataccacatattctttatccattygtctgttgatgaatggataaaggttgtttccaaatcctggctattgtgaatagtgctgcaacaaacatgggagtacaggtatctctttgatatactgatt

SEQ ID NO: 494624 - DNA, 201 bp, Homo sapiens
gagcacatatgctattggaatagctgacctcctctttctgataatggaaatgctggtaactaggatcctcttacccagcttggccttgctatgcagtagakttggactttcgttggtgatgggaaactaacaacaaattactcagtattcattttatacctttgggactgtgtgtaaacaaatatgtccttgtctttcact

SEQ ID NO: 494625 - DNA, 201 bp, Homo sapiens
gaggtggaggttgcagtgagctaagattgccccactgtatccagcctgggcgacagagtgagatttcatctcaaaaaagaaaaaaataggccgggcgcggkggctcacgcctgtaatcccagcactttgggaggccaaggcgggtggatcacgaggtcaggagatcgagaccatcctggctaacacagtgaaaccccgtct

SEQ ID NO: 494626 - DNA, 201 bp, Homo sapiens
ttctaaacttgcttctgtgagtaattgtaaaaattaaacaaggtaatatcaatgagcacctaacttagttcctggacaaagtccctttgtcccacttgaayttcttagattttagtaagaatttgccaaaatgaaacaacagataatttgtaattggtactttgagtttaatgtactgattcttcctctacccttttgttt

SEQ ID NO: 494627 - DNA, 201 bp, Homo sapiens
ctgctgctcctcagtttcccaagaatgaatcctggctggggctaggtagcaggatagcccctcagatgaggtcagcaacattgagggccatcacctcaatsgaggtgttgtataaggtctcagtttcttaaagagtcctcttgtcttcttctgttaccatgttaatagccacacccttatggccaaaccatccacctcgac

SEQ ID NO: 494628 - DNA, 201 bp, Homo sapiens
tgatccctttttctcctttgttgacaaatttctgaacctctttcaccccgcgccgaatctgcttctgcttcaccgctttcttaatgcatttgtagagcttycgcttgaggcggcgagaagccaggagctgcgcgatggggttctggttgaccagcagctcctggtaggtgcgctccccggaacacacctccgcctgagcct

SEQ ID NO: 494629 - DNA, 201 bp, Homo sapiens
ttgatgtgtacataatacaatatatacatagatggagtactctgactgcagggtgttcaatatgcttatgatctttgtggatatctgtaccagtatttaasttggtaagagaggaggtttgaaagaacctgctgagacctcctctttgtgatatttggactttttaacccaccttatctctaatattatctttagtaagta

SEQ ID NO: 494630 - DNA, 201 bp, Homo sapiens
tcatttcagtttctctcaatgatgccttcaggctccatctcatcgggaccattgtctctggatcagaaatactcactcttggccgggcgcggtggctcacrcttataatcccagcactttgagaggctgaggcgggcagatcacgaggtcaggagttcgagaccagcctggccaacatggtgaaaccccatctctactaaa

SEQ ID NO: 494631 - DNA, 201 bp, Homo sapiens
ccccatctctagtaaaaatacaaaaattagtcaggcatggtggtgcattcctgtaatcccagctacttgggaggctgaggcaggagaatcgcttgaacccrggaggaggaggttgcagtgagccgagatcacaccactgcagtccagcctgggcaacagagtgagactctctctggggaaaaaaaaggagtacataccaaa

SEQ ID NO: 494632 - DNA, 201 bp, Homo sapiens
agcatttattgtcctagaaaatcattttaattatagaaactcccacatttgtttcaggtcgatcttctctctttccctttgaagatgccttcctggatgayagccatggtgatcaagccttgtcatctggcttaagttctcccactcgctgtcaaaatggggaacgagtagaacgctactctagaaaggtgtttgttggag

SEQ ID NO: 494633 - DNA, 201 bp, Homo sapiens
ttgactcctgctccaaaatggcccacagaattgctcattttgctttgagacatccggtgacaagggaggcagtttatttcagaagtctttatatttgtagscctagttagttattacatgtttccctctattgtgtcaaatgcttccctgcaatctttactccttagtcaacgatgtcttataaagtaagacagaataagt

SEQ ID NO: 494634 - DNA, 201 bp, Homo sapiens
ggggataaatttccatcatccaggaacagataatattatggcacttaacagtaagtcttcatatgaaatattctattaaattagcagtcaagtttgcagcrtgtagtttctacattcttgattgttggttacattttaaccttccgctgaaaggagtatagaccattgttctgtactagtggttctcaaagtgtggtccct

SEQ ID NO: 494635 - DNA, 201 bp, Homo sapiens
cagcagcagcggcagcagcagcagccccaacctgagtccagcgtatccgaagccccgtccacgcccctctcctcagagacccccaagccggaggaaaacarcgcagtgccggccctcagcccagccgctgcccccccggcccccaacggcccggacaagatgcagatggaatcaccgctcctgccaggcttgagtttccat

SEQ ID NO: 494636 - DNA, 201 bp, Homo sapiens
agaatatcatggtctctatggagttagtgtcgttcaaaataagccagtattagagctgggcacagtggctcacacctataatcccaacatgttgggaggcygagacaggcagatcacttgaggtcaggagttcaagaccagcctggccaacacggcgaaaccttgtctctactaaaaatagaaaaataagccaggtgtggt

SEQ ID NO: 494637 - DNA, 201 bp, Homo sapiens
ggtgtatatgtgccacattttcttaatccagtctatcattgtcggacatttgggttggttccaagtctttgctattgtgaatagtgccgcaataaacataygtgtgcatgtgtctttatagcagcatgatttatagtcctttgggtatatacccagtaatgggatggctgggtcaaatggtatttctagttctagatccct

SEQ ID NO: 494638 - DNA, 201 bp, Homo sapiens
ggtatctcattgtggttttgatttgcatttctctgatggccagtgatggtgagcattttttcatgtgttttttggctgcataaatgtcttcttttgagaartgtctgttcatgtccttcgcccactttttgatggggttgtttgtttttttcttgtaaatttgtttgagttcattgtagattctggatattagccctttgt

SEQ ID NO: 494639 - DNA, 201 bp, Homo sapiens
caggtagtgtgatgcctccagctttgttcttttggctttggattgacttggcgatgtgggctcttttttggttccatatgaactttaaagtagttttttcyaattctgtgaagaaagtcattggtagcttgatttttttttttttttttgagacagagtctcactctgttgcccaggctggagtgcaatggtgtgatctcg

SEQ ID NO: 494640 - DNA, 201 bp, Homo sapiens
cgctgcccccccggcccccaacggcccggacaagatgcagatggaatcaccgctcctgccaggcttgagtttccatcagcctcctcagcagccgccgccgyctcaggagcccgcggcaccgggcgcgtcgctgtcgccgtccttcggcagcacctggtccacgggcaccaccaacgcggtagaggacagcttcttccaggg

SEQ ID NO: 494641 - DNA, 201 bp, Homo sapiens
caccgctcctgccaggcttgagtttccatcagcctcctcagcagccgccgccgcctcaggagcccgcggcaccgggcgcgtcgctgtcgccgtccttcggyagcacctggtccacgggcaccaccaacgcggtagaggacagcttcttccaggggatcaccccagtcaacgggaccatgctcttccagaacttcccgcacc

SEQ ID NO: 494642 - DNA, 201 bp, Homo sapiens
atagattgttgtcataatacatgtctaccattcatttgtagcattaaatgccagtataatgaaataatgctttgtttagtgtccatctactctgttagatsatacaaattcaggagggtaataactgtctttcagtgtaactacagtatacacaatgcctgacacctagtggacacacattaattatttttgaattaatgc

SEQ ID NO: 494643 - DNA, 201 bp, Homo sapiens
gttgaatatcccttagcctagcaaaaacatatgacttgatagatatgaaaaatttgtttataaaaatctggggcaactcctgctgccccccaacacaaccrttgtctagctcagcttggtcatgttgtccgctagaaatttgtaaatcagatctttacaactttaaatgcatcatgcagtagacattggttatagtttccc

SEQ ID NO: 494644 - DNA, 201 bp, Homo sapiens
tttcgctgacaatcagtaatattgagcaccttttcatatatctgtttgccatttgtatgttgtcttttgagaaatgcctattcagatctttcaccctcccttttttttttttttttgcctcaaaaagtgacgtttattcaaggaaaaaaattacaagatgtccatcccttggctctctttccttccgcctcctgctgctcc

SEQ ID NO: 494645 - DNA, 201 bp, Homo sapiens
agagcctctcctttgaagccagaagaggaacccaacctcagagctaatgttttccattcaagtagcccccatactacttctcacctactctatcttctggrttctctgaaatcaccactggagccagtattctctggattgacctctgtttgctagatttctcttaagcacagaggtgctcatgtcattatctctttcctc

SEQ ID NO: 494646 - DNA, 201 bp, Homo sapiens
taccttggtgcagatttgaagtagggtttgtaaaagcatgaccattttcagtggattgttaagagcttaaaatccacatagatagacctcagttggtggcaaaaaaaaaaaaaaaaagccacatagggaaagaatggccaggtggccagatacatggactgtctcgttgcatgtttttgagctagcagagtgggaggccat

SEQ ID NO: 494647 - DNA, 201 bp, Homo sapiens
ggtgggaggatcacctgagcctggggaggtaaaggctgcagtaagccgagattgtgccacactacactccagcctgggcaaccgagtgagaccctgtcttaaaaaaaaaaaaaagtctgtttcctttagcatgtagctgtgaatgtggccactaggaagataagatggacatgacaagcttgatgatagatagcataacct

SEQ ID NO: 494648 - DNA, 201 bp, Homo sapiens
accacatattcttttttttttttttttttatgtgtgtgtgtgagatggagtttcactcttgttgtctaagctggagtgcaatggcacaatcttggctcacytcaacctccacctctgggattcaagagattctcctgcctcagcctcccgagtagctgggattacaggcctgtgccatcatgcctggctaattttgcattt

SEQ ID NO: 494649 - DNA, 201 bp, Homo sapiens
ttgtagcaggcttttacttgtgactcccagttgtttttactctatctactgccagtgtagatattttatggctgtgagatgggcctaagtgaaaatctgcrtgcttttgtgggagctgctcagctgctatagggagacaaccgccttttctttggatgcccaaggtcaatgcaaaactggatttgatgttgaagattgcag

SEQ ID NO: 494650 - DNA, 201 bp, Homo sapiens
taactgtggtgagatgatatcacattgtagttttgatttgcctttcgctgacaatcagtaatattgagcaccttttcatatatctgtttgccatttgtatrttgtcttttgagaaatgcctattcagatctttcaccctcccttttttttttttttttgcctcaaaaagtgacgtttattcaaggaaaaaaattacaagat

SEQ ID NO: 494651 - DNA, 201 bp, Homo sapiens
acgaactgcttgaacccgggaggcagaagttgcagtgagccgagatcataccacagagattgtgccactgcactgagattgggtgacagagcaagactgcmtctcaaaaaaaaaaaaaaaaaaaaaaaggaacgtggtcttgcttattttagtattctcataaaccatggatatgtcccacttgtatcagttactcggtaa

SEQ ID NO: 494652 - DNA, 201 bp, Homo sapiens
tctctctattatatatatataatatattatatataaaatatattttatatatatatatgtgtgtgtatttccccaatagccatttaagagtaagttgtagrccgggcgtggtggctcacgcctgtaatcccagcactttgggaggccgaggcggatggatcaccatgtcaagaaatcaagaccatcctggtcaacatggtg

SEQ ID NO: 494653 - DNA, 201 bp, Homo sapiens
aagctccgcctcctgggttctggccattctcctgcctcagcctcccaagtagctgggactataggcgcccgccaccacacccagctaattttttgtatttytagtagagacagggtttctccgtgttagccaggatggtctcaatctcctgacctcgtgatcctccttcctcggcctcccaaagtgctgggattacaggtg

SEQ ID NO: 494654 - DNA, 201 bp, Homo sapiens
taactttaattagggcttttcttcagtatctaggttacttctctttattcaccaaatgcttgcaaatgcaaaatagaaagtgcatattattattattattwtttttttttttttttactggaaggtgtgtttaataacttaaaatcttcatcattatagtgattacttcctgtggcattttccttattgaatattaacata

SEQ ID NO: 494655 - DNA, 201 bp, Homo sapiens
tagtcccagagtaggcaagttgtgggcaaaaaatgggaatttttgcagccaccccatctttagaaacaaggggaaaactagacccttttccactcttatgktctacaaggtactctactgctccaaggggatctgaaagtgcaaaaggatctaaacaaataaggagaacttttcccaggctggagataagagtgacaaaca

SEQ ID NO: 494656 - DNA, 201 bp, Homo sapiens
gtgggaggctgaggctgaaggatcacaaggtcaggtgtttgagaccatcctgaccaacgtggtgaaaccccatctctactgggaatacaaaaattagtcgsgtgtggtgtcacacgcctgtagtcacagctgctcgggaggctgaggcaggagaatcacttgaatccgggaggcggaggttgcagggatccgagatcgcct

SEQ ID NO: 494657 - DNA, 201 bp, Homo sapiens
ggtggaggtgttgtgaaatatttctgactttttctaactagtgttatatttaggagtggagagggacagaaatccttttccttattttacaaatggacaakcattgctagtattctagctattccttttgcaactaactgcaagcacaaattagtttttttgtttgtttgtttgtttgagatggagtctcgctctgttgcc

SEQ ID NO: 494658 - DNA, 201 bp, Homo sapiens
taaatataaagcagaattcaaaatagggcttaccacatagggtgtgtgtgaagatgaaatgagttaatgtccacaaggcacttagaacagtgtctggtgcrtagtaaatctcaacaaatgttagctattagctgttattatcacatagctactaaatgttaggacttgtacccgaatctagaccttctgtctcctagtcca

SEQ ID NO: 494659 - DNA, 201 bp, Homo sapiens
taatctatattattgtcttagaattttaccattcatcccaagacttctagtttagagggccatgttatcaagacaaaaagttaacatctgcaacttttatstataatcctagggattgggtttctttgaaacacactgagctttgggaactgatgtataccttggaatagaagacgttttttaaaggaattcattgtgact

SEQ ID NO: 494660 - DNA, 201 bp, Homo sapiens
gttgaacaaaacaaaacaaacaaacaaacaaaagtactggcttaggaattcagagatctgggtctattcctagctttttccaatcgtggtatgatcttggrcaaactgcttaacctttagaggcttgatttcattatcctgaggtaataagaacaccagcctaactacctcacactttattgcgcagataaaccatgacag

SEQ ID NO: 494661 - DNA, 201 bp, Homo sapiens
accctgcactgcttcttttttgccagtttctgccaacacaatagattttgagtagctttacttacatggcttatattgcaaaagcaatcactgtattttatgtgtgtgtgtgtgtgtgtgacaatgtttcacttttgttgctcagggtggagtgcagtggcatgatctcggctcactgcaacctctgcctcccggtttcaa

SEQ ID NO: 494662 - DNA, 201 bp, Homo sapiens
aattgcttgaacccgggagatggaggttgcagtgagctgagattgcaccactgcactccagcctgcttgacagagccagactccatctcaaaaaaaaaaaraaaaaaagaaaaaaagaaaaatagttaaactggtttggtaacatatcttttatacagtttagccagaaaactttcagttctttgaacagctatctaatgt

SEQ ID NO: 494663 - DNA, 201 bp, Homo sapiens
ccctgcactgcttcttttttgccagtttctgccaacacaatagattttgagtagctttacttacatggcttatattgcaaaagcaatcactgtattttatgtgtgtgtgtgtgtgtgtgacaatgtttcacttttgttgctcagggtggagtgcagtggcatgatctcggctcactgcaacctctgcctcccggtttcaag

SEQ ID NO: 494664 - DNA, 201 bp, Homo sapiens
gcaagctccgcctcccaggttcacaccattctcctgcctcagcctcctgagtagctgggaccacaggcgcccgctaccacgcccggctaatttttcgtatytttagtagaaacggggtttcaccatgttagccaggatggtctcgatctcctgacctcgtgatccgcctgcctcggcctcccaaagtgctgggattatagg

SEQ ID NO: 494665 - DNA, 201 bp, Homo sapiens
tgccggccctcagcccagccgctgcccccccggcccccaacggcccggacaagatgcagatggaatcaccgctcctgccaggcttgagtttccatcagccycctcagcagccgccgccgcctcaggagcccgcggcaccgggcgcgtcgctgtcgccgtccttcggcagcacctggtccacgggcaccaccaacgcggtag

SEQ ID NO: 494666 - DNA, 201 bp, Homo sapiens
ttgttctaggtgtagagttggtttagcattcgtggtcttgtgtaggattgatgcctaacttggtgacttttcctctattatgctgatccttagaaaaggakactggtgcctccatgattcatcacataaaccaaatttatgttcaaattaatgttcaaaatcagcatgcctggtctttactccatttgactggtcagttcc

SEQ ID NO: 494667 - DNA, 201 bp, Homo sapiens
aaagctcaggcagtatatgcacaaggccagactaaagcttcatctgtctgtaggagagcatcacctggattgaaacagagttccccagttgtttgctgackgagggagtgtaacaggcagtggggcataagctaggtttgtggactcagatgtgggcatcagcatttactagctatatgacattgagcaagtaatttaacc

SEQ ID NO: 494668 - DNA, 201 bp, Homo sapiens
ttaaacccattcaaccaataagggaaattcattaatgactgcaattaacaattaattttgccttcagtttcttgatctctgttactgcagtaacattagcygtatgaggagattctcaaaccatcagaggttgttgggatgaagtataaggacctctaatatttagggttatgcacacaattcctgttacattgtttgaat

SEQ ID NO: 494669 - DNA, 201 bp, Homo sapiens
cattaagagtgctacctctgatgtaaagagggggcatgaagtagagttttaggcagttggtgtacttaatagttttgcagattggcatgagtttaaattcyttgaatcccagctttgccactgtttgcaatcttaggggtatggaaggcagtaagagccaatctggaccctgtattaataaatgaaaagagcatgtaggag

SEQ ID NO: 494670 - DNA, 201 bp, Homo sapiens
cttcagacaacacctcatgaacaggtgcaggagcagctctgcagggacagcaccctcgctcatctggaagactgccctctggaagctttcaggaaaggccyctgagagcacagtcacaatccaaaagccacgttctttgtttatttttactattattacatatatatttttgagacagggtctcactgtgtcacccaggct

SEQ ID NO: 494671 - DNA, 201 bp, Homo sapiens
cacagtggcgaggtttgggggaactcaatttcccactgctggaatcagagattcccctcaggcttgggctggtttaaatgtgtggtgattcgggactattyttctgactcctcagtgcttctttcagcaatatgaagataaaaccaggtactacgagggcctacctgatttttggctcttctaaaggtatttttttctgtg

SEQ ID NO: 494672 - DNA, 201 bp, Homo sapiens
gcttgcagtgagccgagatcgtgccactgcactccagcctgggcgacagagcaagactccatctcaaaaaaaaaaaaaaagaaaaagaaaaaaattagccragcgtggtggcgcactcctgtaatcccagctactcgcgaggctgaggcaggagaatcacttgaacctgggaggcagagtttgcagtgagccgagatcgca

SEQ ID NO: 494673 - DNA, 201 bp, Homo sapiens
cagctgctcgggaggctgaggcagaagaatggtgtgaacccaggaggcagagcttgcagtgagccaagattgcaccactgcactccagcctgggcaacagrgtgagactccgtctcaaaaataagtaaataaataaataaataataaaatacagatgagggtagagagggagatgggaaattttcatactcttctcccaaa

SEQ ID NO: 494674 - DNA, 201 bp, Homo sapiens
cttccttctcctgggcaagagtacctcccagatatttatacacatccatgttttgttttttttttgcagttgaactggcaatgatcatggaccgtttgtayggtggtgtctgctatgctggcattgatacggacccagagctgaagtaccccaaaggtgctggccgcgtggcattctccaatcagcagagttacattgcag

SEQ ID NO: 494675 - DNA, 201 bp, Homo sapiens
atggtgtgatcttggctcaccgcaacctccgcctcccaggttcaagcagttctcctgcctcagcctcctgagtagctgggattacaggcacgtgccaccaygcccagctaattttgtatttttagtagagacggggtttctccgtgttggtcaggctggtcttgaactcctgacctcaggtgatccgcctgcctcggcctc

SEQ ID NO: 494676 - DNA, 201 bp, Homo sapiens
agttcaagaacagcctggccaacatggtgaaaccccatctctactaaaaatacaaaaattagccaggcatggtggcacatgcctgtaattccagctactcrggcggctgatgcacgagaatcacttgaatccaggagatggaggttgcagtgagccaagatcatgccactgcactccaacctgggtgacagagcgagtgac

SEQ ID NO: 494677 - DNA, 201 bp, Homo sapiens
attagatttttttcctatagagttgtttgagctccttacatattctggttatgaatcccttgtcagatgggtagtttgcaaatattttctcccattcagtkggttgtctctttgttgattttatcctttgctgtgcagaagttttttaacttgatgtgatcctatttgtccatttttgctttggttgtctgtttgttgggg

SEQ ID NO: 494678 - DNA, 201 bp, Homo sapiens
ttcaccaattgttagcattttgccacatttttgcgtgcatgctcgctcacgcgctgtctctctattatatatatataatatattatatataaaatatattwtatatatatatatgtgtgtgtatttccccaatagccatttaagagtaagttgtagaccgggcgtggtggctcacgcctgtaatcccagcactttgggagg

SEQ ID NO: 494679 - DNA, 201 bp, Homo sapiens
tcattatcatttgtttcaagaaaattttcagtttccttcttaatttcttcattgacccactggtcattcaggagcatgttgcttaatttccttgtatttgytttttctttgtttttttttttttttttttttttgacagagtttcacttttgtcacccaggctggagtgcaatggcgcaatatctcggctcactgtaacct

SEQ ID NO: 494680 - DNA, 201 bp, Homo sapiens
gagtcacagacctcagcctgggccaaatgagcattttagggagaaggacaatcccttatagcttagccctaggggagctctgggcagggttttacacattstttctgaaagtaaggtcatttggggacagggctgagagcagtttcttggctacacagatgggtctgtcagggttgaagccacatgggtgcctgctcatgt

SEQ ID NO: 494681 - DNA, 201 bp, Homo sapiens
acgccgctgggccggccctggcagctctgcagctgctgggcctggggcctatcaggcagcgtgtgtgtaggccaggtgggcagcgggacaccagagcctgkactggggccagggctcaggccactgtcctcctcctcctcctccttctcctagggtggtagtcaagaatgaatgtatgggtccagccaggaaatgggagcc

SEQ ID NO: 494682 - DNA, 201 bp, Homo sapiens; identical to SEQ ID NO: 152731

SEQ ID NO: 494683 - DNA, 201 bp, Homo sapiens; identical to SEQ ID NO: 152755

SEQ ID NO: 494684 - DNA, 201 bp, Homo sapiens
ccaagctgagttctgtccatggccataggagcgcaaaggtagctgagtgtggtctttttaagggataatgtaccacattagctgttgtctgccttactgayttttgaacaaaagtcgtgtcacttagagatagcagaagctattggtcagtgtgtctgccaacacatacttctgcaggacttctccctgctataaataagt

SEQ ID NO: 494685 - DNA, 201 bp, Homo sapiens
agggatcatctgtacagttggctttggtccaccactaggtctgggcactggggaggggtggagtagctctcctagattcactgaccacctgaagatttctygcaggtggatgaagctgtagcagttctacaggctcatcatgccaagaaagaagctgcccagaaggtgggcgctgttgctgctgctacctcttagacaagg

SEQ ID NO: 494686 - DNA, 201 bp, Homo sapiens
ggattacaggtgtgtgccaccacgcccagctgatttttgtatttttagtagagacggggttgcaccatgttggtcaggatggtcttgaattcctgacctcrtgatccacccacctcggcctcccaaagtgctgggattacaggcatgagccactgcgcctggccctttgtttttttgagatgaggtctcactacattgctc

SEQ ID NO: 494687 - DNA, 201 bp, Homo sapiens
catcgagaagatgaatggcatgctcctcaatgaccgcaaagtgtgagtgtcccagtccggagcaacaaccatcgcatgagccagccgtggccccacctcgstattaactggcacacacaaggcggctactggttctcggcccaagtgtggcctgctcctacctctccactccagggctggtgagtctccctgcctgagccg

SEQ ID NO: 494688 - DNA, 201 bp, Homo sapiens
ggtgagtctccctgcctgagccgtggcagcccttttgactcgccaaggtgggcttcctgcccaagccatggcctgcctgccgcctctcccttaaaggcatstgtctgtgggttttgtgagcatcaacaactggggctggctggaaagcagctctaagctcactctgagtcggggtcttggccagcggcagagtggagaggg

SEQ ID NO: 494689 - DNA, 201 bp, Homo sapiens
gtggtccgccttgtctttgacaggtggtgtgtgatgagaacggctctaagggttatgcctttgtccacttcgagacccaagaggctgccgacaaggccatygagaagatgaatggcatgctcctcaatgaccgcaaagtgtgagtgtcccagtccggagcaacaaccatcgcatgagccagccgtggccccacctcgctat

SEQ ID NO: 494690 - DNA, 201 bp, Homo sapiens
ggatctcgtgttttaacctctcctgtcagtctttaacctgtattcctttgggtccctggacatcatgttttattcctctgggtaattactgttcttcatgrtttcattttagatttgtgggcagattcaagtctcgcaaagagcgggaagctgagcttggagccaaagccaaggaattcaccaatgtttatatcaaaaact

SEQ ID NO: 494691 - DNA, 201 bp, Homo sapiens
gcttagctctgggaatacaataagtacagttagttacacggagtgtgttgcaggtgacttcttatcatgaggactgtggactttgtctgcaggagcttgartgaataataaaactagtactggttgatggttgtaggtgtctccagatagggaaagaagagacagtaaaataagctaaggaaaaagcacatggtaaggacc

SEQ ID NO: 494692 - DNA, 201 bp, Homo sapiens
tgttcattttgtaaaatgtataatttcagctgtcccacctgagtcatggtgggtggtagtctgcaaagtctcttgtaagtggtaaagcttagtcaaatgtraggtattatcactggatcttggtgtcattaaggccatttagattatctttacttgtggcccctttatccaacaagggcacagacccagaagggtgtttag

SEQ ID NO: 494693 - DNA, 201 bp, Homo sapiens
cgaggatgccaataaggtgagtataccacaaagattgggaaaagcttttaagaggttgccccagagtatgggtagggtcttgctagcacctacctagagcygggacggtctgagtatctggtagtagatgtaccattactatactctgggatcatcttcctgggttccgcatgttaacttcatgtaggtgtttacaaagca

SEQ ID NO: 494694 - DNA, 201 bp, Homo sapiens
agtcctggagtaatctgttcttaggctgttggcctgtgggagctgacgttttctctccttattgaaatgtgtttctctcttacagctgagcgggctttggrcaccatgaactttgatgtgattaagggaaagccaatccgcatcatgtggtctcagagggatccctctttgagaaaatctggtgtgggaaacgtcttcatc

SEQ ID NO: 494695 - DNA, 201 bp, Homo sapiens; identical to SEQ ID NO: 152772

SEQ ID NO: 494696 - DNA, 201 bp, Homo sapiens
aaccactgttaacagtttggtttgtatccttccagaccttttctatgcatttacatagttgcacagaaatgaacattttaaaaacatggccatcaggtttmttcatgaaggcagtgtgatgtggtaggaatagccctggtctaagccaggagccctggggctggtcctcacaggatagtcctgcctttttctctttctgct

SEQ ID NO: 494697 - DNA, 201 bp, Homo sapiens
cagcttagttaccctaaacataagtttgttcattttgtaaaatgtataatttcagctgtcccacctgagtcatggtgggtggtagtctgcaaagtctcttstaagtggtaaagcttagtcaaatgtgaggtattatcactggatcttggtgtcattaaggccatttagattatctttacttgtggcccctttatccaacaa

SEQ ID NO: 494698 - DNA, 201 bp, Homo sapiens
ccctttgcagaaaaacttcataacagaccttgttgctttgatgtggttgttactgtagaatgcagagagggggaacttaccaaagccatatggggagaagragagacaataagtcttggctattacaagccaaaataatttttgtcctttgtgtcattcagtatgccagaggatgggttatctttataatgtctgtgtgtg

SEQ ID NO: 494699 - DNA, 201 bp, Homo sapiens
cagtacacaggaggacagacccaacagaatgtccaaagtgtcaatagcactgaggttgagaaactctcttctagaataccttcctttatccactatatgtkaatgaatctaaattatttgattatgcatttatttgtgttggtgcttttctttacaggattcaaaagccaaataaccccttatggaattcaactcaaggtt

SEQ ID NO: 494700 - DNA, 201 bp, Homo sapiens
gagcaggatggaaactggtgccatctgaacattttgagttatggccggatgcagacgccggtcttgctaaacaggtgtaccagatgccacaaaatcctttwgttgatgagaagggaagccacgtgggctggtaagggcttagtggccctgccctggctcttagtggactttgctcccaacctgggaatgtggaaagcaatg

SEQ ID NO: 494701 - DNA, 201 bp, Homo sapiens
agcttgttaaaacagatagctgggctccagccccagagtttttcttattcattgggtttggggtctggcctaagaatttcatttctttctttttttttttyttttcttgagacagtctcgctctgtcgcccaggttggagtgcagtggcacaatctcggctcactgcaaactccgcctcccgggttcgcaccattctcctg

SEQ ID NO: 494702 - DNA, 201 bp, Homo sapiens
gcccatctcattggtagagagttatggagtgatgcacttctttacttccctatcctccacttcaggaggctctctgggccattaactaagacataaaacartgacagtcacaccagagaagacagtgaataaccttgtctattaggaagaatgccatttgtgaatgatgaacttaatgtgggaaaagactgcctgaaccag

SEQ ID NO: 494703 - DNA, 201 bp, Homo sapiens
ccaaacagagaactatcttggaattggggaacaagatatgggaattttcaaaatgctggacatggaatcctaaaagttcccataggtaatctcagggccayacccagcgtaaccagcacacgctttcatacccttgttctttactcagcctgaaatatccttcctattctttagctttggaaagcccacgtttttcttttg

SEQ ID NO: 494704 - DNA, 201 bp, Homo sapiens
tttgccagaagaaaagcgcttttgattaaggctgccttttctctctctcttttttttttcttaagctgttgtgggaagacttcagagcctctgaaggtgcygtatttaaggggtgtaggggaaggaatgatagctaaatagaactaagggagacttaatcgtgctttaccgcacatttgtgcagagattaacaacagcaac

SEQ ID NO: 494705 - DNA, 201 bp, Homo sapiens
atacaaggctgcagtaagctatgaactgcaccactgcactccagcctgggcaacagagtgagactctgtctctaaaaaataaaaattaaaaaaaaaaaaawtaaggaaaaaggacagaaaatccaggcactggctgtgcagtggagctaacagctaagtttgatgttatgatgggttatgtgtgaatgatgttagtgcctg

SEQ ID NO: 494706 - DNA, 201 bp, Homo sapiens
ttgagatggggtctcactctgtcacccaggctggagtgcagtggcacgatctcggctcactgcagcctccgcctcctgggttcaagtgattctcctgcctyagcctcctgagtagctgggactacaggcatgcaccaacatgcccagctaaattttttatttttagtagagacggggttttgccatgttggccaagctggt

SEQ ID NO: 494707 - DNA, 201 bp, Homo sapiens
gccgaggtaaggaaccattctaagcatgaattacgtgttaggtatgcccccagcagtgatcttttatgcttacaggaagcattgatggtggggtctgtctsttttttattttgttaagctgcccaggtgtcatcccactagcacagattagaactcaggggtgccagcataggccagggagaaaaagctgaagaggttgat

SEQ ID NO: 494708 - DNA, 201 bp, Homo sapiens
aggccagtagctggaggttctttggtaccccctccttttaggtggggtcagcagacacaggggcgccatgtggccgagttaccaagatgaacacgagttcracgcccacctggtttgtcgcatgtgctgtatgggttagtatgtgaagtttttttttttttttgcttgtccgggcctgaggatcccaaatagcccttgctc

SEQ ID NO: 494709 - DNA, 201 bp, Homo sapiens
ctcaattagttcacttagtaagaagaacatatactaatttggaacagacaataaatgtatatgtcaaaagcctgaaatgcctaaaaagtaaataatgagcygtgcgtggtggctcacgcctgtaatcccagcactttgggaggctgaggcaggcggatcacctgaggtcgggagttcaaggccagcctgaccaacatgaag

SEQ ID NO: 494710 - DNA, 201 bp, Homo sapiens
ttatcatcaccattatcatgtgtggatttcaagcatctgggctctttcttctccatttccaaagataataacagcagtctggtgaaggagctctcaaaccraaacctgaactagaaacattctcataattatcctgattatccaatccatagacccagatcaatggactgtccaaatgaggggagctttccgaatatgatt

SEQ ID NO: 494711 - DNA, 201 bp, Homo sapiens
taagatgttgttcagtcaatacttattgaattattaggaaaacattcagcttctgggaatacttcagagaagcaattaaccaagctttgggaagtgtgagwtgaaaggaaattcaagtggaatttgcatattctcaggcatactgttgaggctgttctccctctccaaatggcttcctccttaaaaagcccagatgaggga

SEQ ID NO: 494712 - DNA, 201 bp, Homo sapiens
taagtggtgtgtcttttcttgttcttctccatggtgccagtcatagtgctaagatgttgttcagtcaatacttattgaattattaggaaaacattcagcttctgggaatacttcagagaagcaattaaccaagctttgggaagtgtgagttgaaaggaaattcaagtggaatttgcatattctcaggcatactgttgaggc

SEQ ID NO: 494713 - DNA, 201 bp, Homo sapiens
tgcagccttgagccttaaactcctgggctaaagcagtcctcctgtctcagcctcccaaagcactggtattacaggtgtgagccattgcacctggcctcctsctctactttcagagctactttgaatattataattggaaaggacttcagttttccacacaaatgtaaaaatccccaaatccccagcctctactcaaaaaat

SEQ ID NO: 494714 - DNA, 201 bp, Homo sapiens
tccctgtatcttttaataagtgtaggagagagtaaataacattacttttctctttaaaactttctcctctgccctatatattgctcttcaacatagtttgrgtcaaggaaattgggctgcttacgtttccttttaattgtttagaggaaagatttctagatcaagttttcggcaggtgtcaatactacgaggccaggcatg

SEQ ID NO: 494715 - DNA, 201 bp, Homo sapiens
gttgttgctgagcaatcctctggcattgctagtttggattacttgcttacctctgtcacaacattgatctctttgtatagtaaattgtctccctgattaaattgcttgaacttgaggcctgaggctgtgtttttttattttgagatatcaagaatttaagcacagctcctagaatataatggttgctcaaaaaatattaac

SEQ ID NO: 494716 - DNA, 201 bp, Homo sapiens
ttttctttttccttctcttttctctttccttttcttcctcttttttccttccttccttccttttctttttccttctcttttcattttccttctcttttctytttcctttccttccccttctttccttccttcccttttctttttccttctcttttccctttcctttcctttctttcctctttcttttctttcctctttttt

SEQ ID NO: 494717 - DNA, 201 bp, Homo sapiens
aatatgactcagaaatttgttgtctaagcttctgttttcttagagcaaccaatccatatctctatctagacataatatttgcatagttgcaaccataacaygtagtttacttactctttctctaatgtatttttatttcattcttttttaatcagggaaagatgtcccagaatttccataccagctatgctgaaactcttg

SEQ ID NO: 494718 - DNA, 201 bp, Homo sapiens
tccgtccgtctttctgtctttctgttttaagagacaagttatccctatgttccctaggctggtctcaaactcctgtgctcaaggaatctttggccttcccragtgctaggattacaggcatgagccaccacacctggcccacttacactttctctatttctgtttgagactctctagttgaatatggggtagcactgattc

SEQ ID NO: 494719 - DNA, 201 bp, Homo sapiens
gtgctttcggagcagctcagccagcagacggtgagtgtggtagtagctctggcgagaagagttagaaatttaaattttctttatcataaaagaaaatgatrtactggcaattaaagcttcctccaaatggaagatatccaaattcccttttctttgagtggtttgagcaggatcgtcccaagatactggttttgcatttag

SEQ ID NO: 494720 - DNA, 201 bp, Homo sapiens
tacaagaatgtaaaacattaacatggttctaaaagtcaaatctatacaaaaagaagtgtattcccctctagctagtccttttatcccctttgccttccttygatcctttcaattccatccttttcatctcattagtttctggttatcctttctgtctgtctctttgtataaacatatacacatatattttctcattttccc

SEQ ID NO: 494721 - DNA, 201 bp, Homo sapiens
ccagaaggcagcaagtcttgtgttaagagaccaggttagatgagaaaaggtcttggggaaaggtctcgtaatcagaattaacttagttgaaaatacatctratatacctactgaaaactatagtttagcctatcttaaatgtattccgaacacttatattagctaaccgttgagcatttggccaaaatcatgtaacacaaa

SEQ ID NO: 494722 - DNA, 201 bp, Homo sapiens
agaaaaatgctttttctggtcagttcctgttgacttcacaggttagtagttagaaaggaaaagcccagtatttaatctagcagatagagcagttctttccmtttttgtatatgcaatctagaagcccctggctttcctggaattttagataaaatttccatatataccagcaaaagttttcaaatttttaataatgcttac

SEQ ID NO: 494723 - DNA, 201 bp, Homo sapiens
aagcctttgaagaagttatttagcttctcagtgttctacttccttatcagtaaaatggacatagtttgttatttatttaacctaccttatgagattatcgktgctaggattaactgaagtgatacatgtaaaatacttagaatagtggttctcaaagtgtggaccccagactagcagcatccgtatcacctggggacatgt

SEQ ID NO: 494724 - DNA, 201 bp, Homo sapiens
ccaaagtgctaggattacaggtgtgagccactgcacccagccatttttttttttttttgaaatggagtctcgctctgttgcccaggctgaagtgcagtggygccatcttggctcactgccacccctgcctcctgggttcaagcaaattctcctgcctcatcctccccagtagctaggattataggcgtgtgccaccatgcc

SEQ ID NO: 494725 - DNA, 201 bp, Homo sapiens
tgatctcgaactcctgacctcatgatccacccgccttggcctcccaaagtgctaggattacaggtgtgagccactgcacccagccatttttttttttttttgaaatggagtctcgctctgttgcccaggctgaagtgcagtggcgccatcttggctcactgccacccctgcctcctgggttcaagcaaattctcctgcctc

SEQ ID NO: 494726 - DNA, 201 bp, Homo sapiens
attttataaattacttagagagggtaagtaatttgttcaagatcatgctgctagaaaaaggcagaactgaaattttaaaattcaggcaacctaaagtctagaaaccgtgctcttaacccatgcagaactggctctggttgctgcctacctttccaggctcatagcaccaagtttccctcataccttgagttcttgctgaac

SEQ ID NO: 494727 - DNA, 201 bp, Homo sapiens
taagaaatagttttacatttagtatttagttcaaatcaattttatattctttttctccaatgaattatttcttcaggagtgctggtaattaaattagcagraagactacttatatttagtgaatgtatattacacagagttggcaagacaaggctcaagctacatctcaaattaaaatagaaatgtatatgcaatagggaa

SEQ ID NO: 494728 - DNA, 201 bp, Homo sapiens
cctgggccatgtcttcctcagatgaagagacgctcagtgagcggtcatgtcggagtgagcggtcttgtcggagtgagcgatcttacaggagcgagcggtcrgggagcctgtctccctgtcccccaggggacaccttgccctggaacctgccactgcatgagcagaaaaagcggaaaagccaggattcggtgctggaccctg

SEQ ID NO: 494729 - DNA, 201 bp, Homo sapiens
aggcaataacaatactaaatgaccttttgtagtcacattaaacattgaaatggtactgagactgccttggtggggagttttggcctatgggaatgatgtgrgttttggtttctactcctttctctgttttcagataaatcctcctacatgtcccattctctggctctgggaagtactgacagtagggaaaagttagtacac

SEQ ID NO: 494730 - DNA, 201 bp, Homo sapiens
ctactcctgacctcaagtagtcctcccaccttggcctcccagtgtcttggaattacaggcatgagccaccatgcctagtctaaatcagacattctgtataytaagtcctttacatggattatttcatttaatccttcagtgatcttatgctgtgggttctgttaatatccccattttataaattacttagagagggtaagt

SEQ ID NO: 494731 - DNA, 201 bp, Homo sapiens
atctttgatcttgtttcactccctggtttggcttgtccagtgcaatttgtctctcaacctgcaagaggtgtgtgtgtgtgtgtgtgtgtgtgtgtgtgtgkacttgggtgtcccttgcctgtggcttcacctgttgccatgaatggttgacttcagggcatgcccctttgtgtatacagacttcctctactattgttatca

SEQ ID NO: 494732 - DNA, 201 bp, Homo sapiens
atttcctcgttagtagtggggagaatagttcttaccttgcagggatattgtgaggtttgaataagataatacgtattagcacctagcatatgtgaaacatrcagtggatactcaatatccgtgagttgtcttttcttccttccattcattcgggagatgcttagggaagcagatataccagattcaaaaggatttagaccc

SEQ ID NO: 494733 - DNA, 201 bp, Homo sapiens
gctgtattgtgtgtgtacactctttggtgttttgcctagcattatttaatggtagttatagcagcagcattaacacatcttgtacttattaatgtgccagkcataatttttatgtactttatgcatatattatttcattcagtccttagagcaaccatgtgaaataaatattatctccattttcggatgaagaaacagaac

SEQ ID NO: 494734 - DNA, 201 bp, Homo sapiens
ctgtttatcaagattgtccagagtaggacagcccaggaccattctttatccaaggagcaccacaaaggccttatgaattctgttttctacttaggattgaraagagttctgggagtcttatatcaaacttgtacaaaagttgaatccatggggaaaaatccagagattaagagcaaattaatttcctgagttattctctcc

SEQ ID NO: 494735 - DNA, 201 bp, Homo sapiens
cttcctttctcttttcttgtcttttctttctttctttctcttcttttctgtgtgtgtgtgtgtgtgtgtttgttttttttttttttttttttttttttgayggaatcttgctttgtcacccaggttgaagtgtagtggcgtgagtagctgggactacagatgtgcatccccacacccagctaacttattgtattttttcat

SEQ ID NO: 494736 - DNA, 201 bp, Homo sapiens
atagttattagtttgtggctcagatgtcctggaataagtgaaccaggagctgacagacgtgttcttcatgacagaaattgaagcaggacattgctcggcaraagagcagcttggaggccacccgtgagatggtgacccgattcatggagacagcagacagtactacagcagcagtgctgcagggcaaactggcagaggtga

SEQ ID NO: 494737 - DNA, 201 bp, Homo sapiens
atttctagaaatggcaaaccctaatgttgcaggtctagaagcaggatccattgaggacatagtgactcagagaggttccagagtcttgggatcctttcttycagagaaactgttcaaaggagtgtctcaaaaagagaatacagggcaacagaatgccatcattagtcctactgttctagagaccagtgaagaaaagacagt

SEQ ID NO: 494738 - DNA, 201 bp, Homo sapiens
cctttagattttcaacttacttcacatagcctggcaactgcttgtgctgtgctctaacgaaaggctggatgttcattctctgaggaaagtaattcaaagtrtctcttgactagggagagcagccatttattgaaggtaaatattccatacagaaatcagtaggattaactggaagttcacatacatactgaattttgagct

SEQ ID NO: 494739 - DNA, 201 bp, Homo sapiens
aggtgaaaaattacctctcatggttttaatttgcatttatttgactagcaagagggggaatatatgttggaatagtcctctaaagtgcttccagccttggmccttcgttttactaagagccataatgtatggagaagagaaggctaaaagactttgtcttatttataatgaattattctgtgtcccatcttttggcagatc

SEQ ID NO: 494740 - DNA, 201 bp, Homo sapiens
attatttagaaactaagatctgggtaccaaatgtattcattgttgttggagtattattgcttataggcccacttagcagacagagctagaaaacataggcygggtgtggtggctcacgcctataatcccagcactttgggaggccaaggcaggtggatcacctgaggtcaggagttggagaccagcctggccaacatggta

SEQ ID NO: 494741 - DNA, 201 bp, Homo sapiens
cggggtttcaccatgttggccaggctggtctcgaactcttgagctcaggtgatccacctgcttcggcctcccaaagtgttaggattataggcgtgagccaycatgcccggcccattgtcagatttcatttaatatccctgttttcactgagacacctggctcctgacctcacacgggcctgaagacttccaaccaatcttg

SEQ ID NO: 494742 - DNA, 201 bp, Homo sapiens
ttacagtgagttgtctgtaacaaagccaggcctctttctttgggcagctgctgcctttggcctgaccttgcttaagtctgcttacctttctttctctggcwcagtgtacacgattaggatctcacctgaatatgctgttaggccagtatcatcaattccaaaacagtgctgacagcctgcaggcctggatgcaggcttgtg

SEQ ID NO: 494743 - DNA, 201 bp, Homo sapiens
cagtctggtgaaggagctctcaaaccaaaacctgaactagaaacattctcataattatcctgattatccaatccatagacccagatcaatggactgtccamatgaggggagctttccgaatatgatttctatgtcttttcctattctagtctcccaccaacttttccatccttgagatataaccttcctgttttacatttc

SEQ ID NO: 494744 - DNA, 201 bp, Homo sapiens
ggcaacatattaagaccacatccatataataataataataataataatttttattatttattatttaataatattaataataaagtctttaaaagcataayacaaaaattgtctccactctttcttttcatggcctgatttttcagattccatactcagccacttccaaagcctctcctatagcctggctgagcgatcttc

SEQ ID NO: 494745 - DNA, 201 bp, Homo sapiens
atacagttttctcatttgaaaccctttggaatcttttccctcagctaactgtactctgagtgagagcttggtgaaaattgcaatgtctttacatctgttayctttttttttaattaaaaaaattttttgtgggtacatagaaggtacatatatttatacgatacatgagatattttgatacaggcatgtaatgcataataa

SEQ ID NO: 494746 - DNA, 201 bp, Homo sapiens
cagagtgttccagtcggaagaaatacaaatgcaaagggcctggagtgagggcttgcttagagtggtttagggacagcaggtggctgaagtgaggtgaggamgataggaattctgaatgacaaaaataaaaattgttgagttcttagtggtcataaacatgccccaattttcagttctaaccgacgatatttttcccatgac

SEQ ID NO: 494747 - DNA, 201 bp, Homo sapiens
gagaaaccacccgctctgctctgggtgcgagcttcctcccagaggggctcggacctctgtgtgcccgcggagagtccctccctcgcccccttttgtctctytgagtctcggatgagtcgcgtggaagccgaggttggaaagcaccttggtgtcttcggggtggggtgggcagcggtgtgggtgagtgtgcagtttttggtg

SEQ ID NO: 494748 - DNA, 201 bp, Homo sapiens
gcagaaccacccagcaggatctctctgctttgcagaagaaccaaagtgacttgaaggtcagtgtgaatctgtcaattttgacacaaagtctcgctctatcrcttaggctggagtacagtggtgttatcttggctcactgcagcttcgatctcctgggctcaggcaatcctcccacctcagcctccccaggagctgggacaa

SEQ ID NO: 494749 - DNA, 201 bp, Homo sapiens
gatagaaatttttgtaagctactaaaaagataagctagagaagatgttggataggcaaagtgtcaaactgtataagaacaatttttgatgtggctttttcrtagattttgtcttaacctttagtaataacaggaaaagggtctttttacttcttaactacagtttacttttcaaaggctttctccattgacattattcgac

SEQ ID NO: 494750 - DNA, 201 bp, Homo sapiens
ttacaaaacccagtgtggagtagaaaaagcactggaggccgggcgcggtggctctgcctataatcccagcactttgggaggccgaagcgggtggatcacarggtcaggagatcgagagcatcctggccaacatggtgaaatcccgtctctactaaaatgcaaaaaattaactggatgtggtggcgcatgcctgtagtccca

SEQ ID NO: 494751 - DNA, 201 bp, Homo sapiens
gcatttcaaagagtcccagaggatctctgacatctgagctctagctcaggctagatggattactcaagtgagtcatgtctgtgtggtgctctgaagtttayagagaacctttgcagggcagcatactcatcctggttcactcgtcctgtgtttgggatggactcatctcactcttgagcatgctgcctggaatctagggaa

SEQ ID NO: 494752 - DNA, 201 bp, Homo sapiens
agattctgcattttaataaattatatggggatataatttatatgcatgttggtgtttgaaaagctctattctagatcattgaaagctttttaaggagaagagtgatgtggtcatctttgggttttagaaaaagtattctggtggaacaatagagaataaattgagattagactagaagcagtgaaagtacctaagaggcta

SEQ ID NO: 494753 - DNA, 201 bp, Homo sapiens
taaattagctggatgtagtggtgtgcacctgtagtcccagctcctcaagaggctgaggtaggaggctcacttgagcctgggacattgaggctattgagccrtgattgtgtcactgcacttcaacctgggcaacagagaaagactgtgtctccaaaaaaaagaaaaaaataacttgagattattacatatttatttgtttat

SEQ ID NO: 494754 - DNA, 201 bp, Homo sapiens
gagtgagataggatttggttattgagtaaaagagggccctgtaatgtggacttgacatcttccctccataccttggctttctgccttctttgccttttcawtccttcaccttcaccaccaccattttattgtaccaaaagcagctttaaacttgggatgtttttcctgcctctatctgatttttcttcagcagaaacatct

SEQ ID NO: 494755 - DNA, 201 bp, Homo sapiens
tcaccttacaaggttgatacgaggattaaataagatagtgtacatgaaggagcctaattatatgcctctttttggtaggccctcaagtaacattagttccyttcccccaagattagaccgtatactctcagcaaacattttaaatgccagggttcaggctttattgatttcaattttattttctcatttcagccgatcgca

SEQ ID NO: 494756 - DNA, 201 bp, Homo sapiens
ggtaggggcgaggaggaaagactagtggcagacaagttaggaagctgtcacaggaatttaggcagggagtgaaactaaggttgtgaaaatagtaatgtaawaaagcaggcaaatcaagaaatgtgaaggggtaacatccatgtgttttgatgactaattgtatgtggtatatgagggggagagggaagaacctaggatgac

SEQ ID NO: 494757 - DNA, 201 bp, Homo sapiens
ggagcttacgatttagtaaggatgagagacactgtaccataacttcaagtgtgatgagtattaccaaagggtagaggaggacctattaattggaggggggsggggtcaaggaaggctttcccctggggagtttcagcagaagcatgggtaggagtgagccaggccaaaggagagtgatgaagggttataatctgggaggaa

SEQ ID NO: 494758 - DNA, 201 bp, Homo sapiens
agcttatgcagtacactgatgtttactggatctggaagcttatctaagaggaccaaattgctttgtgttccctgtgcagattcccttaattattattattmttttatttgagtgatggggtcttgctatgttgcccaggctggactggaactcctgggctgaagtgatcctcctgcctcagtctcttgagtagctgggaca

SEQ ID NO: 494759 - DNA, 201 bp, Homo sapiens
aaaattacctctcatggttttaatttgcatttatttgactagcaagagggggaatatatgttggaatagtcctctaaagtgcttccagccttggaccttcrttttactaagagccataatgtatggagaagagaaggctaaaagactttgtcttatttataatgaattattctgtgtcccatcttttggcagatctctgac

SEQ ID NO: 494760 - DNA, 201 bp, Homo sapiens
atccctgcactttaggaggccaaggcaagagggttacttgatcccagaagtttgagaccagcctgggcaacatatcaagatcccatctgtaaaaaaaaaaattttaaattagctggatgtagtggtgtgcacctgtagtcccagctcctcaagaggctgaggtaggaggctcacttgagcctgggacattgaggctattga

SEQ ID NO: 494761 - DNA, 201 bp, Homo sapiens
tcttttctcaaggacaaaacctatactctagttcttgttttattagctttgtatccaaatatgagccattttttatgatggagctttacagaatttcttgytttcatctcatttgctaattcagtaatttttcatctctgttactagaggtcctgcttctaatgacagatgtaaataggaaggacagaaactgcacctttt

SEQ ID NO: 494762 - DNA, 201 bp, Homo sapiens
catttccaaagataataacagcagtctggtgaaggagctctcaaaccaaaacctgaactagaaacattctcataattatcctgattatccaatccatagayccagatcaatggactgtccaaatgaggggagctttccgaatatgatttctatgtcttttcctattctagtctcccaccaacttttccatccttgagatat

SEQ ID NO: 494763 - DNA, 201 bp, Homo sapiens
gtggctttcagagtaaagcagcaaaggaactggcagagaacaagaagaagatcgatgctctcctggattgggtaacttcagtaggatcatctggtggacakctgctgaccaaccttccaggaatggagcagctctcgggagctagcttggagaaaggagccttggacaccactgatggttacatgggggtgaatcaagccc

SEQ ID NO: 494764 - DNA, 201 bp, Homo sapiens
ctagcctgggcaacagagtgagactctgtctcaaaaaaaaaaaaaaaaaagacagtggttaaccagaggttttcagctgggaaacaatatgatttggtctrtgttttagtaaatcactgtgactactataaatagtcacacttccctttgtatagcaatttgtttagaatctaagacaataatctaaacataggaaaactt

SEQ ID NO: 494765 - DNA, 201 bp, Homo sapiens
tatgctgaatgaggtggagaagcgccgctccctgctggaaatattgaatagtgctgctgacattctgatcaattcttcagaagcagatgaggatggaatcygggatgagaaggctgggatcaaccagaacatggatgctgttacagaagagctgcaggccaaaacagggtcactcgaagaaatgactcagaggctcaggga

SEQ ID NO: 494766 - DNA, 201 bp, Homo sapiens
tttgagacggactcttgctctgtcacccacgctggagtgcagtggtgtgatctcggctcactgcaacctctgcctcccaggttcaagtaattctcctgccytggcctcctgagtagctgggattacaggtgcccaccaccacgcccggctaatttttgtatttttagtagagacggagtttcaccatgttggccaggctgg

SEQ ID NO: 494767 - DNA, 201 bp, Homo sapiens
ccattctccttactactaaggaatctttctaaaatgccatatccttgcttagccctttttatggttccctgttgccctcaagattacctggttaactctcytctcagcccctacccactgggatctagtctacttatttggccttatctgtcaccttcctttatacttgagcatctgcttatattgattcctttcagttta

SEQ ID NO: 494768 - DNA, 201 bp, Homo sapiens
tcttgcatgacgcttttcgaaggtccattatactgtgtcccccaaagccctggtagtcttataagaggacagagcaaaaatggttctgctgtcatagggckcctctgacaccttttgctggcagcagtcaacctaatgaagtggtatctccattctaggaaggaaactgccttataggtagatgagttggaaggtgagaat

SEQ ID NO: 494769 - DNA, 201 bp, Homo sapiens
aggctggtctcaaaaacctagcttcagtgatactcctgcatcagcctcctagtcactcagctttcttgaaatgatgtgggaagctgaggctatcaggttgytgttgatacaggctaaaactagacgatgatctgtagtccttctctaagtagtggcataaacagtataggtagtaaggaacactgacaactcccactgtct

SEQ ID NO: 494770 - DNA, 201 bp, Homo sapiens
tcagctttcttgaaatgatgtgggaagctgaggctatcaggttgttgttgatacaggctaaaactagacgatgatctgtagtccttctctaagtagtggcrtaaacagtataggtagtaaggaacactgacaactcccactgtcttctagattcaggaagaacatcccaatatatgtttcaaaacaaaaactcacagctct

SEQ ID NO: 494771 - DNA, 201 bp, Homo sapiens
cagctttcttgaaatgatgtgggaagctgaggctatcaggttgttgttgatacaggctaaaactagacgatgatctgtagtccttctctaagtagtggcawaaacagtataggtagtaaggaacactgacaactcccactgtcttctagattcaggaagaacatcccaatatatgtttcaaaacaaaaactcacagctctc

SEQ ID NO: 494772 - DNA, 201 bp, Homo sapiens
aaacgaaagataattattcttccttctgggcttctcgaggacagtacttctagtattaatataccacttaagatttgatttttatcattaattgtgatgcrtcttcctctgcctatgctctgttttaaagtcttaagttgtagatgtcagataagatacttaagtatctttagtcctcagcatctagtacaatttctggtt

SEQ ID NO: 494773 - DNA, 201 bp, Homo sapiens
ctttttgacatgtcttcctcagcataagagcacttttggaacttaagatatttgtggcacaataatgtatttccttgtcccctatctgaaatcagctattyatccaaggagtcccacttttagtggggaatgatatttagaaaccaaatctggacactagatgagctactggagtgtcactacttttaggttctttttaat

SEQ ID NO: 494774 - DNA, 201 bp, Homo sapiens
aggatatccaacctgtatcatttatttgaaaagtccatattttccccagatttaagaaaccatcttcatcatatacacaatttttatatgtctttgagtckatttctggattttcttttttttctttttttttttgagatgggatcttgttctgtcacccaggctggggtgcagtggcatgatcttggctcactgcaacct

SEQ ID NO: 494775 - DNA, 201 bp, Homo sapiens
catgttttcttgatgcttcacgtgcaaatgcttgttctttctttttattcctggtcgtctttcattaagtcataaatgccccaagaataaccagtctctgygtggtatagagagtctaatagcctttgtattaaatcttctttggcttgtaattatctagatgtttcagaaagaacaagtggatcctcttcagatgaaatt

SEQ ID NO: 494776 - DNA, 201 bp, Homo sapiens
actgacagaactcaaacacctctgggagaacctgggtgagaaaattgcccaccgacaggtaaggcaggtggtagatgacatcagtgaactactctccgctsttttctaatttcgtattgaatattccctttctgtcttttcctgagtagcacaaactagaaggggctctgttggcccttggtcagttccagcatgccttag

SEQ ID NO: 494777 - DNA, 201 bp, Homo sapiens
cggcctggtggcgggcgcctgtagtcccagctactcggaaggctgaggcaggagaatggcatgaacccaggaggcggagcttgcaatgagccaagatcgcrccactgcactccagcctaggcgacagaacgagactccatctcaaaaaaaagaaaaagaaaaagaaaatcctaccaactccatacccgaggaacccttgaa

SEQ ID NO: 494778 - DNA, 201 bp, Homo sapiens
tttaactacttcgttgtttgatttcgttttattgttgattatcttgggttttacaaatatacttttttttttttttttgagacagagacttgctctgttayccaggctggagtgctatggcacaatctcggctcactgcaacctccgcctcctgggttccagcaatttccagctaatttttgtgtttttagtagagacagg

SEQ ID NO: 494779 - DNA, 201 bp, Homo sapiens
agcttttagtcatgtgtaaaaaaatgaaaatattttactagctagatttgccagtctcctggtactgccaaaatcagatatttcagtttctgaatgtatcygtggcacaggaaatcatgatgttttggatagagagaaaaaaagtgctcctgcctaaataatgggtatacttgtacctaaggtactgtgtatgtttttgat

SEQ ID NO: 494780 - DNA, 201 bp, Homo sapiens
acagaataattttgaaagaagagaaaaattggaagagacttcctagacataattaagggtgatgttggcagtcccctggcttttttttttttttttttttwaagatatggggtcttgctatgttgaccaggctacttgtgaactcctggcctcatcgatcctactgccttggcctcccaaagtgctgggattacaggtgtg

SEQ ID NO: 494781 - DNA, 201 bp, Homo sapiens
gtcttcatgagggattcctttttttttttttttttttgagacggactcttgctctgtcacccacgctggagtgcagtggtgtgatctcggctcactgcaayctctgcctcccaggttcaagtaattctcctgccttggcctcctgagtagctgggattacaggtgcccaccaccacgcccggctaatttttgtatttttag

SEQ ID NO: 494782 - DNA, 201 bp, Homo sapiens
cattaacatttaaaagttttataatcaccaccctaattcagctaatttttttccttccttttagagacagggtctcgctctgtcacccaggctggagtacrgtagtgtgatcatggctctctgtagctttgacctcctaggcccacgcaatcagcccacctcaagctcctgagtagctaggaccacaaatgtgcactgtca

SEQ ID NO: 494783 - DNA, 201 bp, Homo sapiens
gggtcatgatataggagatcagcataggatcctgtgatagaattaaacaggtcctcagatcacaaaatgcaaaggttgctgttaacatgggataatcttcyttcttgtagtatctttcttatggaaagctattctatctgctcttttaaattgctttaatattctatatatagtaggtgttggcagtcacaaatttaactt

SEQ ID NO: 494784 - DNA, 201 bp, Homo sapiens
tagactgaataattttaccagtacttgcttcacaaaattagggcggcatccagagaattcaagttggagatttaataaaaagggaatacgaatttcctctrgaagggattaagaatcattcctgctaagaaccttgagtgacgttttgttgcctggcagctaaaataatttgtctctttccatgagtatgttgtcttgtgc

SEQ ID NO: 494785 - DNA, 201 bp, Homo sapiens
gcggcatccagagaattcaagttggagatttaataaaaagggaatacgaatttcctctagaagggattaagaatcattcctgctaagaaccttgagtgacrttttgttgcctggcagctaaaataatttgtctctttccatgagtatgttgtcttgtgctgtgttaacttcctgatacctaagcttaaagtgagggccaaa

SEQ ID NO: 494786 - DNA, 201 bp, Homo sapiens
gaaaaatgtcagaagatataagaccacagaaaatcctgtaggcaagtttcaccaaaacttttaatattcccattgagcgtagcatctcatctccttcaagwtatgttatcatcatatcttggtatttttagtttattttgattaataattccttcttattgagttctactgatgtattatacataaaagaaactcagatcc

SEQ ID NO: 494787 - DNA, 201 bp, Homo sapiens
atgaggtgattgtggctgaaggggaatctctacttctttctgtacctcctggagaagagaaaaggactctacaaaaccagttggttgagctcaaaaaccaytgggaagagcttagtaaaaaaactgcagacagacaatccaggctcaaggattgtatgcagaaagctcagaaatatcagtggcatgtggaagaccttgtgc

SEQ ID NO: 494788 - DNA, 201 bp, Homo sapiens
ctgctacagggaaggtctgaagcccctataacttgaagggtgatgattatgagctgaagcttctgtcttaagctgtgccccacccctaccccagaagataycaggcttttgccttgtggtcaggggaggattctgcctggggcctcagtggatgtctctgggatgccctcccccactcattcacacatttcttcatgtgct

SEQ ID NO: 494789 - DNA, 201 bp, Homo sapiens
caggccagcaaaacttgatgggaaaagatatgattaatgacttgctcacctgatttctgatcagggtgtggtgtggaaacaaccagcatgcacctattagygaaaagcgtcatttgttttacttgttaccaatgtgctgagcattgaccaaaatacttggcactactcacaaggtacaaagacaccttccctagcctgggg

SEQ ID NO: 494790 - DNA, 201 bp, Homo sapiens
ccccactttccattcattagaagaatgcattatttcaaaatctcctgggagcatttaaatgcaaattttgtcaagaaagcaatttgagtcttagagaagcyctctagccacaacctaaagcagaagtttcttctttgatttgtgtgtttcttaaaaggaatctcaaccccttgccttctccctgcaacgcccccaggtctt

SEQ ID NO: 494791 - DNA, 201 bp, Homo sapiens; identical to SEQ ID NO: 152639

SEQ ID NO: 494792 - DNA, 201 bp, Homo sapiens
actcaattcagagcgttatgcccgcctagagcgggcccaggtcttagtaaaccagttttgggaaacttatgaagagctcagcccctggattgaggaaactygggcactaatagcacagttaccctctccagccattgatcatgagcagctcaggcagcaacaagaggaaatgagggtaaggagcatgccaagtttcatttt

SEQ ID NO: 494793 - DNA, 201 bp, Homo sapiens
atagttttaaagtagttggcactatttggcacaatccaacatcagtttttgttttgacactgctttttcttttttggagacaaggtctcactctgttgccyaggctggagtgcagtggtgctgcctcagctcactgcaacctcggcctcctgggttcaagcaattctcgtgcctcagcctcccgagtagctgggactacag

SEQ ID NO: 494794 - DNA, 201 bp, Homo sapiens
gtacctcctggagaagagaaaaggactctacaaaaccagttggttgagctcaaaaaccattgggaagagcttagtaaaaaaactgcagacagacaatccasgctcaaggattgtatgcagaaagctcagaaatatcagtggcatgtggaagaccttgtgccatggatagaagattgtaaagctaagatgtctgagttgcga

SEQ ID NO: 494795 - DNA, 201 bp, Homo sapiens
agagaaaaggactctacaaaaccagttggttgagctcaaaaaccattgggaagagcttagtaaaaaaactgcagacagacaatccaggctcaaggattgtrtgcagaaagctcagaaatatcagtggcatgtggaagaccttgtgccatggatagaagattgtaaagctaagatgtctgagttgcgagtcactctggatcc

SEQ ID NO: 494796 - DNA, 201 bp, Homo sapiens
aaaggactctacaaaaccagttggttgagctcaaaaaccattgggaagagcttagtaaaaaaactgcagacagacaatccaggctcaaggattgtatgcasaaagctcagaaatatcagtggcatgtggaagaccttgtgccatggatagaagattgtaaagctaagatgtctgagttgcgagtcactctggatccagtgc

SEQ ID NO: 494797 - DNA, 201 bp, Homo sapiens
tacaaaaccagttggttgagctcaaaaaccattgggaagagcttagtaaaaaaactgcagacagacaatccaggctcaaggattgtatgcagaaagctcasaaatatcagtggcatgtggaagaccttgtgccatggatagaagattgtaaagctaagatgtctgagttgcgagtcactctggatccagtgcagctagagt

SEQ ID NO: 494798 - DNA, 201 bp, Homo sapiens
gcagaaagctcagaaatatcagtggcatgtggaagaccttgtgccatggatagaagattgtaaagctaagatgtctgagttgcgagtcactctggatccastgcagctagagtccagtctcctaagatcaaaggctatgctgaatgaggtggagaagcgccgctccctgctggaaatattgaatagtgctgctgacattct

SEQ ID NO: 494799 - DNA, 201 bp, Homo sapiens
ctggtagaagatgccccagatggatctgatgcttctcaacttctccaccaagctgaggtcgcccagcaagagttcctcgaagttaagcaaagagtgaacastggttgtgtgatgatggaaaacaagctggaggggattggccagtttcactgccgggtccgagagatgttctctcaattggcagacctggatgatgagcta

SEQ ID NO: 494800 - DNA, 201 bp, Homo sapiens
agtttcactgccgggtccgagagatgttctctcaattggcagacctggatgatgagctagatggcatgggtgctattggcagagacactgatagcctccastcccaaatcgaggatgtccggctattccttaacaaaattcacgtcctcaaattagacatagaggcctctgaagcagagtgtcgacatatgctagaagaag

SEQ ID NO: 494801 - DNA, 201 bp, Homo sapiens
tcatagccaaattcgtttcactgatttctaaaaataagccttccacctcagatactctggatgtgaaggctgggactggacactgatcggctgggctcttrcagagtgtgttcatcaacagtggactggtgttgacaaggcaagcctggaagaagagtgggagaagggagaagggtggtggagtgtcctgtgtgtagtcca

SEQ ID NO: 494802 - DNA, 201 bp, Homo sapiens
gtcatcttgcaattcattcccaaaggataagctctggttttggtctaattctttaaattcatacctaagctgtttgtttctttgtcatcaatgataagaaktttccttagtaacgaaatgaaagagatggtttttagaaatctcttctctctgtattatttattctgccttcttttctaatattgaggagcaggggctgga

SEQ ID NO: 494803 - DNA, 201 bp, Homo sapiens
ttcactgatttctaaaaataagccttccacctcagatactctggatgtgaaggctgggactggacactgatcggctgggctcttgcagagtgtgttcatcmacagtggactggtgttgacaaggcaagcctggaagaagagtgggagaagggagaagggtggtggagtgtcctgtgtgtagtccattgtcaagtcagtagg

SEQ ID NO: 494804 - DNA, 201 bp, Homo sapiens
ttagtgatgtgaaggacaagaattcagtgttttcagtcctggatgaggaaattgccaaggccaaggtagtggcagagcagatgagtcgtctgacaccagarcgaaatctggatttggagcgctatcaggaaaaaggctcccagctgcaggagcgttggcaccgagtcattgcccagctcgagattcggtgagtggtggccc

SEQ ID NO: 494805 - DNA, 201 bp, Homo sapiens
acgggcagtggagtttaatttaagaaattgacaaagtagtgctggttagatgctaaggaaaggagtgttacctttgttgcctacatgtgactatatggtartggtttgtggctgtctttgcctggacctgattttttagggcttaatttcactctaaatgcttctcaggtctacatatgggcctatatttggacttgggct

SEQ ID NO: 494806 - DNA, 201 bp, Homo sapiens
ggaggatttacagcaattgaggtcagacttggatgcagtttctatgaaatgtgacagctttctccatcagtctccatctagttcaagtgtcccaactctgygctcagaactgaatctgctggtggagaagatggaccatgtctatggtctctctactgtatatctgaataagtgagtgagctgaggttttgggtccaagag

SEQ ID NO: 494807 - DNA, 201 bp, Homo sapiens
gcctggaagaagagtgggagaagggagaagggtggtggagtgtcctgtgtgtagtccattgtcaagtcagtaggtagttaccataaaatgatcagtatccmccctcaagttggggatgcaaatcaaaagccctgttccacctgtccaccttgtagggaagtcaaaagctttggaaagagtttttgccttctcccagcaaaa

SEQ ID NO: 494808 - DNA, 201 bp, Homo sapiens
aatctcttcaggaaattccgttttcctgaacaagggagtctggttattgaggaaaaggaattgtatgtgtctaacaggaggctaacaagaaaggaaggacstttttatcactgaaacttgagccaaagaattcccctagagtgaccttcctgggaagggtaaaaaaaaaaaaaaaaaatatatatatatatatatatatat

SEQ ID NO: 494809 - DNA, 201 bp, Homo sapiens
caggaggctaacaagaaaggaaggacgtttttatcactgaaacttgagccaaagaattcccctagagtgaccttcctgggaagggtaaaaaaaaaaaaaawaaatatatatatatatatatatatatatgttaagtctctgatgataacaagagattttcctcattttgaaattccctacgtaggttttacttgaactgag

SEQ ID NO: 494810 - DNA, 201 bp, Homo sapiens
ggaactagggtccaaggaaataaagacagtatcctaaaatggatttctcaatttcggcactattgacattttttgggggtgggtggggaggaaaggggcakccactcacgccaccacctctgcctgccactatcaacattttggactggataattctttgttgtgagaagctgtcctgtgcattgtaggctgtttagcagc

SEQ ID NO: 494811 - DNA, 201 bp, Homo sapiens
tttttgggggtgggtggggaggaaaggggcagccactcacgccaccacctctgcctgccactatcaacattttggactggataattctttgttgtgagaarctgtcctgtgcattgtaggctgtttagcagcatttctgacctagtaacttcccagttgtacaactaaaaatgtctccctggaaggcagaattaccctctg

SEQ ID NO: 494812 - DNA, 201 bp, Homo sapiens
cttgtgttaaggatttacaggatgacattcagaatcgtgccacctcatttgccactgttgtcaaggacattgaggggttcatggaagagaatcagaccaarctgagcccacgtgagttgacagctcttcgggaaaagcttcatcaggctaaggagcaatatgaggcgctccaggaagagacacgtgtggcccagaaggaac

SEQ ID NO: 494813 - DNA, 201 bp, Homo sapiens
ttgtaggctgtttagcagcatttctgacctagtaacttcccagttgtacaactaaaaatgtctccctggaaggcagaattaccctctgttgagaactatakccctggaagaaattgccacctatacatgggaaacttagaattcaggtggaataggttactagttaaatatttatgtaacaagcagccttctgataatctg

SEQ ID NO: 494814 - DNA, 201 bp, Homo sapiens
gaatcattcctgctaagaaccttgagtgacgttttgttgcctggcagctaaaataatttgtctctttccatgagtatgttgtcttgtgctgtgttaacttyctgatacctaagcttaaagtgagggccaaaggacaaattcagtgcctatatgtattcctaacacgttggtcttgccctgtttgtctccctgtccttctgc

SEQ ID NO: 494815 - DNA, 201 bp, Homo sapiens
ggctagagtgcagtggcacaatcatggctcactgcagcctcgacctcccagtctcaagtgatcctcctgcctcagccccacaagtagctggaattacaggkgcatgctgccattcctggctaatttttgtattttttgtagagatagagtttcaccatgttgccaaggccggccttgaactcctgagctcaaatgatctgc

SEQ ID NO: 494816 - DNA, 201 bp, Homo sapiens
ggattagattactatatgtaatttctctttaggttgtatttaaatttgttttcctaacaccctaattagagagagtgtgactgcagataataagtaattcraatctgaatttcatagtcgtaggaatgctccatttatttatttatatggatcactgatgagagtagtaagaatattggtagatagacatgggagggaatt

SEQ ID NO: 494817 - DNA, 201 bp, Homo sapiens
tatatacagaacagatgtccctacttatgaggaaaaagccccagatactacatttggccattttcttctttaaacagagtctactagatgactgggcaagyaagggaactctggtggaagaaatcaattgcaaaggtacttctttagaaaatctcatcatggaaatcacagcacctgattcccaaggcaagacaggtgagt

SEQ ID NO: 494818 - DNA, 201 bp, Homo sapiens
tgatgagaaatggcacagatagttcttttgttctttttgggtctcccgggcttatagtttgtagtctttctgttcagtttttggggaaaatatactttaaktttgtctggtgaaagactttataatttcatgcttcgttttttattcagataagccaatcccacggaaaacagggatataaacagttgttgatttacattt

SEQ ID NO: 494819 - DNA, 201 bp, Homo sapiens
tctgtcgcccaggctggagtgcagtggcgcgatcttggctcagtgcaatctctgcctcctgggttcaggcaattctcctgcctcagcctcccgagtagctrggactacaggcacacaccaccacacccagctaattttttgtacttttagtagagacggggtttcaccatgttggccaggctggtcttgaactcctgacct

SEQ ID NO: 494820 - DNA, 201 bp, Homo sapiens
gaatcacttgaacccgggaggtggaggttgcagtgagccgagatcacaccactacactccagcctgggcaacagagcaaacctgtctcaagcaaacaaacmaacaagcaaacaaacattgatataatactgctatccaagctcacgcctcattaaaatttcatcagttgaccaaataatgctctttacatcctcataccat

SEQ ID NO: 494821 - DNA, 201 bp, Homo sapiens
cacttgaacccgggaggtggaggttgcagtgagccgagatcacaccactacactccagcctgggcaacagagcaaacctgtctcaagcaaacaaacaaacmagcaaacaaacattgatataatactgctatccaagctcacgcctcattaaaatttcatcagttgaccaaataatgctctttacatcctcataccatccat

SEQ ID NO: 494822 - DNA, 201 bp, Homo sapiens
tcagtcctggatgaggaaattgccaaggccaaggtagtggcagagcagatgagtcgtctgacaccagagcgaaatctggatttggagcgctatcaggaaawaggctcccagctgcaggagcgttggcaccgagtcattgcccagctcgagattcggtgagtggtggccccacctttttctcctattagagttcagggacta

SEQ ID NO: 494823 - DNA, 201 bp, Homo sapiens
ttagtgtgccagcttaaggagatacccagaacaagtttccttcctcccacgtctcagcccttcagatacttcatgctaattacatctcctagaactttctmtaggtcagacattattgggtcttgcactgtttgttcttcataggacagggtttctagtgtcttggcagtatacgaccaagaggacacaggattctggggc

SEQ ID NO: 494824 - DNA, 201 bp, Homo sapiens
cagcccttcagatacttcatgctaattacatctcctagaactttctctaggtcagacattattgggtcttgcactgtttgttcttcataggacagggtttmtagtgtcttggcagtatacgaccaagaggacacaggattctggggcagtgcctttaaaagttttagaactaaaaaatattaaaactagaaagggtgtcaa

SEQ ID NO: 494825 - DNA, 201 bp, Homo sapiens
actctcggagtcgctcctctccccggccccgcccccgccgggccccgcccccgccctcgtcctcctccctgtgctctccgcgtcgcgcgctccctggcttycagggggctgcccgggcggggcggcgcagcgcggcggcgcggggaagggggaggagagccgcccgccagccgagcacttccagcgagctagcgagctagc

SEQ ID NO: 494826 - DNA, 201 bp, Homo sapiens
ctcttcttttcttttttaatagagaaggggtcttgccatgttgctcaggctgttctcaaactcctgggctcaagcaatcctactgcctcagcctccaaagkgctgggattacaggcatgagccaccatgcccagctttttgaaaactaatatagtcataatggcatggaaacttgtattaatctgcttcttggtgaagaca

SEQ ID NO: 494827 - DNA, 201 bp, Homo sapiens
cgcccccgccgggccccgcccccgccctcgtcctcctccctgtgctctccgcgtcgcgcgctccctggcttccagggggctgcccgggcggggcggcgcascgcggcggcgcggggaagggggaggagagccgcccgccagccgagcacttccagcgagctagcgagctagcgggtcgcgctgcgcgggggaggaggactc

SEQ ID NO: 494828 - DNA, 201 bp, Homo sapiens
cccccgccctcgtcctcctccctgtgctctccgcgtcgcgcgctccctggcttccagggggctgcccgggcggggcggcgcagcgcggcggcgcggggaarggggaggagagccgcccgccagccgagcacttccagcgagctagcgagctagcgggtcgcgctgcgcgggggaggaggactcgccccccgcccgacccta

SEQ ID NO: 494829 - DNA, 201 bp, Homo sapiens
taccaaggctggtaatactgaaccagttttagaggaatggatacccgtcctccagagaccttcccggactgctgcagtacccactgtcaaagatgccctakatgctgcactgcccagcccagaggagggtacctcaattgctgcagtgcctgccccagagggaactgctgtagttgctgctttagtgccctttccacatga

SEQ ID NO: 494830 - DNA, 201 bp, Homo sapiens
tacactgtcttttggaaagtctacaggcaggaaagggcttacaggggtcatgagagttcctgcagagtgtgtggaaagttttctcatgggttcacgagtayatgagagctcaaatagcatcaaaatccttagtatcccacttaaagcaaacttcgtgtcatgctatgttgctttatgagccactccgtagccatgtttata

SEQ ID NO: 494831 - DNA, 201 bp, Homo sapiens
tgttgcagtgcccacccccgaggaatctgcctccccagctgctgcagtgcccaccccagcagaatctgcctcctttgcagctgtggtggccaccctggagraacccacttccccggcagcttcagtgcccacccctgcagctatggtggccaccctagaggaattcacttccccggcagcttcagtgcccacctctgagga

SEQ ID NO: 494832 - DNA, 201 bp, Homo sapiens
ttgagactgatggatttttgattcatttttccgagttttattgaatttggaatgacaccgagatcccaatagcctgtacaaagtgaagacagtaggtcaasaacagagccattcttgataatacagaatatttcacaccaggcacagtggctcacacctctaatcccaacatttgggaagccaagggaagaggattgcttg

SEQ ID NO: 494833 - DNA, 201 bp, Homo sapiens
gaagccaagggaagaggattgcttgaggccaggagttcgagaacagcctaggcaacatagtaagaccccatctctgagaaaataaaaagaaaaaaaaaaamacagaatatctccagtataaagcttatatagcagtaatcatgaaatataaggattaaatttatagtgaggcaatcaaatctgcataaaggggaaaaagtc

SEQ ID NO: 494834 - DNA, 201 bp, Homo sapiens
ccattctttatccaaggagcaccacaaaggccttatgaattctgttttctacttaggattgagaagagttctgggagtcttatatcaaacttgtacaaaasttgaatccatggggaaaaatccagagattaagagcaaattaatttcctgagttattctctcctttgatgtcaaatgtgctatcttctacagatacaaagg

SEQ ID NO: 494835 - DNA, 201 bp, Homo sapiens
aaacttcttttactcaatgaagcttaggatttggcgggttggtttcttttgttttttttctttcttcctagttcagatttcaaaatgatcctgtgttacarcttttcattctctttataatagttgctccagcggctcctagatgatcgaaaggccacagtagacatgcttcaagcagaaggaggcagaatagcccagtca

SEQ ID NO: 494836 - DNA, 201 bp, Homo sapiens
cataacgtgtgttctgtttactattggtatttaaactatacctggaaaagactattcttttactgagtatagtactattaccagttttaatgtgacttttyttcctgagcagcttgttctatatatttgtgtaggcaaaaacagctggaagacatcctggttctggccaaacagttccatgagacagctgagcctatttct

SEQ ID NO: 494837 - DNA, 201 bp, Homo sapiens
gtatgggataggtgaaatcattaccacagagagagagagagcgtctatgaaattaaagctctgatttgaagaaaggggatcagagactcctcattcctagrtctcttaaatatgagtaattgtgtgctatcttccataggtgaggaggtgttacttatccaggaaaaactagatggtataaagactcgttacgcagacatc

SEQ ID NO: 494838 - DNA, 201 bp, Homo sapiens
aacatatgctttttgaatcacacagaaatttgctctgagtccaggtatatccccagtgtgtctttagagttatcccttatcttggccagatatttcaataygaaatgtattgtgcttgggagaagcgtatttttaaatgtaagtgtatattggccaagttgaagaggaagagataaaagactggagaggtcaggcatagga

SEQ ID NO: 494839 - DNA, 201 bp, Homo sapiens
ttatcctcactccacagggagcaagctttgagttacttttcaaggtatttatggtagatttttttcagaaccatatgcagatattaattccttcattatakccttctaaaaggtcgtacctagttttaaaaggattggtcaagatggtttgtagacaagttttttcatttcgttttgttttgtttcataaaggatatgttt

SEQ ID NO: 494840 - DNA, 201 bp, Homo sapiens
gtctggggaggtagacaattattaaaccatgtagagtaaaatagagtacatagaagtacttatgattacagaagagtgtggagtagacttgtatgacacasctggtaggggaagagaagagaggatgtttccaggaaggctgctagggtgatgagacatcagaactgactttcaaaaattaaattgggtaatgtcagaacc

SEQ ID NO: 494841 - DNA, 201 bp, Homo sapiens
gaatctaaggtttcccgaaacctgaatggaaataaaaatttagcagttgcaatctataattactaaaagaggtcagtagtaatttgaaaactactttctcygttctcataatgaacctacatgttcatgatacaggtcgcacaaagaattgcacagctacaggaagctttgttgcattgtgggaagtttcaagatgccttg

SEQ ID NO: 494842 - DNA, 201 bp, Homo sapiens
gagaattactaccagctagaagagctggcttttaggtgaggaacaagggactcaaatggagggcttgcttgcttactgctgaggctcatggatcaagagtwgagcaagagtcaggcacttaatcttttaacctggacatttgaggtcagtgtctcaatggggatactacaggtctcttgggcaggaatgttttgtcagtag

SEQ ID NO: 494843 - DNA, 201 bp, Homo sapiens
gcttttgttgctttagaatatctatatgggaagcaaataataatctgaaggttgtcaggtgaacatgcagtcagagcagagaggtggtgagtagaggaatratttgtaggatgggcttattagctggcatcatcaaagtagaatagtctgatttcttctgtagaaatgtacctgtcaagggcataagatcctatgtccctt

SEQ ID NO: 494844 - DNA, 201 bp, Homo sapiens
gagatggagtctcgctctgtcacccaggctggagtgcagtagtgcagtctcggctcaccgcaacctctgcctcccgggttcacgccattctcctgcctcakcctcccaagtagctgggactacaggcgcctgccactacgcctggctaattttttgtatttttagtagagacggggtttcaccgtgttagccaggatggtc

SEQ ID NO: 494845 - DNA, 201 bp, Homo sapiens
ccacagcactggcttagtgatgtgaaggacaagaattcagtgttttcagtcctggatgaggaaattgccaaggccaaggtagtggcagagcagatgagtcrtctgacaccagagcgaaatctggatttggagcgctatcaggaaaaaggctcccagctgcaggagcgttggcaccgagtcattgcccagctcgagattcgg

SEQ ID NO: 494846 - DNA, 201 bp, Homo sapiens
tggatgggagttggaaaggaaaattaagattgatctgcagacaagctgttgtatcgtaaacgcaaaacttcctaattatttgcttaattaaatggagggayttttttacccatttgtggtttggccctgtcctcagcagtctggttattagaggtctgtttgctcagctgaatcaaaatgaggctcttgaaggactcagaa

SEQ ID NO: 494847 - DNA, 201 bp, Homo sapiens
gcttgtgtcacatttattaatgtgcctttggttaaagccagacatgtggctgtgcctggcttcaaggtgaggagaaatagactccacctcttgatgggagkagctgtaaaatattatgaccttttttttcttttttcaatctgtcagaacatgaaagagtgtactgctggccgggcaccatggctcacacctgtagtctta

SEQ ID NO: 494848 - DNA, 201 bp, Homo sapiens
agctaaaaccacgcagtccagaccatgtgttaaagaacaccatttctgtcaaggctgtctgtgactacaggcagatcgaggtgaggaggtagaaagggtayctctgggccacagggggaaggaagaaagaagggaagccttcagttagggttatgatgataaaagatcaaattacagcgtttttaaaattagaatttaaac

SEQ ID NO: 494849 - DNA, 201 bp, Homo sapiens
tggttcagaggaggactgcacacgcccagtaaactatcactatagtatagtatagtatttttcccccaggtaaggaatctttcactcactgtgaataactyagcaaaaattaagttaacattttagtaaagactgttttcttggtaatgtgtggcaacctggaggagtagtgttggcatagtgctatgttaatgtgacttc

SEQ ID NO: 494850 - DNA, 201 bp, Homo sapiens
tagatggtggcgtttcatgtgccttgctggacttttacagacccgatctagtagacatggagagggtgcaaatccaaagtaaccgagagaatctggaacargcttttgaagtggcagaaagactgggggtcactcgcctgctggatgcagaaggtgagagggagtttactgaacttgagtaaggaacacgtattcagtatt

SEQ ID NO: 494851 - DNA, 201 bp, Homo sapiens
gtgagccaccactccaggcctaaagtttctttttaagtgagacattctccaattgaaaaaaacctgctcattatattacatttcttaaatgtagaaaaatwgatggtagaaaataaaaatcaattttggactcattatctagagataacagttgttacattgacatacttttttctagtttttggtgctatttttcttttc

SEQ ID NO: 494852 - DNA, 201 bp, Homo sapiens
attgagatggagaagcttaatcaccagggtgaactgatgttaaagaaagctactgatgagacggacagagacattatacgagaaccactgacagaactcaracacctctgggagaacctgggtgagaaaattgcccaccgacaggtaaggcaggtggtagatgacatcagtgaactactctccgctcttttctaatttcgt

SEQ ID NO: 494853 - DNA, 201 bp, Homo sapiens
ggctcatcaagccacagtggaaacagtcaacaaagctggcaatgagcttcttgaatccagtgctggagatgatgccagcagcttaaggagccgtttggaarccatgaaccaatgctgggagtcagtgttacagaaaacagaggagagggagcagcagcttcagtcaactctgcagcaggtacatgtgacatccaagtaagg

SEQ ID NO: 494854 - DNA, 201 bp, Homo sapiens
aacagaaagcctatctaagtcagagagaagagatcaatttgaaaagcaaagaatcccttatgtcttgaggggaaggttaatactgtgctgtaacttatctrgaaagagcagcttttgattgggtagttcttttctgaattcatttctagctcagtctctttattcacattcaaagttagcagatcttcactataacagatt

SEQ ID NO: 494855 - DNA, 201 bp, Homo sapiens
cttttcttgtaggaactctattcccagctgaaagccaaggaagagacttataatcaactacttgacaagggcagactcatgcttctaagccgtgacgactstgggtctggctccaagacagaacagagtgtagcacttttggagcagaagtggcatgtggtcagcagtaagatggaagaaagaaaggtacagtgtatgatc

SEQ ID NO: 494856 - DNA, 201 bp, Homo sapiens
aagattttttgaagaccagggtattgtaacagaagttgcagaactgattccatctgtgttgagttgcattgatggtataagtttctgttgttatttgcttytataattattcattccttacctgttaagacattactgccattatcgcttcgtgatgggctttatgtcctatattaatcaccaatttgtgttctacttaaa

SEQ ID NO: 494857 - DNA, 201 bp, Homo sapiens
ctttatgtcctatattaatcaccaatttgtgttctacttaaaaacaaggttttgctggagttggtatcttggggttgagagattggggacagggcatatakggactgacgaataattctccacaaggaatttggttcctaacgtaaatgtagtgtgcaaggaaatttactagaaatcaggagagaagtaaattatatgacc

SEQ ID NO: 494858 - DNA, 201 bp, Homo sapiens
agttggtatcttggggttgagagattggggacagggcatatagggactgacgaataattctccacaaggaatttggttcctaacgtaaatgtagtgtgcamggaaatttactagaaatcaggagagaagtaaattatatgacctcttcccactcatcctcaaaaatcaaattctcttctctacaaaataatgaaagatgac

SEQ ID NO: 494859 - DNA, 201 bp, Homo sapiens
cttggggttgagagattggggacagggcatatagggactgacgaataattctccacaaggaatttggttcctaacgtaaatgtagtgtgcaaggaaatttwctagaaatcaggagagaagtaaattatatgacctcttcccactcatcctcaaaaatcaaattctcttctctacaaaataatgaaagatgactagggatca

SEQ ID NO: 494860 - DNA, 201 bp, Homo sapiens
taactattgtattcttactgaggattttttttttttcatttctaggggaaattagtaaaacaaaaggtatttgaagacattttgaaatttttatttggaayataaaactttgattttgggaattatcaaaatatatgacctaggatactttaagagaaatctttgttttcctggacttttaatttgcttttcaactaagca

SEQ ID NO: 494861 - DNA, 201 bp, Homo sapiens
tgttttagaaataaaacatggactagtggcttgtctgatagtagtgcagtttgcattccagctcctaccaagaaacattggattcttgtgcctcaagacartgttgccttcagtcttggaaagccttagccagggaaacaagggatgcacaagaagtcaatggctatgaatgagctgctgttttgaggttcatttcacttc

SEQ ID NO: 494862 - DNA, 201 bp, Homo sapiens
atctttatttttacaagaaatgtccaggaggagtttaagtcaggacagttggtaaaaagtacatattcctattcctccccaaacccccaaacatcttgctrtctgtatactcagtcctctgactaactgaaaaatatcagaaagaacttagtgaggaagagtattattatggggagaaaaaaagcaaatggcttttttttt

SEQ ID NO: 494863 - DNA, 201 bp, Homo sapiens
gtgaaaatctcaggaactttcagcagtgggtggactgtgaggctgcctgagttccagttttcttctcagaacaaagaatatcccgatcgggaagattgcaytacagaaaaaggcaaaaagaccactgtagaaacagaagattcttctgtagagaaccctgaacaggatctgtttgtagaacaaaaagagagaaatccaaac

SEQ ID NO: 494864 - DNA, 201 bp, Homo sapiens
aaaagcaacataatttctaggcaaatttttcatgaaaaggggaaatagattattggagtcttttgagggatctctaatccttaaaaaatgtttttcttggycgagcgcagtggctcacgcctgtaatcccagcactttgggaggccgaggtgggtggatcatgaggtcaggagatcaagaccatcctggctaacatggtga

SEQ ID NO: 494865 - DNA, 201 bp, Homo sapiens
cccaagctagttttatctatctattgaaatggtaagcttttttgagagaactgttttatagacatttctattattcccacggtgcctcgctcatgcctagmcaagtttaaatgctccttacagagcacttataaaatgtggtgaccaaagccaatcactctttcattcgacaaatgtgtatgagcacctaccatgtgtgct

SEQ ID NO: 494866 - DNA, 201 bp, Homo sapiens
aaaccttctagcatgggattgggtaatttgattatattaagaatggctaaaggacctaagtgtatgctaattcttggacagagtcagacctggtggctcaygcctgtaattccagcacttgggaggctgatgcaggaggattgcttaacaccaggagtttgagaccagcctgggcaatatagcaagaccccatctctacaa

SEQ ID NO: 494867 - DNA, 201 bp, Homo sapiens
gggactacaggcgcccgccaccgcacccagctaattttttgtatttttagtagagatggggttttatcgtggtctcgatctcctgacctcgtgatccgccygcctcggcctcccaaagtgctgggattacaggcgtgagccaccgtgcctggcctattttgtatttttagtagagatggggtttcaccatgttggccaggc

SEQ ID NO: 494868 - DNA, 201 bp, Homo sapiens
ggaatctcttttcctttttgtatcaggccaggataataggatagaggagaggccagatctgtagagaatgagcaagtggcttgtttagggtttcctgcccytgtgaggtaagggctcaaggattagattcagtctttccatttgcagtgaaaggaagtaaactcactttcccaccctcatcctggaggttacttatgttat

SEQ ID NO: 494869 - DNA, 201 bp, Homo sapiens
aggtgtagtggcacacgcctgtagtcctagctacttgggaggctgaagtaggaggctcacttgagcctggagggttgaggctgcagtgagcagtgatggtgcccctgcattctagcctgggtgacatcaataacctatctccaaaaaaaagagaaaacaatccttggacaggctgtcatccatagatcctgcagaaggcaa

SEQ ID NO: 494870 - DNA, 201 bp, Homo sapiens
ggatccccccgggggctggggatgtctcataacttttagttccagtaataaatgggaagaaaagaaatttactgtaggtcaagtactgagccaagtacttyatggacattatctcattaaccttgtctacaatcccagtaagtaggtggtagtatgcacattttacaagtaaggaaactgaaccatctaataaactagtta

SEQ ID NO: 494871 - DNA, 201 bp, Homo sapiens
aagcttgttgtgagggaagtggggaatcagtctgctccctgctctgctcaaattattgtgctaaggagactttgccatggtatgatttttgaggcacgtgrtgattctgtctgatttgtaaactgacaacgtgatcagggccaaagaggaagttcagctaggccaaaccttcctaagaagaagtcactgtcccacagttat

SEQ ID NO: 494872 - DNA, 201 bp, Homo sapiens
agaaccctagagttaatttatctagaatgcatttagaaaggcagtgtcttgggtgaatagagcagcaacctgtaaattgagtcatttcagaagcaatacarcattgtggttaagattataggctttggagtgcctaagttcaaattcttattcttctactaactagctctataaccttgggaagtcatttaatctctctgg

SEQ ID NO: 494873 - DNA, 201 bp, Homo sapiens
gggtcacacaactgatacagagctaggagttgaactgattccagatcactaccaaaactatcatcttttacttagagtggtatatgaggtgattaacacasaccttgggttgttagggtgtgcctgtgtgtcactgggctataagatgcctaaagggtatctctacctgtcccctgtgctacccttaatccattctagagg

SEQ ID NO: 494874 - DNA, 201 bp, Homo sapiens
catacctctgtgtgtcctattctttgttgtcatctccaccagagaaagtcattcttgtgtaaacccctcaccttcccacatcttttagaatgaaaatgccrtaaataactatacaggcttttagaggtctgcgttaacacatggaggaaaaagaaaacattgaaatttatcccccctcagtgtaaactaacagtgctgcta

SEQ ID NO: 494875 - DNA, 201 bp, Homo sapiens
ggggttacgtttctcctcccctgattcttcccttggggtgggctgtctgcatgtgcagtgacctgctagcacttgggaggggtcgcatgtgcagtgtgttkactaaagttgtatacatgctcacttgaggcgtttttcccttaccagtcgagcgtttttagaggaagttcatataccagtttaaactctgccactttgcct

SEQ ID NO: 494876 - DNA, 201 bp, Homo sapiens
tctgcctgccacagcctgtttttattgaccatcatttgagccagggtcccactggtccccattatacctggttcagaaagctctctcgcatgaacccagtkgtcagtgaaggtgcacattagactaaactgaatggaggaaagctcaggtgggccatcttcataatatatccttaagaggcaaatactatttttaaccata

SEQ ID NO: 494877 - DNA, 201 bp, Homo sapiens
taagtatggtgggtttcattcccttatggctcagcacttgaactgaatccaaaagaatggcttgtaatcaagatgagcccttcctggactttcccagactstgctacagaatctatatgtaggtgtcttccagagaattcgtagaattgatatctttcctgccttttcttgtaggaactctattcccagctgaaagccaag

SEQ ID NO: 494878 - DNA, 201 bp, Homo sapiens
aagcttctgcatctttttcatcttcagcactatcatctcctaaagtccagacatacagtaaactagaagcagttctaaaatttccactttatctttgcccscttgcctgacgtcatttgtccattccagatctgccccccctttcctcattcagaggcctgtgatgtctggagttcctccttttcctcacatctagccact

SEQ ID NO: 494879 - DNA, 201 bp, Homo sapiens
gggagagagagaaagaggaggagatagcaggctccttttaaacagccagttctcatgtgaactaacagcaagaactcactcattaccatggggagggcacsaaggccattcatgaggaatttgcccccataactcaatcacatcccgttagaccccacctccagcattggaaatcacatttcaacatgagatttggagggg

SEQ ID NO: 494880 - DNA, 201 bp, Homo sapiens
aaaaattaagcaaaaagtacacatgtactaagagagagaaaagaggggttttgatttaacttcagaggtttacgaactgttgcatctgctttacctcaagyagtcagtgtgcttaccccagggacagtggcaaagcaagacgctagcagcagagtgggctggtcctttatacacagagacttgcttattatacagttaaca

SEQ ID NO: 494881 - DNA, 201 bp, Homo sapiens
tcccccaaagccctggtagtcttataagaggacagagcaaaaatggttctgctgtcatagggctcctctgacaccttttgctggcagcagtcaacctaatsaagtggtatctccattctaggaaggaaactgccttataggtagatgagttggaaggtgagaatgaaggacacctaggtgatatacagacaaggttgtagt

SEQ ID NO: 494882 - DNA, 201 bp, Homo sapiens
atcttgccaggaacagttggatgaattccggaagctggtcaggaccttccagaaatggttgaaagaaactgaagggagtattccacctacggaaacttctrtgagtgctaaagagttagaaaagcagattgaacacctgaaggtaggtgaacaaagggactccaagaattgggctaggcactggtttgaatacttgtatta

SEQ ID NO: 494883 - DNA, 201 bp, Homo sapiens
gctaatacctaatacctagcactggcaggagtatatcacactgatggtgaaggtggaagtattccccttcctgtatcctgaccagcagacttggactcccwagagacatagcacacaggggaaatttaaaccaattgcacagtctttatttctgtctttatttcacagagcatctagggtgaatccttaccttccttccta

SEQ ID NO: 494884 - DNA, 201 bp, Homo sapiens
ctttgcccccataagagtaaaaatacaatatttaactctttttcctattttttgtgtttaacagacatttatggaggagatgactcgcaaacagcctgacrtggaccgggtcaccaagacatacaaaaggaaaaacatagagcctactcacgcgcctttcatagagaaatcccgcagcggaggcagtatgtttccagcccc

SEQ ID NO: 494885 - DNA, 201 bp, Homo sapiens
ttgaacgtttgtttagaggagacaagactgttttgtaattcctagccactctccagtggattgaagttgtcctacatatttatcagattttttaattgggytttttaatacaaaaaataattagctgggcatggtggcaggagactgtaatcccagctgctcgagatgctgaggcaggagaatcgcttgaacccaggaggc

SEQ ID NO: 494886 - DNA, 201 bp, Homo sapiens
accatgctgcttggacacttatgcaacctgatttaaaacactgattctaccaaaattcctcaaattccttaagggacatatggggtagcacagatgagaargtggacaaaatttcctgccaccttctagatttatggtttctgaccagttaaacatctgttatagaaaagaatgacaaatattttgttcataatgattccc

SEQ ID NO: 494887 - DNA, 201 bp, Homo sapiens
ttttgtaattcctagccactctccagtggattgaagttgtcctacatatttatcagattttttaattgggctttttaatacaaaaaataattagctgggcrtggtggcaggagactgtaatcccagctgctcgagatgctgaggcaggagaatcgcttgaacccaggaggcggaagttgcagtgagccaagataccgccat

SEQ ID NO: 494888 - DNA, 201 bp, Homo sapiens
tttttctcactttcactttagcctagagtaagattgaagacctctttccccagaaatgtccaaacaagggcaatatattcctgagtttggtacgcttcaaygttatatgcggttgttcagccaaacctgctatggaaaagattatgagaaagaaaggccatgttaggtaactgatgtctggagtcacagaatgaactactc

SEQ ID NO: 494889 - DNA, 201 bp, Homo sapiens
cagagctttcccaacatttttgtttcacagtgcccatggtgttttaagaaatttgtcatggcacctcaaggccaaaaaaaacagaaacaaaaaaaaactcmtaatacttctacttgctaagaagttaggtccaaacaacttagtagttgttcatatggtgttcaacagatgtcactgtattttcctcaaaaatgtaaaata

SEQ ID NO: 494890 - DNA, 201 bp, Homo sapiens
gtggtatttttgtcttagagcaaatgccattgtttcctgacggatttctgtggtagttggatctttgatttcaaacccaatataaagtttccttaataaaygcaaagtatagcctatgattctatgtatttttctgtatctcaatatctagctccttatttatcctctagttaccatttctttttttatctttatatgcat

SEQ ID NO: 494891 - DNA, 201 bp, Homo sapiens
cctttttggccgtaggtttccttggtttcaaaattgtagggtatacagactggtgctagactgagagacatcaattctctgtaaaatgaaaaaagataaagaaaatgtagtgtgtctttcataaagctaaacttaaagaattgtcttttattctgaaattgtctctcctactttctaatgttaaaatatcctttattttat

SEQ ID NO: 494892 - DNA, 201 bp, Homo sapiens
ctagaaacttgaaagtgatgtaataagaaattattgtttcaaagttaaatcactaagaatatttaatgagggcttttacacatagaaaacacttaagactracattgaggacaaaaactgtccaactgacttgaagtgttaagaattctattattacacaattctgccacaatgagaactgtgtagatgtacagagagcaa

SEQ ID NO: 494893 - DNA, 201 bp, Homo sapiens
ggagacacagtattgtaaattgaaggtgagtttctgccgattctcttacattctgctcatagagtctggttccccccaatcaactctcttccgtaattcaraaatctcctggtttggccctgttttggttttctgcttattaggttatatcatttactatgcacttattcatatctattataacattttcccaattttcta

SEQ ID NO: 494894 - DNA, 201 bp, Homo sapiens
gctgagcctataattcctgaaattggcgctttttctttctgtgtgtgtgtgttttacttgaaattcagtcaaagctggaagaggccctcaacttggcaacmgaattccagaattccctacaagaatttatcaactggctcactctagcagagcagagtttaaacatcgcttctccaccaagcctgattctaaatactgtcc

SEQ ID NO: 494895 - DNA, 201 bp, Homo sapiens
ttgggggtcgggggacaaagaggacaactcaagtggaagacgtgggttctaggtccacctctactgccactttgcttgacctcagcctctgtgagtacttmagtgtctctgtaacatagggatgctaattacagtcagctgcattattgcacattctgtgaactgtgcagtgcatagggaacatatcaccattatggcatt

SEQ ID NO: 494896 - DNA, 201 bp, Homo sapiens
agaaccaagttagatgatatccatagagataaattatgttgttcaacatgttttaggtcctaaaaaatgatgttttggctcatcaagccacagtggaaacmgtcaacaaagctggcaatgagcttcttgaatccagtgctggagatgatgccagcagcttaaggagccgtttggaagccatgaaccaatgctgggagtcag

SEQ ID NO: 494897 - DNA, 201 bp, Homo sapiens
tcttactttgctcccttcacttttgttgttcccatgtttagcattttaaggtatacatctgagtatataatgccaaaaccagaaagcagattaatgagaaygcttttgttttgtgtatataaatgggaacttttgtatgatttagcaggaagataatctctaattcactagaaggagtaagagagatgcaagtaatttagg

SEQ ID NO: 494898 - DNA, 201 bp, Homo sapiens
tctggtgtgcaagagagccggtcacacagcgagagagtgagccccactggccactgactcctcactttaacacagcttggtgcttctgttcttcatccccrtgaaataatgagcacttctcaatggaagcacttagtgagttcatgaaggttgcgagatccattccttgaaactgttgagagactcttgttttcagaggct

SEQ ID NO: 494899 - DNA, 201 bp, Homo sapiens
caagatggtttgtagacaagttttttcatttcgttttgttttgtttcataaaggatatgtttaagcacagtttcctcagaaatattcataaactgactgarctactcatcctaaacatttgaagcataaatggcaggtttctggagacttttttttaatcagaagaaaaatgacaggcaaaacttgataggcaaagattcc

SEQ ID NO: 494900 - DNA, 201 bp, Homo sapiens
aggatccagatagggccagagcatgagcctgaattgggaagaaaattagaaattccactcaaaaagtcagaagtttggctttcttgggcaagtcaaactgrtaatctactgtgatcaagaaccaaagagaggccaggaacagtgcctcacacctgtaatctcagcactttgggaatctgagacaggaggattgcttgaagc

SEQ ID NO: 494901 - DNA, 201 bp, Homo sapiens
ttaaattgctttaatattctatatatagtaggtgttggcagtcacaaatttaactttgtggtttcagtcatgaaaattcatggatttgcatttgtttctgstgtgcaagagagccggtcacacagcgagagagtgagccccactggccactgactcctcactttaacacagcttggtgcttctgttcttcatccccgtgaa

SEQ ID NO: 494902 - DNA, 201 bp, Homo sapiens
tgcttcaactcaattttagtataaatatgacctaatcatttgttcagctgaagaaacttttctgctggtgacactgcaattagcaaatacttcgggttaaytcctgaaaacctgatgcagaaaatcagattttcttctaagcttgtaatgatgctttgcaaaggtttccttaaggcttgaaatagtattcactattttcca

SEQ ID NO: 494903 - DNA, 201 bp, Homo sapiens
cagtgaatgtatcttcaggtctctggtttttgtgtgtttttttttttttttttttttttttggagacagagtcttgctctgtagcccaggttggagtgcartggggcgatctaggctcactgaaacctccacctccggggtccaagtgatcctcctgcctcagcctcccaagtagctggggttacagtcgctcaccaccac

SEQ ID NO: 494904 - DNA, 201 bp, Homo sapiens
attatttcttccttaaatgaatgtggaatactaaaatacattattcctaggaaaggctttccctcagttgcttctgaatgattagtaggtcctcactggcwgaccagattctatcacatgggagtggaagagagttcctttccactcaaaccaggcagagatctcaggcttcctgagttaggatctttaccaggttcagct

SEQ ID NO: 494905 - DNA, 201 bp, Homo sapiens
aaaagaaacatttatttaactacttttctaggaactgggtacaagtagcagtgaagaaaacagcgaaagttcttgctctcatggaacttatctttcagtarggagaataggtaataaatgtatgccatcaagcagtggtaaatgcaatggcaggattagaaagtggcagaggtttgtggtactttggacagggtggtcaga

SEQ ID NO: 494906 - DNA, 201 bp, Homo sapiens
agtagtttgtatttaagttttaagataggagatatttcagagctgtcacttcacatctgacaaagttcctagggggatgaaggtacctttggaaacaattrtatctattgactgaccacttgcccacaaagagatggtcattgtgagcctgagtggctcccaggctagagaggcctggggaaactgtgttgaagccccaac

SEQ ID NO: 494907 - DNA, 201 bp, Homo sapiens
tgaaactcacttttcttacattgacagacagtagctgtactccatattctttggtatgattggtatgaaattacgaggtggttaagcttattttttaacartggcctttccattgttttggttatcagccctagctgtttacatttggcttgtactaatttaatcaacacaacagcttctacagaatatgttgctttttta

SEQ ID NO: 494908 - DNA, 201 bp, Homo sapiens
caggtcctgaagcggtcaggccgagagctgattgagaatagtcgagatgacaccacttgggtaaaaggacagctccaggaactgagcactcgctgggacaytgtctgtaaactctctgtttccaaacaaagccggcttgagcaggccttaaaacaagtaagggatatttgctgtcccaacccaagggatagatctgagtgg

SEQ ID NO: 494909 - DNA, 201 bp, Homo sapiens
aaaaaggtttcaggtggagcagatcggagagaataaataccgggtaaggaagagaaaaagcagtcctttgttgtggtggtttctcatatgtggctgatccyaccttttcctcctgatgcttagaggcccagagcccatcggacttgagatgtggtcactctctgacctcatctctatagatgccaagtgtcaggtaccctg

SEQ ID NO: 494910 - DNA, 201 bp, Homo sapiens
ttgtgaggatggatccagaatttgaccaaaatacttgacccctttgagtagagaagtacttggagaagagtctacatgaggccttttcttagctaatgccmtgctaagaaggctgatggtgatgggagtagataatatctagattcaaaaggtccaaatgcaccacaatcttagtttgacataattaactctcttagcatt

SEQ ID NO: 494911 - DNA, 201 bp, Homo sapiens
agtaaaatctgtctctctgatatgaaattataaacactagttgttgatttcaggccctcaaacatcccaggccttgcaagtcactatagaaatgttctagrcaagtgggaagaacaggggataagagaaaaaaactaaagatgagaacaaactggctttaaaaaaacatcattgcttgagagtgtccaatatgcctatttg

SEQ ID NO: 494912 - DNA, 201 bp, Homo sapiens
ctcatctctatagatgccaagtgtcaggtaccctgttacatctgaaaactagtcccatatctacctagatagtagtagtttgtatttaagttttaagatargagatatttcagagctgtcacttcacatctgacaaagttcctagggggatgaaggtacctttggaaacaattatatctattgactgaccacttgcccaca

SEQ ID NO: 494913 - DNA, 201 bp, Homo sapiens
gacagagagaatgaaaacagacaactttttgcctcctttaaaccttattttggtcagatgttcaggtgatatatatactacattctgttttgatttgtgtyaaataaggagaacattagaagatttgattctactgttgctactcaccaggtgattggacaaatctttctttaagccttctgactgaactttctcttttat

SEQ ID NO: 494914 - DNA, 201 bp, Homo sapiens
gaaagcttgcctataggtatctgatttaattattttgaatagtcaatgggctaaccaaggagaagatgaggggatcaaatatctgatgtttaaattaaacyagtattcatctctttactttaaatttggtctcttaaaggtctcgcattttgtttcatttgtagtgccacagtttcaggattaatggtattctttcctttc

SEQ ID NO: 494915 - DNA, 201 bp, Homo sapiens
aggatcacttgagcatgggagatcaaaggtgtggtaagctgtgatcatgccactacactccagcctgggcaacagagcaagacttgtcttaaaaaataaamacaaatgtttaaaaggggagtaaaatgtaatgtttaaaatggtgtatacccatcatgctttctgccttgttaagaactaccacattgaaactgccaaatt

SEQ ID NO: 494916 - DNA, 201 bp, Homo sapiens
attattttgaatagtcaatgggctaaccaaggagaagatgaggggatcaaatatctgatgtttaaattaaactagtattcatctctttactttaaatttgrtctcttaaaggtctcgcattttgtttcatttgtagtgccacagtttcaggattaatggtattctttcctttcaggctttaaatgaagaaattgttaatag

SEQ ID NO: 494917 - DNA, 201 bp, Homo sapiens
ggcttacatctgtagctctagcactttgggaggccaacacgggaggatcactggagcccaggagttcgagaccagcctgggcaacatagtatgattctgtstgtcccccccgccaaaaaaaaaaaaaaattagccaggtgtggtggcaagtgcttgtagccccagctactcaggagactgaggtggaaggatcacttgagc

SEQ ID NO: 494918 - DNA, 201 bp, Homo sapiens
tatctcacatctggttatagatgatgatttctcctctccttcagtatcttgaatgccaacatgcactgaaaggtgctggaaacatctagaaacacttgacrctgaactcagattttaataattcagaagtggcttcttttatccagtggaaagtttattttatttcccatttgcccttagtatgggataggtgaaatcatt

SEQ ID NO: 494919 - DNA, 201 bp, Homo sapiens
taggagtttcagaagactcttggtggcaagcagcctgtgtatgataccacaattagaactggcagagcactgaaagaaaagactttgcttcccgaagatastcagaaacttgacaatttcctaggagaagtcagagacaaatgggatactgtttgtggcaagtctgtggagcggtgagcatgaatgtccccttcaggggtc

SEQ ID NO: 494920 - DNA, 201 bp, Homo sapiens
acaggcttttagaggtctgcgttaacacatggaggaaaaagaaaacattgaaatttatcccccctcagtgtaaactaacagtgctgctaatgtagactttktacgtttttgttttcaaatcttttttgtttaggaattcatgaagaaagtagaagaaaagcgagtggacgttaactcagcagtagccatgggagaagtcat

SEQ ID NO: 494921 - DNA, 201 bp, Homo sapiens
aggcagaggctgaagataccatgggatgattttaaaaattcgaagaacagtttattcctagctttatacattgctttataagcctgtttctttttttttttaatttattaatttattttaaaatagacacagggtctcactatgttgcccactctggtatcaaactcctgggctaaagcgatcctcctacctctgcctccc

SEQ ID NO: 494922 - DNA, 201 bp, Homo sapiens
tcagctctctacttagaaatatttgtctttgccatctctgtatatctgaaatcctaatgagtaaatgtgattccctccataaagccttctctgatacctcytgccttccttcttcccacccttctgtcaggtcttttctaacttgcaaagccccatgattttgtcatcaccatggttttggtgaccattagtctaaaaaga

SEQ ID NO: 494923 - DNA, 201 bp, Homo sapiens
aattattaagagttatgtccagtggggcacaaagggtggttctggggtgctggtaatgttctgcttcttaatctgaatgctgactaaatggaggaattcarattataaaaatcaacatgtttacgattatggtttatgcactgttttgtatatatgttacttcagtaaaatggaggaaaagaggaagtgttacatttttat

SEQ ID NO: 494924 - DNA, 201 bp, Homo sapiens
accatgggtagcacagcatctggcatgtaggtgtgtgattgtgtgggtgattgaagttataattcaccaatggctaaagaacttttactgggatgttggcstctgcagcagaagaaataaaaacattaggacttcaaagtgcaaaatttataaaatgaggtagggcactttccttgcctagatgggggccactgatactgt

SEQ ID NO: 494925 - DNA, 201 bp, Homo sapiens
gagcacaaggtaagtatgatattatgatgctgcattctttttgaaagcactaattgaaagaaatgcccctttatcttatcttaagctaaaaaagagcactrttgttccctcaggtttttgctaatgaagtaaatgctcatcgagaccagatcattgagctggatcaaactgggaatcaattaaagttccttagccaaaagc

SEQ ID NO: 494926 - DNA, 201 bp, Homo sapiens
ctgggactggacactgatcggctgggctcttgcagagtgtgttcatcaacagtggactggtgttgacaaggcaagcctggaagaagagtgggagaagggaraagggtggtggagtgtcctgtgtgtagtccattgtcaagtcagtaggtagttaccataaaatgatcagtatccaccctcaagttggggatgcaaatcaaa

SEQ ID NO: 494927 - DNA, 201 bp, Homo sapiens
tggtggcttacatctgtagctctagcactttgggaggccaacacgggaggatcactggagcccaggagttcgagaccagcctgggcaacatagtatgattstgtctgtcccccccgccaaaaaaaaaaaaaaattagccaggtgtggtggcaagtgcttgtagccccagctactcaggagactgaggtggaaggatcactt

SEQ ID NO: 494928 - DNA, 201 bp, Homo sapiens
ggagcaaaaaactgtattacaggtgaattacatttatttatttgccatattgttcctgtttttatcatggtgaattagaagcacaattgtgaaatgatggkttaaggctttttccctcctggacttttcttatgattgttattaaagtccagcttgatgttctggggaattcagaatcttaaccctgtgtccacaaatgtt

SEQ ID NO: 494929 - DNA, 201 bp, Homo sapiens
tcatactcttaatgtggcagaagtaccattctcttctgacccttttttccttttagacatgtctaaatcgtaatggagcttaactgtagtagagcaaaatrtacacgttgcttgttacacctattcacattgttttaaaattctgttgcaccatggtaaacgtggataatacagtatcatttttgagcagttttttaaatg

SEQ ID NO: 494930 - DNA, 201 bp, Homo sapiens
ggcctttttagaagtctgcctgccacagcctgtttttattgaccatcatttgagccagggtcccactggtccccattatacctggttcagaaagctctctygcatgaacccagtggtcagtgaaggtgcacattagactaaactgaatggaggaaagctcaggtgggccatcttcataatatatccttaagaggcaaatac

SEQ ID NO: 494931 - DNA, 201 bp, Homo sapiens
aagaccagcctggccaacatggtgaaaccctgtctctaccaaaaaatacaaaattagctgggtgtggtggcgcatgcctgtagtccccgttacttgagagrctgaggtgagagaatcacttgaacctgggaggcagaggttgcagtgagctgagattatgtcactgcactccagcctgggcaacagtgtgagaccctgtct

SEQ ID NO: 494932 - DNA, 201 bp, Homo sapiens
atttaagggttgaaatggactgggcatggtggcttacatctgtagctctagcactttgggaggccaacacgggaggatcactggagcccaggagttcgagmccagcctgggcaacatagtatgattctgtctgtcccccccgccaaaaaaaaaaaaaaattagccaggtgtggtggcaagtgcttgtagccccagctactc

SEQ ID NO: 494933 - DNA, 201 bp, Homo sapiens
ctttgcagggcagcatactcatcctggttcactcgtcctgtgtttgggatggactcatctcactcttgagcatgctgcctggaatctagggaaatggtctmccagtgtagcatttaagggttgaaatggactgggcatggtggcttacatctgtagctctagcactttgggaggccaacacgggaggatcactggagccca

SEQ ID NO: 494934 - DNA, 201 bp, Homo sapiens
ctaagaaaatgggcttggcatcaactgtctacacggggttcctactccaccacttaacaacaaaaccaactggggacattgcttaacctttctctagctcrgttacctcattttttatttttctttttttcatatcaccgtaaaataaaatcacttgtatagggagaatgaatgaagattagcagtggattttcatgttat

SEQ ID NO: 494935 - DNA, 201 bp, Homo sapiens
gactaatagctaagaaaatgggcttggcatcaactgtctacacggggttcctactccaccacttaacaacaaaaccaactggggacattgcttaacctttytctagctcggttacctcattttttatttttctttttttcatatcaccgtaaaataaaatcacttgtatagggagaatgaatgaagattagcagtggattt

SEQ ID NO: 494936 - DNA, 201 bp, Homo sapiens
agagagtcagctccaagaggtaactgggaaacatctcagttttgctccgggcactatttcctttgccatctataccagaagctgtggtgaatgggaaagcyattgctttctgaagtgcccttaggcctttctcagtgactcttaagttttaagaatcatttgggtgagcataatgctgaaatcctgtagctatgaaagctg

SEQ ID NO: 494937 - DNA, 201 bp, Homo sapiens
gcaaatgcttacataaaataaaggcagtggttgggatgccttggacaagatctgagtgctaaacacttgcttctaatatttatggctatggttaaacttasaattattctgtaaagctgttcagtagctccggattcctagaatcatctttgattacttagatgtttttcttttgtttttttcatggacaagcagcagttg

SEQ ID NO: 494938 - DNA, 201 bp, Homo sapiens
ccgagatgagagcaccagaaatgtgggaattttactattgtgagcttaagagcataaggaccaagaagatggaaattacagagagaggaaggaaaataaaagggagaagacaagcctctaaagccccaattaaagtaagccattatttttcacttgagtttagaccttcttaatgaggcctcatggaagcgtgcaggagct

SEQ ID NO: 494939 - DNA, 201 bp, Homo sapiens
cgaggaggtgagtccctggttcagaggaggactgcacacgcccagtaaactatcactatagtatagtatagtatttttcccccaggtaaggaatctttcaytcactgtgaataactcagcaaaaattaagttaacattttagtaaagactgttttcttggtaatgtgtggcaacctggaggagtagtgttggcatagtgct

SEQ ID NO: 494940 - DNA, 201 bp, Homo sapiens
tgcccatgaagatggagaaggtatcaggaaaaggacataattgggctgggcatagtggctcacgtgtacaatcccaacactttgggaggcctagtagggargatcacttcaggccaagaatttaagaccagcctgggcaacatagcaagaccccatctctgttttaaaataaaatacaggccgggtgcagcagctcatgcc

SEQ ID NO: 494941 - DNA, 201 bp, Homo sapiens
caaacaccaacttgagatctttgatgctctgggttctcaagcctgtagcaacaagaacctggagaagctaagagctcaacaggaagtgctgcaggccctakagcctcaggtagactatctgaggaactttactcagggtctggtagaagatgccccagatggatctgatgcttctcaacttctccaccaagctgaggtcgc

SEQ ID NO: 494942 - DNA, 201 bp, Homo sapiens
gcttctcggggccagtttatttacagagttgagataagccttcggaaaccgcccccggggcagtcggcgcgctcagagcgccagttacatgatttgccctrttatccggccccagctggaagaaggcgagacaaggcgctggcctggagaccggccgccgtggggagttgctggggaggaggaggaggaggagttgggcgc

SEQ ID NO: 494943 - DNA, 201 bp, Homo sapiens
cagtccgggccgggcgggggtcggcagcccctgggggacccgtgtgggcagcccgggcccagccggccgcagcctggggccgaggactcgccgggacccgraggcggcggggagagggggcggggaacgggccgggcctggcgctcctgacaggaggagccgccgccgccgcccgccgctgcagccgcgccggggcgggct

SEQ ID NO: 494944 - DNA, 201 bp, Homo sapiens
agaaaaagaaagagagagagagagagagagagaaagagagagagaaagaaaagaaaagaaagacgaaatagttaatgagtgccctatatgtgccagatcakttgctaggtgctaaggatcctgtggtgaattagacgacaaacagtctcagccctcagggagcttacgatttagtaaggatgagagacactgtaccataac

SEQ ID NO: 494945 - DNA, 201 bp, Homo sapiens
tgagccgagattgcaccactgcactccagcctgggcgacagagcaagaccttgtctcaaaaaaaaaaaaaaaaaaaaaaaaaaatctataaccgccaaccraacaagtacccctcttaatgtttcaaaatatgattccttttctccagagttccccaccaccaagttagagatgactgctgtggctgacattttcgaccga

SEQ ID NO: 494946 - DNA, 201 bp, Homo sapiens
gccaggagttcgagaacagcctaggcaacatagtaagaccccatctctgagaaaataaaaagaaaaaaaaaaaaacagaatatctccagtataaagcttayatagcagtaatcatgaaatataaggattaaatttatagtgaggcaatcaaatctgcataaaggggaaaaagtcatagaaatcctgtatcagtctctggaa

SEQ ID NO: 494947 - DNA, 201 bp, Homo sapiens
tcacacctggattccttgcactttgtagaagctgtgatattctagctaaacagtctttctgaagctggccaggagcttggctcacacctgtaattccagcwctttgggaggcaggtggcaaaggcatggtggcacacttgcagtcctagctacttgggaggctgaggtgaatcacctgagcctggggaggtcaaggcctgc

SEQ ID NO: 494948 - DNA, 201 bp, Homo sapiens
ctgacgtcatttgtccattccagatctgccccccctttcctcattcagaggcctgtgatgtctggagttcctccttttcctcacatctagccactcaccakggcttgtcagtcccactttcaaaatacctcttggttccatctttcctgccctggctctggccctcaccatgttttgcctcagttgctgcaatggtttctt

SEQ ID NO: 494949 - DNA, 201 bp, Homo sapiens
agggctcttagagatcggttgacctgatcgcctctggtgagcctgaggaaactgaggccagagcaggaaaaaaatcacagttggcagcagagcttggactrtaactcagaggttttggtatccaagtgagtgcttttaacctgatactttgatatgttctgtcaacatataatatattgagaagaatttggatttgattta

SEQ ID NO: 494950 - DNA, 201 bp, Homo sapiens
ctccccactaccgcccctcccccagccccaggtagatctggagttgattaatagttttagtaaactgactcacactgatcacatttgcttgagattggtckatgtgaatttgttaatttacaaaataaattttaactgccaagtgattcaagaatttgaattggccacttactgcttttgttgctttagaatatctatatg

SEQ ID NO: 494951 - DNA, 201 bp, Homo sapiens
acgatgggtttgccaggatgtaacttcatcgtaagtcgaggagcacctgtccttcctgtgggatgtacctcctctctgagagattatcttcttcctattcwgttcttctcctttctgttttcctctctctcctctatgtcttcagtctctccctgtttattcttttctctaaagcttccagacatgtccttccaacccaga

SEQ ID NO: 494952 - DNA, 201 bp, Homo sapiens
cttcaactgcaatgcaatttcaaagttttcctcttatatcttttttttttttttcctggcagagtttgctcagaagtgaatttttttttttttttttttttgagatggggtctcactctgtcacccaggctggagtgcagtggcacgatctcggctcactgcagcctccgcctcctgggttcaagtgattctcctgcctca

SEQ ID NO: 494953 - DNA, 201 bp, Homo sapiens
gagattacaggcatgagccaccgcgtccagccgtgatttccttttgtaaatttcttccatggctactagttgcctctagagtttgatgtcacctaactctktcctgatgtagagcactttgcagcgtttccaacccacctgtctagcttcatttctaagcactctgttttttgtagcttgcgctatagccacatgagacaa

SEQ ID NO: 494954 - DNA, 201 bp, Homo sapiens
gaactgattccagatcactaccaaaactatcatcttttacttagagtggtatatgaggtgattaacacagaccttgggttgttagggtgtgcctgtgtgtyactgggctataagatgcctaaagggtatctctacctgtcccctgtgctacccttaatccattctagagggtggtttgatttaaaatgtctcaccatctct

SEQ ID NO: 494955 - DNA, 201 bp, Homo sapiens
aattgcttgaacgccggggtcggaggttgcagtgagccatgatcgcgccactgcactccagcctgggcaacagagcgagactctcaaaaaaaaaaaaaaaattaaaaccacatccctgtggcaggagcttggtaagaatatgttcagtgtgtgtcactttgccagaaaaatgtaatgatatgattttcattctttagtgtt

SEQ ID NO: 494956 - DNA, 201 bp, Homo sapiens
gcttgcctctctatcccctgcccctacacacccccacccaacaaccacagaaagcatattgtctaaagctctgtatactttactgttttttttttttttttacaattttccacattaatatgtgttcataatatgaaaagaaattattcaaaaatataaatcagttggcttccctggtggtctagtggctaggattcggca

SEQ ID NO: 494957 - DNA, 201 bp, Homo sapiens
ttttcattttttaaaaagcaaagtagagacaaggtcaaataatggatgtttaaaacatttaaggatcagcctggtcaacatggcaaaaccccatctctacwaaaaatacagaattagctgggtgtggtggcaggcgcctgttgtcccagctacatgggaggctgaggcaggagatcacttgaacctgggaggcagaggttg

SEQ ID NO: 494958 - DNA, 201 bp, Homo sapiens
gccttggatgaatttttagtgaaaaatgatccctgccgaggtaaggaaccattctaagcatgaattacgtgttaggtatgcccccagcagtgatcttttaygcttacaggaagcattgatggtggggtctgtctgttttttattttgttaagctgcccaggtgtcatcccactagcacagattagaactcaggggtgccag

SEQ ID NO: 494959 - DNA, 201 bp, Homo sapiens
aacatcacataatcaggaccctccctgtccttggcattgatattcaaagatgactgaagatgtggtcccttctgcatggaactcagtctagtggagaggayagaagggagaaaaggccgggtgtagtggctcacacctgtaatctcagcatttcgggaggccgaggcaggagaatcattagagctaaggagttcaagacca

SEQ ID NO: 494960 - DNA, 201 bp, Homo sapiens
acgaggccctcgctactggacttgaccagctcttcttcctgacacgaatccctgcactctttcatctctgtggtgcttgctgtcacagctgattcatctartccagtgttttcaggggtttctaactcggattcaccaaaattggagagaaataagagatgcctgaaactagattaataactttataacaatcttgagaat

SEQ ID NO: 494961 - DNA, 201 bp, Homo sapiens
aacaggcactgagctataacggaaagttagagaaaggcttatgtgggctcaggtaatcaggaaaggactttagagggaatgagctccaagtgaggagacarcagtggggcctggaaggcaggagggagagttggagctctttctagtgggcaacgaggagtccttggaggaagtccttctcaaaacctttgggcctgcagc

SEQ ID NO: 494962 - DNA, 201 bp, Homo sapiens
aactggacccccagagggatgcatcttgcaggatgaaaccaccacactttaattttcttctctgcaagatgctggtaaaccctcctcctcttttaagtgcygcctcctctgtccttaatgcccccagtggtatccaaagcttcctcctccgctctcacagtcatacttttctctcctccatgttcccttgttcaatgtagc

SEQ ID NO: 494963 - DNA, 201 bp, Homo sapiens
aaataatacagccaccccctccactgtgtcatctctcacctggaccttccaatgagcatttaatagctcttcctctcttagtcttgccaccatcctccacrtgactaatagagtatttttttctaaaatacaaacctcaagaacacatattctattttatgaaatgaagtgctgcctgtacaacacttcattaaaaataca

SEQ ID NO: 494964 - DNA, 201 bp, Homo sapiens
aaactgacagttatgttgagcatctgctattgatggggtataaatcacatttgcaaagtttggtaagttctgttctgttttctattttggcttatattctrttcgtttacatgtagactattaaggaagagacagatggtctgcatgaagagctggagtttattcggatccttggagcagatttgatttttgcctgtggag

SEQ ID NO: 494965 - DNA, 201 bp, Homo sapiens
tcatgactttctaaatcctactcttttttcactttttggctatattagacaatgctgctgagaacatggttaagaatgatttgacttctgttatttccttrtaatgaaatccttggagagtacagttttacttgtatcgccttccaaaagtgttctacatgctgacctttcacacgacgtgaaggctggggctacctcctg

SEQ ID NO: 494966 - DNA, 201 bp, Homo sapiens
atttaaggtaccaagcgtataagattaccaatcactggccatatcctccccattcttttcaaataggtatgttggttggttgaaagaatttaccaaagtarattggagagaagcaataaagctaaatgattaagaacttttaaatgcaaatatgtgtttctgaaaaccagagctaggcataatgtttatgaaaaatagaga

SEQ ID NO: 494967 - DNA, 201 bp, Homo sapiens
ggtaagagaggtcccccagcaggctggacgctgtgggtgtgagggaggaatgggccagggcacagcagctgtgtggggagccgaggggtcctcaccagggyctctgacaaagcagccatcatctgatttgttattattattcttggaaagacgttgaaataacattaacgaaaaactcaaaagaggaaaatctgccacccc

SEQ ID NO: 494968 - DNA, 201 bp, Homo sapiens
aagggtctaaagagtaaagtgagatttgcagggctgacctggtggtgatgagaaatggcacagatagttcttttgttctttttgggtctcccgggcttatrgtttgtagtctttctgttcagtttttggggaaaatatactttaattttgtctggtgaaagactttataatttcatgcttcgttttttattcagataagcc

SEQ ID NO: 494969 - DNA, 201 bp, Homo sapiens
tccctgggctcccaggccctcctgcagcagcccccgcctgggccatgtcttcctcagatgaagagacgctcagtgagcggtcatgtcggagtgagcggtcwtgtcggagtgagcgatcttacaggagcgagcggtcggggagcctgtctccctgtcccccaggggacaccttgccctggaacctgccactgcatgagcaga

SEQ ID NO: 494970 - DNA, 201 bp, Homo sapiens
gggatttttttttaccaggcccgtcaccaagaattgctgtcccagcagcaaaatttcattctggccacccagtcagctcaggccttcttggatcagcatgsccacaatctcacacctgaggagcaacagatgctgcaacagaagctgggagagctaaaggaacaatactctacttccctggcccaatcagaggcagaactg

SEQ ID NO: 494971 - DNA, 201 bp, Homo sapiens
ctgacaccagagcgaaatctggatttggagcgctatcaggaaaaaggctcccagctgcaggagcgttggcaccgagtcattgcccagctcgagattcggtsagtggtggccccacctttttctcctattagagttcagggactaggtcttaaacaaaaacagagttatatctgtacatttatatttaaaggtggaaatgga

SEQ ID NO: 494972 - DNA, 201 bp, Homo sapiens
cattccttgaacaaacaaattctcctattttcttttctaggttttccagaaggaactgggaaagcgaacaggaaccgttcaggtcctgaagcggtcaggcmgagagctgattgagaatagtcgagatgacaccacttgggtaaaaggacagctccaggaactgagcactcgctgggacactgtctgtaaactctctgtttc

SEQ ID NO: 494973 - DNA, 201 bp, Homo sapiens
gtcctccccagaggagactgctccagctgttgcagcagccatcacacaggagggtatgtcagctgtcgcagggttctccccagagtgggctgctttagctrttacagtacccatcacagaggaggatggtacaccagaagggcctgtcaccccagctaccacagtgcatgctccagaggagcctgatactgcagctgtcag

SEQ ID NO: 494974 - DNA, 201 bp, Homo sapiens
ctaaggtcactcagctaccctgttggcagagctgaggtttaaaccatggcagtttggttctaaaagttgtacttttatctatttgtacccactatgccatrctaaatattacaatattgctaccctatttgtacttttttttgtttgtttgtttgagacagagtctcactctgtcacccaggctggagtgcagtggcgcga

SEQ ID NO: 494975 - DNA, 201 bp, Homo sapiens
gaggtgggtatggtattgagcacaacatattcaagaaccgaaagaaagctagttcgactggactgcaaaaaacaagaggaaaattagggaaagttgaagtwggaggggtaagtgggacctgtatcacactggaccccgcaggccacattaaggataaggagtgatacccaagagagtataagggcccatcaggcctcgact

SEQ ID NO: 494976 - DNA, 201 bp, Homo sapiens
attcggcattagtggtcaaacagtattctgtgtttgcgagatgcgtagtggtacacaagacatttggggacctcagagagcctggtcgaaacacgtacagrcctggtcttagggggtgctttgtgtaatgctcccaggcctggcttctactgtaaggaattcttgtgtggtcctttagtcctggaaataaaagagaaaggg

SEQ ID NO: 494977 - DNA, 201 bp, Homo sapiens
agaagcatgggtaggagtgagccaggccaaaggagagtgatgaagggttataatctgggaggaaagtcggttggatggccctgaggcgagataacacattrgaggcgctgaaagaaatagaaagtggcagggctttagggataggggtatttgatgaggctttaattgggaggacaccaaggataaagggcattaatttcc

SEQ ID NO: 494978 - DNA, 201 bp, Homo sapiens
atgctgaaactcttggaaagctggagacacagtattgtaaattgaaggtgagtttctgccgattctcttacattctgctcatagagtctggttccccccartcaactctcttccgtaattcagaaatctcctggtttggccctgttttggttttctgcttattaggttatatcatttactatgcacttattcatatctatt

SEQ ID NO: 494979 - DNA, 201 bp, Homo sapiens
gaagggtaaaaaaaaaaaaaaaaaatatatatatatatatatatatatatgttaagtctctgatgataacaagagattttcctcattttgaaattccctaygtaggttttacttgaactgagatcattctgaatcttaaaccaacccctcctttgccccctgctccccgcaagaaccatgtgacttctcactcagaaagta

SEQ ID NO: 494980 - DNA, 201 bp, Homo sapiens
tcttaaaaaaaaaaaggtcccatcgttgctcactccattttttcccaagcatctacctgttggtcagcttgcctctctatcccctgcccctacacaccccsacccaacaaccacagaaagcatattgtctaaagctctgtatactttactgttttttttttttttttacaattttccacattaatatgtgttcataatatg

SEQ ID NO: 494981 - DNA, 201 bp, Homo sapiens
aagacagaaaaagctcaggtgtcagctcatcctctttcttggatgaccttggcaaaataacttgaatttctggagcctcaagtgcttgatttataaaatgrggtaataatatatagttcccagggatattacagggatcaaatgaaataacagatgtaaagatgctttatagtagctgcttaataaattttagtttccctt

SEQ ID NO: 494982 - DNA, 201 bp, Homo sapiens
tttcagtggtccttgtaataaactgtcactaatgcagtagggtgtaatcagctttgctaagctctgcacagtaaaattgttctttcttagttaatattccrgtgttctaatgttttgagcagaaggcatccttactttgtattcccatagttcttcagtgatgcacgagagctggagtcattcttgaggaacctccaagat

SEQ ID NO: 494983 - DNA, 201 bp, Homo sapiens
aagaagggtggggagagttttgtttatgtattgtaacacaggagagacttgagcatgtttattttaagtgctgttttgaaagagccagtagagaaggaagrtataatacaattcaaagacggggagaaaaattgatggagcatgggctctagagtcaaaagttgtgtcttttagaaagatcagagggttaaaaataagaat

SEQ ID NO: 494984 - DNA, 201 bp, Homo sapiens
aattcaaagacggggagaaaaattgatggagcatgggctctagagtcaaaagttgtgtcttttagaaagatcagagggttaaaaataagaatgcaggtgaytaagttggttggttagaggtgtaggaacttgagggaatttctcctgatgctcatactctctctatgaagtaggaggtgaagttatttgctgagagtcagg

SEQ ID NO: 494985 - DNA, 201 bp, Homo sapiens
tcctcacttgtggtctttaatccccatctcattatctgacatggatagtggaggattcactcactctccatgagtgaactccaggcctagcttcttcattrgtcttaacaggttagctttactactctccccagggcagttgagctttgctttccatgaaggttatgtagttaatttgtactaggcttgtgaagacctggg

SEQ ID NO: 494986 - DNA, 201 bp, Homo sapiens
gggtgtttacaagactggacagagaggctgttgtggaaaatgcagcctccttcttgtttattttggcaggcaggcaatgaaggagatagatttgttctcakgactcagagccctacctgctttaccttaacaggttcaatataaccaccacctttcagatgtgatagtgtccttcagagtttatctgacctttatatctaa

SEQ ID NO: 494987 - DNA, 201 bp, Homo sapiens
tcctaaagataaaagctctaataaaatttcagtcagcaagtagagattcatccccatagatgtactgataaatggagttccacatatactctcattgatasccactttttttttttttttaatattatgcataccacacacacacggtctcgctctgtcacccaggctggagtacagtagtgcgatcatggctcactgcac

SEQ ID NO: 494988 - DNA, 201 bp, Homo sapiens
caccacacccagctaattttgtatttttagtagaggcggggtttcaccatgttggccaggctggtctcgaactcttgagctcaggtgatccacctgcttcrgcctcccaaagtgttaggattataggcgtgagccaccatgcccggcccattgtcagatttcatttaatatccctgttttcactgagacacctggctcctg

SEQ ID NO: 494989 - DNA, 201 bp, Homo sapiens
agatgatgccaggaagcgggcaaaacaagtaagttggggaagaaagatactaattcactgaagagtcttgggctgcatgtattgagtctctgggatgattstcaaacgtgctgtatagtgtgtatattcattcctgttaacttatttcttatgtaattttagttccatgaagcttggaaaaaactgattgactggctagaa

SEQ ID NO: 494990 - DNA, 201 bp, Homo sapiens
actcatcctcaaaaatcaaattctcttctctacaaaataatgaaagatgactagggatcaaggtgtttgcccaaaaagattattttttatgagtacagagwttcactgtattttttgctgctcagatcaagtatgaaatatatacatacacaaacctgttgaccacattcactcaatgaatagttattgagcaagtgtgtg

SEQ ID NO: 494991 - DNA, 201 bp, Homo sapiens
cgtcgcgcgctccctggcttccagggggctgcccgggcggggcggcgcagcgcggcggcgcggggaagggggaggagagccgcccgccagccgagcacttycagcgagctagcgagctagcgggtcgcgctgcgcgggggaggaggactcgccccccgcccgaccctagcggagccttttgttcccagccagaagtttgca

SEQ ID NO: 494992 - DNA, 201 bp, Homo sapiens
aggaaatttactagaaatcaggagagaagtaaattatatgacctcttcccactcatcctcaaaaatcaaattctcttctctacaaaataatgaaagatgaytagggatcaaggtgtttgcccaaaaagattattttttatgagtacagagtttcactgtattttttgctgctcagatcaagtatgaaatatatacatacac

SEQ ID NO: 494993 - DNA, 201 bp, Homo sapiens
gcttgtaatcaagatgagcccttcctggactttcccagactctgctacagaatctatatgtaggtgtcttccagagaattcgtagaattgatatctttccygccttttcttgtaggaactctattcccagctgaaagccaaggaagagacttataatcaactacttgacaagggcagactcatgcttctaagccgtgacga

SEQ ID NO: 494994 - DNA, 201 bp, Homo sapiens
acagggtttcaccatgttagtcaggatggtctcaatctcctgacctcatgatttgcccgcctcggcctcccaaagtgctgggattacaggcgtgagccacygtgcccggccacttcatactcttaatgtggcagaagtaccattctcttctgacccttttttccttttagacatgtctaaatcgtaatggagcttaactgt

SEQ ID NO: 494995 - DNA, 201 bp, Homo sapiens
tcaccatgttggccaggctggtctcgaactcctgacctcaggtgatccacctgcctcagccccccaaagtgctgggattacaggcgtgagccactgcgccyggcaatcgtaactcttaagtttaagcaaggctactgtattccgcagttccaaggggcactatttacatgtgttcaatgatagtggttcaaatttgatatt

SEQ ID NO: 494996 - DNA, 201 bp, Homo sapiens
ggcaggaggattgcttgagcctaagaggcagaggtgtcagtgagccaagattgtgccaccgcactccagcctgggtgatagagtaagacgctgcctctaartaaataaatagaaaaaaaatttcacgtcatttggggtgaactttcaaggtagatttcagtaggtggagttgggggatgggacattctaggcaaagcctca

SEQ ID NO: 494997 - DNA, 201 bp, Homo sapiens
gcggtttcaccatattggtcaggctggcctcgaactcctgacctcaggtgatctgcccgccctggcctcccaaagtgctgggattacaggcatgagccacygcacctggcctaagaatttctttataaagcatcagttaacacataaaataatgcagcatgaaccaaaggtgaagaaaagctgggaataaactttctagag

SEQ ID NO: 494998 - DNA, 201 bp, Homo sapiens
acactggggagtggaagtatgtctccactaatttggagaatctttgatcttgtttcactccctggtttggcttgtccagtgcaatttgtctctcaacctgmaagaggtgtgtgtgtgtgtgtgtgtgtgtgtgtgtgtgtacttgggtgtcccttgcctgtggcttcacctgttgccatgaatggttgacttcagggcatg

SEQ ID NO: 494999 - DNA, 201 bp, Homo sapiens
cagagaccagatcatcttcagctccaactaagatggcagagagctgccacctgtggccctttgatgccaggtaatttctctctgatatcctttctagtcaygcaggacctttttgccatattatctatacatatggggcaggatcctaacaggacctttgctctctagtggtaacctgtcactgaaatgggaggctccagt

SEQ ID NO: 495000 - DNA, 201 bp, Homo sapiens
tttctgtttctttaaaatttagtatcttctatttatttttttctgttcccaatgtgcaccctttttgttcctttttcaattgttcctgtccttccctttgratttccgtttcacagacttcacttcagttctctcgctgttatgacaaaccctggttggtaaacagtaaagctggcacccctatcagggacagccattctc

SEQ ID NO: 495001 - DNA, 201 bp, Homo sapiens
tcacttgagcctgggaggttgaggcagcagtgagccatgttcatgccactgtactgtagcctgggtgacaaagtgaaaccctgtctcaaaaaaaaaaaaawtcatcaagggaatgagttccatttttgttataggggcctgtgccccaggactgccctgatgctggtgaactgcttcacgtgactctgatctcaactgaga

SEQ ID NO: 495002 - DNA, 201 bp, Homo sapiens
gggacagtggcaaagcaagacgctagcagcagagtgggctggtcctttatacacagagacttgcttattatacagttaacatatctgctatgggtaggaaycttgacaaggctgatgtgtcatgaatttatctctatttttgaagaacccacagatggtactaaacccatataacttatataactgttatcatggggtcaa

SEQ ID NO: 495003 - DNA, 201 bp, Homo sapiens
tttgggcctatttccttattataaaaatggagggattatcaaactcaaaagcaattaaacaaaaaaagacaaaaaatgaaaaaagagtaaaacacaaaaayggagggattagatgagatttgtaaagtctgttcagtgattcattcaacatatagtgatttcaagcaaagattggaagaaaattttatctagggaattggt

SEQ ID NO: 495004 - DNA, 201 bp, Homo sapiens
tcattccctggatcaaacagcatacaatactgatgtcagataaaacttttccccaaaaccctgttgaactaaaggtaaagtcaaggacttaaatttttttkgtaaaatctttctagggagtaagtctccaagcttatcactgctggcttctaggtgaggtggtatgaaaaattgggtcctatagtttgtgtccatttattc

SEQ ID NO: 495005 - DNA, 201 bp, Homo sapiens
tttacttgttttcacaaaaccctgtcaacatctaaaaatggtgacattgattttggttattatgttttatgaacctctctatagcactccaggtatataamcctggctcctaaaattcatgtgttaatgaaggaatgtgtatttgtccccacaggttaaagacagttgatgttatagtacgtagcatacaggatgctgaac

SEQ ID NO: 495006 - DNA, 201 bp, Homo sapiens
taaagctggatttctgcatttgggagattaaggtaaaagcttctgcatagcccagagcacagtactgtgcacacatatcatgtgtgagtatacagaaagarattgatgaaagccaaatttaattactgagatggttgtgatgataatcccatttttctcatccagtttccagtctaggtaatggccctaatccaaacaggt

SEQ ID NO: 495007 - DNA, 201 bp, Homo sapiens
tcctcgttagtagtggggagaatagttcttaccttgcagggatattgtgaggtttgaataagataatacgtattagcacctagcatatgtgaaacatacartggatactcaatatccgtgagttgtcttttcttccttccattcattcgggagatgcttagggaagcagatataccagattcaaaaggatttagaccctcg

SEQ ID NO: 495008 - DNA, 201 bp, Homo sapiens
gcccccaccacgcccagctatataccagtgttcttgccacaacccttcgagtctctacaattttaggtgaatagtcagataacactggggcctagaaatgrtaagaaagaggttggttggtgtattatcttctgggctcagccttttcagtttacaagtatccctctcccagttttcctttttaattatagggagagttgt

SEQ ID NO: 495009 - DNA, 201 bp, Homo sapiens
gtagtcacattaaacattgaaatggtactgagactgccttggtggggagttttggcctatgggaatgatgtgggttttggtttctactcctttctctgttwtcagataaatcctcctacatgtcccattctctggctctgggaagtactgacagtagggaaaagttagtacactcatctcattgttcagatcaagtttcct

SEQ ID NO: 495010 - DNA, 201 bp, Homo sapiens
ttgtgtgttgactttgtctctctgggttttgcttgcaagacctattttgataggagtctgatgaatgatggacctactgaaccctatacagagggtccagrcctggcagaattctaggaaaaaaaaattgcctcctagtctaatttttctcagtgataaactactctgtgtgcttacagtttgtctatcttgcttctctcc

SEQ ID NO: 495011 - DNA, 201 bp, Homo sapiens
gcctcagcctccaatcctctccaccgctccctccactctcggagtcgctcctctccccggccccgcccccgccgggccccgcccccgccctcgtcctcctycctgtgctctccgcgtcgcgcgctccctggcttccagggggctgcccgggcggggcggcgcagcgcggcggcgcggggaagggggaggagagccgcccgc

SEQ ID NO: 495012 - DNA, 201 bp, Homo sapiens
gactacaggtgcccgccaccatgcccgtctaattttttgtatttttagtagagacagggtttcaccatgttagtcaggatggtctcaatctcctgacctcrtgatttgcccgcctcggcctcccaaagtgctgggattacaggcgtgagccactgtgcccggccacttcatactcttaatgtggcagaagtaccattctct

SEQ ID NO: 495013 - DNA, 201 bp, Homo sapiens
atggaagaaaaaggaagggaaataaatccaggctagtgaaatatagctggttctatccctctgataactgagagaaacccaatttttttttttttttttttgagatggagtcttgctctgttgcccaggctggagtgcagtggctcagtctcggctcactgcaagctctacctcccgggttcactccattctcctgcctca

SEQ ID NO: 495014 - DNA, 201 bp, Homo sapiens
tttggagcgctatcaggaaaaaggctcccagctgcaggagcgttggcaccgagtcattgcccagctcgagattcggtgagtggtggccccacctttttctyctattagagttcagggactaggtcttaaacaaaaacagagttatatctgtacatttatatttaaaggtggaaatggatagggaggggtggaaatttaaaa

SEQ ID NO: 495015 - DNA, 201 bp, Homo sapiens
tgaggtgggaggatcatttgagccagggagatggaggctgcagtgacccatgatcgcaccactgcagctgtgatcatcatcatccagcctgggtgacacartgagaccctgtctcaaaaaaaaaaaaaaaaaattgcaggaaagattgagtcttgctttgggaggaaaaagaaacaggtgaaaggagggcaggagggcaga

SEQ ID NO: 495016 - DNA, 201 bp, Homo sapiens
cgatgggaaagggccactgaggttactgtggctcggcaaaggcagctagaggaatctgcaagtcatctggcctgcttccaggctgcagaatcccagctccrgccgtggctgatggagaaagaactgatgatgggagtgctggggcccctgtctattgaccccaacatgttgaatgcacaaaagcaacaggtccaggtgagc

SEQ ID NO: 495017 - DNA, 201 bp, Homo sapiens
cccttcaggaatcttcacgagttgttatcctggaagctccctgaatcttaggcctttcatggagacttccttgggtaggcatgattgacaaccatgcagamatgtgattgggcaaaaagggtatgtctaacactaacagtgtggaaacccagcaaagcctggctgttcagattctgcttgaattttctatgtagtattcct

SEQ ID NO: 495018 - DNA, 201 bp, Homo sapiens
tcatcagagaccctgttcatctgttgtatttagaagtggtattctttttaccaagcactcatttactgtactcaaaaccaacttccagatttttcctgtckgtgtcattggctggcagaattaacagatctttcttttcttttataggaaaaaggagggaaataaatgctccagaaggctagatctttaaagtctgtgttc

SEQ ID NO: 495019 - DNA, 201 bp, Homo sapiens
ctgggcctccgaaagtgctgggattacaggtgtgagccaccgcgcctggcaagttcctgtttttccattctcttactcaacaatcaacacaagaagacttytgtgacgccaagatatgtggggacttctccccgccagcaagttaaacaatagttctgcagtggacaccagcggggtgtcctccagttcaattacaacact

SEQ ID NO: 495020 - DNA, 201 bp, Homo sapiens
atgcctgcattagtatgtaagcttaacaatggcagggatttttgtctcttgttcttttctttgcctggcatagaataggcagtcagtaaatatttattaartgaatggattgtttcatgaatttgatcttctcaaagctttggagtaggtagaccaaataaataggctgtaatgtctgttttcttatgcccatttctcaga

SEQ ID NO: 495021 - DNA, 201 bp, Homo sapiens
ttgccatggtatgatttttgaggcacgtgatgattctgtctgatttgtaaactgacaacgtgatcagggccaaagaggaagttcagctaggccaaaccttmctaagaagaagtcactgtcccacagttatgtgggtaagttgttctagagaaacagagatgtgggcagggcagcagcgtgggaacctgttacctgggtagc

SEQ ID NO: 495022 - DNA, 201 bp, Homo sapiens
gcatgaactgagctacgttgcaagtccaaagagttttgaggaagttctggaagggaaggcacttctactcctgcccctccctggcttagagcaatgatagyatttcttctggggctgggaaaagaaataggaattagccaggacaacctgaagagacagggcacttcccggtggtttgcatctattcttgctctcctttct

SEQ ID NO: 495023 - DNA, 201 bp, Homo sapiens
gcgatttcagctcactgcaagctccacctcccaggttcatgccattcttctgcctcagcctcccgagtagctggggctacaggcgcccgccaccacaccckgctaattttttgtatttttagtagagatggggtttcaccgtgttagccaggatggtcttgatcttctgacctcatgatccgcccacctcagcctcccaaa

SEQ ID NO: 495024 - DNA, 201 bp, Homo sapiens
acaaatatccctagggctactttgctctaggctcagactgcacttcagagcccagctcctgcctatgaagaccgttagaatgcagcatgaactgagctacrttgcaagtccaaagagttttgaggaagttctggaagggaaggcacttctactcctgcccctccctggcttagagcaatgatagtatttcttctggggctg

SEQ ID NO: 495025 - DNA, 201 bp, Homo sapiens
gctggagtgcaatggcaccatctcggcttaccaaaacctctgcctcccaggttcaagcgattctcctgcctcagcctcccaagtagctgggattacaggcrtgtgccaccacgctcagctaatttttttattattagtagagacagggttgttggccaggctggtctcgagctcctgacctcaggtgatccacctgcctca

SEQ ID NO: 495026 - DNA, 201 bp, Homo sapiens
ttccaggaatctgggtggtagttatttcaatcaagttgagaaatgggatcaccgagagggggatttccgcagaatctgggctgtcagggaaatctttaggytgtcagggaaatctttattccccattgtcttctccttacaaattccaggagaggagtatgaggttatatttgtgtcctcagtaagcccataaaggtcagc

SEQ ID NO: 495027 - DNA, 201 bp, Homo sapiens
gccaggcatggcagtgcgtgcctgtaatcccaactactcgggaggctgaggtgaggcaggagaatcacttgaaccggggaggcggaggtcgctgtgagcckagatcgtgccactgcactgaagcctgggtgatagagtgagactccgtctcaaaaaaataaaaataaaaataaaaataaataaataaaataaaataaaata

SEQ ID NO: 495028 - DNA, 201 bp, Homo sapiens
tttggattttttcacttgtttcttgagcatatgtaacttctcatttcctatggttaaaaatcagctatctgtatttttttttttttttttttttttgaggkggagtctcactccatctcccaggctggtgtacggtggcatgatcttggctcactgcaacttccacctcctagatttaagctattcttgtgcttcagcctc

SEQ ID NO: 495029 - DNA, 201 bp, Homo sapiens
ggagagctttgtatgctataaagggatatacaggtcgggcatggtggctcgcactcgtaatcccaacactttgggaggctgagatgggaggatcgcttgarcccaggagttctagaccagcctgggcaacataatgagacccccatctctacagaaatgttaaaaaattagctgggcatggtgatatgcacctgtaccctt

SEQ ID NO: 495030 - DNA, 201 bp, Homo sapiens
tcctaacctttgaaaacctttaagtgtttgtggagatactgataggatatcatctcttcaccaaaaaccatccagatatctctttgacagttattctcacsatgttttttccccatagttgacttagaaaagcagagagggtaggaggctaaggagaattgaagatgtgtttcatcataagaagtgttcaatgtaaccatc

SEQ ID NO: 495031 - DNA, 201 bp, Homo sapiens
agcagtttctcttgttgacccaaagaaaggatcagatttaaactcttctttgctcctgcaacctgagtctttttcaggtgggagaagttcctggaaagagsacatgtagtttttttggtttagtccttatcattttttggaatgttgctataggtcttagacaactattcccccaattctgggctgccaggcagagagtta

SEQ ID NO: 495032 - DNA, 201 bp, Homo sapiens
atgttctcatttcttgatgaaatgagaaattagttataatcctttttatatctgcatgtttttgcattactttttctttattttctagatactaatatttyagaaacagtagattcatgtttaaaggtttttttgaattaggtgtatttttcttcctagagctctagtctatatagacgcctctcattttccaatctattg

SEQ ID NO: 495033 - DNA, 201 bp, Homo sapiens
gctgccagaatcctactcgttatccaaggtttagttcagacaccgttcacttcgtagccttttgtctaagatcaggtatagttctatcacgccttccatgracacctcctacctctctgtgaggattaatcaactctatgcttgtgctatagtgtcattttgtgcagcttgtgtctggtgtgttatttgcttggtgttatt

SEQ ID NO: 495034 - DNA, 201 bp, Homo sapiens
tttgtagagacagagttttgtcatattgcccaggctggtcttgaactcctgagctcaagtgatccacacaccttaacctctgaaagtgcagggattatagrcatgagccaccatgcccagcctacttgtgctttttttaagtttggaatcctttgactcctttttgggctgccagaatcctactcgttatccaaggtttag

SEQ ID NO: 495035 - DNA, 201 bp, Homo sapiens
tctttactgcttggtcaagttttctataactttcataggcttcagttttttcatttgtaagaaaggggatgatagaatttactttacaagatgttgtgggkattaaatgagatagtgaatataacatctgatgcagactaggagcctgatagatgttagcgatactgtttctaaaggcgggaactgtgtctcatttatcct

SEQ ID NO: 495036 - DNA, 201 bp, Homo sapiens
gctggcggatcacgaggtcaggagatccaggccatcctggccaacatggtgaaaccccatctttactaaaaatacaaaaattagccgagtgtggtggtgcrtgcctgtagtcccagctcctcaggaggctaaggcaggagaatcgcttgaatccaagaggcggaggctgcagtgagctgagatcataggtgagcctgggtg

SEQ ID NO: 495037 - DNA, 201 bp, Homo sapiens
gctgtttgtctgctttgttgggtctttttcttcttctgactcttaactgtggcagttttctaaggggtaaggcagtgtagtgaagtgggaagaacatgggytttggatccaggcagggctgggttcaaatatatgttttttgtgtgtgtgcgtgtgtgtggagaacggtctcgctatattgcccaggcaggtctcgaactc

SEQ ID NO: 495038 - DNA, 201 bp, Homo sapiens
agttttttcatctgtaaaatggggataataatatcttccatataaaattatgaggattaaacagagtagtataagtaaattttcttattgcctgattgatyggttgatcgtagagatgggggtctctgtgtgttgtacaggctggtctgaaactcctgggctcaagtgatccatccccttggcctcctaaagtgctgggat

SEQ ID NO: 495039 - DNA, 201 bp, Homo sapiens
attacaggtgtgagccactgtgcccagcccaaactcagtattttcaaaccaagcttaaatttggcttttctatcctagtccccattttttgacagttgaaytcacattcttccagtctctgagattagaaaccttgcagacatctgttaactcttttctcttcatcaaccccattttcaatctgtcattgagttcttttgt

SEQ ID NO: 495040 - DNA, 201 bp, Homo sapiens
gtatttctaactgttctaacatagaagtcactctctatatagggttcaagcaatattccctttcagcgaggcagaattgtgggccatttgtaaaaggaatmcctaaaaatggtagcgtttgtgtgcatttctcaggcagcacaagttggaggaagccctgctcttttcgggtcagttcatggatgctttgcaggcattggt

SEQ ID NO: 495041 - DNA, 201 bp, Homo sapiens
ctattccttcaagtttcacttcaggtctttcttctgatgaagacttctctgattatcgtagtccaagttgatgtatcactttcccaagctagttttatctrtctattgaaatggtaagcttttttgagagaactgttttatagacatttctattattcccacggtgcctcgctcatgcctagccaagtttaaatgctcctt

SEQ ID NO: 495042 - DNA, 201 bp, Homo sapiens
cttcggcgcctcagcctccaatcctctccaccgctccctccactctcggagtcgctcctctccccggccccgcccccgccgggccccgcccccgccctcgycctcctccctgtgctctccgcgtcgcgcgctccctggcttccagggggctgcccgggcggggcggcgcagcgcggcggcgcggggaagggggaggagagc

SEQ ID NO: 495043 - DNA, 201 bp, Homo sapiens
gctcctcacttcccagtaggggcagccgggcagaggtgcccctcacctcccggacggggcggctggcctggcggggggctgacccccccacctccctcccrgacggggcggctggccgggcggggggctgacccccccacctccctcccggacggggcggctggccgggcggggggctgacccccccacctccctcccgga

SEQ ID NO: 495044 - DNA, 201 bp, Homo sapiens
acaaatagcaaatttttcttttttcttttttttttttttttttgagacggagtctcgctctgtcgcccaggccggactgcggactgcagtggcgcaatctyggctcactgcaagctccgcttcccgggttcacgccattctcctgcctcagcctcccgagtagctgggactacaggcgcccgccaccgcgcccggctaatt

SEQ ID NO: 495045 - DNA, 201 bp, Homo sapiens
tacaggtgtgagccactgcttctggcctttaatgaatttttttttttttttttttttaagacagaatcttactctgccacccaggcgggagtgcagtggcrcaatctcagctcactgcagcctctgcctcccgagttcaagcgattctcctgcgtcagcctcccgagtagctgggattacatgcgtgcaccaccacacctg

SEQ ID NO: 495046 - DNA, 201 bp, Homo sapiens
gcttgcaagtatttaggtgctttttgaggaaaaaaagctgccatagcaataatgcttggggcacagagggggcaattttagtggtctacttttttttttttatctttcctgtatcattgagatttcttccctggaacctagaagaaagaattgcctatatctaaaagtgcttggagataaacgtatagcaaaagggccttt

SEQ ID NO: 495047 - DNA, 201 bp, Homo sapiens
agaaggcatccttactttgtattcccatagttcttcagtgatgcacgagagctggagtcattcttgaggaacctccaagattccattaaacgaaaatattsctgtgaccacaacaccagcttatcccgccttgaagacctgctccaggactccatggtgggtgttgcctcagtggggatgattacttctgagaaagagagt

SEQ ID NO: 495048 - DNA, 201 bp, Homo sapiens
tggagatttcatcctgatataagctttcatgattactgcctcagtggtaaaagggcatattatatttatttacattttattagtcaaagcactttccacamaaccacctatacctttcaagagggtgaggaaatgtaatctcaccacttacctagaaggtgcaaagctagaaatatttggtaaaagtattaacagctacca

SEQ ID NO: 495049 - DNA, 201 bp, Homo sapiens
ttttggccgtaggtttccttggtttcaaaattgtagggtatacagactggtgctagactgagagacatcaattctctgtaaaatgaaaaaagataaagaaaatgtagtgtgtctttcataaagctaaacttaaagaattgtcttttattctgaaattgtctctcctactttctaatgttaaaatatcctttattttatgaa

SEQ ID NO: 495050 - DNA, 201 bp, Homo sapiens
tttttggccgtaggtttccttggtttcaaaattgtagggtatacagactggtgctagactgagagacatcaattctctgtaaaatgaaaaaagataaagaaaatgtagtgtgtctttcataaagctaaacttaaagaattgtcttttattctgaaattgtctctcctactttctaatgttaaaatatcctttattttatga

SEQ ID NO: 495051 - DNA, 201 bp, Homo sapiens
tgtgtgaaggtcaaatgctgagaggttgttgttataaaagtattcaaattagagactttgttccactgaaagacttggaggaagtgtcagggaacatttgycttgggtcttctctcttttcattcctgactgttcctatgtccctcaaaagcctgcaaacatttttgttagtctaaggaaactactaagagaaacaataga

SEQ ID NO: 495052 - DNA, 201 bp, Homo sapiens
ctttttggccgtaggtttccttggtttcaaaattgtagggtatacagactggtgctagactgagagacatcaattctctgtaaaatgaaaaaagataaagaaaatgtagtgtgtctttcataaagctaaacttaaagaattgtcttttattctgaaattgtctctcctactttctaatgttaaaatatcctttattttatg

SEQ ID NO: 495053 - DNA, 201 bp, Homo sapiens
tttccatccttgagatataaccttcctgttttacatttcagggagtttcttgtatttgcaaaatgtgaattacgaaatgtctcttgacccctttgcatttwaattagaccctgcagaaacaacaaaatacctgtcaccagcaactggaggatctttgcagttgggtaggacaggcagaaagagcactggcaggccaccaag

SEQ ID NO: 495054 - DNA, 201 bp, Homo sapiens
tctccagtgtgctaaatatttgatagagcatagggaaatttgagtattttagtttccgagtattagtaaagagtggctcacattgccttttactttatacrttcatgcattggaagacttaatattgttaagatggcagcactccccaaactgatctatagattcaatgcaatccctgtcagaatcccagtggggtttttt

SEQ ID NO: 495055 - DNA, 201 bp, Homo sapiens
ggtggagacaggaaccttgattgagctgctggaagatattaaatggtgtggctgcctgggcagtcagaatgattgaccagcataaatcacaggaaacatcrcctgttttttagttcctatttcatgagccctggtgtgggcagtgctgttcatgtgccctcagagcatatggttgagtctatgcatgtcttgggtatactg

SEQ ID NO: 495056 - DNA, 201 bp, Homo sapiens
ttgttctccaccactagattgtaaacttcatgcggtcacaaaacaggactattccaactctacttcccttctgtgtcagctgtggtatatcctttttagawttccaggtggttggtgtttctgggcttcttgaagcacttgtcatttttctgtggcctttggaaacaggagaggctcttctctcacttgttttttgaatgg

SEQ ID NO: 495057 - DNA, 201 bp, Homo sapiens
caagatgagcccttcctggactttcccagactctgctacagaatctatatgtaggtgtcttccagagaattcgtagaattgatatctttcctgccttttcktgtaggaactctattcccagctgaaagccaaggaagagacttataatcaactacttgacaagggcagactcatgcttctaagccgtgacgactctgggtc

SEQ ID NO: 495058 - DNA, 201 bp, Homo sapiens
cattatacatgcttcaaggagattactgttgtggtgaacgagggcagggttggtaagttggagactgagattagacagattaggtaatttaggtgaggtawgttatcagttgccaaggtttcgtacagtctgagcaatattcatagtctttgtggtcagatgtagtttgtttgctgctcctccaaataatgacaattataa

SEQ ID NO: 495059 - DNA, 201 bp, Homo sapiens
tgtcattgtaagggagaaatgaggcctccatttgagaaggtcactagggtcctctggagacacacaagtttcagttcagtagaagagataaagggaggacrgctgaaggacactgtgtcgcaggactctgagggtatgattgaggaggctaacagaggtgaagtagaagtagggtggtttgcccaggacactcccagtttt

SEQ ID NO: 495060 - DNA, 201 bp, Homo sapiens
ccatcccaaattcctgtgggtaatcccaaagagaggcagatctaaaatcttaatgaagttctgagtctgtcttctacaaggcttctttcatggtttggggycctgcccgttggctgttagtaagggatatcctggggggtgctaaatgtgactttaaaaagactgttctttgtatgataaatgatctcttaaaaagaaaac

SEQ ID NO: 495061 - DNA, 201 bp, Homo sapiens
tcccatcatcaggtagcaagttgaaacgaccaacaccaacttttcattctagtcggacatcccttgctggtgataccagcaatagttcttccccggcctcyacaggtgccaaaactaatcgggcaggtaagtacctgccccgtgacctacaagccaggctgagaatttggaaacaacagcctatgtggaatgtttcactgc

SEQ ID NO: 495062 - DNA, 201 bp, Homo sapiens
ttacaggtgcatgctgccattcctggctaatttttgtattttttgtagagatagagtttcaccatgttgccaaggccggccttgaactcctgagctcaaakgatctgcctacctcagcctctcagagtgctggtattacaggaatgagccacagtgcctggcccagagacattttttattgttatgactggaaaagctgct

SEQ ID NO: 495063 - DNA, 201 bp, Homo sapiens
gtatttttagtagagatggggtttcaccatgttggccaggatctcaaactcctgacctcaagtgatctgcccgcctcggcctcccaaagtgctgggattayaggcatgagccaccacacctggccaacaagactcatacgtggtggaaatttgaattgttgtttccgaaattgtgctattactactgaatagctgtgtgta

SEQ ID NO: 495064 - DNA, 201 bp, Homo sapiens
agagatgcagctgcctctggtggacagtttcctgggttgccctttgtactttctttgtttaacagtcaccaggtgaccaagtggcttttctaaaagccaarggccgtggacgacgggattgtgagcgacttttctctagtgttttctatttgagatttgaaatacccatgcttttcatctggtccaaggaggctcaggttt

SEQ ID NO: 495065 - DNA, 201 bp, Homo sapiens
ttagtagagatggggtttcaccatgtggacccagctgttctcaaactcctgacctcaagtgatcctcctgcctcggcctcccaaagtgctgggattacagktgtgagtcaccatgcctggccaaatgacatattttaatatgagtctagactggtgatctaagagtactagggaaaaatatctatgaagtcttagtgagcc

SEQ ID NO: 495066 - DNA, 201 bp, Homo sapiens
cggatcaaccagctttctgcccgctggcagcaggtgtggctgttagcactggagcggcaaaggaaactgaatgatgccttggatcggctggaggaggtaaygccctgctgagtggccttccctgaaacaaagtgcttttttcaatcaaaacacagcccttctgaggctctcttaatgtgaaccttgtgtcttaatttactt

SEQ ID NO: 495067 - DNA, 201 bp, Homo sapiens
gcgccatgtggccgagttaccaagatgaacacgagttcaacgcccacctggtttgtcgcatgtgctgtatgggttagtatgtgaagtttttttttttttttgcttgtccgggcctgaggatcccaaatagcccttgctctcattgactcataggaatgcatggacttcgaagccttgtggtgttacaacctttaggcttgt

SEQ ID NO: 495068 - DNA, 201 bp, Homo sapiens
gagagagtctcgctctgtggcccaggctggagtgcagtggcacaatctcggctcactgcaacttctacctcccgggttcaagcagttctcctgcctcagcytctcaagtagctgggattacaggcatgtgccaccacgcccagctaattttttttgtattttagttagagtcggggttttaccgtgttggccccagggtgg

SEQ ID NO: 495069 - DNA, 201 bp, Homo sapiens
catgacatagtgtgagatataaaaacatagagacatagagcatttcatgcattggtgccctcccctagttataacatatgaatcctcttgtagcagagaaygacagtctgagccttgtttttctagtgatagtttcctaaattatcatgttcacagaggaaggaagctttgtcttattgttagcagtggcaaatccatgtg

SEQ ID NO: 495070 - DNA, 201 bp, Homo sapiens
aagaaagatgtttgtgtcttttatatccttaatagtgggtgattttggcattttaggaaagacattaagtatataccttcaattttctttgtttctgtaaraaagccagtagctgtcaattctcagataacttctgaccacatgtggaaatactggcctgaacctcttccctccactcacccttttcaagatctgcaggta

SEQ ID NO: 495071 - DNA, 201 bp, Homo sapiens
cctcccgggttcaagtgattctcctgcctcagtctcctgagtagctggtaatacaggcatgtgccaccacagccggctgattttgtatttttagtagagayggggtttctccatgttggtcaggctggtctcgaactcctgacctcaggtgatccacctgcctcggcctcccaaagtgctgggattataggtgtgagccac

SEQ ID NO: 495072 - DNA, 201 bp, Homo sapiens
aagccgggaggcacaggttgcagtgagccaagatcatgccactgcactccagcctgggcaacagagcaagactctgtctcaaaaaaaaaaaaagtaaactwtcccccattgacattgacactccatctcctcttcgtctcctttagtattctccatagcatttatgtgacaagctatgtatttacctgtttatatttcttt

SEQ ID NO: 495073 - DNA, 201 bp, Homo sapiens
cagaacatgcccaggacttgtcccctcagcagaatcgacagatgctgaggcttctgaatgaactgcagaggtccttccaggacattttggaacagactgcmgctcaggtggatgccttgcagggccatcttcaacaaatggagcaggaagccctggtgaaggtcagactgaaccagcagctgggctcagtttgtctttggg

SEQ ID NO: 495074 - DNA, 201 bp, Homo sapiens
gggaggattacttgagcccggtagtttgaggctgcagcgagctatgattgtgccactgcattccagcttggactacagagtaagaccctgtctcaagaaayggtgatagaaacagcactagcaggctgggcgcggtggctcatgcctataatcccagcagtttgggaggcccaggcggatggatcacctgaggtcaggagt

SEQ ID NO: 495075 - DNA, 201 bp, Homo sapiens
acacttttttcttttaaattcccaggtagatttggaagttcactgttaaaggtggttcgacacccttgttagtgtatgttacctactaggcctctctagargagcattttgagttatttctgccataagatgaatggttttccaggcacttgttctcggttgtatgtttttgtggtcaaaaaagatgcattaccagaagaa

SEQ ID NO: 495076 - DNA, 201 bp, Homo sapiens
agtgttattatgttttggagagatggggtcttgctatgttgcccagggtggtcttaaactcctgtcctcaggcagtcctcctgcctcagcttctcaaagcrctgggattacaggggtgagccactgctcccagccaagcagtttaatttctgaattaataaactatcttccttccagctccaaggaaaagcaaaacttaca

SEQ ID NO: 495077 - DNA, 201 bp, Homo sapiens
gagcccaggagttcaagactagcctgggcaaccccatctgtacaaaaaattacaaaaatgagctggatgtggtggcgcatggaggctgaggtgggcagatygcttgagccccggaggttgaagctgtagtaagctgagactgcgccactacactccagcttgggcaacagagtgagaccctgtctccaaaaataaaaaaag

SEQ ID NO: 495078 - DNA, 201 bp, Homo sapiens
ggagtgcagtggtgtgatcatggctcactgcacccttgaactcctgggctcaagggatcttcccacctcagcttcctgagtagcttagactataggtgtgyaccactgcgcctggctaatttttttttctttttgtagagttgggggtcttgttttgttctccaggctagtctcaaactcctggcctcaaatgatgctcct

SEQ ID NO: 495079 - DNA, 201 bp, Homo sapiens
atccagcgcataggaaagcttgcctataggtatctgatttaattattttgaatagtcaatgggctaaccaaggagaagatgaggggatcaaatatctgatrtttaaattaaactagtattcatctctttactttaaatttggtctcttaaaggtctcgcattttgtttcatttgtagtgccacagtttcaggattaatggt

SEQ ID NO: 495080 - DNA, 201 bp, Homo sapiens
  misc_feature (1)...(201): n = A,T,C or G
aacatttttgttggctgtgcgtgagatcttcctatggaatccacattttaagttctgggtgtgcagccccagaaagccataagacagcgctaactggcttnccgtgccgactccacgttctttgcatcttgatgttcctcctacttgcagttactcctttggccttttattgctttcagtttttcacttaacagtttctca

SEQ ID NO: 495081 - DNA, 201 bp, Homo sapiens
tattagaaagtggagatggataaagaaaggaatttttgtggatatgatatagagaatttttgtttcctaaggatttaaaatttttgtttgtttatttattkgtttattttttagagatggggtcttgcagtgttgcctaggcttgtcttgaactgctgccttcaagtgatcctcctgcctcagcctcctgagtatgtggaa

SEQ ID NO: 495082 - DNA, 201 bp, Homo sapiens
aaaaaccatcgttcagctaaaaccacgcagtccagaccatgtgttaaagaacaccatttctgtcaaggctgtctgtgactacaggcagatcgaggtgaggrggtagaaagggtatctctgggccacagggggaaggaagaaagaagggaagccttcagttagggttatgatgataaaagatcaaattacagcgtttttaaa

SEQ ID NO: 495083 - DNA, 201 bp, Homo sapiens
gtgcagtggtgcaatctcggctcactgcaagctctgcctcccgggttcgcgccattctcctgcctcagcttcccgagtagctggaactacaggcacccacsaccatgcccggctaattttttgtatttttagtagagacagggtttcaccgtgttagccaggatggtctcgatctcctgacctcgtgatctgcccacctcg

SEQ ID NO: 495084 - DNA, 201 bp, Homo sapiens
ccttaatccattctagagggtggtttgatttaaaatgtctcaccatctctcagtcactttttactctatttcttttttttttttttttttttgagatggartctcgctctgtctcccaggctggagtgcagtggtgcaatctcggctcactgcaagctctgcctcccgggttcgcgccattctcctgcctcagcttcccga

SEQ ID NO: 495085 - DNA, 201 bp, Homo sapiens
caaattacttattattacccagaaatacagtttaatctctaattattgaattaattttccatggcttttcctagtagggacagtcttcatggacacatgartgacatatttcacagttaagaacttgcattttttttttttttgagatggagtctcaagtctgttgccaggctggagtgcagtggcagggtcttggctcac

SEQ ID NO: 495086 - DNA, 201 bp, Homo sapiens
tctctactaaaaatacaaaaaaattagctgggcgtggtggcgggtgcctgtagtcccagctacacgggaggctgaggcaggagaatggcatgtacctgggwggtggagcttgcagtgagccgacatggcaccactgcactccagcctgggcgacagagcgagactccgtctcaaaaaaaaaaaaacaaaaaaggaaaaaga

SEQ ID NO: 495087 - DNA, 201 bp, Homo sapiens
tggatgtggtggcgggcgcctgtaatcccagctactcgggaggctgaggcaggagaatcgcttgaacccgggaggcagaggttgcagtgagctgagatgaygccattgcactccagcctgggcaacagagcaagactccaccttaaaaaaaaaaaaaaaaagaatttaaaccctgacctcacacaacatataaaacttaac

SEQ ID NO: 495088 - DNA, 201 bp, Homo sapiens
aggtggatcacgagatcaggagttcgagaccagcctggccaacattgtgaaaccccatttctactaaaaatacaaaaattagctggatgtggtggcgggcrcctgtaatcccagctactcgggaggctgaggcaggagaatcgcttgaacccgggaggcagaggttgcagtgagctgagatgacgccattgcactccagcc

SEQ ID NO: 495089 - DNA, 201 bp, Homo sapiens
gctaggaaaataaagaccacttaggaccattcagggccacacactgcttacaaaacccagtgtggagtagaaaaagcactggaggccgggcgcggtggctytgcctataatcccagcactttgggaggccgaagcgggtggatcacaaggtcaggagatcgagagcatcctggccaacatggtgaaatcccgtctctacta

SEQ ID NO: 495090 - DNA, 201 bp, Homo sapiens
agccaggatggtctcgatctcctgaccttgtgatccgcccgcctctgcctcccaaagtgctgagattacaggcgtgagccaccgtgcccagcctctccttrccctttagttctctttacctggaatgcccttgttctttatacttaactgaaatctgtctattccttcaagtttcacttcaggtctttcttctgatgaaga

SEQ ID NO: 495091 - DNA, 201 bp, Homo sapiens
agaggagcccgcctccccagctgctgcagtgcccaccccagaggagcccgcctccccagctgctgcagtgcccaccccagaggagcctgccttcccagctsctgcagtgcccaccccagaggaatccgcctccgcagctgttgcagtgcccacccccgaggaatctgcctccccagctgctgcagtgcccaccccagcaga

SEQ ID NO: 495092 - DNA, 201 bp, Homo sapiens
cgagtagctgggactacaggcacctgccaccatgcccagctaatttttttttttttgtattttttagtagagatggggtttcaccttgttagccaggatgktctcgatctcctgaccttgtgatccgcccgcctctgcctcccaaagtgctgagattacaggcgtgagccaccgtgcccagcctctccttgccctttagtt

SEQ ID NO: 495093 - DNA, 201 bp, Homo sapiens
gctgggtgtggtgacaggcacctataatctcagctattcaggaggctgaggtaagagaatcgcttgagccaaggctttggaggttgcagtgagctgagatygcgttactgcactccagcctgggcaacagggcgagactccgtctcaaaaaaaaaaaaaaagagagagagaatttggtttttaaaaatattttatgttgaa

SEQ ID NO: 495094 - DNA, 201 bp, Homo sapiens
tacaggtgtgagccaccatgccctactggcactagatatttatttatttatttaaccatgccctgccagcactagatatttatttatttatttatttattyattcattcattcattcattcgagatggaatttcgctcttattgcccaggctggagtgcagtggtgcgatcttggctcactgcaacctccgcctcctgggt

SEQ ID NO: 495095 - DNA, 201 bp, Homo sapiens
tatgatcatgccactgcactacagcctgggtgacagagtacaccctgtctctctgtcttttttttttgcaatctccgcctcccgggttcaagcaattcttrtacctcagcctcctgagtagctgagattacaggcatgagccactgtgcctggctaattttttgtatttttagtagagatggggtttcgccatgttggcca

SEQ ID NO: 495096 - DNA, 201 bp, Homo sapiens
tctttatgtgtgtcttgttcctggcagcacacccaggaggatttacagcaattgaggtcagacttggatgcagtttctatgaaatgtgacagctttctccwtcagtctccatctagttcaagtgtcccaactctgcgctcagaactgaatctgctggtggagaagatggaccatgtctatggtctctctactgtatatctg

SEQ ID NO: 495097 - DNA, 201 bp, Homo sapiens
ctttgggaagctgaggcaggaggatcagttgaggctaggagtttgagaccatcctgggcaacagtagcaaaaccctgtctctaaaaacaagcaaacaaacraaaaaacaatacaaaaactagccggtggctgggcacggtggctcacacctgtaatcctagcacttcaggaggctgaggcgggcggatcacaacgtcagga

SEQ ID NO: 495098 - DNA, 201 bp, Homo sapiens
gtaggcaaaaacagctggaagacatcctggttctggccaaacagttccatgagacagctgagcctatttctgacttcttatctgtcacagagaaaaagctkgctaactcagaacctgttggcactcagactgccaaaatacagcagcagatcattcggcacaaggtagggagtggttacagtaaatgaaaatagaaaactg

SEQ ID NO: 495099 - DNA, 201 bp, Homo sapiens
ggccgagggaggcggatcacttgaggtcaggaggtcaagaccagcctggccaacacggtgaaactccatttctactaaaaatacaaaaaaaaaaaaaaaaatttgccgggcgtgatggcaggcccctgtaatcccagctactcgggaggctgaggcaggagaatcagagaatcgcttgaacctgggaggtcgagtttgcag

SEQ ID NO: 495100 - DNA, 201 bp, Homo sapiens
atgtggtggtgcacgcctgtagtcccagctacttgggaggcttaggcatgagaattgcttgaccaaggaggcggagtttgcagtcagctgagattgcgccmctgcactctagctgcctgggcaacagagcgagactctgtctcaaaaaaaaaaaagattgggctgggcacagtggctcatgtctgtaatcccaacactttg

SEQ ID NO: 495101 - DNA, 201 bp, Homo sapiens
atggtctcaattttctgacctcgtgatccacccgcctcagcctcccaaagtgctgggattacaggcgtgagccaccgcgcctggcatttttttttttttttgtcatgttgagacagggtctagctctctggcccaggctggagtgcagaacttactgcagcctccaactcctgggctcaagggatcctcccacctcagcct

SEQ ID NO: 495102 - DNA, 201 bp, Homo sapiens
cacccaggctggagtgcagtggcgcgatctcggctcactgcaagctccgcctcccaggttcacgccattctcctgcctcagcctcccgagtagctgggacyacaggcacccgccaccacgcctggctagttttttgtatttttagtagagaagggatttcactgtgttagccaggatggtctcaattttctgacctcgtga

SEQ ID NO: 495103 - DNA, 201 bp, Homo sapiens
caaaaatcaaattctcttctctacaaaataatgaaagatgactagggatcaaggtgtttgcccaaaaagattattttttatgagtacagagtttcactgtrttttttgctgctcagatcaagtatgaaatatatacatacacaaacctgttgaccacattcactcaatgaatagttattgagcaagtgtgtgccaagtcct

SEQ ID NO: 495104 - DNA, 201 bp, Homo sapiens
ctcattatctagagataacagttgttacattgacatacttttttctagtttttggtgctatttttcttttcttttcttttcttttcttttcttttcttttyttttttttttttttggagacagggtctcactgggtcacccaggctggattgcagtggcatgatcttggttcactgcagcatccacctcccgggctcaagc

SEQ ID NO: 495105 - DNA, 201 bp, Homo sapiens
actcattatctagagataacagttgttacattgacatacttttttctagtttttggtgctatttttcttttcttttcttttcttttcttttcttttctttytttttttttttttttggagacagggtctcactgggtcacccaggctggattgcagtggcatgatcttggttcactgcagcatccacctcccgggctcaag

SEQ ID NO: 495106 - DNA, 201 bp, Homo sapiens
aaaggattcccaatatggccaaacaccacaggcaattttcatttttcttttggaaacatttattctggaccattctatctttttttttttttttttagtcyggacctgttctgtaggcctgattcagtcagtactgtctctgtgatacgtggacccactaattactagattccaagtcttatttattagtgtactccctgg

SEQ ID NO: 495107 - DNA, 201 bp, Homo sapiens
tgggaggccgaggcgggtggatcacctgaggtcaggagttcgagaccagcctggccaacatggtgaaaccccgactctaccaaaaatacaaaaattagccrggcatggtggcacatgcctgttatcctagctacttgggaggctgaggcaggagaatctctggaacctgggaggcagaggttgcagtgagccaagattgcg

SEQ ID NO: 495108 - DNA, 201 bp, Homo sapiens
gtgagccactgcacctggcccctgttttatttactttcttatataatttttgtttccttggagtgggtaattgttttgttttttagtttgcttagttgtcyccaaactctcctacattactgtaaaaggattcccaatatggccaaacaccacaggcaattttcatttttcttttggaaacatttattctggaccattcta

SEQ ID NO: 495109 - DNA, 201 bp, Homo sapiens
ctggagtgcagtggtgctatctcagctcactgcaacctctgcctctcgggttcaagtgattgtcatgcctcagcctccctagtagctgggactacgggcgygcgccaccacacccggctaattttttgtatttttagtagggacggcgtttcaccatgttggccaggctggtcttgaactcctgacctcaggtgatccaca

SEQ ID NO: 495110 - DNA, 201 bp, Homo sapiens
cccaggaaaagccaagcttagttatggatcttatattaaataagagttaagattccaagtgagctataaagtctgtagttttttttgtttggtttttttttggggggggtgctttttgtgttggcaaattcagccagcgtgaggttttttgtttgtttcttttttgtttttttgccttaaatctggattcaaagttatgtt

SEQ ID NO: 495111 - DNA, 201 bp, Homo sapiens
cagctggaagaaatgggaggttggaaagtagagacaattaatatagatccttctttccagaagtcttaggtacaggcaaggaatgaggtgggacactactygaaggagatggattgaaaggaatgttttgaatgggttttggactgaggagaaagaaccaattaaaagggagaacttgaagttagaagagagaggaagtga

SEQ ID NO: 495112 - DNA, 201 bp, Homo sapiens
ttgtatttttagtagagacggggtttcaccatgttggccaggctggtctcgaactcctgacctcaagtgatccacccacctcggcctctcaaagtgttggkattacaggcgtgagccactgcacctggcccctgttttatttactttcttatataatttttgtttccttggagtgggtaattgttttgttttttagtttgc

SEQ ID NO: 495113 - DNA, 201 bp, Homo sapiens
agtgagccaagataccgccattgtactccagcctggatgacaggagtaaaactctgtctcaaaaggaaaaaaaaaaaaaaaaatgtttgtttgttttttttaaacttttcactgagttgcatatttattgttttgatctagcatttgacctggcaagcatacctctttccttattcctttttagagtatatttataaggat

SEQ ID NO: 495114 - DNA, 201 bp, Homo sapiens
tactgcttttgttgctttagaatatctatatgggaagcaaataataatctgaaggttgtcaggtgaacatgcagtcagagcagagaggtggtgagtagagraatgatttgtaggatgggcttattagctggcatcatcaaagtagaatagtctgatttcttctgtagaaatgtacctgtcaagggcataagatcctatgtc

SEQ ID NO: 495115 - DNA, 201 bp, Homo sapiens
cgcccctcccccagccccaggtagatctggagttgattaatagttttagtaaactgactcacactgatcacatttgcttgagattggtcgatgtgaatttrttaatttacaaaataaattttaactgccaagtgattcaagaatttgaattggccacttactgcttttgttgctttagaatatctatatgggaagcaaata

SEQ ID NO: 495116 - DNA, 201 bp, Homo sapiens
gatgcttgcttatggggggaaattgaacagattttttttcctcttgtttaccctttaccttttttaaaatgttatctgccactgttttttttttttttcaracagtctcgctctgtcgctgcaacctctgccttccaggttcaagcgattctcctgcctcagcatcccaagtaactgggattacaggtgtcccctaccacg

SEQ ID NO: 495117 - DNA, 201 bp, Homo sapiens
ggctgggcacagtggctcatgtctgtaatcccaacactttgggaggccgagggaggcggatcacttgaggtcaggaggtcaagaccagcctggccaacacrgtgaaactccatttctactaaaaatacaaaaaaaaaaaaaaaaatttgccgggcgtgatggcaggcccctgtaatcccagctactcgggaggctgaggca

SEQ ID NO: 495118 - DNA, 201 bp, Homo sapiens
atccttcagttaagcagatgtgtatttcctgcaaccccatgtttggggttgcttggagaagtagcagacgttggctgtgatttgaggagtctccatttgcrtgaccgtaggccctttaaacttaacatggcaaaaacagaatgtttgagttttcttcttaaatatgcttcttacttgtctttcctatctcaggaaatagta

SEQ ID NO: 495119 - DNA, 201 bp, Homo sapiens
gtctttaaatataacaagtgttataggccacggtggctcacacctgtaatcccagcactttgggaggccaaggcgggcagatcacctgagatcaggagttytagaccagcgggaccaacatggagaaaccccgtctgtactaaaaatacaaaattagctggcgtggtggcccatgcctgtaatcccagctacttgggaggc

SEQ ID NO: 495120 - DNA, 201 bp, Homo sapiens
aaaaaaaaaaagattgggctgggcacagtggctcatgtctgtaatcccaacactttgggaggccgagggaggcggatcacttgaggtcaggaggtcaagaycagcctggccaacacggtgaaactccatttctactaaaaatacaaaaaaaaaaaaaaaaatttgccgggcgtgatggcaggcccctgtaatcccagctac

SEQ ID NO: 495121 - DNA, 201 bp, Homo sapiens
ccacacacccggctaattttttgtatttttagtagagagggggtttcaccgtgttagccaggatggtctcgatcttctgacctcgtgatctgcccgcctcrgcctcccaaagtgctgggattacaggcgtgagccaccgcacctggcaattattttattttttttatagagatgggatcttgcaatgttttctaggctagt

SEQ ID NO: 495122 - DNA, 201 bp, Homo sapiens
tgtggagaggaggaggtaattttgggatttctgcccaccaccatgatattggttattatttcctactgctatcacttttcactgctgtcatttggtctgtrtagtctattcctcccttctaatcttcactgagctagaaaatgagataaacaggcctgttaaaattgcattagatatgagctaaaatgtacaaaagagtcc

SEQ ID NO: 495123 - DNA, 201 bp, Homo sapiens
tattttttgtagagatgaggttttactatgttgcctaggctggtcttgaactcctgggctcaagcagcctgcctaccttagccttcagaagtgctgggatyataggtgtgagctgctgtgcctggccaattgtactgtttttatctccagtgtcctagcacatagtagacactcaagaaatatgtattatacaaaagaatg

SEQ ID NO: 495124 - DNA, 201 bp, Homo sapiens
gatcgcgccactgcactccagcctgggcgacagcgagactccgtcaaaaaaaaagaagaaaaagaaagagagagagagagagagagagaaagagagagagaaagaaaagaaaagaaagacgaaatagttaatgagtgccctatatgtgccagatcatttgctaggtgctaaggatcctgtggtgaattagacgacaaacag

SEQ ID NO: 495125 - DNA, 201 bp, Homo sapiens
aattttttttttatttctgtgaagaatgtcttgtattttttatagggtaaatctgttttttttttttttattctctcattgacagaggagtttattcttcrtttttcattgttgatgtaacttttttttttttttttttgagatggagtttcactcttgttgcccaaactggagtgcaatggcacgatctcggctcactgc

SEQ ID NO: 495126 - DNA, 201 bp, Homo sapiens
agatcgcgccactgcactccagcctgggcgacagcgagactccgtcaaaaaaaaagaagaaaaagaaagagagagagagagagagagagaaagagagagagaaagaaaagaaaagaaagacgaaatagttaatgagtgccctatatgtgccagatcatttgctaggtgctaaggatcctgtggtgaattagacgacaaaca

SEQ ID NO: 495127 - DNA, 201 bp, Homo sapiens
tagaaacattggtgatccatcacattctttttataggggggaaaattgagacccacagaagatgaaaattatgtaaagtcatgtggctagttttttttttycccttttttttttgagatggcatcttgctctgtagcccaggatggagtgcagtgacacgatctcggctcactgcaacttctgcctcctgggtccaagaaa

SEQ ID NO: 495128 - DNA, 201 bp, Homo sapiens
ctgaaaataatacttaatggcataaagacaaaggaagagacactaaagaataaaaagaaaagtttttagttacactaggtattagactttgaaggtcttcmctcttcccacccatctctacctatgaccttgaagagtagcgcatcttaaactcttcatagtgtaaaatgggtttctggcttcatgcctttcttccatgag

SEQ ID NO: 495129 - DNA, 201 bp, Homo sapiens
agtaagccgagatcgcgccactgcactccagcctgggcgacagcgagactccgtcaaaaaaaaagaagaaaaagaaagagagagagagagagagagagaaagagagagagaaagaaaagaaaagaaagacgaaatagttaatgagtgccctatatgtgccagatcatttgctaggtgctaaggatcctgtggtgaattaga

SEQ ID NO: 495130 - DNA, 201 bp, Homo sapiens
cttatgcccatttctcagataaggaaactgaaacacagagaccgactgacttttttgggttacacacccagataggatttcttttttttttttttttttttgagacggagtctcgctctgtcgcccaggccggactgcggactgcagtggcacaatctcggctcactgcaagctccgcttcccgggttcacgccattctcc

SEQ ID NO: 495131 - DNA, 201 bp, Homo sapiens
cagtaagccgagatcgcgccactgcactccagcctgggcgacagcgagactccgtcaaaaaaaaagaagaaaaagaaagagagagagagagagagagagaaagagagagagaaagaaaagaaaagaaagacgaaatagttaatgagtgccctatatgtgccagatcatttgctaggtgctaaggatcctgtggtgaattag

SEQ ID NO: 495132 - DNA, 201 bp, Homo sapiens
cctgcagtaagccgagatcgcgccactgcactccagcctgggcgacagcgagactccgtcaaaaaaaaagaagaaaaagaaagagagagagagagagagagagaaagagagagagaaagaaaagaaaagaaagacgaaatagttaatgagtgccctatatgtgccagatcatttgctaggtgctaaggatcctgtggtgaa

SEQ ID NO: 495133 - DNA, 201 bp, Homo sapiens
agcctgcagtaagccgagatcgcgccactgcactccagcctgggcgacagcgagactccgtcaaaaaaaaagaagaaaaagaaagagagagagagagagagagagaaagagagagagaaagaaaagaaaagaaagacgaaatagttaatgagtgccctatatgtgccagatcatttgctaggtgctaaggatcctgtggtg

SEQ ID NO: 495134 - DNA, 201 bp, Homo sapiens
tacagtggcacaatcttggctcactgcagcctctacctcccgggttcaagcaattctcctgccccagcctccgaagtagttgggattacaggaatgtgccmccacacccagttaatttttttttttttttttttttttttttttttggatttttagtagagacagggtttcactgtgttggccaggctggtctcgaactcc

SEQ ID NO: 495135 - DNA, 201 bp, Homo sapiens
cattataaaacaagaaaattgggctaaatgtcctcttgggtctctcttggctctaagattctttttattttttttttttagatggagtctggctctgtcastcaggctggagtgctagagtgcagtggtgcgatctcagctcactgcaagctccacctcccgggttcacgccattctcctgcctcagcctcccgagtagct

SEQ ID NO: 495136 - DNA, 201 bp, Homo sapiens
cccaccccagaggagcccgcctccccagctgctgcagtgcccaccccagaggagcccgcctccccagctgctgcagtgcccaccccagaggagcctgcctycccagctcctgcagtgcccaccccagaggaatccgcctccgcagctgttgcagtgcccacccccgaggaatctgcctccccagctgctgcagtgcccacc

SEQ ID NO: 495137 - DNA, 201 bp, Homo sapiens
cagtgcccaccccagaggagcccgcctccccagctgctgcagtgcccaccccagaggagcccgcctccccagctgctgcagtgcccaccccagaggagccygccttcccagctcctgcagtgcccaccccagaggaatccgcctccgcagctgttgcagtgcccacccccgaggaatctgcctccccagctgctgcagtgc

SEQ ID NO: 495138 - DNA, 201 bp, Homo sapiens
agtgcccaccccagaggagcccacctccccagctgctgcagtgcccaccccagaggagcccacctccccagctgctgcagtgcccaccccagaggagcccrcctccccagctgctgcagtgcccaccccagaggagcccgcctccccagctgctgcagtgcccaccccagaggagcccgcctccccagctgctgcagtgcc

SEQ ID NO: 495139 - DNA, 201 bp, Homo sapiens
tttcttcttgaccttgaagaagtccagaaaaattcttacaaaatagggaattgcatggtaggtaggttatgagaagtttcatttttgggttttgtgaataytacgaacagcttttcctagtttgctagggatttgcgtggccaggtatttgctgcatttaaagttcttagatattatcatcagaagaacagtctttttttt

SEQ ID NO: 495140 - DNA, 201 bp, Homo sapiens
ctccccagctgctgcagtgcccaccccagaggagcccacctccccagctgctgcagtgcccaccccagaggagcccacctccccagctgctgcagtgcccmccccagaggagcccacctccccagctgctgcagtgcccaccccagaggagcccacctccccagctgctgcagtgcccaccccagaggagcccacctcccc

SEQ ID NO: 495141 - DNA, 201 bp, Homo sapiens
ttacaaaatagggaattgcatggtaggtaggttatgagaagtttcatttttgggttttgtgaatattacgaacagcttttcctagtttgctagggatttgygtggccaggtatttgctgcatttaaagttcttagatattatcatcagaagaacagtcttttttttttttttttttttttttgagatggggtctcgctctg

SEQ ID NO: 495142 - DNA, 201 bp, Homo sapiens
agtgcatgctccagaggagcctgatactgcagctgtcagagtgtccaccccagaggagcccgcctccccagctgctgcagtgcccaccccagaggagcccrcctccccagctgctgcagtgcccaccccagaggagcccacctccccagctgctgcagtgccccccccagaggagcccacctccccagctgctgcagtgcc

SEQ ID NO: 495143 - DNA, 201 bp, Homo sapiens
cttatgctggacatgggtggagggtgaggagaggcagtagtccctccaaacccttgtatctccaactgtggattctcctgtttgtttatagggtggaaggsgtggtttatactggtttgtccccagttcctgctctgtgcctgaggggactgcagtggcattaggattttttgcccagttgctcatggacatagagacacg

SEQ ID NO: 495144 - DNA, 201 bp, Homo sapiens
agaagggaccatatggacagtggaagagagtttagcattctgattgttcacctcttgctccttccattctgatggctaattagggacacctcattagctawcagagtggaacaagtatttgccaggctgacatgagcctcagccctgcatcctgcatcttctgctttcccaacctgctgagtcaccacctaggaatggcag

SEQ ID NO: 495145 - DNA, 201 bp, Homo sapiens
gagccactgcacccagccctcatttgcttcttgaaagttttcaaggtctgatgctttatctttagtgggtgatgaggtcagctagaaacttgaggacatartaatcaagtacttacttgctcagaacaactcgtctcatccactgagagacttaccaagtccaaactcctcagctgggataagataagataccaagtcgaa

SEQ ID NO: 495146 - DNA, 201 bp, Homo sapiens
tttccatttgcagtgaaaggaagtaaactcactttcccaccctcatcctggaggttacttatgttatttgcagaccccaacttctgcctctctgttaagtwtacttcttatgcaggttgcccttactgttacatcttaccactgggggaaagatccaaggctctgggaaggacagtgacagttgtcctacattggctagtt

SEQ ID NO: 495147 - DNA, 201 bp, Homo sapiens
tttacattgtattaggaattataagtaatctagagattatttaaagtagctgggaggatgtacacaggttgtatgtgaatactacctcattttgtatctgrgacttgagcatttgtggatttcagtatctgcggattttggtatctgagggaggtcctagaaccaattctccatggatgactactgaaaaggggttactat

SEQ ID NO: 495148 - DNA, 201 bp, Homo sapiens
gaggtaagtgagcttatcctttgctgagacttggggtttgctggtctgtactgttgttgcttcttgattatagattccttgtattcttttcccaaactgcrttaatagaagtactctcctggtgacaaataatagcaccactctcaggctggtcttaaaatgttgtggtaaaggggcaatgtcagccatctctgtttttta

SEQ ID NO: 495149 - DNA, 201 bp, Homo sapiens
cccatatagcagatactatactaaaaaaaattggggtggaggaatcttcactgacatcacaaggtgatttttgaatccgacttttacagtctgaaattcasacttcctgccctactgcaatgggagtaaaaaccacctgaacctctttttggcagcttcttctcttactcccaaatggcaacaagtgttatctctttgatt

SEQ ID NO: 495150 - DNA, 201 bp, Homo sapiens
ccaagtgacaatatgaatgttattgttagcagtatgattactttgaagtcacttgaaataatttctctctattgttgttaagccacaaattcaatacacarttaaggttcatttgtttttatttgctttcagttttggggggttgcttttttcctttcaattttaccttacattatgtagatcatttatattgttccaaag

SEQ ID NO: 495151 - DNA, 201 bp, Homo sapiens
ccgttctccctaaaaacgacttctcatggaataaaaaaggatttaaaaattgccagagggagcaccgagctttgactgcagttttccctgtcatctcttaratgaagggaaggtgtgagaaatgtgcgtctgtccctgactgctgtcaccgcttctgagtttagtaaaaagatgagaaatgaaggtagcagacttctcatc

SEQ ID NO: 495152 - DNA, 201 bp, Homo sapiens
agctgaaatgactgagaaaaggttcttgctaaaaagatttttcctaaacctttgactgaagaagttatcctgtgcccagagaggccttgacatctctgtgwacagattctcctatttgagaagtgttgcttagaagtgttggagagtgcccagaagatgcttccatccttatctctccatgtgttagggtactttttgccc

SEQ ID NO: 495153 - DNA, 201 bp, Homo sapiens
gttcactcatcgatgttctctgttacagtactcattgaggactgggattgtattatgctactttctctgttaagtgctgcacatagcacatgagaagtatmcaataagtacttgttaccttgagtaactaatatttcaatagtgttatagcgtatgaagcacattcttatctgtcttaatccttaaaataaccctgaagta

SEQ ID NO: 495154 - DNA, 201 bp, Homo sapiens
ttgtgaatttcttgttcctctattgtgtctttgccttggttggtggccaaaggagccagcagggctgaagaccctccgtctggtgagcatgccctcctggygccatacaaacaacgaggagcaggcggaggaagatgatgatgatgtagtaggtcctcctggggatgccagcatcccagctggcactgctggcactgcagg

SEQ ID NO: 495155 - DNA, 201 bp, Homo sapiens
gctactcgggaggctgaggcaggagaatggcgtgaaccccggggggcggagcctgcagtaagccgagatcgcgccactgcactccagcctgggcgacagcragactccgtcaaaaaaaaagaagaaaaagaaagagagagagagagagagagagaaagagagagagaaagaaaagaaaagaaagacgaaatagttaatgag

SEQ ID NO: 495156 - DNA, 201 bp, Homo sapiens
ctggagtgcagtggcacaatctcggctcactgcaacgtctccctcctgggttcaagcagttctcctttctcagcctcctgagtagctggaatgtaaggcgygccccaccacgccccgctaatttttgtatttttatttatttattttttgaggtggagtcgtgcactgtcacccaggttggagtgcagtgtcgtgatctcg

SEQ ID NO: 495157 - DNA, 201 bp, Homo sapiens
tgcgccattgcactctagcctgggtgacagagtgagactccgttgcaaataaataaataaattaaattaaattaaataaagtaaacaaatatacaaacgcrcgcgcgcgtgtgtgtgtgtgtgtatgtatatttttagagaccaaattttgccatgttacccaggctggtcttgaactcctgggctcaagcgatcctcctg

SEQ ID NO: 495158 - DNA, 201 bp, Homo sapiens
gagtagctgggattgtaggcatgcaccaccacacctggctgacttttaaaattttttgtagagatggagtctcactgtgttgccctgactggtctcaaacycctgggctcaagtaatcttcctgtcttggcctcccaaagtgctgcaataacatgcttgagccaccgcacctggccttctaaattttgatgcttagtccac

SEQ ID NO: 495159 - DNA, 201 bp, Homo sapiens
tccttaatagtgggtgattttggcattttaggaaagacattaagtatataccttcaattttctttgtttctgtaagaaagccagtagctgtcaattctcarataacttctgaccacatgtggaaatactggcctgaacctcttccctccactcacccttttcaagatctgcaggtagcagccagacttaaactttttccta

SEQ ID NO: 495160 - DNA, 201 bp, Homo sapiens
gactgcgccattgcactctagcctgggtgacagagtgagactccgttgcaaataaataaataaattaaattaaattaaataaagtaaacaaatatacaaaygcgcgcgcgcgtgtgtgtgtgtgtgtatgtatatttttagagaccaaattttgccatgttacccaggctggtcttgaactcctgggctcaagcgatcctc

SEQ ID NO: 495161 - DNA, 201 bp, Homo sapiens
tcagactcctgagtagctgggattgtaggcatgcaccaccacacctggctgacttttaaaattttttgtagagatggagtctcactgtgttgccctgactrgtctcaaactcctgggctcaagtaatcttcctgtcttggcctcccaaagtgctgcaataacatgcttgagccaccgcacctggccttctaaattttgatg

SEQ ID NO: 495162 - DNA, 201 bp, Homo sapiens
atgtgcatgtgtgcacacacacacactcactactagcaaagaatttcttttttttgagatggagttttgctcttgttgcccaggttggaatgcaatggcaygatctaggctcactgcaacctctgcctcctgggttcaagcgattctcctgcctcagcctcccaagtagctgggattacaggtgaccaccatcacgcccgg

SEQ ID NO: 495163 - DNA, 201 bp, Homo sapiens
gaggatcacctgagcccaggaagtcgaggctatagtgagctgtgatcgcgccactgcactctagcctgggtgatggaagtgagaccctatctccaaaaaaraaaaaaaaaaaaaactttatggccagcacagtggcccacacctgtaatcccaacactttgggaggctgaggtgagatgatctcttgaggccaggagtttg

SEQ ID NO: 495164 - DNA, 201 bp, Homo sapiens
aggatcacttgagcctgggaggttgaggcagcagtgagccatgttcatgccactgtactgtagcctgggtgacaaagtgaaaccctgtctcaaaaaaaaaraaattcatcaagggaatgagttccatttttgttataggggcctgtgccccaggactgccctgatgctggtgaactgcttcacgtgactctgatctcaact

SEQ ID NO: 495165 - DNA, 201 bp, Homo sapiens
ggaggctgcagtgacccatgatcgcaccactgcagctgtgatcatcatcatccagcctgggtgacacagtgagaccctgtctcaaaaaaaaaaaaaaaaaattgcaggaaagattgagtcttgctttgggaggaaaaagaaacaggtgaaaggagggcaggagggcagaaagattctgttttctaagacttgacttgcttc

SEQ ID NO: 495166 - DNA, 201 bp, Homo sapiens
tgatctgcccaccttggcctcccaaagtgctgggattacaggtgtgagccatcacgcccggccaagggattcttttcttttttttgagacggagtcttgcrcttttgcctaggctggagtgcagtggtgtgaacttggctcactgcaacctctgcctcccgggttctcctgtctcagcctcctgagtagctgggattacag

SEQ ID NO: 495167 - DNA, 201 bp, Homo sapiens
caggctggagtgcagtggtgcgatctcggctcactgcaacttctgcctgccgggttcaagtgattctcctgcttcagcctcccgagtagctgggactacasgcacacgccatcacacccagctaatttttgtatttttagtagacacggggtttcatcatgttggccaggatggtcttaatctcttgaccttgtgatctgc

SEQ ID NO: 495168 - DNA, 201 bp, Homo sapiens
ctcctgggttcaagggattctcctgcctcagccttctgagtagctggaataacatgtgcgcgccaccacgcctggctaattttttttttttttttttttttgagacggagtcttgccctgtcaccaggctggagtgcagtggtgcgatctcggctcactgcaacttctgcctgccgggttcaagtgattctcctgcttcag

SEQ ID NO: 495169 - DNA, 201 bp, Homo sapiens
ctgtctacctggaaatagcatcagatctcacagtttgagggttcagtccccaagacattcccctactccacttctttttttttttttttttttttttttttgagatgatgtcttgctcttgttgcccaggctggagtgcaatggctcaatctctgctcattgcaaccaccgcctcctgggttcaagggattctcctgcctc

SEQ ID NO: 495170 - DNA, 201 bp, Homo sapiens
gcctcctaaagtactgggattgcaggcagaagccactgcacctggcaatgagtatcacttaatgaagtcgtcactagactgggactgaatcagaaatccarttgccacttaacttatagctaagtgaccataacatctcagaacctcagcttccttggtttctttgatggaatggtggtaataagtaaacttcacaaggta

SEQ ID NO: 495171 - DNA, 201 bp, Homo sapiens
aagcccctccttcggcgcctcagcctccaatcctctccaccgctccctccactctcggagtcgctcctctccccggccccgcccccgccgggccccgcccycgccctcgtcctcctccctgtgctctccgcgtcgcgcgctccctggcttccagggggctgcccgggcggggcggcgcagcgcggcggcgcggggaagggg

SEQ ID NO: 495172 - DNA, 201 bp, Homo sapiens
ttgaagcttgttgtgagggaagtggggaatcagtctgctccctgctctgctcaaattattgtgctaaggagactttgccatggtatgatttttgaggcacrtgatgattctgtctgatttgtaaactgacaacgtgatcagggccaaagaggaagttcagctaggccaaaccttcctaagaagaagtcactgtcccacagt

SEQ ID NO: 495173 - DNA, 201 bp, Homo sapiens
gagcgagatcgtgccactgcattccagcctggcaacagagtgagactctgcctcaaaaaaataaataaataagtaagtaaataaataaataaataaataaataaataaataaaatgaaatagaataaaacggtttttttttgctgggcatggtggctcatgctgtaagcccagttgggaggcttaggcaggtgcatcactt

SEQ ID NO: 495174 - DNA, 201 bp, Homo sapiens
gctttaccagtccttaccacattccctcctatttcagaggcaggtctctgggcatatacatatatattttgtgttcttagttcctcccttcctagtgactstttgtaaagatattcaggttttctccatcctaagataaaaattcctttaagcttatctcttcttcagactaactctctgtgctttttttttctttaccac

SEQ ID NO: 495175 - DNA, 201 bp, Homo sapiens
tgagcgagatcgtgccactgcattccagcctggcaacagagtgagactctgcctcaaaaaaataaataaataagtaagtaaataaataaataaataaataaataaataaataaaatgaaatagaataaaacggtttttttttgctgggcatggtggctcatgctgtaagcccagttgggaggcttaggcaggtgcatcact

SEQ ID NO: 495176 - DNA, 201 bp, Homo sapiens
gaagtgggggatggttaatggatgcaaaaaaataaaaagactaaataaaacctagtatttgctagcacaacaaggtgactatagtaaaaataatttaattrttcatttaaaaataactaaaagagtttaattggattgtttgaaacacaaattgcttgaggtgatggataccctatttaccctgatgtgattagtatacat

SEQ ID NO: 495177 - DNA, 201 bp, Homo sapiens
atgagcgagatcgtgccactgcattccagcctggcaacagagtgagactctgcctcaaaaaaataaataaataagtaagtaaataaataaataaataaataaataaataaataaaatgaaatagaataaaacggtttttttttgctgggcatggtggctcatgctgtaagcccagttgggaggcttaggcaggtgcatcac

SEQ ID NO: 495178 - DNA, 201 bp, Homo sapiens
tcacggctttggctttttgaagcttgttgtgagggaagtggggaatcagtctgctccctgctctgctcaaattattgtgctaaggagactttgccatggtwtgatttttgaggcacgtgatgattctgtctgatttgtaaactgacaacgtgatcagggccaaagaggaagttcagctaggccaaaccttcctaagaagaa

SEQ ID NO: 495179 - DNA, 201 bp, Homo sapiens
cctgcactcaagcaatcctcccaccccagcttcccaagtagctggggttacaggcgcatgtcaccatggctggctaatttttttgtatttttactagagayggggttttgccatgtgctcaggctggtctcaaattcctgagctcaagcgattcgcccaccttggcctcccacagtgctgggattacaggtgtgagccacc

SEQ ID NO: 495180 - DNA, 201 bp, Homo sapiens
aatgagcgagatcgtgccactgcattccagcctggcaacagagtgagactctgcctcaaaaaaataaataaataagtaagtaaataaataaataaataaataaataaataaataaaatgaaatagaataaaacggtttttttttgctgggcatggtggctcatgctgtaagcccagttgggaggcttaggcaggtgcatca

SEQ ID NO: 495181 - DNA, 201 bp, Homo sapiens
tgtctgtgcctttgtaagggctgttggagacagaagggctttttttccgctttgtcagcagctggccagagaatgcctattagtctgccagatcctaagtmtttcacgtttccctgtctgtgtctggaacttagggcagaatctcttaccacctgaggttacatctcactatttgcctttgtgggacccattggaggataa

SEQ ID NO: 495182 - DNA, 201 bp, Homo sapiens
ctcatgcctgtaatcccagcattttgggaggctgaggcaggtggatcacgctgtcaggagatcgagaccattctggccaacatggtgaaaccccatcttakccgggcatggtggcatgcgcctgtagtcccagctacacaggaggctgaggcaggagaatcgcttgaacccaggaggtggaggttgcagtgagccgacatc

SEQ ID NO: 495183 - DNA, 201 bp, Homo sapiens
gcacttagttcaagtggttaagtcagttgttcctgttgttagattgctgttgtgtagtcgactttccttctttaggtgggaagagtctctgaatagacttwaaaaaagcaaaaggaaccagctcttctttagctgattgatcattcctttacatctgactcttttcagcacttaaattcagattgtactatgctgattgct

SEQ ID NO: 495184 - DNA, 201 bp, Homo sapiens
taccgggggacctaggtatcctactatgaaaacagaataagaaagtcttgtaaacgccttcatttgattgattgattgattgattgattgattgattgatttattgccacatagaaagcaagcttaggcatcttcatgtgcacatgagaaaagccctggaagaggctgggggcggtggctcacgcctgtaatcccagtact

SEQ ID NO: 495185 - DNA, 201 bp, Homo sapiens
tcacccaatggcatcttgtgagccaggttgtctgaaaaacttcaaatcttggtggcagtgtggtgggtgtatctcccatatgagggattgttccagggatstgactcaattgacagctcctgaatttctaatatgccaaggcttttgtggtaagatgagcaagaatttttcaagctcagatttggggatcatagcttcttg

SEQ ID NO: 495186 - DNA, 201 bp, Homo sapiens
ctaccgggggacctaggtatcctactatgaaaacagaataagaaagtcttgtaaacgccttcatttgattgattgattgattgattgattgattgattgatttattgccacatagaaagcaagcttaggcatcttcatgtgcacatgagaaaagccctggaagaggctgggggcggtggctcacgcctgtaatcccagtac

SEQ ID NO: 495187 - DNA, 201 bp, Homo sapiens
gggtagcttatcctaagaacctgtgactattgggatggtcatctttttgaggccagcagtagaaagaaatttgcagtagtgactgacacattaaagcaacyccgaaacaaatcagagtgaaatagtgtcctggagttggggatatgtgggtgatatctgggctgcattttctctctaggtatccatggagagggtcctgtc

SEQ ID NO: 495188 - DNA, 201 bp, Homo sapiens
tctaccgggggacctaggtatcctactatgaaaacagaataagaaagtcttgtaaacgccttcatttgattgattgattgattgattgattgattgattgatttattgccacatagaaagcaagcttaggcatcttcatgtgcacatgagaaaagccctggaagaggctgggggcggtggctcacgcctgtaatcccagta

SEQ ID NO: 495189 - DNA, 201 bp, Homo sapiens
gaagttcctggagggactcaacaaccttagaggtattacaaggcttcaggctccctaccctttgtccttgctgatcgtgtgagcacttattatggtgtgtrttgtatagggtctgtaaaaccctcctgctctgagctggccctattttttatgcgtttaggcaattaaacagaagggatagagtttgtaaatgcaatccta

SEQ ID NO: 495190 - DNA, 201 bp, Homo sapiens
ttctaccgggggacctaggtatcctactatgaaaacagaataagaaagtcttgtaaacgccttcatttgattgattgattgattgattgattgattgattgatttattgccacatagaaagcaagcttaggcatcttcatgtgcacatgagaaaagccctggaagaggctgggggcggtggctcacgcctgtaatcccagt

SEQ ID NO: 495191 - DNA, 201 bp, Homo sapiens
ttttctaatctttcattcactattgtttgcttcattcacttatatacactgtataatagtctttatagcataaaacatacaatatatagcagtttctcttrttgacccaaagaaaggatcagatttaaactcttctttgctcctgcaacctgagtctttttcaggtgggagaagttcctggaaagaggacatgtagttttt

SEQ ID NO: 495192 - DNA, 201 bp, Homo sapiens
tcttctttgctcctgcaacctgagtctttttcaggtgggagaagttcctggaaagaggacatgtagtttttttggtttagtccttatcattttttggaatrttgctataggtcttagacaactattcccccaattctgggctgccaggcagagagttagatacaaaccattgcctttgtcaaatcctcctgtgggttgagt

SEQ ID NO: 495193 - DNA, 201 bp, Homo sapiens
ataggtgtgagccaccgcgcctggcccgagatggggtttcaccatgttggtcaggctggtcttgaactcctgacctcaggtgatccgcttgccttggcctyccaaaatgctgggattacaggcgtgagccaccgcacccggccctgtacattgttatttctatttccttaggcaatacctggcaaccagcccagtctgaat

SEQ ID NO: 495194 - DNA, 201 bp, Homo sapiens
ttttagtagagacggggtttcaccatgttagccaggatggtctccatctcctgacctcgtgatccgcccgcctcagcctcccaaagtcctgggattatagrtgtgagccaccgcgcctggcccgagatggggtttcaccatgttggtcaggctggtcttgaactcctgacctcaggtgatccgcttgccttggcctcccaa

SEQ ID NO: 495195 - DNA, 201 bp, Homo sapiens
ttttagaattccaggtggttggtgtttctgggcttcttgaagcacttgtcatttttctgtggcctttggaaacaggagaggctcttctctcacttgttttktgaatggttcgtaatgtactgggactatgtgggtaggctatgttggatcagaacatagaattttgcccctcaaatgcaggctttcatttgacgtcaggcc

SEQ ID NO: 495196 - DNA, 201 bp, Homo sapiens
tgccaccgcagtccagcgtgtaacagagtgagaccctgtctcaaaaaaaaaagaaagaaagacagagagagagggagggagggagagagagagagagagaraaagaaagagagaaagaaaagaaaggaaggaaggaaagaaaagaaagaaagagaaagaaagaacgaacgaacgaacaatgggaaaaattgactgacagac

SEQ ID NO: 495197 - DNA, 201 bp, Homo sapiens
ccagaatgagacgggcagtggagtttaatttaagaaattgacaaagtagtgctggttagatgctaaggaaaggagtgttacctttgttgcctacatgtgaytatatggtagtggtttgtggctgtctttgcctggacctgattttttagggcttaatttcactctaaatgcttctcaggtctacatatgggcctatatttg

SEQ ID NO: 495198 - DNA, 201 bp, Homo sapiens
ctgaggtcgcccagcaagagttcctcgaagttaagcaaagagtgaacagtggttgtgtgatgatggaaaacaagctggaggggattggccagtttcactgycgggtccgagagatgttctctcaattggcagacctggatgatgagctagatggcatgggtgctattggcagagacactgatagcctccagtcccaaatcg

SEQ ID NO: 495199 - DNA, 201 bp, Homo sapiens
agaatcgcttgaatccaagaggcggaggctgcagtgagctgagatcataggtgagcctgggtgacagagcaagactgtctcaaaaaaaaaaaaaaaaaaawgaaaagaaaagaaaaaaagaaactccatagtcattttatagtcatacctaatttttggtcaaaagatgatattacccaagacaaaattaaacccaatctc

SEQ ID NO: 495200 - DNA, 201 bp, Homo sapiens
tctgaggaactttactcagggtctggtagaagatgccccagatggatctgatgcttctcaacttctccaccaagctgaggtcgcccagcaagagttcctckaagttaagcaaagagtgaacagtggttgtgtgatgatggaaaacaagctggaggggattggccagtttcactgccgggtccgagagatgttctctcaatt

SEQ ID NO: 495201 - DNA, 201 bp, Homo sapiens
acttctccctgggctcccaggccctcctgcagcagcccccgcctgggccatgtcttcctcagatgaagagacgctcagtgagcggtcatgtcggagtgagyggtcttgtcggagtgagcgatcttacaggagcgagcggtcggggagcctgtctccctgtcccccaggggacaccttgccctggaacctgccactgcatga

SEQ ID NO: 495202 - DNA, 201 bp, Homo sapiens
ggagatggttgttatacgatccctatttctcaaagagtgagcctgtatagctaacaagcatacaataccattttcccctcatccttgattttgttttcttrtcatgtaggcattagtattgaaaggttaaggccttcatcctcactatgctgctgtggtttctattggttgttggagaaaccccaggctgataatactact

SEQ ID NO: 495203 - DNA, 201 bp, Homo sapiens
cccacctcagcctcccaagtagctgggactatagacacacgccaccatgcccagctgatttttttttcttttttttttttgagacagagtctcactctgtygccccagctggagtgcagtggcacgatcttggatcactgcaacctccgcctcctcggttcaagcaatcctcctgcctcagcctcccaagtagctgggact

SEQ ID NO: 495204 - DNA, 201 bp, Homo sapiens
aaacgactattataggaaaaaggtgtttaatggattcattcagcaggtaatttattgaatatccactgatacaaatgtattcccaggtattagggatataycagtaaataaagcaaagtcctttcccttgtagagcttatattctatcatttagaggcatttttgaaaagcaaagcacctaatattggatgaagcccatct

SEQ ID NO: 495205 - DNA, 201 bp, Homo sapiens
tagccgggtgtggtggcgggtgcctgtagtcccagctgctcgggaggctgaggcaggagaatggcatgaactcgggaggcgaagctgacagtgagccgagwtcgcaccactgcactccagcctgggcaacagagcgagaatccgtctcaaaaaaaaaaaagtggcattgttttatgtctttgcaaatcttaatttctggct

SEQ ID NO: 495206 - DNA, 201 bp, Homo sapiens
gattcattcagcaggtaatttattgaatatccactgatacaaatgtattcccaggtattagggatataccagtaaataaagcaaagtcctttcccttgtaragcttatattctatcatttagaggcatttttgaaaagcaaagcacctaatattggatgaagcccatctgtgggaggacagcagtgaaggagttaaaatgc

SEQ ID NO: 495207 - DNA, 201 bp, Homo sapiens
ttgggaggctgaggcaggagaatcatttgaacccaggaggctgaggttgcagtgtcctgtccggacagtagagcgtgactccgtctcaaaaaaaaaaaaawtttttttttacttgtaatcccctgtgatagtgatccacattacttaatatcttatatctgccggctttacataggattttctgtgatcaaacctcaaaaa

SEQ ID NO: 495208 - DNA, 201 bp, Homo sapiens
gcaacatagcaagatcctgtctctacaaaaagcaaggaaaaacaaattagccaggtgtggtggcatgagcctggagtcctagctactggggaggctgaggygagacgattgcttgagcccaggagttcaaggctgcagtgagctatgattgtgccactgaactccaacctgggcaacagagagggaccttgtctccaaaaa

SEQ ID NO: 495209 - DNA, 201 bp, Homo sapiens
actgaacataatcttagtacctcacagacagtgcacatgtactaacacctttcctgaaaccttaaaatataagaaatatagaaatacaggtagtttgtaartctttgctcttggggaagccaattttggatttcctttgtctttttgtcctatcatactccttgaaaggggtagtaaaagcatttttctctttttccctct

SEQ ID NO: 495210 - DNA, 201 bp, Homo sapiens
aaacgtggaatttttttttttttttgagacggagtctcgctctgtcgcccaggctggagtgcagtggcgcgatctcggctcactgcaagctctgcctcccrggttcacgccattctcctgcctcagcctcctgagcagctgggactacaggtgcctgccaccgcgcctggctaattttttgtatttttagtagagacgggg

SEQ ID NO: 495211 - DNA, 201 bp, Homo sapiens
taagtctttgctcttggggaagccaattttggatttcctttgtctttttgtcctatcatactccttgaaaggggtagtaaaagcatttttctctttttccytctctgtagttcaccccagtggggcacatagttgctggattcagcaacgttctttcccaaatgattcttaaggcatgcgggtcactgaggtttattttta

SEQ ID NO: 495212 - DNA, 201 bp, Homo sapiens
ccagcactttgggaggccgaggaaggtggatcacttgacaccagaagttcaagaccagcctgagcaacatagtgagaccaccatctccacaaaaaaaaaaattaggtgtggtggtgcatgcctgtagtcctagctacttgggggctgagaaaggaggatcccttgagcccaggaggtcatggctgcagtgagctatgattg

SEQ ID NO: 495213 - DNA, 201 bp, Homo sapiens
aaggccaggagttcaagaccagcttgggcaacatattaagaccacatccatataataataataataataataatttttattatttattatttaataatattaataataaagtctttaaaagcataatacaaaaattgtctccactctttcttttcatggcctgatttttcagattccatactcagccacttccaaagcctc

SEQ ID NO: 495214 - DNA, 201 bp, Homo sapiens
gcctttgctgttcctctcatccctggctatggttggctaagtctctttttcttaggtctcagggtgttcagctgttttgggaacttgttgaaaattgttgytttgcagtacaaaagacactctgttactttttaatcaatatctttttttttgagacagggtctggctctgttgcccaggctcgactacagtagcccatct

SEQ ID NO: 495215 - DNA, 201 bp, Homo sapiens
cttactcctctgggcccatgtgtctctcctccaagttgggagctctgagaagacatctcacaggcacctctctgcttcattcattcattcaataaaaaaaatggattaagctcctgccatgtgccaggcactgcggagataactgaatctggagttacaagacttaggcaaatgacctcacttcttggatcctcagtttcc

SEQ ID NO: 495216 - DNA, 201 bp, Homo sapiens
gattcttgtgccacagcctcctgagcagctgggactacaggcgcgtgctaccatgcccagctaatatttttgtatttttagtagagatgggattttgccaygttgtccaggctggcttcgaactcctggcctcaagcggtacacccgccttggccttccaaagtgctgggattataggcgtgagccactgcgctgggccag

SEQ ID NO: 495217 - DNA, 201 bp, Homo sapiens
tgtttgggtggtctctcctctaaaaagtcattgtgttggccgggagcagtggatcacgcctataatcctagaactttgggaggcttgaggcggtcagattmcctgactcaggagttcaagacaagcctgggcaacatggtgaaacccatctctactaaaatacaaaaaattagctgggtatggtggcacaagtctgtaatc

SEQ ID NO: 495218 - DNA, 201 bp, Homo sapiens
ggagcttattggacgatctcagggagcagacaaggatctggctgcaaaaggtgcttgatgattgtcattatttttaaaaatcaacagaataaattctaggstgtggttatcttcagcatcccaccagatttatttatttctttgaatgtaaaggcagtccccagtaatgagtattccagaaagtcactggaaaatcatttg

SEQ ID NO: 495219 - DNA, 201 bp, Homo sapiens
accaccatccccactaactgcatgccactctctgtcttctttactcattttatttttcttcagaactcttaatactgcctaacagattgtgtgtttgtttmttctctcctattagagatttttgtccattttgtttacctctgtatctttagcacttagaaccattcctagcacatagcaggtattcaataaatggttatt

SEQ ID NO: 495220 - DNA, 201 bp, Homo sapiens
gcttaaggccaggagttcaagaccagcttgggcaacatattaagaccacatccatataataataataataataataatttttattatttattatttaatawtattaataataaagtctttaaaagcataatacaaaaattgtctccactctttcttttcatggcctgatttttcagattccatactcagccacttccaaag

SEQ ID NO: 495221 - DNA, 201 bp, Homo sapiens
ccccaaactgatctatagattcaatgcaatccctgtcagaatcccagtggggttttttcttcttctttcttctcctcctcctcctcttcctcttattcttygtcttcctcttcctcctcctcctcttcttccagaaattggcaagctgctcctgaaattcatgtgaaaatgcaagggacccagaatagtcaaaacaatctt

SEQ ID NO: 495222 - DNA, 201 bp, Homo sapiens
agattgcttaaggccaggagttcaagaccagcttgggcaacatattaagaccacatccatataataataataataataataatttttattatttattatttaataatattaataataaagtctttaaaagcataatacaaaaattgtctccactctttcttttcatggcctgatttttcagattccatactcagccacttc

SEQ ID NO: 495223 - DNA, 201 bp, Homo sapiens
gaagattgcttaaggccaggagttcaagaccagcttgggcaacatattaagaccacatccatataataataataataataataatttttattatttattawttaataatattaataataaagtctttaaaagcataatacaaaaattgtctccactctttcttttcatggcctgatttttcagattccatactcagccact

SEQ ID NO: 495224 - DNA, 201 bp, Homo sapiens
aggaagattgcttaaggccaggagttcaagaccagcttgggcaacatattaagaccacatccatataataataataataataataatttttattatttattatttaataatattaataataaagtctttaaaagcataatacaaaaattgtctccactctttcttttcatggcctgatttttcagattccatactcagcca

SEQ ID NO: 495225 - DNA, 201 bp, Homo sapiens
tgaaggacccagggaagaaagttccctagggtgtatttgatttgggagccccctgagggtaatctgtggtgatgctgtttcagaagtcaccacctgactcrttgtcagatgagtctgagcccaagactcgtacctgccacataatatatacaggtcctctctccctttggttatgagctaaaggcctttaatcatgaggta

SEQ ID NO: 495226 - DNA, 201 bp, Homo sapiens
agtaggaagattgcttaaggccaggagttcaagaccagcttgggcaacatattaagaccacatccatataataataataataataataatttttattatttattatttaataatattaataataaagtctttaaaagcataatacaaaaattgtctccactctttcttttcatggcctgatttttcagattccatactcag

SEQ ID NO: 495227 - DNA, 201 bp, Homo sapiens
ggaggcggagcttgcagtgagctgagatcgtgccactgcactccagcctgggcgacacagcaagactccgtctcaaaaaaaaaaaaaaaaaaaaaaaaaaatatatatatatatatatatatatatatatatatatacacacacacacacacacatatgtatatacacacatatatacacacacacacatatatatcgtat

SEQ ID NO: 495228 - DNA, 201 bp, Homo sapiens
ctctctctcttctttctttcttttttcctcccctccccgcccctctcctctctcttcctttctcttttcttgtcttttctttctttctttctcttcttttstgtgtgtgtgtgtgtgtgtgtttgttttttttttttttttttttttttttgacggaatcttgctttgtcacccaggttgaagtgtagtggcgtgagtagc

SEQ ID NO: 495229 - DNA, 201 bp, Homo sapiens
gggaggcggagcttgcagtgagctgagatcgtgccactgcactccagcctgggcgacacagcaagactccgtctcaaaaaaaaaaaaaaaaaaaaaaaaawatatatatatatatatatatatatatatatatatatacacacacacacacacacatatgtatatacacacatatatacacacacacacatatatatcgta

SEQ ID NO: 495230 - DNA, 201 bp, Homo sapiens
atagattttgacacaagcttgaacttgtataatgaaagttccatgtgtgagaatttcatcagaataaaagcaacacagttttctttgttgtttaaaaactyagtcttctgtgtctatctatctttgtccagtaggggtcactgagggttaggctctcaataagagaaacactaatctagtgataaatgagctggattcctt

SEQ ID NO: 495231 - DNA, 201 bp, Homo sapiens
ctgggaggcggagcttgcagtgagctgagatcgtgccactgcactccagcctgggcgacacagcaagactccgtctcaaaaaaaaaaaaaaaaaaaaaaawaaatatatatatatatatatatatatatatatatatatacacacacacacacacacatatgtatatacacacatatatacacacacacacatatatatcg

SEQ ID NO: 495232 - DNA, 201 bp, Homo sapiens
acctgggaggcggagcttgcagtgagctgagatcgtgccactgcactccagcctgggcgacacagcaagactccgtctcaaaaaaaaaaaaaaaaaaaaawaaaaatatatatatatatatatatatatatatatatatatacacacacacacacacacatatgtatatacacacatatatacacacacacacatatatat

SEQ ID NO: 495233 - DNA, 201 bp, Homo sapiens
ttccttccagctccaaggaaaagcaaaacttacacttgtgttcttggagacacttttttcttttaaattcccaggtagatttggaagttcactgttaaagrtggttcgacacccttgttagtgtatgttacctactaggcctctctagaagagcattttgagttatttctgccataagatgaatggttttccaggcacttg

SEQ ID NO: 495234 - DNA, 201 bp, Homo sapiens
atattcccccatatgctcttctttcttttcttttatttatttatttatttattttttgagacagagtcttgctctgttacccaggctggagtgcagtggcrcgatcccagctcaccgcaacctccatctcctggagtcaagcaattctcatgcatcagcctcccaagtagctaagattacaggcatgtgccaccatgccta

SEQ ID NO: 495235 - DNA, 201 bp, Homo sapiens
cataatgtcctcaaggttcattcatgttgtagcatgtgccagaatttccttcctttttaaggctaaataatattccatttatgtatctaccacattttatytatccattcatctgttgatggatacttggcttgctaataatatgattatttttgggtttttttgacatcttatttaattaattaatttatttagacagcg

SEQ ID NO: 495236 - DNA, 201 bp, Homo sapiens
ttaagacttgattcaaaactgacatccagagaagttatgccattttatactctcactagtggcggtgtatgatgatacccagttgtagatcttctctccartcgtgaataatatcattaaaaacaaacatttcctagtttgataggtgaaaaattacctctcatggttttaatttgcatttatttgactagcaagaggggg

SEQ ID NO: 495237 - DNA, 201 bp, Homo sapiens
ctctttcctttattcccacttcattgtctgaactggacatcatcctagattccattctctctctcactctcctatgtcaaatcagtcatcaaatcttatgrtaattatatttctttcaaagtcagctatacttcttcatctttattgagatattattgtagtttagaaccactgtctgctttcactgttattattatagta

SEQ ID NO: 495238 - DNA, 201 bp, Homo sapiens
ctgggactgcaagcacaccaccatgcctagctaagataccattttatacccatcagattggcagaaggtaaaaattctgaaaataccaagtgtaggcgagratgaagagtgatgggaaaacctcttcatagcacttaagtggaagtataatttgctactgttctttagaaagtagtttgacaatattttgtagagttgaaa

SEQ ID NO: 495239 - DNA, 201 bp, Homo sapiens
tgaagtagaataatgatgtacctgtagacatggatggtagttttcacctcaagggaatattcagttgaaggagaagggagaggctggatccagattaaagrtttgtgactgctgatgaggctggtaatattgataacttcatgcagaggtttatggtttctaaaatgctttaacacattttttttaatgtgctaaatggta

SEQ ID NO: 495240 - DNA, 201 bp, Homo sapiens
tacagatatagatcaatatatttattgatctctcaatttctctttctctctctctctctctctcacacacacacacacacacacacacacacacacacacaaattcatatgtatttgtctccccatccagttcccaacccatagcacagggattattctagcctctttccatatttttaacccccttccccaagagagaaa

SEQ ID NO: 495241 - DNA, 201 bp, Homo sapiens
tggaagatattaaatggtgtggctgcctgggcagtcagaatgattgaccagcataaatcacaggaaacatcacctgttttttagttcctatttcatgagcsctggtgtgggcagtgctgttcatgtgccctcagagcatatggttgagtctatgcatgtcttgggtatactgtgtttgtatctgggtgagatggctcacaa

SEQ ID NO: 495242 - DNA, 201 bp, Homo sapiens
tcaggcattggttttgcttagaagcctaccagaattgctggaaacacaggatagtgaggtctgttgtttgtaattaccctgctcaactgttgctcacttartgctgctccaagttataaaatatgactcagaaatttgttgtctaagcttctgttttcttagagcaaccaatccatatctctatctagacataatatttgc

SEQ ID NO: 495243 - DNA, 201 bp, Homo sapiens
gaccttgaagagtagcgcatcttaaactcttcatagtgtaaaatgggtttctggcttcatgcctttcttccatgagtccaccacatgtatgcatgttccartgccacttagaactttattttgaattggcttaaattggcagcataaaaaccacatttacttgttttcacaaaaccctgtcaacatctaaaaatggtgaca

SEQ ID NO: 495244 - DNA, 201 bp, Homo sapiens
taacggagggggcccagctatttgttaatttttactcattcttcagatctcagcttagagttcacttcctctaggaagcccttaattcaccaccactcacmaaagttagggtatatattcccccatatgctcttctttcttttcttttatttatttatttatttattttttgagacagagtcttgctctgttacccaggct

SEQ ID NO: 495245 - DNA, 201 bp, Homo sapiens
ggggatttgatggcttattatttagctttctattaaaagttcacaaacgcctgacagaattagaattagattcaatcattccccagtgtcctttccagtamgtcccagaaaagcttttgactaaatattcagatcctagtgtgcatctatagcagcggaaacaaagacagacattttagaagtgtgtttgattgtgtggtg

SEQ ID NO: 495246 - DNA, 201 bp, Homo sapiens
atcttggcttactgcaacctccacctcccaggttcaaacgatactcgtgtctcagcctcctgagtagctgggtctacaggcatgcaccaccacacccagayaattttttgtatttttagtagagatggggtttcaccgtgttgaccaggcttgtctcaaactcctgatcctgaagtgagccactgtgtcctgcctcttttt

SEQ ID NO: 495247 - DNA, 201 bp, Homo sapiens
caaggtagagtctttgtcttttccattcctttcctttttttaaaaaaaaaaaagagacgaggttttgctatgttgcccatcctgaacttgaatttcaagcstcctcccaccttagcctcccaagtagctgggactataggcaccctctaccatgcctggctctttttctttcctttgcattttttttttcttaaagatttg

SEQ ID NO: 495248 - DNA, 201 bp, Homo sapiens
agaatcattagtgccagttatgaaaatacaggaaattagcctctctgattctgttggttttcttcatgaactgagaaatggaagtatcatggttttttgtkttttgtttcctttttccatttaccttaggatttgaaacagcccatggctgaaaggaaagctcagctggatgctcttgcttttgatattcagttctttatc

SEQ ID NO: 495249 - DNA, 201 bp, Homo sapiens
gttccaataaaactttatttacaaaaaaacacgtgacagaccagattttgcttgggggccacagtttgttgacccccctgctctagagagttgcttttctycttcttaagccccagattaattgattctttttattagtcaataagagaaaagaccatgagacacatgtgagccagagagttttctccccaatattgttct

SEQ ID NO: 495250 - DNA, 201 bp, Homo sapiens
tgtttctgtaagaaagccagtagctgtcaattctcagataacttctgaccacatgtggaaatactggcctgaacctcttccctccactcacccttttcaaratctgcaggtagcagccagacttaaactttttcctacctttaacaggaaatgacaaaagttgggaaaaaaagaaggggaatggctcggatgactctactg

SEQ ID NO: 495251 - DNA, 201 bp, Homo sapiens
caggacctcttgggaacttgaagggaaggcctgtctcctgtaggtagactgaccttgtccccaagactctaccctacttttctcagtctgcagtgccgttrggagaaataggttctgcttgagtgccagggaatttaggagatggcagattttggttcactttcctccaacttcacccagtaattattattttgattttta

SEQ ID NO: 495252 - DNA, 201 bp, Homo sapiens
attagcagtttgtaggtgggagggatacccacttgggagtgaagttgtcaagcaactgaggcaggtcatagggcttgtttaaactgaatggtctgctaggraagcttgcatttactttttttcatttgtagtcgtttgggctaatctctggaaacttgctttcctaggtgctgcccctcctccctccctgccttcaggaac

SEQ ID NO: 495253 - DNA, 201 bp, Homo sapiens
tgttagctgtgacttagatctctcttgataaggcatcattaaataatgattatttaagtaatgtcctgtggccttgaacaagtgacttaacctttttggcmgtaggtttccttggtttcaaaattgtagggtatacagactggtgctagactgagagacatcaattctctgtaaaatgaaaaaagataaagaaaatgtagt

SEQ ID NO: 495254 - DNA, 201 bp, Homo sapiens
tgtctggactttatttttctggctaacttacagagttgttgagcattagaaagaatagatacaaggtgcttagcacctaagtaggtgctgaataaatgctrtttaattttttttttttttttaagacagaatctcactgtcacctaggcaggaggagttcagtggtgccatcttggctcactgtgacctccgcctcctggg

SEQ ID NO: 495255 - DNA, 201 bp, Homo sapiens
tttgtatttttagtagagacggggtttcgccacgttggccaggctagtcttgaactcctgacctcaagtgatcctcccacctcggcctcccaaagtgctgygattacaggcatgagccactgtgcctggcctgacactgcttttagatagatctgtttttttcctgtctaaacatcttggtgtcatttctatttcagttta

SEQ ID NO: 495256 - DNA, 201 bp, Homo sapiens
tatcatttttttctccatttctttaagatgttggctaccagagtttcctggaaaaagcttactagatagatattatttcattggggaaaagggtcaaaatkccagagagagagattacttaaaatggtaatatggctgttgaggttgactagatattcttgtcctttccctttttgaagcaatgctgtcgaagcctaattt

SEQ ID NO: 495257 - DNA, 201 bp, Homo sapiens
tgaaggctttcctttagttaataacagaacactcactgtaagaaagaattgagttcaaacccttcaccattttccaggcttactttgagtatgcacttagmctatgtttctgttactgtatctataaagtgagaacaataatacctcactgagtgattgtaaagattaaatgagataatgtatacataggaccatgcctca

SEQ ID NO: 495258 - DNA, 201 bp, Homo sapiens
atgagaaaaggttgaaaagaaaatcaaaagaataatattttatgatgtgaaaataatatgaacttcagtttttagtgttcataaataaagttttattctamcaaccacaccctttcatctatatattgcctatggctgctttcacttataatgagagagatagtatggcctgatattttctgtctggccttttacaggaaa

SEQ ID NO: 495259 - DNA, 201 bp, Homo sapiens
tcttaccaagtggagaaactgttgatggggccagcattgcaaagctatcttagcagcaaaagaatataagtataattttttataaaggagatgaaatggasgaaagtgaagctatggtatcagtccattacacttctaagaagagcctggttttgtacttctgtgttagaagtcagattaccaaatagcacagttcttatt

SEQ ID NO: 495260 - DNA, 201 bp, Homo sapiens
ttcaagttggagatttaataaaaagggaatacgaatttcctctagaagggattaagaatcattcctgctaagaaccttgagtgacgttttgttgcctggcrgctaaaataatttgtctctttccatgagtatgttgtcttgtgctgtgttaacttcctgatacctaagcttaaagtgagggccaaaggacaaattcagtgc

SEQ ID NO: 495261 - DNA, 201 bp, Homo sapiens
cgcggcggcgcggggaagggggaggagagccgcccgccagccgagcacttccagcgagctagcgagctagcgggtcgcgctgcgcgggggaggaggactckccccccgcccgaccctagcggagccttttgttcccagccagaagtttgcatgccgggaccgtgacagctgcgggcggggaggacggcggggccgcggggc

SEQ ID NO: 495262 - DNA, 201 bp, Homo sapiens
tgaaggtgccgtatttaaggggtgtaggggaaggaatgatagctaaatagaactaagggagacttaatcgtgctttaccgcacatttgtgcagagattaamaacagcaacaaaatctacccagtttttggtcattgcttctactagcctttctttcttcctgtcttttatgaaatctacccaaaacagtagttcccaaagg

SEQ ID NO: 495263 - DNA, 201 bp, Homo sapiens
gcattagaaagaatagatacaaggtgcttagcacctaagtaggtgctgaataaatgctatttaattttttttttttttttaagacagaatctcactgtcayctaggcaggaggagttcagtggtgccatcttggctcactgtgacctccgcctcctgggttcaagtgatcctcgtgccttggccaaccaagtagctggtat

SEQ ID NO: 495264 - DNA, 201 bp, Homo sapiens
aatcttgatacctagtattatttgaatttctttttcctttactcattcaccataattgtttgttgtaactattgtattcttactgaggattttttttttttcatttctaggggaaattagtaaaacaaaaggtatttgaagacattttgaaatttttatttggaacataaaactttgattttgggaattatcaaaatatat

SEQ ID NO: 495265 - DNA, 201 bp, Homo sapiens
gtagagatgctggtggtggggagtgggctctctcttgtttgtttatagcctttggtggggctgagattataaagaacattaaaatgaatattgccttttckttgcccgttttcctctcacataagggtactttctgagacttttacctcagttttatctttctgcctaaccttcaatgttagtcagaaagatctttgctag

SEQ ID NO: 495266 - DNA, 201 bp, Homo sapiens
aaagaaaaattagaatggcatgctgtagcatgtggcataagtaatgttttgggggtttttttgtttgtttgtttgtttgttttttcattttttaaaaagcraagtagagacaaggtcaaataatggatgtttaaaacatttaaggatcagcctggtcaacatggcaaaaccccatctctactaaaaatacagaattagctg

SEQ ID NO: 495267 - DNA, 201 bp, Homo sapiens
acatattcaggtctaaatgaaatgaggcagtggactaaaaggaaaccgaatgaattccacctcctttaaatacttactagtttaaaagaaaatctgttaaytttttcctttttcatctgtgtgttgtttgacctattacagcaaacatacatagcttttataaaaaaaagaaattataaaaaaaagaaaaaacacttctat

SEQ ID NO: 495268 - DNA, 201 bp, Homo sapiens
ttacataattgatttcaaagaaaaattagaatggcatgctgtagcatgtggcataagtaatgttttgggggtttttttgtttgtttgtttgtttgttttttcattttttaaaaagcaaagtagagacaaggtcaaataatggatgtttaaaacatttaaggatcagcctggtcaacatggcaaaaccccatctctactaaa

SEQ ID NO: 495269 - DNA, 201 bp, Homo sapiens
ctcccaaagtgctaggattacaggcataagccaccttgcctggcatggttttgaggtttttagatattgaactggattcttgtaggtaactcagttctgayttcattttgtgtgtttcttttaccaatcttctaatcatacttggccaattgagaacgctctccggtggttttatgttttagttcttactatgtagaactt

SEQ ID NO: 495270 - DNA, 201 bp, Homo sapiens
gcctgggcaacatggtgaaacccatctctactaaaatacaaaaaattagctgggtatggtggcacaagtctgtaatcccagttacttgggaggctgaggcrggagagtcacttgaacccgggaggcagaggttgcagtgagccaagattgtgccactacactccagtgtgggtgacagagcgagagtctgtctccaaaaaa

SEQ ID NO: 495271 - DNA, 201 bp, Homo sapiens
tttacataattgatttcaaagaaaaattagaatggcatgctgtagcatgtggcataagtaatgttttgggggtttttttgtttgtttgtttgtttgttttttcattttttaaaaagcaaagtagagacaaggtcaaataatggatgtttaaaacatttaaggatcagcctggtcaacatggcaaaaccccatctctactaa

SEQ ID NO: 495272 - DNA, 201 bp, Homo sapiens
atttacataattgatttcaaagaaaaattagaatggcatgctgtagcatgtggcataagtaatgttttgggggtttttttgtttgtttgtttgtttgttttttcattttttaaaaagcaaagtagagacaaggtcaaataatggatgtttaaaacatttaaggatcagcctggtcaacatggcaaaaccccatctctacta

SEQ ID NO: 495273 - DNA, 201 bp, Homo sapiens
aacaatttacataattgatttcaaagaaaaattagaatggcatgctgtagcatgtggcataagtaatgttttgggggtttttttgtttgtttgtttgtttgttttttcattttttaaaaagcaaagtagagacaaggtcaaataatggatgtttaaaacatttaaggatcagcctggtcaacatggcaaaaccccatctct

SEQ ID NO: 495274 - DNA, 201 bp, Homo sapiens
taaaaacgtagaaagacagccttgagagggaggaagagtggctatttcactgaaattggaggttaagagttgtcataggattggagtcaccatgaagacarattgtagtggtttactggttctctcaatatctagtgtgtggccttgggtagggtggctgaaccggggctgaggatgatgccccaaagaactatgtcaagt

SEQ ID NO: 495275 - DNA, 201 bp, Homo sapiens
cagccatttattgaaggtaaatattccatacagaaatcagtaggattaactggaagttcacatacatactgaattttgagctatatccttgctcccgctatggtttgaccagcccaagggggaagacctaatggtactgatataagtggtttcccaactgtatggcccagctccatcaccctcagtgaagactacagccag

SEQ ID NO: 495276 - DNA, 201 bp, Homo sapiens
ataagaggagagaagaagcccgtttagctctggacagggcctctgtttcctctgagatctcttgtctactctccctggtccagggctccatctttgcatamctttttacagatagatttgaagtgccaacttcattctgttttggagtactggcattggacacaattgattacatccctgcctgtttaaaatattctcttc

SEQ ID NO: 495277 - DNA, 201 bp, Homo sapiens
gagtaattatgttgacagccctacactatcaaagttttgtttgctgtgggtatttcatgctggagtaaagggtgcccttccttcagtggcagctatgttcytgggaaactggttgcttcctaatttttgcctcccattttggattttttcacttgtttcttgagcatatgtaacttctcatttcctatggttaaaaatcag

SEQ ID NO: 495278 - DNA, 201 bp, Homo sapiens
tttcctttgcagcactctagaaggcttttctgactctggctggactcatctacccatcattcgccatgctattacattttggctcatagtaactcctaagrtgtctcaggataattaagactccccatcttcttgtccaaactttctaggacgttgttgcatgttggttagagtgtgtaatagatctggcatcaatttaaa

SEQ ID NO: 495279 - DNA, 201 bp, Homo sapiens
aaggtatggcctgaaaactcttttccctccttaggaattaaagaaggaggtcatggagcacaggctggtgttggacacagtgaatgaggtgagccgtgctstcttagagctggtgccctggagagccagagaagggctggataaacttgtgtccgatgctaacgagcagtacaaactagtcagtgacactattggacaaag

SEQ ID NO: 495280 - DNA, 201 bp, Homo sapiens
ggcactgtgtttcatatacagcttccagaactgtgagccaattaaacctcttttctttataaattacttgatctcaggtatttctttatagcagtgcaagwatggcctaacacaacatatgatgttgagtatttttcaaatacttacttgccatctgtatatcttatttggtgaggtatctgttcaattttttaatcaggt

SEQ ID NO: 495281 - DNA, 201 bp, Homo sapiens
tgcttgagcccagaagttcaaggttgcaatgagcagtgatcacaccactgcactccagcctgggcaacaaagtaagactctttttaaagaaaaaaaaaaaaccttagaaacatagatagagaatgtaacctattcttaaagtttggtaacaaataaaaagtgaattagattcatattttagtgagggggcaagggaagatt

SEQ ID NO: 495282 - DNA, 201 bp, Homo sapiens
ttaaaacacagatgtcttctgtaaatagagttggaaaaatactaccagtgagctctttgtttataaatgtttcttttaacttatccatgcaggatctgaartggaaagctacttctctttcatcagtcaagaggtacattacaacagaatccttgatgcactgagaagagagctgggttccaaatctcactcagtgatcta

SEQ ID NO: 495283 - DNA, 201 bp, Homo sapiens
agttggaaaaatactaccagtgagctctttgtttataaatgtttcttttaacttatccatgcaggatctgaaatggaaagctacttctctttcatcagtcragaggtacattacaacagaatccttgatgcactgagaagagagctgggttccaaatctcactcagtgatctaggagaggagaggcagccagtgttctgcc

SEQ ID NO: 495284 - DNA, 201 bp, Homo sapiens
cttctatgctttgaaacagcttaagtggtattaaaatgatttatttcttaaatatttggtagaattccactgtgaaattctgtgccaagtacttggaaaamttttcctattcttctaggataattggtctacttaagtttttgtttctcctgaggacaatttttgtaaattatattttactagaaaattataatttcttac

SEQ ID NO: 495285 - DNA, 201 bp, Homo sapiens
ttctgtttaatgagaatggaccagatcagttgttagaaatcacattgaggcagggcatggtggcttacacctataatctgagcacttgggagactgaggcrggaggatccatttgagcctaggagtagtgagctatgatggcttcttcctgccagctgcacagacaaaatcaattccctgagatcgtggcattgcagtaag

SEQ ID NO: 495286 - DNA, 201 bp, Homo sapiens
catgattgtgccactgcactccagcctgggcaacagagtgagaccctgtctctagatacatagatagatagatagatagatagatagatagatagacagayagatagatagatagatagatacgtacgtacatacatacatacatacatacatacatacatagagtgagaccctgtcgatagatagatagatgaatgaatg

SEQ ID NO: 495287 - DNA, 201 bp, Homo sapiens
gagccatgattgtgccactgcactccagcctgggcaacagagtgagaccctgtctctagatacatagatagatagatagatagatagatagatagatagayagatagatagatagatagatagatacgtacgtacatacatacatacatacatacatacatacatagagtgagaccctgtcgatagatagatagatgaatg

SEQ ID NO: 495288 - DNA, 201 bp, Homo sapiens
tggatcacctgaggttgggagtttgagaccagcctgaccaacatggagaaacctcatctctactaaaaatacagaattagccaggcatggtggtgcatgcstgtaatcccagctactcgggagggtggggcaggagaatcatttgaacctgggaggtggaggttgcggtgagccgagatagcaccattgcaatccagcttg

SEQ ID NO: 495289 - DNA, 201 bp, Homo sapiens
gatagcaaaataaagattggttgatggattactttacaattagagtgtggatttatgtagtttatttgtatgcctttttttttttttttttttttttttttgcgatggatctcgctctgccacccaggctggagtacagtggcgtgatcttaactcactgcaaactccaccttccgggttcaagcgattatcctgcctcag

SEQ ID NO: 495290 - DNA, 201 bp, Homo sapiens
agatagcaaaataaagattggttgatggattactttacaattagagtgtggatttatgtagtttatttgtatgcctttttttttttttttttttttttttttgcgatggatctcgctctgccacccaggctggagtacagtggcgtgatcttaactcactgcaaactccaccttccgggttcaagcgattatcctgcctca

SEQ ID NO: 495291 - DNA, 201 bp, Homo sapiens
catacctcaacataataaaggccatatatgacaaacccacacctaatagcatactgatagggaaaagctgtgaaagccttttctctgaaaactggaacaargatgctcactttcaccactcctattcagcatagtactggaagtcctagctgcaacagtgaggtaagagaaagaaagaaaaggcatccaaattggaaaaga

SEQ ID NO: 495292 - DNA, 201 bp, Homo sapiens
ccaaagttttagaaataaagttttattggaacacatctgtactcatcgagtactttgtaacagagaccatatggccctcaaagccttttttttttttttttaatagagtctcattttgtcacacaggctggagtgcagtagcatgatcataactcactgtaactttgaactcctgagctcaagggatcctcccatcttagc

SEQ ID NO: 495293 - DNA, 201 bp, Homo sapiens
tgaactcctgagctcaagcgatctgcccgcctcggcctcccaaagtgctgggattacaggtgtaagccattgcacctggccctgaatattttttaaagagraaatcggtgagggatattagcacaagggaaggaggcataaaggatgcctcttaattaggttttttgtttgtcaatttttaaactttaaatttattcattt

SEQ ID NO: 495294 - DNA, 201 bp, Homo sapiens
ttagatagagaagatgaccaagagctgagccctagaatatttgggagtctgaggtgagaggattacctaagaccaggatttcgagaccagcctgggcaacrtagcaaggctctgtctctacaaaaaaaaaaaaaaaaaaaaaaaaaaaaaaaaattaataattagctggatgtgatggcatgtacctgtagtcctatttac

SEQ ID NO: 495295 - DNA, 201 bp, Homo sapiens
aggtggtgccatctgatgcatcagaatgcaaggtccgaaaaatactcaaacaccagtcttaggttttgcaatagtgatgttatctgtaggagcaattggggaagttacaaatcttgtgacctctggctgcatgacccctgaaccataattctaactgtgtggccagtctgttagttttataaaggcagtttcatccccaag

SEQ ID NO: 495296 - DNA, 201 bp, Homo sapiens
aggctggtctcgaactcctgacctcaggtgatccacctgccttggcctcccaaagtgctgggattacaggcgtgagccactgtgcccagcctattaatttwaaaaaaattaattcttccatattctgctatagaacttttataattttaatatttaaatttttgatccattcggaatttatcctagtgtaaggtataaaac

SEQ ID NO: 495297 - DNA, 201 bp, Homo sapiens
tttgttgaaaagactgtcctttccccattgaatggttttggcacccttcatgtcacagtcaattaaccatgttagagagggtttatctctctctctctctyttttttttttttttttttttgagacagggtctcattctgttacctaggctggagtacagtggtgctatctcactgcagccttgacctcccagactcaagt

SEQ ID NO: 495298 - DNA, 201 bp, Homo sapiens
atcctactttatttctaagagtttgactaccctagatatcttatgtaagtgaaaacatacagtatttgtctttttttgactgccttatttcacttagtcartctatgtttaactttttgaggacccaccagactgttttccgtagtggttgtgccattttacagttctatcagcaatatgtaagggttccagtttctccat

SEQ ID NO: 495299 - DNA, 201 bp, Homo sapiens
caggcgtggtggcacatgcctgtagtcccagctacttgggaggctgaggcaggagaattgcttgaacccaggaggtggaggttgcagtgaaccaagatcgsgtcactgcactccatcctgggcaacagaacgagactcaaaaaaaaaaaaaaaaaaaaaggccaggctaacacaaggaacctaacttcctctttcctcttg

SEQ ID NO: 495300 - DNA, 201 bp, Homo sapiens
ggattcctgaattggtctaaagattaaactagttcatctctaactgcctttataactttcaccctaagtttctgttttatgtcatggcttagggcctggtrgattgaagttacacagcaaatatgatgcttatttagaagagctaatacacttttaagaactggcttttgatctgtctggtactaatatatgccattgtgt

SEQ ID NO: 495301 - DNA, 201 bp, Homo sapiens
ctgcaactcattatttcacagcaggaaggtaagctcagcagtattgcttttatttttaattagatagtcatcctgaaacgtgtctgtattagctgtgttgstccatagaaagaataacagctgagcagacttgtcatgtagatttgccatgtgtttggtattgatacacagctaatgtacttgtcagtattcccattctag

SEQ ID NO: 495302 - DNA, 201 bp, Homo sapiens
tgtttatatttggagaagtcataatctctcaggattttgatttctttttctttaaattagagatgataatacatgctttgcagagttgtcacaaagattasagataacatacaaaacccttggtagaatgcgtggtctgtagtaaatagtggctgcagttattatttccagaagcatatttcagacaggagtgtggtctga

SEQ ID NO: 495303 - DNA, 201 bp, Homo sapiens
gaggcaggagaattgcttgaacctgggaggcagaggttgcagtgagccaagatcactccattgcactgcagcctgggcaacaagagagaaactccatctcaaaaaaaaaaaaaaaaaatgctttgtgaccagatgcagtggctcacgcctgtaatccctacactttgggaggccgaggcaggtggatcacctgaggtcagg

SEQ ID NO: 495304 - DNA, 201 bp, Homo sapiens
ggctgaggcagaattgcttgaacccgggaggcagaggttgcagtgagctgagattacgccactgcactgcagcctgggcaacagagtgagactctgtctcaaaaaaaaaaaaaaaaaaagccgggcgtggtggtgcacgcctgtaatcccagctactcaggaggcagaggcaggagaatcacttgaacgcaagaggaggag

SEQ ID NO: 495305 - DNA, 201 bp, Homo sapiens
tcatccctggaggcagaggctacaaagccgaaatcacaccactatgctctatcctgggtgacagagtgagactctgtctcaaaaaaaaaaaaaaaaaaaargagagagaaagaaatgtcacatctcaaatcctttcataattagaagtttatttcacttaaacttctatgtgcaaaaaatatttctacaaatacagtttga

SEQ ID NO: 495306 - DNA, 201 bp, Homo sapiens
gaggccaagacgggagaattgcctgagcccaggagtttgagaccagcctgggcaacatgacgaaactctgtctctgggggaaaaataaaataaaataaaawaataaaaaaataaaaaataaatctttttcttactatcttaacagtatttaattatgttaagtacatacttaacacaactgttaagtatgtacacatggtt

SEQ ID NO: 495307 - DNA, 201 bp, Homo sapiens
catttatgtttatgcaaaaatggcagtgttaataatgctttattctgttgcctgggaacaatggcagtatttctttatatatatatatatatatatatatwcacacacacacacatacactttaagttctggggtacatgtgcagaatgggcagtatttcttaatgtccttctattccctcataatacttggtgaatactc

SEQ ID NO: 495308 - DNA, 201 bp, Homo sapiens
tcttgaactcctgacctcaagtgatccacctacctcagcctcccaaagtgctgggattataggcatgagccaccgcgcccaacctattttattctattatwttattttattttattttattttttgagacagggtttcgctctgtcacccaggctagagtgcagtgtggtgtgatcatggcttactgcagtcttgacctcc

SEQ ID NO: 495309 - DNA, 201 bp, Homo sapiens
ggtcttgaactcctgacctcaagtgatccacctacctcagcctcccaaagtgctgggattataggcatgagccaccgcgcccaacctattttattctattmttttattttattttattttattttttgagacagggtttcgctctgtcacccaggctagagtgcagtgtggtgtgatcatggcttactgcagtcttgacct

SEQ ID NO: 495310 - DNA, 201 bp, Homo sapiens
gctggtcttgaactcctgacctcaagtgatccacctacctcagcctcccaaagtgctgggattataggcatgagccaccgcgcccaacctattttattctwttattttattttattttattttattttttgagacagggtttcgctctgtcacccaggctagagtgcagtgtggtgtgatcatggcttactgcagtcttga

SEQ ID NO: 495311 - DNA, 201 bp, Homo sapiens
aggctggtcttgaactcctgacctcaagtgatccacctacctcagcctcccaaagtgctgggattataggcatgagccaccgcgcccaacctattttattmtattattttattttattttattttattttttgagacagggtttcgctctgtcacccaggctagagtgcagtgtggtgtgatcatggcttactgcagtctt

SEQ ID NO: 495312 - DNA, 201 bp, Homo sapiens
gtcagtcaggcattttgccctttgacaccaaaaggatagtagtgaaaatggataatgatgtggtagaagggaaggaaagtgagggagtttaacagatggcyttatcgatgtgattacttatctgtggagaagtcagtttggagactgaagacactatggtgagtttctgacttgagtattatggccatgggaatcttaaat

SEQ ID NO: 495313 - DNA, 201 bp, Homo sapiens
tgggccttatgtttcttcaaatataaaatgaatgactgaagttgatgttttctactggctctaaaattaagaaaatttggtttttaaaattattattattwttttagtgatgaggggtcttgctgtgttgcctagtctggtcttgaactggcaggcatgatggcacatgcttgtagtcccagctacacaggtagctgaggc

SEQ ID NO: 495314 - DNA, 201 bp, Homo sapiens
tcaaagtgctgggattacaggtgtgagccaccgtgcctggccacgttttgagattaaatgaggaaatgcttttaaaattcctgatgtttaaaaaaaaaaaacagtggccaggggcagttcacacctgtaatcttagcactttgtgaggctaaggtgggaggatcacttgaggccaggagttcaagaccagcctgggcaata

SEQ ID NO: 495315 - DNA, 201 bp, Homo sapiens
tacaacagcttcaaataggataaaatacctaggaacaatcttaaccaaataagtgaaagatctttacaatgaaaactataagactttttttttttttttttatccagtgtcttgctctgtcgccaaggctggagtgcagtgatgtgatcttggctcatcgcaacctctgcctcccggcttcaagcaatttttgtgcctcag

SEQ ID NO: 495316 - DNA, 201 bp, Homo sapiens
tttctttgtctctctctttcttcttcctttccttttttccttccttccttccttccttccttccatctcttttctctttctctctctctctctctctctctttcttttttggagtctcactctgtcacccaggctggagtacagtggtgccatctcagctcacttcaacctctgcctcatgggttcaagtgattctcttgc

SEQ ID NO: 495317 - DNA, 201 bp, Homo sapiens
ttagtacacgtaaatcacttagaatagtacctggtatgtggtaagtgctcagtaaatgttagctattattattagtttcttttcctctggctgcttctttyagtggcctattatagcctttgttgttgttgttgttgttgttatttagtttttatttcgtaatcataaacttaactctgcaatccagctatgcatggaagg

SEQ ID NO: 495318 - DNA, 201 bp, Homo sapiens
ctaaaaaattacttgtgtccttataagccacataatttgggcatttttgaaagactgctaaatgctatttcctagtctaagaacaaaaatgattaagcttytctaacacagtgtttctcaaccagggcattattggcatttagggcaggacaattctttgttttgtgcattgtaggacatttagcttccctagcacctgcc

SEQ ID NO: 495319 - DNA, 201 bp, Homo sapiens
ccatcataaaatgtcatatatttgaaataatgtattttcttattttaaaagtaatcattcccacattttataaaattgggcttggttttagggtttgtacrtgtatatctttgctgccttttattagttattaaaatttgtcagaataaattgacagccatttatagcttggttgatttcatttaaaatatagtcatttag

SEQ ID NO: 495320 - DNA, 201 bp, Homo sapiens
ttaaatgcagaaaagagtacagtataataaataacacccagaattaacaaatattaattaatgaaaaatgataaaattaacagatatatcattttgtgttrtttgccacaggtttgtttttcaatagaaggaaacaaaaatattattggcagtccatcaccttaaccacttggccacttcatcacgttaaggaaacaaaat

SEQ ID NO: 495321 - DNA, 201 bp, Homo sapiens
ttatattaggctagagagaactcatatggcttaagtatgacttacatgtttggtcaatggtattaaattatggaattaaattatactgcttacttgaaackttttatccttatatagaattattggcttcctagtctactacaaaaatattcagccagtatttttattgtggtgactttctttcaaatttataagtcaaat

SEQ ID NO: 495322 - DNA, 201 bp, Homo sapiens
cagtccatcaccttaaccacttggccacttcatcacgttaaggaaacaaaattttattagtatagtggatgtctcttttgtttccctttcttgtcatttcwctttctttcccctgaggcaaatactattatgaatttagtgtcttcatttttagttcatgcttttagatgttcactataaatatgtaatatctttaataat

SEQ ID NO: 495323 - DNA, 201 bp, Homo sapiens
aagtctagctttgctagtaaataggttatagcattaacttttagcatttgcactttctgggccttatgtttcttcaaatataaaatgaatgactgaagttsatgttttctactggctctaaaattaagaaaatttggtttttaaaattattattatttttttagtgatgaggggtcttgctgtgttgcctagtctggtctt

SEQ ID NO: 495324 - DNA, 201 bp, Homo sapiens
aaaaattctggaaaaacatactttttaaaaaagaataggctggatgcattggctcatgcctgtaatcccagcactttgggaggccgaggtgggcggatcamctgaagtcgggagtttgagactagcctgaccaacatggagaaaccccatctctactaaaaatacaaaattagcttggtgtggtgctgcatgcctgtaatc

SEQ ID NO: 495325 - DNA, 201 bp, Homo sapiens
cacccctctggctgctcagtcctgcctcaggtaacgtgaaaagaggacgggggtcacaaacccgggcatcctgcctggcccgcgcgcgctgccgctccacmtcctctgccccggagcagaggcgcctgcgtccctccgcacccgacgggacccctcggcttcccagaggtccccctctcagcggcggcggacgctcccttc

SEQ ID NO: 495326 - DNA, 201 bp, Homo sapiens
ctttctttgtctctctctttcttcttcctttccttttttccttccttccttccttccttccttccatctcttttctctttctctctctctctctctctctctttcttttttggagtctcactctgtcacccaggctggagtacagtggtgccatctcagctcacttcaacctctgcctcatgggttcaagtgattctcttg

SEQ ID NO: 495327 - DNA, 201 bp, Homo sapiens
aaaattagtcaggtgtggtagcatgcacctgtagtcccagctattggagaggctgaggtaggaggatcacctgagcccaggaggttgaggctgcagtgagycatacttgcactactgtattccagccttggtgacagagcaagaccctgtttcaaaaaatatatagtgaaaacggtttggtgaaaagtcacatgaaacctt

SEQ ID NO: 495328 - DNA, 201 bp, Homo sapiens
atctcagctatctaatcattagtattactttagcatgtgatagggtctctacactaaatatcagtgtttgttatgagctctctaattttttttttttttttgagacagacgtttgctctattgcccaggctggaatgcagtagcccaaacacggctcactgcagctttgacctcctgggctccagcaatcctcccaccttg

SEQ ID NO: 495329 - DNA, 201 bp, Homo sapiens
gctgagacaggatgattgcttgagcccaggaggttgaaggttgagaatgcaatgagccatgattgtaccactgcacttcagcctgagcaacagagagagayctcttaaaaaaaaaaaaaaaaaaaaaaaagaataggaatgtaccataagtatgtctttcattcacaagacctaaccttgtctttcacttagtcacaagta

SEQ ID NO: 495330 - DNA, 201 bp, Homo sapiens
ctcctgagtagctgggactataggtgcacgtcaccatgcctgactaatttttgtatttttagtagagatgggatttcaccatgttggccaggatggtctcracctcctgacctcgtgatccacctgcctcagcttcccaaagtgctaggattacaggtgtgagcctctgtgctcagccttctaccacttcttggttgtgag

SEQ ID NO: 495331 - DNA, 201 bp, Homo sapiens
ccaggttcatgccattctcctgcctcagcctcccgagtagctgggactacaggtgccggccaccatacccggctaatttttttgtatttttagtagagacrgggtttcaccgtgttagccaggatggtctcgatctcctgacctcatgatccacccgcctcggcctcccaaagtgctgggattacaggcgtgagccactgc

SEQ ID NO: 495332 - DNA, 201 bp, Homo sapiens
agacaggatgattgcttgagcccaggaggttgaaggttgagaatgcaatgagccatgattgtaccactgcacttcagcctgagcaacagagagagacctcwtaaaaaaaaaaaaaaaaaaaaaaaagaataggaatgtaccataagtatgtctttcattcacaagacctaaccttgtctttcacttagtcacaagtatcag

SEQ ID NO: 495333 - DNA, 201 bp, Homo sapiens
ggagtacagtggcactatctcggctcactgcaagctccgcctcccaggttcatgccattctcctgcctcagcctcccgagtagctgggactacaggtgccsgccaccatacccggctaatttttttgtatttttagtagagacggggtttcaccgtgttagccaggatggtctcgatctcctgacctcatgatccacccgc

SEQ ID NO: 495334 - DNA, 201 bp, Homo sapiens
ctcttgacctcaggtgatctgcccgccttggcctcccaaagtgctgggattacaggtgtgagccacggtgcccggacttgaacacctttttttttttttttgagatggagtcttgctctgtcgcccaggctggagtacagtggcactatctcggctcactgcaagctccgcctcccaggttcatgccattctcctgcctca

SEQ ID NO: 495335 - DNA, 201 bp, Homo sapiens
actcttgacctcaggtgatctgcccgccttggcctcccaaagtgctgggattacaggtgtgagccacggtgcccggacttgaacacctttttttttttttttgagatggagtcttgctctgtcgcccaggctggagtacagtggcactatctcggctcactgcaagctccgcctcccaggttcatgccattctcctgcctc

SEQ ID NO: 495336 - DNA, 201 bp, Homo sapiens
ctgatagcaactgtcatttttcatggctataaaaatattctcttggccgggtgtggtgggggctcacgcctgtaatcccagcactttcggaggctgaggcrggtggatcacctgaggtcaagagttcgagaccagtctggctagcatgatgaaaacccgtctccactaaaaatacaaaaattagccaggcgtggtggcaca

SEQ ID NO: 495337 - DNA, 201 bp, Homo sapiens
agtggtgtgatctcagctcactgcaaccaccgtctcccaggttcaagtgattctcccgtctcagcctcccgagtagctggaattacaggcacccgccatcrtgcccggctaatttttgtattttagtagagacggggtttagccatgttggccaggctggtcttgaattcctgacctcaggtgatccacctgcctgaaatt

SEQ ID NO: 495338 - DNA, 201 bp, Homo sapiens
ccaccacacctggctaatttttgtgtgtgtgtgtatatatatgtagatatatacacacactaagattttatatatatatctatatatagatatagatatakatatattttttagagatggggtttcaccacgttgtgcagactggttttgaactcctgagctcaagcgatctgcccgcctcggcctcccaaagtgctggga

SEQ ID NO: 495339 - DNA, 201 bp, Homo sapiens
ccagactggtctcaaacttgtgagctcaagcagtcacccacctcagcctcctaaggtgctgggattacaggcatgcactgtgcccagccaactcatacatyttgagagccttcatgtttaacttcaatctcctgaatatgtgttacaggagcaaatgacatgagaagggttaagaaattcttgccttataggaatgacagc

SEQ ID NO: 495340 - DNA, 201 bp, Homo sapiens
ctgggattgcaggtgtgagccactgcaaccagctgggttctgaatatcttctttcttttaatttttcttatttctccaagaaaaaatagagatttttttttgagacagggtcttgctctgttgcccaggctggagtgcagtgacaccatcatggctcactgcagccttggcctcctgctgggctaaaatcatcctcccacc

SEQ ID NO: 495341 - DNA, 201 bp, Homo sapiens
cttagtctattttcaagctgtaaacattataagctttcttttataggtgcagaagtatgaaccagaatttttccccaaattgagattagatctacattggraagaatccatctcttggaaccctaggattacacagatgtgccttctcaggtgctggccccgggtatgggaggtggctgagtagatgagacttctgttctc

SEQ ID NO: 495342 - DNA, 201 bp, Homo sapiens
attataagctttcttttataggtgcagaagtatgaaccagaatttttccccaaattgagattagatctacattgggaagaatccatctcttggaaccctakgattacacagatgtgccttctcaggtgctggccccgggtatgggaggtggctgagtagatgagacttctgttctcttggcttcatctagtcagaacagtt

SEQ ID NO: 495343 - DNA, 201 bp, Homo sapiens
gggtttcgccgtgttagccaggatggtcttgatctcctgaccttgtgatctgcccgcctcagcctcccaaagtgctgagattacaggcgtcagctactgcrcccggacattttttttttttttttgaattggagttttgttcttgtcacccagactggagtgcaatggcgccatctcagctcactgcaacctccacctcct

SEQ ID NO: 495344 - DNA, 201 bp, Homo sapiens
gcagcctgggcaacagagtgcggctctgtctttaaaaaaaaaaaaaaaaaaaaaaaaaaaaaagagtttcctgttggtcttactatctttagagcagtgataaacagtcatttgtttaaaggctttgctactcactgcatgtagtctgtagaccaagcgacatcagcatcacctgggagtttagaaattcagattcttagg

SEQ ID NO: 495345 - DNA, 201 bp, Homo sapiens
cagccaggtgcagtggctcacacctgggcaacaagagcaaaactccgtctcaaaaaacaaacaaccaaccagccgggtgcggtggctcatgcctgtaatcycagcactttgggaggccgaggcaggtggatcacctgaggtcaggagttcgagaccagcctgaccaataaggtgaaacctcgtctctactaaaaaatacaa

SEQ ID NO: 495346 - DNA, 201 bp, Homo sapiens
ttaacagtaattttctactattgtctggtagtcgtgcttattaaaacttccccaattggctgggcatgatggctcatgcctgtaatcctagcactttgggrggctgaggcgggaggattgtttgagcctaggcgtttgaggctgcaaatgagctatggttgagccactgcactacaccctgggtgacagagcaagacctta

SEQ ID NO: 495347 - DNA, 201 bp, Homo sapiens
caaagatgagtaattgtgtttggaatgtgaagtgtatcctaggacagccacccaagacccaggactaactcatctcacctggctgtcttagagcccctgayctgaccagtggggtcagcttgagtgcggttcaccaaggagcagaggacaaggtgccctgtgataggaaggggggaatgggtggtaactctatggctgatc

SEQ ID NO: 495348 - DNA, 201 bp, Homo sapiens
gctggagtgcagtagtacgatcatagctccctggtgcttccagctccttggctcaagggatcctcctgcctcagcctcctgagtagctaggcctacagatrtgcaacaatatacccagctaatttttttgacttttttgtagagatggagtctcactatgttgcccatgctggttcaaactcctggcctcaagtgatccgc

SEQ ID NO: 495349 - DNA, 201 bp, Homo sapiens
aaagagatccctttttttgcaacagcatggatggaacttgaggacatcatgttaagtgaaataagtcaggcacagaaggacaaactttgcatgttcttackcattgctgaagctaaatattaagacaattgaactcatggagatagagaatagaatgatggttaccagagggtgggaagggtagtgtgttgggggtgttga

SEQ ID NO: 495350 - DNA, 201 bp, Homo sapiens
cactgtgggtatctggaaatttgggtctgaaaattgggagaaagcttggacctggatacataaatttggagggtcaagagaatatatgggggatatttgtrtgccttagtatggaatggtaatactgaaagatgagaagggctgtggaccagaaggagcatcattgtttgaaaggtaatagacactgaaaaagagagatta

SEQ ID NO: 495351 - DNA, 201 bp, Homo sapiens
agtgttcagatttcgctacaagcgaaatccaggtttgcgtaatttaaaagtctttaaattgtatacctctgagaagaacttgctgaggaatttggacttcrtgctgcatgcatggggagccgttgaaggttttgtaagcaggagcttggtatgattgcattatctttggtgaaaatatagaggaaggattgaaagtgaaga

SEQ ID NO: 495352 - DNA, 201 bp, Homo sapiens
gcttctttatagccatataaaacatacaatgtgtactttatggaagagtatttattgccagtctttccagcagcattaatgagattttgacatagcttatratattagtaatttttaatatgatgttaatagactggtagtgatgaagcccaaatagccaaatgctcttggttatttttagaagggatcagcaaaggcctt

SEQ ID NO: 495353 - DNA, 201 bp, Homo sapiens
tagcacctgtcctaaagccttgcacctagtggctacccaattaacatttgagtcagctaatagaggggattcctgaattggtctaaagattaaactagttyatctctaactgcctttataactttcaccctaagtttctgttttatgtcatggcttagggcctggtggattgaagttacacagcaaatatgatgcttattt

SEQ ID NO: 495354 - DNA, 201 bp, Homo sapiens
atatctatgttctagtaaaacttaatttataaaaacaggtagttggccatagttagccaattcctgctagtacccatcatagtttggaaagccttaatcawgcaggaaatgtagcttatcatattttactttaactgtttttgttatagtaggataatgggaatagaattattcctaggcagggatataatttaatctcag

SEQ ID NO: 495355 - DNA, 201 bp, Homo sapiens
ataaaatggtatagtataacctgaaactgtaaaactactaaaagaaaacatatgctgggtacggtggctcacgcctgtaatcccagcactttaggaggccraggtgggcggatcacgaggtcaggagatcgagaccatcctggctaatactgtgaaaccccgtctctactaaaaatataaaaaattagccaggtgtggtgg

SEQ ID NO: 495356 - DNA, 201 bp, Homo sapiens
ctaagggaaaattctagcctcctccccagaggccaggacttggtcacagctcaacctcagctccctaaatttgtttagtcctcgtctgtacccatccttgrggtggaggaatggtcaaaagattccattgcaccagccattggcaagctcattttctgtataatctcaccccacagcatggggagtgagaagctggccgtg

SEQ ID NO: 495357 - DNA, 201 bp, Homo sapiens
tgggctcaagcaatcctcccacctcagcttcccgactagctgggaccacaggcttgaaccaccaagcccagttaatttttttgtattttttgtagagatartgtctcactatgttgcccaggctggtctcgaactcctggactcaagcaatccttttgtcttggcctcccaaagtattgggattacaggcgtgaaccactg

SEQ ID NO: 495358 - DNA, 201 bp, Homo sapiens
tgttctttgctctcagccaagttttctaatgtatgaaaggtagcattcagtctatctaaatcttcccaataagcccacaaatgagatgatatatataaagyctctggcacaggaactgtcacactgcaagtataatacatgagaatgtaattattgttagccacgtgggtttgccctctgatggtgaccatttttgttctg

SEQ ID NO: 495359 - DNA, 201 bp, Homo sapiens
cacaccagtacactccagcctgggcaaaagagtgagactctgtctcaaataataaaataaaataaaataaagataatttaaagacttaaatgtaaaacccyaaactacaaaactactagaagaaaacataggggtttcagcatgttattctgggtcttaaaaaaaaaaaaaaaaagaatactgagcaacatagtgagacct

SEQ ID NO: 495360 - DNA, 201 bp, Homo sapiens
aagcctatctgcatgatctgccaggtggtaggcatttaatcctctgggcataccttggttctcttctgccagagctattgtgtgcccagcaggagtgagtgagctgaacctttgtagttctctttttcttgaccccaacctcctagtttccctttttccctttatctcccttcctcctaagatttctatttgggaggaaaa

SEQ ID NO: 495361 - DNA, 201 bp, Homo sapiens
taggactacaggcatgtaccaccagcatgcctggctaatttttaaatttttttgagagatggggtcttgctatgctgcccagccttgtcttgaactcccgrgctcaagcaattctcctgtctcagcttcctgcgtagctgggactacaggtgtttgctaccatgcctagctgggtttgagtcttggctgtaccacttacaa

SEQ ID NO: 495362 - DNA, 201 bp, Homo sapiens
tgaggcaggaagattgcctgaacccaggagtttgaggctgcagtgagctgtgatagcaccattgcacttcagcctgggcttggattaaaggaatgagcccstgcacccgaccctattttattttatttttattatttaatttatttactttgagacagaatttcactcttgttgcccaggctggagtacaatggcatgatc

SEQ ID NO: 495363 - DNA, 201 bp, Homo sapiens
atctcctgacctcgtgatccgccgacctcggcctcccaaagtgctgggattgcaggcgtgagccactgtgcccggcctcttgcatcttcttactagcactrtgtaacatagactctcctagttgcaaggaagattgccaggttgggtttctttcagtcacaaaaaagaagaaaattggtgttgagtaaataattcgtattg

SEQ ID NO: 495364 - DNA, 201 bp, Homo sapiens
tgacctcgtgatccgccgacctcggcctcccaaagtgctgggattgcaggcgtgagccactgtgcccggcctcttgcatcttcttactagcactatgtaayatagactctcctagttgcaaggaagattgccaggttgggtttctttcagtcacaaaaaagaagaaaattggtgttgagtaaataattcgtattgtttaat

SEQ ID NO: 495365 - DNA, 201 bp, Homo sapiens
ggtaactggtattagtccttaatagcttatgaaagagggtcccatgtgcctcagtctctctcttttctcagttactgaaggcactagaatgtggaatgtgygcagctatgccctgcctcttaaatggaaagccaaagaagacagaatggtgaagaggttaagagcatggcctctgaagtcttgattacatacgtttgaatc

SEQ ID NO: 495366 - DNA, 201 bp, Homo sapiens
ctaatctttctcctaatcccctcatgattgttaaactagtgtgacacttgaattcacagagttctttttgagtttaggctagatatgtttctaatagattygccaagtgtaattttcctaacttgataagtggtatcattcccaggagttggttctatgttggctcctgggagctgttccaactttggaatctgtagcaag

SEQ ID NO: 495367 - DNA, 201 bp, Homo sapiens
tatacggatgtacgcttgtagtggctgtggatcctcgagctgagaacaggaggcttctttggagcacaagcctcccacagggcactcttgggatgtctgtyctggaattacccagagcagtaacaaagctttcttttcttccttaacccaagccagcaggatgggatgtcggctagcctttgtgtttggagcctaccaaca

SEQ ID NO: 495368 - DNA, 201 bp, Homo sapiens
aggtgggagaatcacttgaacatggaggccagatagcgctgctgcattctagcctgggtgacagagcaagacccagtctcaaaataaaaataaataaaaawaaataaaaataaatttacccagtgaagaatcacttgagcccaggagtttgaggctgcagtgagctatgatggtgccactgctctccagcgtagttgacag

SEQ ID NO: 495369 - DNA, 201 bp, Homo sapiens
aaattagccaggtatgggggcacatgcctgtaatcttagctacttgggaggctgaggtgggagaatcacttgaacatggaggccagatagcgctgctgcaytctagcctgggtgacagagcaagacccagtctcaaaataaaaataaataaaaaaaaataaaaataaatttacccagtgaagaatcacttgagcccaggag

SEQ ID NO: 495370 - DNA, 201 bp, Homo sapiens
tgttaagtgctaggtggtttacaattttcaacatgtagacagggaaggcctcataaaagaggctaaaatttaagaaggtgggctgggtgcagtggctcacaaaaaaaaaaaaaaaagggtgaaggaactagctgtgtggatatcaaagtgttctaggtagttggaatagtatatgcaaaggcgtggaggcagaagtgtgcc

SEQ ID NO: 495371 - DNA, 201 bp, Homo sapiens
aaacattatcaatgggaaaggggggaataggtctgtttatttttggttgcatataatatagtctgatacagtatttggtaaactacagcccttggaccaawgttttagaaataaagttttattggaacacatctgtactcatcgagtactttgtaacagagaccatatggccctcaaagccttttttttttttttttaata

SEQ ID NO: 495372 - DNA, 201 bp, Homo sapiens
taaagtgcttagaacaatgcctgcatagtaagtgctcattaagagttagctgataccaggctgggtgtggtggctcacacctgtaatcccagcacttcagsaggccgaggatggcggatcacttgaggtcaggagtttgagacccgcctggccaacatggtaaaatgctgtctctaataaaaataccaaaattagtcaggc

SEQ ID NO: 495373 - DNA, 201 bp, Homo sapiens
aggccaggggcctgatagtctgttgttctcccctatattgcaagctccaagaggacaagggttttggttgttttcatctagctatttctagcacttaaaaytatgcctagcacttagaaagcaaagatgagtaattgtgtttggaatgtgaagtgtatcctaggacagccacccaagacccaggactaactcatctcacct

SEQ ID NO: 495374 - DNA, 201 bp, Homo sapiens
ccagaataaatgggcagtgttttaaaaaaaaattttttttttttgagttggagtttcgctcttgttgcccaagctggggtgcaatggtgcaatctcagctyactacaacctctgcctctcaggttcaagtgattctcctgcctcagcctcccgagtagctgggattacaggcacgcgccaccatgcccagctaattttttg

SEQ ID NO: 495375 - DNA, 201 bp, Homo sapiens
acctgggaggtggaggttgcagtgagccgagatcatgccactacactctagccaacagagctctaggcaacagagcgagactctgcctaaaaaaaaaattwaaaaaaaaataaactattcttattttcttctgtggcgatgagaaccactcagccaattctgcagttgcagaatattccttggcctagtcgaggtgattcg

SEQ ID NO: 495376 - DNA, 201 bp, Homo sapiens
tgaggaaggaaggcaaaccagaacttgctcctgaggggttcatagcttttctgctagactgtaagaggagtggcatagaggaggagctaagagttgagatragagggagaaagatgaggtcatggctaaaaaggtagcttgccttaaaatacaaaattttcttaggtgaaaaggataattgggagaatatttcaaatgaaa

SEQ ID NO: 495377 - DNA, 201 bp, Homo sapiens
aatatttgggagtctgaggtgagaggattacctaagaccaggatttcgagaccagcctgggcaacatagcaaggctctgtctctacaaaaaaaaaaaaaawaaaaaaaaaaaaaaaaaattaataattagctggatgtgatggcatgtacctgtagtcctatttactcaggagtctggggcagcaagattgcttgagccca

SEQ ID NO: 495378 - DNA, 201 bp, Homo sapiens
ctgtgttgcccaggctggagtgcaatgtcttgatcatggctcactgtagccttgatctcctgggctcaagcgatcctcccacctcagcctcctgagtagcygggaccacaggtgcacaccaccacaaccagctaatttttgtatttttttttgtagagatgtgttttaccatgttgcccaggctatctcgaactcctgggc

SEQ ID NO: 495379 - DNA, 201 bp, Homo sapiens
gatcctcccacctcagccttctgagtagctgggatcacaggcaggagccaccacacccagataattttttgtattttttgtagagacgggatttctctgcrttgcccaggctggtctcgaactcctgagctcaaagctatctgccttccccggcctcccaaagagctggggttacaggggtgagccatcatgcctggcctg

SEQ ID NO: 495380 - DNA, 201 bp, Homo sapiens
cacacccagataattttttgtattttttgtagagacgggatttctctgcgttgcccaggctggtctcgaactcctgagctcaaagctatctgccttccccsgcctcccaaagagctggggttacaggggtgagccatcatgcctggcctgccctatatttagcaatcaggaggtcacttgtttcctctgaaatgcagtttt

SEQ ID NO: 495381 - DNA, 201 bp, Homo sapiens
ggttcaagcgattcttctgcctcagcctcccaggtagctgggactacagacacgcaccatcacgcctggctaattttgtatttttaagagatgggttttcmccatattggccaggctggtctcgaactcctgatctctaccgcacctggcgagctttcagtttttgagagatgtgttaaaatgtctcataatatttagggg

SEQ ID NO: 495382 - DNA, 201 bp, Homo sapiens
cttagagacctttccagatcagtacatagagagcttcctcattctttttttttggttatatatattattatttttttgagacagaatctcacttcatcacmcaggctggagtgcagtggtgcgatctcagctcactgcaacctccatttcccgggttcaagtgattctcctgcctcagcctcctgagtagctgggattaca

SEQ ID NO: 495383 - DNA, 201 bp, Homo sapiens
ataatattaagttgtatggatgcacatggattgattgattggtcttgctctagtgccgaggccggagtgcggtggtgtcatcttgactcattgcaacctcygctcctgggctcaagcgattctcctgcctcagcctcccaagtagctgggactacaggcatgggccaccacgcttagccaatttttgtattttttgtagag

SEQ ID NO: 495384 - DNA, 201 bp, Homo sapiens
cagcagtactgagtcaataaagcctaaagcagtaagtacctggatgcctcacatagaatggttttggtgtgtggcagagtcatttgtagtcagctgcactrttcctgaaggagcacaagactggcaagtagaaactgggaaccagcagaggcctagttgtaaggagccctttatctacattactgtctgtaagaactggac

SEQ ID NO: 495385 - DNA, 201 bp, Homo sapiens
ctgcctcgggcctcccaaagtgctgggattacaggtgtgagccattgtgcctggcctgtactgtaatttatttaatctatctctatttttggatatttggrttgtctccatttttctgttactgtattagtcagggttctctagagggacagaactaataggatatatgtatatatgaaagggagtttattaaggaagatt

SEQ ID NO: 495386 - DNA, 201 bp, Homo sapiens
aaatgctcttggttatttttagaagggatcagcaaaggccttgatggcataggtctttcgagacttctaggtttaattgccttataatttgacttggcagmacaactatatggtaaggataataaaaaataaattattaaaaatatctagcacagtccttgaaacttagatgacattcaccaaatacttttcagttggtgg

SEQ ID NO: 495387 - DNA, 201 bp, Homo sapiens
gttcaatggagtgatcttggctcactgcaacctccacctcctgggttcaagcaattatcctgcctcagcctcctgagtagctgggattacagacgcctgcyatcacccctcgctaattttttgtatttttagtagagatggggtttcaccatgttggcaggctggtctcaaactcctgacctcaggtgatccacgtgcctt

SEQ ID NO: 495388 - DNA, 201 bp, Homo sapiens
gtttgacacacgctttttttaattttaatttttgagacagagtctcactgtcacccaggctggagtgcagtggtgtgatcttggctcactgcaacctctgyctcccggattcaagtgattctcctgcctcagcctcctgagtagctgggattacaggtgcctgccactgcacctggctaatttttgtatttttagtagaga

SEQ ID NO: 495389 - DNA, 201 bp, Homo sapiens
aatctttttattttatcattccttttcttactctcttcactgtgaactgaactagcaaatgcatggaaagttgactttaaataaattttattccattacascaaaatctttagatatacttgttatataataaaatggtatagtataacctgaaactgtaaaactactaaaagaaaacatatgctgggtacggtggctcac

SEQ ID NO: 495390 - DNA, 201 bp, Homo sapiens
tctgtgacaccactttggatgtggtggtggttttccattaggaatgatttgggagaggttaggcagtaaagttgcacgtagaagtagagttgtgtgacacrattgtgatatggttatttgagtagagggtgggaagaaagcagacagaaaactctcctatgaagccagtgcctgcctggatgtgctatgacatctctgtag

SEQ ID NO: 495391 - DNA, 201 bp, Homo sapiens
caacatagagaatgcaggtggtgcctgtggcctcagagcctgcaggcggtgctggctctgggtccgggttggaaaaataagaattttataaaatgcaaaakaaaaagaaaagagagagaatgcaggtggatgtaataggagataaagcaagagaggtttggatcagatcattcagacctttgaataacatggtaaggaatt

SEQ ID NO: 495392 - DNA, 201 bp, Homo sapiens
tcatgccatttaataaatctttactgataactagcttactgtgttccagacactatactaggtagtagaaatgcagagataaatgaagctctgaatcttcsatagtgagaaaagtttcaagagtgatatggggccaatgcaggaggattgcttgacacaaacagttcaagaccaacctggacaacagcaagaccccagctc

SEQ ID NO: 495393 - DNA, 201 bp, Homo sapiens
agttaacgatgtcagatttctcttttgcaaaggtggtttcagttgtgccactgaaacacagactgggtgatatagtgagaccatgtatgttaaaaaaaaaataaaaaataaaataaataaatatataaataagaaatcacattgaattaaatgttgaacaatttttaaataatcaggtttttaaaatatcttaagggtgag

SEQ ID NO: 495394 - DNA, 201 bp, Homo sapiens
aagaacgtgctggcctgtaatgaaaaggaaagagtttcaaggaaggagtattaattgtggcaaatgctgttgatataatgttgacctcacaaggatgttgkgaggatgaaatataaaatacttatttagtacagtgcctggcatgtataaattatttaatacatgttaactctttgaacaaaataacagtgactagtccct

SEQ ID NO: 495395 - DNA, 201 bp, Homo sapiens
gcctatctgcatgatctgccaggtggtaggcatttaatcctctgggcataccttggttctcttctgccagagctattgtgtgcccagcaggagtgagtgagctgaacctttgtagttctctttttcttgaccccaacctcctagtttccctttttccctttatctcccttcctcctaagatttctatttgggaggaaaagt

SEQ ID NO: 495396 - DNA, 201 bp, Homo sapiens
ttacaggcataagctactgcacccggcccagctttttttcttttcctcaggatggctttggcgattctgggtctttgtgattccatagaaagtttagtatytgagtagtatgggaattttaaaaataccgattcttgcaattcatgaacatggaatatctttccatttttttgtatctttagtttcttacatcaatgtttt

SEQ ID NO: 495397 - DNA, 201 bp, Homo sapiens
agcaggaacccttataaccaaatcctttctctccagtggtcagagcacaaaagttttctgttgtctttggaaacttgtctgcaaacagctcgaaggagacrtggcccaagggctcgctgtttgactgtgatgttgaagaacatggtggggttgaccatggctgatagtacggggctcctggcggtggcagcagtgtccaca

SEQ ID NO: 495398 - DNA, 201 bp, Homo sapiens
ttttttcttttcctcaggatggctttggcgattctgggtctttgtgattccatagaaagtttagtatttgagtagtatgggaattttaaaaataccgattsttgcaattcatgaacatggaatatctttccatttttttgtatctttagtttcttacatcaatgttttataactttcattgtagagaacttttttgtttgt

SEQ ID NO: 495399 - DNA, 201 bp, Homo sapiens
agccaggtataatggcatgtgcctgtagtttcagctactcgggaggctgaggtgggaggatctcttgagccaatagttcacagctacagtgagccatgatygcagcactgcactccagcctgagtgacagagtgagaccctatattaaaaacaaaaatgattttgttaaaaaaaatttttcttaaatgagataaggtctca

SEQ ID NO: 495400 - DNA, 201 bp, Homo sapiens
aaatgtattttgtggtattttagaaagtaattgtttaattttatggtgaaaacattatcaatgggaaaggggggaataggtctgtttatttttggttgcayataatatagtctgatacagtatttggtaaactacagcccttggaccaaagttttagaaataaagttttattggaacacatctgtactcatcgagtacttt

SEQ ID NO: 495401 - DNA, 201 bp, Homo sapiens
tatccttaacttttagcactcacttgaggagacacattttgcctttgagaattgttatttttttgagatagggtctcactctgtcacccaggctggagtayagtggcatgatcatggttcactgcagccttgacctccagggcccagttgagcttccccacctcagactcctgagcagctggaactacaggcgcaccacca

SEQ ID NO: 495402 - DNA, 201 bp, Homo sapiens
aatgatcatatggtttttgtccctcattctgttgatataatgtatcacattgattgatttacgtatgttgaactatccttacatcccagggataaatcccrgttggtcaggatgaatgatcttttcatgggttttgccattttgttaaaatcttagtgtgacagttttcagatgatggaaaaataagaagagtgactttca

SEQ ID NO: 495403 - DNA, 201 bp, Homo sapiens
tggaaatgttctatatttctgctgtccagtagccacatgtggctaataagcacagaaatattgctaatgcaaacaagaaattaaaattttatttggattgstttaaatttaaattgccacatgaagctagtgcctactgtatttgataatgctgggctacctacatctttgcctttgctttgctacgggtatatgtattcc

SEQ ID NO: 495404 - DNA, 201 bp, Homo sapiens
atgtgattcctccagtttctttctttttttcttttgagacaaagtctcagctctgtcacctaggctggagtgcagtggtgcaatcttggctcactgcaacytctgcctcccgggttcaagccattctcctgctcagcctcccgagtagctgggattacaggggcatgccatcacgctcagctagtttttgtattttttttt

SEQ ID NO: 495405 - DNA, 201 bp, Homo sapiens
caccatgttggccaggctggtctcaaaaggttttagttaattgtaaaaagaaaattacacatttaaatatgctcatcccggacttattttgaggagaaaaytgacttgcttttatgctttcttccctgtatgaaagtatttatacatatattcttagtgtcatacatttcattttgttttgcaaaaagaatgtagtgttgg

SEQ ID NO: 495406 - DNA, 201 bp, Homo sapiens
aatctttaatccattttgattagatttttgcatatggctagagataggagtctagtttcattcttctgcatgtaactatacagttttcccagcactatttrttgaagagactgtcctttccccaatgtatgttcttggtacttttgttgaaaatgagagtttattgtagatttatggatttgttattggattctctattct

SEQ ID NO: 495407 - DNA, 201 bp, Homo sapiens
ggtgcacagctgtggtcccagcttctcaagtggctgaggtgggaggattgcttgatctcaggagggggaggctgcagtgagctgaggtcatgccactgcaytcaaacatgggtgacagagtgagaccctgtttaaaaaaaaataaaaataaagatcatagatttgtcacatttgccttacattgtcagtttttgttttcta

SEQ ID NO: 495408 - DNA, 201 bp, Homo sapiens
atggtgggtacgtgcctgtagtcccagctacttgggaggctgaggtacaagaatcgcttgaacccaggaggtggaggttgcagtgagccgagattgcaccmctgcaaccagcctgagtgacagagtgagactcggtctcaaaaaaaaaaaaaaaaaaaaaaaaaagcggctgggcgcggtggctcatgcttgtaatcctag

SEQ ID NO: 495409 - DNA, 201 bp, Homo sapiens
gagggatcttggttgcacgtcccttatgagaatcaaatgcctgatgatctcaggtggaacagtttcatcccaaaaccatccctccacctgaccctcacccragtctgtggaaaaattgtcttccacaaaaccagtccctggtgccaaaaaggttggggaaggctgggctacaggaccagttgagtcatgagtcatgagtct

SEQ ID NO: 495410 - DNA, 201 bp, Homo sapiens
agttcctaaacatattgatcatcagagaaatgcacatcaaaactacaatgagttatcatctcacccttaaaatggcttttattcaaaagatgggcaaatartgctaaccaagatgtggagaagagggaaccctcgttcactattgatagaaatgtaaattagtacagccactatggagaacactatggaggtccctcaaaa

SEQ ID NO: 495411 - DNA, 201 bp, Homo sapiens
tgtgatcttgtggacagtgaaggttagtgaaggcttagacacttgtcttgtgcttatatcaagttggcaaggtcaggcctgggctttgggtctgtgtttcygaggaaggaggaagggaggccaggggcctgatagtctgttgttctcccctatattgcaagctccaagaggacaagggttttggttgttttcatctagcta

SEQ ID NO: 495412 - DNA, 201 bp, Homo sapiens; identical to SEQ ID NO: 149999

SEQ ID NO: 495413 - DNA, 201 bp, Homo sapiens
cactgcacctggctaatttttgtatttttagtagagacagggtttcaccatgttggccaagctggtctcgaactcctgacctcaggtgatccacgtgcctyggccttccaaagtgctggaattacaggcatgagccatcacacccagcttgacacatgcttttaaaagaagcccagttgcttcagtcatcagactaaactt

SEQ ID NO: 495414 - DNA, 201 bp, Homo sapiens
agaagtgaaccactgcctaccttttgactttcagagctaaagaaatctgcctgcatgattagatgtcagcttcactgcccacttataaccctgaagttcayaagctcagtttcttttcagcaaatgggcacctcaaatgtgaatcttgggcagattcaactagaatgaagagagcaaggcgctgtgcttatgccgtcatta

SEQ ID NO: 495415 - DNA, 201 bp, Homo sapiens
ttcagcatgttattctgggtcttaaaaaaaaaaaaaaaaagaatactgagcaacatagtgagaccttgtctctacaaaaaaaaaaaaaaaaaaaaaaaaawttagaccacagtggcttacacctataatcccagtactttgggaggctaaggcaggaggatcacatgagcccaggagttcgagatgagtctgggtaatata

SEQ ID NO: 495416 - DNA, 201 bp, Homo sapiens
gctgggcatggtggtgtgcatctgtaatcctagctactcaggaggctgaggcaggagaattgcttgaacccaggaggcagaggttgcagtgagctgagatygtgccactgctctccagcctgagcgggccacacagtgagactctgtctcaaaaaaaaaaaaaaaagttaaaaaccattgttaacattttggactgtatcc

SEQ ID NO: 495417 - DNA, 201 bp, Homo sapiens
ttctgggtcttaaaaaaaaaaaaaaaaagaatactgagcaacatagtgagaccttgtctctacaaaaaaaaaaaaaaaaaaaaaaaaaattagaccacagkggcttacacctataatcccagtactttgggaggctaaggcaggaggatcacatgagcccaggagttcgagatgagtctgggtaatatagtgagaccctgt

SEQ ID NO: 495418 - DNA, 201 bp, Homo sapiens
cttatttactttatatatcttagagacctttccagatcagtacatagagagcttcctcattctttttttttggttatatatattattatttttttgagacrgaatctcacttcatcacccaggctggagtgcagtggtgcgatctcagctcactgcaacctccatttcccgggttcaagtgattctcctgcctcagcctcc

SEQ ID NO: 495419 - DNA, 201 bp, Homo sapiens
gctaatttttgtatatttagtagagacagggtttcaccatgttagccaggctggtttcaaattcctgacctcaggtgatccaccccccttggcctcccagrgtgcctggattacaggtgtgagcaaccacgcctggccccaggtataatttttgacttcccgcaaaacttaactgctgttgctgttggcattgcatagcct

SEQ ID NO: 495420 - DNA, 201 bp, Homo sapiens
ggtcttgatctcctgaccttgtgatctgcccgcctcagcctcccaaagtgctgagattacaggcgtcagctactgcgcccggacattttttttttttttttgaattggagttttgttcttgtcacccagactggagtgcaatggcgccatctcagctcactgcaacctccacctcctgggttcaagcaattctcctgcctc

SEQ ID NO: 495421 - DNA, 201 bp, Homo sapiens
tttgaccccccctccgccgccccctcgcggcaaaacttaactactgctgttggtgatggtgttgcataacctggcttcattaatttcctttttttttttttcttttttctgagacggagtttcgttcttgttgcccaggctgtagtgcaatggcacagctcactgcaacctctgcctgccgggttcaagcagttctccctc

SEQ ID NO: 495422 - DNA, 201 bp, Homo sapiens
aaccagggaggcggagcttgcagtgagccgagattgcgccactgcactccagcctgggcaacagaatgagactccgtctcaaaaaaaaaaaaaaaaaaaaagccgtacctctcaatactgccacgttgggaattaagtttcactatgagttttggagggagcaaacattcaaaccattgtagtcagcagactttttctata

SEQ ID NO: 495423 - DNA, 201 bp, Homo sapiens
tgtaatatataatatataatatatattattattattattatttgagatagagtcttgctctgttgcccagactggagtgcagtggtgtggtcatggctcaytgcagccttgacctcctgggacccaactaatgcttctgcctcagcctcctgagtagctgggactacaggcgcatgccaccatgcctgggtaatttttgtt

SEQ ID NO: 495424 - DNA, 201 bp, Homo sapiens
aatactaccagtgagctctttgtttataaatgtttcttttaacttatccatgcaggatctgaaatggaaagctacttctctttcatcagtcaagaggtacrttacaacagaatccttgatgcactgagaagagagctgggttccaaatctcactcagtgatctaggagaggagaggcagccagtgttctgcctgccttagt

SEQ ID NO: 495425 - DNA, 201 bp, Homo sapiens
ctttgcacttcaatttttttttttttttttgagacagtgtctcactctgttgcccaggctggagtgcagtggcacgatctcggctcactgcaacccctgcstcctgggttcaagtgattctcctacttcagcctcctgagtagctgagattacaggtgcttgccaccacgcctggctaatttttgtatttttagtagagat

SEQ ID NO: 495426 - DNA, 201 bp, Homo sapiens
ctggcctcaagtggtcctcccaccttgatctcccaaagtgctgggattacaggtgtgagtcactgtgcctggcctcttttcttttcttttttttttttttwatggttattagcagggtttcagtgttttagatgtaggccttttagaaaacataagtatcaaaattatgtccacgttttaacattgtattataggtttatt

SEQ ID NO: 495427 - DNA, 201 bp, Homo sapiens
ggcatggtgggtacgtgcctgtagtcccagctacttgggaggctgaggtacaagaatcgcttgaacccaggaggtggaggttgcagtgagccgagattgcmccactgcaaccagcctgagtgacagagtgagactcggtctcaaaaaaaaaaaaaaaaaaaaaaaaaagcggctgggcgcggtggctcatgcttgtaatcc

SEQ ID NO: 495428 - DNA, 201 bp, Homo sapiens
gtgttgatggaactctggtccggttttattgttggactgtggatccaactggtcctgaggcatatgagaaaggctcttcttggccttcatgtatgtagctytggggctggaccttacctgttaggatcaaggggtaggtgggctttgttcagatacctcccagaaacacattaggagcagaactcaagaacagaataaact

SEQ ID NO: 495429 - DNA, 201 bp, Homo sapiens
tccggagttcgagaccagcctgggcagcatggtgaaacctcgtctctaccaaaaatacaaaaattaactgggtgtgctggcacatgcctgtagtcccagcyattcaggaggctgaggcaggaggatccctagagccaggaggttgaggctgcagtaagctatgatcatgccactgcactccagcctgggagacagagtgag

SEQ ID NO: 495430 - DNA, 201 bp, Homo sapiens
gataaagccagatcatagacttttaatgccagagaagaggttggttgtgatcttgtggacagtgaaggttagtgaaggcttagacacttgtcttgtgcttrtatcaagttggcaaggtcaggcctgggctttgggtctgtgtttctgaggaaggaggaagggaggccaggggcctgatagtctgttgttctcccctatatt

SEQ ID NO: 495431 - DNA, 201 bp, Homo sapiens
tttggtttttaaaattattattatttttttagtgatgaggggtcttgctgtgttgcctagtctggtcttgaactggcaggcatgatggcacatgcttgtartcccagctacacaggtagctgaggcaggaagattgcctgaacccaggagtttgaggctgcagtgagctgtgatagcaccattgcacttcagcctgggctt

SEQ ID NO: 495432 - DNA, 201 bp, Homo sapiens
tattgattggtagaaagaagcacaggcttttgaatcagacaggctttgcacttcaatttttttttttttttttgagacagtgtctcactctgttgcccagrctggagtgcagtggcacgatctcggctcactgcaacccctgcgtcctgggttcaagtgattctcctacttcagcctcctgagtagctgagattacaggtg

SEQ ID NO: 495433 - DNA, 201 bp, Homo sapiens
caatttcctaattatattctctaggacaagttatttaacctctgtgctttgatttcttctgtttaatgagaatggaccagatcagttgttagaaatcacaytgaggcagggcatggtggcttacacctataatctgagcacttgggagactgaggcgggaggatccatttgagcctaggagtagtgagctatgatggcttc

SEQ ID NO: 495434 - DNA, 201 bp, Homo sapiens
cataggaatggtcaacaggtatacgaaaaatgctcaacatcataaaaaatttgctaatcagggaaatgcaaatcaatacaatgaggtattatcttatctcrtttagaatggctaccatcaaaaagacaaaaagaccccatctctacaaaaaaaaaaaaaatagctggatgtagtggtgcacacctgtagtttaagctactc

SEQ ID NO: 495435 - DNA, 201 bp, Homo sapiens
caggcagattgcctgagctcaagagcttgaaactagcctggccaacgtggtgaaaccctgtctctgcaaacaatacaaaaaaattagctgggtgtggtggygtgtgcctgtagtcccaactacctgggagactgaggtgagaggattggttgagcctaggaagttgaggctgcagtgagctgtgatcacaccactgcactc

SEQ ID NO: 495436 - DNA, 201 bp, Homo sapiens
gaggtggaggttgcagtgaaccgagatcacgccactgcactccagcctgggtgacagagtgagtctccatctcaaaaaaaaaaaaaaaaaaaaagaagatmccaatgtcatttttcacagaaatagaaaaagcagtcctaaaattttgtatggaaacaaaaaagagaccaaatagccaaagcagtcctgagcaaaaagaac

SEQ ID NO: 495437 - DNA, 201 bp, Homo sapiens
ccaggcacggtggctcatgatcccagcactttgggaggccgaagtaggcggatcttctgaggtcaggagtttgcgaccagcctggccaacatggtgaaacyccatctctactaaaaatacaaaaattatccaggtgtggtggtgtgtgcctgtaatcccagctactcaggaggctgaggcaggagaatcgcttgagcctgg

SEQ ID NO: 495438 - DNA, 201 bp, Homo sapiens
cagagtgagactctgtctaaaaaaaaaaaaaaaaagatactaatgttggctgggcacagtggctcatgcctgtaatcccagcactttgggaggccaaggcrggaggatcacctgaggtcaggagttcgagaccagcctgcccaacatggagaaaacctgtctctactaaaaatacaaaattagctgtgtgtggtggcacat

SEQ ID NO: 495439 - DNA, 201 bp, Homo sapiens
ttagaatttcattcctttttatggctaatattgcattgtgtatatatgtcatattttatctgtcgatggtggggctgtttccaccttttggctattgtgaytaatgctgctatggatattgatatacaggtatctatttggttctttgcttgcaattcttttgggtatttagctgtaaatagaattgctgagtcatatgag

SEQ ID NO: 495440 - DNA, 201 bp, Homo sapiens
acagtggcgtgatcttaactcactgcaaactccaccttccgggttcaagcgattatcctgcctcagcctctcgagtagctgggaccacaggcatgcaccacatgttcggctaattttttttttgtattttttagtagagatggggttttgccatgttggccaggctggtctcaaactcttgacctcaagcgatcctcctgc

SEQ ID NO: 495441 - DNA, 201 bp, Homo sapiens
gagtgagaccctgtctctagatacatagatagatagatagatagatagatagatagatagacagatagatagatagatagatagatacgtacgtacatacrtacatacatacatacatacatacatagagtgagaccctgtcgatagatagatagatgaatgaatgaatgaaagtctggggagaaggacagactgagaagg

SEQ ID NO: 495442 - DNA, 201 bp, Homo sapiens
aacagagtgagaccctgtctctagatacatagatagatagatagatagatagatagatagatagacagatagatagatagatagatagatacgtacgtacrtacatacatacatacatacatacatacatagagtgagaccctgtcgatagatagatagatgaatgaatgaatgaaagtctggggagaaggacagactgag

SEQ ID NO: 495443 - DNA, 201 bp, Homo sapiens
cctgggcaacagagtgagaccctgtctctagatacatagatagatagatagatagatagatagatagatagacagatagatagatagatagatagatacgtacgtacatacatacatacatacatacatacatacatagagtgagaccctgtcgatagatagatagatgaatgaatgaatgaaagtctggggagaaggaca

SEQ ID NO: 495444 - DNA, 201 bp, Homo sapiens
taattttaacgatgtaatcctgagtcttgatttttttcccctgaatgtcaattttaccccaaattatcttataacaatattggaagggaaatatttaagartgctaaatcctcagctgctacactgtaaaatcagtagataaggtcagaaatggcagtgtatgttagctagatgtatgaaggtaaatagaataaatagcta

SEQ ID NO: 495445 - DNA, 201 bp, Homo sapiens
cagagtcttcgaatgccgggctaaagaattttataagcaacagatatcattgaagatttttaactgtcacctgtattgtctgaacagttacaggttgcagkttgcttccttctggctagtctgaaatttggttaaaatctttctttttttttttgtttttgagatggagtctcgttcagctgcccaggctggagtgcagtg

SEQ ID NO: 495446 - DNA, 201 bp, Homo sapiens
agtgcagtggtgcaatctcggctcactgcaacctctgcctccagggttcaagcaattctcctgcctcagcctcccgagtagcggggactacaggcgctcgycaccacacccagttatttatttttttttttgtatttttactagagacagggtttcaccatgttgaccaggatggtctcaatctcttgacgtcgtgatcca

SEQ ID NO: 495447 - DNA, 201 bp, Homo sapiens
gaacagaaataaagtacctgactgtattggttatcgggcaagaggctgtcttgaaccttaagataaccagcacagcaaagcagttctggtttcattcagtkagatttaacatacttttatttggctcccattttaggtaaagtactgccctaggcactggggaatataaaagtgattttaacaaatagctcccaacatctg

SEQ ID NO: 495448 - DNA, 201 bp, Homo sapiens
tagcttcttgtcttctttcccactggaggttgtccaaggccagtggcaaagaaatctgcctggaacaccttagctagaagtggctctcgctctgttacatsccttccctgttagactgggcctcctagagtaacactagaaaccacctgatctcatggggtggaggcagattgcatagcacccccagcattgccctagagt

SEQ ID NO: 495449 - DNA, 201 bp, Homo sapiens
actccccagcaggacagtggacagtagtttcccgtcacagggtaacatttatagtggaataagtcaggtgtgagctttcgccctggtccaagtccaggtgkctcaaacattttacagacattatctcatgttgtaagaccagacctagaaagtgagtggtattacccccaactccagataaggaaacggaggatcagggct

SEQ ID NO: 495450 - DNA, 201 bp, Homo sapiens
ggttttataggtgaccttgtttgccatttgttgagcagaatttgttgtaagaaaatgagccatgttatcatctactctgcttctttaaattctttattcayttcatgagctctgtcatactcctactgcaaccaaacagtaaatagaagtcttttaagttaaaatacatactcccttctcatgataaggtggaaatcagcc

SEQ ID NO: 495451 - DNA, 201 bp, Homo sapiens; identical to SEQ ID NO: 390263

SEQ ID NO: 495452 - DNA, 201 bp, Homo sapiens
caaggaggaccacctgatgagcgccatgaacatcaagctggggcccgccctgaagatctatgcccgcatcagcatgctcaaggactcctagggctggtggmagccaggattctggcccagggcgcctcctcccgactgagcagagccagacagacattcctgaggggcccagaaatggggccggttggagggcaggggctc

SEQ ID NO: 495453 - DNA, 201 bp, Homo sapiens
cctcagcctcttgagtagctgggattacagacattcgccaccacacacagctaatttttgtattttagtagagatggggtttcaccatgttggcaggctgstctcaaactccttacctcaggcgatccacccacctcagcctcctaaagtgctgggattataggcgtgagccactgcgcccggcctacctttgactcttaa

SEQ ID NO: 495454 - DNA, 201 bp, Homo sapiens
caaaaagggagaaacagggagcgtacaagagtcgctgatccattccagttccgaaatccgctagggtttatggtggcatttcctcaattgggactcaaagsctgggagtgatttctgtcttggttctgccctctgagttctccttccttttctgtgaaaagtagcctgtattttcagtgtagtcgttttctcagcctgctt

SEQ ID NO: 495455 - DNA, 201 bp, Homo sapiens
gtcttaagacctcagttcccaagtggtcgggcatggcggctcatgcctataatcccagcactttggaaggtcaaggcaggtggatcactcaggggcaggarttcgagaccagcctggccaacatggcgaaaccctgtctctactaaaaatacaaaaattagctgggtgtggtggtggtcgcctgtaatcccagctactcag

SEQ ID NO: 495456 - DNA, 201 bp, Homo sapiens
taaaccatctctagattacttataatacctcatacaatgtaaatgctatgcaaatagttgttacactgtattggttagggaataatgacacaaaaaaagtktacgtgttcagtacagacaccgtattttttgaatatttttgatcctgtggttggttgaatccatggatgtggaacccacagatacaaaaggctgactttg

SEQ ID NO: 495457 - DNA, 201 bp, Homo sapiens
cttgggcatctggaatgggagggtaaactattacaagcaaggaagctggggggttggaaacagaggagggatgtgagaagatgaaccagggataaagtaaktgagacacggaagatattagagcaagagggtggagacagaagaggtgaaagttctagagccagacactggggcctacctgcatgtcactggtgtcagatg

SEQ ID NO: 495458 - DNA, 201 bp, Homo sapiens
ctctgtgccatgcttctggtctaactttacgcagggcagccatgttagttggaataaaggagtccttctgcactgtaggcacagcgatgaatcagggtacrcagccacagcggtggagctgtgggcacaacctggagtggctggaggcaggcagttgaactattttgaaattctccaagactcagcaaaaaggccaggggc

SEQ ID NO: 495459 - DNA, 201 bp, Homo sapiens
taggatgagcccctcacagagggttctgaagggaactcggctttggtgtagccccagagcggctctccccacccacccctgcacccagcctgggtcaggaygcaacgagcctctagagaaaggcaggcgctccccttggactcccccttcctttctgcttctactgtcctgcccttcctcatagccgctcctgggctaaac

SEQ ID NO: 495460 - DNA, 201 bp, Homo sapiens
gcagagagaggcaagatagacaaagttagacatgatgaagaagctctgcgaacagctgtcctcccactgccctagagagtggccacaattggctgtggtgrtggtcacagatcttggtgtctcccgagcagttatagagacctggggtgggcaaggcattactgccaaaggggtgttctgtgtggcagctaccagcctggc

SEQ ID NO: 495461 - DNA, 201 bp, Homo sapiens
ctgtggcagaccctattgattaggatttaggtttaggtcacaagggatgtagggcttcccatcgttttgactttagaacagaaataaagtacctgactgtrttggttatcgggcaagaggctgtcttgaaccttaagataaccagcacagcaaagcagttctggtttcattcagttagatttaacatacttttatttggct

SEQ ID NO: 495462 - DNA, 201 bp, Homo sapiens
caagccttacatcattcacagatgccttcagtggggcctggatgcattactgtttttctgccagtctcactcatacaccgaccaggtcaggtattcatggyaaccacaagcctctttctcaagagactgcagtgtggttaagagcacagacttctgagtcacacagaactgggttcaaattctggctctgtcacttaacct

SEQ ID NO: 495463 - DNA, 201 bp, Homo sapiens
ataggtgaccttgtttgccatttgttgagcagaatttgttgtaagaaaatgagccatgttatcatctactctgcttctttaaattctttattcacttcatkagctctgtcatactcctactgcaaccaaacagtaaatagaagtcttttaagttaaaatacatactcccttctcatgataaggtggaaatcagccattgac

SEQ ID NO: 495464 - DNA, 201 bp, Homo sapiens
aggagggctgaggattctctatcacatcctcccagacaactactgagcatgcagcatgcattctttgccttcctaggaaggtagggttttcagagtattcraggttgctctgggcgccagttatcagtgataactaacaaagatccagggaaaatgatggctgctaatgagcttcttttcaagtttatggcctccctgagt

SEQ ID NO: 495465 - DNA, 201 bp, Homo sapiens
tttgcagctggaggagagagtcactgaaggtttaacatttaactttagtttaaagaccttttggtgcctatgataagtgcaaaaagttgacttttttttttactttgaaaactggctttctgttgctgttcccctttttcctttacttttttttttcttttgctgctataaagacttgatggtgttcttggattatttgga

SEQ ID NO: 495466 - DNA, 201 bp, Homo sapiens
tttcacaataaattgcaggcatcaggatacttcagtcctaaacacttcagtatgtatagcattaactagagttcaatatttatttatttatttatttatttttatcttaaggtaaaatgtatatacaacaaaatgcacaaatttgaaaaacactattctgtaaattttgacagaggcatgcattgatatagtacaaatccc

SEQ ID NO: 495467 - DNA, 201 bp, Homo sapiens
caaggataccaagaagcaggtaagaggcgggcagagcctgaagctccatccccacagtccccacagcttcccttccatggccctcgacaccacggtccccwccagctgccgacttcagcgcactctgctgtgctctcattccttgtagacctgtccagtcgagccttctgcaccccagtaggtcccttcatttagacccat

SEQ ID NO: 495468 - DNA, 201 bp, Homo sapiens; identical to SEQ ID NO: 390257

SEQ ID NO: 495469 - DNA, 201 bp, Homo sapiens; identical to SEQ ID NO: 390260

SEQ ID NO: 495470 - DNA, 201 bp, Homo sapiens
gtcaaaagatctgctttttaatcccagttttgccactttgtaactgtataagtttgagcaagttactcatcagtgtccttttctgtaaaatatggtttctrttatgtattccaaggctatgaggataaaagtgcctgactcaaaaattttctgaaatttattataggacaggagtggaaatagagttatccattgccctcc

SEQ ID NO: 495471 - DNA, 201 bp, Homo sapiens
ttaatgaaactcaattcttgataattcatgtcccattcctgttatccaggtcctgacctctgatcacccagaatcttaggcctgattcatcatttcatgtracccagactttttgttttggtccttgacttttatcttccagggccttattatggctggataagaatctgactccttgcttactcagaactaaagtatctc

SEQ ID NO: 495472 - DNA, 201 bp, Homo sapiens
tagaaaccatgggtacagataaaggtggctttagacttttcaagagacttgaggagtaagttctccagaacaaatgatgactattataaggcacccgttcrttttaaggaaccatctggaaatgaatctatctctaaaatagtattaatgaatcaatctctataatagtattaatttactcaacaaatattcagcactttc

SEQ ID NO: 495473 - DNA, 201 bp, Homo sapiens
catgtgcccggccttattcagcactttctaaataaaaaatatgtattttcattgtccagaaggaaatacaattataagcagttgataatttgaaagtactrcattacacctagttcttccaagttttgccccaaattaatttttttagtatagggtaatgtgaacttaattaaatatttaatgctgtttctagaaataaaa

SEQ ID NO: 495474 - DNA, 201 bp, Homo sapiens
aacattaattatggtattgtacttagtaccataatagaagtatggtccctgcttagaaatgttaggaaaagttttctggagaaagtgacagggtaagaggragcttctcagccagacagaagcaatgtctgcaaaggtgaggttgtatttgcttgagagaacacatatggggggacctccaaacaacctttcaagaccaca

SEQ ID NO: 495475 - DNA, 201 bp, Homo sapiens
gccccctccatttccccaggactgcactttatgtcccacctcctgccattaatagtctaccccaggaggtccataggggtggcttctccagtttcctagttcctcgacccacctggaagcaggatggcatccctaattcaacaagcacgagaagccagaacccctaagagcaggtgggagagagcagcgggagtccaagga

SEQ ID NO: 495476 - DNA, 201 bp, Homo sapiens
gcaggccttcccacagaccatctgattccagactcctcgtgttaacactaaaccaaagagcgagtggcattctccatttcagccttgaaagtgaacaccayaggaagtgctgtaccaaggggcctcctcttgtgtctgtgtgggaggaggacgctgctgtccgtcagctcagagtgtctcctccaaagaaatgcatctcag

SEQ ID NO: 495477 - DNA, 201 bp, Homo sapiens
aatttggactttatggtggaggccatagggagctgttaaagcccttaggagtaacgagatcagatccgccttttagaaagaacacatcagcaatgtgaagsgtggtttgggcaggagtgagaccagagacggaatcatgcagttagcgaagaacctttaatgagccttctcgtctactgccagtatgtttactcttgaata

SEQ ID NO: 495478 - DNA, 201 bp, Homo sapiens
atttcacaataaattgcaggcatcaggatacttcagtcctaaacacttcagtatgtatagcattaactagagttcaatatttatttatttatttatttatttttatcttaaggtaaaatgtatatacaacaaaatgcacaaatttgaaaaacactattctgtaaattttgacagaggcatgcattgatatagtacaaatcc

SEQ ID NO: 495479 - DNA, 201 bp, Homo sapiens
gagccgccatgcctggccctaaaccaccttttctcaaacgtgtctgttttgacttttccatactatataattaagcacaaagaattcctattctgtggtgrtattatggatctttaacatgaaatatgagcatcttcatataaagttttatgcaaagattacttaacaagtgtgctgaaatcacttttaaagtatatatca

SEQ ID NO: 495480 - DNA, 201 bp, Homo sapiens
tagcaagtgttcataaatgtgtgggtctattttgggaacttctgtttggttccattaagtggtaaatgtttagcaactagctcttcccactcctttcctawacacaaaaagtcccgatttgtagtatttgctgatttccatggtataaatactcccgcaatgaccagtttcaagcttccaatgtgatatcactaaaatgcg

SEQ ID NO: 495481 - DNA, 201 bp, Homo sapiens
aagtggaatgtagaagacgtctacgaattcatccgctctctgccaggtaaggcccttggaaattccatgtctccccggaatagcaaggaaagagaaaatgrgagaccctcccaccaccaggaggattaggtagtttagttaatgactcaggttcaggaactggggtgcagaaatgagtgagatgagctccctgcctataag

SEQ ID NO: 495482 - DNA, 201 bp, Homo sapiens
catttcacaataaattgcaggcatcaggatacttcagtcctaaacacttcagtatgtatagcattaactagagttcaatatttatttatttatttatttatttttatcttaaggtaaaatgtatatacaacaaaatgcacaaatttgaaaaacactattctgtaaattttgacagaggcatgcattgatatagtacaaatc

SEQ ID NO: 495483 - DNA, 201 bp, Homo sapiens
gcatttcacaataaattgcaggcatcaggatacttcagtcctaaacacttcagtatgtatagcattaactagagttcaatatttatttatttatttatttatttttatcttaaggtaaaatgtatatacaacaaaatgcacaaatttgaaaaacactattctgtaaattttgacagaggcatgcattgatatagtacaaat

SEQ ID NO: 495484 - DNA, 201 bp, Homo sapiens
tgcatttcacaataaattgcaggcatcaggatacttcagtcctaaacacttcagtatgtatagcattaactagagttcaatatttatttatttatttattwatttttatcttaaggtaaaatgtatatacaacaaaatgcacaaatttgaaaaacactattctgtaaattttgacagaggcatgcattgatatagtacaaa

SEQ ID NO: 495485 - DNA, 201 bp, Homo sapiens
gtgacttaaataggaatcatagcccttcagagcccgggctcatacaaaaccacacagtgagtaggaacccagagaaaaacagacttctagttcttgatgtyagccattaatgagatttggctgtgatttataatgggagtccgcagggatgggtggccttggggaagaaataaagaactagttggaagagaaggaaagaat

SEQ ID NO: 495486 - DNA, 201 bp, Homo sapiens
ttcaaggattctgaccgcagctcttatcagttacggggcaggaagccgccttccacaagccactctctccccataccagagggttccttggctgtgaacarcacttagattgtgtcagaggaaggccatgggctttaacaggccacatccattttcatttaccttctgaaagaagattaaggagaaaattcaattttgcct

SEQ ID NO: 495487 - DNA, 201 bp, Homo sapiens
cagaggctgcagtgagctgagattgtgccactgcactccagcctgggtgacaagagcgagactccatctcaaaacaaacaaacaaaaacaaacaaacaaamaaaaaacaagtccatatgtaaggtccctgatgataaccctgagtttcctataaagacaaaaatgctgccagcctttactttggcttgtgactaattgggc

SEQ ID NO: 495488 - DNA, 201 bp, Homo sapiens
atctgagagcaggagagaagagcgtgcttgagcgtgtgtgtgtgtgtgcgtgtgtgtgtgtgtgtgtgtgtgaaagcaagtgtgtgtgtgtgtgtgtgtgkctgggagagagaaagcaagcgagtgcgcacacattttttgtttgttattggagcattttttgagctggctggctggctgcccccagggaaagtaaccagt

SEQ ID NO: 495489 - DNA, 201 bp, Homo sapiens
ctatcctggggcaggttatttggggcaataaatcaacctcaactgttaacctttcttgtgtgtgtgtgtgtgtgtgtgtgtgtgtgtgtgtgtgtgtgtgwgacagagagagagaatacatatgtaaacatgatgcatgggcacttatttatttagtatcttatatatgccaggcattttaatcttcataacagccctgcc

SEQ ID NO: 495490 - DNA, 201 bp, Homo sapiens
tgaatcttctgttattactgccttatgcctctggcggaggggcatccagaaaggagaagcagagccacagcaaaggaatatgttcacccatctcttcagaytctccataccaagccgcctcatgataataccagcagccacgatggggctgacgagacttctcatttcctgcccagctctgattccattaggaaaaacctc

SEQ ID NO: 495491 - DNA, 201 bp, Homo sapiens
ggccgccgccccgtctgggaggtgggggggcgcctctgcctggccgccctgtctgggaagtgaggagcctctctgcccggccgccaccccgtctgggaggwgtacccaacagctcattgagaacgggccatgatgacgatggcgattttgtcgaataggaaagggggaaatgtggggaaaagaaagagaaatcagattgtt

SEQ ID NO: 495492 - DNA, 201 bp, Homo sapiens
gtataaagtagttcataatattgtttcattatccttttcatgtctataagatttctttcattcctatcactggtgatttgtgtcctctttctctctctctcactctctttctctctcttgctcttgctcctttttctgatcaatctggctagaggtttatcaattgtattgatcttttcaaagagccagcttttcatttca

SEQ ID NO: 495493 - DNA, 201 bp, Homo sapiens
ggtataaagtagttcataatattgtttcattatccttttcatgtctataagatttctttcattcctatcactggtgatttgtgtcctctttctctctctctcactctctttctctctcttgctcttgctcctttttctgatcaatctggctagaggtttatcaattgtattgatcttttcaaagagccagcttttcatttc

SEQ ID NO: 495494 - DNA, 201 bp, Homo sapiens
agtggtattccagaccggcagaccgtgcaggtaagagtctaattgatctgggaattatactccttaatcatctccagggctagcaaggaggaggtgttggyatggtctggtgggataatctagatgtggactctagaacgggcatatgggagtgagttcgtagatacacatttgtgtatagttacagggggtgaaggatgc

SEQ ID NO: 495495 - DNA, 201 bp, Homo sapiens
taattgccttttgccattcattgtctgccagattaacgactcctcatgtgtctggttgcccatcgcctcctctgagattcctctgtgtactctctctggcwtgtctttcccttcttctgtctcctcagctcagcctctctgagctccacatctgaatttttagaaggcatttaatttaaatgataaaatagaagcactgcc

SEQ ID NO: 495496 - DNA, 201 bp, Homo sapiens
gggagggtaaactattacaagcaaggaagctggggggttggaaacagaggagggatgtgagaagatgaaccagggataaagtaagtgagacacggaagatmttagagcaagagggtggagacagaagaggtgaaagttctagagccagacactggggcctacctgcatgtcactggtgtcagatgcatccacatagacata

SEQ ID NO: 495497 - DNA, 201 bp, Homo sapiens
aatgtatacaggcagataagaatccattagtatggccgtagagcacctgcaaggaacagaacgtgagaacgcgcatgtgaatgaggcataacagaaaaaamaagcatgctttaagataggaaagggagcccataaactgaagtttagaactgtatctgttatgactccgccagtgtttagcatgtggacctcgcgttagga

SEQ ID NO: 495498 - DNA, 201 bp, Homo sapiens
tcaggagaccgaggcctcatctggtctctgccatggatggactgtaagcaagttacttaacctttctgcgaagtctcctccttgtctaacagggtaagatyataattaagaggatggctcaaaacaattcctcttaagctttaatgtgcacgtgaatgacccagaggatcttgttgcaatgctcattcagattcagcaggt

SEQ ID NO: 495499 - DNA, 201 bp, Homo sapiens
agatttcttttgtaaaccggtagaaatccatcttccatgagtttatcttaaactgggtttatttttagccttttaaactaatttcttttcataagctaaawcatctggcattacaagttacataaatttagtattttctaagtaaagcagtgcttccttttatttgtcttaaagttaacctttcttttggtttctagggtt

SEQ ID NO: 495500 - DNA, 201 bp, Homo sapiens
aagaaggcagctcttggcctcccactcccacacttctttgcctataaatcttcctagcagcaatttgagctacctgaggaggaggcagggcagaaagggcragggcctgcctctgacctgccgtgtcctttgcaggaaggaggtaggcacctttctgagcttattctattccccacccacacccccaggcagggttggaaa

SEQ ID NO: 495501 - DNA, 201 bp, Homo sapiens
tcaagcgttccaagcgcttctgttccatggcttgtgcaaagaggtgagtggccccagccccctccatttccccaggactgcactttatgtcccacctcctkccattaatagtctaccccaggaggtccataggggtggcttctccagtttcctagttcctcgacccacctggaagcaggatggcatccctaattcaacaag

SEQ ID NO: 495502 - DNA, 201 bp, Homo sapiens
attttttttcttatttcccccaacctcaagtactgtgtgtcagcgctcttagtcacacactttgccctacttcctgtcctttactagcttacaaagtcccktctttattcctcttttcctgtttccccaaggatatgcataccagaattgtagactacattattttctttgcttttctcatgtgggtgcctttcccccatg

SEQ ID NO: 495503 - DNA, 201 bp, Homo sapiens
agcgcttctgttccatggcttgtgcaaagaggtgagtggccccagccccctccatttccccaggactgcactttatgtcccacctcctgccattaatagtytaccccaggaggtccataggggtggcttctccagtttcctagttcctcgacccacctggaagcaggatggcatccctaattcaacaagcacgagaagcca

SEQ ID NO: 495504 - DNA, 201 bp, Homo sapiens
gccccacggtaaaagccgggcgcagtttgagtccttgctgtccctccctgggcgtggactctggttctgatctcccctgctttgttttcctactctctctygtgcagagacagggcagggcattgttcatgcactgaccgacctcagcagccccggcatgacctcagggaacggaaactctgcctccagcatcgccggcac

SEQ ID NO: 495505 - DNA, 201 bp, Homo sapiens
tggatgtgtcttagaatatttttacatttccatgtaaaatttctgaaaatgtgaacaatttgctctttccttgctaacttcctcccccaaagaatatagarccatttctttctaggattatctttccaaggtccagaagaggggggtcagtgatcaggaataattgacaagacccttggttagaagtttcccacacaaact

SEQ ID NO: 495506 - DNA, 201 bp, Homo sapiens
ttgggaaattagatttcattgagttttgaatgccaaaacctctgaatggcaaaacttcggccagttaggaacaaaaggaattgcacagaacagaattctcmagatacgtgtatcagaaatgaatgtgaggaaacagggtcacaacctgaagcttgttttctggggacagagccttgaaaggggagttaatgagattgaggg

SEQ ID NO: 495507 - DNA, 201 bp, Homo sapiens
catattgtccttgttattgcattattgcttatgtgtctttgttttatcttttcttagtatttgtcctcctgtttataacatatgtctttaacttatccctrtctatctccaaataatatatatcactttatatatattagagaaacattaaaactatatacttccatttttcccttctggtcctttgagttattgtcatgt

SEQ ID NO: 495508 - DNA, 201 bp, Homo sapiens
gatgttccccctgccttctggtattcagaggaccccaggtgggaagggtctataattttcccaccactaagagttcattttgtgcatgttttacaagatactgtcttccaaataaatggcattcgtttgttttattctaaaatgcacacttttacaatctgtacttgagacgcacacgtaatcaatgtgtaaattcgttgt

SEQ ID NO: 495509 - DNA, 201 bp, Homo sapiens
cccacagcttcccttccatggccctcgacaccacggtcccctccagctgccgacttcagcgcactctgctgtgctctcattccttgtagacctgtccagtsgagccttctgcaccccagtaggtcccttcatttagacccatgggtgcttacaaggttccctgcccccttccgtggccttgcctcaacatcaccccacctt

SEQ ID NO: 495510 - DNA, 201 bp, Homo sapiens
cagccaacccactgtcaatgaaccaagggatctgagagcaggagagaagagcgtgcttgagcgtgtgtgtgtgtgtgcgtgtgtgtgtgtgtgtgtgtgtgaaagcaagtgtgtgtgtgtgtgtgtgtgtctgggagagagaaagcaagcgagtgcgcacacattttttgtttgttattggagcattttttgagctggctg

SEQ ID NO: 495511 - DNA, 201 bp, Homo sapiens
gtgacttgagactttgctttgccctttaggacagaagcatttctgttatgttgcagtcacagtggaggtaacatttcttcctgaagcctgacctcaacagygcaaggacaggactaccgacgtagaccaagacgtctgaggaacacaaacctcagatacctcagtttgggccacggaaagattagccctgctctggggctg

SEQ ID NO: 495512 - DNA, 201 bp, Homo sapiens
ccagccaacccactgtcaatgaaccaagggatctgagagcaggagagaagagcgtgcttgagcgtgtgtgtgtgtgtgcgtgtgtgtgtgtgtgtgtgtgtgaaagcaagtgtgtgtgtgtgtgtgtgtgtctgggagagagaaagcaagcgagtgcgcacacattttttgtttgttattggagcattttttgagctggct

SEQ ID NO: 495513 - DNA, 201 bp, Homo sapiens
gagtttttccctcttcttgagtcagtctaaatttatattaaacttctcccagctgttcaatatttaatctccagacagatttagttccagccatagaaagwttctcttctgaaaggacacctactggagacgagagtagggaaatgagaatgaggagtcttcataattgatagtttctcttttattccctttgttttgtgc

SEQ ID NO: 495514 - DNA, 201 bp, Homo sapiens
atcccagcactttgggaggccgaggcggggggatcatctgaggtcaggagttcgagaccagcctggccaatgtggtaaaaccccatttctaccaaaaatayaaaaattagccaagtgtggtggcacatgcctataatcccagctacttgggaggctgaggcaggagaatcacttgaaccctggaggcagaggctgcagtga

SEQ ID NO: 495515 - DNA, 201 bp, Homo sapiens
aggtgacttctggcctcctgcccagccaacccactgtcaatgaaccaagggatctgagagcaggagagaagagcgtgcttgagcgtgtgtgtgtgtgtgcgtgtgtgtgtgtgtgtgtgtgtgaaagcaagtgtgtgtgtgtgtgtgtgtgtctgggagagagaaagcaagcgagtgcgcacacattttttgtttgttatt

SEQ ID NO: 495516 - DNA, 201 bp, Homo sapiens
gaggtgacttctggcctcctgcccagccaacccactgtcaatgaaccaagggatctgagagcaggagagaagagcgtgcttgagcgtgtgtgtgtgtgtgcgtgtgtgtgtgtgtgtgtgtgtgaaagcaagtgtgtgtgtgtgtgtgtgtgtctgggagagagaaagcaagcgagtgcgcacacattttttgtttgttat

SEQ ID NO: 495517 - DNA, 201 bp, Homo sapiens
tggtctgaggtggcctattagatatgggaactctagtttattttttaataatgaatgttatttttattacaaaagtatatattttcattatagaagatttkggggagaggaataagcatagtcaagaaaaaacctgttatcctagcaccccgaagtaatgctgttaatgttttgttttatatccttctagttttttaaatt

SEQ ID NO: 495518 - DNA, 201 bp, Homo sapiens
tggtataaagtagttcataatattgtttcattatccttttcatgtctataagatttctttcattcctatcactggtgatttgtgtcctctttctctctctctcactctctttctctctcttgctcttgctcctttttctgatcaatctggctagaggtttatcaattgtattgatcttttcaaagagccagcttttcattt

SEQ ID NO: 495519 - DNA, 201 bp, Homo sapiens
aagctgcttttccccaaaggccgcaaagcagtctgggagagcgggaagcagattaaattaatctcagtgtgctgagcttggcagggggcgagattgtgttyggtcattccaggaatagcccaaactcctttgttactaaagcagatgaggagctattggtctacaagatgactgcaaagcgaagtagctgtgaacctttgt

SEQ ID NO: 495520 - DNA, 201 bp, Homo sapiens
gttccctgggcagaggtgacttctggcctcctgcccagccaacccactgtcaatgaaccaagggatctgagagcaggagagaagagcgtgcttgagcgtgygtgtgtgtgtgcgtgtgtgtgtgtgtgtgtgtgtgaaagcaagtgtgtgtgtgtgtgtgtgtgtctgggagagagaaagcaagcgagtgcgcacacattt

SEQ ID NO: 495521 - DNA, 201 bp, Homo sapiens
ttggtataaagtagttcataatattgtttcattatccttttcatgtctataagatttctttcattcctatcactggtgatttgtgtcctctttctctctctctcactctctttctctctcttgctcttgctcctttttctgatcaatctggctagaggtttatcaattgtattgatcttttcaaagagccagcttttcatt

SEQ ID NO: 495522 - DNA, 201 bp, Homo sapiens
aactctttcctttgcacctatccctgaggggtgcaaaggtccttaggagcctaccaggtccctaagatttaggagaatgccctggggaaatggcagcataytccctgggtggcagtagcatgcagccccagctagggctcagtcactgtgggtcgtgtctcatacctcccattctgaagtctgctccttcgggctcttgac

SEQ ID NO: 495523 - DNA, 201 bp, Homo sapiens
ctttaatgattcgagtataattacctcttgtcttacaagtatgtaaaactccaaatcagtaggatagggattttgaattggttttccattcctgatggtgmtgtgggctgatccatctcttcgttgtccccatgtaacccacaacacatctttgcaagactgctgggtagagttggtattaagagaacagtgaagagctgt

SEQ ID NO: 495524 - DNA, 201 bp, Homo sapiens
ttaagttattggtataaagtagttcataatattgtttcattatccttttcatgtctataagatttctttcattcctatcactggtgatttgtgtcctctttctctctctctcactctctttctctctcttgctcttgctcctttttctgatcaatctggctagaggtttatcaattgtattgatcttttcaaagagccagc

SEQ ID NO: 495525 - DNA, 201 bp, Homo sapiens
gagaactctgctggaaggccacacagctgctttgtttgaacacagagagcgttttgtgcagggggcagtgatttctgtctgtgataggctggacaatgcartgttgctgattccaggattcttgggtaccctatttccctcccaaagcagcctccaaactgcaagcacacttttacttagggaatccaataaaaaccaaag

SEQ ID NO: 495526 - DNA, 201 bp, Homo sapiens
gggagaagggcagtttggacactccagctcatgtctgcaaattctctgtggggggcggtggctgggtgtgatggcagtggccaagtgtgatggcggtggcygggtgtgatggcggtggccaggtgtgatggtggtggctgggtgtgatggtggtggccaggtgtgatggtggtggctgggtgtgatggtggtggccgggtg

SEQ ID NO: 495527 - DNA, 201 bp, Homo sapiens
tttaagttattggtataaagtagttcataatattgtttcattatccttttcatgtctataagatttctttcattcctatcactggtgatttgtgtcctctttctctctctctcactctctttctctctcttgctcttgctcctttttctgatcaatctggctagaggtttatcaattgtattgatcttttcaaagagccag

SEQ ID NO: 495528 - DNA, 201 bp, Homo sapiens
atagtaaagatggggtttcaccatgttggccaggatggtctcgatctcttgacctcgtgatctgcccaccttagcctcccaaagtgctgggattacaggcrtgagccaccgcacccggccttctctgtagattgttagtcctgcttctttcactaggtggctgtataaatatggacaaatagtaaattctctgatgttcag

SEQ ID NO: 495529 - DNA, 201 bp, Homo sapiens
gggggccgggcacagtggctcacgcctgtaatcccagcactttgggagaccgaggtaggtagattacctgaggtcaggagttcgagaccagcctggccaayatggtaaaaccccgtctctactaaaaatacaaaaaaaattagccaggtgtggtggcgggcacctgtaattccagctccttgggaggctgaggcaggagaa

SEQ ID NO: 495530 - DNA, 201 bp, Homo sapiens
attcagatatttgactcttaaattttatgagggtacatctgtgtctggcttattcactgctcttttcccgacaccatgccctagtagctgcacagcaaathgtgaatgaattaatgaaactcaattcttgataattcatgtcccattcctgttatccaggtcctgacctctgatcacccagaatcttaggcctgattcatc

SEQ ID NO: 495531 - DNA, 201 bp, Homo sapiens
gaggggtgttcacgtcagaggagtggaatctgggggcaacatgtggaagaattgggatggggatgtctggggagacaccagagcccacggaggatctgctrtaacaacaggctgtttttacagaaccccaaatctgagccagaggctgttttgtcctagagctgtcagccctagaagtcacaccaacctggggaaagcctg

SEQ ID NO: 495532 - DNA, 201 bp, Homo sapiens
ctaattgatctgggaattatactccttaatcatctccagggctagcaaggaggaggtgttggcatggtctggtgggataatctagatgtggactctagaaygggcatatgggagtgagttcgtagatacacatttgtgtatagttacagggggtgaaggatgcaaaatggcccaatcaaggagtttggaggacacgtgtgt

SEQ ID NO: 495533 - DNA, 201 bp, Homo sapiens
agagagcaggagagaaaaagaatagagttaaaataaaacagggtatcggagaggggtgttcacgtcagaggagtggaatctgggggcaacatgtggaagarttgggatggggatgtctggggagacaccagagcccacggaggatctgctgtaacaacaggctgtttttacagaaccccaaatctgagccagaggctgttt

SEQ ID NO: 495534 - DNA, 201 bp, Homo sapiens
attatgatctccacataatgctgctgcctagctcccacctagtcaatgtgtgactgggtctagtcccagccttttggccaggaccttctacatctgctttktgcagtgaccacagtcccacacccatcacttcaacaccactcatctttcatttcccctctccattcccaaatcaaaatttacatgtcctaggccctgttg

SEQ ID NO: 495535 - DNA, 201 bp, Homo sapiens
tagcagcaatttgagctacctgaggaggaggcagggcagaaagggcgagggcctgcctctgacctgccgtgtcctttgcaggaaggaggtaggcacctttytgagcttattctattccccacccacacccccaggcagggttggaaatgaaggacttttttaacctttgttttgttttttaaaaataaatctgtaaaatct

SEQ ID NO: 495536 - DNA, 201 bp, Homo sapiens
ctttggtatgaaagggggttcttgatattggaaatatggcaaaacggctaccacatctcaaaaataagggaaatgccagggggaggcagaaggggactcaratgagttcagctcacaggaagcatctctgaggaaaactgctcagctctgggatccccatctgtccatctgtgcgggctcagttacaagtggacttctccc

SEQ ID NO: 495537 - DNA, 201 bp, Homo sapiens
acttgaactagggaggcagaggttgcagtgagccgagatcacgccattgcactccagcctgggcaacaagagcaaaactccatcccccctccaaaaaaaaagaataaaaggggagtgtgctgtccctgtggcactggcctgctctgtaaggcccagacaaccttattctaagggattgatgggactctgagaggctgtggg

SEQ ID NO: 495538 - DNA, 201 bp, Homo sapiens
tccttgggaggctgaggcaggagaatcacttgaactagggaggcagaggttgcagtgagccgagatcacgccattgcactccagcctgggcaacaagagcraaactccatcccccctccaaaaaaaaagaataaaaggggagtgtgctgtccctgtggcactggcctgctctgtaaggcccagacaaccttattctaaggg

SEQ ID NO: 495539 - DNA, 201 bp, Homo sapiens
aaaagagggaatgatggagagagagaggaagggaaagaattaaagggggccgggcacagtggctcacgcctgtaatcccagcactttgggagaccgaggtrggtagattacctgaggtcaggagttcgagaccagcctggccaatatggtaaaaccccgtctctactaaaaatacaaaaaaaattagccaggtgtggtggc

SEQ ID NO: 495540 - DNA, 201 bp, Homo sapiens
ccccttcccccaccgaagcctagctttactcccctcccccagcctctcccatcggccttatcctgcctccacctttcggtttcaggtgcctgactgtatayaggcatttgagacctgtgggaatgcccggcagcacttatagcctctgaactggtcaagggaattgagtaaggaaccaaattcagagtatttctttgtctc

SEQ ID NO: 495541 - DNA, 201 bp, Homo sapiens
ttgcacgcttatccttttggttattattaggcacaattctgtagttgagaaaactggggctcagagaaggtaataacttgttcaaggtcattcaggtaaakacaaaaaaattgaacctctcaccccagacctgtgttcttaatcactacaatgtttttttgaggttcctggataatacaggcagaaaagagagaccacagc

SEQ ID NO: 495542 - DNA, 201 bp, Homo sapiens
tcagtacagacaccgtattttttgaatatttttgatcctgtggttggttgaatccatggatgtggaacccacagatacaaaaggctgactttgtgaacatyctctagtaagcgtctgtcaaaacattcacttctgcctcttccctcctagcatctgcctgcccttctgccatccgagcgccctgactgcgccacactgcag

SEQ ID NO: 495543 - DNA, 201 bp, Homo sapiens; identical to SEQ ID NO: 390258

SEQ ID NO: 495544 - DNA, 201 bp, Homo sapiens
acaaagatccagggaaaatgatggctgctaatgagcttcttttcaagtttatggcctccctgagtgtctgtctgtggaactctcatgcttttgtaaggggstacaggatagaggggacaagggaagggatcagatggcctgctatctgaagcatgtgcctggcttcaatagtccccttttgggttggtttattctgtaatg

SEQ ID NO: 495545 - DNA, 201 bp, Homo sapiens
tactggatcacagagctagtgtcaacaatttcatagaattaaaaccacacataattatgctctctgaccacagtgtattgttagcattcaataagaaaaagatgactagaaataccaatatttggaaattaagcagtacacatatataatccatcacagtggaaattagaaaatattcctgactgataatgaaaaatacta

SEQ ID NO: 495546 - DNA, 201 bp, Homo sapiens
ggaattaatgaaatagaaaacacttatagagaggatatacaaagccaaaaggtgattctttttaaagactgataagactgctgccgggtgtagtggttcaygcctgtaatcccagcgctttgggaagctgaggtgggtggatcacttgaggctaggaattcaagacctacctggccaacatgacgaaaccccgtctctact

SEQ ID NO: 495547 - DNA, 201 bp, Homo sapiens
agaagccatccctgtactttgcccattagcatcttacctcgtgagccaaccagcaaaatagggccttgagcccagcacacttggatgatgacatgggggamggtttgaggagggctggcctctgtgcctggatactttatacgtgtaattgtgatgaggatggatagcaaggaagccgctcccacctgaccctcacggcct

SEQ ID NO: 495548 - DNA, 201 bp, Homo sapiens
ggtatttactgtttcaaggaaaagaatggtcagcagtgttgaatgctgctgagacaccaaagaaaatgagaattgaaaatgtttattacctttagtgacaytgaagtctctgacctcagtgaaagtaattttagcagagtggagatggaatctgagtcattttaacatccacagtacctttccgtagagtagatatttgat

SEQ ID NO: 495549 - DNA, 201 bp, Homo sapiens
ttcctgcctgagaaacttccacagcaggatcacaccaccaccactgactcggagatggaggagccctatctgcaaggtgggcatctcagaccctgaatctytcggcctcccagcgtggctggaaaggcaggcctcacacacttcctctctctgtttccccagaggaaccctgagccagcgagtctgtaaacatttccccca

SEQ ID NO: 495550 - DNA, 201 bp, Homo sapiens
aagtgaacaacatttatccataacccaacttaggaaacagaactttagaagacacccatatgctcctccctgtttgcatctaccttcttcatctgcccagwtataccactcttaaactgttgtaataagttttcccgccaggtgcagtggctcacgcctgtaatcccagcattttgggaggccaaggcgggtggatcacga

SEQ ID NO: 495551 - DNA, 201 bp, Homo sapiens
cataagtagaatcgccccattattcagaggcagaaacaaaggctgaggggctccaggtcccgcggctctgaaagggcagcgccatgactctgactcctacrgtagtcactcgctcaccttccttcatcaggatggtgcacgaatggcccccgtgaactctcccaccctataggaatgacactgttgttcacagagcactgt

SEQ ID NO: 495552 - DNA, 201 bp, Homo sapiens
cctggctaacacagtgaaaccccatgtctactaaaaataaaaaaataaaaaaaatttaaaaagtcgggcgtggtggcaggcgcctgtagtcccagatactygggaggctgaggcaggagaatggcatgaacccaggaggcgagatcgcgccactgcactccagcctgggccacagagcaagaatccatctcaaaaaaaaga

SEQ ID NO: 495553 - DNA, 201 bp, Homo sapiens
ggcgtggtggcaggcgcctgtagtcccagatacttgggaggctgaggcaggagaatggcatgaacccaggaggcgagatcgcgccactgcactccagcctsggccacagagcaagaatccatctcaaaaaaaagagttttcccttgcttttcttttatagttttacaacatatgagtgacttcctaaacaatatactgtta

SEQ ID NO: 495554 - DNA, 201 bp, Homo sapiens
tgcttttgattggtatttgggtcatttccagttttttggttttttgctttaaaaagcaattccaccgtgaacatcattatcatgtcaccttatgaatatgygcaagagtttttctaagataggtgtatagataagaatagaattgctaggccatatcatatgggtatgttcaactctattgtgaaataccaaactgttttc

SEQ ID NO: 495555 - DNA, 201 bp, Homo sapiens
ttcagttatgtgcatatgtatagatgtggatgtgaatgtgtgtgtgtgatagtggttaagagcttgagttctggaaccagactgcctgtcccggaatcctkctctgacaccttctatgtgactttagaacagtttcttaacctctgtgagtctcattttcctcatttataatatggtcaaagtagcaatgcctatgtcatg

SEQ ID NO: 495556 - DNA, 201 bp, Homo sapiens
cagattcagcaggtctggggtggggcccaagattctgcattttcaacatgctccaaagactcaagaagtggccctcaactactggcctgtgacctgttccygggactaagcacctggtaatgtttacttcagagctgagcagctccctctggagaaccctggcattcaatttcctaagatttttatttgacctctggtgcc

SEQ ID NO: 495557 - DNA, 201 bp, Homo sapiens
tatcttttaagactcaattcaagcattacctctcagaaggcatttcccagcttgctttttaagaattagtaatcttcctctttgatatttcttcgtacttyagcatctcattatagcatttaccacattgttataattgctagggaccatgtctttttcatacccttaacttcagttcctaaaactatttcttgaatgtca

SEQ ID NO: 495558 - DNA, 201 bp, Homo sapiens
tctcactctgtcaccgaggctggagtacaatgtcatggtctcggctcactgcaacctctgcctcccaggttcaagggattctcctgcctcagcctcatgastagctgggatgattataggcgcccactaccacggccggctaatttttgtattttcagtagagacggggtttcactatgttggccaggctggtcttgaact

SEQ ID NO: 495559 - DNA, 201 bp, Homo sapiens
agctgcttttccccaaaggccgcaaagcagtctgggagagcgggaagcagattaaattaatctcagtgtgctgagcttggcagggggcgagattgtgttcrgtcattccaggaatagcccaaactcctttgttactaaagcagatgaggagctattggtctacaagatgactgcaaagcgaagtagctgtgaacctttgta

SEQ ID NO: 495560 - DNA, 201 bp, Homo sapiens
gccaaagagaacccccaaataatcctttgtcattgcagctttttaccttctcccttaaagcagcagttggcaaatgtcatccagaaggccttccaggtggyggctcactgctcctaaatgcagtcagggccatgcactaccatctgctgtgtgcctgacatggtactaagcattttgcacgcttatccttttggttattat

SEQ ID NO: 495561 - DNA, 201 bp, Homo sapiens
tgagctacctgaggaggaggcagggcagaaagggcgagggcctgcctctgacctgccgtgtcctttgcaggaaggaggtaggcacctttctgagcttattytattccccacccacacccccaggcagggttggaaatgaaggacttttttaacctttgttttgttttttaaaaataaatctgtaaaatctgtctctttggt

SEQ ID NO: 495562 - DNA, 201 bp, Homo sapiens
cattgccagtgttcgtacagctcgcaagctaataatgatttctacattttaaatttttttttgaaaaaatcaaaagaattctatttcatgatacatgaaarttatctgaaattccaattctagtgcccataaataaagttctattggaacacaaccacactccttcacgtacatattgtctgtggttgctttcctgcggca

SEQ ID NO: 495563 - DNA, 201 bp, Homo sapiens
attggttagggaataatgacacaaaaaaagtgtacgtgttcagtacagacaccgtattttttgaatatttttgatcctgtggttggttgaatccatggatrtggaacccacagatacaaaaggctgactttgtgaacattctctagtaagcgtctgtcaaaacattcacttctgcctcttccctcctagcatctgcctgcc

SEQ ID NO: 495564 - DNA, 201 bp, Homo sapiens
tgtgctgtgtccactcagggttaaatggattaagggcagtgcaagatgtgctttgttaaacagatgcttgaaggcagcatgctcgttaagagtcatcaccrctccctaatctcaagtacccagggacacaaacactgcggaaggccgcagggtcctctgcctaggaaaaccagagacccttgttcacatgtttatctgctg

SEQ ID NO: 495565 - DNA, 201 bp, Homo sapiens
acgggccatgatgacgatggcgattttgtcgaataggaaagggggaaatgtggggaaaagaaagagaaatcagattgttactgtgtctgtgtagaaagaagtagacatgggagactccattttgttctgtactaagaaaggttcttctgccttgggatgctgttaatctataaccttacccccaaccccgtgctctctgaa

SEQ ID NO: 495566 - DNA, 201 bp, Homo sapiens
aacgggccatgatgacgatggcgattttgtcgaataggaaagggggaaatgtggggaaaagaaagagaaatcagattgttactgtgtctgtgtagaaagaagtagacatgggagactccattttgttctgtactaagaaaggttcttctgccttgggatgctgttaatctataaccttacccccaaccccgtgctctctga

SEQ ID NO: 495567 - DNA, 201 bp, Homo sapiens
ctgggacagtgagtcgtttcctgcatatttgaagccttgagaacaagtcttgtaggataaacaagtcccaccatgttgtctgtcattcattcattcattcagcaatattgattgagcatctactaaattcaagatattttggaggaaacaaatgtctcacataaattctgcctactaaaagagataagtcacttactgaaa

SEQ ID NO: 495568 - DNA, 201 bp, Homo sapiens
tctgggacagtgagtcgtttcctgcatatttgaagccttgagaacaagtcttgtaggataaacaagtcccaccatgttgtctgtcattcattcattcattcagcaatattgattgagcatctactaaattcaagatattttggaggaaacaaatgtctcacataaattctgcctactaaaagagataagtcacttactgaa

SEQ ID NO: 495569 - DNA, 201 bp, Homo sapiens
ttctgggacagtgagtcgtttcctgcatatttgaagccttgagaacaagtcttgtaggataaacaagtcccaccatgttgtctgtcattcattcattcattcagcaatattgattgagcatctactaaattcaagatattttggaggaaacaaatgtctcacataaattctgcctactaaaagagataagtcacttactga

SEQ ID NO: 495570 - DNA, 201 bp, Homo sapiens
tgtacctgacagatgccaaggccagttagacacgctattaaccatgagagtgtagtatcacagaagtcaagagaagaaaaagttttgagctgcagaaattygtcagcagtttgaaattgtacagaaagagtgggaaacattcattatacttagtaaacagaaggtcattggtaactttttgaaaatgatagcttcagtaga

SEQ ID NO: 495571 - DNA, 201 bp, Homo sapiens
cagcctcaggatggggaatagccaagaatggcagcctcagcgcagaggcaaggtcagaaagagacggcgcttcagagtttcctttccagacacccctcccygcactgtgaagttcccctgaccgccctcctggttcacaaagagcattaagaaagctgcggtggtctgagcaacatagcccagagggctgagcctcctggc

SEQ ID NO: 495572 - DNA, 201 bp, Homo sapiens
tttccagacacccctccctgcactgtgaagttcccctgaccgccctcctggttcacaaagagcattaagaaagctgcggtggtctgagcaacatagcccaragggctgagcctcctggcctgcctgcccgcccaccctgggagtcccagtggtgaggctcagagaacttctaaggggaaagaacagctggagtttctgttg

SEQ ID NO: 495573 - DNA, 201 bp, Homo sapiens
gaaagctgcggtggtctgagcaacatagcccagagggctgagcctcctggcctgcctgcccgcccaccctgggagtcccagtggtgaggctcagagaactkctaaggggaaagaacagctggagtttctgttgatgtgaagaaggcagctcttggcctcccactcccacacttctttgcctataaatcttcctagcagcaa

SEQ ID NO: 495574 - DNA, 201 bp, Homo sapiens
gccagttcaaggctgagcaggagcaggagaaaatggccaactctagaaatagtagctgtgtgtatgtgtatgtgcacatgcacatgtgtgctgtgtgtgcrctttgtgtatgtgctgtgtgtgtgctttgtatgtgtgcagggtgtgtgtgcgcacactgtgatgtgtgtgcgcactgtgtgctgtgtgctttgtgtatgt

SEQ ID NO: 495575 - DNA, 201 bp, Homo sapiens
aacacccaccacatgcacaacccgtggcttacgtctgtcctggttgtcacttcttccaacttcatctgtaggtgagggggttttttttctttctttctttcttttttttttttttaacaagaacatttcttggacttgagaatggggcttttgggagcctggtggaaagtttgtgtccaagccaggactaagagtgtagtc

SEQ ID NO: 495576 - DNA, 201 bp, Homo sapiens
ttctttggttccatgagtggtttgattagtctgcagaagacgcggagcttgattaactgagatgggtgaactgctcctgtaaaatgccaaaagacacatarcttcttgtcttctttcccactggaggttgtccaaggccagtggcaaagaaatctgcctggaacaccttagctagaagtggctctcgctctgttacatccc

SEQ ID NO: 495577 - DNA, 201 bp, Homo sapiens
ccccaccccgttaaaatcaactgtccattcaggtcctttgaggtaccacgtgccagcttctccctctccaaatacctgatcctgcattaaccctgtggatytgtggcccaccatggggaaatggagctatagaaaacagcaggctctgagaagactagggatacaaaccctggaggagaagcaggggctgaatagaggctc

SEQ ID NO: 495578 - DNA, 201 bp, Homo sapiens
cacagctggtaagcagcagagttggaattcaaatccaagcattttgactcaagagctcacacttgacttctgggcacactgcttctctgagggcagtgcaragcaaagcggcctgattgtcatctcagagaaaggggaaagtcctgtcagctgtaaagaccagagaatggtgactagaatttgatttgtagcactctagac

SEQ ID NO: 495579 - DNA, 201 bp, Homo sapiens
tttctgggacagtgagtcgtttcctgcatatttgaagccttgagaacaagtcttgtaggataaacaagtcccaccatgttgtctgtcattcattcattcattcagcaatattgattgagcatctactaaattcaagatattttggaggaaacaaatgtctcacataaattctgcctactaaaagagataagtcacttactg

SEQ ID NO: 495580 - DNA, 201 bp, Homo sapiens
tatactttgcggcaagagtcccagcatttctgggacagtgagtcgtttcctgcatatttgaagccttgagaacaagtcttgtaggataaacaagtcccacyatgttgtctgtcattcattcattcattcagcaatattgattgagcatctactaaattcaagatattttggaggaaacaaatgtctcacataaattctgcc

SEQ ID NO: 495581 - DNA, 201 bp, Homo sapiens
aagtgcacagagaagttaggtaacttggccaaagtgatgcagttagtaaataatggggccaggacctgaaccaaggcagacagtttgatttcaaaaggccrtgctattaaacactatgctatacagggctttacactgggcaagcattccacaaaggacaaagtgacagtgtctaaagtcttttcaatcttctagcctctt

SEQ ID NO: 495582 - DNA, 201 bp, Homo sapiens
gctgttccttttgtcatcttcctaactctgaatcatgttaaacacttacttgctctgggaaaccttctctgctctccttccaaagctgaatccccttttcygtgttctcaatattctgtgcttatcacctatcataatatttaccaaattatggtgagagtatctgtcttccatctcttttactaaactgtaatctcttct

SEQ ID NO: 495583 - DNA, 201 bp, Homo sapiens
caagattagtattgaaaatgtccataaatggataagttaaaaataagcaaaaagcttaaaatttcaggtggatttctgatgtccagtaaaaagttttcacrgaattatatgctaccatggttaaaagagcccctagtgatgatgctgcacgaattccacctgccccatggttgcccagcctctgcttgaacccctccaccg

SEQ ID NO: 495584 - DNA, 201 bp, Homo sapiens
ctttcgcaccccccacaccctgccaaacacccaccacatgcacaacccgtggcttacgtctgtcctggttgtcacttcttccaacttcatctgtaggtgarggggttttttttctttctttctttcttttttttttttttaacaagaacatttcttggacttgagaatggggcttttgggagcctggtggaaagtttgtgt

SEQ ID NO: 495585 - DNA, 201 bp, Homo sapiens
tgtggaggagcccagagccagcggcacaccagcctctgttctgatgaaaagtatctggctgttggagaagacacctttctgggataccatctgccttttcytcattctttggttccatgagtggtttgattagtctgcagaagacgcggagcttgattaactgagatgggtgaactgctcctgtaaaatgccaaaagacac

SEQ ID NO: 495586 - DNA, 201 bp, Homo sapiens
taagctgtgctggatgttttaaatgcattgttttacctattatttaaaaccaatgaagtctgcactcttgtccattttacagagaggcaaatgaggcgcakaaaggttacgtaacatggccagggttgcattcctgtatgtaaaccctgccctggcaatgtttgctcatttttatggagtagaacgtctctccccttttct

SEQ ID NO: 495587 - DNA, 201 bp, Homo sapiens
aggcccgcgccgcggcagcccgtggtcttgcgcggcctgcgcctgctccgcttgtcccgcagagtgcggtgagacccgggcgtcgggcctgaccggggcgyccgctccccagccgcggcgtgacagcgcagccgctggcactttcggcccagagtcaagcgtggcgtggggggcaccagcagagggaaccgggggttgctg

SEQ ID NO: 495588 - DNA, 201 bp, Homo sapiens
ataggagatgtaaagggaaactccaagggaggtaggctgtatccttggaagaagctctggggggagcatgctcagatcttcacaagaaaacagggcacccmgtacagtcactgcttctctagggcactctcaatgctagtgttcatgaaagtcagcaaaatccttgaccccagagttacaaagagttaagtggtacctgta

SEQ ID NO: 495589 - DNA, 201 bp, Homo sapiens
ctcagcctgtcctgcccagcttggccctgaaacccacgccgggcggtagccagcctctgcctaccccagcacagagcagaaatactgctcaggcttccccygcaggtgccaagcctggcatagctgacagtgtgatggagccacacaagaaaggagatggcaacagcagtgtgccagggagcatggaaggccgggctgggc

SEQ ID NO: 495590 - DNA, 201 bp, Homo sapiens
tcaactaagataattgaaatttgtcttttaccccaatgtctgctcattggaatcgcctgggtaatttgtccccaaattttcttatgaaaagttctgaacayaccaaaaagttgaaataagtatacagtgaatgtcacatgtatcctatccagattctacaattaacattttaccatacttgccttatcacatatctgtcca

SEQ ID NO: 495591 - DNA, 201 bp, Homo sapiens
cttttttaaataaatgaactccaatttcttactctgggtaaacaaagccctgtctcatctaattcatacattcatctcattttatacagttttctctctcrtctactgtgcagccattaaacatgccaagtttgtttctctcatagggtcttcattaccaactaatgcaaagtaatgcaatgactgtctccttgtctcaga

SEQ ID NO: 495592 - DNA, 201 bp, Homo sapiens
ctgggaatggttctgcctgctcccttccagtagtcttgagtagtttcctatcatgcatgtgcagaccagtgcttagtcaaagactctagggaggcctgtcratagaactccagagtgttctatcttcagttctctgtcccacaaattctagtcactttgccctcctggatgtctaatctcagtcacctcgactcggtgaga

SEQ ID NO: 495593 - DNA, 201 bp, Homo sapiens
gatgaaaaggctgatagggtgagaggtgatccatgagatcactgctagggagaacgttataggaagtctgcctcctttcctagttttgcttcctctggcaraataaacaggtcataggctttagaatcagccagacctgatctcaaatctcacctagtgaaccaagtctgccctgtccttctgagggcaagtgtgtcttaa

SEQ ID NO: 495594 - DNA, 201 bp, Homo sapiens
aggccctgttgagagtagccatctggacccacaaatttgagtaaaggtgctaatggctactaatagtttcaaaggtcccttctcagataacatggtatttscacagtgtgtttcggtattttaaccttgggttcctcatcaggaggtgaagagcttcccaaagagcttcaagctttattcattcctcatttaacaaaatct

SEQ ID NO: 495595 - DNA, 201 bp, Homo sapiens
caagtgaacttcataagaactgactggcccagagaggcctggatcggaataagcacaagtaattctgcctcttgtgcatggactttgaaacctgtgtttcygatcctacacctgccatttgctagctctggggctccgataagttacagggcctctatgaatctcagttgtcttgtgagaaaaatgaggaagtagtgtctg

SEQ ID NO: 495596 - DNA, 201 bp, Homo sapiens
atggtctggtgggataatctagatgtggactctagaacgggcatatgggagtgagttcgtagatacacatttgtgtatagttacagggggtgaaggatgcmaaatggcccaatcaaggagtttggaggacacgtgtgtgaaagtataaagggcagacaagtaacaataacaaataatacatgaccaagagctgctcagcca

SEQ ID NO: 495597 - DNA, 201 bp, Homo sapiens
tgcacttgaggccagcatgggcacagatgaggcttctaaatcagggtagaagtgccaggcttagctcctttctaaacaggagggctgaggattctctatcrcatcctcccagacaactactgagcatgcagcatgcattctttgccttcctaggaaggtagggttttcagagtattcaaggttgctctgggcgccagttat

SEQ ID NO: 495598 - DNA, 201 bp, Homo sapiens
acattattttctttgcttttctcatgtgggtgcctttcccccatgagatcacagtccccagaggaatagctcctgacaataaagaaactgaagataagacmtttctcctgaaatagaagagatggagttgtattagaaacggtagtgtttattgcataataataattggaattacaacttattgagtgctcatagatgata

SEQ ID NO: 495599 - DNA, 201 bp, Homo sapiens
tgcactggtccctgagcacagaaagttggtgtgtgtggctcctgacaagatttacatcaaatgctcagtacttgttggaagaaaaaaaaaaaaaaaaaaaacctcttgaaaaggtcttataagtgatgtggcttctctcattgttttgttcaaccatttaaatgaggattttccagtcagcaccaggaagaatgcacttga

SEQ ID NO: 495600 - DNA, 201 bp, Homo sapiens
gaacgggccatgatgacgatggcgattttgtcgaataggaaagggggaaatgtggggaaaagaaagagaaatcagattgttactgtgtctgtgtagaaagaagtagacatgggagactccattttgttctgtactaagaaaggttcttctgccttgggatgctgttaatctataaccttacccccaaccccgtgctctctg

SEQ ID NO: 495601 - DNA, 201 bp, Homo sapiens
cttatgtgccaaacattatgctgaacactatgggtgttaaagagatgaacaagagtttaaattctaatgggagctgcagacatttgagttgtgctttgaarcattattgtttcaagaatggaacaggaggaggagtatctcagctggcactgggaagcacctaagcccagaggggctgtgtgcgcgtgtgaccatctgtgt

SEQ ID NO: 495602 - DNA, 201 bp, Homo sapiens
aaggtcatttcagctatccactgtagcaccaaatctagatgactaagaatctctttttatgttaggagaaaaatccacaatcatcagctatcagtggaggrgctttatattttgcttaacatctttgtgtgtacgagcctgtgtgcacgtatgtgtgagagagaaagcagactgacacacaaagggacttggccttgctgg

SEQ ID NO: 495603 - DNA, 201 bp, Homo sapiens
tgcttgagcgtgtgtgtgtgtgtgcgtgtgtgtgtgtgtgtgtgtgtgaaagcaagtgtgtgtgtgtgtgtgtgtgtctgggagagagaaagcaagcgagygcgcacacattttttgtttgttattggagcattttttgagctggctggctggctgcccccagggaaagtaaccagtggagacttgcagtgggccagtagg

SEQ ID NO: 495604 - DNA, 201 bp, Homo sapiens
tctggctgcaacacctgtcaccccattgatcggcagagttgattccgctgatctggctggctacgcaggtgtccccttcctccttcactgctccatgtgcrtccctcctgaaccagcagctgggtcaaagaggacgaccatcccgtagaggagggccgtccctcagtcaagggcatacgagtagctgccctcccctgctag

SEQ ID NO: 495605 - DNA, 201 bp, Homo sapiens
ataaaccgttgctctgagattcattgtaagaccatgtagaccagcatagaaaacttcaaggttttttttgtttccttctccttccaaattatttttatagytagtgaaaaaggatatgctttcctgttcttccaatttccaaatgatatttaggtaagtccaaaagaagagaacattctttctacatctggtaaagacatg

SEQ ID NO: 495606 - DNA, 201 bp, Homo sapiens
gtaaacaccagcaggtgacaggcttgaggcccgagggcctaaggctaacagtgcctggctagaatgcagtacagagaccagtggctccacagaactttctrtggagcagctgtgagctgcagctccacaaagaacctctccccagagacacaaagcagtgggcctgcattgttcctgcctcccaccatcctgttcattctt

SEQ ID NO: 495607 - DNA, 201 bp, Homo sapiens
ccaggtacagaacttgaccctccgaacacagcagacaccagcggcagcagcctcgggccccacccccactcagcctgtcctgcccagcttggccctgaaayccacgccgggcggtagccagcctctgcctaccccagcacagagcagaaatactgctcaggcttcccccgcaggtgccaagcctggcatagctgacagtgt

SEQ ID NO: 495608 - DNA, 201 bp, Homo sapiens
cctgtagaggggcactgatactggggaggggcacaaggagaggccgggatcagctaggaaagcaggcgggagacaggacaccccaatgcccccaggcctgygcgtctaccctgttccagaaggcctcagtccctcctggctctgtttcgttccctcaaacacaggtcaggagccagagggcagcctgctgaggccagcatg

SEQ ID NO: 495609 - DNA, 201 bp, Homo sapiens
tcaccattcaaagcctctttctcccccctcacaccttgtttgtgctctagacccacatgatcagggacaggccagaaacctgaccacaggtatcaggaatkccagctcctgagaaagctaacctgatgactacttcattgtttttaacttcatctatttctatgaaacacattgattgtaccatttttttaaagtgttaag

SEQ ID NO: 495610 - DNA, 201 bp, Homo sapiens
actactagtagattcctttctttaaagaaattctgtcatttaaaatatggcttgtgaatagttaaaaagtagatctgcatttaaagtaacaaaattctacrtgataaattaaaaacaggatttaggagatttagatcttccccaccttgctatctagcatacaattagagagtaattcattgctattagaatggcagaggg

SEQ ID NO: 495611 - DNA, 201 bp, Homo sapiens
gaaatagaaaagtgattagtgaaggcagcacagtcaagcggaagattaattttccctgtctgcttcattattttcgttgacctaaaatattattctttttmtttcatatccttaatagcaagtcagcagttcatttcttaaacttactgctttgataactacctgaatgtttcactgaacagtaatagtgtagctgtcgtt

SEQ ID NO: 495612 - DNA, 201 bp, Homo sapiens
aaagctgcggtggtctgagcaacatagcccagagggctgagcctcctggcctgcctgcccgcccaccctgggagtcccagtggtgaggctcagagaacttytaaggggaaagaacagctggagtttctgttgatgtgaagaaggcagctcttggcctcccactcccacacttctttgcctataaatcttcctagcagcaat

SEQ ID NO: 495613 - DNA, 201 bp, Homo sapiens
ttgggaggctgaggtggaaggattgcgtgaggtcaggagtttgagaacagcctgggcaacatggtgagacctgtctctaccaaaaaaaaaaaaaaaaaaaatttaattaagaaaatgtaaactaaatgacagtagacagacaagtatgcctttgctggatggagagactgcaagagggcgcacatgcagaggcatgaagat

SEQ ID NO: 495614 - DNA, 201 bp, Homo sapiens
tattcaaggttgctctgggcgccagttatcagtgataactaacaaagatccagggaaaatgatggctgctaatgagcttcttttcaagtttatggcctccytgagtgtctgtctgtggaactctcatgcttttgtaagggggtacaggatagaggggacaagggaagggatcagatggcctgctatctgaagcatgtgcct

SEQ ID NO: 495615 - DNA, 201 bp, Homo sapiens
agtttgtcatcgtttttatggcagcaacaagggactaaacaatgagggtagtcacttatcatactgcttagctcattttgagagaaaatattatgacttartaaagacaacaaccaactaatataacatgtataataataatttcggcaaacatgtatgtagtctttactatgtgccaggcactggtgtaagcatttgaaa

SEQ ID NO: 495616 - DNA, 201 bp, Homo sapiens
ggagtcttccccttcccaccatccttacaaggactggccacctctaactcaagggccaaagatgctttccagcttcagcgtgcctccattgccctcccagyggcccccattctaatcagggtcaggtgagcttgtttgggcaggatatactcaggatagcaccaactctttcctttgcacctatccctgaggggtgcaaag

SEQ ID NO: 495617 - DNA, 201 bp, Homo sapiens
tatttaagcaatcttctcagtcagtgtatttactgaacacctgcttgtgtgcaaatactatcctgtatttgtgatgtggaggagacaggaaaatgagagtrgtggtgtagtatgggggttattctcagctaaacaaagatttggatcccagttctaccaggtacttgctacatgactttgacttcagtttcttcatctgta

SEQ ID NO: 495618 - DNA, 201 bp, Homo sapiens
ctcaggatagcaccaactctttcctttgcacctatccctgaggggtgcaaaggtccttaggagcctaccaggtccctaagatttaggagaatgccctgggraaatggcagcatattccctgggtggcagtagcatgcagccccagctagggctcagtcactgtgggtcgtgtctcatacctcccattctgaagtctgctcc

SEQ ID NO: 495619 - DNA, 201 bp, Homo sapiens
aggcaggtactgttagcatcctcacctattcacagaggaggcgggatacttgctgtgggccacatagaggcaggttgggggctgacctccagaggctgttstccttaacaccagcctgcagcacctcctgtggatgatgagagcccaggagtgactgggggaggtctgggactctagcaagaggagtttgttctttcctag

SEQ ID NO: 495620 - DNA, 201 bp, Homo sapiens
gccttgttagggtaagccttacccagaaccacagctatagtgttcccttggtgagctctcgcccagcatagatcactaatggtcatcataaaaaccactgycatttcctgagaacctgctgtgtgctagtcactgtgccagtcaattgatacgattatctcatcttcaaaataactcccaagacaggtattactattgtcc

SEQ ID NO: 495621 - DNA, 201 bp, Homo sapiens
ctaaaaaaaaaaacaacaacaacaacaacaacaaaaacatgagcttgagtggaccaagacccattatgaactagtcataaaccatcttttctttccccccctccccccccaagatagagtcttgctctgtcgcccaggctggaggggggtggcgagatctcagctcactgcagcctccaccccctgggttcaagcagttct

SEQ ID NO: 495622 - DNA, 201 bp, Homo sapiens
gcaggagaatcgcttgaacctgagaggcagaggttgcagtgagcataggtcgcaccactgcgttccagcctgggtgacagagtgagactccatctaaaaamaaaaacaacaacaacaacaacaacaaaaacatgagcttgagtggaccaagacccattatgaactagtcataaaccatcttttctttccccccctcccccc

SEQ ID NO: 495623 - DNA, 201 bp, Homo sapiens; identical to SEQ ID NO: 114718

SEQ ID NO: 495624 - DNA, 201 bp, Homo sapiens; identical to SEQ ID NO: 405851

SEQ ID NO: 495625 - DNA, 201 bp, Homo sapiens
tctaacaccacaagacaattttgttttagttattgttttggtttgagttgagttgaaagatttcttttttttcttctcagcttaccacagtgcggagactsctttctgaaaaggccactcacgtgaacactagggatgaagatgagtatacccctcttcatcgagcagcctacagtggacacttagatattgttcaggagc

SEQ ID NO: 495626 - DNA, 201 bp, Homo sapiens
gtgctgagagcagtaagatgtatagtgcagcgaaaaataatgtagaacttttgaattagaacgtctgccctttcagttccattgaagggtccttgatctarggcaagttgttttaatctatctgaacctccttcaccagtaaggtttatagccccgcctatcactgagttgtttgtaaggagttgacatagttcggatctc

SEQ ID NO: 495627 - DNA, 201 bp, Homo sapiens
cctgcctaatcctactgatttgggcactgcttgtatagtctctcaagttcacaggaaatgttgattttctaaggtcctcatttttacagagtatacaggcmaagtgacaggggaaaaggaattagtctaagagtaaggggatgattattatattgaggctaaaaccacaaagtggctcaggctttaaaaaaaaaacactgt

SEQ ID NO: 495628 - DNA, 201 bp, Homo sapiens
ataaggttactatatttgatataattacaagtgaacttttatttattagcatctgttaagtgtttaatgaattgatgtatggtcatttttgtgttgcaagkttcaggaattagtttgagaatcaaagaaaaagtggaagctccaggagaattaataaaacacagagcaattctgattggatatctctgattccaagggtgt

SEQ ID NO: 495629 - DNA, 201 bp, Homo sapiens
gaccactattagatcatagtttgttgttttctgtcagcatcagtatttagtgtatgtaagggatatcatgagaaaaacaagagtttagacagggtttaatygtatatgtttgcaagacttatctatgcagttgataaagcctgaattattgttttactaataacttttgtatttgtgttttcagatcttgatgaacaaagc

SEQ ID NO: 495630 - DNA, 201 bp, Homo sapiens
tcttggatccagaacattattcatccagcacgcacttagttatttaacatctactcactcagtctctccagcagcaattttgcattgtctatctagccccyctgtgattgttcccaaagttttgtcttctcaacaccacaacactccaggggaagggaactaaaccagttgctctttacttcagttaaatttttaagatgt

SEQ ID NO: 495631 - DNA, 201 bp, Homo sapiens
attaataaaacacagagcaattctgattggatatctctgattccaagggtgtctctgattgggtgactgaaaagccggattggccttaggaatactttagkaaaattcttacattttacaataaagtaacaggaccagaaaagttactggacatgagtaatacatttaaacttgagtttagtgctattgccactagtaata

SEQ ID NO: 495632 - DNA, 201 bp, Homo sapiens
gaagtttttatttctgctctatattatctgtgtgtctagtttataaaaatcttgaatgcacctgtcttcattgtattagttatacttcaaaacctttaagyattcatcactgttagcataacaccatcatacctaaaccagtagattaaaaataatagttataataatataattgacttagaagaaaacaacaaaagtaag

SEQ ID NO: 495633 - DNA, 201 bp, Homo sapiens
tctctgattccaagggtgtctctgattgggtgactgaaaagccggattggccttaggaatactttagtaaaattcttacattttacaataaagtaacaggwccagaaaagttactggacatgagtaatacatttaaacttgagtttagtgctattgccactagtaataaagtttaataccacattaagattgtatactgtt

SEQ ID NO: 495634 - DNA, 201 bp, Homo sapiens
gttaaagtaaaaaacagcaaaaaacctagatctttgtcttttagaacacagaccattttcaggaaagcagttagctaagtgtttaattcatgaatattgtrtactgcatcccctaccacaatttacacaatcctgtggatagtcctacctcaccctggtcaacctacatgatccttaagctaatggcgaatcacgatgacc

SEQ ID NO: 495635 - DNA, 201 bp, Homo sapiens
gtttagtgctattgccactagtaataaagtttaataccacattaagattgtatactgttaaacttgtgagattaggtatcaagaaatcagtatcttggggktatgcctaactctggaacttctcagaatccattccaggcaaaatcaagtgacaagactttaattaaatgtaatgctacacatacttcttaatgccttcta

SEQ ID NO: 495636 - DNA, 201 bp, Homo sapiens
tgttgttttctgtcagcatcagtatttagtgtatgtaagggatatcatgagaaaaacaagagtttagacagggtttaattgtatatgtttgcaagacttayctatgcagttgataaagcctgaattattgttttactaataacttttgtatttgtgttttcagatcttgatgaacaaagcagtcataattcatctctagaa

SEQ ID NO: 495637 - DNA, 201 bp, Homo sapiens
caacaaaagtaagaagcattagaccactattagatcatagtttgttgttttctgtcagcatcagtatttagtgtatgtaagggatatcatgagaaaaacargagtttagacagggtttaattgtatatgtttgcaagacttatctatgcagttgataaagcctgaattattgttttactaataacttttgtatttgtgttt

SEQ ID NO: 495638 - DNA, 201 bp, Homo sapiens
ggatatcatgagaaaaacaagagtttagacagggtttaattgtatatgtttgcaagacttatctatgcagttgataaagcctgaattattgttttactaawaacttttgtatttgtgttttcagatcttgatgaacaaagcagtcataattcatctctagaaagatttatatcctggcatttgaaatgctttttatttaga

SEQ ID NO: 495639 - DNA, 201 bp, Homo sapiens
gtgagatgtattcccataatcaaagttgacgtcaaacatcttactacaaaaattcagtgacattcattataacattcttccaagtgaattgcctgactttratgtcaaaatgtatttgaaagtaatttgcatatatctttaattatttctgtggagtttgtgatttttttatcagaaataattttaatgtgtgtatactta

SEQ ID NO: 495640 - DNA, 201 bp, Homo sapiens; identical to SEQ ID NO: 428630

SEQ ID NO: 495641 - DNA, 201 bp, Homo sapiens; identical to SEQ ID NO: 428629

SEQ ID NO: 495642 - DNA, 201 bp, Homo sapiens
attcaggcaacttccagaagaaggctgcaaacatgcttcagcaatctggttctaagaatacaggagctaagaaaagaaaaatcgatgatgcctgacatgamtgttactaaattttctaattaaagatggtttatgcatgtatatgccactatttttgtagttagacaatagtttttaaaagaatttcatagatattttata

SEQ ID NO: 495643 - DNA, 201 bp, Homo sapiens; identical to SEQ ID NO: 428631

SEQ ID NO: 495644 - DNA, 201 bp, Homo sapiens; identical to SEQ ID NO: 428632

SEQ ID NO: 495645 - DNA, 201 bp, Homo sapiens
gtctttcaggtgaggtgcacgaaaggcttctccgaagtggcagctcggaaggatgcacgtccggctgcgccaagctggtttccccgcctttttcccacttyggcgtcagcctgggctctgggaactgcagcctgtgcctccagccgcgcgcttcctcctgcttccagaggagcagggcagtgcagccaggcctcgcaaacc

SEQ ID NO: 495646 - DNA, 201 bp, Homo sapiens
tgcttgtccctgaaactaaaaaacatcaaaaaacaattccctttgcttccatgaattatggttagtgcctggttttgaatcattgcctctacttgggactsttgcccctttgggttttgctggttctgaaattctgatgcctgtagccaaagtgggacatttgagtgggcttctggaaatccaacattctagaagaaagcc

SEQ ID NO: 495647 - DNA, 201 bp, Homo sapiens; identical to SEQ ID NO: 256382

SEQ ID NO: 495648 - DNA, 201 bp, Homo sapiens; identical to SEQ ID NO: 256383

SEQ ID NO: 495649 - DNA, 201 bp, Homo sapiens; identical to SEQ ID NO: 256384

SEQ ID NO: 495650 - DNA, 201 bp, Homo sapiens
ccgccaaaaaaccgccgccgtgagggcggggcttgtgcggtatggccccgccccctcgcccacgttccccgcgcacgagacgcgcgctgtcgccgcccackagttccccgggctgcgcgcgcctccctctcccgccctcgacggctgccatagcaacggcgctgggctccgcctccggagggggtttgtttgcgccatctg

SEQ ID NO: 495651 - DNA, 201 bp, Homo sapiens; identical to SEQ ID NO: 256388

SEQ ID NO: 495652 - DNA, 201 bp, Homo sapiens; identical to SEQ ID NO: 256409

SEQ ID NO: 495653 - DNA, 201 bp, Homo sapiens
cgggctcactcatttatgtcctagaaaagttgtgtggacgactgctttaattttcatttttagcactctaaagtttgggaagtaattaagaaccacctcaraatctgcagttttttgttcttgtttcttataggctgaaggggatgctaagggagataaagcaaaggtgaaggacgaagtaagtcattctctcttcaaggg

SEQ ID NO: 495654 - DNA, 201 bp, Homo sapiens
cgtccgtgtcattcataacgttggtttcctgatcaagaattctgttgttagtttataggaaaatctgcatttaaatattaaataccccagggtttaaactratttattcttctgttacttaggaaattctaagtactaaagattatagcaaattacagataatttagcctagttttgatcagttgttcttgtcaaatgggt

SEQ ID NO: 495655 - DNA, 201 bp, Homo sapiens; identical to SEQ ID NO: 256422

SEQ ID NO: 495656 - DNA, 201 bp, Homo sapiens
ctaatataatgtcagctgatatttattgagcttttcctctttgcccagagactaggacccaaagaagttaagtaactattcccaggtttatttctctctcwtatgatgtcccatgtggatgtttgtggtcagtggacagctttccacctagtctttctgcgacccaggctccttcctcttggggctctgcctttctctcag

SEQ ID NO: 495657 - DNA, 201 bp, Homo sapiens
ccccactggctgccggggggaaggcttccatttagtggcattttcctttctcatttcatgctgtaatggagattcattgccagttttaaatccataatttsctgtgaaacccttgttttgggcctgggctgaggtcggaacggagaagcggcgggttatttttagccctcagagggctccctgtgcagctgcagctcccct

SEQ ID NO: 495658 - DNA, 201 bp, Homo sapiens; identical to SEQ ID NO: 366839

SEQ ID NO: 495659 - DNA, 201 bp, Homo sapiens
gggaggctgaggcaagataattgcttgaacctgggaggcagaggttgcagtgagctgagatcacgccactgcactccaggttgggcgacagagggagactscatctcaaagaaaaaaaaaaaagagctatacaaagagtggaccccccaggctgcctggagaggcagtcggtcatgggtccccaaacacctctctccactg

SEQ ID NO: 495660 - DNA, 201 bp, Homo sapiens
caggacctctgaatgggggctttgaagctgtgtccagtccctgtctttcctagtacctatcagaacttctcatgagtgaaagccagtctcctaggcatgakcatcttatctctgatgaaccccccagctttttgctctgacatcatgccaccgtttctcatcatttcatgggatataccttctgctcctgctggggaccct

SEQ ID NO: 495661 - DNA, 201 bp, Homo sapiens
acatgcagggtgcagctcccggagtctgggaccatcaggacctctgaatgggggctttgaagctgtgtccagtccctgtctttcctagtacctatcagaasttctcatgagtgaaagccagtctcctaggcatgagcatcttatctctgatgaaccccccagctttttgctctgacatcatgccaccgtttctcatcattt

SEQ ID NO: 495662 - DNA, 201 bp, Homo sapiens
tgaacttagatctcctcatccctgcctagtggggcacatgcagggtgcagctcccggagtctgggaccatcaggacctctgaatgggggctttgaagctgygtccagtccctgtctttcctagtacctatcagaacttctcatgagtgaaagccagtctcctaggcatgagcatcttatctctgatgaaccccccagcttt

SEQ ID NO: 495663 - DNA, 201 bp, Homo sapiens
gacctgcctggcagagctggtcagagggcagatgaaggcatgcgagtgggttcctcagcacagtgcctgtcatagagtggcagctcaccagcgtcaccctygcccttctctcttctctccactcgagcaactcacaagctgccctttctgtgcatagaaggtgtggctgaacttagatctcctcatccctgcctagtgggg

SEQ ID NO: 495664 - DNA, 201 bp, Homo sapiens
gggtcagggtcttctcattgctcaggacctaggagaattggcaggctcagacgccaagagcaggcggaggggtgcactcttgtctctgggaacaaggcagytgagaggctggcctggggtaactgaggcagtctccggcatctcagtaggaagcaaggtggggaggaaagaggccaaaagtttcctggcccagacaatgcc

SEQ ID NO: 495665 - DNA, 201 bp, Homo sapiens
gtttgctcttcgagccgactccccgattccatgagccctgggatggtggaagggttcaagcagggctcctggagttcccaggggctaggaagaaacctgtwtcatagtgatgattttagggggagtcaggcagcagagagagtggagtttggaaaagaggaggggcataattgagcataaagggccagggtttcagagcca

SEQ ID NO: 495666 - DNA, 201 bp, Homo sapiens
ggaagtgagcttcctgtctttagccacagacaactccagagtggaactcagcagggagttggccgccccgcactccagcatgagtccttctgtcctgtccygaaaggggtaaagagaaacttggtagcaccgcagcttccactacggggtgccgctcacagaaggcggaggtggagggagggaatggcctcttcccccagg

SEQ ID NO: 495667 - DNA, 201 bp, Homo sapiens
aggctcttgtcttcccttgtcctcttatggtctcttctcaacctagcagccagggtgagtcttttaaaatatcactcagatcccatcgatcctctattgaraacccttccatgagtgattttctcttcaaatagaaatttggctctaagatccacagctgacttcgtcacttctatgagtctttgtttacacaaagtcagc

SEQ ID NO: 495668 - DNA, 201 bp, Homo sapiens
gggtctggagagtttccaatgccctggggatggtggtgacacactccagaacttcccagggctgccctgaagagcctgtctcttggtgatgggggtgcagscactggggccaggcaacagcaggaggctgaacccctaccataagcagtagaccatgagtgggctcctaagaacctccccagcttcccttgtcctggtgtt

SEQ ID NO: 495669 - DNA, 201 bp, Homo sapiens
ggaagagagtggcactaaggggcagggatggaactatgccattagctcaagagggagctgcaggctcggctatgggcaggctcggctacagcagacagagwgcccatcaacccctctcagagggcgtcagcgtgggcaccaccaggagaggctggaggctaggtcatggattggctgactccaagatgcccagcacctctt

SEQ ID NO: 495670 - DNA, 201 bp, Homo sapiens; identical to SEQ ID NO: 366867

SEQ ID NO: 495671 - DNA, 201 bp, Homo sapiens
tccagcagctgaagggtatattatccttgctctcaggaggaagggaagaggaactcagggaacaatgcctctcatgccccaaccccaaaccatgagcaaakgagagagaatcacagtcaacccgtgaagtgggtttaacacttcatctctcctgctactggctccaccatggagagggcgggccctgagagattaagcatc

SEQ ID NO: 495672 - DNA, 201 bp, Homo sapiens
cgcttcccggccatggaatcccaacttatttacccccgctggaacaggtttattttctcattcctttcatcgcaggcctggggagactcaaaggttgcagraggtttctgaggctggccccaagtccctcccccgcatctcaagaagtcaagctccgagcttggtaagtggtcctccggggcctgtctgctgcactgcttg

SEQ ID NO: 495673 - DNA, 201 bp, Homo sapiens
gcaggctaagacaggagaatcgcttgaacctgggcagcagaggttgcagtgagccgagattgcgtcattacactccagcctgggcaacagagtgagactcwgtctcgaaagaataaaaaaaagattaaatgagataatacatgtagatttccttcttcttgtccccttgatcaacccttccatgagagtggctggtgcacc

SEQ ID NO: 495674 - DNA, 201 bp, Homo sapiens
caggccagggccagggccagtgagggggaagagccgagggtcggagattaaggaggcctggcctcactttcagggccagccctgcttgcattgtgtgcccygggacctccttcagtcaccctagctctaggcttggccagagctccgcggccctggctgcttgtgaatgaggatgccagaaggctccttggtacaggggta

SEQ ID NO: 495675 - DNA, 201 bp, Homo sapiens
ggagccgtcgtggatgctggactgcatggctttgcggcatctcaccttttccagtggggcttactgctccatgtggctgctcaccacacaggaggaggcgktgctcagacccaggacccaggccagggccagggccagtgagggggaagagccgagggtcggagattaaggaggcctggcctcactttcagggccagccct

SEQ ID NO: 495676 - DNA, 201 bp, Homo sapiens
tgctgacgatgctctcccgcttgccgtcccgaagcagggtcttgggagaaagggaaaggggagagaaagctccatgtcgcttggctggggtggccagcctrggttgggggtaaacgagcaccagcttagacagaagggggagctgtggatggaggggttcagcttaggagacctgggctgcccatgtctacgcagagctcg

SEQ ID NO: 495677 - DNA, 201 bp, Homo sapiens
ctggtcttcccactgtccccttctgagaggtcccaggttcttattcctggttcctctgtcctgtggctgtaggggagagcttcctccctccagattactcycgagacaatggggaggttctcactgaccttcattcattctccgaaacttgtccttggccatgtagcccagcaccagacagcatcctctcttctggaggcc

SEQ ID NO: 495678 - DNA, 201 bp, Homo sapiens; identical to SEQ ID NO: 366879

SEQ ID NO: 495679 - DNA, 201 bp, Homo sapiens; identical to SEQ ID NO: 366880

SEQ ID NO: 495680 - DNA, 201 bp, Homo sapiens
cctgcctgcggcaaatgaattcagttccaggcacagctagggaagtgtgtccagccccgcagttcctttcaccctgctgaggcgagggggccaggtggtgkatgcagcgtgaggccaagcgggcagctggctgggctgggaaggcagggagccctggctgctcacagctgtgggtgccgggctggggctggagggtttggg

SEQ ID NO: 495681 - DNA, 201 bp, Homo sapiens; identical to SEQ ID NO: 366883

SEQ ID NO: 495682 - DNA, 201 bp, Homo sapiens
tggggataccaagcaaagagacaatgtcctcttttggttcgagactctttccagttgttaatgtagtattggatttccttcattttataacccatttttcrtttctttactctcaggtattattcctcattttctccactagtcgtttattttttacctgcacttttccacctttggaagggacattgggttcggccactg

SEQ ID NO: 495683 - DNA, 201 bp, Homo sapiens
gcaaaagatgctggggggtatgggggctggccctgggcatggtcatttgggaagctacccccagatttcagtggcgagtgggcacttggataggcagtgtygagcttctgggcccctccagaaatcgctcatggtggcactggctggggtagggtggggctgtgcattccttgcatcaggtcttctccttcttggagaggc

SEQ ID NO: 495684 - DNA, 201 bp, Homo sapiens
ctaaagtgcagtggtgcgatctcggcttcagcgcaacctccgcctcttggattcaagtgattttcctgctttagcctccaaagtagccgagactacaggcrtgtgccactatgcctggctaatttttgtatttttagtagagacagggtttcaccaagttgaccaggccagtctcgaactcctgacctcaagtgatcttcc

SEQ ID NO: 495685 - DNA, 201 bp, Homo sapiens
cctcctgtcagcccacccggcttccaacctggatgcagcgccctcatcttaatctcttttctgggactcgcagcacacattatcacggaatgaaccatcamcatctggctcccaaagtccccaccaacttccagtgaaacattgaaatgcagaagaccccatgtttctctatgacttgcacacctgtggccccattctgag

SEQ ID NO: 495686 - DNA, 201 bp, Homo sapiens
ttctgggatctttctccctgtggcttacactggaggctgactcccccagtctaatagtgagaggggcctgggcagcagttccttcttgctccactgtcccygccccctgccagaggtgccccgaggtctgagctgcagcctcaccactccggagccccgcttcatccagacgatggtcagggatgggttgccggtccaggc

SEQ ID NO: 495687 - DNA, 201 bp, Homo sapiens
tagggaaagagccttcgcttgtcccgtttgggtgggaaggtgggcatggatattgtggaagcagcagtgtctggagccctgtgggatgatccccagagggragtctccccatgtctgaccaaaaaaataccctcttggagctgagcccttggtgcttcacgcagtgtcccagccccgtgtgcagatggttcttacccagga

SEQ ID NO: 495688 - DNA, 201 bp, Homo sapiens; identical to SEQ ID NO: 366890

SEQ ID NO: 495689 - DNA, 201 bp, Homo sapiens
tgaatcttcccctctcttgggccagcccatgacttcactcagctccagaactggcagatttgctgccatcatctcatctctggagatgaatctatttcctycctatagaaacagcatgcaagaaaactcagcttctgcttgaatactcccagagacaggaagcttactacttaactgaactctgttagttttaattgttga

SEQ ID NO: 495690 - DNA, 201 bp, Homo sapiens; identical to SEQ ID NO: 366898

SEQ ID NO: 495691 - DNA, 201 bp, Homo sapiens
ctggtgtttagggaccaggagcagagacctgggagcagacagaggagagaagctgaacttgtatggagaaacccaggcctggcaggtgcagcgtggaagcytagggccagggagtctcattgggcgcctctcttgtatcttcagtggcttctgaatagatgccagaccacagccaaaccagacttgccccctggacctggc

SEQ ID NO: 495692 - DNA, 201 bp, Homo sapiens
acagcccggcacacgtacttgcccgcgtcctcctggcgcacggatttgagggtcagggtcttctcattgctcaggacctaggagaattggcaggctcagaygccaagagcaggcggaggggtgcactcttgtctctgggaacaaggcagctgagaggctggcctggggtaactgaggcagtctccggcatctcagtaggaa

SEQ ID NO: 495693 - DNA, 201 bp, Homo sapiens; identical to SEQ ID NO: 366912

SEQ ID NO: 495694 - DNA, 201 bp, Homo sapiens
ctatctgaggcgctccttttcaatacctacctgacacctgtggggactttgtacattcctccattgtcactcagggccctagttaattacctaaatgaaakttgagcgactactccctatgtgcaagacactgggcgaaggcccagggagaggagaggaaggaacaggagtctttgccctcctccagctgattctctacat

SEQ ID NO: 495695 - DNA, 201 bp, Homo sapiens
caaaccatctggaaaggccgagagtagcctgattgcctggcagcaaggccgcctcgcttctccccgctactcaccttccccacctgctgggtccctttttktttttttaaaaaaaatcatggctctgcttccccttttgatagctgcttggggctccccatgggctggttgccacctggcttgaataagggtgtgtgggcc

SEQ ID NO: 495696 - DNA, 201 bp, Homo sapiens
tgaagacgtaaaaaaataaagaggcattccatgttcatggatgggaatactcaatattgttaaggtggcaattaattctaaattgatctatagctttcacrcaattcctatcaaaattccagcaaccatttttttgcagatgttgacagactagtcctaaaattcatatgaaaatgcaaaggacctaaaatagctggaacc

SEQ ID NO: 495697 - DNA, 201 bp, Homo sapiens
tttttgtgcttcataagacaccattaagtaaaggaaaaggcaaactacaaactgagagaaaatatttgcaagtcgtatatctggtaaaggacttgtatccwggctataaagaactcctataacatagtaagacaaatgattctatttaaaaataggcaaaatatttgaatagacattttaccaaagaagatacacaaatgg

SEQ ID NO: 495698 - DNA, 201 bp, Homo sapiens
ctggtggcccccaggcctcggcacccccggggcatccacacgccgagggatgggggataacgagccagttcccatcctttttccctgtcatggcccagagstctggctgagttgagtgggcagcccaggacctcatccccatggacaggctgggccctgggctgcatcttctgggtcagtccccaccaacaagcagagcaa

SEQ ID NO: 495699 - DNA, 201 bp, Homo sapiens
ctggcgcacggatttgagggtcagggtcttctcattgctcaggacctaggagaattggcaggctcagacgccaagagcaggcggaggggtgcactcttgtmtctgggaacaaggcagctgagaggctggcctggggtaactgaggcagtctccggcatctcagtaggaagcaaggtggggaggaaagaggccaaaagtttc

SEQ ID NO: 495700 - DNA, 201 bp, Homo sapiens
agagctctggctgagttgagtgggcagcccaggacctcatccccatggacaggctgggccctgggctgcatcttctgggtcagtccccaccaacaagcagrgcaaattgctggaaagtcacgaggacttctaggggtccagcccatttccagaaaaagaagtaaagaaaccagtttctcagaggcaatgaggaaaaatgct

SEQ ID NO: 495701 - DNA, 201 bp, Homo sapiens
caatgaggaaaaatgctggtctctttcggtccccatgggggcaccacaaagggagcaaggccccagctggcccagttggtctgggctctggttgggactayggtggggtcctgagaccctcagagagtcatacagtcatgcactcagcctctaagctgcagaccgagccggccttactctgagttcggatcacataactgc

SEQ ID NO: 495702 - DNA, 201 bp, Homo sapiens
gttctaacttatccaaaatcctatttcgggggtggggggtggtcctaaggttgaaaataataaaatcaaggtgcaaagaagtgaaagcaagtctctcaagsacacttggccttttgggggctcagatctatatcctaaacattaaaaaaagtaaacaaaataatcatttatgctgctatagccttgtcagtcagacacggt

SEQ ID NO: 495703 - DNA, 201 bp, Homo sapiens
cttgccatggaaagtgtgttgttcatggcggatcctctatcaaaaaacaggatggtgtcgagttgcagtgggtgcgctgggatcagtccgggttaaaataygtgggtctcagctcagatctccatccctggcactgtgcaggaatctgggcgtgttagtgctgcatacgttggggaaaatgagacgtgttgcttggaagca

SEQ ID NO: 495704 - DNA, 201 bp, Homo sapiens
cccaaaatgctgggattacaggcgtgagccaccgtgccaggccaagaaaagcttttttttttagctgagttgggaaagaaagaaaaaaatagtcattatascagtgtactccttccttagcaagaattgcatagttatctagcatccttcccacatcctcttccccagatcagccagaaaaacagaggaaaaagtctagtg

SEQ ID NO: 495705 - DNA, 201 bp, Homo sapiens
ttttttttttttttttttttttttttttgagacagagttttgctgttgctccggctgaagtgcaatggcacaatctcggctcactgaacctctgcctcccrggttcaagtgattctcctgcctcagcctcctgagtagctgggattacaggcacctgccaccatgcccagctaatttttttgtatttttagtagagacggg

SEQ ID NO: 495706 - DNA, 201 bp, Homo sapiens
taattttgctagacagggtgaaggcacctcccacccccatcagggccctaggaattctgacataaggtttaaaaacacagtgacagttttttgcttagaarttatctctgtttccagcacttgtagttgcagccctggtcccgggatcactgcatcacacaggggagagagaaaagttttttttttttttttttttttttt

SEQ ID NO: 495707 - DNA, 201 bp, Homo sapiens
gatttcaatgtaaatgcttctgggaagccgacctctagttccccaggtccagatccttgaacctgtctttattattagatgctgttgggttgtcggagtaygattaggtggaatttggccagtagttgcaggaatctcagcctccccaaagccacctgatgtgaggctagcgtgactgactgaggagctgtatttttagtc

SEQ ID NO: 495708 - DNA, 201 bp, Homo sapiens
caaaggccctgtgcagttttgatgctcttcaggtgtcctgtgaagggccacgtggctacatcccactgacggtgtgaaagcaggcccacccggcgtgcacygagtgactcaggcaggctggtctgaagcacgaggtgccttggtcttgctctctgagcctgcatggagaatcacagctcagacctggtgcttatagaggag

SEQ ID NO: 495709 - DNA, 201 bp, Homo sapiens
tcaaggattccaaaggccctgtgcagttttgatgctcttcaggtgtcctgtgaagggccacgtggctacatcccactgacggtgtgaaagcaggcccaccyggcgtgcactgagtgactcaggcaggctggtctgaagcacgaggtgccttggtcttgctctctgagcctgcatggagaatcacagctcagacctggtgct

SEQ ID NO: 495710 - DNA, 201 bp, Homo sapiens
tagagacaatatcaaaaacacaatctataagaaaaaattatcaaactgaacttgattaaaattaaaagtttttgtgcttcataagacaccattaagtaaasgaaaaggcaaactacaaactgagagaaaatatttgcaagtcgtatatctggtaaaggacttgtatcctggctataaagaactcctataacatagtaagac

SEQ ID NO: 495711 - DNA, 201 bp, Homo sapiens
gtggctcaaagccctttccactgagccccaacctgttgactgggctgacatccgactacacttgctcaagcattgcacgccaaacatcccaaacgctcacrttagggagtgggggcagggtgggcgtctatctttctgtgcctttgattttgttgctatgattacgttttcattttccagctgctaaaatcctacccattc

SEQ ID NO: 495712 - DNA, 201 bp, Homo sapiens
tgcccagcacaaaccgctgcccgtagtcgtagaggcggccctggccgctcagggtgctgtagatgttggtgaaggacatgcctgtgggcacacgctgcttrcccgcaggacgcaggtcgggctggcagctggagagggagatggtcggggttgagtggtgctctttgaaggtgttgacgctgtagtagccattggtggggt

SEQ ID NO: 495713 - DNA, 201 bp, Homo sapiens; identical to SEQ ID NO: 366973

SEQ ID NO: 495714 - DNA, 201 bp, Homo sapiens
gggcagcaccagcaccaacaggcagaattcacatggggaggttctttagaatattctcaactgtttgaggtatccaacaaggatctgggatgccagagagkgtagtgaggtccccatcactggctgtattcaagcagaggttggatgatcgcctctcagggatgttgcagaggtgatttctacaccgggtgaaagatcaga

SEQ ID NO: 495715 - DNA, 201 bp, Homo sapiens
cacaacagctgctaaggggtgggcctgggctttcccacttccctcctgcacgcgtgcctggcacagactcacgtgtaagggggcagcgaggtggggcaggkagccctggagccctggccaggagcccatgggccaagctctttgcatctgtgggccttagtatctcatctggggtaacagtccctgtcccaccgagcagcg

SEQ ID NO: 495716 - DNA, 201 bp, Homo sapiens; identical to SEQ ID NO: 366974

SEQ ID NO: 495717 - DNA, 201 bp, Homo sapiens
ggtgctgttgctgatcctatctttgtctaatattttgatattttgcttatcatggattttttcacattcatttggatttttaaaaatattgctttaaaatrttatttgtctagattattgattctttgggtaccctttacattttgtgcctgagaatgatgcctcactctgaacttagttttattctgttcccagagaggg

SEQ ID NO: 495718 - DNA, 201 bp, Homo sapiens
gacagagacgggcagccactaccgagctcatccatcgggacccctgtgggatgacactcaccttaatcaggccacaagggccccgggcctgagggatgcgrgtggcgtgggacggggagaagcgggtgagcagacgctcctgtaggctctaagttggtgtctggagaggagtgagaggttcaaccagggtggctaggctgt

SEQ ID NO: 495719 - DNA, 201 bp, Homo sapiens; identical to SEQ ID NO: 366976

SEQ ID NO: 495720 - DNA, 201 bp, Homo sapiens
ggtgcagccactggggccaggcaacagcaggaggctgaacccctaccataagcagtagaccatgagtgggctcctaagaacctccccagcttcccttgtcytggtgttgggagcaaaagatgctggggggtatgggggctggccctgggcatggtcatttgggaagctacccccagatttcagtggcgagtgggcacttgg

SEQ ID NO: 495721 - DNA, 201 bp, Homo sapiens
tttcagtggcgagtgggcacttggataggcagtgtcgagcttctgggcccctccagaaatcgctcatggtggcactggctggggtagggtggggctgtgcrttccttgcatcaggtcttctccttcttggagaggctcctgcctgcccttctccacactcaggcagggaagggaaaagatgcgctgagtttgcctccatcc

SEQ ID NO: 495722 - DNA, 201 bp, Homo sapiens; identical to SEQ ID NO: 366977

SEQ ID NO: 495723 - DNA, 201 bp, Homo sapiens; identical to SEQ ID NO: 366980

SEQ ID NO: 495724 - DNA, 201 bp, Homo sapiens; identical to SEQ ID NO: 366986

SEQ ID NO: 495725 - DNA, 201 bp, Homo sapiens; identical to SEQ ID NO: 366985

SEQ ID NO: 495726 - DNA, 201 bp, Homo sapiens
tcttggagctgagcccttggtgcttcacgcagtgtcccagccccgtgtgcagatggttcttacccaggactgtgaggcgtgcggggcgggagcggatggcrgcctggatggcctggcactcgtacaccgcatcgtcttgcagctctgccctcaggatcttcaggtggtgctcccctgacaggtggttccctaccaccaggt

SEQ ID NO: 495727 - DNA, 201 bp, Homo sapiens; identical to SEQ ID NO: 366996

SEQ ID NO: 495728 - DNA, 201 bp, Homo sapiens; identical to SEQ ID NO: 366997

SEQ ID NO: 495729 - DNA, 201 bp, Homo sapiens
gccctggtggtcttcaggaagctgggggctccatgggaggtgcctgcttcagacagtcctggaggtgggaacagggcctccccgtggacttggggcctggygtggacacgaaccccgagccaggaagcctcaggcttgggcccaggggtttcccatcctccaacttttgggcggaacaaaataatctaggaaggagaggtg

SEQ ID NO: 495730 - DNA, 201 bp, Homo sapiens; identical to SEQ ID NO: 366998

SEQ ID NO: 495731 - DNA, 201 bp, Homo sapiens; identical to SEQ ID NO: 366999

SEQ ID NO: 495732 - DNA, 201 bp, Homo sapiens
ccagctgctgaccctgttgtcgaaccttcacaacagctgctaaggggtgggcctgggctttcccacttccctcctgcacgcgtgcctggcacagactcacrtgtaagggggcagcgaggtggggcaggtagccctggagccctggccaggagcccatgggccaagctctttgcatctgtgggccttagtatctcatctggg

SEQ ID NO: 495733 - DNA, 201 bp, Homo sapiens; identical to SEQ ID NO: 367000

SEQ ID NO: 495734 - DNA, 201 bp, Homo sapiens
aatgaatttttcttagttttacagaatgttggaaagcataggccctggcagggccatcttggggaactttggaaggaacagtgatctggttcgtctttggrgtccaaaggccttggtactatggtgtgtgtgtctgtgtgtgtgtgtgtgtgtatcggataggaaggtggcccagtatcctggtgcccatagaggctggga

SEQ ID NO: 495735 - DNA, 201 bp, Homo sapiens; identical to SEQ ID NO: 367002

SEQ ID NO: 495736 - DNA, 201 bp, Homo sapiens
agcaggtggctttctgggtagagaggaagctgaagcccacgagctaatttggagacctcaggagggccctgctctggggccaggacccagatgtcctgcaratgttggtggttcagttcctgcagggtcccagagctttggggttttgatctgagtcaggctatggtgggaacaggggcctcccaaagggcagtgggcatg

SEQ ID NO: 495737 - DNA, 201 bp, Homo sapiens
actgcgccgtctgtcccgggggccctttagaccactgggtaaggcagctgcttttccctttgaggagagtggcagaatcagaggagagcctgggtctgccwccccctcgtgccaagttctctgccctacctgagaaggtagaagcttcaggagtgggagcaggaggtcgaggtgctgagcaggcagggccttttgcagcct

SEQ ID NO: 495738 - DNA, 201 bp, Homo sapiens
tgagtgagagtccctgtctgggatgcttgcccccagcctgtgcgtctcccctgcacacccaggctgttgtgacctgcaggggccgagagagcactgcgccrtctgtcccgggggccctttagaccactgggtaaggcagctgcttttccctttgaggagagtggcagaatcagaggagagcctgggtctgcctccccctcg

SEQ ID NO: 495739 - DNA, 201 bp, Homo sapiens
gtctctctcccacattcgcttggttaggtggctgcagaagcaccttcctgctcgccgcctggaaggtaggtcatgttcctgaaagggggaggctctgcggsgcagggtcccagggttctgagacaaagccctttgtctctgagtgagagtccctgtctgggatgcttgcccccagcctgtgcgtctcccctgcacacccag

SEQ ID NO: 495740 - DNA, 201 bp, Homo sapiens
ctgggaaacacagcggtctctctcccacattcgcttggttaggtggctgcagaagcaccttcctgctcgccgcctggaaggtaggtcatgttcctgaaagsgggaggctctgcggcgcagggtcccagggttctgagacaaagccctttgtctctgagtgagagtccctgtctgggatgcttgcccccagcctgtgcgtct

SEQ ID NO: 495741 - DNA, 201 bp, Homo sapiens
aaggggtagggggcgtctcccgggccaatgagggctggcttggctccgcatctgactggcgctgaactagcttccgttagtagaaaaaggctgcgtgtgcrtgaacctgcctgggcatggcagaggagcaggcctgggaaacacagcggtctctctcccacattcgcttggttaggtggctgcagaagcaccttcctgctc

SEQ ID NO: 495742 - DNA, 201 bp, Homo sapiens
ctgcttgctctgagcacagtgcagccaccaaggccttcccgagaatccaagacccagaggacgggcccttcctccttgtggctggagtgttgtgttactgkaatatcggattagaggcagcgaggacgagggaggagggagtggggcgtgttgtgggagtgctcaggcacacgcacagccacgcacatacatccaccctca

SEQ ID NO: 495743 - DNA, 201 bp, Homo sapiens; identical to SEQ ID NO: 367007

SEQ ID NO: 495744 - DNA, 201 bp, Homo sapiens
tgaaacggttgagggtaaagtttagtactggccaccataggaagattaaaagaaaggaggtgtactagttaccattacttataattattacttaaaatggytatttaatataattatattataatatagcttataattatgtatcataaatatttttattgctataaaattagtaattgctaacttttctattttttaact

SEQ ID NO: 495745 - DNA, 201 bp, Homo sapiens; identical to SEQ ID NO: 366836

SEQ ID NO: 495746 - DNA, 201 bp, Homo sapiens
aatgcacttgctttaaaatgagtaaaaggctaaggaggacacgaatgccagcctgcagctccagccttgaaattcagagcccaggacagaagcagccaccygcttgcagtagcgttatgtttggcggcagggaggggatctcagaggagagaagtccacttttgagtcctgactctttaaactgaactaatccagtcttga

SEQ ID NO: 495747 - DNA, 201 bp, Homo sapiens
atgcacttgctttaaaatgagtaaaaggctaaggaggacacgaatgccagcctgcagctccagccttgaaattcagagcccaggacagaagcagccacctrcttgcagtagcgttatgtttggcggcagggaggggatctcagaggagagaagtccacttttgagtcctgactctttaaactgaactaatccagtcttgag

SEQ ID NO: 495748 - DNA, 201 bp, Homo sapiens
acactctgctctactttttttgaatagcattgatcaccttctaatacactataaagttttcttgttatgtttttcgtctaactccctccgctacaatatgkttcgcggaggtaggagtttcaagtctgttttcatcgctaatgtatattctcagggtctagaacagtacctggcatgtggaaggcacatatacagatgctg

SEQ ID NO: 495749 - DNA, 201 bp, Homo sapiens; identical to SEQ ID NO: 366842

SEQ ID NO: 495750 - DNA, 201 bp, Homo sapiens; identical to SEQ ID NO: 366843

SEQ ID NO: 495751 - DNA, 201 bp, Homo sapiens
gtttgttccacctaattagagaaaaagggagatgtgttcattaaacaaaaggagggtgaggggaaggcacgtgccccagcaccaacaccctctctgtcccygtggaaggtcccagcacctcctgggcccctagctcgcgggggaccccaggccccgtgcagcgggtatcccagggaggaaggctgggtctgccagctctgc

SEQ ID NO: 495752 - DNA, 201 bp, Homo sapiens
atctggccccgcttggcccacctgcaacaaaggccaggggctgatgtgggccttgagtggcaaggccaaccctccgggagctggacacatccatcccatgraaaaatgaggcctgggttgtgtggcaagtggggagtcctctggggtccgtcaaggggaatcttcacagaggggctacttcaagggctcagaaagagttgg

SEQ ID NO: 495753 - DNA, 201 bp, Homo sapiens
gttcttagagacaatatcaaaaacacaatctataagaaaaaattatcaaactgaacttgattaaaattaaaagtttttgtgcttcataagacaccattaartaaaggaaaaggcaaactacaaactgagagaaaatatttgcaagtcgtatatctggtaaaggacttgtatcctggctataaagaactcctataacatagt

SEQ ID NO: 495754 - DNA, 201 bp, Homo sapiens
gggaggctgaggtaagataattgcttgaacccaggaggcagaggttgcagtgagctgagatcgcaccactgcactatagcctgggcaacagagtgagactytaactcaaaaaaaaaaaaaaagaaaaagaaaagaaaaacagtatatattttcactgcattcttatttttttcagtgctgataccagatcagcatactcat

SEQ ID NO: 495755 - DNA, 201 bp, Homo sapiens
gccacactcacacctctgtaccttccccacctaatgtttagtcaaaccttggcaggcacagaggagctgaggtccagggtcctttctctatgagctgagarcaggttagtgttgtgttttgagatccttttatgaataatggttgagaagtgctgctctttagtactaagaatagtggttattcctagtgcatttgactcg

SEQ ID NO: 495756 - DNA, 201 bp, Homo sapiens
aaggccaggctttggcgttcagctggcttactctaacatctgtgtgcctttaggtgatgatctaatctgtctgagcctctgtttcttcctcctcagaatgyggataacactacccactttgtgacgtggtgaggattagatggtgcaagtgtgcaaaagtaccctccttggccctcgtctttgtgtgtcagctccatctct

SEQ ID NO: 495757 - DNA, 201 bp, Homo sapiens
gtgtgtaaagtaatgactgtggtgtttggcacacaggatatatgataaataaggggctgtggcagtgattggcacatagtagatgttcaataaatgttgartgtatccatgaataataacacttcccacttgtgtgcattacaaaaccctcctccaaacagctgagcttggatttagacctcacaattgttcagggttgat

SEQ ID NO: 495758 - DNA, 201 bp, Homo sapiens
tttggcttcatacagtcctgggctctgctatttcctagctgtgtggctttgggcaagttatttgtctttcctaagtttcattttctttatgtggaaaatgkgagtgataatagatacctctcaagattctggtgatgattaaatgaagtgatgtgtgtaaagtaatgactgtggtgtttggcacacaggatatatgataaa

SEQ ID NO: 495759 - DNA, 201 bp, Homo sapiens
agctctgtcaccaatacttcagggcaaaagtcgttggcaccacttttaatcctaatcctgtgtggccttattcagaagccctttgcaaaggccgatccctrgccatagctctctctgctcggccttgggctgggtgaataatgacttccatttcctgccctgctggagccttgggtctttgccactgccaccgtggtgctg

SEQ ID NO: 495760 - DNA, 201 bp, Homo sapiens
agtggaggatattcctgccagtcatcgcatccctgctcaggacctgccaggaggggacagggccagcagcctcagcctgcactcccagacccagaagcagrgctctgtggcccaggcgatgtctgtggctgctttttaacttcttttttcttttttcgagatgaagtctctgtcacccaggctggagtgcagtagcatgat

SEQ ID NO: 495761 - DNA, 201 bp, Homo sapiens
cctacctgcccccagctgagctccaaaaacagctataaagctgatgggaagccgataggacagcccctgcccttcctgaagaccacggaaacctctcccayggtgcccttggggctgagatcagctctgtcaccaatacttcagggcaaaagtcgttggcaccacttttaatcctaatcctgtgtggccttattcagaagc

SEQ ID NO: 495762 - DNA, 201 bp, Homo sapiens
ggtggtgctcccctgacaggtggttccctaccaccaggtactgtgggtaacctgtggagacaacaggcaggtcagggagctggggtggggtggaggggacrcccatgacaaagaggcacagaatggaggacccaagcaggggccattctacaaggctggcagagcgggtgattgctcagggctctgatctcagtgcaagga

SEQ ID NO: 495763 - DNA, 201 bp, Homo sapiens
tatagaggagtcttctcatggttcctggagttgttcccaactggacacagaccatcttggggcaacgtcctgggtttctcccctcttggagaccaaatacratcaactcttaattatctttgttagtggagaagagcagggtgtgtataatctagaatgatggacaatccaaaacagtgaataatcctaagtaacattcat

SEQ ID NO: 495764 - DNA, 201 bp, Homo sapiens
tcaaggacacttggccttttgggggctcagatctatatcctaaacattaaaaaaagtaaacaaaataatcatttatgctgctatagccttgtcagtcagasacggttctaaaacttccatgtgcatgaggatcacctgggggactggctaaaaataacagtttcctgggctccaactcagagattctgggatagtggctct

SEQ ID NO: 495765 - DNA, 201 bp, Homo sapiens
gacacatccatcccatgaaaaaatgaggcctgggttgtgtggcaagtggggagtcctctggggtccgtcaaggggaatcttcacagaggggctacttcaasggctcagaaagagttggttttgctcccacccaggtggttgtgaaggcagtgggctttggtttgtggtcaccaggcagtcagtggcactcaacaagtgggt

SEQ ID NO: 495766 - DNA, 201 bp, Homo sapiens
aacggatgggctctgggcggtgggtgccagtggcaggggagggaggggacccagctctaattaggccctctgactgctccccctcctccctgcacccagcrtgctcctccgcctcggaatgatgattaatgacatatttactgggtccaggcgtgtgcttttctgggaaataaaaattctggttcaagttgtttgttccac

SEQ ID NO: 495767 - DNA, 201 bp, Homo sapiens
ggttataatgagagccccttaaatgaagcagtgcccgagccctctgagatgtccattattaggaagcacccacagtgggtaaccgtcccggtctctccccrtcctgtgtcctcttggaggaaggcgcgggaggtactgggtgagggcccccggggaagtggggtgcaagaagcatccgagggccaagggtaagttgtggac

SEQ ID NO: 495768 - DNA, 201 bp, Homo sapiens; identical to SEQ ID NO: 366852

SEQ ID NO: 495769 - DNA, 201 bp, Homo sapiens
ctggaaaggccgagagtagcctgattgcctggcagcaaggccgcctcgcttctccccgctactcaccttccccacctgctgggtccctttttttttttttwaaaaaaatcatggctctgcttccccttttgatagctgcttggggctccccatgggctggttgccacctggcttgaataagggtgtgtgggccaggtggag

SEQ ID NO: 495770 - DNA, 201 bp, Homo sapiens
agagaattatcaggttgtcaggtggacgtggagggggttataatgagagccccttaaatgaagcagtgcccgagccctctgagatgtccattattaggaakcacccacagtgggtaaccgtcccggtctctccccgtcctgtgtcctcttggaggaaggcgcgggaggtactgggtgagggcccccggggaagtggggtgc

SEQ ID NO: 495771 - DNA, 201 bp, Homo sapiens; identical to SEQ ID NO: 366854

SEQ ID NO: 495772 - DNA, 201 bp, Homo sapiens
gcctgttaaggagaagcatggccagcctgtgctgggggagggactgggtgcttcctctcctgcccttcctcctggggaaggggcctggtgccctccagggytgaggctcatccctcccctactggtcccatggtggagtcacagagagaatggtcggtgagcaacccagaaactttgagaacaggcctggtgttttatgaa

SEQ ID NO: 495773 - DNA, 201 bp, Homo sapiens
ttgtgctatcagagagaattatcaggttgtcaggtggacgtggagggggttataatgagagccccttaaatgaagcagtgcccgagccctctgagatgtcyattattaggaagcacccacagtgggtaaccgtcccggtctctccccgtcctgtgtcctcttggaggaaggcgcgggaggtactgggtgagggcccccggg

SEQ ID NO: 495774 - DNA, 201 bp, Homo sapiens; identical to SEQ ID NO: 366855

SEQ ID NO: 495775 - DNA, 201 bp, Homo sapiens
cctcgcaggattggttattatcctcaaccactatagagtttgggcttctaatttttaatcacaaggaaggtggaggcgttagccttttcgtgattaatccrgagataaaaatagttgactgttttggtgttgtgcttgttgtcagtcaggaaaaaaatggcattaactgttggggcactgaagcctggggaggactgagcg

SEQ ID NO: 495776 - DNA, 201 bp, Homo sapiens; identical to SEQ ID NO: 366857

SEQ ID NO: 495777 - DNA, 201 bp, Homo sapiens
gtatgtgtgtatgcgtgtgtatgtgtgtatgtatgtgtatatgtatatatgtatgtgtatgtatgtgcatgtagatgtacatgtgtgtatacatgtgtatrggtgtgtgtatacatgtgtatgtaagtgtgtgtgtgtatatgtgtgtgtatatgtgtgtttgtgtgtgtgcatgcatgtgtgtgtgcattgggtacagtt

SEQ ID NO: 495778 - DNA, 201 bp, Homo sapiens
aaccccgtctgtactaaaaatacaaaaatttttagtatttattatttagcctccctacttgggaggctgaggcaggagaattgcttgaacctgggaggtgraggttgcagtgagccgagattgcgccactgcactccagcctgggcgacagagcgagactccagctcaaaaaaaaaaaacaaaaaaaaaacaaaaaaccca

SEQ ID NO: 495779 - DNA, 201 bp, Homo sapiens; identical to SEQ ID NO: 366859

SEQ ID NO: 495780 - DNA, 201 bp, Homo sapiens
tgaggcaggagaattgcttgaacctgggaggtggaggttgcagtgagccgagattgcgccactgcactccagcctgggcgacagagcgagactccagctcaaaaaaaaaaaacaaaaaaaaaacaaaaaacccaacatgcacagacacacaaaacacacacacacacacacacacacacacacacacaaaaaaccttttcc

SEQ ID NO: 495781 - DNA, 201 bp, Homo sapiens
ctcttacactggtcctcaccacatctctattgcattgacttgtggacctgtttcaggttccctacagttgcagggtaggagtcctggcgcctctttgcctrtctcccattgcctagtatgttaccttggatgcagtcataaaaaaacagcaccaataatatgaataatagctaacattgatatagggcttaccacacagca

SEQ ID NO: 495782 - DNA, 201 bp, Homo sapiens; identical to SEQ ID NO: 366865

SEQ ID NO: 495783 - DNA, 201 bp, Homo sapiens
gtgagtgaggctcttgtctcgggcacaaactttaagggtgtactcaaaaccccagtaatggaaataaataatatcttaatgcaaattaaacaaatcagaaygaatgtaaaaatatccacgatgaggaaaatatcacaattttaagtaaagacaggattagggagctgcagttaattaagaattgtttaagatggtcacttg

SEQ ID NO: 495784 - DNA, 201 bp, Homo sapiens
tatctaagagggacaaggttactccagtctgggagtgttgggagtagctgccttgggtgaaacatctaactcttgttgaggtttgcacaggttttgaaccmtatcgggatggcaagagatcatctaacctaatcttctccctttagactgggattggaaatataaacagagaagccagaagaaccaggcaggggtagaaga

SEQ ID NO: 495785 - DNA, 201 bp, Homo sapiens
aaatatggaaagttatagatgttgttgtgactatctaagagggacaaggttactccagtctgggagtgttgggagtagctgccttgggtgaaacatctaamtcttgttgaggtttgcacaggttttgaaccctatcgggatggcaagagatcatctaacctaatcttctccctttagactgggattggaaatataaacaga

SEQ ID NO: 495786 - DNA, 201 bp, Homo sapiens
ggggaacaggattgggggtgatagagtatgttctgacccactgactgactgataaaaatggatttttatggaggttctagggggtttcagtcactgtttcmgctctcaggatgccatggtgcctcaggcatgagcaggagccacctcagcaatctccaagtccccaggttgggtgtggggtgtgcaggaggggctgatatg

SEQ ID NO: 495787 - DNA, 201 bp, Homo sapiens
aggaggatcagctttgagaaatttccagaatgcccagttggtgacctgctcggggaacaggattgggggtgatagagtatgttctgacccactgactgackgataaaaatggatttttatggaggttctagggggtttcagtcactgtttccgctctcaggatgccatggtgcctcaggcatgagcaggagccacctcagc

SEQ ID NO: 495788 - DNA, 201 bp, Homo sapiens
tggaggaggaatcataatatggggaaagtaatggaggagaaatgtcattctggggtaggaaaaaaaatataagcaaaaacatgagtgatgggtcaccctcygtcacctgcctggagtacctaaccgatgggtcacctgtcggagcctgggtcctggacagtaggaagaacacagggtcagtcagccctaggaaggaactct

SEQ ID NO: 495789 - DNA, 201 bp, Homo sapiens
gactttgggaaacggaggctcagggttaactgaattgcccagggaactgtctagtgggagttggggtgggtggtgcggtgaatccaagtctttctggctcygaagaccatgctctcccctactgagctatgctgtgtgcagatccccaagcctggccttggagggagttgctgatgaagaggtgtgatgtgatctgtgtct

SEQ ID NO: 495790 - DNA, 201 bp, Homo sapiens
agacttggcctgggaaggagacaaacacaatggtcagttatctgccggctacaggggcgagaaggctcccctccagctatggaagcagagcagggctggcrcaggagactgagcctcctgaagcacctggctttcctgctgagggtctggtagagcttcctaactggtctcagccccagctctattccctcctatgggggc

SEQ ID NO: 495791 - DNA, 201 bp, Homo sapiens
gggaacaggagactaggcaaagagcttggagctgaaaaatctggagttgattttgaatgttaattaagctgtgtcacctcctgtgagtgcctttgcctctytgagtttccattctctcatctgtaaaacattcgaaataatctggacttttaatacgttggacttttttacgtaacgtagagttgagaggaaaggaagtgt

SEQ ID NO: 495792 - DNA, 201 bp, Homo sapiens
ctggcccctcaccagccagacagatgagatgctgctggcatctgggaacaggagactaggcaaagagcttggagctgaaaaatctggagttgattttgaakgttaattaagctgtgtcacctcctgtgagtgcctttgcctctttgagtttccattctctcatctgtaaaacattcgaaataatctggacttttaatacgt

SEQ ID NO: 495793 - DNA, 201 bp, Homo sapiens
aaggattggggttctgtggtcatccggggcccaactgcgatgtgaggaagaagaagacaggttcaggtgggtggggagctctgggatcctccttgctgctscctccttttccccctagaccttgactggggggaggcaggcagtggggtacttgtgccacctcagtcgcttccattttaagtcttatgtccgggcggggtc

SEQ ID NO: 495794 - DNA, 201 bp, Homo sapiens
ggagacagtagagaggtatggctgaggagacaccaagctggttttggttttctagcgaaggggagaatagatgaggccatcagcaggtggctttctgggtagagaggaagctgaagcccacgagctaatttggagacctcaggagggccctgctctggggccaggacccagatgtcctgcaaatgttggtggttcagttcc

SEQ ID NO: 495795 - DNA, 201 bp, Homo sapiens
gagacagtagagaggtatggctgaggagacaccaagctggttttggttttctagcgaaggggagaatagatgaggccatcagcaggtggctttctgggtagagaggaagctgaagcccacgagctaatttggagacctcaggagggccctgctctggggccaggacccagatgtcctgcaaatgttggtggttcagttcct

SEQ ID NO: 495796 - DNA, 201 bp, Homo sapiens
gtttgtggtgagacctgggagcgactcctggactcccggttccaggctgcatggccttggatacgttaattagttatttgagcctgtgtcttcatcataarataagagggataataattctgtgaaggttaggagaagttccatgggatggcatttgtgacgtccccagaacagggctcagtgaatgctcattccttttct

SEQ ID NO: 495797 - DNA, 201 bp, Homo sapiens
gggagttggaggttgcagtgagcagagatcttgccactgcattccagcctggtggcagagtgagactgtctcaaaaaaaaaaaaaaaaaaaaaagaaatawaaagaaaaagaaggtacgtccgtgagtcccctcagtggaaggcagcagaatgtgtgaatgggcaatggatttggtcattgcctgggttcagttctcattt

SEQ ID NO: 495798 - DNA, 201 bp, Homo sapiens
atacgttaattagttatttgagcctgtgtcttcatcataaaataagagggataataattctgtgaaggttaggagaagttccatgggatggcatttgtgaygtccccagaacagggctcagtgaatgctcattccttttcttgtctctcctccctcctcgtctcccaaagaatgggtctgccttcttcatctcttgcgagt

SEQ ID NO: 495799 - DNA, 201 bp, Homo sapiens
catatgaatatgcatgtgtgagtgtgcctgtgtgtgcatgtgtgagcatgtgcgtgtgtgcatgtgtgagtgtgcccatgtgcacgtgtgcatgtgtgagygtgggcatgtgtgtccatgtgcatgtgtgcatgtgtgagtgtgcatgtgtgagtgtgggtatgtgtgagtgtgtgcatgtgtgagtgggcatgtatgtgt

SEQ ID NO: 495800 - DNA, 201 bp, Homo sapiens
tgcatctgcgtatgtgtgcatgtgtgtcaatgtgcatgtgtgcatgtgcgtgtgcatgtgtgcatgtgcatgtgtgcatgtgtgtgtccatcggcgtgtgygagcatgtgcatgtgggagcatgtgcacgtgtgtgtgcatgagtgtgtgtgtgtccatgtgcatggtgcgtgtgtggtgcgtgcatgtgcgagtttgtgc

SEQ ID NO: 495801 - DNA, 201 bp, Homo sapiens
catgtgtccatgtgcatgtgtacatgtgtgagcatgtgcatgtgtgcatgcatgtgcatgtgtgtgcgtgtgtgcatatgtgtccatgtgcatgtgtgcatgtgtgtgtgtgcatgtgcatgtgtgtgcatgtgtaaatgtgggcacgtgtgaatgtgtacatgtgtgaatgtggccgtgtgtgtgcatgtgtgtgcatgt

SEQ ID NO: 495802 - DNA, 201 bp, Homo sapiens
atgtgtccatgtgcatgtgtacatgtgtgagcatgtgcatgtgtgcatgcatgtgcatgtgtgtgcgtgtgtgcatatgtgtccatgtgcatgtgtgcatgtgtgtgtgtgcatgtgcatgtgtgtgcatgtgtaaatgtgggcacgtgtgaatgtgtacatgtgtgaatgtggccgtgtgtgtgcatgtgtgtgcatgtg

SEQ ID NO: 495803 - DNA, 201 bp, Homo sapiens
tgcattgcttgtgtgtccgtgtgcatgtgtgcgtgtgtgcatgtgtgcatgtgtgtgcatgtggttgtgtgcattagtgagtgtgtgcatgtgtgtgcgtrtgtgagtgtgactatgtgtgagcgtgtgcatgtgtgaacgtgtgcatgtgtgcatgtgtgtgcatgtgtgagcgtgtgcatgtgtgtgtccaagtgcatg

SEQ ID NO: 495804 - DNA, 201 bp, Homo sapiens
tgcttgtgtgtccgtgtgcatgtgtgcgtgtgtgcatgtgtgcatgtgtgtgcatgtggttgtgtgcattagtgagtgtgtgcatgtgtgtgcgtatgtgmgtgtgactatgtgtgagcgtgtgcatgtgtgaacgtgtgcatgtgtgcatgtgtgtgcatgtgtgagcgtgtgcatgtgtgtgtccaagtgcatgcgcat

SEQ ID NO: 495805 - DNA, 201 bp, Homo sapiens
cctgagcctggagattccaagaggattaagccatggtctctgatccccagagagtttgtgggcccccgtggaatacacacagccccttcctaaccttcctagaggccctgcagataagtgagtcaggcatctggctcagtaaaaagtgtcttctccattttatggacaaggaagcagaggctcagagagggtaaatgactt

SEQ ID NO: 495806 - DNA, 201 bp, Homo sapiens
ctgagcctggagattccaagaggattaagccatggtctctgatccccagagagtttgtgggcccccgtggaatacacacagccccttcctaaccttcctagaggccctgcagataagtgagtcaggcatctggctcagtaaaaagtgtcttctccattttatggacaaggaagcagaggctcagagagggtaaatgacttg

SEQ ID NO: 495807 - DNA, 201 bp, Homo sapiens
agaggcatgagaatcacctgaacctgggagacggaagttgcagtgagccgagattgtgccactgcaccccagcctggacaacagagcaagactccgtttcaaaaaaaaaaaaaaaaaagctgtgcgttgctcaggcagcatgggatatttctgctggaatcgtcattgcattgaatgggattaaaggctttacctaggagt

SEQ ID NO: 495808 - DNA, 201 bp, Homo sapiens
gtgagatggaggcttctgggtgcctatgaacctcccccttggaaaaacctccttcacacggacagaacaatttagaggctcagagtgatggagaaagacgyggcaggtggccgcccagaggatgatactgaatgggatggcaaatgaatgctgcgggtctcggggctccccaggtccatctgaggaggaggggctgccagg

SEQ ID NO: 495809 - DNA, 201 bp, Homo sapiens
ggctggctgtggggtggggtgcggaagaaatggtagggaagagagaggaagagaagtaggagacacaaagggagaagggaagattgcataaagaaaatgcycctgaatcagcatcctgtgtttcaggcattcactatgcttccccatgtgattgtacaaatggcttcatggaaaccaaactggtcttcccactgtcccctt

SEQ ID NO: 495810 - DNA, 201 bp, Homo sapiens
ttcttcacagacaaaatgctcctgtatgcagaaaatcttaaatttacaaataactattaggtttaaaaaatgtgtttatcagccaggcacagtggctcacrcttgtaattccagcactctgggaggctgaggccggtggatcacttgaggccaggagttcgagaccagcctggccaacatggtgaaaccccatttctacta

SEQ ID NO: 495811 - DNA, 201 bp, Homo sapiens
ataaagacattgccatattcttctttggtattctcctaagtgcctgtatagtgctgtttattcaacaggcattcaagaaacatgagtgatggaggaggcargtagagaggtctggattagaaatgaaaataggagcagatttaattgggctggctgtggggtggggtgcggaagaaatggtagggaagagagaggaagaga

SEQ ID NO: 495812 - DNA, 201 bp, Homo sapiens; identical to SEQ ID NO: 366889

SEQ ID NO: 495813 - DNA, 201 bp, Homo sapiens
tgcccacagcccctcctccactcctcctggcaagaggaaacaggacagctcctcctgcccaggcacagtcagaagaagctgtcccttctgggcaggcacayctcagagggaaagcaattcaattaagccctggttcacagcgagtgctaaaaacctccctctggagaaccattttctgctatagatttttaagaccagcag

SEQ ID NO: 495814 - DNA, 201 bp, Homo sapiens
tgctatggggatagagatggtagaaagaagcttcctccttcttgctggaatgggaatgaggagacatgggccctgggccctggaaggggaggggtccagcycatggcaagcatggctggtgggagccaaggcttcatttgtctgactttaatgaataaatggcatccccagccattgtttatctacttttgaatcctgaca

SEQ ID NO: 495815 - DNA, 201 bp, Homo sapiens
gcagccattacataattgtttgcaagcaggcaaacaggcataaactgaccaggtctttgtaagagaagccagaaatcagaatttttttttaatataaaacyccccagaatcttaaacatggataatgaatgtaaaaaactctacagatactccggaagctaaccggatccatccatgtgcctgccctggcctccccttaat

SEQ ID NO: 495816 - DNA, 201 bp, Homo sapiens
gcagacatgttggagtttgggcgtatgagctttagagagagagaaatgtataatgtggtacttagggcagcaaggctggctggagtggaagaagaggagcytcctccctccagagccctccctctccttcacctctgccttccagctctccagagccaaagctgacccacctgtgtctctcctctgccccactgcctcacc

SEQ ID NO: 495817 - DNA, 201 bp, Homo sapiens
ggtgccaaggtaagcacggacgagtggggactggtgggccacatcccgcccaagggagcagccattacataattgtttgcaagcaggcaaacaggcataarctgaccaggtctttgtaagagaagccagaaatcagaatttttttttaatataaaaccccccagaatcttaaacatggataatgaatgtaaaaaactctac

SEQ ID NO: 495818 - DNA, 201 bp, Homo sapiens
ggtctctacaaaaacaaaacagaacaaaacaaaaaaacaaacaaacaaaaattagctgggtgaggtggtgcatgcctgtggtctcagctactcgggaggckgaggtgggaggatcgcttgagccagggaggtcgaggctgcagtgagccataatagtgccactgcacttcagtctggatgacagagcaagaccctgactca

SEQ ID NO: 495819 - DNA, 201 bp, Homo sapiens
gtatgtcatggctgctattccattttaattattaatatgtggaaattataattattttgagtattggtatgagataattataaatataaaacagctccgcrtgctttctgatgcctttcttatctgcagacatgttggagtttgggcgtatgagctttagagagagagaaatgtataatgtggtacttagggcagcaaggc

SEQ ID NO: 495820 - DNA, 201 bp, Homo sapiens
tggctctgcctctcccagcctcctcctctgggtttcatttccttgctgtgagccttgtgcgaggcaggatatctccagtgcaaggacactactggtggacwgctggtccgtcccacacttttctctgcacgtctgaggagtccaggaggactggctgaggctgcaggcaggaagctcagttgggtgaacccaggcaaaccc

SEQ ID NO: 495821 - DNA, 201 bp, Homo sapiens
gacaggcaccttattagatactgttaaacagaacaaatatgctttaatacagcacaagtaggtcttttatatttattctaaatgggaaatacaatgatcaycaacttatctttaagggaagaagaagctaattgttctaatatctcactaatcctagcaactgggagaaaaataattgtttttccctattttaccaattgt

SEQ ID NO: 495822 - DNA, 201 bp, Homo sapiens
cttcttgaatggctgctgctggtctgttgcatttgtccacctgtttgcatctgcatgcggatcccaaatgtcagcctttccccttctgacgccctccaccygctgccgagacatctccgtgtagctttcctggctctgcctctcccagcctcctcctctgggtttcatttccttgctgtgagccttgtgcgaggcaggata

SEQ ID NO: 495823 - DNA, 201 bp, Homo sapiens
gattctaatctccaaaatccagctccttttcttcctgggagctccacagcacccccgtgctggctagtcactaaggtcacctgcctcgagttctcctcgaygtttcattgtcctgggatgcactgcatccccccacccaaggctcccccacccaaggccccccctaagcaaccccacctatcattgaaggcccagttctct

SEQ ID NO: 495824 - DNA, 201 bp, Homo sapiens
aggggaggagacagaaagtcagggagagaaagaggcagggagacaagaaccagagacacacagagacacacagaagggaccggaggccgacagcgagacaygtacatagaggagagacatggagaccatagaggaagagagattatgtgtgtgtgtgtgtgtgtgtgtgtatgtgtatgtgtgtgtatgcatgtgtatatg

SEQ ID NO: 495825 - DNA, 201 bp, Homo sapiens
ggccgtagaacagcctcggtgctgcggctaactgacagggggcaggaattggcactgcttgttgcacagcaatttccctgcagggattgacgtggagcgtsacaaagacagtgaggtaggcagtgaggtaggcagagtagcaacctgcctctatctcatggcctctcagggcaggcagcagccctcctggactcaggagga

SEQ ID NO: 495826 - DNA, 201 bp, Homo sapiens
cacaggctgagctccatagggctgggcgacgggaagcgtgacctggaatggcaggtggctgtctattggtgtgaaagggggaggcaagggtggacttttawttactatccaatgacttattgaagagacagttttcactaaagacaaggatgtactctctttgcaggaggacctcagtgtagcatccatgggttctcaggt

SEQ ID NO: 495827 - DNA, 201 bp, Homo sapiens
gccgcagaacttcctggccgtgggctgagtgacccaaaaggccgtagaacagcctcggtgctgcggctaactgacagggggcaggaattggcactgcttgytgcacagcaatttccctgcagggattgacgtggagcgtgacaaagacagtgaggtaggcagtgaggtaggcagagtagcaacctgcctctatctcatggc

SEQ ID NO: 495828 - DNA, 201 bp, Homo sapiens
cttcttctctcaaagccaccctctgtcctgaacaccaggccacaggctgagctccatagggctgggcgacgggaagcgtgacctggaatggcaggtggctstctattggtgtgaaagggggaggcaagggtggacttttatttactatccaatgacttattgaagagacagttttcactaaagacaaggatgtactctctt

SEQ ID NO: 495829 - DNA, 201 bp, Homo sapiens
tgcatctgggccacttgactccggggctggctcacaacaaatgctcaggggaaaccgaccttcttctctcaaagccaccctctgtcctgaacaccaggccrcaggctgagctccatagggctgggcgacgggaagcgtgacctggaatggcaggtggctgtctattggtgtgaaagggggaggcaagggtggacttttatt

SEQ ID NO: 495830 - DNA, 201 bp, Homo sapiens
aaccccgtgacctctcctcgaagctgcaccctagcttccagggcaaggctgaatcaggagttccagccctctttccatgcagggctggctggctgatctgsgcgtccgtgggaccctacctagagaacatggacactcagggaggagcctgcatctcgccgtgggttggagaagtggaggtggggcagaggagcttgggaa

SEQ ID NO: 495831 - DNA, 201 bp, Homo sapiens
cttgtgtgtccgtgtgcatgtgtgcgtgtgtgcatgtgtgcatgtgtgtgcatgtggttgtgtgcattagtgagtgtgtgcatgtgtgtgcgtatgtgagwgtgactatgtgtgagcgtgtgcatgtgtgaacgtgtgcatgtgtgcatgtgtgtgcatgtgtgagcgtgtgcatgtgtgtgtccaagtgcatgcgcatgt

SEQ ID NO: 495832 - DNA, 201 bp, Homo sapiens
gtgtccgtgtgcatgtgtgcgtgtgtgcatgtgtgcatgtgtgtgcatgtggttgtgtgcattagtgagtgtgtgcatgtgtgtgcgtatgtgagtgtgastatgtgtgagcgtgtgcatgtgtgaacgtgtgcatgtgtgcatgtgtgtgcatgtgtgagcgtgtgcatgtgtgtgtccaagtgcatgcgcatgtgtggg

SEQ ID NO: 495833 - DNA, 201 bp, Homo sapiens
catgtgtgtgtgcgcatgtgtgtgcatgtgtgagtgtgtccatttgtgagtgggtgcatgtgtgagagtgtgcatgtgtgcatgtgtgtgatcatgtgcakgtgtgtgtgcgtgtgtgtacatgtgtgagcatgtgcatgtgtgcatgtgtgtccatgtgcatgtgtgcatgtatgggcgtgtgcatgtgtgagtgtgtgc

SEQ ID NO: 495834 - DNA, 201 bp, Homo sapiens
ctcttgcgatggaatccatttaataagatttacaggtggcaaggaggtggggtgagctggtgtgcggctcagataatcggccaagctgatttctccctcaytgggtgtcaccagtataaaaacatgaactaaaagctttgcagcgcttaagtaataataatgtcagcatttcacctgcctccccttgattatttttcctcc

SEQ ID NO: 495835 - DNA, 201 bp, Homo sapiens
taaacttgtaaaacttatgggagaaaatacagtagtaaatctttgtgacctttgattaggcagagttcttagagacaatatcaaaaacacaatctataagaaaaaattatcaaactgaacttgattaaaattaaaagtttttgtgcttcataagacaccattaagtaaaggaaaaggcaaactacaaactgagagaaaata

SEQ ID NO: 495836 - DNA, 201 bp, Homo sapiens
cacgcagctggccaaggatccaggccaagagctaaagagtgagtctcgccccaccctcttcgtgcctctcctgattttggtgcagtttcttccctgtcctycctctttgtctcctcccctctccccacccacctcccccaactcactgttgcttccccacctcccccagcccctctgaaagtggagtcagcttaagcctct

SEQ ID NO: 495837 - DNA, 201 bp, Homo sapiens
cagagcgggtgattgctcagggctctgatctcagtgcaaggagcacaaatgcaagagctttcccaaggcattgaaggtgttggttctctctctctctctctgtatgtgtgtgtgtgtgtgtgtgtgtgtgtgtgtgtgtgtgtataagggcatttggtctgtttgttagtttttgagacagggtcttgctctgtcactcag

SEQ ID NO: 495838 - DNA, 201 bp, Homo sapiens
agagcgggtgattgctcagggctctgatctcagtgcaaggagcacaaatgcaagagctttcccaaggcattgaaggtgttggttctctctctctctctctgtatgtgtgtgtgtgtgtgtgtgtgtgtgtgtgtgtgtgtgtataagggcatttggtctgtttgttagtttttgagacagggtcttgctctgtcactcaga

SEQ ID NO: 495839 - DNA, 201 bp, Homo sapiens
ggtgattgctcagggctctgatctcagtgcaaggagcacaaatgcaagagctttcccaaggcattgaaggtgttggttctctctctctctctctgtatgtrtgtgtgtgtgtgtgtgtgtgtgtgtgtgtgtgtgtataagggcatttggtctgtttgttagtttttgagacagggtcttgctctgtcactcagattggag

SEQ ID NO: 495840 - DNA, 201 bp, Homo sapiens
ttttttttttcaaatgaatcttaaactgttactgagtatctagagtggataaaagttgaggtgctttggatgaaggtggagatggagggatggaacccacttttttttttcatccatctgacagaccttagggcctctcctttgggctcaagagcccctcagagcacagcttttgagccatggatgtaagttattgccaga

SEQ ID NO: 495841 - DNA, 201 bp, Homo sapiens
tccatcttctccgcttcgcattttccctgatgatgttcccctggtgtgaagccttggcggccggtgcaatctccccttcccatactttatttttatttttmttttttttttgagacggagtctgactttgttgcccaggctggagtgcagtggtgcgatctccgctcattgcaacctttgcctcccgggttcaagcgattc

SEQ ID NO: 495842 - DNA, 201 bp, Homo sapiens
atctccccttcccatactttatttttatttttattttttttttgagacggagtctgactttgttgcccaggctggagtgcagtggtgcgatctccgctcaytgcaacctttgcctcccgggttcaagcgattcttctgcctcagcctcttgagtagctgggattacaggcactcaccaccatgtctggtaatttttgtatt

SEQ ID NO: 495843 - DNA, 201 bp, Homo sapiens
gggagcaggcagatggcatcctcagatcagtggtggggctggatgtcttccccagttgtttccccaccctcctccatcgggactcctcctgactgctcttcccaaaagccccctctagatttccctcctgcgcttactcctgcctcctgtcagcccacccggcttccaacctggatgcagcgccctcatcttaatctcttt

SEQ ID NO: 495844 - DNA, 201 bp, Homo sapiens
gcttgggactgttaaaacaggagccagaggagcacctgtcttgcggagtcccagagctgagaacggaggctttgcaaatctgaagttgcacccattagaawgctgcatgggtggtgcaggagacagtgggtgagccctcccattggctctgcctctttcttgagcttgggactgttaaaacaggggccagagcagcacctg

SEQ ID NO: 495845 - DNA, 201 bp, Homo sapiens; identical to SEQ ID NO: 366911

SEQ ID NO: 495846 - DNA, 201 bp, Homo sapiens
gaagcagggtcttgggagaaagggaaaggggagagaaagctccatgtcgcttggctggggtggccagcctgggttgggggtaaacgagcaccagcttagayagaagggggagctgtggatggaggggttcagcttaggagacctgggctgcccatgtctacgcagagctcgggggttaccccctggctccctggcctggct

SEQ ID NO: 495847 - DNA, 201 bp, Homo sapiens
gaatgggagactaagtggggaaatgccacgctctgaccatgtgaggagttcaagtataatttacttcattcacagcttcttgaatggctgctgctggtctrttgcatttgtccacctgtttgcatctgcatgcggatcccaaatgtcagcctttccccttctgacgccctccacccgctgccgagacatctccgtgtagct

SEQ ID NO: 495848 - DNA, 201 bp, Homo sapiens
tttagttgaaaaacaggatgtggctggacacagtggctcatgcctgtaatcccagcacttcgggaggccgaggcgagtggatcacttgagatcaggaattygagaccagcctgaccaacatggtgaaaccccgtctctacaaaaagtacaaaaattagctgggcgtggtggcgggcacctgtaatcccagctacttgggag

SEQ ID NO: 495849 - DNA, 201 bp, Homo sapiens
tctttttcatcgttagtaagcatctgcaaactcccggttgccctacttactttctgttaacaggacctaactacccaacacttccctgccttcagattcaygccccataccctgcatggttctgttcctgggaccctcggatcaggcgatgagctctcttaaacacctaggacggctccacactgcccacagccaaattca

SEQ ID NO: 495850 - DNA, 201 bp, Homo sapiens
aaggcagatagtgcagtggtaatgaatggggctcaggaatcagactgacctgggtttgaatcctggcacttccatgaacttgctgagcctccattttcctmtctgtgaaatggggacaataataccaccaccttgtggagatagagaggatgcatctgggccacttgactccggggctggctcacaacaaatgctcagggg

SEQ ID NO: 495851 - DNA, 201 bp, Homo sapiens
aaaaagctgtgcgttgctcaggcagcatgggatatttctgctggaatcgtcattgcattgaatgggattaaaggctttacctaggagtcccctggctaacraaaatccatcgggtgactctccgccccactttagtgcctcctgcctcgggacttcccctttctttttcatcgttagtaagcatctgcaaactcccggttg

SEQ ID NO: 495852 - DNA, 201 bp, Homo sapiens
gcagtaggtggggtgaggaaggagagctggtacagaaagaagggaaactacccctggggaaggcctcctcacccagccctgcttccacgacttgcctggaycctactcccaggaaggggctgtagcactggaactggaagaaagcctgagagtgagcaccaaggtagactctaggaatcacccaaaacagggagaccattt

SEQ ID NO: 495853 - DNA, 201 bp, Homo sapiens
ttgaagcagacatcattgcaatgctgaaagtccacggaaaccgacacccaccctgatgggcagcccaagaaggcaccagtgtgagggaggagtaccctccygtgcaggcccccctctgccccaaggggatggctgaaggggaggtcaaaacttcggtgcctctgcttcttccctcctttaaatatcctcttcctcatttcc

SEQ ID NO: 495854 - DNA, 201 bp, Homo sapiens
ggccagcatttaatgcaaaaattagccaggtgtggtggcacatgcctgtaatcccagctactcggaggtagaggcatgagaatcacctgaacctgggagayggaagttgcagtgagccgagattgtgccactgcaccccagcctggacaacagagcaagactccgtttcaaaaaaaaaaaaaaaaaagctgtgcgttgctc

SEQ ID NO: 495855 - DNA, 201 bp, Homo sapiens
ggagcagggtagacacaggccctatgacaggggccctgcttgaggagcagcaggaaggcccatgtgactggagcgcagggtgtttaagggggtaggatgargtcagaggtaggtaggaaccagatcacgtggcaccttgtagaacatgctaacaatgtgagcatttttttttttttttgagacggagtctccctctatcac

SEQ ID NO: 495856 - DNA, 201 bp, Homo sapiens
ggtcatgagtttgagaccagcttgggcaacatggccagcatttaatgcaaaaattagccaggtgtggtggcacatgcctgtaatcccagctactcggaggyagaggcatgagaatcacctgaacctgggagacggaagttgcagtgagccgagattgtgccactgcaccccagcctggacaacagagcaagactccgtttc

SEQ ID NO: 495857 - DNA, 201 bp, Homo sapiens
gtccattattaggaagcacccacagtgggtaaccgtcccggtctctccccgtcctgtgtcctcttggaggaaggcgcgggaggtactgggtgagggccccyggggaagtggggtgcaagaagcatccgagggccaagggtaagttgtggaccggctggagcccccagggagaggagggggctatcaccatggaaaccaggc

SEQ ID NO: 495858 - DNA, 201 bp, Homo sapiens
atgcttttatgtccccattttagacaaccaatatttcaatagcctgttgtatttctctatcaaattcttactctaaggagatctctctgaccattgctggrcattatgggcttacagtgtgtcccttggtctgaagaaatgatggtcagctgtccaaatgcatacaatatcttctgttccatttttttttaaatgacactc

SEQ ID NO: 495859 - DNA, 201 bp, Homo sapiens
ccctgtgggatgatccccagaggggagtctccccatgtctgaccaaaaaaataccctcttggagctgagcccttggtgcttcacgcagtgtcccagccccrtgtgcagatggttcttacccaggactgtgaggcgtgcggggcgggagcggatggcggcctggatggcctggcactcgtacaccgcatcgtcttgcagctc

SEQ ID NO: 495860 - DNA, 201 bp, Homo sapiens
tccatggggacagagctggcctggcgtcccagtatcctgcttcctgggaggagcaccttcccttctgcacctaaggttgagtccccctcccacaggagcamctgcgtgggccctcagtaaatgccagttcttcacaggctcaggacctcgacgcacggaaacttctggatcattaaagaagctgtgtgggccaggtgcagt

SEQ ID NO: 495861 - DNA, 201 bp, Homo sapiens
gacctgctgctaattgtcgctaggcatcacactatcctgtctgtcaggtaaggggtggcagcgagagataattataatcagatctaattagtaattataamagatcccgactagaaattgttttcagttaaatattcccagagaggtgctaatggtctccggggcatgccaagtgtcacagccaggaggggaaggggcccg

SEQ ID NO: 495862 - DNA, 201 bp, Homo sapiens
gggcaggagcttccacgccctccctgagtgcgccaccctccaggaagctttacatgctcagctgcccagaagctcccgaaactcagtccttttgggttttyatggaagcattccttcccctagggtgtgaggcgggactctctcagggaagggtcttaagacccacaatcagaaagtggtgaaaggttagagtcctgcgat

SEQ ID NO: 495863 - DNA, 201 bp, Homo sapiens
gagtcggtgtcctgggggctccatgcaggacagcaaatgggccctgtcatttatttactccctccacggggctgctttttgtatctgggccagtgggtggrgagtgcagggagctgtccttggttggcagcatcaagataatcgcctaagccctttcttctcttgcaagtccgttgctgcctgggaagcagccattcctgg

SEQ ID NO: 495864 - DNA, 201 bp, Homo sapiens
attaaccacaactaactccgatacaaagcacttcacatacattatcttacctaatccaccttcatagcaccccgtggagcaggtcccatcatcagcccccrtgtagagacttgaatatcacagctccaagccagatgtcccccgtgaatataccctcccaattctgccctattctactccactctgcctctcctgtcaccc

SEQ ID NO: 495865 - DNA, 201 bp, Homo sapiens
tcccttacagcaaaagaatatatatgatcatttaacaattagtccagtgcactgtattgcatgaatgtctcccagggtgaggccactcaggtttgcaggcttttttttttttttttgagacagagtctcgctctgtttctcaggctgagtgcaatggtgtgacctcggctcactgcaacctctcctgggttcaagcgattc

SEQ ID NO: 495866 - DNA, 201 bp, Homo sapiens
ctagtcgtttattttttacctgcacttttccacctttggaagggacattgggttcggccactgtgtggtccagatggctgctggcagcactagtccagccrgtgcctcccctcagtccattaccattcatacccgggaaggttacgtaagttccaaacgagtggactattcttaccaccaggccccctagttggatttact

SEQ ID NO: 495867 - DNA, 201 bp, Homo sapiens
gccacatctttggctgtatacgttgtttctggcatgcagattagctgtaattaaccacattttatagatgaaccaaggctcacagaaatgcagggacttgyacaagttcacttgattagctcaggtgtcactcaaaccccaatggtctgggtacagccctattttctcaccactatccgatgtaggttgttgaatcaaggg

SEQ ID NO: 495868 - DNA, 201 bp, Homo sapiens
gggggtgcctgggttccccctcctctttctgggatctttctccctgtggcttacactggaggctgactcccccagtctaatagtgagaggggcctgggcarcagttccttcttgctccactgtccctgccccctgccagaggtgccccgaggtctgagctgcagcctcaccactccggagccccgcttcatccagacgatg

SEQ ID NO: 495869 - DNA, 201 bp, Homo sapiens
gttacacgcctgtcacatgtgcctttgtacttagagtttgcctgctctggttggtctgctgagatcggtggtcactacaggaaaattgcttttgcattatraactactaacccggcagatactgttcagagcacaccacacaggagaaaggtgagaaatcacagggtgggctggagtctctaggaatcaggcttgacagga

SEQ ID NO: 495870 - DNA, 201 bp, Homo sapiens
ataggaagaagggaaggagagaagaagtcagctcagtggctcctggtgacatcagaacaatatcgggtagggtgggaaagacaagggcagcgtgactcagwtcatacctcgaaacccaagtcttgaattctgctgtgttcctgctgctcagcacagggccagcatctaacacaggaggatcagctttgagaaatttccaga

SEQ ID NO: 495871 - DNA, 201 bp, Homo sapiens
acagaaataaggaagaaacagtgtacacttcttgagggcaggggccacagctatcttttctgtcttgtgttcccagctgtgggtgagcaccggttacacgyctgtcacatgtgcctttgtacttagagtttgcctgctctggttggtctgctgagatcggtggtcactacaggaaaattgcttttgcattataaactacta

SEQ ID NO: 495872 - DNA, 201 bp, Homo sapiens; identical to SEQ ID NO: 366937

SEQ ID NO: 495873 - DNA, 201 bp, Homo sapiens
ccctgcgattgtgttcctaatcagccagtgtatcaggaaagacctgctgctaattgtcgctaggcatcacactatcctgtctgtcaggtaaggggtggcakcgagagataattataatcagatctaattagtaattataaaagatcccgactagaaattgttttcagttaaatattcccagagaggtgctaatggtctccg

SEQ ID NO: 495874 - DNA, 201 bp, Homo sapiens
aactcttaattatctttgttagtggagaagagcagggtgtgtataatctagaatgatggacaatccaaaacagtgaataatcctaagtaacattcattttygactttggaatgcattttgatattcacatttgaatatggatatgtttgatgttctaggaatttttcatacttaaaaaaaacactcaacccaagggtgggg

SEQ ID NO: 495875 - DNA, 201 bp, Homo sapiens
gcagcgggccctcaggaccctctgtgcaatgctcaaggattccaaaggccctgtgcagttttgatgctcttcaggtgtcctgtgaagggccacgtggctayatcccactgacggtgtgaaagcaggcccacccggcgtgcactgagtgactcaggcaggctggtctgaagcacgaggtgccttggtcttgctctctgagcc

SEQ ID NO: 495876 - DNA, 201 bp, Homo sapiens
caagagactgagggctactcttggcttcttgtatctgccaaaacccaaacagaagcgctcagaaatgttggagggcctgcgtgcgaactcaaggcctgagkctgtaggcagggagtcagggctggggaagctgggctcagccaggggactgagacataggtcacaaatctaggagacttctctctggggcctctggaagct

SEQ ID NO: 495877 - DNA, 201 bp, Homo sapiens
ctcggcagccctgcagcgggccctcaggaccctctgtgcaatgctcaaggattccaaaggccctgtgcagttttgatgctcttcaggtgtcctgtgaaggrccacgtggctacatcccactgacggtgtgaaagcaggcccacccggcgtgcactgagtgactcaggcaggctggtctgaagcacgaggtgccttggtctt

SEQ ID NO: 495878 - DNA, 201 bp, Homo sapiens
agatggtcacttggtcaagagaaatggtcaaaatgccaattctctcagtcgaaaatgagataagcaaagaagtagatgattactattactggtgagttatyttccattacagccaggaaagtaaaatgaaatacattctgtttttgctgtaaataaaatatttaagtgtaacataatgttggggattttaatacacctgct

SEQ ID NO: 495879 - DNA, 201 bp, Homo sapiens
ttgtcctggacagtgtggatctttaacgaagagcaatcgggctggccgaggcagggtgagtccaaagtcactataaatcctttgcctactgatgatcaggmtcgcggcccctgccaaagcctgcactgtactcattagtggcagggagagggattcttccatcgatccagccaaggcctggatgccacgaagacactgata

SEQ ID NO: 495880 - DNA, 201 bp, Homo sapiens
gcgggtgctttattgtgtgatgggtggggacacttgctctcagggggaaagaaagcgccctctcttcctgcagggctggctgagaactaattcaaggccaygtgactctggctaaagcctgcatcctggttctctgctcccatctgggccagactgttggactccagtgttgtctgtcccccgagtcgaggtctggggcag

SEQ ID NO: 495881 - DNA, 201 bp, Homo sapiens
ctcacccgggctgagccagtgtgggcagcctgtgattctcccagcctcgcacttctctcccaggacacaaaatccaccaaggttgtcctggacagtgtggrtctttaacgaagagcaatcgggctggccgaggcagggtgagtccaaagtcactataaatcctttgcctactgatgatcaggatcgcggcccctgccaaag

SEQ ID NO: 495882 - DNA, 201 bp, Homo sapiens
ggggtccagaatcccccaggtgatgctgtcccagatgtagttgggtcaatggttctggagctgggaaggaggtgtgaagaactcacactgactgagcactmcctatgggtcaggcagtaggagaagtattttcaggtgtcctctcacttggtgttgacctgataattcaactccaaatatggaaagttatagatgttgttg

SEQ ID NO: 495883 - DNA, 201 bp, Homo sapiens
cttacactcaccctcccagtcctgcggagcgagagactttctcctttctccagcccagctcctatgctgatggctgcaggatgggtgagagcgcttcttargtgtgtttgcaggaataaccggcacatgcccccttgcagccgctcacaaagctctccagctggtttcgaccttaacctgatttggggtctcttttgctca

SEQ ID NO: 495884 - DNA, 201 bp, Homo sapiens
gatgaaagtgtgaatggatgatggaggagccatttgctgctcaggaggagaagcgggcttgaggtgaggcagtgagttcagttttaaatgtgttgatggasaggggtccagaatcccccaggtgatgctgtcccagatgtagttgggtcaatggttctggagctgggaaggaggtgtgaagaactcacactgactgagcac

SEQ ID NO: 495885 - DNA, 201 bp, Homo sapiens
gccatttgggggtagaactgatagtacttgaccagggatgaggaagatgaaagtgtgaatggatgatggaggagccatttgctgctcaggaggagaagcgsgcttgaggtgaggcagtgagttcagttttaaatgtgttgatggagaggggtccagaatcccccaggtgatgctgtcccagatgtagttgggtcaatggtt

SEQ ID NO: 495886 - DNA, 201 bp, Homo sapiens
cacatgctcagatctgagttttagaaagatcacggtgatgacagggaggaggatgaatgaaggaggataatctgaagacagggagactgatcagcaaggtkttgctgtcatgaggactcaggctaacgctgcatcaatggaaagaagaaatggatttaggagccatttgggggtagaactgatagtacttgaccagggatg

SEQ ID NO: 495887 - DNA, 201 bp, Homo sapiens
ggcagtatcattacaagcctagcaggctgggtgcacggagcatgtgtgtgcagactctcttagtacagcgcaaatctagaaagtcctggtgggtcagaccrtgtgggcccttgaacgtgtgccaagaagtttgtacttcatgagaagtcatcaaaggtttttgacccacatgctcagatctgagttttagaaagatcacgg

SEQ ID NO: 495888 - DNA, 201 bp, Homo sapiens; identical to SEQ ID NO: 79456

SEQ ID NO: 495889 - DNA, 201 bp, Homo sapiens
agatggttcttacccaggactgtgaggcgtgcggggcgggagcggatggcggcctggatggcctggcactcgtacaccgcatcgtcttgcagctctgccckcaggatcttcaggtggtgctcccctgacaggtggttccctaccaccaggtactgtgggtaacctgtggagacaacaggcaggtcagggagctggggtggg

SEQ ID NO: 495890 - DNA, 201 bp, Homo sapiens
cggccccatgctttgttttgagtctgtcaccatcactgagcctagcccagcaggctgtacatctctcagacttcccctttcctctctattcccactgctascacccaagttcaagctctcgttgcctcaacctgggctcttgccacagactctgaatgttctctttgcctgatccattaatgtgctgaacctggattttcc

SEQ ID NO: 495891 - DNA, 201 bp, Homo sapiens
ccccagccgcccaccccacaccctttcattagtgcccatgggcctccttggggtgggcctggccacagggcaaaacggaggcggctcagggctttccaccragtgggggtgggtgcaaccacttgtggaggaggggaattgcatctccacgcggtgagtgggggacttgcagcaggaagagcagggctcagaggtggccag

SEQ ID NO: 495892 - DNA, 201 bp, Homo sapiens
cccccagccgcccaccccacaccctttcattagtgcccatgggcctccttggggtgggcctggccacagggcaaaacggaggcggctcagggctttccacyaagtgggggtgggtgcaaccacttgtggaggaggggaattgcatctccacgcggtgagtgggggacttgcagcaggaagagcagggctcagaggtggcca

SEQ ID NO: 495893 - DNA, 201 bp, Homo sapiens
tcaggcggcactgcggggagagaagcagtgaggtcaggccgaggctcccacctcgggcaggacggcaggcaggctgggaggattttgtggagatggcaacraacaataattatcacacattaataaaacgcatcgtccgcttgtatcgtaatgatgagagcagcacccacagtgatccctgacatgtgcactgcgtgctta

SEQ ID NO: 495894 - DNA, 201 bp, Homo sapiens
tgtgtgtatcggataggaaggtggcccagtatcctggtgcccatagaggctgggatctgactcagaggagccgttgcttactcctccctgccacccacaastgccaaccctaaatcttctagggatgcattctggaactccactgtcccaagtctattgctaccccataggcacatgtctctgcactgtggttccacagtg

SEQ ID NO: 495895 - DNA, 201 bp, Homo sapiens
tctttagaagggagagaagacagagtatctggaccctttggggttaacaggcaggtctcatgtgctgggattggttatatagttgagtcaatttctttctsagttgtgactttgtttacctgtcaaacaaaggggaaaatccttcttttctccctccggatcgctgtagatttatgagataatgtctgcgaagtacctgag

SEQ ID NO: 495896 - DNA, 201 bp, Homo sapiens
ctcataaggttatggtgaaggttaaataggataatctatgtaaagtgcctggcacattgtaagtagtctataaatgccaatttaaatgaagagaaaggtawgtcataaggtcaggtggccaaagaggtctttatctttagaagggagagaagacagagtatctggaccctttggggttaacaggcaggtctcatgtgctgg

SEQ ID NO: 495897 - DNA, 201 bp, Homo sapiens
cctgagatggaatggtcagtaccttgcctcaaagcacctttaaaccactagagcgatgacaaggaggtcacagacccaaagatcccacagctgtacaggtytgatgggcagccctgctgcctttaggcaggagaccccaagggagggagggctagtccagtgggccagggaaagggagccaggtgctgtcagggtcaaagt

SEQ ID NO: 495898 - DNA, 201 bp, Homo sapiens
gtgcctggctgggcttctggctccgtcattcactggccacgtgaccatgtgcaaattctctgtgctggatgatgttaatgtcatagatattatagtagctrttgtacagggctggtgtgctgtttaaatgagttcatgtaagagttatgcagtgtcttgtcccagagcttggcactgtagtaagaacccactaaattttag

SEQ ID NO: 495899 - DNA, 201 bp, Homo sapiens
gcctcagcaggtacatgtggtgcctggcgccattaccacctgttgttcccctgaggctgtgagctccttgagggctggtccttgccaaattctctctctartacttagtacagtgcctggcatagtgagcacttaataaatacttgttgcctggtgccttgcctgatcccactgaattagaagccccctccccacctgagc

SEQ ID NO: 495900 - DNA, 201 bp, Homo sapiens
gagtcttaactggctggaatcccagcctcttttcaatcagctcaaaggcctatcatgccttgttaactcttggttattctttaagactcaggctattgtcrcctcctccacaaagtcttctctcaatctcaacccctgactctcccacctgcagcctctgcactgccataagaccatgtgcccgcctcagcaggtacatgt

SEQ ID NO: 495901 - DNA, 201 bp, Homo sapiens
agtgatcttcccactctcagcatcccaaaaggttgggattacaggcatgagccattgcacccaacccctgtgcagttctctttccatccatgcttggaggyggctcagaggcaggcaggaggtggctcaagggtgggctcaatccctgcctcccctttctccactggttatttggcctggcctttgttccagcagcagatt

SEQ ID NO: 495902 - DNA, 201 bp, Homo sapiens
cacagtaacctgcccaaggtcacgcagctaatgagtgttagagcaggggtttgagcaggggcccatctgcattccaagccctccctttttcctacctcctkctctacagacccagacctaaccgaggcaaaactggacctggcgctccagctgctgatgctgtggcctctcctccccaacccgggagagtcaggggcagcc

SEQ ID NO: 495903 - DNA, 201 bp, Homo sapiens
gccaggtgactgttctggaagctcggtctgctgctcacaatgttcaatggttcccactgctccagcacaaaaatcaattcctcatcatgggggccttcccyggttctctccagtgaggtctcatctctgcagctttctcctgtgtgaccattaactcttctgtgaggatagcctgcccttttacaaatacacgctttggct

SEQ ID NO: 495904 - DNA, 201 bp, Homo sapiens
ctgtgtgcagatccccaagcctggccttggagggagttgctgatgaagaggtgtgatgtgatctgtgtctcctgggagtccacagttgagtggacaatggracattgacattcgctgagcatctggcccacagtacaaccagtacttcatacaacccctcctgtaatccacttaattatacttcagggcagaaaaagcccc

SEQ ID NO: 495905 - DNA, 201 bp, Homo sapiens
tgctgtttgattcagaactgggcccacggcatcaactgtctctccacttccctccgatccattctccctccactatggccaggtgactgttctggaagctyggtctgctgctcacaatgttcaatggttcccactgctccagcacaaaaatcaattcctcatcatgggggccttccccggttctctccagtgaggtctcat

SEQ ID NO: 495906 - DNA, 201 bp, Homo sapiens
tcccagggtagctttgctgaataccagcctgcccaagccgaacatagttggaaatttatttttaatacttcctgtcttttcttcccatctcatgatggctyctaagatcaactaggtgtctttgtgagttttcagtttacttggttccctttaatgggtgagaagcctggaagaaccaggttgtgacttgtatttccttaa

SEQ ID NO: 495907 - DNA, 201 bp, Homo sapiens
gggtgtcagctgcaaaccttgtaatggatgaggaaaatatattactttttctcccctgcagcagcaaaagctaactgatgtaacccagtagtcccctgctrtttgattcagaactgggcccacggcatcaactgtctctccacttccctccgatccattctccctccactatggccaggtgactgttctggaagctcggtc

SEQ ID NO: 495908 - DNA, 201 bp, Homo sapiens
gagagaagaagtcagctcagtggctcctggtgacatcagaacaatatcgggtagggtgggaaagacaagggcagcgtgactcagatcatacctcgaaaccwaagtcttgaattctgctgtgttcctgctgctcagcacagggccagcatctaacacaggaggatcagctttgagaaatttccagaatgcccagttggtgac

SEQ ID NO: 495909 - DNA, 201 bp, Homo sapiens
ttctctcctcagaggctgccctcggcttccactcccctctggcagccccaggctgctcctccttttgaaggaccctcaccacacagggagtgttctcagaygggtgctgtaggaggatgagacgggacacattcagccttttaaagagaagatgagggcttaagcaagtgagagagacagaacaaagacaggcagggagac

SEQ ID NO: 495910 - DNA, 201 bp, Homo sapiens
gcttgggtttgaatcctgggtgctatgtttactggcttgtggccatgggaaaactgcttagcttctctgtgcctcagtgtccttatttgtaaaatatgaawtaaaataacaaaaccagattcactgtatagttgccagggtcaaggaagatgtaacatgagaaaatgctttgtaaagggtctgatggatgatgtggcatgt

SEQ ID NO: 495911 - DNA, 201 bp, Homo sapiens
cccggttcccttctctcctcagaggctgccctcggcttccactcccctctggcagccccaggctgctcctccttttgaaggaccctcaccacacagggagygttctcagacgggtgctgtaggaggatgagacgggacacattcagccttttaaagagaagatgagggcttaagcaagtgagagagacagaacaaagacag

SEQ ID NO: 495912 - DNA, 201 bp, Homo sapiens
catgatctcggctcactgcaacctctgcctcctgggttcaagtgattctcctgcctcagcctcctgagtagctgggattacaagtgcccaccatcatgccyggctaatttttgtatttttagtagagatggagtttcaccatgttggctaggctggtctcgaactcctgacctcaggtgatccacctgccttggtctccca

SEQ ID NO: 495913 - DNA, 201 bp, Homo sapiens
ttatttatcttttttgagacagagtttcactcttgttgcccaggctggagtgcaatggcatgatctcggctcactgcaacctctgcctcctgggttcaagygattctcctgcctcagcctcctgagtagctgggattacaagtgcccaccatcatgcctggctaatttttgtatttttagtagagatggagtttcaccatg

SEQ ID NO: 495914 - DNA, 201 bp, Homo sapiens
gtttaggaaaatcggaggagccactgttagaaaggaaagagggagaagagatggaaatgctaagcgtggacagacaccgctggcttattattctggaaagyggtgtgctcagcactgtggtctaccaagcagacatgcattttgataagatagagaggagagagagagagacagacagacagagagacccaggctgagaat

SEQ ID NO: 495915 - DNA, 201 bp, Homo sapiens
agcgggtgattgctcagggctctgatctcagtgcaaggagcacaaatgcaagagctttcccaaggcattgaaggtgttggttctctctctctctctctgtvtgtgtgtgtgtgtgtgtgtgtgtgtgtgtgtgtgtgtgtataagggcatttggtctgtttgttagtttttgagacagggtcttgctctgtcactcagatt

SEQ ID NO: 495916 - DNA, 201 bp, Homo sapiens
tctcagtaggaagcaaggtggggaggaaagaggccaaaagtttcctggcccagacaatgcctgtgggctgtacagaggagactgtaccagcagagaggccrccccgtgtgactgaggatgttacatcccaggcgcagccctgtgggctgggggcatgtgggggcacatgtgccggaggagggggatgcctgcctggggact

SEQ ID NO: 495917 - DNA, 201 bp, Homo sapiens
gactacttactatgtgccagtccccattttatggggacaataccagtacctcataaggttatggtgaaggttaaataggataatctatgtaaagtgcctgkcacattgtaagtagtctataaatgccaatttaaatgaagagaaaggtatgtcataaggtcaggtggccaaagaggtctttatctttagaagggagagaag

SEQ ID NO: 495918 - DNA, 201 bp, Homo sapiens
gcaggctgatcacagggccccccaggatgacggggtcatcaggcggcactgcggggagagaagcagtgaggtcaggccgaggctcccacctcgggcaggayggcaggcaggctgggaggattttgtggagatggcaacaaacaataattatcacacattaataaaacgcatcgtccgcttgtatcgtaatgatgagagcag

SEQ ID NO: 495919 - DNA, 201 bp, Homo sapiens
ggccacacaaaggtcggtttccttctggtccccctgcttccctacctgggactctccctgttccttcctatgtgaggacatctgacaatctcttatgcacygaagaatatatacgtcttaaaagaggaacacaagggctggacacggtggctcacgcctgtaatcccagcactttgggaggccgaggtgggcggatcacct

SEQ ID NO: 495920 - DNA, 201 bp, Homo sapiens
tgttctgttggagttagagcagctcccagactatccctgcagctgcagcagcccttccactaacccctgcctttgtcctggccctagagctctgcgaagcrggctctctgcctgtcccagggggcattcagacctggcaggtactctcctcccttccctccccgcagtctgaatttcagagggccccaggaagcatgagcc

SEQ ID NO: 495921 - DNA, 201 bp, Homo sapiens
ggtttgtggctgtgtgaaaagtgctgagccaaggtcctctcattttattctcaatatcttttgaggcagggactattagggtcttcattttataggttaakaagctgagactcagagagggcaaattacttggcaaagaccacacagccataagtggtgaagttggaatttagactcgagattttgaccctacaacatgtt

SEQ ID NO: 495922 - DNA, 201 bp, Homo sapiens
gacttgagtcgatcactttatgagccatatgattgtagacaagttatataatccgacaaccttaatcctcttatctgggaagtgagataataaaaataccyatcttgcagggttatcatgaggattaccttacaatatgaaagatacacagagaacattgtaaaaggctatacaaatgtaggttattatgtctaattttta

SEQ ID NO: 495923 - DNA, 201 bp, Homo sapiens
tcccacagcatcctgggcatcccctgactcactagctaccacatcctatggaaatctctctgtgtgtgtctcttccctgaaccatgatctccatccggatycccatctcccagcagagtgcctgcctgctgcacagggcacagggtggcatatgcatttgctgagctgaacttgacttgagtcgatcactttatgagccat

SEQ ID NO: 495924 - DNA, 201 bp, Homo sapiens
ccgagcccattcccctgtcttcaggcaagatgatccaggaacgctgggctcctgggaacataagatgaagaaagatcaaggggaaaagtatgatttggaakaaggacctgaaatgaattttcctaggagggacctgtcagccaggattcccagggagcaatgaggggtggagaagtcacgggggtcactggtgtccacatg

SEQ ID NO: 495925 - DNA, 201 bp, Homo sapiens
catgacaaactgacaagtgctatgaagggaaggctcactggacaaagagcacgtgtggggacccttgatcccttcacaggctgcctgctcccttcgctccyccggggccggccagagaaaggggcagactgctccctgcttactagctttggagttacacgatcttgtttcagaacagcttcctttgtgtatgccgtttct

SEQ ID NO: 495926 - DNA, 201 bp, Homo sapiens; identical to SEQ ID NO: 366988

SEQ ID NO: 495927 - DNA, 201 bp, Homo sapiens
cagaactaggcggtttaagaggtcaccgagcccattcccctgtcttcaggcaagatgatccaggaacgctgggctcctgggaacataagatgaagaaagaycaaggggaaaagtatgatttggaataaggacctgaaatgaattttcctaggagggacctgtcagccaggattcccagggagcaatgaggggtggagaagt

SEQ ID NO: 495928 - DNA, 201 bp, Homo sapiens
gggttctttgattttgttctgccgcagacccaggggctctgggagagtcagtgctaggagttgcagcactgactacagtggagggaggatgccgaagcctyggggtgcatctcccacaccttcagcatcttctccatccccaggttccccgctgcagccctgcagtcagcctgccatgtgtcctgccctcctgcctccctc

SEQ ID NO: 495929 - DNA, 201 bp, Homo sapiens
aatcttggttccagggagggatggcccaatttcctaaaatagttggtacagcatgttggactccttacagtggaagtcatggccttttgggagcgagacarttctcagcgatcatcttatttatcaccacctctcattttacagatgaggaaactgagacccaggttgagaaacagggccactgtcacacagctggacact

SEQ ID NO: 495930 - DNA, 201 bp, Homo sapiens
atacatgtgtatgtaagtgtgtgtgtgtatatgtgtgtgtatatgtgtgtttgtgtgtgtgcatgcatgtgtgtgtgcattgggtacagttgggaacgggytgcgtgagtagtgggagggaggagggcaaagcaggagcccttctgaggccagctgggacagcgctgtaggaactctgcgctgctgtggcatcagggttgg

SEQ ID NO: 495931 - DNA, 201 bp, Homo sapiens
gacagctctctctgcacatgtgcatgggggtcctctgaagcccaaccaaactgagtcttcggagagggctaggtctatgtggaagctggctacagaggggyggttgggggggatcctttgcagggaggaccagggtttgaggtccacagccaaggccaggaccccagggctgaacaggacttggagaggtcctatctccca

SEQ ID NO: 495932 - DNA, 201 bp, Homo sapiens
ctccagccccttcatccccagaggcagcctgattctctcctgtcccagccttccactgcattttgtagtagggtcagagacgggtggctcccatcaagggwtcctgagtgccaggaagagggccatccgcgtcggagcacggtctccgcagtgcccagcacagagccctgtgctggggaaactccactgacatttgctggc

SEQ ID NO: 495933 - DNA, 201 bp, Homo sapiens
ctgactcaaaaaaaagatgcctaaggaagtgaaaaggaccacagggggacagtcaggccatgtgggctccagagaaggcttcctggaggaggagttgtctraggtgaatcttgacagctgaacacaagttagccaagggaagaaaggtaggaagggcactccaggaagaaacacagtgtgaatgagggcccagaggcttgg

SEQ ID NO: 495934 - DNA, 201 bp, Homo sapiens; identical to SEQ ID NO: 79452

SEQ ID NO: 495935 - DNA, 201 bp, Homo sapiens
gagctgtgtttgtggtgagacctgggagcgactcctggactcccggttccaggctgcatggccttggatacgttaattagttatttgagcctgtgtcttcrtcataaaataagagggataataattctgtgaaggttaggagaagttccatgggatggcatttgtgacgtccccagaacagggctcagtgaatgctcattc

SEQ ID NO: 495936 - DNA, 201 bp, Homo sapiens
atgtaggcctgtgttccacgggtgctcagaaaagaccatgtaggcctgtgttccacgggtgctcagaaatcctgggggctgagatacaacctcagtgaacragccactgggccagggatgcagagctgtgtttgtggtgagacctgggagcgactcctggactcccggttccaggctgcatggccttggatacgttaatta

SEQ ID NO: 495937 - DNA, 201 bp, Homo sapiens
tgatctggccccgcttggcccacctgcaacaaaggccaggggctgatgtgggccttgagtggcaaggccaaccctccgggagctggacacatccatcccaygaaaaaatgaggcctgggttgtgtggcaagtggggagtcctctggggtccgtcaaggggaatcttcacagaggggctacttcaagggctcagaaagagtt

SEQ ID NO: 495938 - DNA, 201 bp, Homo sapiens
tgtgtatatatgtgtgtacatgtgtgtatatgtgtgtatgtgtatatatgtgtgtacacgtgtgtatgtgtatatgtatatgcatgtatatgtgtgtatgygtgtatgcgtgtgtatgtgtgtatgtatgtgtatatgtatatatgtatgtgtatgtatgtgcatgtagatgtacatgtgtgtatacatgtgtataggtgt

SEQ ID NO: 495939 - DNA, 201 bp, Homo sapiens
gcttggagatgtattattcatcaccccctcgcaggattggttattatcctcaaccactatagagtttgggcttctaatttttaatcacaaggaaggtggargcgttagccttttcgtgattaatccggagataaaaatagttgactgttttggtgttgtgcttgttgtcagtcaggaaaaaaatggcattaactgttgggg

SEQ ID NO: 495940 - DNA, 201 bp, Homo sapiens
tcatcaggcggcactgcggggagagaagcagtgaggtcaggccgaggctcccacctcgggcaggacggcaggcaggctgggaggattttgtggagatggcracaaacaataattatcacacattaataaaacgcatcgtccgcttgtatcgtaatgatgagagcagcacccacagtgatccctgacatgtgcactgcgtgc

SEQ ID NO: 495941 - DNA, 201 bp, Homo sapiens
aagagaaatcagcagtcgctcttggcagctgtgtctggcgtggaagggggctcctcattacctccccattcagactcggccaggctgggccaggcagtggygaggggaggaagtttcagagtggtccccgcttggagatgtattattcatcaccccctcgcaggattggttattatcctcaaccactatagagtttgggct

SEQ ID NO: 495942 - DNA, 201 bp, Homo sapiens
ctggagtgttgtgttactggaatatcggattagaggcagcgaggacgagggaggagggagtggggcgtgttgtgggagtgctcaggcacacgcacagccaygcacatacatccaccctcagaatggggcctgattacatcttcccaaataagtggttatcatgctgggtattcatgtagccaggcattattgattggtctt

SEQ ID NO: 495943 - DNA, 201 bp, Homo sapiens
gccaggctgagctctcggaaatgggtgggctggagggcagacaaggggtgggggcccaagcactggtgctaaatatggggtgcccgatgacaggcaaaccrtctggaaaggccgagagtagcctgattgcctggcagcaaggccgcctcgcttctccccgctactcaccttccccacctgctgggtccctttttttttttt

SEQ ID NO: 495944 - DNA, 201 bp, Homo sapiens; identical to SEQ ID NO: 367005

SEQ ID NO: 495945 - DNA, 201 bp, Homo sapiens
ttccccagcaccggcctgggaggccggtcttcccaggtatggttgtacacagtgtaccccaccccatggttttcctgcttgggtggcagtggctggccacyctgctctttccaaagcccccagggcctcctctgggcagtggagagccaggctgagctctcggaaatgggtgggctggagggcagacaaggggtgggggcc

SEQ ID NO: 495946 - DNA, 201 bp, Homo sapiens
accgctttaccaccctgccttgggctcttcagcagacctcatcgagtctataaatagccaagtgataataagaacaatttcctggatgaaactaagacttsgggtagggcgcgcaggggcggggaggtggtgaggagcaggttggtattcttcttctcttctttacatttccgttgtgctaacaagggacatttacataag

SEQ ID NO: 495947 - DNA, 201 bp, Homo sapiens
gggcaaacctcgtggcgtcaggagaacagggccagagcctctatatagaacagcacatcttgctggaggcaaagccggactgtgacattctagagagccaygcggtgcagctgcaggcctgggactcagggtgccagccacggccctgggcagaggggctggaggagagtgacgtggccagatgcagcaagccgggggcag

SEQ ID NO: 495948 - DNA, 201 bp, Homo sapiens
ctagcagccaatgctgctatgccttgctgcataacaggcgctattctgagacatgttttacatatattatttcattaaatcctctcttcaaccccatgaargcagttatgattatttccctcattttacacagaaagaaacaggcacagagtggttaaataacttgctcacggtcacaccagtggcaaaatgatacagcta

SEQ ID NO: 495949 - DNA, 201 bp, Homo sapiens
tcagaccatgtgggcccttgaacgtgtgccaagaagtttgtacttcatgagaagtcatcaaaggtttttgacccacatgctcagatctgagttttagaaakatcacggtgatgacagggaggaggatgaatgaaggaggataatctgaagacagggagactgatcagcaaggttttgctgtcatgaggactcaggctaacg

SEQ ID NO: 495950 - DNA, 201 bp, Homo sapiens
agctgtgagataattgatttctgttgtgtcatgcaccgaattgtggtgctttgtaatggcagccctaggaagcaaacccatcttaactgctggcctcccaycttcccaggtcattgcttttctctactgggccacaatgtcattccgaagctagttccccattgtggctgctacctccttccctctcctgttcctctttgc

SEQ ID NO: 495951 - DNA, 201 bp, Homo sapiens
gtctcataacattgtgcaataatagcaatgatgaaaacagttataatactagcagccaatgctgctatgccttgctgcataacaggcgctattctgagacrtgttttacatatattatttcattaaatcctctcttcaaccccatgaaagcagttatgattatttccctcattttacacagaaagaaacaggcacagagtg

SEQ ID NO: 495952 - DNA, 201 bp, Homo sapiens
aggagtgtggagaggatgttaccagggtggactctggaaatctatgctacctaagtggtcttgggcaagttaatcaccctttcggtgcctcagtttcccayggtagggaccacagttgcaccttctccaaacagttgttgtaaagattaaataaggccaggcgaagtggctcacatctgtaatcccagcactttaggaggc

SEQ ID NO: 495953 - DNA, 201 bp, Homo sapiens; identical to SEQ ID NO: 367009

SEQ ID NO: 495954 - DNA, 201 bp, Homo sapiens
acccaggacccaggccagggccagggccagtgagggggaagagccgagggtcggagattaaggaggcctggcctcactttcagggccagccctgcttgcaytgtgtgccccgggacctccttcagtcaccctagctctaggcttggccagagctccgcggccctggctgcttgtgaatgaggatgccagaaggctccttgg

SEQ ID NO: 495955 - DNA, 201 bp, Homo sapiens
agtgggctcctaagaacctccccagcttcccttgtcctggtgttgggagcaaaagatgctggggggtatgggggctggccctgggcatggtcatttgggawgctacccccagatttcagtggcgagtgggcacttggataggcagtgtcgagcttctgggcccctccagaaatcgctcatggtggcactggctggggtagg

SEQ ID NO: 495956 - DNA, 201 bp, Homo sapiens
gagggctccctgtgcagctgcagctcccctgggcttcccccagggcgggcctcagacagcgtcctgggtttgacacccaggatgcccaggaagctggagcygggacaggggtaaacacacacgtgggactggctggcctgcccctccctcagttggctctggctctgttcctcctccatttcatgagatgagggggaatca

SEQ ID NO: 495957 - DNA, 201 bp, Homo sapiens
ggcattttcctttctcatttcatgctgtaatggagattcattgccagttttaaatccataatttgctgtgaaacccttgttttgggcctgggctgaggtcrgaacggagaagcggcgggttatttttagccctcagagggctccctgtgcagctgcagctcccctgggcttcccccagggcgggcctcagacagcgtcctg

SEQ ID NO: 495958 - DNA, 201 bp, Homo sapiens
tatctgtcaagaacccccaactcaggaagctctgctccaagtgagctgagtaaggagagtctgcctccaagttgttcctctgcaggtgactgtgctccatsctaaatcattccttgcacgggcagaagctgtttggcattgcaccagtgtctgattttgtttgaatatggtgcctttggcttaatcagtcagacatgcatt

SEQ ID NO: 495959 - DNA, 201 bp, Homo sapiens
ataggatgtgaataagtgcaaggtgtgagtgactgacagtaagtgcaagggggttcagagaagtggcagctccaagcctgcttctgctgaagctggagggmttatctgtcaagaacccccaactcaggaagctctgctccaagtgagctgagtaaggagagtctgcctccaagttgttcctctgcaggtgactgtgctcca

SEQ ID NO: 495960 - DNA, 201 bp, Homo sapiens
atgtgaataagtgcaaggtgtgagtgactgacagtaagtgcaagggggttcagagaagtggcagctccaagcctgcttctgctgaagctggagggcttatmtgtcaagaacccccaactcaggaagctctgctccaagtgagctgagtaaggagagtctgcctccaagttgttcctctgcaggtgactgtgctccatgcta

SEQ ID NO: 495961 - DNA, 201 bp, Homo sapiens
agagccttgcctccaggtctgcattaacacctcgaagcatcactggtcaaaaaggggcaaacctctctcctggctgggcatcgttgtgactgctagctctgcgtgttaggcagagcatcacatttcagagtggaaaaaagactcagacccagccccttaggatggtggatttagaagggatccatctagataatgtggttt

SEQ ID NO: 495962 - DNA, 201 bp, Homo sapiens
actgacagtaagtgcaagggggttcagagaagtggcagctccaagcctgcttctgctgaagctggagggcttatctgtcaagaacccccaactcaggaagmtctgctccaagtgagctgagtaaggagagtctgcctccaagttgttcctctgcaggtgactgtgctccatgctaaatcattccttgcacgggcagaagct

SEQ ID NO: 495963 - DNA, 201 bp, Homo sapiens
attcctacccaccttcctccaggggccaggcgctacgagatgaggggaaggaacggcaaggtcagcgggagcccgtggagtcagaccctccagcagcaccrctgggggctgggcaggagggcatgggctgaggccacagggaagggctgctccacagggaggcctccctctgctccgtggcagttgtggtgctggagatgg

SEQ ID NO: 495964 - DNA, 201 bp, Homo sapiens
tggatggcaggggaaggaggaggggtgatggggaggagcagaataagaagttgtacaaacaggagaggcacagagtggggagaaggaagccaccacggacrgtgagccctggggcttggagaaggccctcggcacccttccagggcagctcccacctgtcagttgaaaccaccacctggagactttccaccattctcaagg

SEQ ID NO: 495965 - DNA, 201 bp, Homo sapiens
aggggtgatggggaggagcagaataagaagttgtacaaacaggagaggcacagagtggggagaaggaagccaccacggacggtgagccctggggcttggaraaggccctcggcacccttccagggcagctcccacctgtcagttgaaaccaccacctggagactttccaccattctcaaggccttcccacaggttctaccc

SEQ ID NO: 495966 - DNA, 201 bp, Homo sapiens
accccagaactgtgttctgcatttggagctcaccccaggaatccctgcagcggggcgagaccagggccaaggcacccgaggggcttcctggagtaagtgasgtctgtctgccagggtggagctgtctgagctgctagggcaggtcaaagtgttggcctggcatctccccaagagaaagacaccattctttgccatttgtaa

SEQ ID NO: 495967 - DNA, 201 bp, Homo sapiens
ctttcttccttctttccttccttcctttctctctcttttcttgtctttccatctttccttctcctcttctttctttttctttctttttttttcttccttcyttctttccttccttcctctctctctctcttttcttgtctttccatctttccttctcctcttctctcctctctcctctccatgtgcttttttggccccagg

SEQ ID NO: 495968 - DNA, 201 bp, Homo sapiens
gcttccacgtggtttggtgaagccactcacctgcccctggtggaggatgttcctgagcagcggcaagtgctccggagtaaggtcgcgtagggatctgatgycccggcgatggcagatggcgatcaagtacaagtcatcgagctgcgtagagagcaaggggagaccaggctcagcagggaacagacctggggaggctgccaa

SEQ ID NO: 495969 - DNA, 201 bp, Homo sapiens
gccatgaacattctttcctgccagagttctaagaatctgtgttctctgccttagaccttctgcagatgagcccacaggaagctccacgtgtagctgagctrcatgcaccaggcctcagtttgccccaagtcccctgtgtactctctcatggcctgtggccaagaaatgtattctctcactttggacttaggagtccaaaga

SEQ ID NO: 495970 - DNA, 201 bp, Homo sapiens
ggaccagggacaaagagccctgctcttcaacctcaagagcctaatggggtccccaagactggcatccagagagaagtctctccaagatggactctgggaarggtgaggaaaggggcccaggaacacactggaatctgagtctaatttctctgagcttccacgtggtttggtgaagccactcacctgcccctggtggaggat

SEQ ID NO: 495971 - DNA, 201 bp, Homo sapiens
aaaccgtctgggggaagcattgttatcactcctatttcatgagcagttatgtaacttgccccagataagacttggttatggcacagattctgtgttggagscttcagaccactctacttcccaagcaggggaggaacagaacattaaagattttcttggccttggctttcatttcttcatcgtggttctgaaaggaaaatt

SEQ ID NO: 495972 - DNA, 201 bp, Homo sapiens
aagactggcatccagagagaagtctctccaagatggactctgggaagggtgaggaaaggggcccaggaacacactggaatctgagtctaatttctctgagmttccacgtggtttggtgaagccactcacctgcccctggtggaggatgttcctgagcagcggcaagtgctccggagtaaggtcgcgtagggatctgatgcc

SEQ ID NO: 495973 - DNA, 201 bp, Homo sapiens
ctgtttattaaattgtattgaaattgaaacgcttgaaacagatttcattcctgcttattttctaacagtggttaaaacttggtaacttcaagttgacatgsatttcagaattcaatgtaatttcaataatattataatagaacaaacttagggttgccaacatttattttgctaagcaaggctattttaaaaacaactatc

SEQ ID NO: 495974 - DNA, 201 bp, Homo sapiens
ttcttatttctcagttcggggatctgtattcaacagggacatggaatatggagcctgagatggtatttttctgtttcatgttggtaaatagagaccactcrgcaattttgctctattaggaaagtttgagacaaatggagagaagccaaggaacaatagcagtcatgcctccaactgcttctttccttctccaaccaagcc

SEQ ID NO: 495975 - DNA, 201 bp, Homo sapiens
ggttctacccacccactgtcccccaccatctgtctgcctcccaggccacgctgtccacactgagtgagcccgctagtttattcaatactaggaataagccrgtataaaatacatttttagaaaattcacttggagataaaaaatcttgtccccactcctcccccaatcccacacatctgtgctcttctgcctgagttaatt

SEQ ID NO: 495976 - DNA, 201 bp, Homo sapiens
cagcaccactgggggctgggcaggagggcatgggctgaggccacagggaagggctgctccacagggaggcctccctctgctccgtggcagttgtggtgctrgagatggagaccgtgtttgcttgttgggaccacatctgctttcagaggggaagcgggtcacttctttcccctggacctggaatgggcacaactgagacgc

SEQ ID NO: 495977 - DNA, 201 bp, Homo sapiens
gttagcatcctgcccaccaagaggaggaaacagcaagatgtgtttgaggaagaaatataccccatccagcatctcagatgattttaaaaatagcaactccrggatggtatttcagctcctatttttatcagatttatatggctggaccatggagctgagctgttcccagggttctcagtagcaagggacatcactcttgta

SEQ ID NO: 495978 - DNA, 201 bp, Homo sapiens
agaaaccccgcagggcatctgcataccccgggcgtgtgggatggtcttaaggagcaggcctactgtgtacgcttcttgctagagaataccatgtgagagtyctttttttttttttttttttgacagagtctcgctctgtcgcccaggctggagtgcagtggcgcaatcttggctcactgcaacctccgcctcctgggttca

SEQ ID NO: 495979 - DNA, 201 bp, Homo sapiens
ttcttgtctttccatctttccttctcctcttctcttttctttcctttcttccttctttccttccttcctttctctctcttttcttgtctttccatctttcyttctcctcttctttctttttctttctttttttttcttccttccttctttccttccttcctctctctctctcttttcttgtctttccatctttccttctcc

SEQ ID NO: 495980 - DNA, 201 bp, Homo sapiens
gagtctatggggtgaggggtggaagtgcatcccagatggagaaaggccgaggaaggcgtgtgagggtgaggaaaggtggcaggaccagggacaaagagccytgctcttcaacctcaagagcctaatggggtccccaagactggcatccagagagaagtctctccaagatggactctgggaagggtgaggaaaggggcccag

SEQ ID NO: 495981 - DNA, 201 bp, Homo sapiens
tgaggggtggaagtgcatcccagatggagaaaggccgaggaaggcgtgtgagggtgaggaaaggtggcaggaccagggacaaagagccctgctcttcaacytcaagagcctaatggggtccccaagactggcatccagagagaagtctctccaagatggactctgggaagggtgaggaaaggggcccaggaacacactgga

SEQ ID NO: 495982 - DNA, 201 bp, Homo sapiens
ttctctttttctttctttttcttccttctttccttccttgctttctctctctctcttcttgtctttccatctttccttctcttctctttttctttctttcytttcttccttccttctttccttcgttcctttctctctctcttttcttgtctttccatctttccttctcctcttctcttttctttcctttcttccttcttt

SEQ ID NO: 495983 - DNA, 201 bp, Homo sapiens
cagaaacaaaattgcttgaacttgaatttgtgtgcgtgcgcacgtgtgcacgtggtggtgaaggtgtatgttttcggctgttctatgcgtcactgtcaccraactcccaaataatagtaacatttgtttagatgatgtctgctgacaaatcacaaacacgacgctaactcgcaactctctgctccactggcacagaatagg

SEQ ID NO: 495984 - DNA, 201 bp, Homo sapiens
ggggtgatgccgcgcggtcgcaggcttgggatggtgttcgcgcctccgagacccggacagaggcaagcaggggcgccgtgggtgccagagaggcggaagasgaggcctgatggggtgagcacagggccagggcaggcactgcctgtgaatggcgccagggtgggtatgcccagcgcagccaaggcgctcgctcccgggaac

SEQ ID NO: 495985 - DNA, 201 bp, Homo sapiens
aaggctgagtgtggtggctcatgcctgtaattccagcactttgggaggccgaggcaggaagactgcttgagcccaggagttcaagaccagcctgggcaacrtaggaagactctgtctctacatagaaattttattataaaagtagctggggatggtggcacacacctgtagtcccagctactcaggaggttgaggtgggaa

SEQ ID NO: 495986 - DNA, 201 bp, Homo sapiens
agttctagggacaagaccaaaaggacatagactcttaactcaaggctttcttctacatggttgaggtcttatttttattagcagcaattgtttagtgaatsagattccctgttttttcattgtggctttttgtttttttctctagattttccatgatgatgatgccatccctggatgggaagggaaaattgtagcttgggt

SEQ ID NO: 495987 - DNA, 201 bp, Homo sapiens
ttttctccttccaacggcaggaaaaggagctacttcagtcagcaacagaggggtacgtacctggagttttgatggagtcctgccacttctcactgaaaccrgaagagtgccaaagccatggccagtggatgaggccttttatattccagttccctaattcctggatctgtggagtgtgtaaagatgtgaggcacttgctat

SEQ ID NO: 495988 - DNA, 201 bp, Homo sapiens
tgggagcataagccccttgggatctgagtttctaaggttgctttgcttctgtggttcttgttcctatcggtttttctttctatgagtcacatgagtattcyctactacggacctccaaaacctaaatattggcagagtctacagcttctgctgtgtgtctaccctgcctggctgaaatcttcccatgcttctctgtccttt

SEQ ID NO: 495989 - DNA, 201 bp, Homo sapiens
tgtgaaaaaaaaaaaaaggatgctagcaaggatgcagagaaaggggaatgcttattatgcaccattggtgggcatgtaaatgagtatagttaaatagaaarcaatgtggacattcctcaaaaaaatacaaatagagctaccatgtgatccagcaattccactgctgggtatgtatccaaaagaaaggaaatcagtatatca

SEQ ID NO: 495990 - DNA, 201 bp, Homo sapiens; identical to SEQ ID NO: 386580

SEQ ID NO: 495991 - DNA, 201 bp, Homo sapiens
ggggttcaagaccagcctgaccaacatggagaaaccctgtctctactaaaagtacaaaaattagccaggcgtggtggtgcatgcctgtaatccagctactygggaggctgaggcaggagaatcgcttgaacccgggaggtggaggttgcggtgagccgagatcatgccattgcactccagcctgggaaacaagagtgaagc

SEQ ID NO: 495992 - DNA, 201 bp, Homo sapiens
tttctgcctttgtggttattcaggccttactgctcaatggatccttacctgaagatgaacaggagaggcccttggccctctgtgaaccaggtgtcaatccygaggaacaactggtgagctccatcttttgtgattggacactaaatctgtatgtattttacttgtatttagcatttgacactgctgttcatgccttcttga

SEQ ID NO: 495993 - DNA, 201 bp, Homo sapiens
ccatcttaaaaaaaaaaaaattatatatatatatatatatatgtatgtatatatatgtgtatatatatgtgtgtgtatatgtgtatatatatgtgtgtgtrtatgtgtatatatatatgtgtgtgtatatatatatatcacatgtaacctaaaaatacgtagaactgatatgtatcaatttaaaaattaataaaatatgct

SEQ ID NO: 495994 - DNA, 201 bp, Homo sapiens
cttaggcaagctcctgagaaagctgggttttaagaattttaattgagatgaaggcagtgtgaagagatacaagaccctgttaaaggttagagttgtttttmtctattgttttttctctcagtggaactgactattcatcatggtatgacaatccagagaagaagttcatggtcatacttgctcccagcaactgtagctgtg

SEQ ID NO: 495995 - DNA, 201 bp, Homo sapiens
tcagtagaagtagtgtacagaacatcaataagaatatagaaaacctgggccgggtgtggtggcttatgactataatcccagcactttgggaggccaaggcrggcagattacttgaggtcaggaggacagtgggtgtagcccacggagggtgaaccaaagcagggcagggcgtcgcctcacccaggaagcgcaaggcgttgg

SEQ ID NO: 495996 - DNA, 201 bp, Homo sapiens
tggcattcaataagaaattatgaggcatccacaagagcaagagaaaaacgaagccactgtgaagagcgaaagcagtcaacagaatcaaactcatatatgayaaggatgtcgaaaccatcagacaaggaatttaaagtaactgattcatatgttaaaggctgtagtgaaaatgttgataacatgcacatacaggtgaggaag

SEQ ID NO: 495997 - DNA, 201 bp, Homo sapiens
tggcctggaagtcaagattgcctaagcggtgaaagatgaataagaaagttctagaaagcaattgctatttcggaatatcacttcttgccactccctacccytcctgcctgtttggttatagatctatagatatggttaagcaactttctttaatttgatatttcaatttaaaagctttaaaatgttttctgtggttctaag

SEQ ID NO: 495998 - DNA, 201 bp, Homo sapiens
aggaagcgcaaggcgttgggagatttccctttcctagacaaaggaagccctgacagactgtacctggaaaaaacggaacactcctcccccaaatactgcgygttttcaacagtcttagcaaatgcagaccaggagctactatccagtgcctggctcggtggttcccacacccacagagccttgctcacagctagtgcagca

SEQ ID NO: 495999 - DNA, 201 bp, Homo sapiens
tcaaaaaatacatgaaacaaaaactgaaaggagaaatagataaatctagttacaattggaggctttaatatttcttctttgcagtaatcagtagaagtagygtacagaacatcaataagaatatagaaaacctgggccgggtgtggtggcttatgactataatcccagcactttgggaggccaaggcgggcagattacttg

SEQ ID NO: 496000 - DNA, 201 bp, Homo sapiens
gattatacccaaccaggttgttcccaggataatttgcattatatgaacatagatattcatcagtttggctcaaagtttgtttgcattttcttagtctgggwgaaattcgatggcagattagacagaaaaagaagagaaatgacaggcagaaagtcagcatcttaatatttcctgcaaacagaagagttttaattcacagcc

SEQ ID NO: 496001 - DNA, 201 bp, Homo sapiens
ggatgtttgaacccattgcaaggaagctagaaaccttgaaaaaagattagatgaatggctaactagaataaacagtgtagagaagaccttaaatgacctgrtggagctgaaaaccatggcatgagaactttgtgatgcacgcacaagcttcaatagccaatgcgatcaagtggaagaaagggtatcagtgattgaagatca

SEQ ID NO: 496002 - DNA, 201 bp, Homo sapiens
caagtcatgatctactactagatacaggtacaataatagtacttccaatcctgataactatgcaaatatggctctgcatttgggaaaatcttttttttttyttttaagtgttcaaaatagctcctgctgatacaatggattgcagcctggcactcactccaggactatgactaattgatctttgttactattcaatgactg

SEQ ID NO: 496003 - DNA, 201 bp, Homo sapiens
aagagagccattaaacagacaattatatacttcatcaggaagtgataaatgtaaagaagaaaaataagatagcacatctggtttacaattctccctttaasaagcaacatttcttcatgctgctgtaggcgaccaactacaacagtcacaactctcaaagcaatggttttctccttccaacggcaggaaaaggagctactt

SEQ ID NO: 496004 - DNA, 201 bp, Homo sapiens
cctttcttgatctcgccctgatatttctctccaaattcatctcttgccatttcttcttccctttaccccaccccctcccctgcacccaacccccaccccawacttattctttttttttttttttgagacagagtcttgctctgttgcccaggctggagtgcagtggcacgatcttggctcactgcaacctctgcctcccgg

SEQ ID NO: 496005 - DNA, 201 bp, Homo sapiens
ttttctgtggttctaagaaggaagagaatgtatttctagttgaggtcattcccagcaaagcccctaaaatacggacagtgaggaggatgagacactagtcytcaggctgcctcactgcttttgacgtgcctggctacctccaccatgcctggctcttgttttttactggattctaggaggacaaaatgttaactcctgatc

SEQ ID NO: 496006 - DNA, 201 bp, Homo sapiens; identical to SEQ ID NO: 386617

SEQ ID NO: 496007 - DNA, 201 bp, Homo sapiens
tctgtctaaaaaaaaaaaaaagggccaataaacccaagaaaagatgcccaaaatcattagtcattaggggaatgcaaatcaaaaccacagtgagataccaytttacacctactaaatggtgtcaaaaatggagaataataagtattggtgagaatgtggagaagttggaactgtcatacattgctctggggatgtgaatgg

SEQ ID NO: 496008 - DNA, 201 bp, Homo sapiens
tagctaggctgggcgtggtggctcatgcctgtaatcccagcactttgggaggctgaggtgggcaaaaccttgtctctactaaaaatacaaaaattagcggrcgggtggcaagtacctgtaatcccagccacttgaggcacaagaatagcttgaacccaggaggcagaggttgcagtgagctgagatcgcaccactgcactc

SEQ ID NO: 496009 - DNA, 201 bp, Homo sapiens
agatttctgacttattagtattccttagttagaaccctttgaacagtttgctgttatagttgatatttccataatgttgaatgcccttagctccccgcggscctggcttcttatatatgtctgtacctgttgccatgactggtgagatagcaaaattcatttgacttactcaaattttattataaaatggggtcacatttt

SEQ ID NO: 496010 - DNA, 201 bp, Homo sapiens
agagaggttggttaatggatacaaaaatacagttagatagaaggagtaagatctagtgtttgataagaagtagggtgactatagtagaatttattgtatartttgaaatagctaggctgggcgtggtggctcatgcctgtaatcccagcactttgggaggctgaggtgggcaaaaccttgtctctactaaaaatacaaaaa

SEQ ID NO: 496011 - DNA, 201 bp, Homo sapiens
tcagttgctctttattttttcttacatagagagaaaaacatgcaagaagcaaagtgcaagacttagaattgtatttacccacaagagttgtaatgaaacasaggccctcagaagaaaaactggaattgaattcttctgtattctgctccccatctaaccctggcattagtaccaaagagtcagtcatgttactgagtcaaa

SEQ ID NO: 496012 - DNA, 201 bp, Homo sapiens
ccttgagggttagcaggcagtacctgcgtgccatgaattctttcttattcttgcaggtggatctgcagaggaagctagatgagaggaaccggctcttgggrgaatataaagtaagaatgaatatcagtttggaaatgacttccactgacttttcatgaacagcccgttattgttgctcaaaaagcacttaagtattctatt

SEQ ID NO: 496013 - DNA, 201 bp, Homo sapiens
gtttcactgtgttgcccaggctggtcttgaactcttgagctcaggcaatccacccaccccggcctcccaaagtgctgggattacaggcgtgagccaccgcscctggcctagtactatatttttaaatgtaaactagatatctctctctgtaggtcccaaggcactgtaaagtcatgtccaaaactggacacaaaacaatag

SEQ ID NO: 496014 - DNA, 201 bp, Homo sapiens
ggagttctttgaatgctagattacccatcattttggtaaatctcttctcaatgaattaggcttaaaggcatccttgttgtgggagagactttgtaggactrggtcattcctttattcaatattaatttcattcattcaaaaagttaatcattaaataaatattttattttctgtgggccaagtactgtgttacccatggag

SEQ ID NO: 496015 - DNA, 201 bp, Homo sapiens
gtggtccagcaaagtcagaggatggaacatgtcatccatagcaccttgtcagatgagaaagtgttttcttgtttctcaaagatgagcagctcttgcaggcygctttctacacttggattcccatttctgtaagaaggtaaatgctgaggcctgagcaggcacaaatctattctccttgtgaatgacatagtacacttggat

SEQ ID NO: 496016 - DNA, 201 bp, Homo sapiens
caggtgtgagccaccacgcccgacctcctagaggcatcttaacagttatcagcacatttgtgtctatatcgctttcccccacggttttacccaaatggtartatactagaaataaaacttgacaccttgctttttttcacttagtagtatatcttcgagctcattctatgtcagtagtacataaagactttcctaggtctt

SEQ ID NO: 496017 - DNA, 201 bp, Homo sapiens
tacattcaaggtctctttgaagcttctcgttttctgcttgtgcctttaatgttggtgttcctcagcattccagtctaggccctcatgtgtcttaaacattmacctgggcggtagtatctgcctccagttcttcactcacttccctcttgcttctcatgtatttatttccagctcagctcttgctatggatttctagattta

SEQ ID NO: 496018 - DNA, 201 bp, Homo sapiens
gagtgccaaagccatggccagtggatgaggccttttatattccagttccctaattcctggatctgtggagtgtgtaaagatgtgaggcacttgctatccawaattaagaattagtgggcaaaccataggcctgcttctgtgggggaaaaatcttctggaaacttctctcctatatccttttaagcccagtggttgggaagt

SEQ ID NO: 496019 - DNA, 201 bp, Homo sapiens
aagttaaagatctatttttttaagtgagtttgacctatacttcataccatatgcaaaaatcaactccaaatggataagcctaaacttataagctataactrttaatcacctgttttgtggtacttttcaaaatcatgtattaaatttgtagatatacacaaggatatgtttctgagccacttatcctgcatgagttttttt

SEQ ID NO: 496020 - DNA, 201 bp, Homo sapiens
caaagccaggcagtgctggagcagcattctgaggctctccagtgctgtggcagaggctaggttggggcctccaggtggaggttagcatttcctttattcamatccaacaatgcgtactaagtgtcaagtgctgggcatacagcagtgaccaaaaggggaaaaaaaatctatacttaagaaagatacattctaataaagaga

SEQ ID NO: 496021 - DNA, 201 bp, Homo sapiens; identical to SEQ ID NO: 386597

SEQ ID NO: 496022 - DNA, 201 bp, Homo sapiens
ccttttatattccagttccctaattcctggatctgtggagtgtgtaaagatgtgaggcacttgctatccaaaattaagaattagtgggcaaaccataggcstgcttctgtgggggaaaaatcttctggaaacttctctcctatatccttttaagcccagtggttgggaagtggcaccgtgccatgccagcaacaccttatt

SEQ ID NO: 496023 - DNA, 201 bp, Homo sapiens
cttgctctgttgcccaggctggagtgcagtggcacgatcttggctcactgcaacctctgcctcccgggttcaagtgattctcctgcctcagcctcccaagyagctgggattacaggtgtgcaccaccacacctggctaatttttgtgtttttagtagagatgggtttcaccatgttggccaggctggtctctaacacctga

SEQ ID NO: 496024 - DNA, 201 bp, Homo sapiens
cactggcctttcttgatctcgccctgatatttctctccaaattcatctcttgccatttcttcttccctttaccccaccccctcccctgcacccaacccccmccccatacttattctttttttttttttttgagacagagtcttgctctgttgcccaggctggagtgcagtggcacgatcttggctcactgcaacctctgcc

SEQ ID NO: 496025 - DNA, 201 bp, Homo sapiens
ggcggccagggagccctggaacctatctggagacctcatgggaagaacagctgttggaacaacaagaatatttagaaaaagaaatggaggaagcaaagaaratgatatcaggactacaggtagctctctcccttgtagtttgcccttgttataccaattgattattaagtcagtattatcaatggaaaataaactgatttt

SEQ ID NO: 496026 - DNA, 201 bp, Homo sapiens
tctttcatgtaagtttacctggtcttttcctattgaagaatttttcatcagaaacgactgggaaagtttgggaaagtcagcaaaagaaagaatgcatttcraaagcaaacagaagaaaaaagtatattctcacagtttttccccaggaagtctggagaaaaagtcctcatgtcaccaatttctctgttgcatgaattttag

SEQ ID NO: 496027 - DNA, 201 bp, Homo sapiens
aaaggacatagactcttaactcaaggctttcttctacatggttgaggtcttatttttattagcagcaattgtttagtgaatcagattccctgttttttcaytgtggctttttgtttttttctctagattttccatgatgatgatgccatccctggatgggaagggaaaattgtagcttgggtggaagaagaccatggagag

SEQ ID NO: 496028 - DNA, 201 bp, Homo sapiens
tatatggaactgtgtatttctcataatgaaatcaaggaacttctagggagttatgtatgcttatgcccaactccttgagtaagtattttcttagcctacgygtctctttataatccatttgtcaaagatagacttttgggggaatacagttctgggttatatagtattacaagtggattcactgcagttacagaatgaaaa

SEQ ID NO: 496029 - DNA, 201 bp, Homo sapiens
atgtggacattcctcaaaaaaatacaaatagagctaccatgtgatccagcaattccactgctgggtatgtatccaaaagaaaggaaatcagtatatcaaaraggtatctgcattctcatgtttattgcagtactatttccaatagccaaggctggtcacagtggctcgtgcctgtaatcccagcactttgggaggctgagg

SEQ ID NO: 496030 - DNA, 201 bp, Homo sapiens
tgaaaatgttggttgtgacagtgagatatcatcttaccccagttaaaatgccttttatcagaaagacatttgacacagcaggcatgtgaaaaaaaaaaaarggatgctagcaaggatgcagagaaaggggaatgcttattatgcaccattggtgggcatgtaaatgagtatagttaaatagaaaacaatgtggacattcct

SEQ ID NO: 496031 - DNA, 201 bp, Homo sapiens
ttgatctcgccctgatatttctctccaaattcatctcttgccatttcttcttccctttaccccaccccctcccctgcacccaacccccaccccatacttawtctttttttttttttttgagacagagtcttgctctgttgcccaggctggagtgcagtggcacgatcttggctcactgcaacctctgcctcccgggttcaa

SEQ ID NO: 496032 - DNA, 201 bp, Homo sapiens
acagcttggagcagggcatttctagcctcatggagcgcctgcatgttatggagacgcagaagaaacaagaaagaaaggtaaccctcttgctgtggtatctstcttaggcaagctcctgagaaagctgggttttaagaattttaattgagatgaaggcagtgtgaagagatacaagaccctgttaaaggttagagttgtttt

SEQ ID NO: 496033 - DNA, 201 bp, Homo sapiens
ccacctgcctcggcctctctaagtgctgggattacaggtgtgagccaccacgcccgacctcctagaggcatcttaacagttatcagcacatttgtgtctayatcgctttcccccacggttttacccaaatggtagtatactagaaataaaacttgacaccttgctttttttcacttagtagtatatcttcgagctcattct

SEQ ID NO: 496034 - DNA, 201 bp, Homo sapiens; identical to SEQ ID NO: 386604

SEQ ID NO: 496035 - DNA, 201 bp, Homo sapiens
ctcctagaggcatcttaacagttatcagcacatttgtgtctatatcgctttcccccacggttttacccaaatggtagtatactagaaataaaacttgacaycttgctttttttcacttagtagtatatcttcgagctcattctatgtcagtagtacataaagactttcctaggtcttttttatggctgcatagtattccat

SEQ ID NO: 496036 - DNA, 201 bp, Homo sapiens
ttgagttcatgggagaacattaagatcgttttttttcccttttagctcggtaatctcatgtaccacaggtaatgaccaagcatctctgctagaggatgtamctctcataactcctgtgtaaaatgaggatcctgttggtgatcctcattccagtttccaaagcgagaggagccttctgagcagaagtatgcaagactgatt

SEQ ID NO: 496037 - DNA, 201 bp, Homo sapiens
atttgtgtctatatcgctttcccccacggttttacccaaatggtagtatactagaaataaaacttgacaccttgctttttttcacttagtagtatatcttmgagctcattctatgtcagtagtacataaagactttcctaggtcttttttatggctgcatagtattccattgtattccactgtatacatacatatatatgc

SEQ ID NO: 496038 - DNA, 201 bp, Homo sapiens
ggtggctcatgcctgtaattccagcactttgggaggccgaggcaggaagactgcttgagcccaggagttcaagaccagcctgggcaacataggaagactcygtctctacatagaaattttattataaaagtagctggggatggtggcacacacctgtagtcccagctactcaggaggttgaggtgggaagattgcttgagc

SEQ ID NO: 496039 - DNA, 201 bp, Homo sapiens
atatattagattttatatgttgtggaagagatggtagaaaagtatgtagtattttaagcacacttttatgatttaaatttcttggttaagttctctcattsatcataactcttgtgatttttgtgtggctccccaggttcgggtcaagtcacccagaactcaagtaggtagtgaataccgggagtcctggccccctaactc

SEQ ID NO: 496040 - DNA, 201 bp, Homo sapiens
gagtgagcgtcttgacaggacccggcttagccacggggctgctcggggcgcgcttggaggcggggaccttcgccttccccatcctgctgccgtccagcgcmtgggccggcggccacccgagaccccggcctccccgggcccggcgccctggcagcacaagcgcctgcccaggccaggccgaaacacacccaccgcagggac

SEQ ID NO: 496041 - DNA, 201 bp, Homo sapiens
atgcaaatgaggaaggcacacttgcttagttctgattggttaatacttgctgagttcagattggtcgatgcaggtcacagtcgatgggttgattctggcgrcataaacaggaacagatagctgtgaaaccatcccagagttaagtgagagtgggggctttccaggaacgcagaatgtgtgtgtgaccctagtcagcaaatg

SEQ ID NO: 496042 - DNA, 201 bp, Homo sapiens
cacacatatttcttatttgcaaaattgggatttagtttggatccctgaaaaaaaggaaaattgtgattatgctgtgcattgctttgttacctgctatttctttttcttttcttttcttttttttttttgagatgaagtttcgctcttgttgcccaggctggagggcaatgacgtgatctcagctcattgcaacctccacct

SEQ ID NO: 496043 - DNA, 201 bp, Homo sapiens
tgtctggggcttagtggcaacaggggcttagcctctgcagagacctagtgcgccgcctccttgccccagacctgcccgggcagagagccgtgtatgtgtcycagtgcacaggcgctgctgggccctgccaaaaggccacaagcccactgtcaccgttcacattgcttctcgcttcccggcccagccccgcccacacaggca

SEQ ID NO: 496044 - DNA, 201 bp, Homo sapiens
agctgtggccttggcactgctagacgctcggtggcctgtgtgcagctcgaccaaggccaggacgtggaggtggacgaggcggcctgtgcggcgctggtgcrgcccgaggccagtgtcccctgtctcattgccgactgcacctaccgctggcatgttggcacctggatggaggtgagcacagcgggcactcggaatccctat

SEQ ID NO: 496045 - DNA, 201 bp, Homo sapiens
gtttgactggggcaagccgaggacctccccaagatccgggatggggatgagagatgcgaacgccggaagggaactggggggccgctgtgtgtgtagcaccyggtagggcagctgagctgggggcactgggcggtggggctagtgagagccgggctaggtcgctcgcctgcgtcctggactctcgagcctttcccgccttgg

SEQ ID NO: 496046 - DNA, 201 bp, Homo sapiens
atctggcaaggagctgacctgggtacccagggtggaggtggtcttggcaagcagtgggtccttgtagagtttctccagaggagcctgtacccctcaccccracagactcaggtgtgaggacaggggaacctgatactgtttgattaaaagaactttttttccaaaagacgagcaagacacctttagcaggtagaaaataac

SEQ ID NO: 496047 - DNA, 201 bp, Homo sapiens
cagggtggaggtggtcttggcaagcagtgggtccttgtagagtttctccagaggagcctgtacccctcaccccgacagactcaggtgtgaggacaggggawcctgatactgtttgattaaaagaactttttttccaaaagacgagcaagacacctttagcaggtagaaaataacttctgtagaaaattcaggtaaagaaag

SEQ ID NO: 496048 - DNA, 201 bp, Homo sapiens
ctgtcaggcagctgctgcaggaggggtgggcaaaggcatcttcctctgggaaggactggcacaagcacttggtccctgggttgtgtgcctgggaggccggratcagggctggccctctttctccctggcaaagcaaaacctcccttttactactatcaaggggaagtaacttgaaggtaggaacccagcttgtgagccccc

SEQ ID NO: 496049 - DNA, 201 bp, Homo sapiens
ccacaaattatgtagctagtcctgggagggcccctgtgcccaaggactcctggctgagtgaggacaccaatcttaaacagttaccaaggacttccccatckattgtggctggagtcagactggagggcttcctggaggaagtggcctctaaactgaacccacagcagaagtggggctggtagggggaggggagatgaagga

SEQ ID NO: 496050 - DNA, 201 bp, Homo sapiens
gctaccccatagacactgtgcccaaaagagcagctcaaaggcagggctgcagtcctagttaatacccacttctaattatatgcaaattaaggggccagatkatgcagaaatttctagaaaaagggcagtaacttctaggttttcgtcatggaaaaggggcagtaacttctgggttttgccatggcaatggcaaactggtat

SEQ ID NO: 496051 - DNA, 201 bp, Homo sapiens
cagcctggcctctactacagcgccaacgagcagtgccgcgtggccttcggccccaaggctgtcgcctgcaccttcgccagggagcacctggtgagtctgcyggcggtggcctgggattggctgtgaggtccctccgcatcacccagctcacgtccccccaaacgtgcatggtgagaacctgctgggtgccgtgctaggctg

SEQ ID NO: 496052 - DNA, 201 bp, Homo sapiens
tcccaggttcaagcgattctcctgcctcagtctcctgagtagctgggactacaggtgcccgccaccacgcccggctaattttttgtatttttagtagaggmggggtttcaccgtgttagccaggatggccttgatctcctgacctcgtgatccgcctgcctcggcctcccaaagtgctgggattacaggtgtcactgcgcc

SEQ ID NO: 496053 - DNA, 201 bp, Homo sapiens
catattccactgcagggatagaccacattttcatccagtcgtctgctgatggacatctgaggtgttttcaccttttggctcctgtgaacagagccgctgcsaatgtgcttgtacatgtttgaatccctgttttcaattcttttggcagtatgctgaagagcggagttactggatcgtatgggaattgtatgtttgactttt

SEQ ID NO: 496054 - DNA, 201 bp, Homo sapiens
cacaggcgtgagccaccgcgcccagcatgtttggcttttaaagaaactgccaaaccgttttccacagtgcctgaactgtttcacattcccaccagcattgygccagggttccagtttccccacatccgctgcagcacttgctgttttctgttgttgttttttcttttctcttcttttttttttttttttttttaatagaga

SEQ ID NO: 496055 - DNA, 201 bp, Homo sapiens
agccagccctggagaccctcggacagggcagagtcataggggggttggcctactatccctccagcactgggcaaagtggttcaggctctggcatcccacaraccatggatgacatagtggccaggcctcgctggtagatcaggcactgacatcccatctctgagtctcaatttcccatctgtgaaatggagataatagcag

SEQ ID NO: 496056 - DNA, 201 bp, Homo sapiens
agaaacagggctatggcaggaggacagtgtgggtcaagggaaggttgttgattgtaatcaagagacaccagagtgtctgggcttggtggctcatgcctgtratcccagcactttgggaggccgaggcagtcagctcacctgaggtcaggagtttgagaccagcttggccaacatggcgaaaccccacctctactaaaaata

SEQ ID NO: 496057 - DNA, 201 bp, Homo sapiens
acacatatttcttatttgcaaaattgggatttagtttggatccctgaaaaaaaggaaaattgtgattatgctgtgcattgctttgttacctgctatttctttttcttttcttttcttttttttttttgagatgaagtttcgctcttgttgcccaggctggagggcaatgacgtgatctcagctcattgcaacctccacctc

SEQ ID NO: 496058 - DNA, 201 bp, Homo sapiens
cacatatttcttatttgcaaaattgggatttagtttggatccctgaaaaaaaggaaaattgtgattatgctgtgcattgctttgttacctgctatttctttttcttttcttttcttttttttttttgagatgaagtttcgctcttgttgcccaggctggagggcaatgacgtgatctcagctcattgcaacctccacctcc

SEQ ID NO: 496059 - DNA, 201 bp, Homo sapiens
acatatttcttatttgcaaaattgggatttagtttggatccctgaaaaaaaggaaaattgtgattatgctgtgcattgctttgttacctgctatttctttttcttttcttttcttttttttttttgagatgaagtttcgctcttgttgcccaggctggagggcaatgacgtgatctcagctcattgcaacctccacctcct

SEQ ID NO: 496060 - DNA, 201 bp, Homo sapiens
atatttcttatttgcaaaattgggatttagtttggatccctgaaaaaaaggaaaattgtgattatgctgtgcattgctttgttacctgctatttctttttcttttcttttcttttttttttttgagatgaagtttcgctcttgttgcccaggctggagggcaatgacgtgatctcagctcattgcaacctccacctcctgg

SEQ ID NO: 496061 - DNA, 201 bp, Homo sapiens
ctataaatacaagtctttttttttcctttttttttttttttgagacagagtctccctctctgctcactgcaggctccgcctgccagattcacaccattctsctgcctcagcctcccgagtagctgggactacaggcgcccgccaccacgcctggctaattttttgtatttttagtagagacggggtttcactgtgttagcc

SEQ ID NO: 496062 - DNA, 201 bp, Homo sapiens
tgagccaagatcgcgccattgccctccagcctgggcaacaagagcgaaactgtctcaaaaaaaaacaagaaagaaaaagaaattaaaacatttgcctcttragcttcaagtcagtgacaagttaagaaggaaaaaaagaaaaaagacacaaaaaacacatttccatgggcccccaaaagtgtgacaggacctggtcatggt

SEQ ID NO: 496063 - DNA, 201 bp, Homo sapiens
gaggccaaggcaggtggatcacctgaggtcaggggttcaagaccagcctggccaacatggtgaaatctcgtctctacagaaaatacaaaaattagccgggygtggtggtgggcgcctgtagtcccagctactcgggaagctgaggcaggagaatcacttgaacccaggaggtagagcttgcagtgagccgagattgggcca

SEQ ID NO: 496064 - DNA, 201 bp, Homo sapiens
ggatggtctggatctcctgacctcaggtgatctgcccgccttggcctcccaaactgttgggattacaggcatgagccaccgctcccggcctatgtttgactttttttttttcttatttttttctttctttctttatttttttttttttagagatggagtctcgctctgtcgcccaagctggagtgcggtggcgcgatctcg

SEQ ID NO: 496065 - DNA, 201 bp, Homo sapiens
ccgccttggcctcccaaactgttgggattacaggcatgagccaccgctcccggcctatgtttgactttttttttttcttatttttttctttctttctttatttttttttttttagagatggagtctcgctctgtcgcccaagctggagtgcggtggcgcgatctcggctcactctaagctccgcctcccaggttcacccca

SEQ ID NO: 496066 - DNA, 201 bp, Homo sapiens
gcggcagtgcaacaaccccaggtaccgcagggagggtgcttttctgtcagggagtgtggccataccatagtccctagttgaaggcagtggtcaccctgctstctcaccctcctgtctgctgggcattttcagacctgcctttggggggcgtgcatgtgttggtgctgacctccaggccgagatgtgcaacactcaggtagg

SEQ ID NO: 496067 - DNA, 201 bp, Homo sapiens
gattcagggagataatcggaaaatgccaagtgtgttccttggttcatgatactttttttgtgagacagagtcttgctctgtcgcccaggctggagtgcagkggcgtaatctcagctcactgtaacctccgcctctgggattcaagggattcttgcccctcagcctctcgaatagctgggactacaggcttgcactaccatg

SEQ ID NO: 496068 - DNA, 201 bp, Homo sapiens
ggctaggctggtttcaaactcctgacgtcaggtgatccgcctgcctcggcttcccaaagttctgggattacaggcatgaaccattgcgcccagccttggtycctaattcaataccattaattattagattagattaggatcgtgattaggattattgccttaggaggtgggatgtggggaagatagaaacccttgccccag

SEQ ID NO: 496069 - DNA, 201 bp, Homo sapiens
cgtgtgtggacattggcgatggccctggggcctacctgtcctatcggaaggctcctgggggcaggttggtgggtgctggccctgatggagctgcagtgccstctgcaggggagtggtgctggggaaaaggatctggacttggagtcagcctgggttaagggctgcagtgtgaccttgggcaagtcactgagccctctaagc

SEQ ID NO: 496070 - DNA, 201 bp, Homo sapiens
attgccatccatgccctggccaccaacatgggcgctgggaccgagggagccaatgccagctacatcttggtgaggcccagcatggggacttgtgctgtgaytctggacagctttccctagggcgtgcagggctaggggacccccttcagtttatttcagactaaaaccctcaaaatcattagtgaaagaatgggagaagat

SEQ ID NO: 496071 - DNA, 201 bp, Homo sapiens
ctttgggaggctgaggcgggtggatcacctgtagtcgggagatcacctacagcctggccagtatggtgaaaccccatctctactaaaaatacaaaaattasctgggcatgatggcgggcgcctgtagtcctagctactcaggaggctgaggcaggagaattgcttgaacccaggaggcagaggttgcagtgagccgagatc

SEQ ID NO: 496072 - DNA, 201 bp, Homo sapiens
attatgcagaaatttctagaaaaagggcagtaacttctaggttttcgtcatggaaaaggggcagtaacttctgggttttgccatggcaatggcaaactggyatggcacactggtgggcgtgtcttatggaaaggggcttcccacccctccctgttttagctagtcctctggtccagtgtccaagcggggcctccagagtgg

SEQ ID NO: 496073 - DNA, 201 bp, Homo sapiens
aaaaaaaaaaaaagtatggacgttgtgcattctgtggcagctaccctcttctctcctgctcaagaaatcccactgagagggacacaagtgaatgagagggwtggtagttacatttggaaaatctttgactttggtgtatatatgaggtcaaaaaccatttgcaaatgccagtgcttctatggagagcagagacttgagccc

SEQ ID NO: 496074 - DNA, 201 bp, Homo sapiens
atttttcccgaccagctaagatcagctccctttgtctgtggtgtggtggctgtgaggtccacgcatctctccttcttttcttctttctagaatatgtcacrtttctgacagttacccccaacctgaccagtgtctacattgccaaccacaggcctctcttcacacacttgggtgagttgactggaggactcccacccagtt

SEQ ID NO: 496075 - DNA, 201 bp, Homo sapiens
tttctggagtgtgtctgcacctaacctttgaagccttggttgccggcacttgccatggggtccctgagccctgagcctgttgagttctgtgcgtgagtgcrcttggtcatagcactcaccaggttgtggaaagaggcctagagcctccgctgtggggaagcctctagctcagatgcctgtggctccttagaggagggctgg

SEQ ID NO: 496076 - DNA, 201 bp, Homo sapiens
tagctcagatgcctgtggctccttagaggagggctggggaccccgggaaggagagtcactgacatgtgcctgtgaggaggatgggtgctcagctccacacrgctaacagggctggttccccgacagcggtgaggatcggagggcgctatgtcgtggctgggaagatgagcatctcccctaacaccacctacccctccctcc

SEQ ID NO: 496077 - DNA, 201 bp, Homo sapiens
gctccacacggctaacagggctggttccccgacagcggtgaggatcggagggcgctatgtcgtggctgggaagatgagcatctcccctaacaccacctacscctccctcctggaggatggtcgtgtcgagtacagagtggccctcaccgaggaccggctgccccgcctggaggagatccgcatctggggacccctccagga

SEQ ID NO: 496078 - DNA, 201 bp, Homo sapiens
cgaccctacgggcctcagctctggctccagaagcactttctgtgctggccctgccctagcccttcttgggctccttagcccagcctaaggtgggcctgcctcctccactgcactttatcctctacccagccagcttagggaaccttctctgtgctgcccaaataccctatcatgtaacccaccaatgacttggtaattacc

SEQ ID NO: 496079 - DNA, 201 bp, Homo sapiens
cccacagagcccctgaagcgtcccgcctccctccctgagtgccactttgccctccagagcgcatctctgcagggagaacctccccactaggaatacagtgygctgctgcatgcctgcaaaggaattttttaaatattatttttatttttttagacagagtctctccctgtcacccagactggagtgcagtggtgctatctc

SEQ ID NO: 496080 - DNA, 201 bp, Homo sapiens
ttaatagagatggggttttgtcatgttggccaggctggtcttgaactccgaccccaggtgatccgcccaccttagcctcccaaagtgctgggattacacgygtgagccatggcgcccggcctgttttctgttttttgattttggccatctcggtggtatgaaatggtagaaagattctttttacattgagttaaattctat

SEQ ID NO: 496081 - DNA, 201 bp, Homo sapiens
cggaaaatgccaagtgtgttccttggttcatgatactttttttgtgagacagagtcttgctctgtcgcccaggctggagtgcaggggcgtaatctcagctyactgtaacctccgcctctgggattcaagggattcttgcccctcagcctctcgaatagctgggactacaggcttgcactaccatgccggctaatttttttg

SEQ ID NO: 496082 - DNA, 201 bp, Homo sapiens
aagccgcggaaggcacgggtccaagaggcagcgctgcagggtcatgggggagcacagtattgcgatgaagatcccagctcccttgcaggctgcctgggttygtgtctgggctctgaagaatgcgggccataattagttattgattgattacagatcaacatgggcagccttcccttgcccaagggaagggaactcggcctt

SEQ ID NO: 496083 - DNA, 201 bp, Homo sapiens
gagggatggtagttacatttggaaaatctttgactttggtgtatatatgaggtcaaaaaccatttgcaaatgccagtgcttctatggagagcagagacttsagccctgcctccctctggcttgccccactgtgctggagaaccttggacccggtcccttctcccagccagggcagagccttggcaggtggtcctccagcct

SEQ ID NO: 496084 - DNA, 201 bp, Homo sapiens
agacctagcctctctctggggtcttctcttcctgcaggtggaaagtcatgtcccttggcccatgttcggccagctgtggccttggcactgctagacgctcrgtggcctgtgtgcagctcgaccaaggccaggacgtggaggtggacgaggcggcctgtgcggcgctggtgcggcccgaggccagtgtcccctgtctcattg

SEQ ID NO: 496085 - DNA, 201 bp, Homo sapiens
tgagtgggagttgagagtttttcctggggtttgagtgcaaagacatgattgactaattggccaggtggatactctcagtctcttggtgacccagcccctaycctaaatcacatagttggtctttctggtacagccagcccctgccctaaaggaggacacttctgcctggtgtgacccgtgtttcctcttggaagccaacag

SEQ ID NO: 496086 - DNA, 201 bp, Homo sapiens
tgtctctggggagacctagcctctctctggggtcttctcttcctgcaggtggaaagtcatgtcccttggcccatgttcggccagctgtggccttggcactrctagacgctcggtggcctgtgtgcagctcgaccaaggccaggacgtggaggtggacgaggcggcctgtgcggcgctggtgcggcccgaggccagtgtccc

SEQ ID NO: 496087 - DNA, 201 bp, Homo sapiens
gcggtcacttacaggggacccactatgtgttgggccctgtgctaggcaaaatgtagctagctcctccaggggcttagggtcccacaaatatccaaatgtgyctgtgcccagagcccgtgggagaaggccctgcagttctgggatcaggtaaggttggagggcccaatgcaggggtccagggctccctgggaaagagtgatg

SEQ ID NO: 496088 - DNA, 201 bp, Homo sapiens
tgagaaaccgcaccgtaaccaacacaggcttgcggcactggccagatgtgggcatcgagggggcaggtgcggaatgtcacctcgccctgggctctggcctycaggctggcctctttcttgggctggtcttgggcacaggacccagttaccctcctgaagagccttaggcccaggaacctgctgaagttcttcctagtgctc

SEQ ID NO: 496089 - DNA, 201 bp, Homo sapiens
tccttagcccagcctaaggtgggcctgcctcctccactgcactttatcctctacccagccagcttagggaaccttctctgtgctgcccaaataccctatcrtgtaacccaccaatgacttggtaattacctccccgagccctctatcccaacccactgagagctccttgcagctcagccagtgtcctgtgcactgtgctat

SEQ ID NO: 496090 - DNA, 201 bp, Homo sapiens
gtttgactttttttttttcttatttttttctttctttctttatttttttttttttagagatggagtctcgctctgtcgcccaagctggagtgcggtggcgygatctcggctcactctaagctccgcctcccaggttcaccccattctcctgcctcagcttcccgaatagctgggactacagacgcccgccaccacgcccgg

SEQ ID NO: 496091 - DNA, 201 bp, Homo sapiens
cgccgctggcactccagcctgggctacagagcgagactccgtctcaaaaacaaaacaacaaaacaaaacaagacggggtggggggctcagtggcccaagarccagtctgtaaggaatagggctacctggcaggctgtgctagttgtgggaggtgaagtttaagcaccatgcaggcagggtgcagtgtggggaggcctgggg

SEQ ID NO: 496092 - DNA, 201 bp, Homo sapiens
tcggctcactctaagctccgcctcccaggttcaccccattctcctgcctcagcttcccgaatagctgggactacagacgcccgccaccacgcccggctaatttttttttgtatttttagtagaggcggggtttcaccatgttagccgggatggtcttgatctcctgacctcgtgatctgcctgcctcggcctcccaaaggg

SEQ ID NO: 496093 - DNA, 201 bp, Homo sapiens
ttttctatatcatacagaaacgtccagaaaagaatgtaacagacatgtatgttccagcactccagtttaatagatagcatcctactgccatgtttccttcmtgtccacttacttttatttatttaatttatttattttgagacggagtctcgctttgttgcccaggcagtgatgcaatcttggctcactgcaacctccgcc

SEQ ID NO: 496094 - DNA, 201 bp, Homo sapiens
ctgctgggactgtggtgcctcagtaatggtcactcactgtagccgtgctgcaaaaaaaacacagacattggccgggcgctgtgctcacgcctgtactcccrgcactttgggaggctgaggcgggtggatcacctgtagtcgggagatcacctacagcctggccagtatggtgaaaccccatctctactaaaaatacaaaaa

SEQ ID NO: 496095 - DNA, 201 bp, Homo sapiens
gctctttgggccctggggtgaaatcgtgagcccctcgctgagtccagccacgagtaatgcagggggctgccggctcttcattaatgtggctccgcacgcayggattgccatccatgccctggccaccaacatgggcgctgggaccgagggagccaatgccagctacatcttggtgaggcccagcatggggacttgtgctgt

SEQ ID NO: 496096 - DNA, 201 bp, Homo sapiens
gtctgctcacctcagcctcctaaagtgctgagctaccgtgcctggccagggataggttctgtctctgcaccctgggtgcaggtggggtgcctgactgttgmgcagcgagtgcttgttgaatgggaacctgctggctgatgaatggggaacccggtgcttcagggagagaccctgagcttcacttctctgtggggctcctct

SEQ ID NO: 496097 - DNA, 201 bp, Homo sapiens
ggctgaggcaggagaattgcttgaacccaggaggcagaggttgcagtgagccgagatccctctgcactccagcccgggcaacagagtgagacactgtctcaaaaaaaaaaaaaaaaaaagtatggacgttgtgcattctgtggcagctaccctcttctctcctgctcaagaaatcccactgagagggacacaagtgaatga

SEQ ID NO: 496098 - DNA, 201 bp, Homo sapiens
cgtgctccgtctcctgcgggcgaggtgagggcccccgggatgctcctggggaccagcactcatggtaactctcctgtccacttgcatcttgcctcgttctraaaagcatttgaggtggattgcagaaaatccagactatatgggaacacgtggtaatacacaaggagactaagcatagtagctgacagccacttcaaatgt

SEQ ID NO: 496099 - DNA, 201 bp, Homo sapiens
gaagaccagcctgggcaacaaagtgaaaccccatctgtattagttcattgtgcactgctataaaggaatacctgtgtttggtaatttataaagaaaaaacrtttatgtagctcatggttttgcaggttgtacaagaagcatggtgccagcatctgcttctggtgaggccgaaggaagcttcccatcatggtgtaaggtgaa

SEQ ID NO: 496100 - DNA, 201 bp, Homo sapiens
ggccacccgagaccccggcctccccgggcccggcgccctggcagcacaagcgcctgcccaggccaggccgaaacacacccaccgcagggaccccgtccagkaaaagactccggaagagaccccgcacgcgttgcgcatacctcagcacgcacgctccagtccccggaagcgctcgtctctccacaaccggctggaaaccgg

SEQ ID NO: 496101 - DNA, 201 bp, Homo sapiens
tgagaagacacaccatgttcttaaacgaaaaccctgaccacttgctcagtaaaatgtcagcctgtttaaaaccgagaccaaaaagagatttctttttctcycttttcttttttgagacaaaaaagaaaacctctgtcaccaggttggagtgtagtggcacaatcttagctcactacaacctccaccacctgggctgaagcc

SEQ ID NO: 496102 - DNA, 201 bp, Homo sapiens
ggaacacgtggtaatacacaaggagactaagcatagtagctgacagccacttcaaatgtgggtgttgattggctgaaaggtaggaaaagacaataacgccyggcagtgtggcacgagagccattccttatggtcctagcagagcggccggggggtccccaattgatgacccgagcagagaaaccttagctttaagatacac

SEQ ID NO: 496103 - DNA, 201 bp, Homo sapiens
ctggctaattttttgtattttattttatcagagagggggtttcgccatgatggccacgctggtctcaaactcctgacctcaggtgatccacccgccttggcctcccaaagtgctgggattacaggcatgagccactgagcctatttcttttgaggatattcctaaaagagagacttgagaaaactggccctaataacatct

SEQ ID NO: 496104 - DNA, 201 bp, Homo sapiens
ggatattcctaaaagagagacttgagaaaactggccctaataacatctttatgatagacacaatcagagattttcatattgtgatttttttttcttttttytttttttgagatggagtctcgctctgtcacccaggctggagtccagtggcgcagtcttggctcactgcaacctctgcctcctgggttcaagtgattctcc

SEQ ID NO: 496105 - DNA, 201 bp, Homo sapiens
cttgctcagtaaaatgtcagcctgtttaaaaccgagaccaaaaagagatttctttttctctcttttcttttttgagacaaaaaagaaaacctctgtcaccrggttggagtgtagtggcacaatcttagctcactacaacctccaccacctgggctgaagccatcctcccccctcagcctcctgaatagctactataccctg

SEQ ID NO: 496106 - DNA, 201 bp, Homo sapiens
cccaggcagcagtgagctatgatcctaacaggaggtagctccaagggagctccaagggatgtggtaagaatgtatgagtgacgcacgtggaagagtgtctrggagagagcaggcaacctctacagaagtgcaggtcactagggagacagcaggtacaacacagccttaaaagcatggactccagagtcagccacctggttc

SEQ ID NO: 496107 - DNA, 201 bp, Homo sapiens
gcaggagaatcacctgaaccttgggaggtcaaggctgcagtgagcagagatcacaccaccactgcatgccagcctgggcaacagcatgagaccctgtctcaaaaaaaaaaaaaaaaaaaaaaagattttacttaaatttaaaccctgtactaatctgtgatttatttggagtatgttgcaaagtagggaccaaaggatttt

SEQ ID NO: 496108 - DNA, 201 bp, Homo sapiens
cctcccatgttcaaacgattctcatgcctcagcctcctgagcagctgggactccagctatgtgccaccacacctggctaattttttgtattttattttatyagagagggggtttcgccatgatggccacgctggtctcaaactcctgacctcaggtgatccacccgccttggcctcccaaagtgctgggattacaggcatg

SEQ ID NO: 496109 - DNA, 201 bp, Homo sapiens
tctcctggatgggacagaatgtggcgtggagaaggtcagagccaagagtgaatgagtgggctcctgtgagcacgtgcacgtgggtgcctccagccaggccrccctattcctaggtcaggaggcaggaccagtatggggcagagagtcttggagttggccttggggactgtcctttgggttggtggtctgacctctttcctt

SEQ ID NO: 496110 - DNA, 201 bp, Homo sapiens
ctgggagccggcgggaggtctgccaggctgtcccgtgccctgctcggtgagtgaggggagcaagactgtgtgctggccttctccctgtaagtgggagaccygagccttggctccatgcccggtgacctgcggaggggggcaggtgctgctggctgtgcactgtgtgaggctggaccatggccgccccatccccctgcctca

SEQ ID NO: 496111 - DNA, 201 bp, Homo sapiens
atctggacttggagtcagcctgggttaagggctgcagtgtgaccttgggcaagtcactgagccctctaagcttgcttcctgtgtagatggtggggtgctayagaagtgttgctggttttgtggatcccagaatctcagagctggcagggctgcagagtcattgaggccagcaccctccagtgacacgggccctctgtcctt

SEQ ID NO: 496112 - DNA, 201 bp, Homo sapiens
ctcgatgcaacgcgtgtaaagtacattgcacaggatctgggatgctgtgggtgcacatggttgctggtgcgtttcttcatcgcctgctctttatggagcamctaggccccggggccgtcctggagctaggggacacagcagagaacaaggcagacaaatgtccctgacctcctggagcaaatgcagggggaaagggggaca

SEQ ID NO: 496113 - DNA, 201 bp, Homo sapiens
catggactccagagtcagccacctggttcccagccgcaatcttagatgatctatttaaacttttccagcctatttcctcatctgtacaatagcgatgatgraagtgtccacctcacagtcttattgtggggattgcaacacgcatggcatagagcacatggcagagtgcacatttttaggagctcaattagtatttacttc

SEQ ID NO: 496114 - DNA, 201 bp, Homo sapiens
caattcgaactttttccaatcttaggtatctactttagagtcttctccaatgtccaaaaggctagggggttggaggtggggactctggaaaagcagccccyatttcctcgggtaccaataaataaaacatgcaggctgaccggcgtttttttcttataagctgtccagacctggcttgaaaacccatcccatggcaaggca

SEQ ID NO: 496115 - DNA, 201 bp, Homo sapiens
cactcagcatgatgtcctcacagttcatccatgttgtagcatgtgtgagtgtttccttcttaaggctgaaaaagattccattgtgagtgtatcctttacakgtttatccatttattcatcagtggacacttggcttccttccacactttggctattgtgaataatgcttctgtgaacatgggtgtgcaaatatctgtttga

SEQ ID NO: 496116 - DNA, 201 bp, Homo sapiens
gtggctgcactttccatcttgcctggccacggaagctgtctaggcaactgtccgagtacacgtgggtggagaggggcctgcgtggggcagtactgtctctrgggagacctagcctctctctggggtcttctcttcctgcaggtggaaagtcatgtcccttggcccatgttcggccagctgtggccttggcactgctagacg

SEQ ID NO: 496117 - DNA, 201 bp, Homo sapiens
tctgaaactcctgggctcaagtgatctgcctgcctcaggctcccaaagttttgggtttacaggcatgagctaccgtgcctggccagtgattgcttgctgarcgaaagattatagggatgcaagaagaagttggaaggcttcccaggggaggtggccatgacagtgaccctcagggaacccactggacaaggcctgaagctc

SEQ ID NO: 496118 - DNA, 201 bp, Homo sapiens
gggctcagtggctgcactttccatcttgcctggccacggaagctgtctaggcaactgtccgagtacacgtgggtggagaggggcctgcgtggggcagtacygtctctggggagacctagcctctctctggggtcttctcttcctgcaggtggaaagtcatgtcccttggcccatgttcggccagctgtggccttggcactg

SEQ ID NO: 496119 - DNA, 201 bp, Homo sapiens
ggtgcaggtggggtgcctgactgttgagcagcgagtgcttgttgaatgggaacctgctggctgatgaatggggaacccggtgcttcagggagagaccctgwgcttcacttctctgtggggctcctctttgggctcctggatgttggggagcaggtccccttcctccctgcccctagcagctgggctataccttcccctggg

SEQ ID NO: 496120 - DNA, 201 bp, Homo sapiens
agacggagtctcgctttgttgcccaggcagtgatgcaatcttggctcactgcaacctccgcctcccgggttcaagccattctcctgtctcagcctcccaartagctgggaatacaggcacccacaaccacacccagctaacttttgtatttttagtagagacagggtttcaccatattggtcaggccgatcttgaactcct

SEQ ID NO: 496121 - DNA, 201 bp, Homo sapiens
gggttcccaggccctggggctgtttggggtccctgactccagtttgctccaggtggcagtacaagctggcggcctgcagcgtgagctgtgggagaggggtygtgcggaggatcctgtattgtgcccgggcccatggggaggacgatggtgaggagatcctgttggacacccagtgccaggggctgcctcgcccggaacccc

SEQ ID NO: 496122 - DNA, 201 bp, Homo sapiens
tattccccacagctggatgccacctctgcaggggagaaggctccctccccatggggcagcatcaggacgggggctcaagctgcacacgtgtggacccctgyggcagggtcgtgctccgtctcctgcgggcgaggtgagggcccccgggatgctcctggggaccagcactcatggtaactctcctgtccacttgcatcttgc

SEQ ID NO: 496123 - DNA, 201 bp, Homo sapiens
tcggctcaccacaatctccacctcccgggttcaagcgattctcctgcctcagcctcctgggtagctggaactacaggtgcacgccaccatgcccagctaattttttttttttttttgagacgaagttatgctcttgtcgcccaggctggagtgcaatggcgcaatctcggctcaccgcaacctccacctcccgggttcaag

SEQ ID NO: 496124 - DNA, 201 bp, Homo sapiens
gtctcccagtgacaacacccgccccccgccccaccgccatccccctcctctgcctcctcctggccaggcctgcgagaagacccagctggagttcatgtcgsaacagtgcgccaggaccgacggccagccgctgcgctcctcccctggcggcgcctccttctaccactggggtgctgctgtaccacacagccaaggtggggc

SEQ ID NO: 496125 - DNA, 201 bp, Homo sapiens
ccccaggccagcctgggacctggccagggtcccgacgctctgtctccttcctcagctgggcggtgggagacttcggcccatgcagcgcctcctgtgggggyggcctgcgggagcggccagtgcgctgcgtggaggcccagggcagcctcctgaagacattgcccccagcccggtgcagagcaggggcccagcagccagctg

SEQ ID NO: 496126 - DNA, 201 bp, Homo sapiens
gccaggcatggtggcgtgtgcctgtaatcccagctacttgggaggctgaggcacaagaatcacttgaacccgggaggtggaggttgcactaagcccagatmgcaccactgcactccagcctgggcaacagagtgagactctgtctcaaaaaaaaaaaaaaaaaaaaaaaaaaaaagcgaaatggtaaagaatggtaaagac

SEQ ID NO: 496127 - DNA, 201 bp, Homo sapiens
aaggcaggacagacaagggtaaatggggttcaggctgccccctggaggggctcgctcatggtgtggagggggcataggggcacagcagacagagatgagcygcagccccgcagacctgcttgctctaaggcttggagggacagagaggccgtgagggtgacagggacccagacttgaattatggctcctcccacctatatg

SEQ ID NO: 496128 - DNA, 201 bp, Homo sapiens
ctgatgactgtctcatgccatcctcaggtgggaggtgtcagagcccagctcatgcacatcagctggtggagcaggcctggccttggagaacgagacctgtrtgccaggggcagatggcctggaggctccagtgactgaggggcctggctccgtagatgagaagctgcctgcccctgagccctgtgtcgggatgtcatgtcc

SEQ ID NO: 496129 - DNA, 201 bp, Homo sapiens
ttgcagtataacacagatattataaaatttaccatccaaactgtttctccctgtgcaggtcagtggcataaaagcacagtcacattgttgtgcggccatcrccaccaacctctccagaacttttccagtttcgcaaactggagctctgtccctgtgaaacacgaactcccatttccccctccgcagcccctggcaacctcc

SEQ ID NO: 496130 - DNA, 201 bp, Homo sapiens
ggtgccgtgctaggctgaggtactaagccagggcggcttagtttaatgctgtctgtgccctctagaaattatttaaaatgtttgaacaaaagctccaacakttttgtttgactgggccccacaaattatgtagctagtcctgggagggcccctgtgcccaaggactcctggctgagtgaggacaccaatcttaaacagtta

SEQ ID NO: 496131 - DNA, 201 bp, Homo sapiens
gtgcacctggtgaagatggtcattctgacagagcctgaggtaggcatggagctggaactcagcacaccatacagagcgggaagcccaagtcatcgcatctycatcctctttaacctcttgtcccggatgccccaagcagcatggatcacagaatgcattcagccagacagaccagctgccctcccagctctacccagcact

SEQ ID NO: 496132 - DNA, 201 bp, Homo sapiens
ccctggcttccagaggcagaggcagaggcagaggcgggctgcaggcggcatcctacacctggagctgctggtggccgtgggccccgatgtcttccaggctsaccaggaggacacagagcgctatgtgctcaccaacctcaacatcgtgagtgccccacgctggactgtgcaggtccccacggccagggctggtgaccaatg

SEQ ID NO: 496133 - DNA, 201 bp, Homo sapiens
cagggcaggcacgtgccttggcaccacccaagtgactgttttctctcaccgaggtttgacctggagttgcctgatggtaaccggcaggtgcggggcgtcayccagctgggcggtgcctgctccccaacctggagctgcctcattaccgaggacactggcttcgacctgggagtcaccattgcccatgagattgggcacagg

SEQ ID NO: 496134 - DNA, 201 bp, Homo sapiens
tggagggttgacccctggtctcagtgctttccaattcgaactttttccaatcttaggtatctactttagagtcttctccaatgtccaaaaggctagggggytggaggtggggactctggaaaagcagcccccatttcctcgggtaccaataaataaaacatgcaggctgaccggcgtttttttcttataagctgtccagac

SEQ ID NO: 496135 - DNA, 201 bp, Homo sapiens
cgacggcgcgcccggcagcggctgcggccccagcggacacgtgatggcttcggaacggcgccgccccgcgccggcctcgcctggtccccctgcagccgccsgcagctgctgagcctgctcaggtagcggccgccccgtgggaggggcgcgcgagcctccagtccagcccgctgggcgcgccagcgccacctctctctacgt

SEQ ID NO: 496136 - DNA, 201 bp, Homo sapiens
tggtgctccaagggtcgctgccgctccctggtggagctgacccccatagcagcagtgcatgggcgctggtctagctggggtccccgaagtccttgctcccrctcctgcggaggaggtgtggtcaccaggaggcggcagtgcaacaaccccaggtaccgcagggagggtgcttttctgtcagggagtgtggccataccatag

SEQ ID NO: 496137 - DNA, 201 bp, Homo sapiens
ccagctggagttcatgtcgcaacagtgcgccaggaccgacggccagccgctgcgctcctcccctggcggcgcctccttctaccactggggtgctgctgtaycacacagccaaggtggggcctgcggagtgtggggttgggggaggagccagccctggagaccctcggacagggcagagtcataggggggttggcctactat

SEQ ID NO: 496138 - DNA, 201 bp, Homo sapiens
tctgccctcccaggggatgctctgtgcagacacatgtgccgggccattggcgagagcttcatcatgaagcgtggagacagcttcctcgatgggacccggtrtatgccaagtggcccccgggaggacgggaccctgagcctgtgtgtgtcgggcagctgcagggtaggcgtgtgtggacattggcgatggccctggggccta

SEQ ID NO: 496139 - DNA, 201 bp, Homo sapiens
catcatgaagcgtggagacagcttcctcgatgggacccggtgtatgccaagtggcccccgggaggacgggaccctgagcctgtgtgtgtcgggcagctgcrgggtaggcgtgtgtggacattggcgatggccctggggcctacctgtcctatcggaaggctcctgggggcaggttggtgggtgctggccctgatggagctg

SEQ ID NO: 496140 - DNA, 201 bp, Homo sapiens
cctgtgcatggactctgccctcagggtgcctgtccaggaagagctgtgtggcctggcaagcaagcctgggagccggcgggaggtctgccaggctgtcccgkgccctgctcggtgagtgaggggagcaagactgtgtgctggccttctccctgtaagtgggagacccgagccttggctccatgcccggtgacctgcggaggg

SEQ ID NO: 496141 - DNA, 201 bp, Homo sapiens
ctccagggcggtggtgctgggatcactgttgaagacagacatgcagggcccttgggtgcccggacccctgcccccactgtctctgggatacgacatctgtsgtttgccctcacctttctcttctgtaaaatgggtttgtccaaatgttctgtccactctgccaagcctcttggtgaggacacaagggggcctccagaaaga

SEQ ID NO: 496142 - DNA, 201 bp, Homo sapiens
ccccgccccgcccggttcccacacatgctggtggagtagcctctccagctcttcacactccgggggcccctgggagtcagcagctgcctggggctggcaaygcccacccgacgggttacctctctcatctgcccttgcacagggggcagaactgcttcgggacccgtccctgggggctcagtttcgggtgcacctggtgaa

SEQ ID NO: 496143 - DNA, 201 bp, Homo sapiens
gccgagctttctgatgggtgctggccagccagcctgggaaggctgctccctcagcctcctgccctctgcaaaggtgaccccagggcaggcacgtgccttgrcaccacccaagtgactgttttctctcaccgaggtttgacctggagttgcctgatggtaaccggcaggtgcggggcgtcacccagctgggcggtgcctgct

SEQ ID NO: 496144 - DNA, 201 bp, Homo sapiens
agaaattgggcataagacaatatgaggggtggtctcctcccttacttctgcctcctgggttcaagcgattctcctgcctcagcctcctgagtagctgggaytataggtgcacgccaccactctctgccaatttttgtatttttagtagacctggggtttcgccacgttggccaggctgtcttgaactcctgacctccagtg

SEQ ID NO: 496145 - DNA, 201 bp, Homo sapiens
tgtggattttatttctgccttttagtttttacttctttatttggaagcagaaattgggcataagacaatatgaggggtggtctcctcccttacttctgcckcctgggttcaagcgattctcctgcctcagcctcctgagtagctgggattataggtgcacgccaccactctctgccaatttttgtatttttagtagacctg

SEQ ID NO: 496146 - DNA, 201 bp, Homo sapiens
gccaagatgccctcacttctgacatcacccgcaagttcagggggttccccaaaccaccctcaggcttgatagttgactaggaagactcccagagctcactsagagctgtggcacatggctgcggctccttccagaagaacacaggttagaattgtccaagggaagagatgtaggcagagtctgggagggtccaaccaggag

SEQ ID NO: 496147 - DNA, 201 bp, Homo sapiens
gatgtcccctcgttctggaacaatatcaccatttgtcctttccttggttcctttcttattgtgctctgttccactggccttggtgcgaggtactggcgccytcctgtccatcttggaacctgaaggaacagagcccctgctggcctcctggtcttttcctgccggcatctcctctcccttcacttgaggcgaggtctcttt

SEQ ID NO: 496148 - DNA, 201 bp, Homo sapiens
ttaatgctgtctgtgccctctagaaattatttaaaatgtttgaacaaaagctccaacatttttgtttgactgggccccacaaattatgtagctagtcctgsgagggcccctgtgcccaaggactcctggctgagtgaggacaccaatcttaaacagttaccaaggacttccccatctattgtggctggagtcagactggag

SEQ ID NO: 496149 - DNA, 201 bp, Homo sapiens
actgcttacctgtctcctgctcccttttcaggtgcctgtggcaggcagcaccttgagccaacaggaaccattgacatgcgaggcccagggcaggcagactrtgcagtggccattgggcggcccctcggggaggtggtgaccctccgcgtccttgagagttctctcaactgcagtgcgggtatgtctagggccatgcaagcg

SEQ ID NO: 496150 - DNA, 201 bp, Homo sapiens
gaaccctggggctgcccacgggaatttgactggtcctgtgtgttaagacaggaatgtctgcactgagatactgtgcagagtattaggaggttcaagaagcrctcggggaggctgaggtgggaggattgcttgaggtcaggagttgaagaccagcctgggcaacaaagtgaaaccccatctgtattagttcattgtgcactg

SEQ ID NO: 496151 - DNA, 201 bp, Homo sapiens
ctgtcgcctgcaccttcgccagggagcacctggtgagtctgccggcggtggcctgggattggctgtgaggtccctccgcatcacccagctcacgtcccccmaaacgtgcatggtgagaacctgctgggtgccgtgctaggctgaggtactaagccagggcggcttagtttaatgctgtctgtgccctctagaaattattta

SEQ ID NO: 496152 - DNA, 201 bp, Homo sapiens
tggcgtggagaaggtcagagccaagagtgaatgagtgggctcctgtgagcacgtgcacgtgggtgcctccagccaggccgccctattcctaggtcaggagrcaggaccagtatggggcagagagtcttggagttggccttggggactgtcctttgggttggtggtctgacctctttcctttagcatttgctcccatgcaga

SEQ ID NO: 496153 - DNA, 201 bp, Homo sapiens
ggagagtcactgacatgtgcctgtgaggaggatgggtgctcagctccacacggctaacagggctggttccccgacagcggtgaggatcggagggcgctatrtcgtggctgggaagatgagcatctcccctaacaccacctacccctccctcctggaggatggtcgtgtcgagtacagagtggccctcaccgaggaccggct

SEQ ID NO: 496154 - DNA, 201 bp, Homo sapiens
gtcactagggagacagcaggtacaacacagccttaaaagcatggactccagagtcagccacctggttcccagccgcaatcttagatgatctatttaaactyttccagcctatttcctcatctgtacaatagcgatgatggaagtgtccacctcacagtcttattgtggggattgcaacacgcatggcatagagcacatggc

SEQ ID NO: 496155 - DNA, 201 bp, Homo sapiens
ccctgtgtcgggatgtcatgtcctccaggctggggccatgtgagtgccctgggcatgagggtggctggggctgttgagtcctttacctggctgggagaacraggagcacccattgccaccgtcctccaggccagagcaagaacaccatccttctgtgggaatgctgtctgagggccacccctgctcagaaaagaagcttag

SEQ ID NO: 496156 - DNA, 201 bp, Homo sapiens
gtgactgtatacagcacagcatagccccttttgaagccaggctaccccatagacactgtgcccaaaagagcagctcaaaggcagggctgcagtcctagttaatacccacttctaattatatgcaaattaaggggccagattatgcagaaatttctagaaaaagggcagtaacttctaggttttcgtcatggaaaaggggca

SEQ ID NO: 496157 - DNA, 201 bp, Homo sapiens
agcaggtgctctactgggagtcagagagcagccaggctgagatggagttcagcgagggcttcctgaaggctcaggccagcctgcggggccagtactggacmctccaatcatgggtaccggagatgcaggaccctcagtcctggaagggaaaggaaggaacctgagggtcattgaacatttgttccgtgtctggccagccct

SEQ ID NO: 496158 - DNA, 201 bp, Homo sapiens
cttaaaagcatggactccagagtcagccacctggttcccagccgcaatcttagatgatctatttaaacttttccagcctatttcctcatctgtacaatagmgatgatggaagtgtccacctcacagtcttattgtggggattgcaacacgcatggcatagagcacatggcagagtgcacatttttaggagctcaattagta

SEQ ID NO: 496159 - DNA, 201 bp, Homo sapiens
ttagatgatctatttaaacttttccagcctatttcctcatctgtacaatagcgatgatggaagtgtccacctcacagtcttattgtggggattgcaacacrcatggcatagagcacatggcagagtgcacatttttaggagctcaattagtatttacttcaagaccgtaagtgtcgctagaaccccatcacatgtctgcta

SEQ ID NO: 496160 - DNA, 201 bp, Homo sapiens
gggacttgggccgccgccttagccagcggcatccggggtcatcgacctcgagtttgactggggcaagccgaggacctccccaagatccgggatggggatgrgagatgcgaacgccggaagggaactggggggccgctgtgtgtgtagcacccggtagggcagctgagctgggggcactgggcggtggggctagtgagagcc

SEQ ID NO: 496161 - DNA, 201 bp, Homo sapiens
ttgggtgtggccatttatcatctcaataaatgtctgcggggagcagggtgaagtatgggggtggagccatgagctccttttcacacttgctgagtttgaaygggccgtcagtcaccaaggagagacgtctaatcagcagcaggatataagattcctaagcttagggaagggtcagtgctggagatgtaatttggaaatcgt

SEQ ID NO: 496162 - DNA, 201 bp, Homo sapiens
ccagatagcaggtgctgggggctctccaggggcgaagcagcagaggaggctgagggggagcagtcagtgcagtgggaggagaagcggatgtgagtggcatyagagaatccagggggagaataaaccacatcagatgctgctgagaggctgagaaggacgaggacagagagatgggaaccagatatggcactgagattgtca

SEQ ID NO: 496163 - DNA, 201 bp, Homo sapiens
ggttccccgacagcggtgaggatcggagggcgctatgtcgtggctgggaagatgagcatctcccctaacaccacctacccctccctcctggaggatggtcrtgtcgagtacagagtggccctcaccgaggaccggctgccccgcctggaggagatccgcatctggggacccctccaggaagatgctgacatccaggtcagc

SEQ ID NO: 496164 - DNA, 201 bp, Homo sapiens
gcagaggggcagaaactaacgatgcaggaggagagagctgggaagggatccagagccagggcctggcaggaagtgtaggtgtgtcctccctgatcgcagargaggagagaggctgcactttgaggggtggaaagacaaggtgaatccccctgctggtcatcagcttgtgcggctctgtgggtgtaaaagagtggtttggag

SEQ ID NO: 496165 - DNA, 201 bp, Homo sapiens
agggcgctatgtcgtggctgggaagatgagcatctcccctaacaccacctacccctccctcctggaggatggtcgtgtcgagtacagagtggccctcaccraggaccggctgccccgcctggaggagatccgcatctggggacccctccaggaagatgctgacatccaggtcagcaggagagcctgggggaggccagtggg

SEQ ID NO: 496166 - DNA, 201 bp, Homo sapiens
agagttgagccagaaccacgatgtctttggcacagcctctcatctgtcagatgggagcggggaccccggagagggagtcagccgaggtcctggcattcctygtgaacccccgtctgtgggtttctggtccagtgtcccttctccagattagatggcttaggcctcctctaagggggtgggcgtgcacatccggagagctgt

SEQ ID NO: 496167 - DNA, 201 bp, Homo sapiens
gccccgcctggaggagatccgcatctggggacccctccaggaagatgctgacatccaggtcagcaggagagcctgggggaggccagtgggggcttcttctygggggctatggctgcttgctcgtttgtctatccatccattccctgattcgttcatttattcattcagcggtcacttacaggggacccactatgtgttggg

SEQ ID NO: 496168 - DNA, 201 bp, Homo sapiens
gtcccattccatactgaccagattcccagtcaccaaggccccctctcactccgctccactcctcgggctggctctcctgaggatgcaccagcgtcaccccygggcaagatgccctcccctctgtgtggccggaatccttgcctgtggctttctcctgggctgctggggaccctcccatttccagcaggtgggctcatttgc

SEQ ID NO: 496169 - DNA, 201 bp, Homo sapiens
ggcctgtccccattgcccacaggcccatgtctgtgaccttctccggtgcgagcccccttcccagtagggccattggcaacttgactaatggctgatggggrccagaggcaggtgggctagtggtcaggggcaacaggagggcaaggcccactttgtgacctggttctttgtggtctaggccagaggcacactgaccagtgc

SEQ ID NO: 496170 - DNA, 201 bp, Homo sapiens
tttgcgtgcctagtcactaatggggtctggctcttggggtgggggtgacacgcaatgtcttgacttcggaaggccatccttccaagacctgccagcccctytcctgttagctttccactgcttgctctctagaaccatcgccctctgctctccctctccccctccaggccgccctccttcccctggcttccagaggcagag

SEQ ID NO: 496171 - DNA, 201 bp, Homo sapiens
atggggtctggctcttggggtgggggtgacacgcaatgtcttgacttcggaaggccatccttccaagacctgccagcccctctcctgttagctttccactrcttgctctctagaaccatcgccctctgctctccctctccccctccaggccgccctccttcccctggcttccagaggcagaggcagaggcagaggcgggct

SEQ ID NO: 496172 - DNA, 201 bp, Homo sapiens
acgcaatgtcttgacttcggaaggccatccttccaagacctgccagcccctctcctgttagctttccactgcttgctctctagaaccatcgccctctgctytccctctccccctccaggccgccctccttcccctggcttccagaggcagaggcagaggcagaggcgggctgcaggcggcatcctacacctggagctgctg

SEQ ID NO: 496173 - DNA, 201 bp, Homo sapiens
ggtgaccaatgtctgtgggctggtgtatctggtagtctgaatacagtgggttaaactcaggtagaatggctcggggttcttcctcttctccctccctcccmtgggtggaggtgggtgaggtcccacaccctctctaggctccatggcacatgcacaccctgcagcctctcactactcaagtcccttcacctggggccaccc

SEQ ID NO: 496174 - DNA, 201 bp, Homo sapiens
tccttagaggagggctggggaccccgggaaggagagtcactgacatgtgcctgtgaggaggatgggtgctcagctccacacggctaacagggctggttccycgacagcggtgaggatcggagggcgctatgtcgtggctgggaagatgagcatctcccctaacaccacctacccctccctcctggaggatggtcgtgtcga

SEQ ID NO: 496175 - DNA, 201 bp, Homo sapiens
cctggagctaggggacacagcagagaacaaggcagacaaatgtccctgacctcctggagcaaatgcagggggaaagggggacagataataataggacaggyggggaatgcagtttgatggatggtgttcagtgcgatgcagccaaacacagcgggaggggaggaggggagggctggcggggtgggctccagggcggtggtg

SEQ ID NO: 496176 - DNA, 201 bp, Homo sapiens
cccacaaagctcagctaaagcaaccctggcaaatgggatacgggctgctcacactgccctctgcaccccgaccctgccctctctccattctcttgtccccygctcagagtggcgaggacaggtcacccgtctgaagtctaaacagagactgctggcaaaggagatgcccaccttcatttcttgctagcacctgaatccctg

SEQ ID NO: 496177 - DNA, 201 bp, Homo sapiens
gcccctgggagtcagcagctgcctggggctggcaatgcccacccgacgggttacctctctcatctgcccttgcacagggggcagaactgcttcgggacccrtccctgggggctcagtttcgggtgcacctggtgaagatggtcattctgacagagcctgaggtaggcatggagctggaactcagcacaccatacagagcgg

SEQ ID NO: 496178 - DNA, 201 bp, Homo sapiens
gttgttaggaggactaactgggaaacaaaccgaccgcagtcagcaccgtgcctggttggggtgtcctaaatgcaggctttgctgtgggtccgcagggtgcyccaaatatcacagccaacctcacctcgtccctgctgagcgtctgtgggtggagccagaccatcaaccctgaggacgacacggatcctggccatgctgacc

SEQ ID NO: 496179 - DNA, 201 bp, Homo sapiens
gaccccagggcaggcacgtgccttggcaccacccaagtgactgttttctctcaccgaggtttgacctggagttgcctgatggtaaccggcaggtgcggggygtcacccagctgggcggtgcctgctccccaacctggagctgcctcattaccgaggacactggcttcgacctgggagtcaccattgcccatgagattgggc

SEQ ID NO: 496180 - DNA, 201 bp, Homo sapiens
agctgggcggtgcctgctccccaacctggagctgcctcattaccgaggacactggcttcgacctgggagtcaccattgcccatgagattgggcacaggtakgtagccccaccagctgtccccaggatctggcaaggagctgacctgggtacccagggtggaggtggtcttggcaagcagtgggtccttgtagagtttctcc

SEQ ID NO: 496181 - DNA, 201 bp, Homo sapiens
ggttggggcatagagggtggctggggtagactctgcctgcactcagaggtctgtgctgcactctaggtcccaggtctccccgctgcgctgcttgaggctcrgccatggcccagcagagagccctgccccagagcaaggagacgctgctgcagtcctacaacaagcggctgaaggacgacattaagtccatcatggacaact

SEQ ID NO: 496182 - DNA, 201 bp, Homo sapiens
aggggcgggctcagaactcgtcgctcacaaggcctctggagcggcccccagcaagcccgagagacgctagggctccgagccccgcactgcggtgctccagscctgcgacacccagccctgcgacaccgggaacaacgcattccgctctcggccgcccggggctctagtccatctcaatgtctccgtgccacaccaagtggg

SEQ ID NO: 496183 - DNA, 201 bp, Homo sapiens
agtttaccaaatgccaagcaagtgacaacggttcctaccaaacagggctcccacagcccaaaaagaccgggccaagataagcccccatccctgcacctagyacagcaagcagcgtgggttgcctctatttgtcttgagcaaaggtgcatgttgtctcccatggccagaacaagagagggtggaattgaaccttgtcagagg

SEQ ID NO: 496184 - DNA, 201 bp, Homo sapiens
gggtggagtggagggggctctggggctggtctggtcttcttcccccgagaaggagcagaaggaggcaaatgtagagatgctttggtttcaccactcggcarctttaaagaatgaggtgggggcaaatcatttctcaggagactgtcctcacgtggggcacttggaggagggctgggcagagagccacccatgcccgtcctg

SEQ ID NO: 496185 - DNA, 201 bp, Homo sapiens
gggcaggaggcaaaatgggatcgcagttttatctgtggggtttgagtttttcatgagcagaatgtacacctgcataattggactggaggccagtcctgcargagtggaagccagaggctgacgagaggggagggcctgccctgcagaactgacatcccagttttctcacttaattctcacacatgaacctgtggaggtcag

SEQ ID NO: 496186 - DNA, 201 bp, Homo sapiens
tgtgatgactggtgagtttatctgtgtaaaacagttacctcggggcctggcacacagccaatgagcaggagaaaagcagactgaggggagaagtggggggkggcctccaggcaggtggagcggtcagcactggggcctgcaagcctgctgaccactgcagctacagctgcatcagattgggctggatccctcctggctgct

SEQ ID NO: 496187 - DNA, 201 bp, Homo sapiens
tctcacacatgaacctgtggaggtcaggggtagagtcccactttgcagatgaggaagctgaggctcctagagaggccatcccttgcccagcatcagctacytgtaggcaaggccgctgtcccccctcaccctgtgcccgccctggttctgatggccacaggtccgagccggcgagtccctgatgaagctggtgtccgacct

SEQ ID NO: 496188 - DNA, 201 bp, Homo sapiens
ggcgcaaacccaggacatctgtgccaggcttcccatgccctcccccaacagtccctcagcttcacccagcggggcttccaggccagcctgtgtcccctccmgcaggcctcctgtccacaccagcgccccctggggggcctcacacagcccctgtggcagaagcagttgccctcctctgtacattgcctttaagcgaccagg

SEQ ID NO: 496189 - DNA, 201 bp, Homo sapiens
aagcccaggcagggaatggccttgaaagccattggagctccaattcgtgacccactcagccttatccacggagctggagccaacctacgtgccaggccccrtgctgggtcccagggatgcagaagggtcaaaacccatcatcctgacccttgtggggctccgtaagaagctgaaaccttcgaccgtttgagctggaggggc

SEQ ID NO: 496190 - DNA, 201 bp, Homo sapiens
cctgccctgccctgccctgttccgcatgagctgcgcctctgtgctcgcctgccccctctctgcttgttagttgctctttctggctctgcctctcctttgckttcctcgggatgccactctgtgcccaggacggttctgagactgaacactgagggcaggagcaagggaggaagccaggggcgaggcaggccgcgggaaagc

SEQ ID NO: 496191 - DNA, 201 bp, Homo sapiens
  misc_feature (1)...(201): n = A,T,C or G
gtccatgtccatcttgtgccttctcctggacaaacctttccttcctggtggtggatttaaaatactcctttctgcccattggccatgctgggagccacagntatccagagccagcatgacctggggcttggtttccctgccctgggctcagtggcactgctgagctgcagcagtcctagagttttccagggggttctgagg

SEQ ID NO: 496192 - DNA, 201 bp, Homo sapiens
ggccagcgttcctgtgcagagccccatccactggttcttgccctgagccacatatgtctgtgccatgggctgagtgccacgacaggcccgtgtgacagctrctgcccacgcatgtggaagctaggtgggactcattcctaattctgccgttgtaatgagacttgattaaaacaccgccacttttttgcattgctgctcttt

SEQ ID NO: 496193 - DNA, 201 bp, Homo sapiens
ttccagggggttctgagggaatctttggtccccagtactcattaactcagcagacatgaggcagcatttcctccacactagggtggctgagaggggtcctrgggtgtttcagacccttctgggcatctccttccacagctgttcagtttgtcggtctctttgaggcagccaccgtccctgagggcccctgcacagagcagc

SEQ ID NO: 496194 - DNA, 201 bp, Homo sapiens
acagccttgcttctctcagcctaggttcccatttggggacttcaggaccccagagccactaggacttccttgggaagcccgttagcccagggtgggtcccrccaggacagtagggaaacagttgtttccctagccatttccgaatagcccatcattccgagtcatcatctctgtttgctgccttcctggccagccaggtgg

SEQ ID NO: 496195 - DNA, 201 bp, Homo sapiens
cgggatttcggatttaaagcaacagcattcctataaagctaaaaatcgaggcggggccgagaggctgcggcggctgactaggttttcggaccgcggcgcgscggggaagagagactgcggcgggagggccaggccgtgggagagacgcgggaaagtgcgggtcgcagaggcacttgaccaccccgccctaggccgacccgg

SEQ ID NO: 496196 - DNA, 201 bp, Homo sapiens
aagtgctgggattacaggcgtgagccaccgcgcccggttggaatgaccactttttaggacctcttccctgccgcgcagagactggagggagcggggcccgsagtgcagggatgaggtctggagcggggcagcctgagtgggagtggaaggaaagcgtggatgtaggcggtgcagaggggtcgaattggaaggactcttcgg

SEQ ID NO: 496197 - DNA, 201 bp, Homo sapiens
ggcccaccaaggggagcagagtctgagaaggggtggagacaggagaggccaggggctgagcagcgcgagtgaatagtgttctaggcaggaagcacccagtscacagggagctggtcagtagataagcaaaccaaataatggcacgtccagcccttactaacagtatggatttggatggagatttcactttttagtgcctca

SEQ ID NO: 496198 - DNA, 201 bp, Homo sapiens
aggccctccgaggccgcgcctggaggaggatggcagcggatacagccggaacctggctatagtgccacggaactacagctcactcaccatcttgggcggcrggaggagagagaaaggaaagggaattgtgggtaatatgtatgcggcctcggagatcgcgagagttgataccggcacgggatttcggatttaaagcaacag

SEQ ID NO: 496199 - DNA, 201 bp, Homo sapiens
gaggagcaggaggccctccgaggccgcgcctggaggaggatggcagcggatacagccggaacctggctatagtgccacggaactacagctcactcaccatyttgggcggcgggaggagagagaaaggaaagggaattgtgggtaatatgtatgcggcctcggagatcgcgagagttgataccggcacgggatttcggattt

SEQ ID NO: 496200 - DNA, 201 bp, Homo sapiens
gcggggcttccaggccagcctgtgtcccctcccgcaggcctcctgtccacaccagcgccccctggggggcctcacacagcccctgtggcagaagcagttgscctcctctgtacattgcctttaagcgaccaggtcctggccgagtttcctctgccccttcttgctggtcccccaaagggcgctccgctccctgccctgccc

SEQ ID NO: 496201 - DNA, 201 bp, Homo sapiens
ctccgtgccacaccgagtggggctctcctagcgccaggaggagcaggaggccctccgaggccgcgcctggaggaggatggcagcggatacagccggaaccyggctatagtgccacggaactacagctcactcaccatcttgggcggcgggaggagagagaaaggaaagggaattgtgggtaatatgtatgcggcctcggag

SEQ ID NO: 496202 - DNA, 201 bp, Homo sapiens
ccctcccccaacagtccctcagcttcacccagcggggcttccaggccagcctgtgtcccctcccgcaggcctcctgtccacaccagcgccccctggggggsctcacacagcccctgtggcagaagcagttgccctcctctgtacattgcctttaagcgaccaggtcctggccgagtttcctctgccccttcttgctggtcc

SEQ ID NO: 496203 - DNA, 201 bp, Homo sapiens
tcccactttgcagatgaggaagctgaggctcctagagaggccatcccttgcccagcatcagctacttgtaggcaaggccgctgtcccccctcaccctgtgyccgccctggttctgatggccacaggtccgagccggcgagtccctgatgaagctggtgtccgacctcaagcagttcctgatcctcaatgacttcccctccg

SEQ ID NO: 496204 - DNA, 201 bp, Homo sapiens
gacaacttcaccgagatcatcaagaccgccaaggtgggggtggggtggcccaccaaggggagcagagtctgagaaggggtggagacaggagaggccagggsctgagcagcgcgagtgaatagtgttctaggcaggaagcacccagtgcacagggagctggtcagtagataagcaaaccaaataatggcacgtccagccctt

SEQ ID NO: 496205 - DNA, 201 bp, Homo sapiens
gttttctcacttaattctcacacatgaacctgtggaggtcaggggtagagtcccactttgcagatgaggaagctgaggctcctagagaggccatcccttgyccagcatcagctacttgtaggcaaggccgctgtcccccctcaccctgtgcccgccctggttctgatggccacaggtccgagccggcgagtccctgatgaa

SEQ ID NO: 496206 - DNA, 201 bp, Homo sapiens
aaagtgctgggattacaggcgtgagccaccgcgcccggttggaatgaccactttttaggacctcttccctgccgcgcagagactggagggagcggggcccscagtgcagggatgaggtctggagcggggcagcctgagtgggagtggaaggaaagcgtggatgtaggcggtgcagaggggtcgaattggaaggactcttcg

SEQ ID NO: 496207 - DNA, 201 bp, Homo sapiens
gcaggccaggcttctgtgaaactggcatgggttaatggtggtcaagtgcatgacacagcctggcacctgggaagtgatcaggaaatggtcgcgaaaaaaaacttaaatcatcccttcactcatccaacagtttaccaaatgccaagcaagtgacaacggttcctaccaaacagggctcccacagcccaaaaagaccgggcc

SEQ ID NO: 496208 - DNA, 201 bp, Homo sapiens
gcgagagttgataccggcacgggatttcggatttaaagcaacagcattcctataaagctaaaaatcgaggcggggccgagaggctgcggcggctgactagsttttcggaccgcggcgcggcggggaagagagactgcggcgggagggccaggccgtgggagagacgcgggaaagtgcgggtcgcagaggcacttgaccacc

SEQ ID NO: 496209 - DNA, 201 bp, Homo sapiens
catcattccgagtcatcatctctgtttgctgccttcctggccagccaggtggaagaaagtttccaagctaggtctggcccgttggggatctcagcagtggrgcaggagggtgcctgatttcggggagtcctgacccgagcctgttgtcagagttgggaggggctctgagcagtgttgggcaggccgggtctcccatcccga

SEQ ID NO: 496210 - DNA, 201 bp, Homo sapiens
atgactcctctgagtcgcggccccacaggctctagaagcaacaggggcgggctcagaactcgtcgctcacaaggcctctggagcggcccccagcaagcccragagacgctagggctccgagccccgcactgcggtgctccaggcctgcgacacccagccctgcgacaccgggaacaacgcattccgctctcggccgcccgg

SEQ ID NO: 496211 - DNA, 201 bp, Homo sapiens
ctttcagaatgctagggtggctctcaccactggccgcctctccttgccaggcctgccaactcaggggacagatggagcaggagtggagaaagggaaaggcwggtctggggtgtggtcgtgttttcttaactctgcttctgtcttgctctcccctcccctggctttcctctctgcctgctcctgtctctccctggggtttct

SEQ ID NO: 496212 - DNA, 201 bp, Homo sapiens
aatatgtatgcggcctcggagatcgcgagagttgataccggcacgggatttcggatttaaagcaacagcattcctataaagctaaaaatcgaggcggggcygagaggctgcggcggctgactaggttttcggaccgcggcgcggcggggaagagagactgcggcgggagggccaggccgtgggagagacgcgggaaagtgc

SEQ ID NO: 496213 - DNA, 201 bp, Homo sapiens
tgacatcccagttttctcacttaattctcacacatgaacctgtggaggtcaggggtagagtcccactttgcagatgaggaagctgaggctcctagagaggscatcccttgcccagcatcagctacttgtaggcaaggccgctgtcccccctcaccctgtgcccgccctggttctgatggccacaggtccgagccggcgagt

SEQ ID NO: 496214 - DNA, 201 bp, Homo sapiens
tggattccttcggatcacaggagaaacacagcaagcagataattccgcaggtgcacgtccagggctcaaaatgcatggaaaaaggtcccacaggagctctscccagctggcagccatgttaatcctaccccggggcaggaggcaaaatgggatcgcagttttatctgtggggtttgagtttttcatgagcagaatgtacac

SEQ ID NO: 496215 - DNA, 201 bp, Homo sapiens
gcactgttgtcctcttcatttcaggaggaaacccaggcccaggagacttagtgacttgcccaaggtcactcagctcacaactggctgagccaggatttgarcccacgaagtctgggtcttaaccactgagggtacctgacacccaccccgaactgagcctttgcaaggcctgccgggaagccccatccagcctcgcttggc

SEQ ID NO: 496216 - DNA, 201 bp, Homo sapiens
ggggtggcctccaggcaggtggagcggtcagcactggggcctgcaagcctgctgaccactgcagctacagctgcatcagattgggctggatccctcctggytgctgcagacctggcaggctccataagcgatgatgatgaggatggaagctagcatgtacttagtgcttgccatgtatcaagccacgttgtgaggttatct

SEQ ID NO: 496217 - DNA, 201 bp, Homo sapiens
gcccaccaaggggagcagagtctgagaaggggtggagacaggagaggccaggggctgagcagcgcgagtgaatagtgttctaggcaggaagcacccagtgsacagggagctggtcagtagataagcaaaccaaataatggcacgtccagcccttactaacagtatggatttggatggagatttcactttttagtgcctcag

SEQ ID NO: 496218 - DNA, 201 bp, Homo sapiens
acaacttcaccgagatcatcaagaccgccaaggtgggggtggggtggcccaccaaggggagcagagtctgagaaggggtggagacaggagaggccaggggstgagcagcgcgagtgaatagtgttctaggcaggaagcacccagtgcacagggagctggtcagtagataagcaaaccaaataatggcacgtccagccctta

SEQ ID NO: 496219 - DNA, 201 bp, Homo sapiens
ggcgagggcttgtcagagtgtgagaagctcaggtccacctggggagctgccctcccctttgatcccacctggtgctgtgatgtggccactgccaagaggasgacatgggccagggaagccacagaactgcccacggggacgctggcaccgagggcctcaacctgcagaacggccatctgagatgtccgcggtgctcaccag

SEQ ID NO: 496220 - DNA, 201 bp, Homo sapiens
ggccctttccactgcagccccgcaccgtccaccagtcatttctccaacgtggctctgaggggagcagggactctataagacaggaccgtgactagaggccrcgacaacctccagcctctcacggcaaccctacggcctgccatcgcatgggaggggcagggcaggcaccctctgagtccccactgccagctttaagcccct

SEQ ID NO: 496221 - DNA, 201 bp, Homo sapiens
caatctttactctatggcagaacaaagggactgggcaaagcttggcgtggcacttacaccagctgccgccccctcctcccgtgcagacaaagagcatgggrcagttctgcccagagacgaaacctggcacctgttggccaggacgcgtttttgccagcattgttctctgggccggattcctcctttcccagcttttctcat

SEQ ID NO: 496222 - DNA, 201 bp, Homo sapiens
aacgccctgggacgtggcgtcagttccgccgccgtgaagccagattgggcagggaatatgcagtctcctcgctggatgcccggcaagaccctcccatcccyggccccggggccgcgcctgcagaatggggctgatggtggggacttgcctggggtgctccacctgcagagccctctgtttgcgagcccactcagtcactgc

SEQ ID NO: 496223 - DNA, 201 bp, Homo sapiens
acgccctgggacgtggcgtcagttccgccgccgtgaagccagattgggcagggaatatgcagtctcctcgctggatgcccggcaagaccctcccatccctkgccccggggccgcgcctgcagaatggggctgatggtggggacttgcctggggtgctccacctgcagagccctctgtttgcgagcccactcagtcactgca

SEQ ID NO: 496224 - DNA, 201 bp, Homo sapiens; identical to SEQ ID NO: 181211

SEQ ID NO: 496225 - DNA, 201 bp, Homo sapiens
agggctgggttattaagatacaggctgctgtattttacattggttgtgggggaaggggagcctggagaaaacaaagtcactattcccttttttgaaacagraaaaaaaattattttttgttcagtaaaaatggtagagaattccaatgtccctagccacaagggaccagttccactgagaagtgaacagtgggaactcaaa

SEQ ID NO: 496226 - DNA, 201 bp, Homo sapiens; identical to SEQ ID NO: 377023

SEQ ID NO: 496227 - DNA, 201 bp, Homo sapiens
gttgtatgtacgcatatatggaccggagtctgctgagtttataaggttccaaaaatatggtaaaatcttggtttttgttaatttatctcaataaaagcccmctggaactccaaatgtgtgtgtggtatgtccttagtagcagctgtgtgcataggaatctgagcattttgctcaggtaattcatactgtgaaacagacatt

SEQ ID NO: 496228 - DNA, 201 bp, Homo sapiens; identical to SEQ ID NO: 376948

SEQ ID NO: 496229 - DNA, 201 bp, Homo sapiens; identical to SEQ ID NO: 376970

SEQ ID NO: 496230 - DNA, 201 bp, Homo sapiens; identical to SEQ ID NO: 376971

SEQ ID NO: 496231 - DNA, 201 bp, Homo sapiens; identical to SEQ ID NO: 376972

SEQ ID NO: 496232 - DNA, 201 bp, Homo sapiens; identical to SEQ ID NO: 376973

SEQ ID NO: 496233 - DNA, 201 bp, Homo sapiens; identical to SEQ ID NO: 376955

SEQ ID NO: 496234 - DNA, 201 bp, Homo sapiens
ttttgggccctcataataagcattgttactattggaagttgttttcacattctttccaatattaaatatgtatttttttaagtaatgataatattttccartggctcatttggatgagaactaccctctatttttaatattaaaactacatccaactcatcatttagcctttggttgtacagttgtgtaatgggctatgga

SEQ ID NO: 496235 - DNA, 201 bp, Homo sapiens
ttattaagatacaggctgctgtattttacattggttgtgggggaaggggagcctggagaaaacaaagtcactattcccttttttgaaacaggaaaaaaaawtattttttgttcagtaaaaatggtagagaattccaatgtccctagccacaagggaccagttccactgagaagtgaacagtgggaactcaaaatttcagaa

SEQ ID NO: 496236 - DNA, 201 bp, Homo sapiens; identical to SEQ ID NO: 377004

SEQ ID NO: 496237 - DNA, 201 bp, Homo sapiens; identical to SEQ ID NO: 376983

SEQ ID NO: 496238 - DNA, 201 bp, Homo sapiens
cctgcaaaagcagataagcaaaaaattaaaacaaaacaaaacaaaacacttctccatggattcgatagagaagatagccacactgtgttgaggggagagtgagtaagagcctttatttatttattttcttactcaaacacctttattagcccactgttcttttttttttttttggaaacataatctcactctgttgtccaa

SEQ ID NO: 496239 - DNA, 201 bp, Homo sapiens
tcctgcaaaagcagataagcaaaaaattaaaacaaaacaaaacaaaacacttctccatggattcgatagagaagatagccacactgtgttgaggggagagtgagtaagagcctttatttatttattttcttactcaaacacctttattagcccactgttcttttttttttttttggaaacataatctcactctgttgtcca

SEQ ID NO: 496240 - DNA, 201 bp, Homo sapiens
gtcctgcaaaagcagataagcaaaaaattaaaacaaaacaaaacaaaacacttctccatggattcgatagagaagatagccacactgtgttgaggggagagtgagtaagagcctttatttatttattttcttactcaaacacctttattagcccactgttcttttttttttttttggaaacataatctcactctgttgtcc

SEQ ID NO: 496241 - DNA, 201 bp, Homo sapiens
acaaacaaacactaaagttgcatatagtttatggagttattcacatttattttagttgataaaattatacagtcatgtgttgcttaatgacaggtacattytgagaaatttgtcattaggtgatttcatcattgtgggaacatcatagagtgtacttgcacaaatttagatgatactgcacatggtgtaacttattactcc

SEQ ID NO: 496242 - DNA, 201 bp, Homo sapiens
ggtcctgcaaaagcagataagcaaaaaattaaaacaaaacaaaacaaaacacttctccatggattcgatagagaagatagccacactgtgttgaggggagagtgagtaagagcctttatttatttattttcttactcaaacacctttattagcccactgttcttttttttttttttggaaacataatctcactctgttgtc

SEQ ID NO: 496243 - DNA, 201 bp, Homo sapiens
gatccgcctgcctcggcctcccaaagtgctgggattacaggcgtgagccaccgcgcccagcctgtttttttttgttttgttttgttttttaaataaaagcmgaaaaactttaacaaatataatctacagtatttattccattcacattttattttgttgtcttaaccaatatgagtgcttctggaggggagggaccatgtg

SEQ ID NO: 496244 - DNA, 201 bp, Homo sapiens
gactaattgccttcccacgtcacaaacggggaaaccgaggtatgcacgcccagagacaggcggagcgtggcctcgatcaccaccgagagctgacggccgcycggattcccgccctcagagaatcctggcccccagtcgttccaagaccctttacggactgcagcttaaaggaaccggcctctgccattgagaccaaactga

SEQ ID NO: 496245 - DNA, 201 bp, Homo sapiens
gcctcctgagtagctgggactataggcccctgccaccgtgcctggctaattttttttattagagacggggtttcacagtgttagctaggatggtctcgatytcctgaccttgtgatccgcctgcctcggcctcccaaagtgctgggattacaggcgtgagccaccgcgcccagcctgtttttttttgttttgttttgtttt

SEQ ID NO: 496246 - DNA, 201 bp, Homo sapiens
agcctcctgagaaactgggattacaggcgtgcgccaccacgcccggctaatttttgtatttttagtagagacgggattttaccatgctggccaggctggtytcgaactcctgacctcgtgatccgcctgcctcgccctcccaaagtgttgtgattacaggtgtgagcctccgcacccggcgtgaagggcttttaatgcctt

SEQ ID NO: 496247 - DNA, 201 bp, Homo sapiens
accgcaagctccgcctcccgggttcatgccattctcctgcctcagcctcctgagtagctgggactataggcccctgccaccgtgcctggctaattttttttattagagacggggtttcacagtgttagctaggatggtctcgatctcctgaccttgtgatccgcctgcctcggcctcccaaagtgctgggattacaggcgt

SEQ ID NO: 496248 - DNA, 201 bp, Homo sapiens
ctggtcaatagagccagaccctgttttttgtttgtttggggtttttttgttttgtttttttgttttttgagatggagtctcactctgtcgcccaggctggmgtgcagtggcgcgatcttggctcaccgcaagctccgcctcccgggttcatgccattctcctgcctcagcctcctgagtagctgggactataggcccctgc

SEQ ID NO: 496249 - DNA, 201 bp, Homo sapiens
gaggctgaagccaggaggtcaaggctgcagtgagctgtgaacacaccattgccctccagcctggtcaatagagccagaccctgttttttgtttgtttgggktttttttgttttgtttttttgttttttgagatggagtctcactctgtcgcccaggctggagtgcagtggcgcgatcttggctcaccgcaagctccgcctc

SEQ ID NO: 496250 - DNA, 201 bp, Homo sapiens
actccagcctgggcaacagagtgagactccatctcaaaaaattacagtaataataaataaatacaaatatcttttgtagtagcattattttagatgaatarcagcttttaacctaactttctagaccctaatatcatcacttgtctccacatcccattctgtttatcagacagtacttgtaagctctttgctttcatcata

SEQ ID NO: 496251 - DNA, 201 bp, Homo sapiens
gcccttctcagcctcccaaagcgctgggattacaggcatgagccattgcacctggccttacaggcatgagccattgcacctggcctaaatggcatctttactggggcaaagtggtgcctgttatttggtttctgtgttaaacaagccaacttgtatcttctggtagcatgtgtaggttttactttgtgacatgttaaaacc

SEQ ID NO: 496252 - DNA, 201 bp, Homo sapiens
ctgcccttctcagcctcccaaagcgctgggattacaggcatgagccattgcacctggccttacaggcatgagccattgcacctggcctaaatggcatctttactggggcaaagtggtgcctgttatttggtttctgtgttaaacaagccaacttgtatcttctggtagcatgtgtaggttttactttgtgacatgttaaaa

SEQ ID NO: 496253 - DNA, 201 bp, Homo sapiens
tctgcccttctcagcctcccaaagcgctgggattacaggcatgagccattgcacctggccttacaggcatgagccattgcacctggcctaaatggcatctttactggggcaaagtggtgcctgttatttggtttctgtgttaaacaagccaacttgtatcttctggtagcatgtgtaggttttactttgtgacatgttaaa

SEQ ID NO: 496254 - DNA, 201 bp, Homo sapiens
tgatctgcccttctcagcctcccaaagcgctgggattacaggcatgagccattgcacctggccttacaggcatgagccattgcacctggcctaaatggcatctttactggggcaaagtggtgcctgttatttggtttctgtgttaaacaagccaacttgtatcttctggtagcatgtgtaggttttactttgtgacatgtt

SEQ ID NO: 496255 - DNA, 201 bp, Homo sapiens
ggtgatctgcccttctcagcctcccaaagcgctgggattacaggcatgagccattgcacctggccttacaggcatgagccattgcacctggcctaaatggcatctttactggggcaaagtggtgcctgttatttggtttctgtgttaaacaagccaacttgtatcttctggtagcatgtgtaggttttactttgtgacatg

SEQ ID NO: 496256 - DNA, 201 bp, Homo sapiens
ctaaatggcatctttactggggcaaagtggtgcctgttatttggtttctgtgttaaacaagccaacttgtatcttctggtagcatgtgtaggttttacttygtgacatgttaaaacctcgtgataagaattcattagaagtagaactaactactacatagtttagtggtaatttagaagggatagtcaagtagagattttt

SEQ ID NO: 496257 - DNA, 201 bp, Homo sapiens
tgctatcagagtacatggaagtagaggtttcaggttattcttatcaagacttctctagttataatgtgtcatcaatagctgattcttctttctggcaggcrgagatggtccacacaggtttgaagttggagcgagctctgttggttacagcttctcagtgtcaacagccagcagaagtaagttcactactagctggtttca

SEQ ID NO: 496258 - DNA, 201 bp, Homo sapiens
aggtgatctgcccttctcagcctcccaaagcgctgggattacaggcatgagccattgcacctggccttacaggcatgagccattgcacctggcctaaatggcatctttactggggcaaagtggtgcctgttatttggtttctgtgttaaacaagccaacttgtatcttctggtagcatgtgtaggttttactttgtgacat

SEQ ID NO: 496259 - DNA, 201 bp, Homo sapiens
caggtgatctgcccttctcagcctcccaaagcgctgggattacaggcatgagccattgcacctggccttacaggcatgagccattgcacctggcctaaatggcatctttactggggcaaagtggtgcctgttatttggtttctgtgttaaacaagccaacttgtatcttctggtagcatgtgtaggttttactttgtgaca

SEQ ID NO: 496260 - DNA, 201 bp, Homo sapiens
caggcctggttttttggtttcaaaccacaatagacattgctggagaatcaagctcatagtttctttttactctgcatgatatccctccaaaagcttgtctrttctcatgacttcatgacagttctttgccaatgatttgcaaacattatctccagtcttgattctttcctaggctttatttctaaatactcactagtcatt

SEQ ID NO: 496261 - DNA, 201 bp, Homo sapiens
tccagggcagttaatggagtcttggaccctttctttctctgggatccctgcccagcaccttcctatagagatgactttaaaaggaaaaaaaaaaaaaaaamaaacccacatgatttcaaggagtctggcattcctgaatccttcttccctgccaggtgcctgtcacctgtcttcactgcctccttttccctgtcatgctca

SEQ ID NO: 496262 - DNA, 201 bp, Homo sapiens
ctcaggtgatctgcccttctcagcctcccaaagcgctgggattacaggcatgagccattgcacctggccttacaggcatgagccattgcacctggcctaaatggcatctttactggggcaaagtggtgcctgttatttggtttctgtgttaaacaagccaacttgtatcttctggtagcatgtgtaggttttactttgtga

SEQ ID NO: 496263 - DNA, 201 bp, Homo sapiens
aggaacaaggtagctgttgttcttacagccctgaaacatgtatctgatgacatgaagactcacaagaaccctgccctgaaggctcagagtggtccagtacrcagtggccccaaaccattctctgcacctaaaccccaaaccagcccatcccccaaacgagccacaaagaaggagccagctgtacttgaactggagggcaag

SEQ ID NO: 496264 - DNA, 201 bp, Homo sapiens
cctcaggtgatctgcccttctcagcctcccaaagcgctgggattacaggcatgagccattgcacctggccttacaggcatgagccattgcacctggcctaaatggcatctttactggggcaaagtggtgcctgttatttggtttctgtgttaaacaagccaacttgtatcttctggtagcatgtgtaggttttactttgtg

SEQ ID NO: 496265 - DNA, 201 bp, Homo sapiens
aaatatatgtagaaaacaatattgtagagttgcaaatgccaacactgactgaggaggtgggggaagtagggttagctgtggggagtgagggtatttttttyttttccttttaccaaattttctttactaccactcatttttctttattgctttaaaaattacatatttgtgcacatacatttgatatgtctttctagacat

SEQ ID NO: 496266 - DNA, 201 bp, Homo sapiens
acctcaggtgatctgcccttctcagcctcccaaagcgctgggattacaggcatgagccattgcacctggccttacaggcatgagccattgcacctggcctaaatggcatctttactggggcaaagtggtgcctgttatttggtttctgtgttaaacaagccaacttgtatcttctggtagcatgtgtaggttttactttgt

SEQ ID NO: 496267 - DNA, 201 bp, Homo sapiens
cgaggcgtgtgtcagcctgctgtgggagatgatgaattatttttcccttaaaacataaaagaaatatatttttacttttattttttattttattttattttttttgagatgggagtctcactttgttgctcaggctggagtgcagtggcgtgatcttggctcactgcaatctctgcctcccaggttcaagcagttctcctg

SEQ ID NO: 496268 - DNA, 201 bp, Homo sapiens
tgacctcaggtgatctgcccttctcagcctcccaaagcgctgggattacaggcatgagccattgcacctggccttacaggcatgagccattgcacctggcctaaatggcatctttactggggcaaagtggtgcctgttatttggtttctgtgttaaacaagccaacttgtatcttctggtagcatgtgtaggttttacttt

SEQ ID NO: 496269 - DNA, 201 bp, Homo sapiens
gcgaggcgtgtgtcagcctgctgtgggagatgatgaattatttttcccttaaaacataaaagaaatatatttttacttttattttttattttattttattttttttgagatgggagtctcactttgttgctcaggctggagtgcagtggcgtgatcttggctcactgcaatctctgcctcccaggttcaagcagttctcct

SEQ ID NO: 496270 - DNA, 201 bp, Homo sapiens
ctgacctcaggtgatctgcccttctcagcctcccaaagcgctgggattacaggcatgagccattgcacctggccttacaggcatgagccattgcacctggcctaaatggcatctttactggggcaaagtggtgcctgttatttggtttctgtgttaaacaagccaacttgtatcttctggtagcatgtgtaggttttactt

SEQ ID NO: 496271 - DNA, 201 bp, Homo sapiens
cctgacctcaggtgatctgcccttctcagcctcccaaagcgctgggattacaggcatgagccattgcacctggccttacaggcatgagccattgcacctggcctaaatggcatctttactggggcaaagtggtgcctgttatttggtttctgtgttaaacaagccaacttgtatcttctggtagcatgtgtaggttttact

SEQ ID NO: 496272 - DNA, 201 bp, Homo sapiens
tcctgacctcaggtgatctgcccttctcagcctcccaaagcgctgggattacaggcatgagccattgcacctggccttacaggcatgagccattgcacctggcctaaatggcatctttactggggcaaagtggtgcctgttatttggtttctgtgttaaacaagccaacttgtatcttctggtagcatgtgtaggttttac

SEQ ID NO: 496273 - DNA, 201 bp, Homo sapiens
actcctgacctcaggtgatctgcccttctcagcctcccaaagcgctgggattacaggcatgagccattgcacctggccttacaggcatgagccattgcacctggcctaaatggcatctttactggggcaaagtggtgcctgttatttggtttctgtgttaaacaagccaacttgtatcttctggtagcatgtgtaggtttt

SEQ ID NO: 496274 - DNA, 201 bp, Homo sapiens
tgtatgaaggaacatgttttaataacagaactgagtggtatctgttcatggaaggtagcttaggagtttattgcgttccttgccttttcccctggacttayagtgtggtggattgtatatatatgtgagtctgtctcttgatcagtatgcataatggaacagggcaggaattcagatatcagttgatagtgtcataacatt

SEQ ID NO: 496275 - DNA, 201 bp, Homo sapiens
caagtagctgggactacaggcgcataccaccacgcctggctaagtagagacgaggtttcactgtgcttcccagctggtctcgaactcctgagctcaggcartccacccgtctcggcctcccaaagtgctaggattacaggcgtgagccaatgtacagtgtttttaatgcctcctatgtttatagtagtggaattacagtgg

SEQ ID NO: 496276 - DNA, 201 bp, Homo sapiens
ttccacttctgctttctctccttttttggtagaggcccttttagtcttctgatccttacccttctgggtttaggaagttttgctggcagtaacatggactratgccctttatataagattttgttcctttgttgagaatttgttactggcccaatggcaaagggttcaataggacttaatagaaatttttcatgaagtcag

SEQ ID NO: 496277 - DNA, 201 bp, Homo sapiens
gtggcgcaatctcagcttactgcaacctccacctctcaggttcaagcaattctcatgcctcagcctcccaagtagctgggactacaggcgcataccaccaygcctggctaagtagagacgaggtttcactgtgcttcccagctggtctcgaactcctgagctcaggcaatccacccgtctcggcctcccaaagtgctagga

SEQ ID NO: 496278 - DNA, 201 bp, Homo sapiens
cagttctgacttctccattgctggttttgagctggaatgattgcaggcaaaatttattaagttgcatatctacacaagcctttcctttcttccatccttcrtcaatcaacaaacatttattaactactctttttaaggaaaactacaccttcctgtgagtgaaatgtgtcccagaacaacaggcacttccttatccttcta

SEQ ID NO: 496279 - DNA, 201 bp, Homo sapiens
tggggctggatactgtgattaaccatatagtcacttaatttgttaaaagccattgtggagtagcaagaagagctgcagagtaggattcagaatatttgtaytctaggcctaggttctttactcactagttgtttgacctctggcaagtttttttttttgagacggagttttgctcttgttgcccaggctggagtgtaatgg

SEQ ID NO: 496280 - DNA, 201 bp, Homo sapiens
tcagtcagccaaggtcctcatccttggtttaagagctccttgagaagttcctcttggtttggggcattacacatgttctttctcttttgcctgtactgagsagttcagtccagccacagaaacgattcctcatttttttctaggccccttgcttttatcacgtatttatacagaaagcttgcttggtacataaaatatggt

SEQ ID NO: 496281 - DNA, 201 bp, Homo sapiens
agcgaggcgtgtgtcagcctgctgtgggagatgatgaattatttttcccttaaaacataaaagaaatatatttttacttttattttttattttattttattttttttgagatgggagtctcactttgttgctcaggctggagtgcagtggcgtgatcttggctcactgcaatctctgcctcccaggttcaagcagttctcc

SEQ ID NO: 496282 - DNA, 201 bp, Homo sapiens
aagcgaggcgtgtgtcagcctgctgtgggagatgatgaattatttttcccttaaaacataaaagaaatatatttttacttttattttttattttattttattttttttgagatgggagtctcactttgttgctcaggctggagtgcagtggcgtgatcttggctcactgcaatctctgcctcccaggttcaagcagttctc

SEQ ID NO: 496283 - DNA, 201 bp, Homo sapiens
ggtccattatggctgacatgcaaaatctggtagaaagattggagagggcagtgggccgcctggaggcagtatctcatacctctgacatgcaccgtgggtaygcagacagtccttcaaaaggtaagcagtccacagcccagcagaatgctttctttgagcgtcttggcctgaaaattttctattattctctcctttggcgct

SEQ ID NO: 496284 - DNA, 201 bp, Homo sapiens
tggtgagttaaaaatacctagacaggggcaggtatttttattattttatttttttgagatggagtttcactttgtcgcccaggctggagtgcagtggcgcratttcggcttaccgcaacctccgcctcccggggaaaaggagtaggaacaggaggttaaatggagcttagctagatgagggcagagttctggcttcaattg

SEQ ID NO: 496285 - DNA, 201 bp, Homo sapiens
aaagcgaggcgtgtgtcagcctgctgtgggagatgatgaattatttttcccttaaaacataaaagaaatatatttttacttttattttttattttattttattttttttgagatgggagtctcactttgttgctcaggctggagtgcagtggcgtgatcttggctcactgcaatctctgcctcccaggttcaagcagttct

SEQ ID NO: 496286 - DNA, 201 bp, Homo sapiens
aactcctgacctcaggtgatctgcccttctcagcctcccaaagcgctgggattacaggcatgagccattgcacctggccttacaggcatgagccattgcacctggcctaaatggcatctttactggggcaaagtggtgcctgttatttggtttctgtgttaaacaagccaacttgtatcttctggtagcatgtgtaggttt

SEQ ID NO: 496287 - DNA, 201 bp, Homo sapiens
aacctccacctcccaggctcaagtgattctcccacctcagcctcctgaatagctgggactacaggcatgcgccaccatgcccagctgatttttgtattttyatagagatggggtttccccatgttgcccaggctgatcttaaactcctggactcaagcgatctgcccaccttggcctcccaaagtgctgggattacaggcg

SEQ ID NO: 496288 - DNA, 201 bp, Homo sapiens
gaactcctgacctcaggtgatctgcccttctcagcctcccaaagcgctgggattacaggcatgagccattgcacctggccttacaggcatgagccattgcacctggcctaaatggcatctttactggggcaaagtggtgcctgttatttggtttctgtgttaaacaagccaacttgtatcttctggtagcatgtgtaggtt

SEQ ID NO: 496289 - DNA, 201 bp, Homo sapiens
tggagctttggaggaagggtgcaaacacaaacaaagttcatccattttgccaaggtgcctatttgaatgctaagcccctaattgttttttattttatttaygtttaaaaaaaaatttttttttttagacagggtgttgttttgtcacccagactggagggtagtggtgcaatcacagctcactgaagccttgacctcccag

SEQ ID NO: 496290 - DNA, 201 bp, Homo sapiens
tcgaactcctgacctcaggtgatctgcccttctcagcctcccaaagcgctgggattacaggcatgagccattgcacctggccttacaggcatgagccattgcacctggcctaaatggcatctttactggggcaaagtggtgcctgttatttggtttctgtgttaaacaagccaacttgtatcttctggtagcatgtgtagg

SEQ ID NO: 496291 - DNA, 201 bp, Homo sapiens
gcttcactgtggatgggctttagtagtgctcctgtggagatcttaaaactcctacagtattgcttctctcctcatccttcactggttgggagactctctctttaattttactcccacctcaaaattttatggtgcaagatgtgaaaagttgaattagagaaaatttagatttctcttggagtcaaagaatataggtttcct

SEQ ID NO: 496292 - DNA, 201 bp, Homo sapiens
ctcgaactcctgacctcaggtgatctgcccttctcagcctcccaaagcgctgggattacaggcatgagccattgcacctggccttacaggcatgagccattgcacctggcctaaatggcatctttactggggcaaagtggtgcctgttatttggtttctgtgttaaacaagccaacttgtatcttctggtagcatgtgtag

SEQ ID NO: 496293 - DNA, 201 bp, Homo sapiens
tgcttcactgtggatgggctttagtagtgctcctgtggagatcttaaaactcctacagtattgcttctctcctcatccttcactggttgggagactctctctttaattttactcccacctcaaaattttatggtgcaagatgtgaaaagttgaattagagaaaatttagatttctcttggagtcaaagaatataggtttcc

SEQ ID NO: 496294 - DNA, 201 bp, Homo sapiens
ggtctcgaactcctgacctcaggtgatctgcccttctcagcctcccaaagcgctgggattacaggcatgagccattgcacctggccttacaggcatgagccattgcacctggcctaaatggcatctttactggggcaaagtggtgcctgttatttggtttctgtgttaaacaagccaacttgtatcttctggtagcatgtg

SEQ ID NO: 496295 - DNA, 201 bp, Homo sapiens
ttgcttcactgtggatgggctttagtagtgctcctgtggagatcttaaaactcctacagtattgcttctctcctcatccttcactggttgggagactctctctttaattttactcccacctcaaaattttatggtgcaagatgtgaaaagttgaattagagaaaatttagatttctcttggagtcaaagaatataggtttc

SEQ ID NO: 496296 - DNA, 201 bp, Homo sapiens
gctggtctcgaactcctgacctcaggtgatctgcccttctcagcctcccaaagcgctgggattacaggcatgagccattgcacctggccttacaggcatgagccattgcacctggcctaaatggcatctttactggggcaaagtggtgcctgttatttggtttctgtgttaaacaagccaacttgtatcttctggtagcat

SEQ ID NO: 496297 - DNA, 201 bp, Homo sapiens
ccaggctggtctcgaactcctgacctcaggtgatctgcccttctcagcctcccaaagcgctgggattacaggcatgagccattgcacctggccttacaggcatgagccattgcacctggcctaaatggcatctttactggggcaaagtggtgcctgttatttggtttctgtgttaaacaagccaacttgtatcttctggta

SEQ ID NO: 496298 - DNA, 201 bp, Homo sapiens
cttgcttcactgtggatgggctttagtagtgctcctgtggagatcttaaaactcctacagtattgcttctctcctcatccttcactggttgggagactctctctttaattttactcccacctcaaaattttatggtgcaagatgtgaaaagttgaattagagaaaatttagatttctcttggagtcaaagaatataggttt

SEQ ID NO: 496299 - DNA, 201 bp, Homo sapiens
gccaggctggtctcgaactcctgacctcaggtgatctgcccttctcagcctcccaaagcgctgggattacaggcatgagccattgcacctggccttacaggcatgagccattgcacctggcctaaatggcatctttactggggcaaagtggtgcctgttatttggtttctgtgttaaacaagccaacttgtatcttctggt

SEQ ID NO: 496300 - DNA, 201 bp, Homo sapiens
ggccaggctggtctcgaactcctgacctcaggtgatctgcccttctcagcctcccaaagcgctgggattacaggcatgagccattgcacctggccttacaggcatgagccattgcacctggcctaaatggcatctttactggggcaaagtggtgcctgttatttggtttctgtgttaaacaagccaacttgtatcttctgg

SEQ ID NO: 496301 - DNA, 201 bp, Homo sapiens
ttggccaggctggtctcgaactcctgacctcaggtgatctgcccttctcagcctcccaaagcgctgggattacaggcatgagccattgcacctggccttacaggcatgagccattgcacctggcctaaatggcatctttactggggcaaagtggtgcctgttatttggtttctgtgttaaacaagccaacttgtatcttct

SEQ ID NO: 496302 - DNA, 201 bp, Homo sapiens
tccatgcttatcacttttctcacattatgatttactttcttaggataaaacctcaggaacaggattacaaaattaagagaagcattttgaagcaaatcaaytgggctaccatagtagacaggctgatttgtatgggtgctttattttcaattttacctaaggatgatgacttagaaaaacaactgtgggacaaagtagaaa

SEQ ID NO: 496303 - DNA, 201 bp, Homo sapiens
acaaatattgtaaattttgcgttcaagtttttttccacacttcatttagctattcccctataattagaagtccaagatagatatagatagatcaatagatmtaacattgcagcaaacatctccatgcttatcacttttctcacattatgatttactttcttaggataaaacctcaggaacaggattacaaaattaagagaa

SEQ ID NO: 496304 - DNA, 201 bp, Homo sapiens
tgttaaaagaaagtttggaaaacaggtagaaattgtcaaaaacccatcacccaaatgtgacaaatattgtaaattttgcgttcaagtttttttccacactkcatttagctattcccctataattagaagtccaagatagatatagatagatcaatagatctaacattgcagcaaacatctccatgcttatcacttttctca

SEQ ID NO: 496305 - DNA, 201 bp, Homo sapiens
tattattataaaatattatatgttaaaagaaagtttggaaaacaggtagaaattgtcaaaaacccatcacccaaatgtgacaaatattgtaaattttgcgwtcaagtttttttccacacttcatttagctattcccctataattagaagtccaagatagatatagatagatcaatagatctaacattgcagcaaacatctc

SEQ ID NO: 496306 - DNA, 201 bp, Homo sapiens
gcacctgaacagaggactgaaacctccactgcaggctggttttaggtcttgaattatgtaagaatcttgcacagcactgctaatgtaaatttcagttgttyttccctctaggacaaacacttaccaaaatatgcaacttttttttggtgggaagagagattgtcctgtgatttctacccatttcctgaggcctgtggaaat

SEQ ID NO: 496307 - DNA, 201 bp, Homo sapiens
gtagagatttttattattattataaaatattatatgttaaaagaaagtttggaaaacaggtagaaattgtcaaaaacccatcacccaaatgtgacaaataytgtaaattttgcgttcaagtttttttccacacttcatttagctattcccctataattagaagtccaagatagatatagatagatcaatagatctaacatt

SEQ ID NO: 496308 - DNA, 201 bp, Homo sapiens
gtcacctgtcttcactgcctccttttccctgtcatgctcatcagcttatggcttctgtctaagcacctgaacagaggactgaaacctccactgcaggctgrttttaggtcttgaattatgtaagaatcttgcacagcactgctaatgtaaatttcagttgtttttccctctaggacaaacacttaccaaaatatgcaactt

SEQ ID NO: 496309 - DNA, 201 bp, Homo sapiens
ggaagtagggttagctgtggggagtgagggtatttttttcttttccttttaccaaattttctttactaccactcatttttctttattgctttaaaaattayatatttgtgcacatacatttgatatgtctttctagacatagaggataaggatttacatatccttatcctcacccacaatatacacacattccatgttgtt

SEQ ID NO: 496310 - DNA, 201 bp, Homo sapiens
ggtgatccgcctgccttggcctcccagagtgtgggattacaggcatgagccacagcgcctggcctagaaagatattaaactacaggttaacatgagaaagwttttaagtgtcaatagttgaactaaatttgttaacaatctgtatgattataaccaacaaaaccaaatatatgtagaaaacaatattgtagagttgcaaat

SEQ ID NO: 496311 - DNA, 201 bp, Homo sapiens
acacaaacaaagttcatccattttgccaaggtgcctatttgaatgctaagcccctaattgttttttattttatttatgtttaaaaaaaaattttttttttkagacagggtgttgttttgtcacccagactggagggtagtggtgcaatcacagctcactgaagccttgacctcccaggtgtaatgatcctcccacctcagc

SEQ ID NO: 496312 - DNA, 201 bp, Homo sapiens
attgatttaattatttattaatgggtcatggtatctggcatttgagagatagctttaatctaaaggagtaaataccttgagaattttcagcagaaatttargcctttgcctttactcctgtctccaatttttgagaaaagaaaggtgtttttttggttgctgtttgttttattttgctgatgtgaaataggaaggattttt

SEQ ID NO: 496313 - DNA, 201 bp, Homo sapiens
tgttggccaggctggtctcgaactcctgacctcaggtgatctgcccttctcagcctcccaaagcgctgggattacaggcatgagccattgcacctggccttacaggcatgagccattgcacctggcctaaatggcatctttactggggcaaagtggtgcctgttatttggtttctgtgttaaacaagccaacttgtatctt

SEQ ID NO: 496314 - DNA, 201 bp, Homo sapiens
aactggagggcaagaagtggagagtggtgagttaaaaatacctagacaggggcaggtatttttattattttatttttttgagatggagtttcactttgtcrcccaggctggagtgcagtggcgcgatttcggcttaccgcaacctccgcctcccggggaaaaggagtaggaacaggaggttaaatggagcttagctagatg

SEQ ID NO: 496315 - DNA, 201 bp, Homo sapiens
gacagggttttgccatgttggccaggctggtctcgaactcctcaagggaaccacccacctcagcctctcaaagtgctgggattacaggcatgagccaccaygcgctcggccaaatgtttgatttttttcagagacagggtcttgctatgttgcctgggctggtcttaaacccctggcctcaggtgattctctggcctcagt

SEQ ID NO: 496316 - DNA, 201 bp, Homo sapiens
ctcaagtaatcttctcgcttcagcctcctgagtagctgggactacagttctttttctttcttttgttttttgtttttttgagatggagttttgctcggtcrcccaggctggagtgcagtggcgtgatcttggctcactgcaacctccccctcccgggttcaagcagttctcctgcctcagcctcctgagtagctgggacta

SEQ ID NO: 496317 - DNA, 201 bp, Homo sapiens
ctacaatgaatgaatcatttgtttctgttgaagcttcaagaaattactgttccttcaaggaatttctgggtgggcaggttggagtacaatggtgcaatcayggctgattgcaacctccaacttttgggctcaagtaatcttctcgcttcagcctcctgagtagctgggactacagttctttttctttcttttgttttttgt

SEQ ID NO: 496318 - DNA, 201 bp, Homo sapiens
ctatgattgtacaatgtccccaactaaattctgtgagggcaggccccatagccatacttagcacagtcgatggtacatgataagcactcagtatcctacartgaatgaatcatttgtttctgttgaagcttcaagaaattactgttccttcaaggaatttctgggtgggcaggttggagtacaatggtgcaatcatggctg

SEQ ID NO: 496319 - DNA, 201 bp, Homo sapiens
cctggaggacaaaattgcccctggttgagaattgctgcgttagaaagtatcgtagctatgattgtacaatgtccccaactaaattctgtgagggcaggccycatagccatacttagcacagtcgatggtacatgataagcactcagtatcctacaatgaatgaatcatttgtttctgttgaagcttcaagaaattactgtt

SEQ ID NO: 496320 - DNA, 201 bp, Homo sapiens
gagtgcagtggcacaatctcggctcactgcaagctcagcctcccgggttcacgccattcacctgcttcagcctcccgagtagctgggactacaggcgccckccaccaggcccagctaattttttgtatttttagtatagacggggtttcactgtggtcttgatctcctgatctcgtgatctgctcgcctcggcctcccaag

SEQ ID NO: 496321 - DNA, 201 bp, Homo sapiens
ctgtcacccaggctggagtgcagtggcacaatctcggctcactgcaagctcagcctcccgggttcacgccattcacctgcttcagcctcccgagtagctgrgactacaggcgcccgccaccaggcccagctaattttttgtatttttagtatagacggggtttcactgtggtcttgatctcctgatctcgtgatctgctcg

SEQ ID NO: 496322 - DNA, 201 bp, Homo sapiens
catcagaactgtgtcagttgaagctctttgtggggctctctcttcaagagaaaatccgggggcatatcagcacatttatcatttaccagacttttatttawtttatttatttgtatttttagtagagatggggtttcgccgtgaaggccaggctgctctcgaactcctaacctcaggtgatccccccacctcggcctccca

SEQ ID NO: 496323 - DNA, 201 bp, Homo sapiens
cagcctcccaaagcgctgggattacaggcatgagccattgcacctggccttacaggcatgagccattgcacctggcctaaatggcatctttactggggcamagtggtgcctgttatttggtttctgtgttaaacaagccaacttgtatcttctggtagcatgtgtaggttttactttgtgacatgttaaaacctcgtgata

SEQ ID NO: 496324 - DNA, 201 bp, Homo sapiens
cactgtggatgggctttagtagtgctcctgtggagatcttaaaactcctacagtattgcttctctcctcatccttcactggttgggagactctctctttamttttactcccacctcaaaattttatggtgcaagatgtgaaaagttgaattagagaaaatttagatttctcttggagtcaaagaatataggtttccttctt

SEQ ID NO: 496325 - DNA, 201 bp, Homo sapiens
ccatcctcccacctcagtctcccaggtagctgggaccacagctgtacaccaccatgcttggaaaaattttaaattatttttgtagagacaaggtctccctrtgttgccccggctagtcttgaactcctgacctcaagcaaccctcctgtcttggcctcccaaagtgctgggattagaggagtgagccactgtgcccagcca

SEQ ID NO: 496326 - DNA, 201 bp, Homo sapiens
cccttctcagcctcccaaagcgctgggattacaggcatgagccattgcacctggccttacaggcatgagccattgcacctggcctaaatggcatctttactggggcaaagtggtgcctgttatttggtttctgtgttaaacaagccaacttgtatcttctggtagcatgtgtaggttttactttgtgacatgttaaaacct

SEQ ID NO: 496327 - DNA, 201 bp, Homo sapiens
gcaaccctcctgtcttggcctcccaaagtgctgggattagaggagtgagccactgtgcccagccagtatcctaactcttatcagtcaggatggaggcaagrggcatctattcatgagatacactaaatagagcctatggattttgatgactgataagatgttgtgggggagtttatggaatccttactattttccaggact

SEQ ID NO: 496328 - DNA, 201 bp, Homo sapiens
tgcccttctcagcctcccaaagcgctgggattacaggcatgagccattgcacctggccttacaggcatgagccattgcacctggcctaaatggcatctttactggggcaaagtggtgcctgttatttggtttctgtgttaaacaagccaacttgtatcttctggtagcatgtgtaggttttactttgtgacatgttaaaac

SEQ ID NO: 496329 - DNA, 201 bp, Homo sapiens
actgaagccctttggatttttgtgctattattgtcttcattataaagataaggaaattgagtctcagaaagtttgataactgcttatagtcacaaagccastgcatattgttattcaaacctccaatctctctgatttctctaaagaacactcttatccactatataatactgcccaacagtttccagttactgacttgat

SEQ ID NO: 496330 - DNA, 201 bp, Homo sapiens
ttatggtggtaccacctcgcaaataggctgggtgttactacaacaagggtagtcagaggctttaggagtgtacatgaccaccggaagaatgtacgtgtgtrtagagaataagaaaaggtgtgtctttcacacaactgaatctcattctctacacacacatacaatgtcatacttaaattctggacattattttccataaca

SEQ ID NO: 496331 - DNA, 201 bp, Homo sapiens
ttctcattctcattttttttctttgcttctcttttaaacaacactctctgacaagtgattgggcccacagagaccagagcctgtacacagagaatggacaragactatattgtcttccttactttatcttgtgagctgcttatctcttccgcagggaggacaatgtgttaaattgagataattctggcatgctgtcatctt

SEQ ID NO: 496332 - DNA, 201 bp, Homo sapiens
ctgaatggttaagatctgagaattgagatgttcaggaaatggagctttggaggaagggtgcaaacacaaacaaagttcatccattttgccaaggtgcctayttgaatgctaagcccctaattgttttttattttatttatgtttaaaaaaaaatttttttttttagacagggtgttgttttgtcacccagactggagggta

SEQ ID NO: 496333 - DNA, 201 bp, Homo sapiens
tttgaaatgcctagggagtttttaaaagaaaggcgggcacatccttgtatttacaggcagatatcctccctttcctcctcggctgctgctcttactttgamaagccaggctaacattgaaggtatgtacttctggacctgaaatcagacggctcaggtttggtctggcctcagtgctaagtgtctgtggccataggtgcct

SEQ ID NO: 496334 - DNA, 201 bp, Homo sapiens
ccggatcaggtcctcctccccctccaccaggcccccctcctcccccagtctctaccagttcaggctcagatgagtctgcttcccgctcagcactgttcgcrcagattaatcagggggagagcattacacatggtgagtgagcacttggacacgaacagtaggtacaacaagttgtgtgggccagaccccaccaaccagaac

SEQ ID NO: 496335 - DNA, 201 bp, Homo sapiens
aaatgcctagggagtttttaaaagaaaggcgggcacatccttgtatttacaggcagatatcctccctttcctcctcggctgctgctcttactttgacaagscaggctaacattgaaggtatgtacttctggacctgaaatcagacggctcaggtttggtctggcctcagtgctaagtgtctgtggccataggtgccttaaa

SEQ ID NO: 496336 - DNA, 201 bp, Homo sapiens
aattagattttaattcttaatctgtcctgaatggttaagatctgagaattgagatgttcaggaaatggagctttggaggaagggtgcaaacacaaacaaarttcatccattttgccaaggtgcctatttgaatgctaagcccctaattgttttttattttatttatgtttaaaaaaaaatttttttttttagacagggtgt

SEQ ID NO: 496337 - DNA, 201 bp, Homo sapiens
aaaagaaaggcgggcacatccttgtatttacaggcagatatcctccctttcctcctcggctgctgctcttactttgacaagccaggctaacattgaaggtrtgtacttctggacctgaaatcagacggctcaggtttggtctggcctcagtgctaagtgtctgtggccataggtgccttaaacttctttcagcctcctttt

SEQ ID NO: 496338 - DNA, 201 bp, Homo sapiens
cacactgaacttagaaccagaaggatcagataaggatatgatggagtactggcttctctattcactggccgtgtgactagacaagtcatttagcttcactraaactaagttttctatctctaagcgtgtagtaatcatccttctattcctgaatagttgtcgggaggctcaaactgagataatgtatgtgactatcctttg

SEQ ID NO: 496339 - DNA, 201 bp, Homo sapiens
tcctcttgatgaaatgttttttatttttttattttttttgagacggagttttgctcgtttcccagcctggagtgcaatggcgcgatctcggctcaccgcarcctccacctcccaggttcaagcaattctcctgcctcagcctcccgagtacctgggattacagccatgcgtcaccatgcctggctaattttttttttttgt

SEQ ID NO: 496340 - DNA, 201 bp, Homo sapiens
agcggctgatcgcagtccggaggtgaggcggaactctgaggtgagggtgtgcagcttggtagggattggggtcccttccggggcccatcggcccctggtgktgttaatggcccttctggcctacgcgcgtgtcatgaaccctgccgagagggccggggctgaggccctcaggccgacccggactcttgggcgcggtctctt

SEQ ID NO: 496341 - DNA, 201 bp, Homo sapiens
atgtcctcttgatgaaatgttttttatttttttattttttttgagacggagttttgctcgtttcccagcctggagtgcaatggcgcgatctcggctcaccrcaacctccacctcccaggttcaagcaattctcctgcctcagcctcccgagtacctgggattacagccatgcgtcaccatgcctggctaattttttttttt

SEQ ID NO: 496342 - DNA, 201 bp, Homo sapiens
agatacccttaacacagctggtggaagtctgagttgtccagccacttctaggaatctatgatcatagtagctaaaaatggtgtaacaacctaaatccaacwgtaagagaaatggctaactaccacatgtcctcttgatgaaatgttttttatttttttattttttttgagacggagttttgctcgtttcccagcctggagt

SEQ ID NO: 496343 - DNA, 201 bp, Homo sapiens
ctaaacctcgggtggcagtgactcaggcactaaatgtcattggtttaatcagtgaaaccaaatgcttagagaagaacagtggctcctgatttgggttagayttagatggcatcttttttttttttttgagatggtgtcttgctctgtcttggctcaccgtaacctccgcctcccgggttcaagcagttctcctgcctcagc

SEQ ID NO: 496344 - DNA, 201 bp, Homo sapiens
ttaaagcaactattcaggctgaaatcagccaatgcagttttcccttacacgctataaaacatgtagaagtagaaagggactgccgagtgctctgtgcaatkagtcttcataatattctttgaacgtaggagagaagagaacccatgaccacacaaagttacctgtttgctccagacattgaaacagctagttcccaagtct

SEQ ID NO: 496345 - DNA, 201 bp, Homo sapiens
acgtcatccttgaatccatctttatatattagagtgggaaatgctgttttattaaagcaactattcaggctgaaatcagccaatgcagttttcccttacaygctataaaacatgtagaagtagaaagggactgccgagtgctctgtgcaattagtcttcataatattctttgaacgtaggagagaagagaacccatgacca

SEQ ID NO: 496346 - DNA, 201 bp, Homo sapiens
ctggagtgcagtggcacgatcttggctcactgcaacccccgcctcctgggttcaagcaattcttctgcctcagcctcctgagtagctggtactacaggtgygcaccaccacgcccagctaatttttgtatttttagtagagatggggtttaactatattggccaggctggtctcaaactcctgaccttgtgttctgctagc

SEQ ID NO: 496347 - DNA, 201 bp, Homo sapiens
ccatttctaattttttttttttttttttttttttttgagacagagtgtctctctgtcgcccaggctggagtgcagtggcgcgatctcggctcactgcaaayctccgcctcctggattcaagagattcttgtgcctcagttctggcagaaggtggtgtttttacaagatgatttctaggattacaggcatgcaccaccatgc

SEQ ID NO: 496348 - DNA, 201 bp, Homo sapiens
taccatgctggccaggctggtctcgaactcctgacctcgtgatccgcctgcctcgccctcccaaagtgttgtgattacaggtgtgagcctccgcacccggygtgaagggcttttaatgccttgttgaatttgtttggatttgattttgtgggtggcagtttgctaattgatttgcccaggtccagcataaagaaatttctg

SEQ ID NO: 496349 - DNA, 201 bp, Homo sapiens
gctccaccatgcctggctaattttctaattttttcgtagagatgaggtctcactgtttcccaggctggtctctaatgattctcctgccttggtctccccaragtgctgggattacaggtgtgagccactgtgcccagccaagttcagctttttctcaaggggtaaaggataaacccatttggttacttgctggagtagcac

SEQ ID NO: 496350 - DNA, 201 bp, Homo sapiens
gcctcctggattcaagagattcttgtgcctcagttctggcagaaggtggtgtttttacaagatgatttctaggattacaggcatgcaccaccatgcctggytaatttttgtatttttagtagagacgaggtttcgccattttagccaggctggtctcgaactcttgacctcaggttatctacccgcctcagcctccctaag

SEQ ID NO: 496351 - DNA, 201 bp, Homo sapiens
gaaactgggattacaggcgtgcgccaccacgcccggctaatttttgtatttttagtagagacgggattttaccatgctggccaggctggtctcgaactcctgacctcgtgatccgcctgcctcgccctcccaaagtgttgtgattacaggtgtgagcctccgcacccggcgtgaagggcttttaatgccttgttgaatttg

SEQ ID NO: 496352 - DNA, 201 bp, Homo sapiens
ggcatgcaccaccatgcctggttaatttttgtatttttagtagagacgaggtttcgccattttagccaggctggtctcgaactcttgacctcaggttatcyacccgcctcagcctccctaagtgctgagattacaggcctgagccactgcgccaggcctggttttttggtttcaaaccacaatagacattgctggagaatc

SEQ ID NO: 496353 - DNA, 201 bp, Homo sapiens
tcttaaccaatatgagtgcttctggaggggagggaccatgtgtcttctatttcttcagtaggcccacaatgctaagcactttgattttattagcatcttcygtgtgcctagtttttctaggtgctgggagatagagtcagtgcaggaggtagaatggataaattcccatccttcttgagcctatattctagtacgtaatat

SEQ ID NO: 496354 - DNA, 201 bp, Homo sapiens
aacagaagggactgaagatttctggcattgaagaaagctattttatgaacattctgcactgagcaggtaaaaacccaataatgcacaccaaaagtacacasaaatgaggtagtcccatgtagtggagccccaaaggtaggtgctttctgcctaagtggagctcaaggtagcaaaaaataatggggatgagccatggcacct

SEQ ID NO: 496355 - DNA, 201 bp, Homo sapiens
ggtaggtaaagcggaacgagggcgtggcctctcttgtgagcccgccctccccgtgtcgctcccgccttgagggcggggctctttcccaagtgccctctgtragagccgggccgctctctccggggcgtggcgaagaggggcggagtcacgagcggggcggtgagacttcctgcccagtcgcgggccagcctagcgcttcag

SEQ ID NO: 496356 - DNA, 201 bp, Homo sapiens
ctctgcatgatatccctccaaaagcttgtctattctcatgacttcatgacagttctttgccaatgatttgcaaacattatctccagtcttgattctttccyaggctttatttctaaatactcactagtcatttccacttagaagctttgtcttcttttcaaactcagcatatccaaaactgacctcatcttgttgccctaa

SEQ ID NO: 496357 - DNA, 201 bp, Homo sapiens
agttctttgccaatgatttgcaaacattatctccagtcttgattctttcctaggctttatttctaaatactcactagtcatttccacttagaagctttgtmttcttttcaaactcagcatatccaaaactgacctcatcttgttgccctaactagaacatgccacaacccatttctgcctataatgtcattattctcttaa

SEQ ID NO: 496358 - DNA, 201 bp, Homo sapiens
tcagcactgttcgcgcagattaatcagggggagagcattacacatggtgagtgagcacttggacacgaacagtaggtacaacaagttgtgtgggccagacsccaccaaccagaaccgtctgtaaactacaaccctggcttgtgtggtggagactcgtttggtgtgtcctgttcctttaagggacggcaaagctggcttaaa

SEQ ID NO: 496359 - DNA, 201 bp, Homo sapiens
tatggacagagctgcaggcttacattaaggagttccataccaccggactggcctggagcaaaacggttagtgaatccttcctccctccctccctccctccyactttctctctccagcatggggtccacaggtttcttagacttcagcactaccaaagtctgtgagggaatgctagttttttcagtggaagggaggaagaaa

SEQ ID NO: 496360 - DNA, 201 bp, Homo sapiens
tagaaaagctgccattgagcggagcctaagaaacaccacgggtaggagaatgtgagcccataggaaagaagggttctggagtcaccactgttatgtacccrgatcacctgtgacaagttcttctttaatcctcccagggataagaagcatgtagactgggtcaaagcttatttaagtatatggacagagctgcaggcttac

SEQ ID NO: 496361 - DNA, 201 bp, Homo sapiens
tgtgcacatacatttgatatgtctttctagacatagaggataaggatttacatatccttatcctcacccacaatatacacacattccatgttgttgttaayggaaccatataatttaatcttggggagaagagaaatgataaaagtacttttccaaaactgcttgcaagagaacatctcaaaggctctggttttggctttg

SEQ ID NO: 496362 - DNA, 201 bp, Homo sapiens
ggcaagcttttaactgctgtgaatgtcagttcagtttcttcattctaaaaatagggatcaatgtctgcgtaacataccttgcagaattattttaagtctcmaaagaatcaacagattaataatgttaagcatttacaactatacagaattactatatttaattgatattatatattctaagaagagtactttccttatggt

SEQ ID NO: 496363 - DNA, 201 bp, Homo sapiens
attgttccattttgcagatgacatctaattttattaaattattctgttcctgagaattggcatcctcttcatccacctggggatgaccaggaattttctgkttttttctctgtaggtgctatttaatatttaaataacaaatgacatttgatctgtttcagcaggtggtccattatggctgacatgcaaaatctggtagaa

SEQ ID NO: 496364 - DNA, 201 bp, Homo sapiens
aactaagttttctatctctaagcgtgtagtaatcatccttctattcctgaatagttgtcgggaggctcaaactgagataatgtatgtgactatcctttgcwaattctaactttctacacacagtatcatagtaaatattgagtatttgaatgagtaagcatttactttagtgaacaccttttcctgagcagttctcttgct

SEQ ID NO: 496365 - DNA, 201 bp, Homo sapiens
gagagaaagcatggctttttctggaaaacgcaagtagtcccgggttgctgtagtgtgctaaggaaaggtgtagcaagagataaaacaggagtggtagaagrttaaacaggactagatgagagaaacccttgtttggactttaccctgaacgctctggggtatgtgtcaaatgcaactctaatatatcttaaatgcaaatat

SEQ ID NO: 496366 - DNA, 201 bp, Homo sapiens
ctcggctgctgctcttactttgacaagccaggctaacattgaaggtatgtacttctggacctgaaatcagacggctcaggtttggtctggcctcagtgctragtgtctgtggccataggtgccttaaacttctttcagcctccttttgttcatcttttaagtggagatctctgctgaccccacaagattaaattcagcgta

SEQ ID NO: 496367 - DNA, 201 bp, Homo sapiens
agtcctcccacaacaatgtccagactaattgccttcccacgtcacaaacggggaaaccgaggtatgcacgcccagagacaggcggagcgtggcctcgatcmccaccgagagctgacggccgcccggattcccgccctcagagaatcctggcccccagtcgttccaagaccctttacggactgcagcttaaaggaaccggcc

SEQ ID NO: 496368 - DNA, 201 bp, Homo sapiens
ccttttcctgagcagttctcttgcttaatgaggtcttttgattttgtaaatatgctacttttttatctgatatttttgtattgttccattttgcagatgayatctaattttattaaattattctgttcctgagaattggcatcctcttcatccacctggggatgaccaggaattttctgtttttttctctgtaggtgctat

SEQ ID NO: 496369 - DNA, 201 bp, Homo sapiens
ttttctctctttttttcttttctgagacagtgtcttgcgttgtcacccaggctgaagtacagtggcacaatcacagctcattgcagcctcaacctcccagstcaaacaatcctcccacctcagtcctccaagtagctgggacttcaggcacgctccaccatgcctggctaattttctaattttttcgtagagatgaggtct

SEQ ID NO: 496370 - DNA, 201 bp, Homo sapiens
ttgaggggagagtgagtaagagcctttatttatttattttcttactcaaacacctttattagcccactgttcttttttttttttttggaaacataatctcrctctgttgtccaagctggagtgcagtggcgcaatctcagcttactgcaacctccacctctcaggttcaagcaattctcatgcctcagcctcccaagtagc

SEQ ID NO: 496371 - DNA, 201 bp, Homo sapiens
tatttgatgtgttaaatgttttatgttcaatttctttggattgcatatatatatgtgcatatatatgtgtatttgtgtgtgtatatataatgtatgtataygtgtgtttttacgtatatatgtaatatatattatatatgtttatatacagttgaccctaaaacaatgcagggttagggacactgaccacctacacggttg

SEQ ID NO: 496372 - DNA, 201 bp, Homo sapiens
gaacccttcgtgtcttcatctcattcttcaaatttcttgcctctttttctgttgtcggtcatgagtctttgacagactctgctaccttcttcctctttcartgacccctgggattacattgggcccattgaataatccaaaataatctccttaatctcatctacaaagtcacttgccatgcaaggtctcctgttttcacag

SEQ ID NO: 496373 - DNA, 201 bp, Homo sapiens
cctctagggctggagtctaatcatctacttaagagccctccaggtgattctgatgctccctaaagtttgagaaccactgttatgaccctcttttattttcrtcctagtctttagcaccagttggtgtaggagttgagacctacttcacagtagtaagtatactgatgagtgaattccttaaatgttattaaataattattt

SEQ ID NO: 496374 - DNA, 201 bp, Homo sapiens
cagtctgggcccgggcggagggtctgtgggggctacccccgtcctcgctttccactcgacccctgccgggcgagcctcccgaggcctggcccttccaaccygtcaccgcggcccggtgtcctagccgaacgctggcttcattttatctacgaggaaggagaaacggggagcgcgccctctcccagaagcagccccgttacc

SEQ ID NO: 496375 - DNA, 201 bp, Homo sapiens
gtcaggctgatcttgaattcctgacctcgtgatccgcccgcctccgcctcccaaagtgttgggattacaggtgtgagccaccgcgcccggccgaaacggasgttttaagtacaacgtgatgttttgttttcttgggtcggctcgggccgcacccttcttagagtctgactgctgacttttcaaaaaacaacattaacccgg

SEQ ID NO: 496376 - DNA, 201 bp, Homo sapiens
tcggcaggtggggtgggtggggatagagcattaggaaaaacagctaatgcatgctgggcttaatacctaggtgatgggttgataggtgcagcaaaccaccrtggtacacgtttacctatgaaacaaatctgcacatcctgcacatgtaccctagaatttatatgtatatcacacaaagagttttggagtggttattcctgg

SEQ ID NO: 496377 - DNA, 201 bp, Homo sapiens
cagatgtttgaggctttcagaagctcttctaaaaaatgatacacacctttcacaagggcaaactttttccttttccctgtgtattctagtgaatgaatctyaagattcagtagacctaatgacatttgtattttatgatcttggctgtatttaatggcataggctgacttttgcagatggaggaatttcttgattaatgtt

SEQ ID NO: 496378 - DNA, 201 bp, Homo sapiens
agaccagtcctgtttgcagggaagccccacttgaaggaagaagtctaagagtgaagtaggtgtgacttgaactagattgcatgcttcctcctttgctcttrggaagaccagctttgcagtgacagcttgagtgggttctctgcagccctcagattatttttcctctggctccttggatgtagtcagttagcatcattagta

SEQ ID NO: 496379 - DNA, 201 bp, Homo sapiens
gggaacaacacacactggcgcctgtcggcaggtggggtgggtggggatagagcattaggaaaaacagctaatgcatgctgggcttaatacctaggtgatgrgttgataggtgcagcaaaccaccatggtacacgtttacctatgaaacaaatctgcacatcctgcacatgtaccctagaatttatatgtatatcacacaaa

SEQ ID NO: 496380 - DNA, 201 bp, Homo sapiens
ctagagtttaactatggttcgttcactcagagcttagacctgggtttaaatgctgttctaccagtttccagttcagaggttgctataataattttaataatttttttttttaattttgagacagtctctctctgttgcccaagctggagtgcagtggcacagtcttggctcactgcaacctccacctcctgggtgcaagcg

SEQ ID NO: 496381 - DNA, 201 bp, Homo sapiens
tacaagtgtataacaagtgttggaagtttgagcattgcaatttcaacgacgtcacaacccgcttgagggaaaatgagctaacgtactactgctgcaagaakgacctgtgtaactttaacgaacagcttgaaaatggtgggacatccttatcagagaaaacagttcttctgctggtgactccatttctggcagcagcctgga

SEQ ID NO: 496382 - DNA, 201 bp, Homo sapiens
tggccctctctttcagccagcagcttggggtggggccagtagagtgggaaccacagtggctatatgagtcaatttgctcatattgtcatttgactcactgmccctgatggggaagatagtgttattcccacagtgtggtagtacacactggggcttatagggactgagcctactcaagggtatatggtgctgtgggtcaga

SEQ ID NO: 496383 - DNA, 201 bp, Homo sapiens
gtaatggacatatgggttgtttccactttttagcaattttgaatcatggtgccatgaacattcatgtggaaacttgtgtgtgaacgtagttttcaattcaractacgataagatacttggagtgtatacatctggcctttattttcctgtgtgcccaaggctatttttccaaaaatgagaccatgatagcatgttcttata

SEQ ID NO: 496384 - DNA, 201 bp, Homo sapiens
actatggttcgttcactcagagcttagacctgggtttaaatgctgttctaccagtttccagttcagaggttgctataataattttaataattttttttttwaattttgagacagtctctctctgttgcccaagctggagtgcagtggcacagtcttggctcactgcaacctccacctcctgggtgcaagcgattctcgtgt

SEQ ID NO: 496385 - DNA, 201 bp, Homo sapiens
cttgttttacaagcaacaagattgaggcctccccaaaattaataacttgtcaaataacacacagaagtggtacacgggaatgtgaacacacagtctggcarcagagtccctgctcttccctcctgctccaggccatctgtcactgggccaccccctctcctcagccacccctcccctggttgctggaggaaattgtgtgct

SEQ ID NO: 496386 - DNA, 201 bp, Homo sapiens
gcctgagtgtgtactaggctattccatgtaagtttgtgtaactacacgctatgacgtttgcacagagacagatatgatggtgctatacaaagtaagtctaraagagagacaggttggctgctaattcaaccaatatttactggcatcctagcagtataaaccatggaagtgtaagcaaggttaaatgtacttagtcttgaa

SEQ ID NO: 496387 - DNA, 201 bp, Homo sapiens
gagggctaagaagggaagggtgtgcctgggaggggcaacagcaggtgccagggctcggtagcctcagagcaaggtgctcatgaatttggggatgggcaatrctaacatgcacaagtcctgtccagtctgcattttccaaatttgttagactacagaatattcacctccatcaccctgttaaaatagagtttaggaagtggt

SEQ ID NO: 496388 - DNA, 201 bp, Homo sapiens
agaactcttcccacttactttcttacccttgtgtgtgtctccccacagggttacaagtgtataacaagtgttggaagtttgagcattgcaatttcaacgaygtcacaacccgcttgagggaaaatgagctaacgtactactgctgcaagaaggacctgtgtaactttaacgaacagcttgaaaatggtgggacatccttat

SEQ ID NO: 496389 - DNA, 201 bp, Homo sapiens
gtattatgagacttacctcaataataagaaacaaaattttcacagatttttttattgacaaaattcataacataattattgagtccagcataataatacayatctactaatgaggggaatagaattctttttagggggataaccatttgcttaattggggttcaaaattagtgttccctcgcatcaaatcaattgcagatg

SEQ ID NO: 496390 - DNA, 201 bp, Homo sapiens
ttgataccatcagtttatgtcgtctgtttacaagatgaattacttgtctgaaatggcaggcggccacaactgcagacctcaatctgtagtacatatcaagyagttcaactgttttttggtaacatcatgacttttttctgcttcttgggagcgtggccagcatcacttgtggcaccctgtaagggtctcatgtgtcattca

SEQ ID NO: 496391 - DNA, 201 bp, Homo sapiens
gacctcaggtgatccaccctcctcggcttccctaagtgctgggattacaggcgtgagccactgcgcctggcccagatagtaaatattttaagctttgcagrccaagaggcaaaatcaagggtattatgagacttacctcaataataagaaacaaaattttcacagatttttttattgacaaaattcataacataattattg

SEQ ID NO: 496392 - DNA, 201 bp, Homo sapiens
actagtatctatatacattttatacattcatgacatacctaaatttttcttaattttaaaaaatatttctaggctatgcagtttatctaacagttttttcmattgcaaatctccaaaatattttccaatatattttcagaaaaaaaattgcatataaatggacccctgcagttcaaacctgtgttgttcaagggtcaaatg

SEQ ID NO: 496393 - DNA, 201 bp, Homo sapiens
tggtacccagctgtcctatgcccatgggtttaaagtgcacagctgttgtcttgtctttgacagtgtgtactcctggcattcggtcagtcccttagaagggrgtagttcagtaatgataccctgtcccagaggttaccaaactttttctgtacaggaccagatagcaatttttttttttttttaaacagagttttgctctgt

SEQ ID NO: 496394 - DNA, 201 bp, Homo sapiens
tgttgttgttttttaaaactaatatttcaaggcattaatctgtaaccttcacaagtcagaggatcctctattgggtaggatttcacacctgtgagggcagrcatggccatttcagatgctctagagaactgggttcctgtgtgtgctcagaaagtgaggacccaccttgcttccactggactttccactgaaaaatctatt

SEQ ID NO: 496395 - DNA, 201 bp, Homo sapiens
cctccgccccccatacacatacacatactccatatgaacgttttgctcttggaaattcatattttggcagtggttcataaaggcctggtcttattttgatsgaacagcccgaccttggcatctacacatagctacttcctttctctgctgtcttggcttcccctgcagcatgtcatgggatcagctatagcaacaaccagc

SEQ ID NO: 496396 - DNA, 201 bp, Homo sapiens
tttctaaggtacttcaaagaacagctccccatcaggggccctgtgtgttgtggcagtgtgatttatgtcaaggaccattccaagggaagtgtcctgaaccrgcagctcctgccagcctgacacctttccagtgcctaacccgagtcaggagattccttccttcctccttccgtggggatgcctgacattgtagctacattg

SEQ ID NO: 496397 - DNA, 201 bp, Homo sapiens
tcagcaaattcctaagtagcagatgaccttcaagatgtgtgagaaggaagggacaggaatgattgtcaggattgtcagttccccagggaactctgcatttmtgacttagggagggtagatgactcacccttccaagaacccatctgtctgtccgggcctgtggggctctggagaatagaatatggagtaccctggtttaca

SEQ ID NO: 496398 - DNA, 201 bp, Homo sapiens
ctccttatttcaggatgggttcagggatgtaggattggagttgggagatttcttagttctgctatggatgctttgtacttaggcaagttcaaaacctcccyaagctttggcttctttactgggtaaagtagggttggaggcatttcaggctttccttcttctcacctgatgctatcactacacatctaggcattcacgtaa

SEQ ID NO: 496399 - DNA, 201 bp, Homo sapiens
caagtgtccccattatacttcttacagtgaggagccagagcttccaggtatgctaagccattgctccctgttccactgctgaatgcatgctggtgccttcyagagtcacccctttggtctgattcacttagtgctgtggctccgagaagtggccctctctttcagccagcagcttggggtggggccagtagagtgggaacc

SEQ ID NO: 496400 - DNA, 201 bp, Homo sapiens
agctccttcctatgttatgaccttgtcctcagtggggcatcgtcctgagttacagcccgtcctgagttacagcgtggcttttggcaggggtgggtcaacamtcggcggctgaagtttcactcctgtcaccataagctgcttggggacaccaatggataccattcttagagtgctgtgcaagtccctttggggtccactctg

SEQ ID NO: 496401 - DNA, 201 bp, Homo sapiens
actgtgaatcttgtggaaacaccactgatgtcaaatgtcttctctaatgacctcagcttaactaatgtatttcagaagctgaatttataagaagtctcccrtctccccactagagtttaactatggttcgttcactcagagcttagacctgggtttaaatgctgttctaccagtttccagttcagaggttgctataataat

SEQ ID NO: 496402 - DNA, 201 bp, Homo sapiens
aaaccaccacaaatttagctgtttcaaatgccacaagtttattaatctttccattctgtaaatcagaagtctgacacaggtctcacagggctgtaatcaargtggcagggctctgtgctgctctggaggctctaggggagagtctgtttctgtgctcattcaggttcctggtagaatatagtccttgtgactggaggactg

SEQ ID NO: 496403 - DNA, 201 bp, Homo sapiens
tatgatggttgttttctctttgtctcttcctgctgatgtaatttgttccgtgaactgagtgatggatgtttgtctgggcgcttcaacaggcatggctagarcaggtattgtgtatgtctccaaggtgacacgcagacctggggttcaaaagctctagttctctgacattgctgacactaggtatcttgtgagttgccagcc

SEQ ID NO: 496404 - DNA, 201 bp, Homo sapiens
atgccacaagtttattaatctttccattctgtaaatcagaagtctgacacaggtctcacagggctgtaatcaaggtggcagggctctgtgctgctctggargctctaggggagagtctgtttctgtgctcattcaggttcctggtagaatatagtccttgtgactggaggactgaggttctgtttctttgctgagtgtcag

SEQ ID NO: 496405 - DNA, 201 bp, Homo sapiens
tggaactgaggctaagacttgacactccccaaccatcccagaaaactgagggcttccttaggtttgatgcctgaggtctcccctgctcattcaacccaggrtgtttctctggcttcctcacctcacatcaccctctgtctgccttcccaccgttcaccccccaacactccctccccacacaatttcttcctcaagtaacct

SEQ ID NO: 496406 - DNA, 201 bp, Homo sapiens
cctgaagcatttatgtgccagtcactactctaagcattttacgtgtatttgcttatttaatcctcatgccaacctgatggagttggtggtatttttatccktgttttacaagcaacaagattgaggcctccccaaaattaataacttgtcaaataacacacagaagtggtacacgggaatgtgaacacacagtctggcaac

SEQ ID NO: 496407 - DNA, 201 bp, Homo sapiens
catgctgctgataaagacataccgaagactgggtaatttgtaaagaaatagaggtttaatggactcacagttccacgtggctagggatgcctcacaatcayggcagagggtgaaaggcacgtcttactggcagcagacaagacagaaatatgagagccaagtgaaaggggaaaccccttataaaaccatcagctcttgtgt

SEQ ID NO: 496408 - DNA, 201 bp, Homo sapiens
tgataaagacataccgaagactgggtaatttgtaaagaaatagaggtttaatggactcacagttccacgtggctagggatgcctcacaatcatggcagagrgtgaaaggcacgtcttactggcagcagacaagacagaaatatgagagccaagtgaaaggggaaaccccttataaaaccatcagctcttgtgtgacttatt

SEQ ID NO: 496409 - DNA, 201 bp, Homo sapiens
aagaaatagaggtttaatggactcacagttccacgtggctagggatgcctcacaatcatggcagagggtgaaaggcacgtcttactggcagcagacaagasagaaatatgagagccaagtgaaaggggaaaccccttataaaaccatcagctcttgtgtgacttattcactaccacaagaacagtatgggggaaaccgtcc

SEQ ID NO: 496410 - DNA, 201 bp, Homo sapiens
ctggctgacacattttaactttataatagatttgtgtatgtttttgggtagtgataaaatagactagtatctatatacattttatacattcatgacatacytaaatttttcttaattttaaaaaatatttctaggctatgcagtttatctaacagttttttcaattgcaaatctccaaaatattttccaatatattttcag

SEQ ID NO: 496411 - DNA, 201 bp, Homo sapiens
catgtgctatgttggtgtgctgcacccatcaacttgtcgtttacattaggtatttctcctaatgctatccctcccccaccccccaactcccgacaggcccyggtgtctgatgttcccctccctgtgtccatgtgttctcattgtttaactcccactgacaagtgagaacatgtggtgtttggttttctcttcttgtgttac

SEQ ID NO: 496412 - DNA, 201 bp, Homo sapiens
ttgtccatgcctatgtcctgaatggtattgcctaggttttcttctagggtttttatggttttaggtcttacatttaagtctttaatccatcttaagttaamttttgtttaaggtgtaaggaaaggatccagtttcagctttctacatatggctagccagttttctcagaaccatttattaaatagggaatcctttccctgt

SEQ ID NO: 496413 - DNA, 201 bp, Homo sapiens
tgcctatgtcctgaatggtattgcctaggttttcttctagggtttttatggttttaggtcttacatttaagtctttaatccatcttaagttaaattttgtktaaggtgtaaggaaaggatccagtttcagctttctacatatggctagccagttttctcagaaccatttattaaatagggaatcctttccctgtagcttgt

SEQ ID NO: 496414 - DNA, 201 bp, Homo sapiens
ggcctttgttctgttccattggtctatatatctgtttcggtaccagtaccatgctgttttggttactgtagccttgtagtatagtttgaagtcaggtagcrtgatgcctccagctttgttcttttggcttaggattgtcttggctatgtgggctcttttttggttccatatgaaatttaaagtagttttttccaattctgt

SEQ ID NO: 496415 - DNA, 201 bp, Homo sapiens
aagatgtgtgagaaggaagggacaggaatgattgtcaggattgtcagttccccagggaactctgcatttctgacttagggagggtagatgactcacccttscaagaacccatctgtctgtccgggcctgtggggctctggagaatagaatatggagtaccctggtttacaggcactgccacctccttatttcaggatgggt

SEQ ID NO: 496416 - DNA, 201 bp, Homo sapiens
aacagacaatttgacttccttttttccaattgaataccctttatttctttctgttgcctaattgccctggccagaacttccaatactgtgttgaataggartggtgagagagggcatccttgtcttgtgccagttttcaaggggaatgcttccagtttttgcccattcagtatgatattggctgtgggtttgtcataaata

SEQ ID NO: 496417 - DNA, 201 bp, Homo sapiens
aatttcttcctcaagtaacctcattactcctgagtagcactaacagtggccacagctttttgagtgccatctttggccaggcattgtgctatgcagtacaygtaactatctccatgcttactagccaaagcgtgatcagaggttaacacatagcaaagaggtgacagagccagaactatctggccttgttcagaggcctcc

SEQ ID NO: 496418 - DNA, 201 bp, Homo sapiens
gtttgtcataaatagctcttattattttgagatacattccatcaatatctagtttattgagagtttttagcatgaagcgctgttgaattttgttgaaggcsttttctgtgtctattgagataatcatgtggtttttgtcgttggttctgtttatgtgatggattatgtttattgatttgcatacgttgaaccagccttgca

SEQ ID NO: 496419 - DNA, 201 bp, Homo sapiens
ggtcttattttgatggaacagcccgaccttggcatctacacatagctacttcctttctctgctgtcttggcttcccctgcagcatgtcatgggatcagctrtagcaacaaccagccagtcatgtggaactgaggctaagacttgacactccccaaccatcccagaaaactgagggcttccttaggtttgatgcctgaggtc

SEQ ID NO: 496420 - DNA, 201 bp, Homo sapiens
gatggcaaaaagtaaaggatcaggaagaaaaataaaaagccataaatgatcttgcttagtgttagttaccatctacattgtagggcatttataaaatagcyttaaaacaatcagctgtttctttttctgcctcccgccctcctccgccccccatacacatacacatactccatatgaacgttttgctcttggaaattcata

SEQ ID NO: 496421 - DNA, 201 bp, Homo sapiens
tgaattttgttgaaggccttttctgtgtctattgagataatcatgtggtttttgtcgttggttctgtttatgtgatggattatgtttattgatttgcataygttgaaccagccttgcatcccagggatgaagccgacttgattgtggtgaatgagctttttgatgtgctgctggattcagtttgccagtattttattgagg

SEQ ID NO: 496422 - DNA, 201 bp, Homo sapiens
actaggattgcaacccctgctttttttgctttccatttgcttggcagatcttaattcattgtgagtagccttccacgcccattacttttcctggctatgcrgttccccaccatggaagtgtaccatagtatactcatttccttattgttggatgtgtgtatcactaaatttttgctattttaaagaatgtttgtatgccct

SEQ ID NO: 496423 - DNA, 201 bp, Homo sapiens
acctctagggctggagtctaatcatctacttaagagccctccaggtgattctgatgctccctaaagtttgagaaccactgttatgaccctcttttattttygtcctagtctttagcaccagttggtgtaggagttgagacctacttcacagtagtaagtatactgatgagtgaattccttaaatgttattaaataattatt

SEQ ID NO: 496424 - DNA, 201 bp, Homo sapiens
  misc_feature (1)...(201): n = A,T,C or G
acaccaatggataccattcttagagtgctgtgcaagtccctttggggtccactctgcttagagccatctgagctcagtccttctgctctgaggctcctccngtgttttaatgatgatgatggtcatagtgacagcagcagcagctaactaaccctgaagcatttatgtgccagtcactactctaagcattttacgtgtatt

SEQ ID NO: 496425 - DNA, 201 bp, Homo sapiens
cttagcttctaaaggccgcctgtgtgccttggcttagggaacccttcgtgtcttcatctcattcttcaaatttcttgcctctttttctgttgtcggtcatragtctttgacagactctgctaccttcttcctctttcaatgacccctgggattacattgggcccattgaataatccaaaataatctccttaatctcatcta

SEQ ID NO: 496426 - DNA, 201 bp, Homo sapiens
actccccgttcctgcgtagtccgctttctcttgctgccacattctaaaggcttgatattttccaaatggatcctgttgggaaagaataaaattagcttgascaacctggctaagatagaggggctctgggagactttgaagaccagtcctgtttgcagggaagccccacttgaaggaagaagtctaagagtgaagtaggtg

SEQ ID NO: 496427 - DNA, 201 bp, Homo sapiens
tctgcctgtgtcatgttggtataatatcttggccactgctggttttttgttttttataaatatggttggtggggggagcagaaaagaaagtggcaatacartgagcaatttaaaaaaagatttccacaccactgtagcatgtcttagaatattaacagcaaccatatattcactgtttattgtttactggggactgtgcca

SEQ ID NO: 496428 - DNA, 201 bp, Homo sapiens
ttcttctgctggtgactccatttctggcagcagcctggagccttcatccctaagtcaacaccaggagagcttctcccaaactccccgttcctgcgtagtcygctttctcttgctgccacattctaaaggcttgatattttccaaatggatcctgttgggaaagaataaaattagcttgagcaacctggctaagatagaggg

SEQ ID NO: 496429 - DNA, 201 bp, Homo sapiens
ggggatgaagataattgagcctagttctcttaacaatcctatgaagagcttagcacatagatgcacatatatttgaacactgaatgaacatgtttgccatsaatatttttgcccacagacgttccaaccatgggttttagcctttccttctaaagctttcttaagaggccaaatgagcccgggatctagccaccacaaaaa

SEQ ID NO: 496430 - DNA, 201 bp, Homo sapiens
tacttgcacaggatacatacgaaatagaattgaggattcaaaagcagatacagaactcttcccacttactttcttacccttgtgtgtgtctccccacaggrttacaagtgtataacaagtgttggaagtttgagcattgcaatttcaacgacgtcacaacccgcttgagggaaaatgagctaacgtactactgctgcaaga

SEQ ID NO: 496431 - DNA, 201 bp, Homo sapiens
tttgccatgaatatttttgcccacagacgttccaaccatgggttttagcctttccttctaaagctttcttaagaggccaaatgagcccgggatctagccascacaaaaatccatgtctacaggtaaccttttaaaatggccctcaaacatggccagtctcaagaacaacacccttcatcttagactcttttcatttcatgc

SEQ ID NO: 496432 - DNA, 201 bp, Homo sapiens
cagtgctgctttaagagatcctgactttcttcctgattctaggtcatagcctgcagtgctacaactgtcctaacccaactgctgactgcaaaacagccgtsaattgttcatctgattttgatgcgtgtctcattaccaaagctggtaagagcctcccctgtctgtctcctaaatgtaatggggtaataagtgcctgggaaa

SEQ ID NO: 496433 - DNA, 201 bp, Homo sapiens
aaatccctcaataactaaagacaaattatagttaccctgtctaaaaaaacaggggcatctgataattttgatatatttagctggatttgataaatttgatrtagtttagctggattgcagctaaaactccaaaccttccattcagagctcttgattctgtagggcaccagtccctctgcccccactggaagaccatattca

SEQ ID NO: 496434 - DNA, 201 bp, Homo sapiens
attttgatatatttagctggatttgataaatttgatatagtttagctggattgcagctaaaactccaaaccttccattcagagctcttgattctgtagggsaccagtccctctgcccccactggaagaccatattcattcactgttaatgtaggaagcgtagtaaggcccctagcgagaacatggtcattatgtacgagca

SEQ ID NO: 496435 - DNA, 201 bp, Homo sapiens
acttggctctttagcttgatcaactgtgtctcttggactcctcactactaagtataattaaactaagtatagtttccaaatgagacgataagggcaattastatgtgttgaatgaatattacagcagcaattagagctctgacttctgtcctgccaccagctagctctctccacctctgtttttcatttatgaaatgtatg

SEQ ID NO: 496436 - DNA, 201 bp, Homo sapiens
cctggcctcacgctgggtaagcttaaggtagaggtgcaggattagcaagcccacctggctaccaggccgacagctacatcctccaactgaccctgatcaaygaagagggattcatgtgtctgtctcagttggttccaaatgaaaccagggagcaggggagttaggaatcgaacaccagtcatgcctactggctctctgctc

SEQ ID NO: 496437 - DNA, 201 bp, Homo sapiens
aatgtggttatggccgaaaaggatatgcagtatgcttaatggtagcaactgaaagaagacatcctgagcagtgccagctttcttctgttgatgccgttccmtgaacataggaaaatagaaacttgcttatcaaaacttagcattaccttggtgctctgtgttctctgttagctcagtgtctttccttacatcaataggttt

SEQ ID NO: 496438 - DNA, 201 bp, Homo sapiens
taaactttggggttgctttctgcaaaaagttgctgtgactcatgccatagacaaggttgagtgcctggacccaaaggcaatactgtaatgtaaagacattwatagtactaggcaaacagcaccccaggtactccaggccctcctggctggagagggctgtggcaatagaaaattagtgccaactgcagtgagtcagcctag

SEQ ID NO: 496439 - DNA, 201 bp, Homo sapiens
ttatcatgttagcatgtagtccttctacttactaaaaaaattaactataaaacagcctctcgggaggctgaggcagaagaattgcttgaacccaggaggcrgaggttgcagtgagccaaggtcgtgccattgtactctagcctgggtgacagaacaagactctgtctctacaaaagaaaaaaaaaaaaaaaaacagcctca

SEQ ID NO: 496440 - DNA, 201 bp, Homo sapiens
tccacaccactgtagcatgtcttagaatattaacagcaaccatatattcactgtttattgtttactggggactgtgccagagcctgtctcatttaaatccrtccagccattccgggaggtcggtactgttacctcccatattacagctgaggaaatgaaggcaaagtagtaacttggcgccaggacacactttaatatgtt

SEQ ID NO: 496441 - DNA, 201 bp, Homo sapiens
caaagagagcaagcaagtgtccccattatacttcttacagtgaggagccagagcttccaggtatgctaagccattgctccctgttccactgctgaatgcaygctggtgccttccagagtcacccctttggtctgattcacttagtgctgtggctccgagaagtggccctctctttcagccagcagcttggggtggggccag

SEQ ID NO: 496442 - DNA, 201 bp, Homo sapiens
atcaatatctagtttattgagagtttttagcatgaagcgctgttgaattttgttgaaggccttttctgtgtctattgagataatcatgtggtttttgtcgytggttctgtttatgtgatggattatgtttattgatttgcatacgttgaaccagccttgcatcccagggatgaagccgacttgattgtggtgaatgagctt

SEQ ID NO: 496443 - DNA, 201 bp, Homo sapiens
tgtagatgtctgttaggtccacttggtccagagctgagttcaagtcctggatatccttgttaatttcctgtcttttgatctgtctaatattgacagtgggrtgttaaagtctcccactattattgtgtggaaatctaagtctctttgtaggtctctaagaacttgctttatgcgtctaggtgctcctgtgttgggtgcata

SEQ ID NO: 496444 - DNA, 201 bp, Homo sapiens
tcatctgcaaaaaagttggggaggaggttggtttttattttattttattttatttattttttagacatggtctcgctctgtctcccaggctggagtgcagwggtgcaagcttggctcactgcaccctccacctcccaagctcaaatgattctcatgccttagcctcctgaatagctgggattacaggcatgtaccaccatg

SEQ ID NO: 496445 - DNA, 201 bp, Homo sapiens
gcatgttcctaatgactaatgatatcaagcatcttttcatgtacttattggccatttgagaatcttctttggagaaatgtttattcaaatcctttgcccatttttttttaaagaggcaaggtcttgctttgttgcctaggctggaatgcagcagtacaatcatagctcactgcagccttaaagtcctgagtccaagtgatc

SEQ ID NO: 496446 - DNA, 201 bp, Homo sapiens
ggattcttgatgggctgagcagctggctggagctagtactgactgacattcattgtgatgagggcagctttctggtacaggattctaagctctatgttttmtatacattttcatctgtacttgcacctcactttacacaagaggaaactatgcaaagttagctggatcgctcaaggtcacttaggtaagttggcaagtcca

SEQ ID NO: 496447 - DNA, 201 bp, Homo sapiens
gccttaaaattcttcagtctgtaaggcctcaggctcctaggaggagtaaccatactcatgggcaactgtgaatcttgtggaaacaccactgatgtcaaatstcttctctaatgacctcagcttaactaatgtatttcagaagctgaatttataagaagtctcccgtctccccactagagtttaactatggttcgttcactc

SEQ ID NO: 496448 - DNA, 201 bp, Homo sapiens
tagccttaaaattcttcagtctgtaaggcctcaggctcctaggaggagtaaccatactcatgggcaactgtgaatcttgtggaaacaccactgatgtcaamtgtcttctctaatgacctcagcttaactaatgtatttcagaagctgaatttataagaagtctcccgtctccccactagagtttaactatggttcgttcac

SEQ ID NO: 496449 - DNA, 201 bp, Homo sapiens
gggcatcctgaggggcggggccggggggcggagccttgcgggctggagcgaaagaatgcgggggctgagcgcagaagcggctcgaggctggaagaggatcytgggcgccgccaggtaagaaggcccgaaggcctgctggggtttgggtgagccgagccgaggtggcggcggcagtctgggcccgggcggagggtctgtggg

SEQ ID NO: 496450 - DNA, 201 bp, Homo sapiens
gttgctgactttgggcccatattaatggagatggtgggctgccaggggacaagtcagtgctgctttaagagatcctgactttcttcctgattctaggtcayagcctgcagtgctacaactgtcctaacccaactgctgactgcaaaacagccgtcaattgttcatctgattttgatgcgtgtctcattaccaaagctggta

SEQ ID NO: 496451 - DNA, 201 bp, Homo sapiens
tgacattccttcctgtcccttccttccaggttctgtggacaatcacaatgggaatccaaggagggtctgtcctgttcgggctgctgctcgtcctggctgtyttctgccattcaggtgagtgctccagtctcaggacatggatctaggctgccttggccatgaactcccttcttaagcctcagtttcagccccagctgctcc

SEQ ID NO: 496452 - DNA, 201 bp, Homo sapiens
ctctagggctggagtctaatcatctacttaagagccctccaggtgattctgatgctccctaaagtttgagaaccactgttatgaccctcttttattttcgycctagtctttagcaccagttggtgtaggagttgagacctacttcacagtagtaagtatactgatgagtgaattccttaaatgttattaaataattatttg

SEQ ID NO: 496453 - DNA, 201 bp, Homo sapiens
tgtggctccgagaagtggccctctctttcagccagcagcttggggtggggccagtagagtgggaaccacagtggctatatgagtcaatttgctcatattgycatttgactcactgaccctgatggggaagatagtgttattcccacagtgtggtagtacacactggggcttatagggactgagcctactcaagggtatatg

SEQ ID NO: 496454 - DNA, 201 bp, Homo sapiens
tctctttcagccagcagcttggggtggggccagtagagtgggaaccacagtggctatatgagtcaatttgctcatattgtcatttgactcactgaccctgrtggggaagatagtgttattcccacagtgtggtagtacacactggggcttatagggactgagcctactcaagggtatatggtgctgtgggtcagagctggg

SEQ ID NO: 496455 - DNA, 201 bp, Homo sapiens
ctcttcatgtccccaaagagagcaagcaagtgtccccattatacttcttacagtgaggagccagagcttccaggtatgctaagccattgctccctgttccrctgctgaatgcatgctggtgccttccagagtcacccctttggtctgattcacttagtgctgtggctccgagaagtggccctctctttcagccagcagctt

SEQ ID NO: 496456 - DNA, 201 bp, Homo sapiens
tatacacactcctgttattctgggataagataaatgaccacagtaccttaatttctaggtgggtgcctgtgatggttcattgtaggtaaggacattttctytttttcagcagctgtgtaggtccagagcctctgggagaggaggggggtagcatgcacccagcaggggactgaactgggaaactcaaggttctttttactg

SEQ ID NO: 496457 - DNA, 201 bp, Homo sapiens
ccaatagcatgaggtgaacaggacgtagttaggccttcctgtaaacagaaaatcatatcaaaacactatcttcccatctgtttctcaatgcctgctacttyttgtagatatttcatttcaggagagcagcagttaaacccgtggattttgtagttaggaacctgggttcaaaccctcttccactaattggctatgtctctg

SEQ ID NO: 496458 - DNA, 201 bp, Homo sapiens
ttttactggaaagttacccaatagcatgaggtgaacaggacgtagttaggccttcctgtaaacagaaaatcatatcaaaacactatcttcccatctgtttytcaatgcctgctacttcttgtagatatttcatttcaggagagcagcagttaaacccgtggattttgtagttaggaacctgggttcaaaccctcttccact

SEQ ID NO: 496459 - DNA, 201 bp, Homo sapiens
ttgggtggtgataagcccattggattgtccccttggggggatgagctaggggtgcaaggaacacctgatgagtagataagtggagctcatggtatttcctraaagatgctaatctatttgccaaacttggtcttgaatgtactgggggcttcaaggtatgggtatatttttcttgtgtccttgcagttagcccccatgtct

SEQ ID NO: 496460 - DNA, 201 bp, Homo sapiens
tttaatgatgatgatggtcatagtgacagcagcagcagctaactaaccctgaagcatttatgtgccagtcactactctaagcattttacgtgtatttgctwatttaatcctcatgccaacctgatggagttggtggtatttttatccttgttttacaagcaacaagattgaggcctccccaaaattaataacttgtcaaat

SEQ ID NO: 496461 - DNA, 201 bp, Homo sapiens
tccttgaaccccaatggaatcaaacttgaaatcattaacaaaaagataacaggaaaatctccaaacacttgaaaaggttacatcctatgtcctttaattcrtacaacattcttgaaatgatagttatagaagtgaagaacagatgagtgagtgattgccaggggttaaggaggggatagagtaggagtgaagtgggtatgg

SEQ ID NO: 496462 - DNA, 201 bp, Homo sapiens
tctgaactaaagtaaaacaaaacaaaaaatctacctggagataccatttgtcacctatcagattagcaaagatcataaagtgtgataatatactatatttsaaaggctatgagggaaacgggcattctcatacattgttggtggcatctgtggagggcaacttggtagtgtgttttgaaattagaagtccacatgcccttt

SEQ ID NO: 496463 - DNA, 201 bp, Homo sapiens
ttatatatgcagataatatttttctaaagatacttaaattgctttctgagaaggtaactgagtagttgcaggcgagagacatgaaaggaagaattttggtrtgcttttttaatgctttaaaatttttaattatgtaaatgtattactgagttaaaaataaattttaaactggaagagattgaggtaatcttacagtaatgg

SEQ ID NO: 496464 - DNA, 201 bp, Homo sapiens
attttaaactggaagagattgaggtaatcttacagtaatggcacaaaaatctaacaatcatatatgtattcagccattagtaactgacactgatatttgasatgtgttcagttcatatggtgcagggattttttttgtaattctccattttacctgttattctcattttttaattgcaaagcatatatataaatggttttc

SEQ ID NO: 496465 - DNA, 201 bp, Homo sapiens
aaatcttttttaaaactttttgttctttcattctgaaaggaggtgaatgaaatcttttttaatagaggcatttagatctgtaaatttcccaatgagcactkctttacttacaggccatattttcattcattctctctttttattttcattttttattttcattcatctctaagtattttctcatttcccttgagatttatt

SEQ ID NO: 496466 - DNA, 201 bp, Homo sapiens
cagtttgtcttcagaggctttttagatgcacaattaataagtggcaataccaagtttgaccttagtgcttaagactgtagatcttttgcttttttttaccaaaaaaaaaaaatatatatatatatatatgttgcttctcaagtggaagaatgtggaagcctaaaacgtagctgtctagaggtagacctggaaatcattaac

SEQ ID NO: 496467 - DNA, 201 bp, Homo sapiens
atctttcagtgattggcttaaataccatctcctcaaaaaataaaaatcgctatctgctctccctaaccagaatttatcattcttatcttcctatctttatracatttttaggacagatgggaactaatatttattaaacacctactatgtaccagtcaccttttcatatgatatctcatttaattcttagaagttttttga

SEQ ID NO: 496468 - DNA, 201 bp, Homo sapiens
gagaggacattataatttcactaaatttgaaatccagataccctagtttttgttttgcttcgtacaactttcatgaaaatagaatatatatatacacacayacacacacacacacacacacacacatacatattggataatcatattagtgctttttgaaacccaccaatgattactggattattaaatcaggaaggattt

SEQ ID NO: 496469 - DNA, 201 bp, Homo sapiens
ttatctgttttggacatgtacaattagatacagaatactggcagtactgtttcatttttatttatttatttgcttgtagagatagggtctggctatattgscaggctaatttcaaacccctggcctcaagctatcctcccacttcagcctcccaaagtgttgagattatggatgtgaaccaccatgcatgaccagtagtac

SEQ ID NO: 496470 - DNA, 201 bp, Homo sapiens
tgaaccaccatgcatgaccagtagtactgtattttgattactcgcctattatcggactactcaattaaaaaataacattattttgtattctgtaataatgrtatactagtaactagctagtcttcaactgcataaatgtgaaggtaatgctttgcttgcaataaatatcagtaacttgatgatataacagtttgtaatatc

SEQ ID NO: 496471 - DNA, 201 bp, Homo sapiens
atttgtctaggtaaacataaaaataggtaggtttaatgagtttatgtttcagttattaagcttgtagaatttacccacagtgtgatcagtgtctgtttctstttgaataagaaatttgccattgaaattcctttgtgaatagctaatgatttcttttgtcttaggtgtttattataaactcatcaaatatatttcttcttg

SEQ ID NO: 496472 - DNA, 201 bp, Homo sapiens
atttctaatttttgttgtggactgtaataagtactaacaaatcaggaagccagttttatgagtaaatacaacacaccaaattaatcattttgtcaaactgwtattaccattttaacttttccccaaactatttccatacttgatctttttctccctggccttggtgtgctctgacagcctttataatttaccattaacacc

SEQ ID NO: 496473 - DNA, 201 bp, Homo sapiens
ttttatgagtaaatacaacacaccaaattaatcattttgtcaaactgatattaccattttaacttttccccaaactatttccatacttgatctttttctcsctggccttggtgtgctctgacagcctttataatttaccattaacacctagtaggctaacaaaagatgcatagtacacagcagttgatacctttcctggtt

SEQ ID NO: 496474 - DNA, 201 bp, Homo sapiens
ttttgttttacaattgaattataagaattctttctatattctggagactaatgttttaaaatcaggtatataatttgcaaatattttcttgcattctgtasgttattttctcattttcttgatagtgtcctctgaagcaaaaaggttttgaattttgatgaagtcaaatttattttttcttttattgcttgtgcatttagt

SEQ ID NO: 496475 - DNA, 201 bp, Homo sapiens
ccactgcactcctgcctgggcaacagagtgatactctgtctcaaaaaaaagaaaaaatagaagaaaaaaaagagtacattgaatctttaggtatatttggrggctgttgctatcttaacagcattcagtcttactcatgaacacagaatgtctccatttgttttagtctttaatttttttcagtaatgttttgtagtttcc

SEQ ID NO: 496476 - DNA, 201 bp, Homo sapiens
ttcacttttagattgttcattgccagtgtatagaaatacagttgatttttcttattaatcttgtattctgcaacctagttgagcttgtttgtcagtcagayaggattttttggtggattccttaggattttcgatatccaagatcatgtcatttatgagtagagatagtaatgctttggactttacaatgtgtgtggcttt

SEQ ID NO: 496477 - DNA, 201 bp, Homo sapiens
aaactttgtaccctttacttattttcctgtttcacccactccctagcccctgctaactaccgttctactctctgcttccaagacttcaactttttatattmcacatgtaggtgagaacatgcagtatttgtctttctgtgcctcacatatttcacatagcatcatgccctccaggttgattcatattgtcacaaatgacaa

SEQ ID NO: 496478 - DNA, 201 bp, Homo sapiens
tgagtgtttcaaagaaccaatttttgtttaatgattttttttggggggtctctatttcttttatgtcctttctaatctttatttccttctttgtgctttargattagtttgctctttattttcgtatatatgtatgaccacacctggctatttttaatttctttgtagaaatggagtctcactaagttgcccgggctggtt

SEQ ID NO: 496479 - DNA, 201 bp, Homo sapiens
ttattatggattttattgtagcagctggtagagtggcttcttcagcttttctcaatgtaagtcatttcctgttccttatcatataacaaactttagccagrattcaactaacaaagttgataaaacataacaagctgataatcaggaaattttgcaatttaattggaattgattgcttctcctacattaaaaaaagtaagc

SEQ ID NO: 496480 - DNA, 201 bp, Homo sapiens
aattgaacacttaatggagcttgacacctacttgggataagctgtaggttaggtaatgacacagctataaagttgagttccaataaagtatcgagatttcytaaattaaaggccatactttatttatagactggttaaggaattatttatatatacttttttggcatagagtttttttccatctggcagacatggaaaatt

SEQ ID NO: 496481 - DNA, 201 bp, Homo sapiens
ctgaggtgggaggattgcttgaactcaagaggttgaggctgcagtgagttgtaatcatgccacagcactctagcctgggtgatagagtgagaccctgtctcccccccaaaattgtaatgaatattcgtaggatatgataatacatgaaagagtttaaagtgctatctatatgttgttactgtactttattttgaaatctta

SEQ ID NO: 496482 - DNA, 201 bp, Homo sapiens
ttaatgtggtgtatcacatcaattgatttgtgtgtgttaaatcagcctcgcatgccagggataagtcccacttcgtctgggtgtataatctttttgatatsttgttggattggttcagtttgctaatattttattgaggatttttgcatcagtgttcatcagagaaattgacctgtagttttctttccttctggtgtctgt

SEQ ID NO: 496483 - DNA, 201 bp, Homo sapiens
tgagtttatttacaatggtttctttgtttcctttcaaaaatcttttattttttcagttgccttttaaaattatgttttgaggctggacacagtggctcacrcctgtaatcccagcactttgggagactgaggcgggcggatcacttgaggtcaggctggccaacatagtgagaccccatctctactgaaaatataaaaatt

SEQ ID NO: 496484 - DNA, 201 bp, Homo sapiens
tagattattttctattaaaatgacttttttgttaaagaaaactatgtcaggatatttttacttcactgtattaaacttgctaattatatggcacttgatastttattcctgtgacctttgtagaaatgtcaaataagatgcctgtttccctcaaagtagtcacaagggcccttaattattttaaaagaagcatctgaaatg

SEQ ID NO: 496485 - DNA, 201 bp, Homo sapiens
tctgtgtttgagctttttaatccctaagtacctatttacaaagcctattgttaggtacctatttacagaataaatatatttcagacattataaattcttcttttttttttttttccccaaggtggagtctcactctgtcttcccaggctagagtgcagtggcgcaatcttggctcactgtagcctccacctcctgggttca

SEQ ID NO: 496486 - DNA, 201 bp, Homo sapiens
accaacatttttcacatatatactatgtgttctttgaaaattttgtgactattgaagctagtcttaaacagaaaggtaagatgctaacatatatcttggcktatgttaatatttctaataattgtcataaacataacttaaaggctgttggacatattgtttcacttatttttgtcggacagctttttgctttccctctca

SEQ ID NO: 496487 - DNA, 201 bp, Homo sapiens
aagtgcttctgaacctaacttttccctttttcaaaaataatttttggaacatacaaaggaatatatttaaattataaaacatgtaatgaaacactctgaayttgccagcctttctaagaactaaatctaaattttttaaatatgcctgactgaatcctatactttttgaggtacaatgtattactttttggtacagatata

SEQ ID NO: 496488 - DNA, 201 bp, Homo sapiens
cctgatcttttggcttctcgttgtgttagatttaccagaatttcattttgagttcggttatagtccactattagcagattatgtagttattttttgtcctrttcctgttatgtttttagaattgaggttatacccagcttcataacatgaatattatctgttgcttaaagttttggaagaaatcataacatttctaatttt

SEQ ID NO: 496489 - DNA, 201 bp, Homo sapiens
tataaaacatgtaatgaaacactctgaatttgccagcctttctaagaactaaatctaaattttttaaatatgcctgactgaatcctatactttttgaggtrcaatgtattactttttggtacagatataattatgtttttatacatttgacaccacaaaattggtatgatattcagtgtgtttgcaaacaatgaagatttt

SEQ ID NO: 496490 - DNA, 201 bp, Homo sapiens
tgatgtaatttagaatttgaacaacctcatttatatgtctcttagctgttgatttagttaaggggggaaaaaaagaattttttttaagagttccaaacagyagtaacgctgatgttagtatctgttctgcagttaattttcattagtcgtgacccctgaggaatttgattatattacttcctgaagtgtttgcatgaactg

SEQ ID NO: 496491 - DNA, 201 bp, Homo sapiens
tcttttcaacttttctataagtttatctctttctatacaaaaataaatataattatgcagttgttggccagctgtgggagacatagggaggacaaaggtaraagagtttatgtgtctcatgtgggaccagcatttatctgtgtagaactttaaaatttctttatcatcctttcatatggggtttactaaagaagatgatat

SEQ ID NO: 496492 - DNA, 201 bp, Homo sapiens
ttctatacaaaaataaatataattatgcagttgttggccagctgtgggagacatagggaggacaaaggtaaaagagtttatgtgtctcatgtgggaccagyatttatctgtgtagaactttaaaatttctttatcatcctttcatatggggtttactaaagaagatgatatcaacgagaagacaaggaaatataaaatatg

SEQ ID NO: 496493 - DNA, 201 bp, Homo sapiens
ggacctaacaatttcatttaccttttcaacttaactgactagttgcagcattcttagtaatgaaatattaaaaacttgatattttgcttcaggaaaatggraccaatactgctgatcatgttcgaaattccagttgggcaaaaaacggctcctaccaaggtgctcttcataacgcctctgaagaagccacagaacaaaaca

SEQ ID NO: 496494 - DNA, 201 bp, Homo sapiens
gaagacaagatgtttctccaaatagagattttctaacacatttctacaatataatgcattgtggattacttcatattgaccaggtaactatatatatatgyatcatctaagaagtagtttatatcatattatctttgattcttgattctgtttaactcttgctttttaaggtctagaagttaaactctcccccttatttag

SEQ ID NO: 496495 - DNA, 201 bp, Homo sapiens
gtcagtgtcaggagatcataaataaggcatcttacatttgattatatatgattattgtaaatattttggacttttctaagtcctttggaaatttgttaatrtaacttttttcttgttcttaaagatatttgttgtctgagttttattcattttattatagttgattagagtcctcaaattagttattgcattattttcaag

SEQ ID NO: 496496 - DNA, 201 bp, Homo sapiens
ataggaatgcatagtgagtaagatgattcagaccattcccacatcaaacaattctatatcttcctctcttctttaaaatttctgtattgagccatcgtttyttgctcaccttcagtttgagaaaagcctttttttttttctatttgtacttctgctttctgccatctctgcctgcttcaggatcgtcttcaaaaagttatc

SEQ ID NO: 496497 - DNA, 201 bp, Homo sapiens
tcttggtcaggctggtctcgaactcttgacttcaggtgatctggcctcccaaagtgctgggattacaggcatgagccaccacgcccagccttaaagaattwaaaaaaaaaaaaattgaagaatatacaacagagagaacatgtgaccacaaaatctaaaatatttaccatcttatccagagcttacctccttgccttcagc

SEQ ID NO: 496498 - DNA, 201 bp, Homo sapiens
gttgttttgttttgttttgttgtttgtttgttttttaaaattcattgaaccctgaacttgttaccagaaaaaaaagttttaaattagagattatttcttayttattaagggatcttttgtagagctaacttaaaagttgctcatctaaataagctatttgccatacataaaacctagtataagagtggaggtaatatcagg

SEQ ID NO: 496499 - DNA, 201 bp, Homo sapiens
catttctgtgctaaagctacttctgaaaccagagtagcataacaatattttctcaagtatttaaaaatgtaggttttttctaaacataatttctttcttaytttggttttcatcttccttttattttgcacagacatcccgcagatgagaccaaagccacattatgtcgtgataaagaaagatgctgaaaccaatgaagca

SEQ ID NO: 496500 - DNA, 201 bp, Homo sapiens
agtccaacagaaagggaatttttatttgatctcataattcagtgtaattagcttaaactttcttttcgtagaaattttttaaaaccttataaacattgatktctctatatactgatgtttcccgtttccctatacctaatgactgttgccttaatcttttcctcagagttctagtatataagatttttctaagtagcaggc

SEQ ID NO: 496501 - DNA, 201 bp, Homo sapiens
tgcctcacatatttcacatagcatcatgccctccaggttgattcatattgtcacaaatgacaagatttccttctttttaaaggctgagtggtattctattktatgtgtattcatgtacgtgtgtgggtgtgtcacattttctttatccattagtccttcaagggacacttaggttttttccatgtcttggctattgtaaat

SEQ ID NO: 496502 - DNA, 201 bp, Homo sapiens
catgatctgcccgcctcagcctcccaaagtgctgggatcacaggcgtgagccactgtgcccggccgggaataaaattctaattcctcactatggcactacrtgatttggccccaccagcctgcctacctctagatctcatctcctgtctttttccttttcatttaccataatctggcctcactgactgacattctgacctt

SEQ ID NO: 496503 - DNA, 201 bp, Homo sapiens
tgagtggcggcagcacgggaggacagtaaaagaaaagtcttactgagtggtagattgtaggcaagtcgtaaaggccttgtgtgagttgtgtgataatctawggaatttagacttcagggaaccaagtctgtccagtaatcaaggaaactcagcaatttgaattgatgttaatattcaaactatttattttgccaccattac

SEQ ID NO: 496504 - DNA, 201 bp, Homo sapiens
atttcaaggcccttagtacatggactctgatacaatgtttatattgattgagggagaggaaaaaataaaacagaaattattccaggccaggtgtggtggcytgcttatgcctgtaatcccagcactttgggaggccaaggtggaaggattgcttcagcccaagagtttgagaccaacctgagtaacatagcaagaccccct

SEQ ID NO: 496505 - DNA, 201 bp, Homo sapiens
ttttgtctgcacatacagcagcagttgggactttgaaaggaaagatgttgactattttatgagacagtatattgtgaaagagtactaaactcataggtttrtaagatctggattttccttacagctgtgaccactggactggtggtcttcaaactaggacctaatggctacacaaaggctttccaggaatgtgtgggtata

SEQ ID NO: 496506 - DNA, 201 bp, Homo sapiens
tgatctgtaactcctcgccttaggtgatccacccgcctcagcctcccaaagtgctgggattacaggtgtgaaccaccattcccagtccccctcctgtccaytcctgaagtctcagcttaaacatcactttatatggaaagctttaccttaatctactcctatgcttcaccttccttcccagactatgtttgaatctccttc

SEQ ID NO: 496507 - DNA, 201 bp, Homo sapiens
aaaaattgaaaacaaaccaaatgtccatcaattggtgagtggataaataaattgtagtatattcatttattgaatattcactgaaataatactcagtaatraaacagaattaaatattaatatatgcaaaaacataagtgaatcttgaaaatgtgctaaatgaaagaagtcaaatacaaaatactccataattatacgtta

SEQ ID NO: 496508 - DNA, 201 bp, Homo sapiens
gtatcagcttttatttttctctgtttaatagcattattatgtagctatacttactgtgctcctactatgtgccaatatctttgcatatgtaatcttaatcyctgggatgacttgacaaaattgcaagtattagctccattttacgaatacaaaaatgtctcaagtcagtttgcccaagatcaaacagctggtaaagtgaca

SEQ ID NO: 496509 - DNA, 201 bp, Homo sapiens
tattctccattccccctgtagagtttcccctattatttacatcttacattagtgtctgaagtccaaagtttacattagggctcattctttctattggtttygataaatgtgtactgacatgtatctaccattagcgtatcacacagaatagtttcactgctctaaaaatctattgtatattaaatcccctatattaaatat

SEQ ID NO: 496510 - DNA, 201 bp, Homo sapiens
ttctcatacaaacctccattctcatgcataccttgaaggggagacattgccttgagtcagcatacatttttttatacactacattaaatgaatgcatgacmtttatttgtttgctttttaaaaataattttaaagaaaactacatagttttttcaatacaatgagctcaagtaagaattcattctaattacatgacagtaa

SEQ ID NO: 496511 - DNA, 201 bp, Homo sapiens
tttcattactttattattctattattttcttgatcctgactcattccttaaaaattgttctgtttcttgaatttagggtatctttatggtgacccattttyatctcaactttttatgtattttagctttgtccctaaactatatatggtagacatctaaaaaaggaaacccaccatttaaaacatatatagggtttttctg

SEQ ID NO: 496512 - DNA, 201 bp, Homo sapiens
aaatttaattaatttattgtaaatgtattaaatatattttttatacaaaatgagtatgttatatctggataattttagttttgtgcagctgtgtattaggrttttttccattttataagcctctttgtataaggaagtagaattagtctgcaaaatgtattttagctagataatcattttcttgctttgatgaatttacta

SEQ ID NO: 496513 - DNA, 201 bp, Homo sapiens
ccttttgttctaaaaacttgcttgaaaaaaattctaatcattgaaatatgaatttttaatcactatttaatatttgaatttggcctataaatttgatttayggtttcttttacctaaatgcagttccttaaaaagtcaactatcttcataaaagtacatgtaccacattttatatgagctaatattcaatgactcttgcat

SEQ ID NO: 496514 - DNA, 201 bp, Homo sapiens
tgttttatgtcattgttttgcttaaagttgcagtttccaagaatctatgatgtgatgtgaaaaacattactgcgttagtggtttgtggcaaaggaaaaagkatcattatcttgattctcctttttttccctaggcatttttattaccaatttgtgaagcagcagctatgagaaaagtggtaaaagtatatcaagaatggat

SEQ ID NO: 496515 - DNA, 201 bp, Homo sapiens
agatcagatcagaagagaatatgcctggaggaggtttatctgctggccttgcatcagccaattcaaatgtcagaatcatagtacgtgatctctctggaaartattcatgggattctgctatactgtatggcccacctcctgtaagtggcttgtcagaacctacatctttcatgctttcattgtctcaccaagagaagccag

SEQ ID NO: 496516 - DNA, 201 bp, Homo sapiens
ttttgcttactgctgtatctccagcacctagtaccaggcctgttggcatttaacaaatgttttttcagtgaattaccacagctaccatagccacaaatcaraagaactatctatagacacctttgtctttatcaaagtgacatatttaaataaatgccataactgcagataattctatttttatgctatgtactgggtaat

SEQ ID NO: 496517 - DNA, 201 bp, Homo sapiens
acaatcttgtaagtccatagagataaggaataaataaaatcaatattaaataatatataaagtttgtcaaacatacatatgcctgaaatttctattaatgyttaaccattaaaaattgattttttcagtagtctttcaaaaattcccaagacacatagcaatgattagcaatttctcaatttgtgtctaattactatgtaa

SEQ ID NO: 496518 - DNA, 201 bp, Homo sapiens
tactctgtctcaaaaaaaagaaaaaatagaagaaaaaaaagagtacattgaatctttaggtatatttgggggctgttgctatcttaacagcattcagtctwactcatgaacacagaatgtctccatttgttttagtctttaatttttttcagtaatgttttgtagtttccagtgtacaagtcttgtacttcttttgttaaa

SEQ ID NO: 496519 - DNA, 201 bp, Homo sapiens
gaaaagaaacctggtatccattacccaccagcctttctttccccccagccttagataacacatatctactttctgtctctataaatttgcctattctggamatttcatataaatggaatcaaataatatgtgggtttttgtggcagctttttttttacttagcatgatgatttcaaagttcattcacgatgcagcatgttt

SEQ ID NO: 496520 - DNA, 201 bp, Homo sapiens
ttggtttcacttttgggcgaatatgaataatgctgctgtgaacattcatgtacagttttttgtgtggacatgttttgaatatatacctaggagtagaattkctggatgatatgataactctctgtttcaccattggaggaactgcaaactgttttacacaccagctgtaccattttaccttcccaccgatggtgtatgagt

SEQ ID NO: 496521 - DNA, 201 bp, Homo sapiens
tctttcttttcctgatcagcctgactagagtcttatcgcttttattgatcttctaaaagaactatcttttggttttattgatttttccgtgtgtgtgtggttttttttttttttttaattgatgtctgctttggtctttgctattttcttttttatttttggaggcgggacgcaggagacagagtttcgctcgtcgcccag

SEQ ID NO: 496522 - DNA, 201 bp, Homo sapiens
gaattgctggatgatatgataactctctgtttcaccattggaggaactgcaaactgttttacacaccagctgtaccattttaccttcccaccgatggtgtrtgagtgttacatactctccatgccctagcctacactcgttattgtcattcttttttattatactcgtcttagtggatataaagtggaatcttgtgagttt

SEQ ID NO: 496523 - DNA, 201 bp, Homo sapiens
tatttgttgtctgagttttattcattttattatagttgattagagtcctcaaattagttattgcattattttcaagtattgtattatcatttattgatatkggtagtgtttcctaaaacaggaaatacataatttggcatccttattcttagttttatacctaaagaacctagtaactcacaggagaacgtagtaacatta

SEQ ID NO: 496524 - DNA, 201 bp, Homo sapiens
atataaccgtaaaagatggactttctctccagtttaaaagatttagagaaactgtaccaacttgggatacaataagagatgaagaagatgttcttgatgarctcttgcagtatttgggtgttactagtcctgaatgcttacagagaactggaatctcacttaatattcctgctccacaacctgtgtgcatttctgaaaaac

SEQ ID NO: 496525 - DNA, 201 bp, Homo sapiens
gagctccaccttcgtggctctgggtccggggccccggcctgtggcggcgagcggcggccgctggagacgagcggcggcggcaggcggccagcccgggtctrcctcgctccgtgcagggccgggagagggatccgccatattggagctggggccgaaggtgccttggagccgcggcgcgaggcgggtggaggtggcggccct

SEQ ID NO: 496526 - DNA, 201 bp, Homo sapiens
tgcatgtgaatatccagttgttccagctctgtttgttgaaaaaggctatctttactgaattgcctttgtacttttgccaaaatttagttttccagaaataygtgtgggcctatttctggactcttattttgttccagtgatctgtttatctttgttggtgccagtaccgcagtgtttgattactgtaactttataataaat

SEQ ID NO: 496527 - DNA, 201 bp, Homo sapiens
agaccatgatatttcaatggaagaaggagaaaaaagagaagaggtgaagttataagatttatatattttagtgttagtctaatagattaagagttttgcaraaacataataatgggttaacacaaatatacttattaaatgggaagataaagatatctttcagtatattttgcaacaatttaggtaatataagtagtcatc

SEQ ID NO: 496528 - DNA, 201 bp, Homo sapiens
tgtgtatacatgcatacctcacgtttttcttgctccatgtattttttatgccttgaatgccctttccattcaactccaccactttatgtctagtgttcttyctgtccttaaaagtcttttcagatattatgtactctgtcaggccttttttctttccccacctttgtgctttattgagctttgaaagtactcttgtgtttc

SEQ ID NO: 496529 - DNA, 201 bp, Homo sapiens
cttggtcaggctggtctcgaactcttgacttcaggtgatctggcctcccaaagtgctgggattacaggcatgagccaccacgcccagccttaaagaatttaaaaaaaaaaaaattgaagaatatacaacagagagaacatgtgaccacaaaatctaaaatatttaccatcttatccagagcttacctccttgccttcagct

SEQ ID NO: 496530 - DNA, 201 bp, Homo sapiens
cattatgtgtcaggtactctacgactctggagttgcagaagtaatcaaaatagtcattgcaaataattcaatctagttggggaaacatactgtattcagcrtacatgttgttaatagagatatgggcaggtattccagaaatatagtaacaaggggtctctcactcacctggatggagtggtgttgtcaggaaacacttct

SEQ ID NO: 496531 - DNA, 201 bp, Homo sapiens
tttaaaggaaagtttttaaaaatatcttatgttccagtccacatgaaatagatttattatcttaacttggtagtttaccacgtacattttcttcttttgaygaaaattgacttaagctatctgattactctgtaatttctcatgtattctgacacagtgaaatggaattgcaggtggatcatggtatgttacattgattaa

SEQ ID NO: 496532 - DNA, 201 bp, Homo sapiens
ttagtattgctttttcctgtacagctttgatcagcctaaaatatctcatgattttgatttgcatttccctaatgacttatcatgagtatttttcattgctrtgataattgactatatatatgttctttgaaaaaatgcctatttaaatgtgtactgggttgaattgtattctctcagaatctcatgtccaccctgaaactc

SEQ ID NO: 496533 - DNA, 201 bp, Homo sapiens
gtctcactgtgttgcccaggctgggtgtttttctttttccttttttttttttcttttttgagatggagtctcgctgtcactaggctggagtgcagtggcaygatctcagctcactgcatcctccacctcccaggttcaagtgattctcctgcctcagcctcccgagtagctgggactacaagcgcacgcaaccacacccag

SEQ ID NO: 496534 - DNA, 201 bp, Homo sapiens
gaaagcagctaaaacatctttcttgctgatattcaacccactatcatgatttggtaacttactccagacgtgtgggaaaatttggttgtcagactaaattytttaaagaactttaatccttatttacttgttgttgcagggttttttttttttttaattcctacatggtatagtagtgaaaactttactaatggtcttaaa

SEQ ID NO: 496535 - DNA, 201 bp, Homo sapiens
ttcgcctgtgttgatacttagagttaatggtggaactggctgaagaagatgcattcatccagatgcctgaatcctagttcagagtttatctcgagctgtcytcctgatgcgtatttgttttggaaagtgatgtttatttagtgaaaaaagtaagtcccttatttgaggtacatgtttctctagtctattgtttactcatac

SEQ ID NO: 496536 - DNA, 201 bp, Homo sapiens
ggcagcatgaggctgagccctgaaggctcacacttcctgctgtaaggcaaggaaagtggtagcaacaggagagcagtagggggaagcaatgggagtctagrcgctgatgaggtttccaattttgctgctttaacatttgtaccacctatgttactgagtccattaggagctctcaaaattttgtgccatttgttcttcatg

SEQ ID NO: 496537 - DNA, 201 bp, Homo sapiens
tttccaaaatgtttattgatcgttattttcataaagtcttttttatgataattagttgagcaataattgccaggctaatagccagtattgcattttctcartgagactaagatctctaaatgtttgatagtatttatacatatgtatcatttttaaaagagcatctgagattttcatatttcttatgatagactcatgata

SEQ ID NO: 496538 - DNA, 201 bp, Homo sapiens
tctttaaaatctcagggcagaatcaatagatagcctctatgaagtcttccctatcatgtaggtataggagttttttgtacactgagcatctttccctctastagtttgatttttttattacaacatatttatttatttgcttgccttcctgagggcagatgtgtatcttttcatgttcatattcctagacttagcatggcg

SEQ ID NO: 496539 - DNA, 201 bp, Homo sapiens
cctcaagctatcctcccacttcagcctcccaaagtgttgagattatggatgtgaaccaccatgcatgaccagtagtactgtattttgattactcgcctatyatcggactactcaattaaaaaataacattattttgtattctgtaataatggtatactagtaactagctagtcttcaactgcataaatgtgaaggtaatgc

SEQ ID NO: 496540 - DNA, 201 bp, Homo sapiens
ttcattcttttcaactgtgtgttgaaaagacttttgaagggtaccaaacaactcaatgaggaaaaaaaagtcaaccatttgttaaaaatactttttttttycctccttttcctccttgagttgtttggtacccttgtcgatgatcagttgatcatcagtgtaaggatttatttctgaactctcaattgttccattcatcta

SEQ ID NO: 496541 - DNA, 201 bp, Homo sapiens
cttacatatggtctattttggatagtataccatgtgcatttgaaaagactgtattcttttgttgttagatgggcattcgatagatgtctgttagatctggytgcattatagtattgtttaggtcttctattttcccttctgtctagttctattcattattgaaagtagagtgttgactcttaaattaccattgttgaattg

SEQ ID NO: 496542 - DNA, 201 bp, Homo sapiens
gtttaggtcttctattttcccttctgtctagttctattcattattgaaagtagagtgttgactcttaaattaccattgttgaattgtgtgtatattccttmaattcagttctgttcagtttctgctttgggggttgggagttctgttgttaagtgcatatatgttcacaattgttatatcttcttaaaagattaacccttt

SEQ ID NO: 496543 - DNA, 201 bp, Homo sapiens
atgtaaatataatcatagggtacatagtttttttggtcttgctttgttttctgtttgattattttgagaattgtctatcttcttgtatgtgtcagcagttygctccttttatagcattccattgtaggggatgcaccagtttattcagttatttgtttatggttatttgaatggtctctaatttttggctatttaaagtaa

SEQ ID NO: 496544 - DNA, 201 bp, Homo sapiens
actaatgataaacttaagcaatttggggtcattcagcaatagtgatatagaccaagtaggatggtaaaggtgattaattttaagtgggagaggatagggtkagaggatgggatggaaattagaggaatggctttactatggaagaattctgctaatatttcagagacacatggaacttttctagacagatatggtcaggga

SEQ ID NO: 496545 - DNA, 201 bp, Homo sapiens
gtttttcaagggtattattacttctattcttatggtatacagagcagttttggaaatctgcctaaaatgatttgaaattacccttcatttaattttctctrtaaagattttctcattcttccctttttttcccttctctataaatggccacttaagcaaatagaattagtttgactaaattcatttctcatgccattgtag

SEQ ID NO: 496546 - DNA, 201 bp, Homo sapiens
taaatctaagttctctgttacccattgattattgacaattgaaattgtctggtcttctgcagtgtctcctgatgtttttgagtgtttgtgtttcatatgtraaactgatcaagtgcaatttaacaattttttaatttcgtttttcccctttttatgttgtatgtgactgtatgactgtactcaaagagcttttaaagcagt

SEQ ID NO: 496547 - DNA, 201 bp, Homo sapiens
atatactatgtgttctttgaaaattttgtgactattgaagctagtcttaaacagaaaggtaagatgctaacatatatcttggcttatgttaatatttctamtaattgtcataaacataacttaaaggctgttggacatattgtttcacttatttttgtcggacagctttttgctttccctctcacactactatcataggtc

SEQ ID NO: 496548 - DNA, 201 bp, Homo sapiens
gccttttttttttttttttttttttgagacagagtctcccactgtcacccaggcttgagtgcagtggcatgatctccgctcagcctccggagtagctgggrctacaggcacccaccaccacacccggctaacttttttttgtattttttagtagagatggggtttcactgagtgaaccagaatggtttcgatctcctgacc

SEQ ID NO: 496549 - DNA, 201 bp, Homo sapiens
ccttgcccagcccaagcctgttttattctaatttcataattctttaaactactctgtgggaaaactagaacacctttcctctttatttcagttgtatgtgyttttattttgatatttgataaactatatttaactagtatttgatgactattattcttataggcagataatagataaatatttagtattctttttttacag

SEQ ID NO: 496550 - DNA, 201 bp, Homo sapiens
tattgtaggtagaggattgacttgagtagttctccatctttaatgttgtaccaaccagttcactttttgaagcaattaaaccatcctttgcttaggctgayacctttctttaataatattctaatgtacctactcttaggcattttgtgactgatacttgaggcatatggattcgtttatctagttatgcaacagtcaggt

SEQ ID NO: 496551 - DNA, 201 bp, Homo sapiens
cccttaaaagtgcctaggtctagatttctgaggcttgatacctatcattaaaggacttcagtttattttaaaaagagaatctttccaattgtcacgtaacrggtcatgtggattcagaaatgagagttattgcacagaagcaactaggtgacaggagaaaactgctatgcagtttagttttacattgtgtgggccttgtac

SEQ ID NO: 496552 - DNA, 201 bp, Homo sapiens
gagggaagaaagcaaagaaagagcaatgggctatagcaagaggtaagaaacaatggtgagtcatcattacacagtgtatgtgtgtatcaaatcatcgtgtygtacaccctgaatatatattgtctttaacaattatatatttaaaaattaaaaaaaagaaacttggtaaggcaaccaccatagaaggacatatgtcctagg

SEQ ID NO: 496553 - DNA, 201 bp, Homo sapiens
ggggtttcaccatgttggtcaggctggtctcgaactcctgaccttgtgatctgcccgcctcagcctcccaaagtgctgggattacaggcgtgagccaccgygcccagccaggagtaaactctcaaattgcatgtgaagattttttcatatggtcgtggaactgtgagacaatgctaagtaaatcagtataaatggaatatg

SEQ ID NO: 496554 - DNA, 201 bp, Homo sapiens
ctgtggtcccagctactgggaggctgaggtgggaagagcacttatgccatggttgtgccaccgcactccagcctgcgtgacagagcaagaccttgtcccaccccccccccaaaaaaggaaatcatttgttaaacaagtgaacttgacttacatataaaatcaatgcaaatttccagtgacacacaaaaaactatataaatt

SEQ ID NO: 496555 - DNA, 201 bp, Homo sapiens
cacaaagtagaacccacagccaaggtgaggaatacaggaaagagcagctttgttggagcagtgagtttcagttctcagtttgttgcatataaaaagtaatmtccaggtggagaccaccagcaaggcaattatatacctgattagaaaatttgatgctggaaataaaattattggcattgtcagtacatgagtagtattaac

SEQ ID NO: 496556 - DNA, 201 bp, Homo sapiens
agaagacaaacactccattctcaccaatacaggaggaagtcaagcatatgaagattttgtagctggtcttggttgggaggtattatttttaaattatacgwaatatttatatttggaagcataagcttatttttcttttttttcctagcttattatagaagtattattttaggagatacaacaacttaacaactagtttgt

SEQ ID NO: 496557 - DNA, 201 bp, Homo sapiens
gtggactcagaactgtggtctaagtgcttagagtttattatatttccttaatacatgttttcagaagtaaaaaaagcgggggccggggggggatgtaagtmctgtagattgggttggcttgttttcatgttgttatttatttatttggctacatcaaactgggaaacttataaagatcatttagcttttagaaagtgattt

SEQ ID NO: 496558 - DNA, 201 bp, Homo sapiens
tgatctgctggtaatggattcttaaaaaaatgtttttggatacataatttgtacatatttatgggatacatgtgacattttgataatcaaggtatttaggrtattcgtcaccttgaacatttattatttatttgtgctgggaacatttcaagtcttctcttacaggctgggcatggcgggtcatgcctggaattccagcac

SEQ ID NO: 496559 - DNA, 201 bp, Homo sapiens
tgaaaacaaaagcattgtttatgtcttttaaattaagacattttgggggagtcagtttgcctttttttaactgacattcagaggagaattcttgtcctccyctcatccacaaatttatcttgctccttcttaaagccgtctttaaatacctagcatgtatatgatctcatagtgctgagttcctttttttgttttgttttg

SEQ ID NO: 496560 - DNA, 201 bp, Homo sapiens
ctatctagtttattttttaatctcagaaactgtagtttttatctagttcatcttgggtcttgttttatatcatctatgtgtcttcttaactttttgaacayatggaatacagctaaaatgatatacttctctgctaattgtgacatctctttcagttctagaatttcaattgatcatcctcttttcttatcctgggttgtt

SEQ ID NO: 496561 - DNA, 201 bp, Homo sapiens
tggtcataggacacaccttgtttgtttgccatctttcagaaatcactctcctcacctgatgtccatacatgctgaaacaattaaaataacacacacgagargcaacagttttcaagacattggacatcagttgctgataataagaggttctcttaaatgaatgagactgaaagttggctttataccaagcaacttggtccc

SEQ ID NO: 496562 - DNA, 201 bp, Homo sapiens
gcagatctccttgtatccgtgctctaataagtgatggattctcccatgcctgaagaagtcagccttcctactattgtaatattgctactgttatgcctctkttgctgctattatacttcagcacccatctgaaaattcttcttgttttggggtgcatgctgctggagcacaccatctttcaaactttgtcgctgctcttat

SEQ ID NO: 496563 - DNA, 201 bp, Homo sapiens
ctgcagtctccacctccccggttcaagcaattcccccgcctcagcctcctgagtagctgggattacaggcacccgctagcacacctggctaatttttgtatttttagtagagatggggtttcaccatgttggccaggctggtcacaaactcctgacctcaagtgatccgcccgccttggcctctcaaagtgctgggattac

SEQ ID NO: 496564 - DNA, 201 bp, Homo sapiens
gcattagattcttataaggagggtgcattctagatcctttacatgtatagtctgtgatacctgtgccgtagctaatgatatttatactagactgccttccsatcacccttatatctgaaagcttctagtcttctttaaaatctcagggcagaatcaatagatagcctctatgaagtcttccctatcatgtaggtataggag

SEQ ID NO: 496565 - DNA, 201 bp, Homo sapiens
caaggtagcacgcataacttgaagatattattgatcaagtaacagtatattgagattgaaaatctacatttccaggagttggacatgaatttcagaaagtytcagttgacaagtcattttctagaggatggagtcgtgatcagcctggccaagccccaatgagacagaggagtgcaacaaccactggttctccaggaaccg

SEQ ID NO: 496566 - DNA, 201 bp, Homo sapiens
atagaaaattaggctcagaagttttgggattctgctttcttcatactttctcttctttggttaccagttaatgtatagagtaacaaattcattaattcatktaaaatagtgcatgttcattctgtgtcagttgattgtgggtcatgtttgtggtggtggtttcattttatgtaaccgttgttgtttgccttttttgcagat

SEQ ID NO: 496567 - DNA, 201 bp, Homo sapiens
actcaagacaagatcactctgttactgtggtagaataatacagaaacacaatcactctgtaattatgtctaaaattaagtagagacaagaatgttttaaacacacacacacacacacacacacacacaccccctaaacatcctaacatgaatgactaatgcttctttaccaaaaacaactctcctcctacctcttagatga

SEQ ID NO: 496568 - DNA, 201 bp, Homo sapiens
ctcaagacaagatcactctgttactgtggtagaataatacagaaacacaatcactctgtaattatgtctaaaattaagtagagacaagaatgttttaaacmcacacacacacacacacacacacacaccccctaaacatcctaacatgaatgactaatgcttctttaccaaaaacaactctcctcctacctcttagatgaa

SEQ ID NO: 496569 - DNA, 201 bp, Homo sapiens
ttttttttttttttttacggaactggaatcatagggatattaccaagttgttttttttttttttttttgcgttgtattatattgtgagcatttcctcagtmatttagatactcttcaaagataactttttttttttttgagatggagtcttgctgtgtcgctcaggctggagtgcagtggtgcgatctcggctcactgcaa

SEQ ID NO: 496570 - DNA, 201 bp, Homo sapiens
ctcagcctcccaagtagctggaactacagacacatgccaccacaccttgctagtttttttttggttggtttttttttttgtttttttcagtagagatgggrtttcaccgtatgggccaggctagtcgtgaactcctgacctggtgatccacccgcccgacctcccaaagtgctgggtttacaggcgtgagccttcccaccc

SEQ ID NO: 496571 - DNA, 201 bp, Homo sapiens
taaagatttgttaaaacttcacataaaccatttgttccaggaatttatcttaaatctctatgaaaataaattatacccaaagtagacacagttataagtatagtgtaaaaagataaataagccaggcacagtggctcacacttgtaatcccagcactttgggaggctaaggtgggaggattgctcaagctcaggagttcga

SEQ ID NO: 496572 - DNA, 201 bp, Homo sapiens
tccatttgagttttatggtggaattgttttcttttaacataatttcaagtttatagaaacattgaaagggtagtacaaagaattatttatattggttcacmacatttgctttatccctttgtatgtagtatgaaatagagagagaaataaatgtgtatactgctgactactttattgtgtttttcctaaaatcaagcaatt

SEQ ID NO: 496573 - DNA, 201 bp, Homo sapiens
agaggaagtcaacttgtccctgtttgcagatgacatgattgtatatttagaaaaccccattgtctcagcccaaaatctccttaagctgacaagcaacttcrgcaaagtctcaggatacaaaatcaatgtgcaaaaatcacaagcattcctatacaccaataatagacaaacagccaaatcataagtgaactcccattcact

SEQ ID NO: 496574 - DNA, 201 bp, Homo sapiens
agtatctaagaactaggcatgcacattgctactgggatatcttttttttttttttttttggagatggagtctcgctctgtcgcccaggctggagtgccccrgcgcgatctcggctcactgcaagctccgcctcccgggttcacgccattctcctgcccagcctcccgagtagctgggactacaggcgcccgccaccacgcc

SEQ ID NO: 496575 - DNA, 201 bp, Homo sapiens
acctgacttcaaactatactacaaggctacagtaaccaaaacaggatggtactggtaccaaaacagagatatagaccaatggaacagagcagagccctcagaaataaaaccacacatctacaaccatctgatctttgacacacctgacaaaaacaagaaatggggaaaggattccctatttaataaatggtgctggggaaa

SEQ ID NO: 496576 - DNA, 201 bp, Homo sapiens
taccgtgttgcaaacgtggctcattgcagccttgacctttcagggtccagcgatcctccttcctctacctccctagtagctgggacatgcaccaccgtgtrtggccaattaaaaaaaatttttttttgtagagatggggtctcatgttgcccaggctggttgcaagctcctggactcaagcaatcctcccatctcagcctc

SEQ ID NO: 496577 - DNA, 201 bp, Homo sapiens
cttttatactttttctgccttttctggttttaattgagcattttatatgattcccttctctctcctttcttaacatatcaattatgcttctttttttaackttttaactttttagtgattgctgtagagtttacactatacatttgtagttaatccaagttacaagtccactttcaaattacactataccaaccgggtgca

SEQ ID NO: 496578 - DNA, 201 bp, Homo sapiens
tcccatctcagcctcccaaagtattctgggattacaggtgtgagccactgtacctaactgttaatctctttttatttctgaatagttactcactatttatttatttatttatttatttatttatttatttatttttgagatggagtctcactctgtcacccaggctggagtgccatggcacgatctcggctcactgcaatc

SEQ ID NO: 496579 - DNA, 201 bp, Homo sapiens
cccatctcagcctcccaaagtattctgggattacaggtgtgagccactgtacctaactgttaatctctttttatttctgaatagttactcactatttatttatttatttatttatttatttatttatttatttttgagatggagtctcactctgtcacccaggctggagtgccatggcacgatctcggctcactgcaatct

SEQ ID NO: 496580 - DNA, 201 bp, Homo sapiens
ctaagaatatttcggttttggttttgggtttttttacatttttaaaaagacattttgttggtggtggtggtggtggtggtggttttgttttggtttttggwttttttgagacggagtctggctctcgctctgtcacccaggctggagtgcggtggcgcaatctcggctcactgcaacctccgcctcccgggttcaagcaat

SEQ ID NO: 496581 - DNA, 201 bp, Homo sapiens
ccatctcagcctcccaaagtattctgggattacaggtgtgagccactgtacctaactgttaatctctttttatttctgaatagttactcactatttatttatttatttatttatttatttatttatttatttttgagatggagtctcactctgtcacccaggctggagtgccatggcacgatctcggctcactgcaatctc

SEQ ID NO: 496582 - DNA, 201 bp, Homo sapiens
ttattttattttactttaagttccaggatacatgtgcagaatgtgcaggtttgttacatgggtagacaagtgccatggtgttttgctgcacctgtcaaccygtcaccacatgcattagctgtttgtcctgatgctctccctcaccttcccccaccaacaggccccagtctgacacctccacgtctaatccaacaccacgag

SEQ ID NO: 496583 - DNA, 201 bp, Homo sapiens
tttaaaattggtcaacaatttagttaacataaattacaacagaaattgagatacaggtaggctttggaaaccaccagttaatcctttactcttcataaaakaaatgaagggataaaaaataataagcttgattatatttggataattgtactgctgtgtcagttattttatgcccaataaaagtactcactaagattccaa

SEQ ID NO: 496584 - DNA, 201 bp, Homo sapiens
catctcagcctcccaaagtattctgggattacaggtgtgagccactgtacctaactgttaatctctttttatttctgaatagttactcactatttatttatttatttatttatttatttatttatttatttttgagatggagtctcactctgtcacccaggctggagtgccatggcacgatctcggctcactgcaatctct

SEQ ID NO: 496585 - DNA, 201 bp, Homo sapiens
tctgataatttgtctttcttttcctgatcagcctgactagagtcttatcgcttttattgatcttctaaaagaactatcttttggttttattgatttttccgtgtgtgtgtggttttttttttttttttaattgatgtctgctttggtctttgctattttcttttttatttttggaggcgggacgcaggagacagagtttcg

SEQ ID NO: 496586 - DNA, 201 bp, Homo sapiens
ctgataatttgtctttcttttcctgatcagcctgactagagtcttatcgcttttattgatcttctaaaagaactatcttttggttttattgatttttccgtgtgtgtgtggttttttttttttttttaattgatgtctgctttggtctttgctattttcttttttatttttggaggcgggacgcaggagacagagtttcgc

SEQ ID NO: 496587 - DNA, 201 bp, Homo sapiens
ttaggaagcttgatagcaatgtcagtctaacagactaacatggatttttaaaaaacatgttgtgtggtatcccagcctgtagtcttcttagtaaattatartagaaaattaggctcagaagttttgggattctgctttcttcatactttctcttctttggttaccagttaatgtatagagtaacaaattcattaattcatt

SEQ ID NO: 496588 - DNA, 201 bp, Homo sapiens
atatttttctcaatagccaagctaactaaaaacaaatatatttgagaaaattgttcttttacgctaatcccaattaagtttacaaggattttcgtataatrttgtttcatttaattctcatcacgattttgagagtttaatagaatcaccctcttcttccagttttgctagccagatactgatgcttagaaagttaacagt

SEQ ID NO: 496589 - DNA, 201 bp, Homo sapiens
caggagaaaactgctatgcagtttagttttacattgtgtgggccttgtacttttaaccttgtgaagcaaagagccttccttaatctctagtgtgaaaaaawtgctgttatttatgccagttaaatgaatgtattttcagtttactttccattgatagaatataatattaagcatggattatttggaagaattgaaattagt

SEQ ID NO: 496590 - DNA, 201 bp, Homo sapiens
agttataattacattgcctaaagaaaaaatccttctttaagattatgaggatttaaagaagtaattatcagttttcttttctcttaatgtaatactttacrtatttatacattgtgctttatttacttttttttggttccagagagggccagcaagatcaaggggcatggtagaaccaaaatctttctcacaagaaagatt

SEQ ID NO: 496591 - DNA, 201 bp, Homo sapiens
cctttcattatagtcactcttcttttttccttccccacttctttcttttccttttttaaagccatgagaagccgatccattggtgaatgtgctctgccatyggcctatatacgcagtgctaaaagtgctcctgttctgatccatacttccaaacccttcttgcctgatattgttctcactcccctttctgatgagctttca

SEQ ID NO: 496592 - DNA, 201 bp, Homo sapiens
ataattatagcacttaaataaaatcttaattaaattagtgcacatttaagtagagataacacttaagtaattgtacactgtaaaatttcacttatttgggktttttttttttttctttttgcagtcttctgacagggtccaagtagatctttccaagaatgagaggacattataatttcattaaatgagaggacattataa

SEQ ID NO: 496593 - DNA, 201 bp, Homo sapiens
cagttttattcatttctgctctgatctttattatttttattctgcttactttgggtttggtttgctcttgcttttctggttctttaagatgcattgttagsttgtttacttgacgtttttctgcttttttgatgtaggtgcttatagctataaacttccctcttagtactgctttcactgtatcctataggtttgggtatg

SEQ ID NO: 496594 - DNA, 201 bp, Homo sapiens
atttcattaaatgagaggacattataatttcactaaatttgaaatccagataccctagtttttgttttgcttcgtacaactttcatgaaaatagaatatayatatacacacacacacacacacacacacacacacacatacatattggataatcatattagtgctttttgaaacccaccaatgattactggattattaaat

SEQ ID NO: 496595 - DNA, 201 bp, Homo sapiens
tgcgccaccccgcctggctaatttttgtatttttagtagagacaggttgttaccttgttggccaggctggtctcaaactcctgacctcaagtgatccaccwgcctgggcctcccaaagtgctgggattacaggtgtgagctaccatgcctggcagtctttgttactttctttcttctacttagtttagtttaatttgctct

SEQ ID NO: 496596 - DNA, 201 bp, Homo sapiens
taggtgtgttttattcttttttcttcttttttcttttgtcgcctctgactgtgtattttcaaatagcttgtcttcagcctcaccaattcttttttctgcaktatccgttctgccattaaaagaactctgatgcattcttcagtacactagttgcatttttcagctccagaatttctacttggttctttttagttatttcaa

SEQ ID NO: 496597 - DNA, 201 bp, Homo sapiens
cattaaatgagaggacattataatttcactaaatttgaaatccagataccctagtttttgttttgcttcgtacaactttcatgaaaatagaatatatatayacacacacacacacacacacacacacacacacatacatattggataatcatattagtgctttttgaaacccaccaatgattactggattattaaatcagg

SEQ ID NO: 496598 - DNA, 201 bp, Homo sapiens
acgcaccaccacgcccagctaattttttgtatttttagtagagatggggtttcaccattttggccaggatggttttgatctcttggccttgtgatctgccygcctcggcctcccagagtgctgggattacaggcgtgagccactgcgcctggctttggcttcttttttaaagatactttcgggaggctgaggtgggcggat

SEQ ID NO: 496599 - DNA, 201 bp, Homo sapiens
agaatttctacttggttctttttagttatttcaatctctttgttaaatttatctcataggattctgaatttcttctctgtgttatcttgaatttcattgarcttcttcaaaacagctgttttgaattctctgtcaggtgacatctctgtctctctgggattggtcattggtgccttatttaattcatttggtgaggtcatg

SEQ ID NO: 496600 - DNA, 201 bp, Homo sapiens
attaaatgagaggacattataatttcactaaatttgaaatccagataccctagtttttgttttgcttcgtacaactttcatgaaaatagaatatatatatacacacacacacacacacacacacacacacacatacatattggataatcatattagtgctttttgaaacccaccaatgattactggattattaaatcagga

SEQ ID NO: 496601 - DNA, 201 bp, Homo sapiens
gggtctcagtctgtcacaacctcctgggctcaagcaatcctcctacctcagcttcccgagtagctgggaactacaggtgcatgccaccacacccagctaatttttttttttttttttttggtagagaaatggggttttgctatgttgcccaggctggcctcaagctcctggtctcaagtgatctgcccaccttggcctccc

SEQ ID NO: 496602 - DNA, 201 bp, Homo sapiens
ttcaagacaatatagtatgtttcttgaacaaagcaatagagtttgcttatttcaaaggaagttttaattttagattttgtacaaaatttactgtgccaatrtcagtcactgtaaaagaagcaaaggaaaagatgtaaatagattagcttaatattgatatcaaatactctgtgcagtacccttctctaaacgtatcaagtt

SEQ ID NO: 496603 - DNA, 201 bp, Homo sapiens
ttaaatgagaggacattataatttcactaaatttgaaatccagataccctagtttttgttttgcttcgtacaactttcatgaaaatagaatatatatatacacacacacacacacacacacacacacacacatacatattggataatcatattagtgctttttgaaacccaccaatgattactggattattaaatcaggaa

SEQ ID NO: 496604 - DNA, 201 bp, Homo sapiens
ggtctcagtctgtcacaacctcctgggctcaagcaatcctcctacctcagcttcccgagtagctgggaactacaggtgcatgccaccacacccagctaatttttttttttttttttttggtagagaaatggggttttgctatgttgcccaggctggcctcaagctcctggtctcaagtgatctgcccaccttggcctccca

SEQ ID NO: 496605 - DNA, 201 bp, Homo sapiens
ttacaggtgtgagccatcatactcaacctcttttatattttataaaacattctgtggcaggcatgatgccccatgcctgtcatctcagcacttggcagagrctgaaagaggatgatcacttgaggccaggagtttgagaccagcttgagcaacatagtgagactctgtctttaaagacaaaagaaatttttttaagctagc

SEQ ID NO: 496606 - DNA, 201 bp, Homo sapiens
atgctctttaaattgaatgattttttattgtttctgttatatccagttttgtatgtaaaagtttttaactcatctttacaaataagtatgcaattcttacrgaaaaatggagtttaaggaatcttatgtatttgtgatcatgaatcacagagcaagccaaagccagggattcttctcttttctatggtggtttcttttcaa

SEQ ID NO: 496607 - DNA, 201 bp, Homo sapiens
taaatgagaggacattataatttcactaaatttgaaatccagataccctagtttttgttttgcttcgtacaactttcatgaaaatagaatatatatatacacacacacacacacacacacacacacacacatacatattggataatcatattagtgctttttgaaacccaccaatgattactggattattaaatcaggaag

SEQ ID NO: 496608 - DNA, 201 bp, Homo sapiens
ctcttgtcataggttactaagacaagaaactttcatctttaacaatgtggtagaaaaagataaatttatgttgggactgcagctggagtttgaaatgtctrtggggcaacctcacatctccctagcccactactgctcttttctggctttataataatatttgaacctgttccttttttctcggttcttaccatcatttct

SEQ ID NO: 496609 - DNA, 201 bp, Homo sapiens
gatcctaaagccgcatagcatgtgaatgccgatatggcaactgcactcccacctgagcttcctccagttatcagccagtctgaatcttcattctcaaagtrgagattctgcttcctcttttctctatattgttttgaataactccaggggtttttaactggtccaaatacgccttctgcatttccagatctcatagcaaac

SEQ ID NO: 496610 - DNA, 201 bp, Homo sapiens
aaatgagaggacattataatttcactaaatttgaaatccagataccctagtttttgttttgcttcgtacaactttcatgaaaatagaatatatatatacacacacacacacacacacacacacacacacatacatattggataatcatattagtgctttttgaaacccaccaatgattactggattattaaatcaggaagg

SEQ ID NO: 496611 - DNA, 201 bp, Homo sapiens
tttttctcggttcttaccatcatttctttagtttaaatttttattgtttcttgcttgaacttttgcagcagcttactagttgatctccctatgcaggtcttttttttttttttttcccctcttgaatctcttacatggccttgtcacaatctatctttctttctttctttctttctttctctttctttctttctctttctt

SEQ ID NO: 496612 - DNA, 201 bp, Homo sapiens
atcagccagtctgaatcttcattctcaaagtggagattctgcttcctcttttctctatattgttttgaataactccaggggtttttaactggtccaaataygccttctgcatttccagatctcatagcaaactcatctaaatttgtttttccattagtagagctccctaatccaacaatttcggaactactatagcattac

SEQ ID NO: 496613 - DNA, 201 bp, Homo sapiens
atgagaggacattataatttcactaaatttgaaatccagataccctagtttttgttttgcttcgtacaactttcatgaaaatagaatatatatatacacayacacacacacacacacacacacacacatacatattggataatcatattagtgctttttgaaacccaccaatgattactggattattaaatcaggaaggat

SEQ ID NO: 496614 - DNA, 201 bp, Homo sapiens
agaaagcattgttttcattaatgaaatttaattaatttattgtaaatgtattaaatatattttttatacaaaatgagtatgttatatctggataattttakttttgtgcagctgtgtattagggttttttccattttataagcctctttgtataaggaagtagaattagtctgcaaaatgtattttagctagataatcatt

SEQ ID NO: 496615 - DNA, 201 bp, Homo sapiens
taaaaccctctatggctttcctttgcctatgtgatacagtacaaaatccttggccaatatttaaggcaatctgttatctgatcctagcctcccttttcagytaagtgttgaagtagttgaattatataaaaaaacaaagcagtgtaataacattcttcaagatgtctattatataaataatttttaggtgacagtgttgca

SEQ ID NO: 496616 - DNA, 201 bp, Homo sapiens
acggtactcttggaatagcaaaaatttgaaaaaaaccaaatgtcttaatataaagacgataaataaattttggtatgttcatacggtggaatagtatgcamctcttaaaatgtattaactagagctacatagataagtatagataaatttcttaagctaatgttggatgtgaaaagtaacatataaataactttttaaaaa

SEQ ID NO: 496617 - DNA, 201 bp, Homo sapiens
tcaatcccaaactggcttccacatcaacacccctcagaatcacagtctttagccctccttagaatggcggtctttaactagttggctttgacaaattattrtctgtctcctttctcctttacctcgttactgtctctgtgttcccttcttccttctccccctcccctcccttttcctcctccttcagattctgacattggg

SEQ ID NO: 496618 - DNA, 201 bp, Homo sapiens
ctgttttactggtgaatttataacaggaacatatttcttacctccagcaccactatcaaggctgttcagcctacacactgaaactctgtatcattccttctcttatgtttttttttctttttgagacaaggtctcactctgtcacccaggttggagtgcagtggcacaatctcggctcactgcaacctctgcctcccaggc

SEQ ID NO: 496619 - DNA, 201 bp, Homo sapiens
ttcaggtatggtgaagtcagcagatcaagaaagctgttgaaataatagtttgttactcacagttcccaagaggaaggggcatgccatgccacaagggctaygtgggggaagcaccagagttggtcaggaggcagagagaacaggggaaaacatgggcaagagtctttattatggtttctatgggaagaaacaggcaaccca

SEQ ID NO: 496620 - DNA, 201 bp, Homo sapiens
atatttgaatttggcctataaatttgatttatggtttcttttacctaaatgcagttccttaaaaagtcaactatcttcataaaagtacatgtaccacattytatatgagctaatattcaatgactcttgcatcttctggaatcatttctgaagtatctgcaaaagaaatacaaattaagcatgcactctgaacttcagagg

SEQ ID NO: 496621 - DNA, 201 bp, Homo sapiens
tgttttactggtgaatttataacaggaacatatttcttacctccagcaccactatcaaggctgttcagcctacacactgaaactctgtatcattccttctcttatgtttttttttctttttgagacaaggtctcactctgtcacccaggttggagtgcagtggcacaatctcggctcactgcaacctctgcctcccaggct

SEQ ID NO: 496622 - DNA, 201 bp, Homo sapiens
gttttactggtgaatttataacaggaacatatttcttacctccagcaccactatcaaggctgttcagcctacacactgaaactctgtatcattccttctcttatgtttttttttctttttgagacaaggtctcactctgtcacccaggttggagtgcagtggcacaatctcggctcactgcaacctctgcctcccaggctc

SEQ ID NO: 496623 - DNA, 201 bp, Homo sapiens
tttggctgcttacacaggaaaccaaggcggggagtgccacgggtgatctcatgctggcatgacgtcaagaactcttgacgtcagaaggcggttgccacggwcaccgttcgccaccgacggcagagtcgtgaaaccccatcactaccacactcgtctccgtttcggcctctgcagggtgtaagctgctaaagaagcttcaac

SEQ ID NO: 496624 - DNA, 201 bp, Homo sapiens
cacccaagtagctgggactacaggcactcgccaccatgcctggctaatttttttgtatttttaatagagacagggtttcaccatgtttcccagctggtctygaactcctgagctcaagtgacctgcccacctcagcctcccaaagtgctggggatgacaggcgggagccacagcccctgacctaagtgggcttttaaaatt

SEQ ID NO: 496625 - DNA, 201 bp, Homo sapiens
taccatgctaatacaagatgttaataattggggaaactggtagggagggggaaagggatgtatggaaactctttgtagttgacactcattttttatctgtwaacctaaaactgttttgaaaaatgtatatttaaaaaaatgtattttttggaatagaaaataatttagacatttgaaataaccacagatttatctttaaaa

SEQ ID NO: 496626 - DNA, 201 bp, Homo sapiens
tataaggaagtagaattagtctgcaaaatgtattttagctagataatcattttcttgctttgatgaatttactacattggaaatatcctcccctgctttaraaatattaacatttgctttctttctgcctaatttttatataaattctaaatataatgtaaaatatttcatttataggccctctgaaagtagaacattttt

SEQ ID NO: 496627 - DNA, 201 bp, Homo sapiens
catgttaaccatagttgttttaaattcctggtctgataattctagcatctctgccacatctgactctggtgcttattctgttctgatgcttgttcagtctytttagactatgttttttgtcttgtaattttttgttgaaatctgaacatatgctcagtaaaaggaactctggtaaataggcctttagtggtatggtggtaa

SEQ ID NO: 496628 - DNA, 201 bp, Homo sapiens
aaagccgcatgtccatgaagctgcgtcgttcctctggctcagccaataaatcctaaggagacaagcagcccagcagtgatcagcagtagccaccttagcaygaacatagggttaaccctttcaggccttcatgtctgccataacatgcatgtttcttcctgtacatttatttgagaaaacactggatttaaataattttaa

SEQ ID NO: 496629 - DNA, 201 bp, Homo sapiens
aaaataatccagcaaattatcaatattttcaaaataactactggaactatttgacttagaaattatagctcatttttcaaccttcatgtaagcctaataattttttttttagaaactgcaatatgattatttccggtttgaatcagggaaattaactcaggattcaagatcaaatcaaaaaaagaatctgaagttttaaaa

SEQ ID NO: 496630 - DNA, 201 bp, Homo sapiens
ggattacaggcgtgagccaccgcgcccggcctaaaaataatcttttatgatgccaggttttatgattgttggacatttaagttgtttttaatttcttgccrcaggatagagtcccaggaatagaattatttaggtcaaatcgtatcaggatatttcatgccatgtatattgggaaattgcttctattaagtaataatttgt

SEQ ID NO: 496631 - DNA, 201 bp, Homo sapiens
ttttactggtgaatttataacaggaacatatttcttacctccagcaccactatcaaggctgttcagcctacacactgaaactctgtatcattccttctcttatgtttttttttctttttgagacaaggtctcactctgtcacccaggttggagtgcagtggcacaatctcggctcactgcaacctctgcctcccaggctca

SEQ ID NO: 496632 - DNA, 201 bp, Homo sapiens
gtaatgggcagttttcatgtgaatttgaaattaccagaagttctttctcaactgagatgttacatacttgtaatcactgtgttatttgtctgtccatccckttgtcacattctctcaatcaagggttcacagaacagctgattgttaaaatttgtggccaggcacggtggctcacacctgtaatcctagcactttgggagg

SEQ ID NO: 496633 - DNA, 201 bp, Homo sapiens
ttcttcctcactgcacccacacacattattcctcttttctttgatagtctcacctacttattcttccagatacatttaaaattatgctgttgtttttcagaaaaaaaaatcccattggtatttgattggatattcaataaaactctcatgtagaaaaagcaaagcaccatcataatcatcattcttcccattagtaattat

SEQ ID NO: 496634 - DNA, 201 bp, Homo sapiens
tttactggtgaatttataacaggaacatatttcttacctccagcaccactatcaaggctgttcagcctacacactgaaactctgtatcattccttctcttatgtttttttttctttttgagacaaggtctcactctgtcacccaggttggagtgcagtggcacaatctcggctcactgcaacctctgcctcccaggctcaa

SEQ ID NO: 496635 - DNA, 201 bp, Homo sapiens
caacatggtgaaaccccgtctactaaaaatacaaaaattagctgggcatggtggcaggagcctgtaatcccagctacttgggaagctgaggcaggagaatygcttgaacctgggaggcggaggttgcagtgagccgagatcgtgccattcattgcactccagccagggtaacagagtgagactccgtctcaaaaaaaaaaa

SEQ ID NO: 496636 - DNA, 201 bp, Homo sapiens
tttatgttaacataaggtattacagtgattgatttttatatgttgaaccaaccttgccttctgggatgaatgtcacttagtcatagtgagtgtgtgtgtatgtgtgtgtgtagatagatagatagatagatagatagattcagttttctagtattttgttgaggatttttacattcatattcataaaggatattggtctgt

SEQ ID NO: 496637 - DNA, 201 bp, Homo sapiens
gtgagaccatttgtacttggacttttctttgtgatatttgtaattattacttcaatttcttgttataggtttattcagattttatatatctctctgagtcrgtttgataatttgtttctttctaggaacaaatttgttagtagaaagttgttcaagttattccttagagtaatcctttcgattcctatagggtcaatagtg

SEQ ID NO: 496638 - DNA, 201 bp, Homo sapiens
atagtgcacagtgcttagaataaaataatgcatagcatgccataagtgttctgtagtgggcaggtgttatgatcatcattgttattactaatttttctttaaaaatacttttgtacttcatatagattttaaagattgctttactgatttattgagctataattgatacacaataaactgcaatatttgaaatttacagtt

SEQ ID NO: 496639 - DNA, 201 bp, Homo sapiens
ttatgttaacataaggtattacagtgattgatttttatatgttgaaccaaccttgccttctgggatgaatgtcacttagtcatagtgagtgtgtgtgtatgtgtgtgtgtagatagatagatagatagatagatagattcagttttctagtattttgttgaggatttttacattcatattcataaaggatattggtctgta

SEQ ID NO: 496640 - DNA, 201 bp, Homo sapiens
cattttcttggatctttgtttgctttgtttttttgtttgtttgagacaaggtcttgctctgtaacccaggctggagtacagtggcccagttatggcttackgcagcctcaacctcctgggcccaagtgatcctgacacctcaacctcccaagtagctgggactacagaccactgagcctggcgaactaaaacttttttttt

SEQ ID NO: 496641 - DNA, 201 bp, Homo sapiens
ataaggtattacagtgattgatttttatatgttgaaccaaccttgccttctgggatgaatgtcacttagtcatagtgagtgtgtgtgtatgtgtgtgtgtagatagatagatagatagatagatagattcagttttctagtattttgttgaggatttttacattcatattcataaaggatattggtctgtatttttcttgt

SEQ ID NO: 496642 - DNA, 201 bp, Homo sapiens
tcatagggtacatagtttttttggtcttgctttgttttctgtttgattattttgagaattgtctatcttcttgtatgtgtcagcagtttgctccttttatrgcattccattgtaggggatgcaccagtttattcagttatttgtttatggttatttgaatggtctctaatttttggctatttaaagtaaaactgctgtgaa

SEQ ID NO: 496643 - DNA, 201 bp, Homo sapiens
aaggtattacagtgattgatttttatatgttgaaccaaccttgccttctgggatgaatgtcacttagtcatagtgagtgtgtgtgtatgtgtgtgtgtagatagatagatagatagatagatagattcagttttctagtattttgttgaggatttttacattcatattcataaaggatattggtctgtatttttcttgtaa

SEQ ID NO: 496644 - DNA, 201 bp, Homo sapiens
ctgtctgtttatctatctatcttaatgttaattcatacccattttccagattttagtctagtaccacagggttcattctggtttcttcctttccatatttrtaactcttacctgtcaatgagaaatgtggctcatattattcttagtatatatacttatttaatcagtcccccttgtgtataatcaatctcccgttgccac

SEQ ID NO: 496645 - DNA, 201 bp, Homo sapiens
tttcaaagaacaaacttttgatatcattgattttctttatactttttctgctttctattttcttgttttccattctagtctttgatattttatgtgtgtgtatatatatatatatatatatatatatatttttttttttttttttttttttttttttgagacggagtttcgcccttgttgcccaggctggagtacagtggc

SEQ ID NO: 496646 - DNA, 201 bp, Homo sapiens
tcctgtgtcaggctctgatcgtctgcacttgactgctgctactgcttacatacacacacccctgccacatatgcttatgtattttgtatggttttttaggstgaattattcaggaaggggcaaaagggaaagaactttaatatttttgtcattagtagggccacttttgtgtaattttcatagtcttttgaagcatacttc

SEQ ID NO: 496647 - DNA, 201 bp, Homo sapiens
ttcaaagaacaaacttttgatatcattgattttctttatactttttctgctttctattttcttgttttccattctagtctttgatattttatgtgtgtgtatatatatatatatatatatatatatatttttttttttttttttttttttttttttgagacggagtttcgcccttgttgcccaggctggagtacagtggca

SEQ ID NO: 496648 - DNA, 201 bp, Homo sapiens
agtgttaacagttcagtgtattgcaaccttttacaagcttgtttataattgctaatacttgcatttaagagattctttcttctggaatgattctaattatrtaatttatttttaggtaaaaagtttagaatggaagaacaaagaaaaccaagaaaggggattttcatttttgttttcacattttaagaaatattacttgcc

SEQ ID NO: 496649 - DNA, 201 bp, Homo sapiens
tcaaagaacaaacttttgatatcattgattttctttatactttttctgctttctattttcttgttttccattctagtctttgatattttatgtgtgtgtatatatatatatatatatatatatatatttttttttttttttttttttttttttttgagacggagtttcgcccttgttgcccaggctggagtacagtggcac

SEQ ID NO: 496650 - DNA, 201 bp, Homo sapiens
caaagaacaaacttttgatatcattgattttctttatactttttctgctttctattttcttgttttccattctagtctttgatattttatgtgtgtgtatatatatatatatatatatatatatatttttttttttttttttttttttttttttgagacggagtttcgcccttgttgcccaggctggagtacagtggcact

SEQ ID NO: 496651 - DNA, 201 bp, Homo sapiens
tcacttttcaagttctaaagttatttttttaccctcttcctaatcaatacaaggaccttagaaccctactagtctgattttccccccaacatatatattaytatcaagtaatttagttctattttttgtgttggtgtgtatttgttatatatttgccactttattttatcatgatttcttccctttcagatcttctattta

SEQ ID NO: 496652 - DNA, 201 bp, Homo sapiens
agtgagtagtagttacatagaatcactattgaatagctagttaacataatgcttacaataattccttattattatctcataataataagtgaggttttgascttatcgggaaaaaataatgtatgttgacatttcttttattcatttctgtagatatttaagattgttaatttagcttggtttcttggggggttttatgtt

SEQ ID NO: 496653 - DNA, 201 bp, Homo sapiens
gataggctgttatccctttatgctattaagatttattggacattatttttatgtggtttattttactgtagagagccctaatattaaaatgttattttacrgaattgaagaagtagaactgtgattcactttacagaactcaagcattaactgatgtggtttcattgaaggaatttactcacaaatatggaaaattagggt

SEQ ID NO: 496654 - DNA, 201 bp, Homo sapiens
ctgaacttggtgaggtcaagactgcagcaagccaagatcatgccactgcacttttagcctgagtaaaaaaatgataccctgtctcaacaataaaaaaaaawtttaattaaaaaagagagaaattctgcttcctttgggtttaatttactcttctgtttctaggtttttgtttatttgtttgtttttttgagatggaatctt

SEQ ID NO: 496655 - DNA, 201 bp, Homo sapiens
acaaaaattacaaaaattagccagacctggtggtgcacatctgtagtcccagctactcaggaggctgaagtgggaggatcacttgaacccaggagtttgargctgcagtgatctatgattgcaccactattttccagcctgaacaacagaacaagaccccatctctttaaaaaaaaaaaaaaagaacaactaaattgaaaa

SEQ ID NO: 496656 - DNA, 201 bp, Homo sapiens
atactttcagggggttgttattaccaaaccacagttcctcctttcctggaaggagtaactatttaggagtggctacccagcataagctacagtgtttgtgycccctccttggaatcttttgcactagagctgatttcagaatgtgaaacttcttgacttggtaaaataagttattctgtgataagaaagactagagtttac

SEQ ID NO: 496657 - DNA, 201 bp, Homo sapiens
tttttatttaaattaaatcattttatttttaataatttaattgtaacttaataattttaataatttcagaacttttcaggggcaagaacattgaattcgcrgtgtgccaggatccccataaccattcctccttttaccaaactcattctcaccactaacagtcattgctctctctcgcttcttggtttagactagtggtga

SEQ ID NO: 496658 - DNA, 201 bp, Homo sapiens
gcataagctacagtgtttgtgccccctccttggaatcttttgcactagagctgatttcagaatgtgaaacttcttgacttggtaaaataagttattctgtsataagaaagactagagtttactcacagcagggaaaagatgagaaaagagagagtagtagaggtggcatttgggttcctggggttccatttattcctttga

SEQ ID NO: 496659 - DNA, 201 bp, Homo sapiens
ctgctatttaaaaatgtataatttcagtaatgtttaatttttgctttcattcattagtgagtctttgtggtttaccttaactttttctaatattcctttctttttttttttttttttgagatagaatctcactctgtcacccaggctggagtgcagtggcatggccttggctcactgcaacctctgcctcctgggttcaag

SEQ ID NO: 496660 - DNA, 201 bp, Homo sapiens
tgctatttaaaaatgtataatttcagtaatgtttaatttttgctttcattcattagtgagtctttgtggtttaccttaactttttctaatattcctttctttttttttttttttttgagatagaatctcactctgtcacccaggctggagtgcagtggcatggccttggctcactgcaacctctgcctcctgggttcaagc

SEQ ID NO: 496661 - DNA, 201 bp, Homo sapiens
ttgtctgatacaagaattgctacccctgttcgcttttggtgtccatttgcatgaaatgcctttttccacccctttacttatgcgagtccttctgtgtttgktgagtctcctgaaagcagcagatggttggttggtgagttcttatccattctacagttctctatcttttaagtggagcatttagaccatttacattcaatg

SEQ ID NO: 496662 - DNA, 201 bp, Homo sapiens
cgaactcctgacctcaagtgattggtccgcctcggactcccaaagtgctgggattacagacatgagccactacacccgaccagatttttctaacattcacttttttttttttttttacttctttaattctcatcttcgtgtacgaatcctgttatttaaataagttaaagttatttctttattctttcatgagcaaacatt

SEQ ID NO: 496663 - DNA, 201 bp, Homo sapiens
cttctctaaggagctgtcattcattttaatgaagaattgtattcacagacacagacacacacaaatccatgtttctgcctgtctgtctgtttatctatctmtcttaatgttaattcatacccattttccagattttagtctagtaccacagggttcattctggtttcttcctttccatatttataactcttacctgtcaat

SEQ ID NO: 496664 - DNA, 201 bp, Homo sapiens
cggccatggataccagcaactgttctagtggaggtggcagcaggtgaaatgaagtctgtgaggtttcttagctttggtggtttaattctctgtttttgtgstggttggcctcttgccgggaggtggcacattccagagagcatcagctgtggtagtatggaaaggaactggcagtggatggggccctagatcttccaagag

SEQ ID NO: 496665 - DNA, 201 bp, Homo sapiens
gaactcctgacctcaagtgattggtccgcctcggactcccaaagtgctgggattacagacatgagccactacacccgaccagatttttctaacattcacttttttttttttttttacttctttaattctcatcttcgtgtacgaatcctgttatttaaataagttaaagttatttctttattctttcatgagcaaacattg

SEQ ID NO: 496666 - DNA, 201 bp, Homo sapiens
cttgccgttcctcaagcatgttaggcaggctctcacctcaggtcctttaaacttgattttcctctttttctgaaatactattctcctagacaggaacgtarctccatttgtcttttccttttcagtttgctgatacttattctctaccacccactcttccttttatgcttactgggcccctcagatccatgggatgagagt

SEQ ID NO: 496667 - DNA, 201 bp, Homo sapiens
tctgacttctcagaagaaccatgacatctagatctaggatctgttgccgcccctgccacatttctcacagtgactgttccacgtatcgctatgcctggaakggacttgcaaaataaccagaggggaggaggctgtgatagagaattgggctgatacacccaactgaaagtccctttagcctctttttcatatgtggttgaa

SEQ ID NO: 496668 - DNA, 201 bp, Homo sapiens
agtgactgtgatattgtctacacaatgaatggaatatgctttaaacattttactaaataattgctgggaaaaaaaaaaccttcattcttgaaatattttargttcattatgaggacaaaatgatatgttttaaatgttttcttataaaaatgttttaggtcacaagtctcaaagagaggaattggatgctatactttttat

SEQ ID NO: 496669 - DNA, 201 bp, Homo sapiens
tctactaaaaatacaaaaattagctgggcatggtggcaggagcctgtaatcccagctacttgggaagctgaggcaggagaattgcttgaacctgggaggcrgaggttgcagtgagccgagatcgtgccattcattgcactccagccagggtaacagagtgagactccgtctcaaaaaaaaaaaaataataataataataat

SEQ ID NO: 496670 - DNA, 201 bp, Homo sapiens
ctccaggaaccgaaaaggcgaggagtatagtacggcaaaaaactgtcggtatgtactcttgaaaatcatgagaatggtacagggcactacatttatagtcyttggtaacaatttatatcaatataaatttttcttaccagttgattattgttgtgaaatgaaaaactgctatagcaaagccttttttccagaagtactcag

SEQ ID NO: 496671 - DNA, 201 bp, Homo sapiens
atgcttctatgaaaagagaattttccatgggaatgtatccgtatttaatggtaatcagtgaaaaacactattaattttaaagaaatgtaaagccattattktaaggatacatcttgtataaaaaattaggttctaaagtgttaagaattatggtttgaaaggaagaaacaactagaaagaaaataagagattaaagatttt

SEQ ID NO: 496672 - DNA, 201 bp, Homo sapiens
agtaattagatggctgggtcaaatggtatttctagttctagatccttgaggaattgccacactgtcttccacaatggttgaactagtttacactccaaccrtgtaaaagtgttcctgtttctccacatcctctccagcacctgttgtttcctgactttttaatgatcaccattctaactggtgtgagatggtatctcattg

SEQ ID NO: 496673 - DNA, 201 bp, Homo sapiens
tcatggccttacctctaaagacactgctccaaccatttcatgctacgggagcagaaagcgataaaacagaaaaatctgttctcaattgcatttataaggtraacttccttgctttattatttatttggtaaccaagagtttttaaaacctagagaaataacatttctcagtataacatttttattcttttagagctagaaa

SEQ ID NO: 496674 - DNA, 201 bp, Homo sapiens
ggagcttgagctgaagtgaaccgcccgccttggcctccctaagtgctgggattacagatgtgagtcactgtgcccagcctatcattcactcttcttcttcttttttttttttttgagatggagttttgctctgttgcccaagctggaatactgtggtgcagtctcggctcactgcaatctccgcctcctaggttcaagtga

SEQ ID NO: 496675 - DNA, 201 bp, Homo sapiens
gattttcagcaccacagtctgaacatggacctcgaactttagataatctcattaatcctccactcaaccttcaagaaagtaagattcatgggatgttatcygtcagtaggtttaagctctctatgtagtctcttagtgtattttttcaaatgtctgtgcattcattaactgggtaatccaaggcaatgctttaaaacatag

SEQ ID NO: 496676 - DNA, 201 bp, Homo sapiens
gaatactgtggtgcagtctcggctcactgcaatctccgcctcctaggttcaagtgattctcctgcctcagcctcctgagtagctgggattacaggcgtgcrccaccatgcccaactaattttttttttcttttttttgagacaggagtctccctctattgcccaggctggcatgtagtggcacaatctcggctcattgcaa

SEQ ID NO: 496677 - DNA, 201 bp, Homo sapiens
ttactttctagttgtactaatgtcaaaacagttttgtctgaaccgaacaagcctatcaaagttaaatccttaaaaatttgttaagaaaggtagctgcatgragttataaaaaggggcagcagattaaattaggatgttctttgggcatatttttaaaattttttaacattacttttttttctttctgagacagtcacccaa

SEQ ID NO: 496678 - DNA, 201 bp, Homo sapiens
tcaggaggctgaggtgggagaatcgcttgagcccaggagtttgaggccactttggacaacatggagagaccgcatctcttaaaaaaaaaaaaaaaaagagygagagagagaaattactgattattagctatttaaaatatattcttcatgtagatttttaaactaatttaagtaattcttagtagtaattcttagtttaag

SEQ ID NO: 496679 - DNA, 201 bp, Homo sapiens
ttacaggcgtgcgccaccatgcccaactaattttttttttcttttttttgagacaggagtctccctctattgcccaggctggcatgtagtggcacaatctyggctcattgcaacctccgtctcctgggttcaagtgattcttctgcctcagcctcccaagtagctggaactacagacacatgccaccacaccttgctagtt

SEQ ID NO: 496680 - DNA, 201 bp, Homo sapiens
attaatttgccctctaaagagaggaacctttgtagccttaatagatttaagcaaggatcattagtagatatcaaaaacattaatgtgtaaaggattgcttkggaagaggatattcacttgttgccaaggattctcttacagattatttatatttgcaaagggtaaatatacctttacaatggagggacctggaatcaagcc

SEQ ID NO: 496681 - DNA, 201 bp, Homo sapiens
ctagcctgagcaacatagtgagaccctgtctctacaaaaatttttaaaatgtgctgggtgcagtggcgcgtgcctgtagtcagcttgtcaggagaatgagrtgagatgattgcttgagcccaagagtttgaagccacagtgagctatgattgcaccactgccctccagcctgggtgacagagcaagttccagtctaagaaa

SEQ ID NO: 496682 - DNA, 201 bp, Homo sapiens
aaaaagctcaaaggttcactctctagagatagtagtgatgtttgtcctttggtgaatatctagctcatcaaaccacacacacagttatatagtattatactatatatatatatatatatatatatatatatatatgccataattttcttaaccagtcctgtactgatggacatgtagttatttctctctgttttgaggcaa

SEQ ID NO: 496683 - DNA, 201 bp, Homo sapiens
ataaggagaacttcctcaacttgataaatctattaaaaaataaaaacacaggacaacttacctctagcatcatacttaatggtgagaaactaggttttttyctgctgagatccacaacaagacaaggatatctcactattcctgtaagacaggaaaaggaaataaaaggtctacagattgagaagaaataaataaagctat

SEQ ID NO: 496684 - DNA, 201 bp, Homo sapiens
aaaagctcaaaggttcactctctagagatagtagtgatgtttgtcctttggtgaatatctagctcatcaaaccacacacacagttatatagtattatactatatatatatatatatatatatatatatatatatgccataattttcttaaccagtcctgtactgatggacatgtagttatttctctctgttttgaggcaaa

SEQ ID NO: 496685 - DNA, 201 bp, Homo sapiens
gttggtaccacaatttgcagttgcaagttgtgctgctataaacgtgtgtgcaagtatctttttcatataatgacttgttttcctctgggtagatacccagyagtgggattgctggattaaaatgacagttctacttttagttctttaaagaatctccacaccattttccatagtggctgtactagttcacatccccaccag

SEQ ID NO: 496686 - DNA, 201 bp, Homo sapiens
ctttcagaccatgaaaaaaaaaacatgaagaaactgaatgagtattgctgagtaaaagaagctaatctgaaaaggctacatactgtatgatttcaaatatrtgacattgtggaaaaggcaaacttttgtcaacagtaaaaagatgactggtttccaggcactaggaataggggggtggggctagaagaagggatgaatagg

SEQ ID NO: 496687 - DNA, 201 bp, Homo sapiens
ggtgaatatctagctcatcaaaccacacacacagttatatagtattatactatatatatatatatatatatatatatatatatatgccataattttcttamccagtcctgtactgatggacatgtagttatttctctctgttttgaggcaaagagaggacaatgaacattcttatatgtattttattttcctctacatgtg

SEQ ID NO: 496688 - DNA, 201 bp, Homo sapiens
tcggccatggataccagcaactgttctagtggaggtggcagcaggtgaaatgaagtctgtgaggtttcttagctttggtggtttaattctctgtttttgtrgtggttggcctcttgccgggaggtggcacattccagagagcatcagctgtggtagtatggaaaggaactggcagtggatggggccctagatcttccaaga

SEQ ID NO: 496689 - DNA, 201 bp, Homo sapiens
tgggtaaatattaatagtggaacttagggttgatgattccagaaacaaattttggaaactcaagaataagaaaatgaatttttaagaagcatatattttakgaatgtacaattataatgattctattgttgttacagttggtagtatctttacttctctgccttctggactggatcatggccttacctctaaagacactgc

SEQ ID NO: 496690 - DNA, 201 bp, Homo sapiens
atgaaaccaggaggcagagcttgcagtgagccgagatcgcgccactgcactccagcctgggtgacatagcgagactccgtctcaaaaaaaaaaaaaatgtrtatatatatatattttttttttttaattaaaggtgattacaactatagatgatgtttcaccctctgtgtaacaacactttaagatttgcatatgtatttg

SEQ ID NO: 496691 - DNA, 201 bp, Homo sapiens
tgttaaggtaagaaatgagatgctaatttttagcacttaaatgattttataatcataaagtatatgcaataaaatttgtattctttcttttctttttgaartccacacaattgttaaagaacattagccatatcctccagacacaaaggcttgaatgttcatttggagcatatccttttttgtgtttaaaactgctttaga

SEQ ID NO: 496692 - DNA, 201 bp, Homo sapiens
gaggtgggaagatctcttgagcccaggaggttgaggcagcagtaagctgagatcacaccactgcacttcagcctggatgacaaagtgagaccctgtttccaaaaaaaaaaaaaaatccatttttttatagttatttatttatttattttttgagatggagtcttgctctgttgtccaggctggcatgatctcagctcactg

SEQ ID NO: 496693 - DNA, 201 bp, Homo sapiens
cagagcttgcagtgagccgagatcgcgccactgcactccagcctgggtgacatagcgagactccgtctcaaaaaaaaaaaaaatgtatatatatatatatwttttttttttaattaaaggtgattacaactatagatgatgtttcaccctctgtgtaacaacactttaagatttgcatatgtatttgtgtctttgctctga

SEQ ID NO: 496694 - DNA, 201 bp, Homo sapiens
acatgtaataaaatgcatagatccatagactcaactgaatgatttttgaaaattgtacatacccctattaaccatcaccacaaacaaattataggacactyccactacctcaaaaagtttcccagtgacctttttgagtcaatcaccacacactcctcccctccacgcaaatacaactttttgctgttcatcaccatagat

SEQ ID NO: 496695 - DNA, 201 bp, Homo sapiens
ttgagttatttgaactctaatcctgtccttgcagttcattctggaagtgctaagtttagtgctgtgccaatgtccagtattttttgttgtaaatggccaatttttttttttttttttttgctgtttgatttttttcttcctctcaggtggttaaaagaagtagtagtatacatttatataatagaagtcttgtaaaagatg

SEQ ID NO: 496696 - DNA, 201 bp, Homo sapiens
cctcccatgtagctgggatcataggcacgtgccaccacatccggctaatttttttatttttttgtagagacagggttgttgcccagggaaattctgaacayaaagttgcccaggctggtcttaaactcctgggctcaagtgatcctccacaccttggcctcccaaaatgctgggattacaggcgtgagccaccacacccag

SEQ ID NO: 496697 - DNA, 201 bp, Homo sapiens
gcaggagaatggcatgaacccaggaggtggagcttgcagtgagccgagatcgcccactgcactccagcctgggcgacagagcaagactccgtctcaaaaaaaaacaaaacaaaacaaaacaaaaaaaaacactgtttataattgaatatgtctcagacttatttaagcacagaacacctttccaagtacacatattgatat

SEQ ID NO: 496698 - DNA, 201 bp, Homo sapiens
accttcctagataattatgtctaagtagttttatctttaatttcatggttaactgtgagccaaaatacaattggacaattagtctcattatttattgtgcyccattgcaactttatggttcaataaatatataattttttacaaatgtaaaattttacatttaagcatttgtaaagttacagcaaaagatgtacctgttaa

SEQ ID NO: 496699 - DNA, 201 bp, Homo sapiens
ctttttttaatgtaatggtttctactctaacgtatgtctactcacaaaggtaaatatttcttatatattgttaaagccttttattttctagggtttttttwattattattttttgtagaaatggagtatcattatgtttcccgggattgtctcaaactcctgggctcaaatgattgtcccaccttggtcagcctcctaaag

SEQ ID NO: 496700 - DNA, 201 bp, Homo sapiens
atcctggtgtttctatgttcttttttaagcaccaaaaagaagatggggaagaaaagaaggaaaattttctgatataaatatgttgttcaaattatgagtaytatttaaaaaagaaaaaggaacataacccaggagtctaagttaaatctaatattgttaatactgaacttgcaggtccaggttggtatacattccaccctc

SEQ ID NO: 496701 - DNA, 201 bp, Homo sapiens
acttgatattttgcttcaggaaaatgggaccaatactgctgatcatgttcgaaattccagttgggcaaaaaacggctcctaccaaggtgctcttcataacrcctctgaagaagccacagaacaaaacatacgagctggtacccaggcagttttgcaggtggatcactttatggctatttttaaaaataaaataatcattaa

SEQ ID NO: 496702 - DNA, 201 bp, Homo sapiens
caggagaatggcatgaacccaggaggtggagcttgcagtgagccgagatcgcccactgcactccagcctgggcgacagagcaagactccgtctcaaaaaaaaacaaaacaaaacaaaacaaaaaaaaacactgtttataattgaatatgtctcagacttatttaagcacagaacacctttccaagtacacatattgatatc

SEQ ID NO: 496703 - DNA, 201 bp, Homo sapiens
gacatttgtacatttgctagtgtcataatgtttttatgattttaatgttttgaaatcttgattttgacctttggtaaaataaattccaagctataaaattygtaagaattcttatagaacagctatacagtctttatcctttgctgagttctttagaatattgtgtggaaagaaatttagagtgcatgctgaatataatct

SEQ ID NO: 496704 - DNA, 201 bp, Homo sapiens
aggagaatggcatgaacccaggaggtggagcttgcagtgagccgagatcgcccactgcactccagcctgggcgacagagcaagactccgtctcaaaaaaaaacaaaacaaaacaaaacaaaaaaaaacactgtttataattgaatatgtctcagacttatttaagcacagaacacctttccaagtacacatattgatatcc

SEQ ID NO: 496705 - DNA, 201 bp, Homo sapiens
ttgggaaggaagctggagaatttattagaccctataagagtctacagtgggatacttggatcggctttctgtgttaaggtgtattttttctgcttggaacktaaataagtaggaaaaatttaatagcatttgagttgcttgatttattggcacagctctatctttatctgcacttccaaatgtttcatcacctcactgtct

SEQ ID NO: 496706 - DNA, 201 bp, Homo sapiens
ggagaatggcatgaacccaggaggtggagcttgcagtgagccgagatcgcccactgcactccagcctgggcgacagagcaagactccgtctcaaaaaaaaacaaaacaaaacaaaacaaaaaaaaacactgtttataattgaatatgtctcagacttatttaagcacagaacacctttccaagtacacatattgatatcct

SEQ ID NO: 496707 - DNA, 201 bp, Homo sapiens
gagaatggcatgaacccaggaggtggagcttgcagtgagccgagatcgcccactgcactccagcctgggcgacagagcaagactccgtctcaaaaaaaaacaaaacaaaacaaaacaaaaaaaaacactgtttataattgaatatgtctcagacttatttaagcacagaacacctttccaagtacacatattgatatcctg

SEQ ID NO: 496708 - DNA, 201 bp, Homo sapiens
gagtgagccactgtgctggacctggaattgctttttttaaactgtcatatttcatttgggtttgacttctctataactccattatataccccgcccctttytttttaggcttacttttttcccttgagtggataaaaatcattgaatgacatctttgctgtcattctttccactcttccactgtcttttttatttgctgct

SEQ ID NO: 496709 - DNA, 201 bp, Homo sapiens
tgtttgatcattttgctgatttagctctcgtaaatatttttactttgtaattgggactcatataataacatttcttcttcctatagattttggctttggarccgacactggggttacgtcctctgctgatgtggattcaggttctggccatcatcagagtgctgaagagcaggaagtggctagtctaactactcttcatat

SEQ ID NO: 496710 - DNA, 201 bp, Homo sapiens
tgggcgacagagcaagactccgtctcaaaaaaaaacaaaacaaaacaaaacaaaaaaaaacactgtttataattgaatatgtctcagacttatttaagcasagaacacctttccaagtacacatattgatatcctgtgccattaaggttccagagagaaccaatatgaaaattaagcaggattaatcttctaccagtttac

SEQ ID NO: 496711 - DNA, 201 bp, Homo sapiens
gtgccatcctagcttactgcagcctggaactcctgggctccagcattcctcccacctcagcctcctggcaaattaatttttttttcctggaataatttacrttaatttttttgagacacagtcttgctgtgtcgcccagcctagaatgcagcggtgcaatcttggctcactgcaacctccacttcctgggttcaagcaatt

SEQ ID NO: 496712 - DNA, 201 bp, Homo sapiens
tagtaaccagagaatgcaaataaaaactacaatgagaccctactacgcatactgaaattgttcaagttaaaaacactgacggccgggcatggtggctcacrcctgtaatcccagcactttggggagccgaggcgggcagatcacaaggtcaggagatcgagaccatcctggctaatagggtgaaaccccatctctactaaa

SEQ ID NO: 496713 - DNA, 201 bp, Homo sapiens
cattttaaaatgtgttttggtagttttctaattcattgacactacatgctatattggcttgtgcccatcatttttttaaaaaagcagatttgtattttgatttttttttcattgagcttacaaaaactcagattttttttaaagcatatgctttagagcattattgaaattaataattattttttatatttgtgtagttct

SEQ ID NO: 496714 - DNA, 201 bp, Homo sapiens
aggtcaggagattgagaccatcctggctaacacggtgaaaccccgtctctactaaaaatacaaaaaattagccgggcgtggtggtgggcacctgtagtccyagctactcgggaggctgaggcaggagaatagtgtgaacccgggaggcagagcttgcagtgagctgagattgcaccactgcactccagcctgggggacaaa

SEQ ID NO: 496715 - DNA, 201 bp, Homo sapiens
tgattttgcccaactgtaagctaatttaagtgttctgagcatgtttagggtaggctaggctaagctatgatgttcagttgattaggtgtattaggtacaaytttgacttaccatattttcaatttacagtgagtttcttggggtgtaaccccatcataagtcaaggagcatctgtatgtatttaatttatattggtttttt

SEQ ID NO: 496716 - DNA, 201 bp, Homo sapiens
ataaactttgagttgtatcacagaatatgctgtgtattaaaagttgtgaccgggtgaggtgactcacacctgtaatcgcagcactttgggaggctgagccrggtggatcacatgaggtcaggagtttgagaccagcctggccaacatggtgaaaccctgtctctactaaaaatacaaaaaattagctgggcatggtggtgg

SEQ ID NO: 496717 - DNA, 201 bp, Homo sapiens
gtgtatgtgtgtatcaaatcatcgtgttgtacaccctgaatatatattgtctttaacaattatatatttaaaaattaaaaaaaagaaacttggtaaggcawccaccatagaaggacatatgtcctaggagcaaactctctctctctctttttttttttttgagatggaagtcttactctgtcgcccaggctggagtgcagt

SEQ ID NO: 496718 - DNA, 201 bp, Homo sapiens
ttgcggtccatgaatttcttatgctatacggaaactctagagtgcaagttacagttttttatatagtctgtatggtccaaggtgaatttatgggaatgcattttttttttttgagaggggaaaagataggaagccttcaaaaattgtcatgctcgtaatttgaaaatctgtttttactttttgatgttatatttttcatac

SEQ ID NO: 496719 - DNA, 201 bp, Homo sapiens
cagctactgggaggctgaggtgggaagagcacttatgccatggttgtgccaccgcactccagcctgcgtgacagagcaagaccttgtcccacccccccccmaaaaaaggaaatcatttgttaaacaagtgaacttgacttacatataaaatcaatgcaaatttccagtgacacacaaaaaactatataaattgacccttgc

SEQ ID NO: 496720 - DNA, 201 bp, Homo sapiens
tgcaattgccttgtaattatatagccctaattttctggtttgtggattatttctgaccttttctttttctcctttgatctgcagttgtttatttgtttacrgttatttccccaacatttggaaaaaaacttcagttatagaagtgtttcaaggctagtaaaatgaatgcacataaaccctttatataaattcatcaattaa

SEQ ID NO: 496721 - DNA, 201 bp, Homo sapiens
tgtccaggctggcatgatctcagctcactgcaacctccacttctaggttcaggcaattctcctgcctcagcctcccaagtagctgggactacagacacatrtcaccacgcctggctaatttttgtatttttagtggacacggagtttcaccatgttggccaggctggtgtcgaactcctgactttaggtgatccgcccacc

SEQ ID NO: 496722 - DNA, 201 bp, Homo sapiens
gtccaggctggcatgatctcagctcactgcaacctccacttctaggttcaggcaattctcctgcctcagcctcccaagtagctgggactacagacacataycaccacgcctggctaatttttgtatttttagtggacacggagtttcaccatgttggccaggctggtgtcgaactcctgactttaggtgatccgcccacct

SEQ ID NO: 496723 - DNA, 201 bp, Homo sapiens
tcatattatctttgattcttgattctgtttaactcttgctttttaaggtctagaagttaaactctcccccttatttagtgatttatatacaatttacttcrattttatgaccttatttgttcttgaaacatggttgaaaatcaagctattattgtaggtagaggattgacttgagtagttctccatctttaatgttgtacc

SEQ ID NO: 496724 - DNA, 201 bp, Homo sapiens
aactcctgacctcaagtgatccacccacctcggcctcccaaagtgctgggattataggcctgagccaccaccaatcaggcattagattcttataaggaggktgcattctagatcctttacatgtatagtctgtgatacctgtgccgtagctaatgatatttatactagactgccttcccatcacccttatatctgaaagct

SEQ ID NO: 496725 - DNA, 201 bp, Homo sapiens
gtatctaatactatgcattatgtaacatccttgagaaaatgtagaatatagtcattttttgcattttctggttcatatgagggatacctgttgagaaaggytgcataggaaaccaaatcattgcaagaatcaagcctaacatatctccacaataaggttaaaacaagtcatttcctctgatggtgttggaaatacccagtc

SEQ ID NO: 496726 - DNA, 201 bp, Homo sapiens
cattgtggataaaaaatataccttgcatgatttcaaatcgtttaaatttatcaagacttgtttttttttgttttttggttttttttttttgagacggagtstcgctctgtcgcctaggctggagtgcagtggcgcggtcttggctcactgcaacctctgcctcccaagttcacgccattctcctgcctcagcctcccaagt

SEQ ID NO: 496727 - DNA, 201 bp, Homo sapiens
tgttattatgtctattttttaattatatgcctgacattatacataaatgttgtagagactctaggtcggtgctgctcactatggtagctactaactgtgtrttgctttcagttgacactaaatttagtttaaagttcacatgaaaaatgtaattcctcgtttgcaaatatcaagtgctcaatagccatatgggcaaatata

SEQ ID NO: 496728 - DNA, 201 bp, Homo sapiens
agaggctttttagatgcacaattaataagtggcaataccaagtttgaccttagtgcttaagactgtagatcttttgcttttttttaccaaaaaaaaaaaawatatatatatatatatgttgcttctcaagtggaagaatgtggaagcctaaaacgtagctgtctagaggtagacctggaaatcattaacacaacagcttgt

SEQ ID NO: 496729 - DNA, 201 bp, Homo sapiens
cattaacacaacagcttgtgttatggagaatatggaaaaaccccagaagttgaatataagcattgtctcaacttgtttttctatacctttttagtatatgtttttttagaaacatactcccaggccaggcgtggtggctcgtgcctggaatcccagcactttgggaggccgaggagagtggatcacctgaggtcaggagtt

SEQ ID NO: 496730 - DNA, 201 bp, Homo sapiens
gattctgctatactgtatggcccacctcctgtaagtggcttgtcagaacctacatctttcatgctttcattgtctcaccaagagaagccagaagagcctcygacatctaatgaatgcttagaagatataaccgtaaaagatggactttctctccagtttaaaagatttagagaaactgtaccaacttgggatacaataaga

SEQ ID NO: 496731 - DNA, 201 bp, Homo sapiens
tggtggctcgtgcctggaatcccagcactttgggaggccgaggagagtggatcacctgaggtcaggagttcgagaccagcctggccaacatggtgaaaccmcgtctctactaaaaatacaaaaaattagccaggtgtcgtagcgtgcccctgtagtcccagctactcaggaagctgaggcaggagaattgcttgaaccgag

SEQ ID NO: 496732 - DNA, 201 bp, Homo sapiens
atattcagtttaaacaccatttgaacagattgtttagctcttgataaatactttatcatcatcatcttcatctttaaaagagacatatacttcatttttattttttttattttaaatttttaacatttttttgaggcggagtcatctcactctgtcacccaagctggagtactgtggcacagtctcggctcactgcaacct

SEQ ID NO: 496733 - DNA, 201 bp, Homo sapiens
cgccattctcctgcccagcctcccgagtagctgggactacaggcgcccgccaccacgcctggctaatttttttgtatttttagtagagacggggtttcacygtgttagccaggatggtctcgatctcctgacctcgtgatctgcctgtctcagcctcccaaagtggtgggattacaggcgtgagccattgcgcccggcctg

SEQ ID NO: 496734 - DNA, 201 bp, Homo sapiens
cccaaagtggtgggattacaggcgtgagccattgcgcccggcctggggtatcgtttcttaagtcctctttggcagatacagctaggaaatacataacatayacacacacacacacacacacacacacacacacacacacacacacccatctctatatctgctatagactgaatgtttgtgtctctcccgaagttcatatat

SEQ ID NO: 496735 - DNA, 201 bp, Homo sapiens
ccaaagtggtgggattacaggcgtgagccattgcgcccggcctggggtatcgtttcttaagtcctctttggcagatacagctaggaaatacataacatatacacacacacacacacacacacacacacacacacacacacacacccatctctatatctgctatagactgaatgtttgtgtctctcccgaagttcatatatg

SEQ ID NO: 496736 - DNA, 201 bp, Homo sapiens
tttatggtaattttatgaaattatatttacaggttcagaaagtgcttccccagtccactcacctctgggctccaggtcacagactccttccccttctacaytgaatatagatcacatggaacagaaggatctgcagctcgacgagaagctccaccactctgttcttcagacaccagatgatctaggcaatatttcaaaatt

SEQ ID NO: 496737 - DNA, 201 bp, Homo sapiens
caaagtggtgggattacaggcgtgagccattgcgcccggcctggggtatcgtttcttaagtcctctttggcagatacagctaggaaatacataacatatacacacacacacacacacacacacacacacacacacacacacacccatctctatatctgctatagactgaatgtttgtgtctctcccgaagttcatatatgg

SEQ ID NO: 496738 - DNA, 201 bp, Homo sapiens
cgcagtgctaaaagtgctcctgttctgatccatacttccaaacccttcttgcctgatattgttctcactcccctttctgatgagctttcaggtagtgccayctctgctaatttctgcaccacctttttcactttttaatcctctgctttcaaattttgcttaatcaaataaactctttaaagttaatttctttgggggagg

SEQ ID NO: 496739 - DNA, 201 bp, Homo sapiens
acatgaactcatcctttttatggctgcatagtattccatggtgtatatttgccacattttcttaatctagtctatcattgatggacacttgagttggttcyaagtctttgctatcgtgaatagtgccacagtaaacatacacgtgcatatgtccttatagcagcatgacttataatcctttgggtatatacccagtaatta

SEQ ID NO: 496740 - DNA, 201 bp, Homo sapiens
tactcaagacaagatcactctgttactgtggtagaataatacagaaacacaatcactctgtaattatgtctaaaattaagtagagacaagaatgttttaaacacacacacacacacacacacacacacaccccctaaacatcctaacatgaatgactaatgcttctttaccaaaaacaactctcctcctacctcttagatg

SEQ ID NO: 496741 - DNA, 201 bp, Homo sapiens
tcccaggttcaagctgttcttctgcctcagcctcccgagtagctgggactacaggcatgcgccaccccgcctggctaatttttgtatttttagtagagacrggttgttaccttgttggccaggctggtctcaaactcctgacctcaagtgatccacctgcctgggcctcccaaagtgctgggattacaggtgtgagctacc

SEQ ID NO: 496742 - DNA, 201 bp, Homo sapiens
tgggactacaggcatgcgccaccccgcctggctaatttttgtatttttagtagagacaggttgttaccttgttggccaggctggtctcaaactcctgaccycaagtgatccacctgcctgggcctcccaaagtgctgggattacaggtgtgagctaccatgcctggcagtctttgttactttctttcttctacttagttta

SEQ ID NO: 496743 - DNA, 201 bp, Homo sapiens
actatgctttcatcaacaatggaccacatatatgacagtagtctcataagattataataccttatttttgctgcaccctttctgtttaggtgtatttacayacacacatacttaacagtatgtcataattgcctacagtattcctacagtaacatgttgtacagatttgtagcttagcaacaataggatatacctgatagc

SEQ ID NO: 496744 - DNA, 201 bp, Homo sapiens
gtggtacgatcttggctcactgcaacctccgcctctcaggttagagcgattctcctgcctcagcttcccaagtagctgggattacaggcacgcattgccaygcccagcttatttttgtatttttagtagagacagggtttccccatgttggccaggctggtctcgaacttctgacctcaggtgatccacctgcctcagcct

SEQ ID NO: 496745 - DNA, 201 bp, Homo sapiens
taacctatttttttattattttttccttgggatacatagcttatttataaatgtgtagtttaatttcaaaatatgtgagttttttctagatatcgttattsatacctaattctataccattgtgatcacagaatatactctgtaagatatcagtattttgaaatataatataacccagtataggtaccctgttcccttgaa

SEQ ID NO: 496746 - DNA, 201 bp, Homo sapiens
atagtatacatctttaacttgccagagtgtacacctttaagtgatactataccacttcccatgtagtataagaaccttgtaagaatttacttccatttctycacccaacctttatgcttttgttgtcatatattttacttatcatgttatcagccatacactatattattttgtttaaacaagtagtgatcttttaaagat

SEQ ID NO: 496747 - DNA, 201 bp, Homo sapiens
ttttgaaatataatataacccagtataggtaccctgttcccttgaaaacaatgtgtatactctgtcgttattgagtgtaatgaactaggtatgtcaattargtcaaggtggttgttggtagtatttagatcagtatgtttttactgacttcatttcttttaaaaatttttattgctacataataattgtacatatttatgt

SEQ ID NO: 496748 - DNA, 201 bp, Homo sapiens
ggcatgtaccactacgcctggctaatttctttttttagtatttttagtagagatgggttttgccttgttggccagactggtttcgaactcctggccccaastgatcgtgtgcctgggcctcccaaaatgctgggattacaggcatgagccactgtgcccagccgatatttctattcagtataattttgtttctgcatgaag

SEQ ID NO: 496749 - DNA, 201 bp, Homo sapiens
ctggagtgcagtggcatgatctcggctcattgcaacctccaccacctcctgagttcaagtgattcttgtgcctcagcctcccgacgaagctgggattacartcatgcgccaccacacccagctaattttttttgtaattttggtagagacagggtttcaacatgttggccaggctggtctcaaactcctgttctcaggcaa

SEQ ID NO: 496750 - DNA, 201 bp, Homo sapiens
gggataaaaaataataagcttgattatatttggataattgtactgctgtgtcagttattttatgcccaataaaagtactcactaagattccaaagcataarttgtgctatttatgatcattaaatacagtttaaattttatcctaggaacatgttctgaaaccatgaatctaatgttgttcactaaatggggacagtattg

SEQ ID NO: 496751 - DNA, 201 bp, Homo sapiens
tatattgcagtattataatttatgcagcatgttcttaaataggataaggaagagatattttaagaaaccttttaaatctgtaaatttttttaatgggatgytcttgctagatttggggaaattcaaatgcatgttttgtaaaatcagtaaatctgtaaaatttactactattccatatcctgtgttctcttaagtaatttt

SEQ ID NO: 496752 - DNA, 201 bp, Homo sapiens
caccttcctctccagtgttacttaggcagtggctcccacgttagaaaaaaaaaaattagatatttggtcttgctatgttgtctgggctagtcttgaactcytggcctgaagcagtcctcctgcgtcagccttccgagtagctgggattacaggtgcaaggcatcattcttggccccacttatttttatttcaattttcagt

SEQ ID NO: 496753 - DNA, 201 bp, Homo sapiens
aggcagtggctcccacgttagaaaaaaaaaaattagatatttggtcttgctatgttgtctgggctagtcttgaactcctggcctgaagcagtcctcctgcstcagccttccgagtagctgggattacaggtgcaaggcatcattcttggccccacttatttttatttcaattttcagtgaaatttcaaaggaagttttagg

SEQ ID NO: 496754 - DNA, 201 bp, Homo sapiens
gacagaaccctggcagtttgtcttcagaggctttttagatgcacaattaataagtggcaataccaagtttgaccttagtgcttaagactgtagatcttttscttttttttaccaaaaaaaaaaaatatatatatatatatatgttgcttctcaagtggaagaatgtggaagcctaaaacgtagctgtctagaggtagacct

SEQ ID NO: 496755 - DNA, 201 bp, Homo sapiens
gactccatctcaaaaaataaataaataaataaaatatatatatataaaacaatatagactggcagaaagtaaaaggatagaaaaagttatattgtgcaaasatcaatcaaagaaaagccagagtgactgcattaatatcagatcaactttagagcaaagagaattactggagaccagaaggacattatataattatagaag

SEQ ID NO: 496756 - DNA, 201 bp, Homo sapiens
ctgggtccgctcaccaaggcctggttcctcgaatccaaagacagcctcttgaagaagacccacagcctgtgccccaggcttgtctgtggggacaaggaccwgggttaaaatgttcataaaagccaggtgtggttgtggcgggtgcctgtagtcccagctactcaggaggctgaggtaggatgatggcttgagcccaggagt

SEQ ID NO: 496757 - DNA, 201 bp, Homo sapiens; identical to SEQ ID NO: 270878

SEQ ID NO: 496758 - DNA, 201 bp, Homo sapiens
aaaaaaaaaaaaatttaacacgtatgtagacaatgtgcaaggcaccattccatgtgcatcgtatgtagtaactcttaattctcacgataaccctgaggtasatattattaccccgttctacaaaaggagaaacagtcctggggagacaggataagtcaccggccaaggcacacagctagctacatgtggcccccgcgtgac

SEQ ID NO: 496759 - DNA, 201 bp, Homo sapiens
agccaccacgcccggccatgtactttatgttaaaatgggatcatattctagatcagcattatccagtagaaatttaaatttttaatacagggccaggcacrgtggctcatgcctgtaatcccagcactttcggaggccgaggcgggtggatcgcaaggtcaggagatttgagatcatcctggctaacagatgggtaaaaac

SEQ ID NO: 496760 - DNA, 201 bp, Homo sapiens
tcatattctagatcagcattatccagtagaaatttaaatttttaatacagggccaggcacggtggctcatgcctgtaatcccagcactttcggaggccgargcgggtggatcgcaaggtcaggagatttgagatcatcctggctaacagatgggtaaaaacccatctctactaaaaatacaaaaaattagccatgcatggt

SEQ ID NO: 496761 - DNA, 201 bp, Homo sapiens
atttaacacgtatgtagacaatgtgcaaggcaccattccatgtgcatcgtatgtagtaactcttaattctcacgataaccctgaggtagatattattaccycgttctacaaaaggagaaacagtcctggggagacaggataagtcaccggccaaggcacacagctagctacatgtggcccccgcgtgacggctggtctctg

SEQ ID NO: 496762 - DNA, 201 bp, Homo sapiens
cattagaggggaaccacaggcagacagggtgacaggagggactactgacacaaggtgaagagatggcccagccggacggggtggctcacatctgtaatccyagcattttgggagcccgaggtgggtggatcacttgaggtcaggagttcgaggccccaacatggcaaaaccccatctcttctaaaaatacaaaaattagcc

SEQ ID NO: 496763 - DNA, 201 bp, Homo sapiens; identical to SEQ ID NO: 270883

SEQ ID NO: 496764 - DNA, 201 bp, Homo sapiens
tggtgggaggggactcctgggtctgagggaggaggggctggggcctggacccctgagtctcagggaggaggaaagggtgggagtggggctgtgacccctaggtctgggaggagtggagggttagagctgagagcaggaactcctaggtcacagagaggagcggataaatggggcagagaacacctggggagagctggggcc

SEQ ID NO: 496765 - DNA, 201 bp, Homo sapiens
gggatgtggggcccacacctggtgggtgtgagtgtggctgtgtgtcctgtggctctgtagccacgtgagacatgagtacggagtgtgtgcgtttcatggcrtgcgtatgcatgtgcgtgtcggggagtgtgtgtgtcggtggctgagagtgaagtgtgaatgtcacattggtacaaactgggatcatctgtgtgtgtgcac

SEQ ID NO: 496766 - DNA, 201 bp, Homo sapiens
tctctgaagtctctgccaagcggggaggtggccgggggagggccctgctctgtgcagcctcccctcccccggcccgcagagttgagcacagagggacagargcacggaacccccagaaatgtccctcctcagaaacaggctccaggccctgcctgccctgtgcctctgcgtgctggtcctggcctgcattgggggtgagaa

SEQ ID NO: 496767 - DNA, 201 bp, Homo sapiens
gtagccacgtgagacatgagtacggagtgtgtgcgtttcatggcgtgcgtatgcatgtgcgtgtcggggagtgtgtgtgtcggtggctgagagtgaagtgkgaatgtcacattggtacaaactgggatcatctgtgtgtgtgcacgtgcgtgcgtggaagtgggagtatgcagtcgtggtaaaaaagtgcatgtctgtgtg

SEQ ID NO: 496768 - DNA, 201 bp, Homo sapiens; identical to SEQ ID NO: 270897

SEQ ID NO: 496769 - DNA, 201 bp, Homo sapiens
aattctcacgataaccctgaggtagatattattaccccgttctacaaaaggagaaacagtcctggggagacaggataagtcaccggccaaggcacacagcyagctacatgtggcccccgcgtgacggctggtctctgtaggcgaggctttgtccagatgcgtgggtagaaggtctggcccggaaagaggaactgacagcaa

SEQ ID NO: 496770 - DNA, 201 bp, Homo sapiens
agggaggaggaaagggtgggagtggggctgtgacccctaggtctgggaggagtggagggttagagctgagagcaggaactcctaggtcacagagaggagcrgataaatggggcagagaacacctggggagagctggggcctccactgtgatgtcctctctcctgtaggagcccgagcaccttccggggcttcatgcagacc

SEQ ID NO: 496771 - DNA, 201 bp, Homo sapiens; identical to SEQ ID NO: 270899

SEQ ID NO: 496772 - DNA, 201 bp, Homo sapiens
gtatgtagtaactcttaattctcacgataaccctgaggtagatattattaccccgttctacaaaaggagaaacagtcctggggagacaggataagtcaccrgccaaggcacacagctagctacatgtggcccccgcgtgacggctggtctctgtaggcgaggctttgtccagatgcgtgggtagaaggtctggcccggaaa

SEQ ID NO: 496773 - DNA, 201 bp, Homo sapiens; identical to SEQ ID NO: 270904

SEQ ID NO: 496774 - DNA, 201 bp, Homo sapiens; identical to SEQ ID NO: 270900

SEQ ID NO: 496775 - DNA, 201 bp, Homo sapiens
ggaggcatcagaggatggcaattagagaggccattagaggggaaccacaggcagacagggtgacaggagggactactgacacaaggtgaagagatggcccrgccggacggggtggctcacatctgtaatcccagcattttgggagcccgaggtgggtggatcacttgaggtcaggagttcgaggccccaacatggcaaaac

SEQ ID NO: 496776 - DNA, 201 bp, Homo sapiens
gtggagggttagagctgagagcaggaactcctaggtcacagagaggagcggataaatggggcagagaacacctggggagagctggggcctccactgtgatstcctctctcctgtaggagcccgagcaccttccggggcttcatgcagacctactatgacgaccacctgagggacctgggtccgctcaccaaggcctggttc

SEQ ID NO: 496777 - DNA, 201 bp, Homo sapiens
ctgggaacagcaaacacaccacagactgcagacccggaagaacttgtcccagtgttgaccacaccccctggctaggggcagggcttccggcctcgaacttyaacttccgcttccggttcctagcgttaactgcgaccggggttcagcgctcgggtgaggagctggtggcgtcggcaggttcgaggcgattcgaggtgaggg

SEQ ID NO: 496778 - DNA, 201 bp, Homo sapiens
gtttttgtatttttagtagagatgaggttccaccatgtatgccaggctagtctcaaactcctggcctcaagtgatcctcccgcctcggcctcccaaagtgmtgggattatagccgtgagccactgtgcctggcctagaaggaacagaaacttttttttttttttttgagatggagttttgctcttgttgcccaggctggag

SEQ ID NO: 496779 - DNA, 201 bp, Homo sapiens
gctttgtgtagctccagctaggatgatcgaggttgtttgcaacgaccgtctggggaagaaggtccgcgttaaatgcaagtatccactggcagccgagaggyagtggtacccgcaggggtgcttggcgtgaggcaggcaactcaatctgtgttgtcggatggttttagttaaacccgggagagggggcggatggggtcctgg

SEQ ID NO: 496780 - DNA, 201 bp, Homo sapiens
tccaaataaaaatggcctggtccaaaatgggcttccttagccctgggctgagacctcaggccacctgacccggctgtgaatggatgagaggggtggggacrgaagtcagagtcaggattccttaacacctttccttcagatgaaatccacgatgggatgaacctggagctttattatcaatagatgagaatcctcatcttc

SEQ ID NO: 496781 - DNA, 201 bp, Homo sapiens; identical to SEQ ID NO: 117640

SEQ ID NO: 496782 - DNA, 201 bp, Homo sapiens; identical to SEQ ID NO: 117619

SEQ ID NO: 496783 - DNA, 201 bp, Homo sapiens
ttcagactttttaaacattttcattttcttcttgacttgggaacagtgtttgatttttaaaagccatttaggagccctgaagcttaataaatgagtggctycttctccataggtgaacgggttgttttgcatagggcaataccttttcattttatctgtgtgacgttttctcagtcttatggcattaattttttggaggag

SEQ ID NO: 496784 - DNA, 201 bp, Homo sapiens
tttcccatgttttaaataaaagtttcttttgtttgtttgttttacagtgggtgtttcttcccgatcaagatcagagatctcagttaatcctcccacccccrgttcatgttgactacagggctgcttgcttctgtcatcgaaatctcattgaaattggttatgtctgttctgtgtgtttgtcaagtaagttaatgtacctag

SEQ ID NO: 496785 - DNA, 201 bp, Homo sapiens
gggaggctgaggacagaggattgcttgagcccaggagttcgagagcagcctgggcagcaaagtgagaccccatctctactaaaaatttaaatgtatttatyaaaactgttctctagaagctttggactgaatcccaaaagtgtttataagttcaaaagcaaaagtatttgtaatttcaacaacaaaaaatgtatttcttta

SEQ ID NO: 496786 - DNA, 201 bp, Homo sapiens
agcaaaaacctgactcttccttgtctcttctcttccctcctttcataaccatgagcaaatcctgttgattctgcctttaaaatatatcctggctgagctcrgtggctcatgcctataatctcagcacttgggaggctcaggcgggtggatggcttgagctcagaagtttaagaccagcctgggcaacatggcgagacacca

SEQ ID NO: 496787 - DNA, 201 bp, Homo sapiens
gttgcagtatatgaacttcatgaatgtcatctttgcagcacagaaacaggtgaactgagagcctgccgtttaaagtatttgtttcataacgaaggagtcartttcattttttgaatgctctactctgaggtattctgactacgtaggcttatgaatgggcaaggaatccagaatctgtattatgttctagtcttttctcta

SEQ ID NO: 496788 - DNA, 201 bp, Homo sapiens
ttagcacaaatgaaaaagctggcagttcccagggttgatggtgatgttggggattgcttattctcatgggttgctgataggaggataaattggtaaaaatyttttctggggtgcattttggtaatctgtgtcaaaattaaatgttcatatactttagtaatcactgcttattttccggaggtaattagagagctgtgcaga

SEQ ID NO: 496789 - DNA, 201 bp, Homo sapiens
ttacagtgccaggtggtgcccctatagctggttccagaatctcaccttgagagtcactggcctccaggattaagtctcagctcagcttcacagtatagtgytcaagaccttttctggtctgacctcacccatgaggtgtcagttctcctggaccagctctaagctggcttgcacagagtgtcaatctgagctccttgccct

SEQ ID NO: 496790 - DNA, 201 bp, Homo sapiens
gaggtggagcttgcagtgagccgaggtcgtgccactgcactgcagcctgggcgacagagcaagaccctgtctcaaaaaaaaaaaaaaaaaaaagtcacgamgtcacgaggccgggctcggtggctcacgcctgtaatcccagcacttcaggaagctgaggcagattacttgaggtcagtttgagaccagccatacatagca

SEQ ID NO: 496791 - DNA, 201 bp, Homo sapiens
gagcacggagagtgatgggaaggaggggatggtgggagagggagggcaagggggcctcagagccttgtaccctgtccaggctgctagacttatgcgtgacrttttgtaccacatagatcatgaataaactggaacctttccaagtaaaaacgggatctttttgtgtgtgtatgtatggtaaagtacaaataacaaaatttg

SEQ ID NO: 496792 - DNA, 201 bp, Homo sapiens
actgcagcctgggcgacagagcaagaccctgtctcaaaaaaaaaaaaaaaaaaaagtcacgacgtcacgaggccgggctcggtggctcacgcctgtaatcycagcacttcaggaagctgaggcagattacttgaggtcagtttgagaccagccatacatagcagccaacatagtgaaaccccatctctactaaaaatacaa

SEQ ID NO: 496793 - DNA, 201 bp, Homo sapiens
cagggcttaagcgatcctgccacctcagccttcagagtagctaagactacaggtgcacaccaccatgcctagctagttttgttttttttatagagctaagrtttcattatgttgcctaggctggtctcaaactcctgaactcaagcagtcctcccaccttggcctctcagggtgctgggattacaggcttgagccactgca

SEQ ID NO: 496794 - DNA, 201 bp, Homo sapiens
gccaattagaaattttaatagatttaagttttttttccagtagggtgaaatttaccagtgtgttggtctattttttgagatggagtctttgtcacccaggytagagtgcagtggcacgatctcagctcactgcagcctccacctcctgggctcaagcagtcctcccacctcagcatcccgagaagctgggactgcaggcac

SEQ ID NO: 496795 - DNA, 201 bp, Homo sapiens
gaggccgaggtgggcagatcacttgaggtcaggagttcgggaccagcctggccaacatggtgaaaccccgtctctactcaaaatacaaaaattagctgggygtggtggtgcatgcctatagtcccagctacttgggatcccgaggcaggagaatcgtttgaacctgggaggcagaggttgcagtgagctggaggttgcagt

SEQ ID NO: 496796 - DNA, 201 bp, Homo sapiens
ttcttttttttttttgagacagagtctagttttgtcgcccaggctggagtgcattgacatgattttggcttactgcaacctctctctcccgagttcaagcrattctcctgcctcagcctcccgagtagctggtatttcaggcatgcaccaccacacccagctaatttttgtattttcagtagagacggggtttcgccgtgt

SEQ ID NO: 496797 - DNA, 201 bp, Homo sapiens
attagtgatttttatattgattacaatttaaaatgaaagctttgggtatattgggttaaataaaatatgttattcagcctaattttatctatgtctttccsccttacgtatggagctactggaaaattttaaattacatattgcttgcgttatatttccgttgggcagcactaaaagacaaaaactgaattttactttaac

SEQ ID NO: 496798 - DNA, 201 bp, Homo sapiens
tttggggctttgaggagtaattgggatttgaatacacagaaatcaaagatggggtagagattctcctaatgtagaagacaggactgcaggaagcaaagtayggagggaggaaaggcattactgctctttgctattaaatgagcatcctagagccgggcacggcggcacatgcctgtaatcccaacactttaggaggctgag

SEQ ID NO: 496799 - DNA, 201 bp, Homo sapiens
ctaggctggtctcaaactcctgaactcaagcagtcctcccaccttggcctctcagggtgctgggattacaggcttgagccactgcacccagcctaaacgamatcttaattatgtcaagacctgacatggttatttggatagctaatttgtttttctaatgtctttttttttccaacagttcactttatccaaatgcataga

SEQ ID NO: 496800 - DNA, 201 bp, Homo sapiens
cgtgatggtgctgggaaattcgcatttattcatgaatcgttccaacaaacttgctgtgatagcaagtcacattcaagaaaggtatgaccattgtgattgcytttgctcttcagtgcttaatattcatgagttttctgtgccagttggcatgtattgttcctactccatgttgcaaaagaaaatgttttctgtaccagtgaa

SEQ ID NO: 496801 - DNA, 201 bp, Homo sapiens
agacagagtcttgctcttgcccaggctggaatgcagtggcatgatcatggctcactgcagccttatcctccccagctcaaatgatcttcccactcagtctsccaagtatctgggaccactggcatgcactacaatgcctggctaattttttaattttttgagacagtttcactcttgttgcccaggctggagtgcaatggt

SEQ ID NO: 496802 - DNA, 201 bp, Homo sapiens
ccaccttctcccctgcaccacagtgttccccctattcatccaccccctctgtcttccacctacagctctccagtagcccctcttacctgtacaaactcttyctttttttttaaagtatagatggggtttctccatgttggtcaggctggtctcgaactcctgacctcaggtgattcccccgccttggcctcccaaagtgct

SEQ ID NO: 496803 - DNA, 201 bp, Homo sapiens
ggggtttaaacaaatagttcctgcatggttttctaacgtgtaccaaatgcaaaagtaaaattcagcagaatgaaacttttatctgataaatgattggagasaaatccaaagcattactgtcactggattctgagttaggaggctgaaatgtcgtgtaacatattcctcttcaaagaggaaaacaagttcggaaacctgtaa

SEQ ID NO: 496804 - DNA, 201 bp, Homo sapiens
aacaaatactacaattagctgtgcgtggtagtcggtgcctgtagccccagctatgagggaggctgaggtcgggggatcgcttgagcccaggaggtggaggytgcagtgagccaggattgctccatgtactccagcctggtcgacagagcaagaccttgtctctaaaaaaagaccgggcgcggtggctcacgcctgtaatcc

SEQ ID NO: 496805 - DNA, 201 bp, Homo sapiens
cttgttctgtcacccaggctggagagcagtggtgccatctccgctcactgcaacctctgcctcctggcttcagcattcctcccgccttggcctcccaaagygatgggattacaggagtgagccaccatgcccagctaattttttgtgtctttagtagagatggagttttgccgtgttggccaggctggtcttgaactcctg

SEQ ID NO: 496806 - DNA, 201 bp, Homo sapiens
tggcgaactctgacatctcttgcctttatggccacgtggcatggagggagaagcgttccagactttagtagcaaaagtctgttacctggagactcctttastgccgcttcccttattacatccctaactgtggtcctcctggtgcttctggaagtttaggatgataagacaagttttgacagctcctttcagcagactact

SEQ ID NO: 496807 - DNA, 201 bp, Homo sapiens
catgagaaaatggttttgtgttcatctccgtctcacatgatgttagtgttcttaaaccaaaagagctttcaactagatgtgccgatgtagagggctctgcwgtgatgagtgctactgccatgtcccctgtctccggtggcgaactctgacatctcttgcctttatggccacgtggcatggagggagaagcgttccagactt

SEQ ID NO: 496808 - DNA, 201 bp, Homo sapiens
cctcccaccatggcttcctgaagtactgggattacaggcaggagccactgcacctggtctgttcccagcttttgatgctacagcaaagatcgttatgcccrtgtacatgaatctttggacatgagaaaatggttttgtgttcatctccgtctcacatgatgttagtgttcttaaaccaaaagagctttcaactagatgtgc

SEQ ID NO: 496809 - DNA, 201 bp, Homo sapiens
atttatgatttaattaacgagagtacactttgtatgacaaaatgcaattttaaggtaaacactatggagaataatttcttttcctagtgaaatggtgcacrttatattttattttgttttatttctagggataatgacacagagatttgtagtaaaatttttaagctataatagtggtaatgaagaagaattatctggaaa

SEQ ID NO: 496810 - DNA, 201 bp, Homo sapiens
agagaacctcccagtaacagagtcaggctcaaagagggtctttaatttatgaacatattcttgtatttgcagaaactcctttaaataacggatcaaccccyagaattgtgaatgtggaagaacattatattttcaaatggaataataataccatcagtgaaataaatgttaaaatttttagggcagagattaatgcccacc

SEQ ID NO: 496811 - DNA, 201 bp, Homo sapiens
gtttctccctgttggtcaggctggtctcgaactcccgacctcaggtgatccacttgccttggcctcccaaagtgctgggattataggtgtgagccaccgcrcccgaccagttaaaagaactttttagggcacagcattttcactttttgctttctttcctttttttttttttttttttttgataattaaactttccaattg

SEQ ID NO: 496812 - DNA, 201 bp, Homo sapiens
aaatgtttgatagttaaataattcttttttttttttttttttttttttgaggcggagttttgttcttgtcacccaggctggagtgcaatggcatgatctcrgctcactgcaacctccgcctcctgagttcaagtgattctcctgcctcagccccctgagtagctgggattatagtcacccgccaccacacccagctaattt

SEQ ID NO: 496813 - DNA, 201 bp, Homo sapiens
gggctttagagtgctctctgtgaccttgagcctgctcctccacagtcctggattctctgagttccaccgacccttctagttccagcttccgtgaacctttycttaaatgtttgatagttaaataattcttttttttttttttttttttttttgaggcggagttttgttcttgtcacccaggctggagtgcaatggcatgat

SEQ ID NO: 496814 - DNA, 201 bp, Homo sapiens
tatgttatctctttaggcatagttacaccaaaagtgatctatgaggaagcaactgacctagacaaattcatcaccaatacaggtatttaatgttacacttygacgtcatttcttcagaaacagatatgtcatttcttacaagtaatatataccctcagagtgtatatttttgttagtcatttaaaaaggttcacaatagtt

SEQ ID NO: 496815 - DNA, 201 bp, Homo sapiens
cattttgtattgccaccagcagtgaactgcatatttgtttttatgtcacagtgaccctggtttttgtttgtttgtgtgtttgttgtggattttcttcctcmgttataattagatgctaagaggatggggactcctatctgatggtttttggggagtggggagggttttgtagtcagcaccctgggcagttgcggtcaccat

SEQ ID NO: 496816 - DNA, 201 bp, Homo sapiens
ggatttcaccatgttggccaggcagatctcgaactcctgacctcaggtgatccacccacctcggcctcccagagtgctgggattacgggcatgagccaccrcgcccggctaatttttttgtatttttagtagagaggaggtttcaccatgttggccagactggtctcaaactgacctcaggcaatctgcctgcctcggcct

SEQ ID NO: 496817 - DNA, 201 bp, Homo sapiens
ctacttaggaggaagaggtaggaggattgcttgagcccgggaggttgacgctacaaatgagctgcccgggaggttaatgctacaaatgagctgtgatcgcrccactgcgttccagccagggtgacagagtgggaccctgtctcaaaaaaaaccaaaaacaaaaacaaaaaaagaaaaatttgtgtcaagcttacctgtttg

SEQ ID NO: 496818 - DNA, 201 bp, Homo sapiens
caggcaagtgaagtctttgactgtcaaaactttcatgttgttcccagctacttaggaggaagaggtaggaggattgcttgagcccgggaggttgacgctayaaatgagctgcccgggaggttaatgctacaaatgagctgtgatcgcaccactgcgttccagccagggtgacagagtgggaccctgtctcaaaaaaaacca

SEQ ID NO: 496819 - DNA, 201 bp, Homo sapiens
tgcctcaggcaagtgaagtctttgactgtcaaaactttcatgttgttcccagctacttaggaggaagaggtaggaggattgcttgagcccgggaggttgaygctacaaatgagctgcccgggaggttaatgctacaaatgagctgtgatcgcaccactgcgttccagccagggtgacagagtgggaccctgtctcaaaaaa

SEQ ID NO: 496820 - DNA, 201 bp, Homo sapiens
attcaagtggaaatttatgccaactcttctctgacccataatgcctcaggcaagtgaagtctttgactgtcaaaactttcatgttgttcccagctacttakgaggaagaggtaggaggattgcttgagcccgggaggttgacgctacaaatgagctgcccgggaggttaatgctacaaatgagctgtgatcgcaccactgc

SEQ ID NO: 496821 - DNA, 201 bp, Homo sapiens
gggcttgcatgttaccataggtttatgggggggaactgaagataactgtgtcatctctgtatacatttcccttttataaaatgaacggaggctgatgtgtrcttttattgtgttttccattatgtattcttatagaccctgttttgagtcactttaaaaatacagcaatgttttcctttcagaaggtgttggaagtgacag

SEQ ID NO: 496822 - DNA, 201 bp, Homo sapiens
ggcgtacacctacagtcccagatacttggaggggggtggggtagctgaggcaagaggattatttgagcccaggagttcagggctgcagagagctatgatcrcaccactgcacttcatccagcctgggcaacagagcaagaccctgtctcttaaaaaaaaagaaaaagctggtcaggcgcggtggctcacgcctgtaatcct

SEQ ID NO: 496823 - DNA, 201 bp, Homo sapiens
gcctgtaacatagcgagacctcgtctctacaaaacaattaaaaaaaaaattaggtgggtggcgtacacctacagtcccagatacttggaggggggtggggkagctgaggcaagaggattatttgagcccaggagttcagggctgcagagagctatgatcgcaccactgcacttcatccagcctgggcaacagagcaagacc

SEQ ID NO: 496824 - DNA, 201 bp, Homo sapiens
attgtgggctgttggatctggtagacacttatccagcccacgggttccttaccctggggttaggagtccttggatgtatttcagtgggtctgtgaactctrtgaaattgtatgtaaagttctgtgtgtatgtgcatttttctgatgagagggtcaccagtttcctttagatcatcaaatgggtcagtgattcaaaaaagct

SEQ ID NO: 496825 - DNA, 201 bp, Homo sapiens
ggattacaggtgcctgcccccatgcctggctgattttttgtattgttagtagagagggggtttcactgtgttggccaggctggtcttgaactcctgacctygtgatctgcctgcctcagcctcccaaagtgctgggattacaggcgtgagccaccgcacccggcctaatttttgtatttttagtagagacagggtttcgcc

SEQ ID NO: 496826 - DNA, 201 bp, Homo sapiens
taatcccagcactttgggaggccgaggcgggtggatcacgaggtcaggagatcgagagcatcctgcctaacacaggtgaaaccccgtctctactaaaaataaaaaaaaaaaattagccgggcgtggtggtgggcgcctgtagtcccagctactcgggaggctgaggcaggagaatggtaggaacccgggaggcggagcttg

SEQ ID NO: 496827 - DNA, 201 bp, Homo sapiens
gaccctcccttccccctcttggtcatggataatgtgatatgtctgtgagcttgaggtgccccagaccactctctgacttggggagggagtcctgttggacyccacccccacggggcactcaggctgctgtttgctcatctagctggtgctcaaggcactgggcccagacctagatcctcatttgcaaacggaacccagagg

SEQ ID NO: 496828 - DNA, 201 bp, Homo sapiens
cattttatttaccattctagaattttgaaaaatattttaaggctgtaaggttgtatatggaatcatttgtatatctatatatgaatgcacaagtgaatgartgacagggtcttgctctgtcgcccaggctggagtgtagtgagtgtagtcacagctcactgcagcctccatctcatgggctcaagcaatcctcccacctca

SEQ ID NO: 496829 - DNA, 201 bp, Homo sapiens
gtaacacattaggaaattacttacctatctaatacatactaattaaagtcgttagtgtggattttgttttattattatttttttttcaattattatcattattttttttttgagatggagtctcactttgttgctggagtgcagtggcatgatctcggctcactgcaacctccacctcccaggtttcaagtgattctcctg

SEQ ID NO: 496830 - DNA, 201 bp, Homo sapiens
tgttgtacagattatttgtcacccaggtactaagccaagtacccaatagtttttttctgatcctctccctcctcctactcactaccctcaagtagggtccrgtataaaaaacaatggttagataaatacatcattttatttaccattctagaattttgaaaaatattttaaggctgtaaggttgtatatggaatcatttgt

SEQ ID NO: 496831 - DNA, 201 bp, Homo sapiens
atcatgatttatggctttaatatgtgggtcagggcttttaagttccagtgactggctaacatacaaggaaacttttttttttttttttttttgagacagartctccctctgtcgccaggctgcagtgcagtggtgtgatcttggctcacggcaagctccgcctcccaggttcacgccattctcctgcctcagcctcccaag

SEQ ID NO: 496832 - DNA, 201 bp, Homo sapiens
ggtgtgtgccaccgcacccagccaattttttgtatttttagtacagacggggtttcaccatgttgacctggatgatctcgatctcttgaccctgtgatcckagtgcctcagcctcccaaagtgctgggattacaggcatgagccaccatgcctggccactagacccttcttttatttttcctgtcctattgttaatttaag

SEQ ID NO: 496833 - DNA, 201 bp, Homo sapiens
tcatggtgcttttctaggggaggtgaaggagtggtggctcatgggagattttaatgttctgtattttacagtttgggattgttaaaaatttacatctatgrtttttgtaattaaaaagtaggccgggagcggtggctcacgcctgtaatcccagcactttgggaggccgaggcgggcagatcatgaggtcaggagatcgag

SEQ ID NO: 496834 - DNA, 201 bp, Homo sapiens
cagttagccaatttattttgcattatttggaagaattgggcctcattgaaaagaaattgattgacattgaaaacagctcatggtgcttttctaggggaggygaaggagtggtggctcatgggagattttaatgttctgtattttacagtttgggattgttaaaaatttacatctatgatttttgtaattaaaaagtaggcc

SEQ ID NO: 496835 - DNA, 201 bp, Homo sapiens
ttggttacttctatcatggtgctgtgtaagtgtctgagcagccgcctgggatggggcattgttctcccgccctggtggggccatactctagtaggccctgyaacgcggtcacgtttttcccaacccctctccagaggttccgtgcctaaagggttcaattctagatttcagttagccaatttattttgcattatttggaag

SEQ ID NO: 496836 - DNA, 201 bp, Homo sapiens
ggccgaggtgggttgatcatgaggtcaggagatagagaacatcctggccaacatggtgaaaccccgtctcttctaaacatgtaaaaattagcggggtatgktggtgggtgcctgtagtcccagctactcaggaggctgaggcaggagaatcgcttgaacccaagaggaagaggttgcagtgagctgagatcgcgccactgc

SEQ ID NO: 496837 - DNA, 201 bp, Homo sapiens
ttgccaacacacccttccttggttacttctatcatggtgctgtgtaagtgtctgagcagccgcctgggatggggcattgttctcccgccctggtggggccrtactctagtaggccctgcaacgcggtcacgtttttcccaacccctctccagaggttccgtgcctaaagggttcaattctagatttcagttagccaattta

SEQ ID NO: 496838 - DNA, 201 bp, Homo sapiens
aggttggtcttgaactcctgggctcaaatgattctcccactacagccttccaaaatgatgggattacaggtgtgagccactgctcccaacctgaaatcttyttttaagttcaacattatgaggagtgttatttgtgggaagaaagcatgggaggtgaaaatttctctttcctattcatatgaatccatttttatggtatta

SEQ ID NO: 496839 - DNA, 201 bp, Homo sapiens
tttttgtgggcacaaggcacttttagatgagacacagattataggttttcttgcttacttggtagtgtcctgctggccttaaataagagttagcattcgcyacgcttgccaggagatcctgaccacggtcacagctcctgcctttatgtttgtcttccaggaatgctcatcaaatttaacaacgctgttcagacggtcctg

SEQ ID NO: 496840 - DNA, 201 bp, Homo sapiens
tcatcccattttcctagtaagaacagtaatatcttttcatcccctttgaccaaggaagaaacaagttcagagaggttgtcactgtcccagtgtcaagcagyttgtaaagggcccaatcttaggctgtaatgtgagtccatcctaggcagtctgactcaatgcaccccctgagctgctggaccttgctgcctttgcatgctg

SEQ ID NO: 496841 - DNA, 201 bp, Homo sapiens
gatctattctgtactatcttttcttcttttgttttactgggaatatctcatgtccttggtaaaactgtggttcccctgaatgcttggagtttctgacttgraggcttatttggggaattgacaaaagaaattccagaactattttactttttgtgggcacaaggcacttttagatgagacacagattataggttttcttgc

SEQ ID NO: 496842 - DNA, 201 bp, Homo sapiens
ttactatgtttttgtcttcatttgagatctattctgtactatcttttcttcttttgttttactgggaatatctcatgtccttggtaaaactgtggttcccytgaatgcttggagtttctgacttgaaggcttatttggggaattgacaaaagaaattccagaactattttactttttgtgggcacaaggcacttttagatg

SEQ ID NO: 496843 - DNA, 201 bp, Homo sapiens
aaaggtaactttgatgagggtagcaagcatgctttcactgaaaagtatttttttttcctcttttcaagattctcataattataacccataaaactaagttrgacttgtttcttatgtgcatttatgatttaattaacgagagtacactttgtatgacaaaatgcaattttaaggtaaacactatggagaataatttctttt

SEQ ID NO: 496844 - DNA, 201 bp, Homo sapiens
atctcggctcactgcaacctgcacctcctgggttcaagagattttcttgcctcagcctcctgagtagctgggattacaggtgcacaccaccatgcctggctttttttttttttttttaatcacacaacacaggaagttttattcatctgctacttctccaaagagaggcttgcagggttgctcactttaatataattttta

SEQ ID NO: 496845 - DNA, 201 bp, Homo sapiens
ctgttgtggcactgtattcattttttttttttttgagacggagtttaactcttgtcacccaggctggagtgcaatggcacgatttgggctcactgcaaccyccaccttccaggttcaagcaattctcctgcctcagcctcccaagtagctgggattacaggtgcccaccaacaccctcagcaaatttttgtacttttagta

SEQ ID NO: 496846 - DNA, 201 bp, Homo sapiens
ctcaggtgatccacccacctcggcctcccaaagtgctaggattacaggcgtgagccactacgcctggccgacatggtattctttttgtgataacaatgtattttttttttttacatagtctgttgtacatagtaacaagttgctgtaaatgtgaagcattctttctctttagctactgttttttttgagacccgaagttgc

SEQ ID NO: 496847 - DNA, 201 bp, Homo sapiens
ggaccctcccttccccctcttggtcatggataatgtgatatgtctgtgagcttgaggtgccccagaccactctctgacttggggagggagtcctgttggactccacccccacggggcactcaggctgctgtttgctcatctagctggtgctcaaggcactgggcccagacctagatcctcatttgcaaacggaacccagag

SEQ ID NO: 496848 - DNA, 201 bp, Homo sapiens
ggtcatccacccacctcagcctcccaaagtgttgggattacaggcgtgagccaccacgcccgactgatttttatttttattttttgagatgaggttctcayttttgtccaggctggaatgtagtggtgccatgccatcacggcttactgcagccttgacttcccaggctgaagcaatcctctcacctcagccttctgggta

SEQ ID NO: 496849 - DNA, 201 bp, Homo sapiens
tttcaagtgattctcctgcctcagcctcccaagtagctgggattacaggtgtgcgccaccatacctggccaatttttgtatttttagtagagacagggttycaccatgttggccaggctggtctcgaactcctgacctcaggtcatccacccacctcagcctcccaaagtgttgggattacaggcgtgagccaccacgccc

SEQ ID NO: 496850 - DNA, 201 bp, Homo sapiens
cctgaccttaggtgatccgcgtgcctcagcctcccaaagtgctgggattacaggtgtgagccactgcgcccggtctttttttttttttttttttttaagargcagggtcttgttctgttgcccaggctggacttcagtggcccaatcatggctcactgcagcctcagcctcctggactcaagcagtcctttcctcaacctc

SEQ ID NO: 496851 - DNA, 201 bp, Homo sapiens
ggcatgatctcggctcactgcaacctccacctcccaggtttcaagtgattctcctgcctcagcctcccaagtagctgggattacaggtgtgcgccaccatrcctggccaatttttgtatttttagtagagacagggtttcaccatgttggccaggctggtctcgaactcctgacctcaggtcatccacccacctcagcctc

SEQ ID NO: 496852 - DNA, 201 bp, Homo sapiens
ccagtttcctttagatcatcaaatgggtcagtgattcaaaaaagctttatgccaggcatcgtggctcacgcctgtactcatagcgctttgggagattgagrcgggaggattgcttgagcccaggagttccagaccagcctgtaacatagcgagacctcgtctctacaaaacaattaaaaaaaaaattaggtgggtggcgta

SEQ ID NO: 496853 - DNA, 201 bp, Homo sapiens
agagctatgatcgcaccactgcacttcatccagcctgggcaacagagcaagaccctgtctcttaaaaaaaaagaaaaagctggtcaggcgcggtggctcaygcctgtaatcctagcactttgggaggccgaggagggcggatcatctgaggtcaggagttcaagaccagtctggccaacatggtgaaacccatctctacta

SEQ ID NO: 496854 - DNA, 201 bp, Homo sapiens
gcggatcatctgaggtcaggagttcaagaccagtctggccaacatggtgaaacccatctctactaaaaatacaaaaattagctgggcgtgatggcgggtgcctgtaatctcagctactttggaggctgaggcaggagaatcacttgaacccgggaggcagagattgcagtgagccgagatcacgccactgcactccagctt

SEQ ID NO: 496855 - DNA, 201 bp, Homo sapiens
gcctgtagccctagctactagggaggctgaggtgggaggatcgcttgagcgtaggagtttgaggctgatgaagtttacatcatttccagctttttttaaartttatttttattttcattttttttagagacacggtctcactctgttacccaggctggagctagagtgcaggggcacgatcctggcttgctgcagcctcaa

SEQ ID NO: 496856 - DNA, 201 bp, Homo sapiens
atgtatgtggggtataatttctctatatcctcaccaacagttgttattatttgtctgtttggttatagccatgttaagtaagtgtgaactgatatttcttyatgatttccttctttgtttttttctttaaatttttgagacagggtcttgctctgtcgcccaggatagaatgcagtggtgcaatcacagctcactgcagcc

SEQ ID NO: 496857 - DNA, 201 bp, Homo sapiens
gagttgctgggttgcgttattactgtatgtttaaccttttgaggaactagtttctgaagcagttgcatcattttaaattcccatcagcaatgtatgtgggktataatttctctatatcctcaccaacagttgttattatttgtctgtttggttatagccatgttaagtaagtgtgaactgatatttctttatgatttcctt

SEQ ID NO: 496858 - DNA, 201 bp, Homo sapiens
tgtggttagagactttggcagcagataggttcaaatcatggctgtcctacttaggagctgtgtgacactggccaattacttaacctttctgagctgtagtytcctcctctgtaatatggtgataatacctttatgtatcaagcctccatcagttttttttttttttttttttgagacagagtcttgctccgtctccaggct

SEQ ID NO: 496859 - DNA, 201 bp, Homo sapiens
aggagctgtgtgacactggccaattacttaacctttctgagctgtagtttcctcctctgtaatatggtgataatacctttatgtatcaagcctccatcagttttttttttttttttttttgagacagagtcttgctccgtctccaggctggagtgcagtggcaatatcttgactcactgcaacctccaactctctagttca

SEQ ID NO: 496860 - DNA, 201 bp, Homo sapiens
ctctgtaatatggtgataatacctttatgtatcaagcctccatcagttttttttttttttttttttgagacagagtcttgctccgtctccaggctggagtrcagtggcaatatcttgactcactgcaacctccaactctctagttcaagcgattctcctgcttcagcctcccgagtagctgggattacaggcacgtgccac

SEQ ID NO: 496861 - DNA, 201 bp, Homo sapiens
aagagatggcaaagatcagcaccagcaatccaggcttatgtcactgcagcaagtccagtggggagaaagcccctttcctcctctttcctttctttctttcttttttttttttttgagacggagttttgctcttgttgcccaggctggagtgcagtggtgccatcttggctcactgcaacctccaccaaccgggttcaagcg

SEQ ID NO: 496862 - DNA, 201 bp, Homo sapiens
cctttctttctttcttttttttttttttgagacggagttttgctcttgttgcccaggctggagtgcagtggtgccatcttggctcactgcaacctccaccwaccgggttcaagcgattctcctgcctcagcctcctaagtagctgaggttacaagcatgtggcacctcgcctggctaattttgtatttttagtagagatgg

SEQ ID NO: 496863 - DNA, 201 bp, Homo sapiens
ctttctttctttcttttttttttttttgagacggagttttgctcttgttgcccaggctggagtgcagtggtgccatcttggctcactgcaacctccaccamccgggttcaagcgattctcctgcctcagcctcctaagtagctgaggttacaagcatgtggcacctcgcctggctaattttgtatttttagtagagatggg

SEQ ID NO: 496864 - DNA, 201 bp, Homo sapiens
ctgaagtgatctcggctcaccacaacctcctcctcttgggttcaagcgattctcctgcctcagcctccggagaactgggattacaggcatgcaccaccacrcccggctaattttgtatttttagtagagacagggttccaccgtattggccaggctgctctcgaactcctgacctcatgatccgcccatcttggcctccca

SEQ ID NO: 496865 - DNA, 201 bp, Homo sapiens
cactgcaatctctgcctcccaagcaatcctcccacctcagcctctggtgtagctgggaccacagatgctccaccatgcctggctgtatttttggtaaagayggggtttcgccttgttgcccagggtggtctgtaactcctgagctcagatgatctgcccacctcggcctcccaaagtgctgggatcacagacgtgagccac

SEQ ID NO: 496866 - DNA, 201 bp, Homo sapiens
agcaaagaacccccttcagaggagccatagaacctaccctacttcctccaattgaccttgctgggttttctccaagacgaatgcaaattcatttctcattyaatttcattctcttccaattgtattaatactatggtaacacattaggaaattacttacctatctaatacatactaattaaagtcgttagtgtggattttg

SEQ ID NO: 496867 - DNA, 201 bp, Homo sapiens
ccactgcactccagcctgggcgacagagcaagactccgtctcacaaaaaaaaaaaaagggtgcaacagatctaataatagcagggatcatgggggccagayagaaagacttgacagctcagtgcctctggccaaaggtatttgcagtgttgaattggcaagtagctcgtacacaaagggaagaagatataccacatgtaca

SEQ ID NO: 496868 - DNA, 201 bp, Homo sapiens
gacagtctcactgtcacccagactggagtgtagtgacacagtctccactcactgcaacctctgcctcctgggttcaaacgattcttctgcctcagcctccygagtagctgggattacaggtgcctgcccccatgcctggctgattttttgtattgttagtagagagggggtttcactgtgttggccaggctggtcttgaac

SEQ ID NO: 496869 - DNA, 201 bp, Homo sapiens
ataaaatgttctaaaatagaatctgctgatagtcacagctttgtgactataccagaaaccatcgaattgcacactttaagtaggtggattgtatagtatgkgaattatatctcaataaagctgtcaggaaagaaagtaattaaggtgcaacagatcggctgggcacggtggctcatgcctgtaatcccagcactttgggag

SEQ ID NO: 496870 - DNA, 201 bp, Homo sapiens
gggttgggattacaggtgtgagccactgcacccggccaagttactaacattttaagtctaaagtaaaagattgcttctgtatgttctcccccaggtgtgtrggtccatcctgggaaggccatcagacacacctagtccatgggtgacacccagccagtttttaatgccagttcctctggcagtttttaatttaggcactcg

SEQ ID NO: 496871 - DNA, 201 bp, Homo sapiens
attaatgaaaattgtactcagctcaggtgagtgtttcattgatgaatatatcggcaatgtgaatggtttgcctagaattaattcactacatgaatatcaargacagcatgaatatgaaaaattagagtcaattaaaatgtgtaaaagtgataataaatacagacatgtaatacaatttagagttgattcaaacatcaatat

SEQ ID NO: 496872 - DNA, 201 bp, Homo sapiens
tgtgtttgtctaggttaccaacttggcaagcctgtccgagctctaaatatcaacaggatgaataatgtcacgactttacatctttggcaatcgggtaatcyggtttggtcattatgattagccctttggcaaattggtgttagaagtattaccatattttgaatctaatcaagcaatcaattattttaaagcctagttggt

SEQ ID NO: 496873 - DNA, 201 bp, Homo sapiens
tcggctcactgcaagctccgcctcccgggttcacaccattctcctgtctcagccttccaagtagctgggactacaggcgcctgccaccacgcccagctaaytttttgtatttttaatagagaccgggtttcaccgtgttagccagaatggtctcgatctcctgacctcatgatccacctgccttggcctcccaaaatgctg

SEQ ID NO: 496874 - DNA, 201 bp, Homo sapiens
gcgagcccctcagggaagctgttgtgtctcactgtatcatccctgcataacccagccccccatactctcgtggtcagaccacatttgtcccacctgcactrttgggtaccacagccacgaaccatgtctggacactggacagttgaaaggggatgggtcttaattgagatgtgctgtaactgttaaacagccaccagtttt

SEQ ID NO: 496875 - DNA, 201 bp, Homo sapiens
atgttggtcaggctggtctcgaactcctgacctcaggtgattcccccgccttggcctcccaaagtgctgggattacgggcctgagccactgtgcctggctrcctgtacaaactcttacgtgtgtttcaggctcagcgcattctctctctctgcaagtcttcctgacgcccagcctaagccacgtgccctccctgggttccc

SEQ ID NO: 496876 - DNA, 201 bp, Homo sapiens
tttgcccgcatcctcctctatcctgtttcgaggtagagagcttggcacttctgttacaagctgagagtctggaggtgctgagtttaacgtggctgtgcagstgatttcaaggcatgagctgaacagcgttgacacagccgtgacttacaattaaaccctttcaattacagtacagattctgtgtgctacttgatgagatgt

SEQ ID NO: 496877 - DNA, 201 bp, Homo sapiens
ctgtagaagatataatgcggacatgatttgaatttagtgacagcttggctgatgtcactgaaccagaagggtttatactgagtgaaggaaaggtaaaaagyagtattttgtatatttttgtaacaaaatataaatgaagatattttaccatgaagagattgcacttatccttgagaacagtctaaatataaatgaagatat

SEQ ID NO: 496878 - DNA, 201 bp, Homo sapiens
gtgtgactgtagaagatataatgcggacatgatttgaatttagtgacagcttggctgatgtcactgaaccagaagggtttatactgagtgaaggaaaggtraaaagtagtattttgtatatttttgtaacaaaatataaatgaagatattttaccatgaagagattgcacttatccttgagaacagtctaaatataaatga

SEQ ID NO: 496879 - DNA, 201 bp, Homo sapiens
agatcagttgaaaactaattcttaatagccattgttttataatctttagtttaaattcatctgtttgacatttggttttttgtgaacttgagtcagtcctrttgaacattttgacctatattcttgcaaattatgttaatttttcatattttagtttgattttagacaattattttcaaaaagaaacctgactttttttca

SEQ ID NO: 496880 - DNA, 201 bp, Homo sapiens
caccgttcaccatattctataaaaagagactcagccatttgaacaagctagctaatcagatgccctctgcatagttcatatttttaaaaatcttggtcctyatattatttataaaaaaagtgactctatattagttttaaggtataaatgatacacttttcctatctgtaaactagctgatctatttgtagtctggcttaa

SEQ ID NO: 496881 - DNA, 201 bp, Homo sapiens
tgagaatacttacctggttagtaggctaaactaacgtagtagggaagagagtgtaagaaaagtgctgttgaattcatcattcccattagcaccagtctgcrgattcccaaacatatatttctaggctcagatatttttcctgatccccagacttattaatccaggaactagtcaacttctttacctggatgccctgtaatg

SEQ ID NO: 496882 - DNA, 201 bp, Homo sapiens
tcaggctgtgtctatggaatacagcaaaacccacaagaaaccagcactaatagatggcaggtcattttgagggatttttctttgcgttcctgtgcttgctstcctggtgagataggaaacctttaataagacttttcctaaatgatgttgcatgtgaaatgcagatttttttttttctgttctcctaacaaatgaccattt

SEQ ID NO: 496883 - DNA, 201 bp, Homo sapiens
gaagggtcgtgttctctggaatgacttttaactctttatccagttaatgatcgggaaagtttactagatgtaggttcccaagcccagcaagcagagtatgygataagagatagaaacagggacagaaaaaaatggatccatcaggacccagacattggggtgcaaccagtgggtcttctccagctccacagcgcatcagtt

SEQ ID NO: 496884 - DNA, 201 bp, Homo sapiens
ttagaggattataaataaagccacactcacaggtgtacatgctataatttattttataagtgcctggcatattaataaatggtatgtagtttacttacagwgctgtttgggtggttctcaagtaatctcttgttttacattctaaagtccactcagtgttagaatggaccatttgagcccaagtagattcaacaaaccatc

SEQ ID NO: 496885 - DNA, 201 bp, Homo sapiens
ctgttgaaacaaaaagattgtcaatccagaattctatatccagcaatattatccttcaaaactgaaggagaaattaagacatttccagagaaaacaaaatrtaagagaaacacctgccatacagaaaatactacaaagaattcttcaggctgaaatgaaaggacactagagagtaactcaaatcagtatgaaaaagtaaag

SEQ ID NO: 496886 - DNA, 201 bp, Homo sapiens
tttataagtgcctggcatattaataaatggtatgtagtttacttacagtgctgtttgggtggttctcaagtaatctcttgttttacattctaaagtccackcagtgttagaatggaccatttgagcccaagtagattcaacaaaccatctatacccaacccgcacatctgggcagggatgacacttgatgagccatccagg

SEQ ID NO: 496887 - DNA, 201 bp, Homo sapiens
gattgcaataataatattgagtgcctattatgcgtcaggcactatactaagcacataaaaatgcaacaacttagtggggttcaattatcaccctcaatttmgaaacaaagaaactgaagtacgaagtatttccataacttgctgatgatcgcataactagtaattagttggcattcaaacctagagtcttgctctagagtc

SEQ ID NO: 496888 - DNA, 201 bp, Homo sapiens
agattgcctggaaaaaatgattccacttcatttttatatacacattgttcctggaaccacttcctgaaatcccaggcttttattttgctgtcattctcttraattgcctctttctcaaagcatccgggttctggagatgttctcgtgcttaaagtgtgtttctaagtagcttctgggaaccacgtaaaattgtctggctcc

SEQ ID NO: 496889 - DNA, 201 bp, Homo sapiens
aaggctgaaggaaacccctgctggtttttagtctcatattccttaacccctctcctacttcactgattcctcaagttctgtggtaatgaactgagcctccragtactctctggactactggcaatgagtaatgtctggacttcatgtgaaatgccatctcaagaaagggcatctgaaagcgtgcttttaccatttcatttc

SEQ ID NO: 496890 - DNA, 201 bp, Homo sapiens
gcctgctaaacagaaaatctctggtgacaccgaattgcatatcctggcttgattgctgatggagaatggcagagcacacactcttatctttagcttgactytccatgtataagagaggggatgtttttgtttgtttattctgaaatggaaaacaaaaaagtaatgcatgctagttgtgaaaaaaaaatcaagcaatatagt

SEQ ID NO: 496891 - DNA, 201 bp, Homo sapiens
gcagaaagcaatctaccttaattttcaaatgagatatttttgacatgaaagtgtaaattcccacctatactttcttctcattggttctgagaatgatgaaytagtgtatctaaataactttagaacatttgtaaaaattactgcaactcaactggagactttcttctggtaggagccaagtatattgttatttggtgagtg

SEQ ID NO: 496892 - DNA, 201 bp, Homo sapiens
ggctgtgttgctggcgctgcaggaggcctagaggaaaacccaggtcccagctctccgggagccctcctagttttcaggggctcataggcacaaacacctgyggacttggtgaaacagaacctaaggaaggggaggtccaggggaatgaagggttgatctagcacagcctccccgttactcctttcctcagggatctgggga

SEQ ID NO: 496893 - DNA, 201 bp, Homo sapiens
ttgcgtgttttcaataagccttattttagggaaatagcaaaaatagcatatgtactttcaattaaattgttattgcttttgaacatattgacagcaaatayttgttatttgtcagtagtggcctatatgctgtataaaagggaatcaggcatgggttttatagctaaacaagcaaggtataaatcagcaaaggataactaa

SEQ ID NO: 496894 - DNA, 201 bp, Homo sapiens
tagacatgcatagctcttccaggcccctcctccctttccactttctgagaattgctcatgaaggaatacaggagacttttaggcctagcaaggctcctggmtggctgcccaggtgatcttctgcagatcagctttgctttatggtcttagaaattgcaagaaccacacctctgcttcttagtggtggctttaggagggaaa

SEQ ID NO: 496895 - DNA, 201 bp, Homo sapiens
catttccaatcccctagctccctctttaccactgttatcagtctcagaattatacttccaaagataatctgtgcacaaacaagcatgtgtaggcatatctrtttttcttgtacacagttagttgcatatcatacatactcttttgcacctcactttttttacttataaatctgactcattttttaaggttgtatagtatac

SEQ ID NO: 496896 - DNA, 201 bp, Homo sapiens
acggggaagaaatgtgtgtttttttttgttttgttttgttttttagtgctgatgaaaggtgttatatccaagggtaagttataaacagagaagctgtttckgattgtgaagattggctcagcctgcactgacacttctgaaaaggtggaaagagcaaaatcgcagttccctagagtctctcagttgtgtgatatccatgca

SEQ ID NO: 496897 - DNA, 201 bp, Homo sapiens
tgactttgtttttgagactgatactcaaaggttggctttcccagtggtcccctagcaatttagccttttgcttgtgctgagttcttttggactaaaaagcrtacatcagtttcatgtgccagagatatgacattcctgatcagctttacagaagattaagaaaaaaatctccacgctggtaaatctgcaaaattttctcca

SEQ ID NO: 496898 - DNA, 201 bp, Homo sapiens
tttgaccctttttggcctttccagtagaggccaactatagatggagaaaaaattcaatgcatcatttgccttccagtttaatcagtagagtaggcaatacrtgtacattttttgtttgttttttaaaagtctctctgccatgacatttccaatcccctagctccctctttaccactgttatcagtctcagaattatacttc

SEQ ID NO: 496899 - DNA, 201 bp, Homo sapiens
cttctctgtgcttgtgttttttacaaaaccatgaagcctgtaaaccacacggtagatatgatcacaacaatattagtggagaaccccatgctgttgtcagkatcaccatcataggtatgagtgcttgatgcagggtgtgagggggaagggggcagtctttttaaaaagcaggtcacggctggacgtggtggctcacgcctg

SEQ ID NO: 496900 - DNA, 201 bp, Homo sapiens
cagaaccatgtgagctaagtattatcatacccagagagactatgaagcttgctccatgtcacacagcgagtaaatggtagagcccaggatctaagttcagrtctgattccaaagcccttgtcctaaacactgtgcaaattgctcttacacaaatttagtactgagcatcagaagactcagtctttcccatggagcaaagca

SEQ ID NO: 496901 - DNA, 201 bp, Homo sapiens
tgtattttattagcaagggcttatttattaatgtatactaggttttggagaatgactttcaagtataatctgtttatttattcacaattggtttaccagtytcctgatgtttctgtccctttgcatttttggtcacatacctttgaccctttttggcctttccagtagaggccaactatagatggagaaaaaattcaatgc

SEQ ID NO: 496902 - DNA, 201 bp, Homo sapiens
aattatgtacaacaaaggctatatttatttttatgttttaaaaaggccagaaggatgaacaccaattttttctttttaaaattaatagataacattgtacrttataatcatatacaacatgatgttttaaagtacacatacattgtagaatggttaaatctagctaattaaacaaatgtattgatcacatagttaccattt

SEQ ID NO: 496903 - DNA, 201 bp, Homo sapiens
gcttcactcttgggtggtgttgggtagaagtaagatcagataccctgctcactgtaggatggaagggatcacatcaaagctctgagggctgttttcccctyaggcatccaaacctgatttcctcttatcacctgatatgaattttcgactgtttcactttttccttctctgtgcttgtgttttttacaaaaccatgaagcc

SEQ ID NO: 496904 - DNA, 201 bp, Homo sapiens
tcaccatattcagcattaataagatactagcaaagctctcattcagctgccatgcctaggttgtgcttctgcatgttcagaggatgtggaaagcaattgaratgattaaaagcatggaaaatcacatctctgaagagcgatgaaagtaggctatttaactaaaagaaaagaagattgaaggaagaaaataaatggtgttta

SEQ ID NO: 496905 - DNA, 201 bp, Homo sapiens
gatttgttagcttgaaatcagccatggtgaaagtatttataccatggaaatcagcaaatgctgaaaatcaggtggcttgtttttttatttcctccctttgygtagactggttttcaaaacaccactagataaagtgaatgatttcaacccttcataatctgtcatttcctttctattcaaatttagttcctgccgatatct

SEQ ID NO: 496906 - DNA, 201 bp, Homo sapiens
cacagctagttagctagttagaatctgactcaccagaattccagtctttctactttgccagatagtctttactgggaaatacttttttacctatttcttasaagaatttacttatgtgagcttcacttaaagcaatattggtctatttcctagttcccttaaactgatcatggtgcatttctgttaaaaaagccatagagt

SEQ ID NO: 496907 - DNA, 201 bp, Homo sapiens
tcttacattgattgtctcatttaattctcataaaaattctatgagatagatattattttacctatgaacaaatgaagctcaaaggtacacaggatcaaaaytggaatttgaacccagttttactgaacttcaaagctcataccctatattataaaagagaaatggccgggcatggtggctcatgcctgtaatcccagcact

SEQ ID NO: 496908 - DNA, 201 bp, Homo sapiens
acttttttttttttctttttttaactgatgaggaaacttacccgtaagagcatttaactaatttgccaagccagcaagtgaggatagagccctggagttgktcccattaccactataatcacttcctctagtcattctttccttactccaaagtttacttcatcatctctagccatttctagatacctttattcttttctt

SEQ ID NO: 496909 - DNA, 201 bp, Homo sapiens
tagggatgacttataggcaggaacggagccagactcctgacggtatccaaggtttataggcttggtgatagaatttaccagagtagaagagaaagttttckgagtagctagtgttttgaatggcatggggtttgtgacaagatttggggtaagccagtgagagatgctttggagttatctgggacctcatttattctggtg

SEQ ID NO: 496910 - DNA, 201 bp, Homo sapiens
agatataaatataattgtgctcatttataacatgaattataaatgtagcagcattggaaatggacatttaataaggtgtagcactactaaattggattaartgcatgcactgggtttatagatggatgttcccatcaaatttgttctttatttgtatccctacccctgagcagtccttgcctggcaagtgattggtgtttg

SEQ ID NO: 496911 - DNA, 201 bp, Homo sapiens
tttatggagccttgagatagttatacgaagtaggaggttgagcagggattattttaatcggagaagagattagtagaaactcatttaggaggattagagcrtgctgaatgagatgtcagaagcttttaggatccaagaaaagtggatggcagagagagagaggggtcagcactgtgtttaatttccttctttaccgtttct

SEQ ID NO: 496912 - DNA, 201 bp, Homo sapiens
gagccaccgtgcccggccaagaaattctttcagctcctcttttgaactatatcttgagtctagttacttctcatcacttgacctgttacttccctgggtgrggtcactaccagctcttaactggtcactaccagctcttatctgtgctagctgatctccttgctttcattcttgcccaagcctcttctccattgggcagtt

SEQ ID NO: 496913 - DNA, 201 bp, Homo sapiens
gcagaaggcattttagaggctgcatatagtaactggacttggattttggtttgagcattcgttttgttctattttcctatttttacaaatatttgtattargttttgagaaactataagaacccagaaactagatgtttctagcttgacatatttgtggggttctttttatttttatcatttctacttttgtttcttactt

SEQ ID NO: 496914 - DNA, 201 bp, Homo sapiens
aggagggaaaggattattaagcggttagtgatgtatttggattctaattcagattccacctcagattctgtaaagagactcctataaccctcttcttttgrccttatttggctagtaataatggttgtaagattgatctaaatcataataaatgttgtctaaggctgctcttactgacttaatgaattggagcattctgag

SEQ ID NO: 496915 - DNA, 201 bp, Homo sapiens
taagtgccacacattatgctggatgtttagtatagtttttttaatttgaatattcataaaaccctgagagaaatgtattactaatcaccttctaatgatgrggtatctgagattcagaaacataagtgagctgtgtgagtgatatgattagtcaaatttgagaccaggtgagtaatcccagcactttgggaggccaaggtg

SEQ ID NO: 496916 - DNA, 201 bp, Homo sapiens
ttggcattctctgaatgccctaatgacatggagcagaggaacagctccaaaggccagaactctctccaggagggaaaggattattaagcggttagtgatgyatttggattctaattcagattccacctcagattctgtaaagagactcctataaccctcttcttttgaccttatttggctagtaataatggttgtaagatt

SEQ ID NO: 496917 - DNA, 201 bp, Homo sapiens
tctgaaaaggataatgatgatgaccaaagtgacaagggtacttataccattgagttagagaatcccaacagtgaggaagtggaagcaagaaaaatgattcmcaaggtaaataattgaaatttgagtgtgatcttagttgttgtgtggtgtatttgactggtggaaattattggagagtcagcatgagatgttgtcatgcag

SEQ ID NO: 496918 - DNA, 201 bp, Homo sapiens
tgattgcaataataatattgagtgcctattatgcgtcaggcactatactaagcacataaaaatgcaacaacttagtggggttcaattatcaccctcaattwagaaacaaagaaactgaagtacgaagtatttccataacttgctgatgatcgcataactagtaattagttggcattcaaacctagagtcttgctctagagt

SEQ ID NO: 496919 - DNA, 201 bp, Homo sapiens
tttcaattgaagtttttgagggatatatgcagcattttgtcattaaatttgtgcagatacatatgatggtttctctgttatattttataatatataaaacrtgctaaaattgttacagcaagaatatttgttttcttaatcttgttactctcattgtgataagtttcttattatcaaaagtggcctaaatagttatcaact

SEQ ID NO: 496920 - DNA, 201 bp, Homo sapiens
tgacctcaagtgatccacctgccttggcctcccaaattggtgggattacaggagtgaaccactgcgcttggccagaatgtaagttcttgtgggcaggaatwtttgtcacttttgttcagtgctggatctccacatcttagaaaagtgcttgacaataatagttaataaataattgatgataataaatactgtatgatgaat

SEQ ID NO: 496921 - DNA, 201 bp, Homo sapiens
ttttgtttttgtttttgttttttctgagaatgagctaaaatcagtaagctgattttaacatatttagggatttgggatttgttagcttgaaatcagccatkgtgaaagtatttataccatggaaatcagcaaatgctgaaaatcaggtggcttgtttttttatttcctccctttgtgtagactggttttcaaaacaccact

SEQ ID NO: 496922 - DNA, 201 bp, Homo sapiens
aacatcagaatcacctgaatcatcagaatcgtctatttcggaaaaattagattcagccaataactgtttgagaactgtgttaacatcatgtgtaggaatgstatgttttctaggatttgacatttttggtgattgagaattactacattttgtaaatggatatatcactaccaaaaacagaatggtacaaatagaatgatg

SEQ ID NO: 496923 - DNA, 201 bp, Homo sapiens
tacttttaaaattcctcttaaactttataattcaaatcagtcaagtaaccaagaagagaaattagagaggataccattgacttgctttgtatctgttgttyttcctttccttctctgcaaaggtaaactgaattgcagctttgtacttagaagtaaattactattaaaataaagacagtttaatagtattttagaaaatgt

SEQ ID NO: 496924 - DNA, 201 bp, Homo sapiens
cacaagctgtatatatcagtttaccatggttttcagtgtaaaaaagcaacttatgtccttcagtgtcagtttattgagctcttcagtgcagcctcataacktatattaattgggaggaaaatgcttccagagaaaggagagatgctggacaaaacaactttgtctttgactagttgtcaaggccctgctgtttggagtcat

SEQ ID NO: 496925 - DNA, 201 bp, Homo sapiens
actccaaggcagagtttgtttaatcagatgcagaaaatgttctgatttggtagtaaagaaaggtaaacaacacatccccatgccccacttaaggtttttamcaggtgcagttgaaatttatattcatggatgtgggattttcacctgccccctgacccagtttgtttaggaggttaatagaattccaagtcgcatctccct

SEQ ID NO: 496926 - DNA, 201 bp, Homo sapiens
atggtagaggctggatgtctgccaaagacatggtgagggaaccgccacagagccgctggtattggaccctggcagagctggttcctctagccaaaggaagygaataatcatggggaagtggttattccagctgtgacactcaggaaatttcagtagaatgtgatggccttatatatggaatattcttagacatactaggat

SEQ ID NO: 496927 - DNA, 201 bp, Homo sapiens
ttcaagagagaaggtcagagagacctttttgcttctgcagttttcttaacttccttcagcttaatactcagtgcgccaagcttccatatttgggggtagcrttttctgcactctatcatgctataagctgattttctcacatttagaggaacattcaacagctaacataaacaattacctgatgtcatatttgaagatata

SEQ ID NO: 496928 - DNA, 201 bp, Homo sapiens
acttgtagtgaaatgagccacagaggcatcattactcatcaccatcacgactcaaggatcagcaaatgagagtcctgaaggtaaagaatgtttattttcargtagagaagaaagaaaaatcacggagaggtagagaaaggtgaagggcaaaggaagaatccagcagacattaagcaacactgtatcttccaagatcataaa

SEQ ID NO: 496929 - DNA, 201 bp, Homo sapiens
ccaaagcaagatagatagcagattaagggtcagcacagatctgcaagttgagctcatggcactttatttccctccctagccccttttctagtgcttaggtrgcaggcaccagttaagcatggtgtcttgaccatgatactgtggaccaagcagcgatatggctatggctatatcactgttttgcctgagagtcatttattc

SEQ ID NO: 496930 - DNA, 201 bp, Homo sapiens
tttgacctcccgccacatttttttggtggagaggggtgagggattgtgtataaatttcctccagagcacacagagaataaaaatgctattcttcagtttgkttttttttttgttttttttttttaacaaagagttgttccatttcccctttttctgtctactgctttctccttctacgcttaggccaagagtatattacgc

SEQ ID NO: 496931 - DNA, 201 bp, Homo sapiens
tttctctctgtctgatgggaagcatttgagacagagcagcttcatgaagtgtggatgtctgttacccacttcccagtttttaaagtaaaagccaagtcaayggcactggtacttgtagtgaaatgagccacagaggcatcattactcatcaccatcacgactcaaggatcagcaaatgagagtcctgaaggtaaagaatgt

SEQ ID NO: 496932 - DNA, 201 bp, Homo sapiens
cggctcactgcaaccttcgcctcccaggttcaagcaattctcctgtctcagcctcccgagtagctggtattacaggcatgcaccaccacacccggctaatrttgtatttttaatagagacggagtttctccatgttggtcaggctggtcttgaactcctgacctcaggtgatccacctgcctcggcctcccagagtgctag

SEQ ID NO: 496933 - DNA, 201 bp, Homo sapiens
tggtttctcagcagctttgatctgaatgattttgtggaatctcatgttgctcctagattaaaagatttattttaaaaaaagaggtgctgtctcttcaagtygtttcattctttacataagaacagggtgggaggttcttgtcctagttagcatcagcccctctcccccaaccctccacagtcagcagatccatgaatttag

SEQ ID NO: 496934 - DNA, 201 bp, Homo sapiens
ataaactacatgacttttgaaaatacctcaaacaacatatataaatcagaccaaggatattaatctcaggccaccgccatagtgaggctttgaagccaggrgaaggtggtgagaccttcttgtttgttaaggaagaaatgtcataaaaattccaaagcaggactcaaatttccaggggagagggcctctttattgtttcct

SEQ ID NO: 496935 - DNA, 201 bp, Homo sapiens
atgaagtctggtcttacaaactacaaatgggattatataaattttcaagtgccctagaaagagtaatgaagtaaatgaatcctgactaagcctcacacccscttgatgaaataaatattatgactctcttatttcaacaaattggaaagaggtctttttttcatataggaggtttatttaaatgaactttctaataatatt

SEQ ID NO: 496936 - DNA, 201 bp, Homo sapiens
actcagaaatcttagaatagttttttttgtttgtttcttttttgttgtttgttttgtttttgtttttgttttttctgagaatgagctaaaatcagtaagcwgattttaacatatttagggatttgggatttgttagcttgaaatcagccatggtgaaagtatttataccatggaaatcagcaaatgctgaaaatcaggtgg

SEQ ID NO: 496937 - DNA, 201 bp, Homo sapiens
tgctttataaatttgtgttgaatgacatgaatgaatgagaattcagtctggttaaaaacagctttattttaaagcacttgatacagtgaaatgagctgtgsacacacgtcaaataatctattctctagatttagcctggcattgacccgctgtgtgacttacgtcaagccactatttcttgactggccctcacatgcaatt

SEQ ID NO: 496938 - DNA, 201 bp, Homo sapiens
actagcttgctgtttgtggcctctttacaactgccggccccatctgagatccggaaccaacacgtgctaacctcagcccattggggccagtggggcagccrgcagtggaaccatagctctccacacctatgtctatggcacggtagctgccggcccacagtttccactgcatccccttgcatgtgcaccccaagagaagta

SEQ ID NO: 496939 - DNA, 201 bp, Homo sapiens
gttctcaacccagggtactttgcccccagaggacttttgacaatgtcacagatgtggagggatgctactggtgtctacccagggacaatgctaagcatccyacaataaacaggatggtccctccaaccaagacttatccagcccaaagtgacagggtgctgaggttgagaagccatgtggtatataacacagatgtacaca

SEQ ID NO: 496940 - DNA, 201 bp, Homo sapiens
gctggagtgcagtggtgtgatctcggctcactgtgacctccacctcctggattcaggcaattctcttgcctaagcctcctgagtagctgggattacaggckcccaccaccatgccctttttaacagctaatttttgtatttttaggagagatagggtttcaccatgttgaccaggctggttttaaactcctgacctcaaat

SEQ ID NO: 496941 - DNA, 201 bp, Homo sapiens
atttgcccttaaggcttctacaaataaggtaattgtagaggcaaatcgctctctgtgatataatggagaataaaataagtatcttgtctactgttcctttyctgtttcttaaaatatgtaagtagcttgtaagtaacttctctgtctgtcctttgtttgggactatagattacacagagggaattaaagggaggtagtaga

SEQ ID NO: 496942 - DNA, 201 bp, Homo sapiens
aatgatagtaatgaaagtgtcagtaagaaaaccttgaaagattatttgtggcatggctttttgtagcgggcattgtgatcagaaatctgaagatgacaggmtattacaagggcttgtgatgtgtaacctgcaagacgtaagtgtgtactaagttacactcccatctgcagtgtgtcagggagttttagtcgttgttccaca

SEQ ID NO: 496943 - DNA, 201 bp, Homo sapiens
tagccagtctgaagccaggaaacatgctagagcctttgattggaggttctcgaggaatgtacggtggatggtattttctcctgttgttttctaaataatakcaaggatagaattacataactcccaacttgagtattttttgccctgaaggaccctttattaggacattttgcacatcagaattcttccattatatttgct

SEQ ID NO: 496944 - DNA, 201 bp, Homo sapiens
ctacctgtgtatttatcagtcttctcctaaaccatagtctgccttttgatagctctaataattaatttggtcttccctgtctttcttctcccttgcccccyaccccttctccctgtctgttcacaggttatcttgacgaatcagattacaacccatctgagtggagccctggcttctcaggcagacctggtgtctccagct

SEQ ID NO: 496945 - DNA, 201 bp, Homo sapiens
ggtccaaattaaggcatagatagtcacttgccaggtgagatttgatggcaaaagaaaaactaaaatgtggcctagaacttctttttcttttaaaagaggarcacttctaaccattttctgaggcattctaccacagtaaatcctttgattgtgggattgatagttagcattatttgtgtatcagaaatgagtcgttctggc

SEQ ID NO: 496946 - DNA, 201 bp, Homo sapiens
tgcaattctaaatgtacctagagtttgtgacaagtgtgtattggaaaactcgttgaaaacacatgagttagtaatgttctctttcagaagatgaacttgcrtggccgaagtgagattccagtgggaaagacctggtagagaaagagtgggagaatgcgttgacctctggagggcagattatggcatgccaggcaatgggtt

SEQ ID NO: 496947 - DNA, 201 bp, Homo sapiens
gtagaatttactgcaaaaggaaaaaaaggaataatacatgttaaattctagttaatgctatgcatgctggactgttgggggaaactatattaatgtgtttracttactttgaaatgcattaaaaaaaccctaagatggattggtgaatggattaatcatacagaaagcatacagtatagtcatagtatagtataacaaata

SEQ ID NO: 496948 - DNA, 201 bp, Homo sapiens
gtgagcatggaagaaatataaccttgatcctctgacctaataaacattcttgcaattctaaatgtacctagagtttgtgacaagtgtgtattggaaaactygttgaaaacacatgagttagtaatgttctctttcagaagatgaacttgcatggccgaagtgagattccagtgggaaagacctggtagagaaagagtggga

SEQ ID NO: 496949 - DNA, 201 bp, Homo sapiens
ggtgggcagatcactttaggtcaggagttcaagaccagcctgaccaacatggtgaaacccgtctctattaaaaatacaaaaattagctgggtgtggtggtrcacatctgtaatcccggctactcgggaggctgaggcaggagaatcacttgaacctgggaggcagaggtttcagtaagcagagatcacgccactgcactct

SEQ ID NO: 496950 - DNA, 201 bp, Homo sapiens
tccagcctgaatgacagagtgagactcctggggaagcccagccctgcatcagagaaagtgatgcactgatgcttcacacacagagaatggaagcgggagtrgaggcatttttctggagttcaagcttcaccttcaagcatgatattcagattccatgagagcatgcagaaagagcccagcggacctgttgaacagggcata

SEQ ID NO: 496951 - DNA, 201 bp, Homo sapiens
gaggtgggcagatcactttaggtcaggagttcaagaccagcctgaccaacatggtgaaacccgtctctattaaaaatacaaaaattagctgggtgtggtgrtgcacatctgtaatcccggctactcgggaggctgaggcaggagaatcacttgaacctgggaggcagaggtttcagtaagcagagatcacgccactgcact

SEQ ID NO: 496952 - DNA, 201 bp, Homo sapiens
ggctcactgcaacctccaccttctggattcaagtgattctcctgcctcagcctcctgagtagctgggactacaagtgcatgccaccatacctggctaattytttgtggttttattagagatggggtttcaccatgttagccaggatggtctcgatctcctgacctcgtgatctgcctgcctcggcctcccaaagtgctggg

SEQ ID NO: 496953 - DNA, 201 bp, Homo sapiens
tggctgcacttaaggctcatcacaggagcatttataccaatgccaatgccccaccctgaccagttaaatcaaaatctctgccagtagagctgagcatcagkgtttattttatttgtaaagctcccccatgtgattctaatgtgcagccaaggttgggaacctctgccttaaataatagataagattcaggtagtcagaaag

SEQ ID NO: 496954 - DNA, 201 bp, Homo sapiens
tattagttatggagaaagtaagtcaaactagagcataggaactgacattttttgaacgcttactaagtgccacacattatgctggatgtttagtatagttwttttaatttgaatattcataaaaccctgagagaaatgtattactaatcaccttctaatgatgaggtatctgagattcagaaacataagtgagctgtgtga

SEQ ID NO: 496955 - DNA, 201 bp, Homo sapiens
tatatactttaaaagggcgaattttatgatatgtgagtaatatctcaataaaattgttacgtatatattttttaaacctattaatttggcttcggtggttkggatttagtccaccacttcaattatctgtttgtgtctgggttattgcaattcaagtacaatatagtctcaacctttattgtctatgaggatcttcaattt

SEQ ID NO: 496956 - DNA, 201 bp, Homo sapiens
ttctgtacattctactagaggttgctgcccctcaccaggttactactgaccttttggtcactcacaagtccacttaatggtattagcacccagctcaactkatcttcactttatccagaaggctatcaagagagtttgtcacattttttgctgaaatcagatattttttattggtgctagccctctgatctatcactctgg

SEQ ID NO: 496957 - DNA, 201 bp, Homo sapiens
tctcttttttcttttcctttcttttgtttcttttatattacattcactgacttatggtatcaaataataaaattagaggaaaatgtaaaacagatgacttwttaaaggtagtacagtctaattgctatagcaaacatcgccatcatcttaaattagctcatctgctgagattattttattattttaataatttgagtctgg

SEQ ID NO: 496958 - DNA, 201 bp, Homo sapiens
aaaactctgtgagcactctaaaaacactgaattatatactttaaaagggcgaattttatgatatgtgagtaatatctcaataaaattgttacgtatatatwttttaaacctattaatttggcttcggtggtttggatttagtccaccacttcaattatctgtttgtgtctgggttattgcaattcaagtacaatatagtct

SEQ ID NO: 496959 - DNA, 201 bp, Homo sapiens
gcaggaatgggaagggacagtgactactaatgagtatcgggtttcttttcagagtaatgaaaatgttctggaattagatattggtgatggttataaaactstgtgagcactctaaaaacactgaattatatactttaaaagggcgaattttatgatatgtgagtaatatctcaataaaattgttacgtatatattttttaa

SEQ ID NO: 496960 - DNA, 201 bp, Homo sapiens
taggcattttgttaaatagcatttctaagcccggtcaaatctggataacttttgggataacatttgtgagaagaagagtcactgagttgcctctctgatgytcattgctaagatcatgattttaagagggaagagaaagttatttagagaaagtagagcctggaaatacaatgaattggtagagtttaaaaaactgcaagg

SEQ ID NO: 496961 - DNA, 201 bp, Homo sapiens
gtaaataaatgcgtgaattagttattaataaaaatgcacacacacacatacacacacacacacgcacacacacacacatcctcttcttttggaatatactrccaccaggtggtgccagaatcacatgattttacataaactttttgggctgaagttccacttgcttaaacaaggtttattacagtgtgatccacagtcata

SEQ ID NO: 496962 - DNA, 201 bp, Homo sapiens
acctggccaaccttttggaggaagaagtgtcaggaatttgaggacattttaaaaccactgcagttattttccttgaaaactgcttacaatgtggtgacttsatagacaatgtttatcaatacactcctgaggacttcttgcttgaaagttctaggggcataaatactttcaggaaacttctaaacaagaacagattatttt

SEQ ID NO: 496963 - DNA, 201 bp, Homo sapiens
attatatactttaaaagggcgaattttatgatatgtgagtaatatctcaataaaattgttacgtatatattttttaaacctattaatttggcttcggtggwttggatttagtccaccacttcaattatctgtttgtgtctgggttattgcaattcaagtacaatatagtctcaacctttattgtctatgaggatcttcaat

SEQ ID NO: 496964 - DNA, 201 bp, Homo sapiens
attcagcatgttgctgtactgaatactataggcaattggaacacagtagtaagtatttgtgtatctaaacacatctaaacagaaaaggtacaataaaaatrgtaaaaggattaaaaatggtacacctgtgtagggcacttactatgactgcagcttataggactggagttgctctgggtccgttggtgagtgcacctactg

SEQ ID NO: 496965 - DNA, 201 bp, Homo sapiens
ggaagtcatctgaaattggtatgtgtgacccagtatatcttttgagaatttgcattggaaaccacagtgagcatggaagaaatataaccttgatcctctgrcctaataaacattcttgcaattctaaatgtacctagagtttgtgacaagtgtgtattggaaaactcgttgaaaacacatgagttagtaatgttctctttc

SEQ ID NO: 496966 - DNA, 201 bp, Homo sapiens
gaggcacagtacaaacaagaaagaactaggggccaggtatggtgtctcaggcctgtaatcctaacactttgagaggccaaggcaggtggatcacttgaggycaggagttcaaaaccagcctgatcaaaatggtgaaaccccatctctactagaaatagaaaaacagttagctgggtgtggtggcaggcacctgtaatccca

SEQ ID NO: 496967 - DNA, 201 bp, Homo sapiens
aaggtggcaggctattaaccagtcccctgttccactgagaacttgccaggctggccatcatagcatggtataggttgaagtagcttagtacctgtggtggrtgactgtttttctcggccagctgtttaatgagcaccaaatgaagtaaaatgctgcttggttcctctcctctcttcagacacaaacaatcgagcacatcct

SEQ ID NO: 496968 - DNA, 201 bp, Homo sapiens
ttcccccaaggagaacacagggacaaaataaatatgccttcctgacccaaagacaggagcgcccagggagaccatgggatctgggagtgagagcagattgkagggaggaagtatccaggatgagactggtattagctacaggctggacagttagtcggtggcagctaggtactgctgctagtggctgagggcagggtttct

SEQ ID NO: 496969 - DNA, 201 bp, Homo sapiens
taaggcattggctttgtgtaattaccaggaatgcttttagctagcaccttgaacggttggttaaaaagggacagttagatgtttgttagatgtgtggtgtyaataaccttgaccagtagattcgtgactatgagaatttcaaaaggcgaagcaagaacacacacagagggaaaacatctcttgtttctaggggcagccttc

SEQ ID NO: 496970 - DNA, 201 bp, Homo sapiens
ttatacatttaattatttgcatatttatactcggaaacattcttaaaagtatgaaatttgttatttcatcctatagtcagtttcattctttttcaactacraaatattatctctgagtgaacttctagcttagaaagaaactctttcggccgggcacggtggctcacacctgtaatcccagcactttgggaggccgaggtg

SEQ ID NO: 496971 - DNA, 201 bp, Homo sapiens
ccagtgttaggaatttagaattctctgaagacacttgggagccactgaaaggttttgagcctgctggttgtaaatgggagggtggtgtgcttaggtgtgtkcttggaggaggttaatcaggtagtaaaacagagggtggctttagtagggagaaagcgacagcagcacagacaacaggcaactaaagcagtcacaccaggt

SEQ ID NO: 496972 - DNA, 201 bp, Homo sapiens
tctatagatgtctattaggtctaattggtctagtgtcgaatctaagtctagaatttctttattagttttctgcctcaatgatctttctaatgctgtcagtrgggcattgaagtccccctctatttttgtttagctgtctgagtcttttcataggtcaagaagaacttgttttatgaatctcggtgctccagtgttgggtgg

SEQ ID NO: 496973 - DNA, 201 bp, Homo sapiens
gcatggtttcctgggtgaggaggagagcaggactatcacctcccttgttccacatactatatctccattgatataacctgagaacttgctagatttttgaraattacatctcacagctgactaatattgaactatagttaaccaacattccattttctgaatgctgaatctcattctggctgttccataatgaatcattgg

SEQ ID NO: 496974 - DNA, 201 bp, Homo sapiens
cccatagaaaagcaatatgaattttcactccagtcctcttaccatgatgtttgcattgaagtgtttgtggtcattgattgctttgggcctctaaccacctwcttgtttgtcattttttcttttggaatttgggccccagtccaaacacattgcatcaggcatggtttcctgggtgaggaggagagcaggactatcacctcc

SEQ ID NO: 496975 - DNA, 201 bp, Homo sapiens
tcagatccttacctgtcaggtaaattttatttaacatttttattgataagttttatgcacaagttaactttataccttaatacctcttaaacttgaaataygaaaatgtaggcttacaaaaaaaagataaatgatggtgcttttccataggctaattgtaaatatcaagcctccttgggtgcatttccaactgctatttca

SEQ ID NO: 496976 - DNA, 201 bp, Homo sapiens
atgccaagaggtggtgtgatcccagaggccttcaagttagaaggactctctgagaagagatccttgttttccatcactgcagagaatgctataccaagggygagaggcctctaggtcagagatcataaagaagaaaagaatggctggattttaggggtggtgcccaacgattagtttgtgttgtaatgtggcatgaagcgt

SEQ ID NO: 496977 - DNA, 201 bp, Homo sapiens
cacaaatgagatacacacacacacacatgtatattatacatctctgcatatataaacacatactttggtcatttatttttttaacagaataaaggtaattwatcaaaatacaattcattttaatagttgaggcttgacagagatcattatttcaagaaaagccaaggagaataagctccctttcatagtattgttttcttt

SEQ ID NO: 496978 - DNA, 201 bp, Homo sapiens
gagaatgcagttccagtggtaacataccatcttcttccctggatttatttcaatcctgaaaacatttgtaggtattgttattcctttatttttttaaattycctctttctactctaaataaatgggctttcatctgcagggactggagggaccaaatatccagaatatccagtccgctaaggccatgaacttttccttccc

SEQ ID NO: 496979 - DNA, 201 bp, Homo sapiens
ggtggccacctggctttctccttgtcccaaagtacttcgttggatatgtaaagcgaccaaatgttacttcactgtagtttgaatcttacccagaaagagtkactggtaaaggacatgccactttgcacccttcccagctctctccaaaggcagctggctgaatgcacacttctgagggtgatgttttttccagcactcagg

SEQ ID NO: 496980 - DNA, 201 bp, Homo sapiens
ttacccaggcctgattcttcacaagctaaggcctgggcaaaggaccctctctcagccctgggtttgccttgtgagctgatttcctgaaggcaaaccacatractgctggtgtgtccccttgctgttcagtcaagtgggtggccacctggctttctccttgtcccaaagtacttcgttggatatgtaaagcgaccaaatgtt

SEQ ID NO: 496981 - DNA, 201 bp, Homo sapiens
tcttagaaggttaagtagaattgatctgttatcagatagaattaaattttagagttttcattgtatctcatgatggaattgcctgttagtttgtgtccccyaggaatgtaagttccctgtgagtaggtgctataccttctatgctgaggttcctagcatagggcttggagagcatggtagatgatcaacaaatatctattg

SEQ ID NO: 496982 - DNA, 201 bp, Homo sapiens
gtataagctaatgagccacctcagataccacctcctttgtgaaaccttctccagcacccttaaaagaaagtagttatcctctgctctgcttttccaaagcmctttgaccctctgtaaaagggcttatctcatatatgtgcctcaaattatattttttcatctctctccctatttatcatggaaatcagaaaggagattttg

SEQ ID NO: 496983 - DNA, 201 bp, Homo sapiens
gacgtggatcctgccatcaaagagcacggtctagtgcaggaattctcagagtgtgggtgagtacccctgggggtccctgagaccttttcaaggagaaaagrttaaaagtattttcataataatattaataattctaagaattctgagacactgtttacttttttgtcattctctttcattagtgtacaagtttttcagagg

SEQ ID NO: 496984 - DNA, 201 bp, Homo sapiens
aaagcaaagaacacttggaatttgggagagaaagagagaccatttaagggaagaattgcatttgagttgaattttgaaaaaattgagataggcttttgccsggcatgggtaaaagtgggaaacagtccagaagaaagatgtgagcaaaggctcagggacaggagaacttgggatgtgttctgagaacagtgagtaatccaa

SEQ ID NO: 496985 - DNA, 201 bp, Homo sapiens
tctctctcctttactgtccctcataatttctacatgagccgaacacacacacttctttttgaaagtgaatgtatatattcactcacttcaaaaatacttaytgaaccccaattctatgctaggtcttacatcaggcggtgaggatacaaagtccctgccctcacagagcttcctttctagcagcctcagccacttttagct

SEQ ID NO: 496986 - DNA, 201 bp, Homo sapiens
gagggtcaaaggaaggaacagagatggagtagatttatatgggaaaatatgagcttgctttgatgatactgaatttgcagtgctaaaatttatgatgtagrcttgcagttcttgtggttaaaagtggaagacaagtgttgagacaagccaaaggttgcgacaaaggcgtagaaaccatccaccttgtcaaatgggctctca

SEQ ID NO: 496987 - DNA, 201 bp, Homo sapiens
ttacccaaatttgtaatccattaaccacagactttggggtgggttggtcaagttagcagaaatctctacatgctttagctccaaggcccttcacagcccartctcagactaaatgttcattggtttgtgtagggccatgtaccaacgggtatgagtggagtagttttaaaaatccactccttgggggtatggtgcaagttg

SEQ ID NO: 496988 - DNA, 201 bp, Homo sapiens
tattgtcctgcattacccaaatttgtaatccattaaccacagactttggggtgggttggtcaagttagcagaaatctctacatgctttagctccaaggccmttcacagcccagtctcagactaaatgttcattggtttgtgtagggccatgtaccaacgggtatgagtggagtagttttaaaaatccactccttgggggta

SEQ ID NO: 496989 - DNA, 201 bp, Homo sapiens
ctcaactttacaaacactgggagggcaacagctggtcagccgagattaaaggagcgtgagagagcacctcccatctcctgacttctcctcccccatagacktccctgcagccagccagggctcgctttttacagccctgtgcagatgaccttgttccagctaagataggagctcttttgatctcagcagggggatgctctg

SEQ ID NO: 496990 - DNA, 201 bp, Homo sapiens
atgtgtaggggaattagtatggaactggagtgagaagaactagattcaaaacccgtccccaccacttcagagcaactgctttagtgcaattggtatgtcarcaggggccttccctcaaaaatacacagctctgtagcaaaagtcatctgtaagacatatttaagacttagttcatcagaaagagggtagggaagaaaggac

SEQ ID NO: 496991 - DNA, 201 bp, Homo sapiens
acagaaagggttttctcatggtgatatcaagaagggtcagtaaagctttggagatgtaagatgcaatttggaggaggctaggaactcagatagagtttacytcagaccctcttccttataggaaagtcttagaaggtaaaggaatgtttctcttggaatagggatgtctaaaacagcttacctatgaaatgctgagatctt

SEQ ID NO: 496992 - DNA, 201 bp, Homo sapiens
aggagaattggatattcctgggaaaagaaaaaaagtgtctcacttctggagccattgtaaccatgtaggtatttaagaggtttttgttttgttttgttttkttttttcaaagataaatccctttttggatgattagtcagttgatcttaaatatcatgtaattggccatgaaaattgatggaaggctctgttcttagaact

SEQ ID NO: 496993 - DNA, 201 bp, Homo sapiens
atttttgtatttttagtagagacagtgtttcaccttattggccagactgctcttgaactcctgaccttgtgatccgcctgccttggcctcccaaagtgccrggattacaggtgtgagccactgcgcctggcctaaattggtctttttataaatgtatcccagtagtaaatgaataaggaatgatagaatatcaccaaatta

SEQ ID NO: 496994 - DNA, 201 bp, Homo sapiens
aacatgctctcctttgtataaaacaaacacacacacacacacacacagacacacacacacaaatgcatagcttatctttgttgtaaggttgtttccagggrggggttttgctgtgtgagaaacaggaaaaagagactttcttttcagtgcaaatccttttatgttttatcattttcaggctttgcctgttccataaaaata

SEQ ID NO: 496995 - DNA, 201 bp, Homo sapiens
tatacttaagcatttgttgaaaggtagatcttacattgtgttcttatcccatacactgtataaataaagagcacaggtggaaacttttagaagtaatggawgtgtttatggcattgaccgtagtgatggtttcacagtgtacattctccaagttgtatgcattaaacatacacagttttgtatatgtcaaacaaataaaaa

SEQ ID NO: 496996 - DNA, 201 bp, Homo sapiens
gtaagtgccctcttgctaacctaaaaacgaaaaagtcaacagcttgctttatagggaattccagaagcatttccataaacttattaagccaatgatcaccyttattcctactatcatttagtattgttatagtagcactagacaaaggagtcttacaagaaaaagaaattagaaataaaaaaaactagaaaggaggcatat

SEQ ID NO: 496997 - DNA, 201 bp, Homo sapiens
actgagacagcatgacgcagtagaaggtacccagaatcacaatacagttcacagtaacaaagatatggaatcaaccaaagtggatgattggatgaggaaartgtagtatatatacacaatggaatactattcagccataaaaagaatgaaataatgtcttttgcagcaacatggatcaaactggaggccattatcttatgt

SEQ ID NO: 496998 - DNA, 201 bp, Homo sapiens
cttcaacagcagatgccaaagtggtttctttgtctttacagactagctctgtgcatcacagagtggggcatggtgttccacatgggaaactgttaaaacasaaatcagaggagccatcggtgtcaatacccttcctacaaactgcattattaagaggttcagggagtcttgggcacagaccaagccaggagatggataaaa

SEQ ID NO: 496999 - DNA, 201 bp, Homo sapiens
agaactttttattatgtcatagattaatcacactgctgtcacttattgagtgactcttgtgcatcaggcattttacatatattatttctaatcatcataamagctttgcaaccagacttagcagctttattgcaaaagtgaagaacctgaaagccagagcatttatgaaacttttccaattattccaggcagtgagaaatt

SEQ ID NO: 497000 - DNA, 201 bp, Homo sapiens
cagtgacttaaaaatatgatgtctgaatttctttttaaatgtcagcagtagtatatctaaataggtgttgtttctctcgaaatggtcatagaagattatawacccattttatgcatgctcctttcttggtacgttcttttgtcagttttctgtggtggcaggtctttattttgcaggctgttttgaattttgaaacagtca

SEQ ID NO: 497001 - DNA, 201 bp, Homo sapiens
taggagtgtgattctctgtaacaatttctttagagaaggtataatgtaaagtaaaaattaatatggaggaatgggttatagggaagttagtgtccctgagwtcatgaaattatctctttacgcactggaagttatttttttctctcgtgtttcaagttagaactttttattatgtcatagattaatcacactgctgtcact

SEQ ID NO: 497002 - DNA, 201 bp, Homo sapiens
aaatttgacagaaaagtaaaacaaaccaccttgtctcatatttcctttctacacaggcactttgaagagatatcttaaatattgtcaagtctcaattatcstggcacacgttagcattatcaccattctcacaaacttgaattaaatgcacatggtattgcagcaggtgcagcacagagaaaattggcaaacaagatcctt

SEQ ID NO: 497003 - DNA, 201 bp, Homo sapiens
ttttttcttagtttgccaactgagggtgtcaccctttgggagcctggaagtctcaactttaagtaagggtcctcatttaatctcttgtcctgcttgggccygggctctgtctgctatcctcccaactctcttgccatgtgcccatttagaacccaggctctagttcattaaggattggcaactgctctcaggaaagaatcc

SEQ ID NO: 497004 - DNA, 201 bp, Homo sapiens
caaacaccctccctcccttcctatatcctctgtcttcattagtggcctctccatcctctcagctggaaacctcacattcatcttgagtctttatgttcccktggtcttcacaaccaatctgtcaacaagtcctgtttcttctatcactaaaattgctttttgactttgtttgtactcttccctccattctcctagccattg

SEQ ID NO: 497005 - DNA, 201 bp, Homo sapiens
catattcattgaatgaaaaaatgaatgaatggggaagacccttgtcccctgccttttttttcctgatatattcagaaccacatctgagaaggacaggtctyctgcttcaaggtgggtttttttttcttagtttgccaactgagggtgtcaccctttgggagcctggaagtctcaactttaagtaagggtcctcatttaatc

SEQ ID NO: 497006 - DNA, 201 bp, Homo sapiens
caggtgtgtgcctccacacctggctaattttgtatttttagtagagacggggtttctccatgttggtcaggctggtctcgaactcccaacctcaggtgatmtgcccacctcagcctcacaaagtgctgggattacaagcatgagccactgcgcccaggcatgaatcaacttctcatcagattttatcatgagattgcagca

SEQ ID NO: 497007 - DNA, 201 bp, Homo sapiens
atcttgctcagatataaaattttttttcagctttcataggaatctgcccttcgattagtgagaaaatacggtcttctgttgaagcagagaatttgacagtmatgacattatattgtgaacctttaagttttactgctttattttctgtaaattactacatttctatagtaatttcgcagtgtaaatgctgaatgaatgtga

SEQ ID NO: 497008 - DNA, 201 bp, Homo sapiens
aagaaactaggttttcaagttggtaatggtttcagactgtctatgtaaagcataagtagcatgatttgaagtgattcattcaaaaaatgtataaaatcagrgtaatagaagctaaattactcaaatcttgctcagatataaaattttttttcagctttcataggaatctgcccttcgattagtgagaaaatacggtcttct

SEQ ID NO: 497009 - DNA, 201 bp, Homo sapiens
cacacagagacatgcatgagcacatgctattggaaaaatggcactaatagacttgtttgatgcagagttgccacaaccttcaatttgtaaaagttgaagtrtctgtgaagcacgataaagtggagtacaataaagtaaggtatgtctctagtgtgtttgtgtacattaagtggtggaagatgtgatttaattttttaaaaa

SEQ ID NO: 497010 - DNA, 201 bp, Homo sapiens
catgaaaggatctgtctaggctctttttgcattgtagggggtggaccaagtaacctttggatcacttccacttgtataattcaccatttcggcaggacagyaacatttcaggccaaagttcaacttttttttattattaaattcttttattgtcgccaggaaactagagaaaatgaattcttcacagtatgcttgtgcatg

SEQ ID NO: 497011 - DNA, 201 bp, Homo sapiens
ttagtttgctgaggatgatggcttccaactccatccatgcccctgcaaaggacataatctcattcctttttatggctgcacagtattccattgtgtatacrtaccacattttctttattcagtctatcattgatgggcatttgggttgatttcatgtctttgctattgtgaatagtgctgcaatgaacatatgtgtgcatg

SEQ ID NO: 497012 - DNA, 201 bp, Homo sapiens
aagaaattgcttcagggttgcagtataactgccacaagaaacccctgacttgtgttcatagcaaaggaagagttaccaggttatcctcccagaaatccaasaaagaatggaaataattgatttttctagatttttttttgtatagctgagcagataaagaggctatataaatatattcctatagtctataatgaaggtttt

SEQ ID NO: 497013 - DNA, 201 bp, Homo sapiens
gtgaagctcctatgccaagtgtgccactcttggcctgcccctccccactcccagctccaggcctgtgcagagacagctcacctagaacagtgcttccccckttcacttcttctgcttctcgtcccacatccactccttcgaggcttatttaaagactgcctctttcacagaacctgcttgcctatggtctcagtctctttt

SEQ ID NO: 497014 - DNA, 201 bp, Homo sapiens
tggaaatcagcaaatgctgaaaatcaggtggcttgtttttttatttcctccctttgtgtagactggttttcaaaacaccactagataaagtgaatgatttyaacccttcataatctgtcatttcctttctattcaaatttagttcctgccgatatcttaggtgaagctcctatgccaagtgtgccactcttggcctgcccc

SEQ ID NO: 497015 - DNA, 201 bp, Homo sapiens
tttgaaaggcagataactaggcctctgttctaatacagacatttagcatatgcggttgattggaccattgttcccaattcttcacttactctctaatttaraaataaacattctgctctgtaatggtttactagagtcttttatgtggcacatgttcaataactgctgttaaatgaatgattatatcccttaatactgttt

SEQ ID NO: 497016 - DNA, 201 bp, Homo sapiens
caacttgccactctgtgccttataattggggcatttagcttgtttacattcaacgttaatattgacatgtggatttgatattgtcatcatgttgttagccrgttattatgcagacttgtttgtgttgttgctttatagtggcaatggtctatgtacttaagtgtgtttttgtagtggctggtgatggtctttcctttttat

SEQ ID NO: 497017 - DNA, 201 bp, Homo sapiens
taagagatgagagccaggactctggaaggtgggaacctgaggaggtaggatataggactggaattttaggaggtagaagtggatattcctgagttgtaatraaatcagaaaagctttgaaaattgggaagacaattagtccagcaagggaggaagacattaatcaaataatcactaaaatgtgaaattgtaaatattataa

SEQ ID NO: 497018 - DNA, 201 bp, Homo sapiens
ataattggcaggattagctgtggcctacatgatcacaggaaataataaggcaggggttgtaaactcaaatgcctataagcacgagccatgtaacagaagtwcatgaaacagttaagtgtaagacatagatatttattagttgattttagctgctgacaacagcagcaaacatttatttttttgctcatgggtctccatgtc

SEQ ID NO: 497019 - DNA, 201 bp, Homo sapiens
tttataggcttggtgatagaatttaccagagtagaagagaaagttttctgagtagctagtgttttgaatggcatggggtttgtgacaagatttggggtaarccagtgagagatgctttggagttatctgggacctcatttattctggtggaatgccagaagtacaggaggcatctcctagggtatttagttttttagaggc

SEQ ID NO: 497020 - DNA, 201 bp, Homo sapiens
gtgagaatatctggtttcataagcagaagtgggaaaaataattattactacttattgaacataagaactgtgctaaacaccctaataacattatttaatcygtacaacttttttgtataagcatttatctataagttaatacatgtgaagcacttagaacttagaatgagagcccattaaatgttaatacccattttggag

SEQ ID NO: 497021 - DNA, 201 bp, Homo sapiens
tgggaccctgccctgaaccctgtgctaccgcaggatcgtcactcagatctcagcctgaatgtcctgtctcagacaggactcccctgactgtcctatcagtrtctacacccgatattttatttcctcacatcactcatcatatctgaaattgcctgctcatttcctggttttcttgtttactgttggaccctgactaggggg

SEQ ID NO: 497022 - DNA, 201 bp, Homo sapiens
ttcttgaatgctctggcctggtgctaatgagatgtgtgagtgtcctacccaaagcattatgtaacaggaagcaaagttttctgagggaaataagaagcttwctagaaagagaagataaaatctttgctggggaatggttcttttccattagcattcccagtgcatttctccagaagtgtgcctaggaatcctctgctgtag

SEQ ID NO: 497023 - DNA, 201 bp, Homo sapiens
gaagctgaagcactgcatttagaattgggagacttgtattcaaggaccagctttgccacaaaccatctgtactattttgagcaaggcacttaacttccctrgacctcagttccctcagctatacacataagagcttgcattaggtgaagctggcaggcctttcagtttgcttcttctgtcacattctgtcttcggtgagca

SEQ ID NO: 497024 - DNA, 201 bp, Homo sapiens
gttttatttcttgaatgctctggcctggtgctaatgagatgtgtgagtgtcctacccaaagcattatgtaacaggaagcaaagttttctgagggaaataaraagcttactagaaagagaagataaaatctttgctggggaatggttcttttccattagcattcccagtgcatttctccagaagtgtgcctaggaatcctct

SEQ ID NO: 497025 - DNA, 201 bp, Homo sapiens
ctagccagtgaatttgttcttcaagcctttagtgattccatactccatataatggactataccatttgtggattccttgacagccatgaggagacactgasggagctatgaatagaagaaccctgtgttctcccctgtccagctcccctggcttttggaaacagaacttcaatttttcttctccatctatgtggttcacat

SEQ ID NO: 497026 - DNA, 201 bp, Homo sapiens
caattttcattattttatcaatctgcttgtctattgccttactttataccagctagacttattatatacaggcaaaaactgatacagagcaatatgatatmttttcttcttgattccttttttaaaaacttaatgttatattacttttcaaaccaagagtggcatattgttgtaattatatcattaaaaaatgtgtttatt

SEQ ID NO: 497027 - DNA, 201 bp, Homo sapiens
aagagcatataacatccactctctacatttttcaagaatgtaatatatttttaaccatagacaccttgctctttcataggtgtcttgaaatttattcctcytgtctcattgcaattgtgtatcctttgaccaacatcttcccatccccctctccaccacaccccagcctctggtaaccaccattctactgtctacttctat

SEQ ID NO: 497028 - DNA, 201 bp, Homo sapiens
ttatctgtttgtgtctgggttattgcaattcaagtacaatatagtctcaacctttattgtctatgaggatcttcaattttcattattttatcaatctgctkgtctattgccttactttataccagctagacttattatatacaggcaaaaactgatacagagcaatatgatatattttcttcttgattccttttttaaaaa

SEQ ID NO: 497029 - DNA, 201 bp, Homo sapiens
taatcaacttttttggattccacaaagaagtgaaatcatgtggtattttgttttctgtgcccggcttatttcatttaacataatgtcttccaggttcatcyatattgtcacaaatggtggaatctcattcttttttatggctgaatagtagagtcaaccctagaaaaatgcagggatgaggggtgctaaccctcacacagt

SEQ ID NO: 497030 - DNA, 201 bp, Homo sapiens
atatggagaacccttataatataccaatagaaagacaaataattaaaagtagattaataattttaatagattttttccaaagatgatgtgcaaatggccamtaagcacatgaaaatatgctcaacagcatcagtcattgatggaatacaagtcaaaaccataataagataccactttttaccactaggatggctatgataa

SEQ ID NO: 497031 - DNA, 201 bp, Homo sapiens
gtctgctaactcttccaccttaccaataggtggattccaagagttcacataaaaggtggttgtttggattgtagaagtctcttcccaaaagaaactcctaytttcctagggagatgccaccatagaccctaattaaccaaggtcctttctgtgagacattatgttcaataggaccttgaggtgttacaaactatttcctca

SEQ ID NO: 497032 - DNA, 201 bp, Homo sapiens
aggatgtgaagtctataaacaattattccttttttaccttagtgctccatgagagctagaagagacgctaaaacctagtacttttcacatcaaaaaacgtraaatactaaggaataaattgaacccccaaaagtataagatttgcacactgaaaattataaaacattgttgaaagaaattaaagaagcctaaataaatgga

SEQ ID NO: 497033 - DNA, 201 bp, Homo sapiens
tggctgagttttagttccagttctgcctctgctttgctggcttcagcgagtcacttctccttcctttgtctatttcccctattgggaaggagaagataatkaacctttccacctatcaggctcacttgagtgttataaagaataatgaggtgatatttgtaaagtgctttgagctgctgggaaagaggagggggtgagctc

SEQ ID NO: 497034 - DNA, 201 bp, Homo sapiens
ttaattccagtctgtactttgctctgttctcctgcctcaagatagatcagtattatttccctcttcattaagatgtttataaacattcaggactggtataracatgcttggctatgacacagttaagctgacagggatataggatgtgaagtctataaacaattattccttttttaccttagtgctccatgagagctagaa

SEQ ID NO: 497035 - DNA, 201 bp, Homo sapiens
atcttagaagtattgcatcttggaagtatttctttgcatcttggaaatattcaatgtttcctttctggtgataggattctcagtgtccattttatattttygaagactcaaatatcatcactgtgaagacttccctgacaccagctgtgatccgtccctcttccctctggcccacacttgcacctggcccttgtctctatt

SEQ ID NO: 497036 - DNA, 201 bp, Homo sapiens
tttctgacctcctatctcatgctgtgacttggaatgcctaacctcctgggaatacagaccaataggtctcagccttatttttacagcttgttttcaagacrgagtcactctggttcaaatgcctctgacagttatcactgttttaatttaggaataaaatgaggtgctagaaaaggaggccttgacttggtgatgattctg

SEQ ID NO: 497037 - DNA, 201 bp, Homo sapiens
ctgtgagtgaccagtctatttaattccagtctgtactttgctctgttctcctgcctcaagatagatcagtattatttccctcttcattaagatgtttataracattcaggactggtataaacatgcttggctatgacacagttaagctgacagggatataggatgtgaagtctataaacaattattccttttttaccttag

SEQ ID NO: 497038 - DNA, 201 bp, Homo sapiens
tttatgccccaggcattgatttaggagccaaatacataatagttaacaagacaaagtcctggcccataaatatattgtttctaatccacataaaaccttgmaaggcaggtattgtcttaattttatagatgagaaaactgaggctacagaaggagaacaaagttttcagcattttatagcctgtgagtgaccagtctattt

SEQ ID NO: 497039 - DNA, 201 bp, Homo sapiens
tcaggcaatcctcccacctcagcctccttagtagctgggactacaggcctgtgccaccacactcagcaaattttttagtttttgtgttttgttttgttttkttttaagagatggggtctcactatattgcccaggctggtcttgaactcctgggttcaagcaatcctcctgcctcacactccgaaagtgctgggattatag

SEQ ID NO: 497040 - DNA, 201 bp, Homo sapiens
gtaaggaatattattgactttccatcaggaaggaaagaactcagttgtttttgatattactaagaaagagagagttttgcatttatttgtttgcatggacrgtctacctaccgtgtggccttgttcatgacatggcggacctccctctctggggtcagtgtgaatagccaggctgcagctgtagctagagacaatggccag

SEQ ID NO: 497041 - DNA, 201 bp, Homo sapiens
cacaggatcaaaattggaatttgaacccagttttactgaacttcaaagctcataccctatattataaaagagaaatggccgggcatggtggctcatgcctrtaatcccagcactctgggaggccgaggtgggtggatcattttaggtcaggagttctagaccagcctggccagcatggtgaaaccccatctctactaaaaa

SEQ ID NO: 497042 - DNA, 201 bp, Homo sapiens
gctctaggagggcagatggtttccagggacagacccagggtaccatccacaggctgactttccagggccactcaggacgctaccttctgcatcccagaggrgcatttctctgccacccagtcatagctcaagcaggcccaggtgtgactcatgttgccactctagaggcacgagtagtaagccttggtggtgcccacatag

SEQ ID NO: 497043 - DNA, 201 bp, Homo sapiens
ctggacatccaggcagaaatttatcacaggggcagagccatggcagagagccccatctagggcaatgcttactggaactgtggggttgcagctgccacagrgagtcccctctacacctagtataggtgtcatggcagggtcacttgagactccagaactgcagagcaaccaatgtgcagccccagcctcggacagctgaag

SEQ ID NO: 497044 - DNA, 201 bp, Homo sapiens
tagatgtggtaggtttttttatttccagttgttctgtcaaaccttgaacattttgccctatctggcacaatgttttctagccttttccatattcaacaatrtcaagtaagtaaaagttaatttaaaatgaacttcagtgtttgtgtcacattggagttgttaaagttctcctttgttctttccaggtttgcattgcctctg

SEQ ID NO: 497045 - DNA, 201 bp, Homo sapiens
tagtggagtctttagggttttctcagtatatgatcatattgtcagtaaagagggataatttgacttattgttttcttacttggatccctattatttctttyttttgcctgactgctctggctaggacttccagtactatgttgaataggagtggtgagagtgggcatctttgtcctattcctgttcttaaagagaatgctt

SEQ ID NO: 497046 - DNA, 201 bp, Homo sapiens
gcaactatgggaatgaaatagaagtgggaaaaattagcttttaaaccaattagttagtaatgactagtgccaagtttaaagtgtttcagagtgttattgcsgtgttttaaatgtaaaacactagctccctcttaatctttttagaagataaaactgcaggaaatgaaaaagtggtcagttgaaacagcagaaggcatttta

SEQ ID NO: 497047 - DNA, 201 bp, Homo sapiens
cagtaaagcgcctgagctgagagaggagagggccctatggagagctatgtctccctctccactgaattctagcaaatgtaaagtccaggggagtggcatcmgtagctaatttgcagaaataccagtacaggcttcaaagttttctgaaagacccacatctgcaaattgggaatcaggaatccttgctttcgtgggtcatgc

SEQ ID NO: 497048 - DNA, 201 bp, Homo sapiens
gtctatatctctcccaagacttgggtagttctcagctattattttattaaatagtttttataggcctttttccttgttttctttttctgggattctcatartattaatatttgttcacttaatggtgtcccaaagtcttgtaggctttctttgttcttttttatttccttttcttttcttcctgttttttctcttttattc

SEQ ID NO: 497049 - DNA, 201 bp, Homo sapiens
tttgtctttgacttttgacagtttgactataatgtgcctcggagaggaccttattggtttgaaattttctagatttttgagcttcctggatttagatgtcyatatctctcccaagacttgggtagttctcagctattattttattaaatagtttttataggcctttttccttgttttctttttctgggattctcatagtat

SEQ ID NO: 497050 - DNA, 201 bp, Homo sapiens
gcttttcctatgctgttttacaattctttctttgtctttgacttttgacagtttgactataatgtgcctcggagaggaccttattggtttgaaattttctrgatttttgagcttcctggatttagatgtctatatctctcccaagacttgggtagttctcagctattattttattaaatagtttttataggcctttttcct

SEQ ID NO: 497051 - DNA, 201 bp, Homo sapiens
aagtcacaaaacgtgagttttatattccattggtcacactgaccaactccaattcaatatggaagaaaaactacccaagagcatgagcatcactgggagtyatcttggaggctgggttttagtgtctgtccttgtttttgttttcagtagaagaaatgacttttttagtgcccttgaaataattgctaaaatggtcctcaa

SEQ ID NO: 497052 - DNA, 201 bp, Homo sapiens
gccaaaatacaaagggaaaggaccatcttgggcaggttgccagaagtgccacctgggtctcctgaaatggctgtcagcaagaagggagcaattacatcccrtaacagactcaaagcagatggtcacctgcggtgataagtattacattattaagcctttgatttgtgattgtactttgtgctttccaggcactgaagttat

SEQ ID NO: 497053 - DNA, 201 bp, Homo sapiens
cttaaatgggttacaagaaagaatacagacatttgtatgatctatgtctccaagatactgcctagagcttttaaactttgtaagttctgcatttcacctayccaagggagtctgagagtgtgtaatttgggccagggcacaacagcccttggccaggttgaagtggacaaacaaatggaattggttccagtttaccaacct

SEQ ID NO: 497054 - DNA, 201 bp, Homo sapiens
actccctcttctttgtcccccaccaaaagtcaggtaaaatgagctgtttctatcaaaggctgtgtcttcaggcctggccatttcccactcaggtctccagkgctatccaattttctcttcacctgtacattctagtactcatggaaggctccagtatacaaaatggctactcatggggccccctccccttccaccccacca

SEQ ID NO: 497055 - DNA, 201 bp, Homo sapiens
gtaaatgggagggtggtgtgcttaggtgtgtgcttggaggaggttaatcaggtagtaaaacagagggtggctttagtagggagaaagcgacagcagcacaracaacaggcaactaaagcagtcacaccaggtgaaagctaatgtgggtctaaggttgatttaggaggaatggagagtcaggaatggatctaagggtgaggt

SEQ ID NO: 497056 - DNA, 201 bp, Homo sapiens
tgaggcaggagaatggcatgaacccgggaggcagagctttcagtgagccaagatcctgccactgcactccagcctgggcgatactgactttgtctcatagyttagatctgggataaacaaaccttttctgtaaagggccagaatattttaggcctttatttattttaggttttgcaggtcctataatctctgttgcagcta

SEQ ID NO: 497057 - DNA, 201 bp, Homo sapiens
atgtttcccccttccactgagtatattaagagaaaattgccttagacatttcatttttacaaaggaaggattttttcaagcaaataggattcttgtactgsgtgtgacattggactagatgacctttaagatttttcttcactaagattctatgattaccagattgaggatgtacttatcaaaagagtgtggaaccacttg

SEQ ID NO: 497058 - DNA, 201 bp, Homo sapiens
atataaccctaacactctgctcagttatttatttggctgacgacttcctcttgtaatacttcttgacaggtggtcagaggaatacctcttggaatccactkgcagagcttgttaaaaattcagattcctggacttcccagactaaatcagcagctttgggggtgggtctagaaatctgcatttctacattgctgggcaatt

SEQ ID NO: 497059 - DNA, 201 bp, Homo sapiens
tgtgagaccaagggcttttctgggcaggaacaaccatactggctgctgtggcaaggttagagcctgccaggtaactacagtgagacttccttttcatacakattgggggaactggcaagacaagttatcatcacctccacatagcaggtgagggaagggaagcaacagcagaggcattggtgttttgtatttagaagggca

SEQ ID NO: 497060 - DNA, 201 bp, Homo sapiens
gagattgccaggatctagagagaggcaggaatgggaagggacagtgactactaatgagtatcgggtttcttttcagagtaatgaaaatgttctggaattakatattggtgatggttataaaactctgtgagcactctaaaaacactgaattatatactttaaaagggcgaattttatgatatgtgagtaatatctcaataa

SEQ ID NO: 497061 - DNA, 201 bp, Homo sapiens
ggtgatgatagaaaaacttcctatcagatactatgcttattacctgggtggcaaaataatctgtgcactaaactcccatgacaggccatttacctatatarcaaactggtatatgtgcccctgaacctaaaataaaagtttaaaaattaattaattaaacaaataagagaagaggtcttgccatgttgcccaggctggagt

SEQ ID NO: 497062 - DNA, 201 bp, Homo sapiens
aatttaattttgttcctttagaaccatttaacagagcatattattatgccattaattattattagtagtaataataatgatagtcattatgtattaagggyctactctgtgttagcactgtgctaaatgttttgcatacattatatctaacttttacaataaccctctaaagtaagttgtttcatcccccttttatacctg

SEQ ID NO: 497063 - DNA, 201 bp, Homo sapiens
gctctaatgtataattggaggaaaccttcctgtaagtatgatgggcatgcctacataacggctttgaaatacatgtgctggccattcatgaatttaatttkgttcctttagaaccatttaacagagcatattattatgccattaattattattagtagtaataataatgatagtcattatgtattaagggcctactctgtg

SEQ ID NO: 497064 - DNA, 201 bp, Homo sapiens
taacccacttctacccaattactgacattgatgggagttaaatgtaaccaggactctttgtttatatatacatctggttttccctgttccgtatgcctaartcctccctccattgcttctgtttagcatttaatgtaaatttccaaattaattcaagaagaaaatttgaaatatataagatgagggcattaggtgatctct

SEQ ID NO: 497065 - DNA, 201 bp, Homo sapiens
gcaatatgagggatttgggataggcataaggaagtatctactaacaagcaaaattggagtagactactgagaaatatggtagaatttccatctctgaggaytgaaaatgtatatattctattcctttcgagtgttttaaggtaaatcttgctcaaagatgttgacctgaacttgatggcttcctggaaatccattcattgt

SEQ ID NO: 497066 - DNA, 201 bp, Homo sapiens
tagcaatggctggagtggctgggatgcagggcaccaagtccctaggctgcacttagcatggggccctgggcccagcccatgaaaccattttttcctcctargcttctgggtctgtgatgagaggggctgccatgaagacctatgacatgctctggagagattttccccattgtcttggggattagcattcagctccttctt

SEQ ID NO: 497067 - DNA, 201 bp, Homo sapiens
ccttttagcaatggctggagtggctgggatgcagggcaccaagtccctaggctgcacttagcatggggccctgggcccagcccatgaaaccattttttccycctaggcttctgggtctgtgatgagaggggctgccatgaagacctatgacatgctctggagagattttccccattgtcttggggattagcattcagctcc

SEQ ID NO: 497068 - DNA, 201 bp, Homo sapiens
aggttcccaaacctcaattcttgacttctgtgcacctgcaggctcaacaccacatcgaagctaccaaggtttggagcttgtactctctgaaactatgcgcygagctgtaccttgaccccttttagcaatggctggagtggctgggatgcagggcaccaagtccctaggctgcacttagcatggggccctgggcccagccca

SEQ ID NO: 497069 - DNA, 201 bp, Homo sapiens
tggccaactaacacaaaaccaattcactaaacaaaaacacaacaaaggaccctcagagagtccacttcactccctgctacctccactggagcaggtactgktatcctcggctgcaagacctgaagacagatcacatcacaggacgctttgcagacactcgccagtaccaacccagagcccaagagctccactagatggcta

SEQ ID NO: 497070 - DNA, 201 bp, Homo sapiens
ctttttattcactgtatttattataattgtataattatatatttatttgtatgacttttttatttaatattagtggcccacactagattacaggttccccratatctaagaccagatctgttttgtttattgctatatctacaatacctggtatagtcctagcataatcagcaaatattcttggtatgaactttggatcaa

SEQ ID NO: 497071 - DNA, 201 bp, Homo sapiens
attacatcaaacttttagtgactgaagtgttgtaataatttgtgattttcaaagatactcaaaatttaaggtgaacagtgagccagaacacaagatgatayacctaatctcattcaccagtctgttttgaccaagtcaagttgaggcaagaatgctgggaacaagcttttctgattgaatgtgttaatttagcccgccttc

SEQ ID NO: 497072 - DNA, 201 bp, Homo sapiens
gtccaagtgtctgctgggaatctcctagatgttgtgggctaactccaactcagaatgcccatgtctgaactgttagtatttctttccagaatggccatttsttacacttcccctaccttggctaacaggaaaatcgttatctactcagttgcctaaatcacaattttgaggcgtagaaactttccctcgtcctttcctccc

SEQ ID NO: 497073 - DNA, 201 bp, Homo sapiens
aatccatcctccatactcttgtcaaatctctttctttaaagacagttctaatcatatcactctctggtttaaaaacctttgatgggtccccattaacacayaagggataaagtctaaactccttagcttgtcatgccagggtttcagagtctggctctgatctacttattctcatctcattacctgccataatttccccct

SEQ ID NO: 497074 - DNA, 201 bp, Homo sapiens
gcccagaagagccaaaacaatcactagagtttggctctcaggaagccgcattcctgagagcggagcaccacctaagggagcaccccgtgtcccaaagaatytgaacagcagcccttgaatcccagatcttacctctgacatcgtctacccaaatgagaaggaactagaaaaacaattctggtaatatgacaaaatgaggtt

SEQ ID NO: 497075 - DNA, 201 bp, Homo sapiens
ttctttagagatgaaaaacacatagttaaaaactgtgaaaaactgccctgcttatatcagaaaacttatacttctctgttgaaaaaataggcaactaaaayagtttacaatataatctaaaaggatgaattggtggaattttcagtataactggaaggtatgatgtgttagatagtggggagagtgtatatatattatcaa

SEQ ID NO: 497076 - DNA, 201 bp, Homo sapiens
tacacaaggaaaagtacagaagcaacacttaaggtttccttttgtagaaaggtgagtaggtgttggcatggttaagttggagataaagcagaatccaactrcaggaaatgcttggatgtgaaagaacatggcacatttgagggactgaaagttgttgactgtatctggagcccagataatttctaaggtctcttaattcac

SEQ ID NO: 497077 - DNA, 201 bp, Homo sapiens
ggtggaggtatagggagaggacagatgctgagggaggatatatcagacctcaggcatctcattaaaaaagataaggccattggccaagaatgaggaaaaargagataggagaaaaggtgtaaaatagttgcagtgggaaataattaaaatgaggtaaactcagctgaggacagatagttgattttatttcttgcctttttc

SEQ ID NO: 497078 - DNA, 201 bp, Homo sapiens
gaaaaagtttgaaatattgtgagaataagcaaaatgtgacacggacatgaaatgagcacatgctattggaaaaatggcagtcatagacttgctcagtgcakggttgccacaaaccctgaatgtgtaaaagaccacaatatatgtgaagtacaggtgaggtatgcctgtacgtagttggtgcctgtagttttgtatccattg

SEQ ID NO: 497079 - DNA, 201 bp, Homo sapiens
cactctgcccactgttagatgaggggattgtaaatgttagagagggccggggtagaggagtactctttttaagaaaagtagttgactttgataatgaaaargtatcatcatgattatcgtcatgctgttgagtgctttactacatttcaggcacgataaggttatatatttaatacttacaactttatgagcagctgtcgt

SEQ ID NO: 497080 - DNA, 201 bp, Homo sapiens
agtaatatcaaagattgctgatcacagatcatcataacaggtatgacaataatgaaaaagtttgaaatattgtgagaataagcaaaatgtgacacggacaygaaatgagcacatgctattggaaaaatggcagtcatagacttgctcagtgcatggttgccacaaaccctgaatgtgtaaaagaccacaatatatgtgaag

SEQ ID NO: 497081 - DNA, 201 bp, Homo sapiens
catatccctttcctgcctgaggctgcttcaacaaacagcaagtataaactgaaaccctatctctttgcggatcaaacacacagcttgaatacattgataartaactttaaaaaaaaattgtttagcctgtggacctatttatcagaatgctatataaaattattgttttccagtgacccaattagttgaaatattctttct

SEQ ID NO: 497082 - DNA, 201 bp, Homo sapiens
ttaatcagaaatactcttaatggcatctagaatggtaaattctttccagaagaatttcaattttctttatccagatccatcagaagaatcacaatctatgscagaaatagcattacgaaatgtatgtcttaaatagtgaaacttgaaagttgaaattattccttgatccatgggctgcagaatggatggctgtgttaagag

SEQ ID NO: 497083 - DNA, 201 bp, Homo sapiens
gcagtggcatgatcatagcacactataacttcacactcctaggctcaagtgatcctcccaccttagcttcccaagtagctaagacaagaggtgtatgccaycacatccagctaattttttattttttgtagagatggggtctcactatgttgcccaatctggtctcaaactcctggcctcaagccatcctcctgccttagc

SEQ ID NO: 497084 - DNA, 201 bp, Homo sapiens
gatatatttaagtcccttattttgatctaatatatttgataaaatagtaatcttttaatagtagccctgttatacataataataatacctatcagataggkttgtggtgaggattagaccatatagtaaatgtaacatgtctagtgctgtgccctgaacttaacacgtgcttattaaatattaactattgctattaccatt

SEQ ID NO: 497085 - DNA, 201 bp, Homo sapiens
gagaaattggctaaaataaaggggctacaggccccatgcaagtccaaaatccagtaagacagtcaaatcttaaagttccgaaatgatctcctttgactccrtgtctcatgtctaggtcacactgatgcaagaggtgggcttccatggccttgggcagctccacccctgtggctttacagggtacagcctccctcccaggtg

SEQ ID NO: 497086 - DNA, 201 bp, Homo sapiens
agcatcagactgggttcagggcaaggtctgggggctttagccccttcaaagccaggcattaaatctttccagcctttggccttgtgacctatcttacccargttgttagtgacctcaagctgtcctctgtagaatcactttgtacctgctcctccatcagagatttttagtgcattgagggctagaatcaagtctcatcct

SEQ ID NO: 497087 - DNA, 201 bp, Homo sapiens
aattgattttgtacatgttttttccctcaacaagaagcaaacttattgaggtctgggaccatatcttcaagcagcctccagataattggcttggcacaaarttgcatgcatctcttgttttctcataactggatggaaacaatgatatttagatttatcagaactgctacagagggctaaagggatgcaaaaacacttggt

SEQ ID NO: 497088 - DNA, 201 bp, Homo sapiens
tcaacaccctgtgatttgctctaataaccacaagaatcagaatgtaggtgatccttgctgaatgaaagcaatcctaaggctaaatgctctttgaatggggaaaaaaaaaaactctctcaacagatgaactatgtgtgaaactttctaacagagcttaggagtttgaagtttatttacctagagcttcagttttattaattc

SEQ ID NO: 497089 - DNA, 201 bp, Homo sapiens
cagcactttgggaggccaaggcgggtggatcacctgaggtcaggagtttgagaccagcctcatcatggagaaacctcgtctctactaaaaatacaaaattrgccaggtgtggtggtgcatgcctgtaatcccagctactcgggaggctgaggcaggagtattgcttgaacctgggaggcagaggttgtagtgagccaagat

SEQ ID NO: 497090 - DNA, 201 bp, Homo sapiens
ttatggttttaggtctaacatttaagtctttaatccatcttgaattaatttttgtgtaaggcaatcagagaaatgcaaatcaaaaccacagtgaaatatcrtctcacaccagttagaatggcaatcattaaaaagtcaggaaacaacaggtgctggagaggatgtggagaaataggaacacttttacactgttgatgtgat

SEQ ID NO: 497091 - DNA, 201 bp, Homo sapiens
cagggatctagaactagaaataccatttgacccagccatcccattactgggtatatacccaaaggaatataaatcattctgctataaagacacatgcacasatatgtttattgcggtactattcacaatagcaaagacttggaaccaacccaaatgtccaacaatgatagactggattgagaaaatgtggcacatttacat

SEQ ID NO: 497092 - DNA, 201 bp, Homo sapiens
tgtaattttgtagagatggggtctcactgtattgtccaggctggtcttgaactcctggcctcaagcgattctcccatacgcatatatatcctcccacatakgtgtgtgtgtgtgtgtgtgtgtgtaaaatgcagtgtttttaggaaaaatataaagaggtcaacttactagctttcaaaactaagaagaaaagaagaacac

SEQ ID NO: 497093 - DNA, 201 bp, Homo sapiens
agtacaattctctgaagaaggggagaaggaaggaatgttagtgtcactggaaacttctaaaaacaatgaacagatatttgaacaacagatattttctttcttttttttttttttgagatgaggtctgtctctatttctctggctggagtacggtggtgtgatctcggctcagtgcagcctccgcctcctgggctcaagcca

SEQ ID NO: 497094 - DNA, 201 bp, Homo sapiens
gtaattttgtagagatggggtctcactgtattgtccaggctggtcttgaactcctggcctcaagcgattctcccatacgcatatatatcctcccacatatgtgtgtgtgtgtgtgtgtgtgtgtaaaatgcagtgtttttaggaaaaatataaagaggtcaacttactagctttcaaaactaagaagaaaagaagaacact

SEQ ID NO: 497095 - DNA, 201 bp, Homo sapiens
caattccaaatacagttcaagaaaccatctttctcctatggtttacattcattcttgtagcattccttatatttcagcactgccctaaacactggcttagttttttttttttccaacttttattgtaagttccggggtacatgtgcaggatgtgcaggtttgttacataggtaaatgtgtgccatggtggtttgctgtatg

SEQ ID NO: 497096 - DNA, 201 bp, Homo sapiens
ttcatcatctctagccatttctagatacctttattcttttcttctcttgatgtcttcattttatctgtctcacttccatgacttcttcttcttcttcttctttttttttttggatgaggtctcactctgttgcccaggctggagtgcaatggtgccatcatagctcactgcaacctctgcctccgaggctccagcgatcct

SEQ ID NO: 497097 - DNA, 201 bp, Homo sapiens
atacctggtaacggcattgctggttcaaatggtatttctgcctctaggtctttgaggaattgccacactgtcttccacgatggttgaattaatttacactcccaccaacagtgtaaaagcattcctattagtctgcaacctcaccagcatctgttgtttcttgactttttagtaattgccattctgattggtgtgagatgg

SEQ ID NO: 497098 - DNA, 201 bp, Homo sapiens
catatacgactccttccatgacatcctgtttccctggccaaaagtagttttttctatatgcgtcataataatgtattttgagatattgctagtatcaaacatatttcattatgtattttagttgtacatgtctttttccctcaggagatcacaatcactttgagagcagtggcaatatcatatccattttcatatacttct

SEQ ID NO: 497099 - DNA, 201 bp, Homo sapiens
tacctggtaacggcattgctggttcaaatggtatttctgcctctaggtctttgaggaattgccacactgtcttccacgatggttgaattaatttacactcccaccaacagtgtaaaagcattcctattagtctgcaacctcaccagcatctgttgtttcttgactttttagtaattgccattctgattggtgtgagatggt

SEQ ID NO: 497100 - DNA, 201 bp, Homo sapiens
aggcagcagaattgcttgaacccaagaggtggaggttgcagtgagccgagattgtgccactgcactccaacctgggcaacagagcaagactccatctcggaaaaaaaaaaacaaaaaaaaaaaaacaggaaaagaaaaagaaatacatcatgttttaattaaaggaaaagtattgaaaagcacactgatactagagaattt

SEQ ID NO: 497101 - DNA, 201 bp, Homo sapiens
cctggtaacggcattgctggttcaaatggtatttctgcctctaggtctttgaggaattgccacactgtcttccacgatggttgaattaatttacactcccaccaacagtgtaaaagcattcctattagtctgcaacctcaccagcatctgttgtttcttgactttttagtaattgccattctgattggtgtgagatggtat

SEQ ID NO: 497102 - DNA, 201 bp, Homo sapiens
ctcaatgcacatgaccttggcattgcttcaaaggtggcagctcatccaagtaggcagaatacctggtctctcagcactgcttttataatgccctttttctmacgttgagctggtgaccatgctgccctcttcattttgcagtaatcagggttgtcttcttttttcatatccctttcctgcctgaggctgcttcaacaaaca

SEQ ID NO: 497103 - DNA, 201 bp, Homo sapiens
tcatttttcttgaataaacacttctcgattattgcaagtctttggttaatttccagagctccagaagaattgattctgacaattttgctggtgttcttgttgcttttaggaaacagcagattttctaagattcttacactaccattctaaagttgctttagtattcttctaaagttgaatactcctttttgttcgttttta

SEQ ID NO: 497104 - DNA, 201 bp, Homo sapiens
acaaataaataatagaagggaaaaggatggattagggttaaaattgctaaaatttagagaattaaagttggtttatgtttttgaatatatatagaggttgaaaaaaaacttaatcattttcttgtttaggcttatgggataaaagcacaaaggtctgctgatttctcaccagcattcttatctactaccctttctgctttg

SEQ ID NO: 497105 - DNA, 201 bp, Homo sapiens
aaagccctttggtctccagagttgatgaacattgcattaatctacagcattaatattttatattgaagacttctgagcaggtcattttgaacacaaaaaarggtaaactttggatcatgtattccctggttctagaaattaaaggtaaccaaccttgaaataaatagttatagcagtgccaaaagaggatacgattatgga

SEQ ID NO: 497106 - DNA, 201 bp, Homo sapiens
tgctaatttttgtatttttagtagatacaaggtttcaccatgttggccagcctggtttcgaactcctgacctcaagtgatccacccacctcagcctcccaragtgctgggattacaggtgtgagccaccacacccagccatatttctcattcttattttaggctgatgaaaatactaaatatttcaacacctctgtatcat

SEQ ID NO: 497107 - DNA, 201 bp, Homo sapiens
agcagccactctctcactctgcatttccaccttccccaagcccttggaaatctctatttgctatctctatagatttgcctgttatggacatttcatgaaaktggagtcatataatgtgtgttcttttgtgactggcttctttcatatagcataaagttttcaaaattagtgttgcagcatgttatcagtattcttcattcc

SEQ ID NO: 497108 - DNA, 201 bp, Homo sapiens
aaattaaacaagtcttgtttatatgttttgtgtatgtgatcacaaaaaatagcaaagaatactgttctatggactcttagctgtggtggaaagaaccattkaaactctctcagcctttagttcttcattaggaagatgcctttcttactgagggttgtaatgattgtgaagtccagttttctgacttctccattagggaat

SEQ ID NO: 497109 - DNA, 201 bp, Homo sapiens
aatctgactaattatagtgtacttggtataagataaatttgtataggaatccttttggagagagttaatttttggatatgccagaaagaccatcctttaasattttttttacatatgtgaggatgattaggcaattactttgagtgtaagatatggtgcactttcaaagataaccagaagatataccagttgtatgctaga

SEQ ID NO: 497110 - DNA, 201 bp, Homo sapiens
attgtgcccgatacccagtggtaacctaccaatgattgttatgaaaatgatggtgatgatagtataggggagagagtgtaaaccaaaagttgagatctgtrttctgttttcagcttcattttaatggcctactggaagaccaggtacattatttctgctctttttttttttttttttttagtttctccagctatacatgaa

SEQ ID NO: 497111 - DNA, 201 bp, Homo sapiens
agagcagaagctacctctatgctcctgctgagtcaggcaatgcctatacctttaattctaccagaattgaagtaacaaatttgtctactttagggcaatamataaagtcaatatacacctgactacaaagcttcgtagactatcaacatcagttacttctgacagcttggttgtagatgtgaaaggaaatgggttcattgt

SEQ ID NO: 497112 - DNA, 201 bp, Homo sapiens
ttcaaaaaggagggattttgcccccagaggaaatttggtaatttctggagacatttttttattgtcacaactgtgcacagaggtgagtgtggtgctactgyatagaggctaggatgcctatacctcctgtagtgcacagaacaattcctcacaacaaagaattacccagcctaaaatgtcagtagtggtaaggttaagaaa

SEQ ID NO: 497113 - DNA, 201 bp, Homo sapiens
ggctgagttggtcacttgcttccttctccttctttgcctcaggtgtttcctgtgactagatcctgttggacactagtgttctcttctagatgttctattakaggtgtgattattttggttatatattagtaattttggttctttctggagagggtgagtgtccaatctctctagttagccaccttgaatacatctctgctg

SEQ ID NO: 497114 - DNA, 201 bp, Homo sapiens
gccacagctggctattattgagactatggaaagagaaagagcttttgccctgatttatcccataaaatgaataataggccacattcagggagacctagctygtggcagactattctcaccacacccttcacacagcctttttttttcttctcccatcccaagccaccatcccaacctgccttgactaaactcaatgaacag

SEQ ID NO: 497115 - DNA, 201 bp, Homo sapiens
tggctgagttggtcacttgcttccttctccttctttgcctcaggtgtttcctgtgactagatcctgttggacactagtgttctcttctagatgttctattwtaggtgtgattattttggttatatattagtaattttggttctttctggagagggtgagtgtccaatctctctagttagccaccttgaatacatctctgct

SEQ ID NO: 497116 - DNA, 201 bp, Homo sapiens
gcctatcctagtgtatttccaaggccccaggttaaatcccacctccttcccgagcctttcctattgtcttactcacttcaccaatctctcttgcccctaascttctacagttctgaaacccgatacaaaaagaaaaacttttggcacaggaagcgattgaatagaatcagataaatactaaagtcataaacataaaatctg

SEQ ID NO: 497117 - DNA, 201 bp, Homo sapiens
gagtcaggcattgggtagctcgtggccattagtattattttcaaagtcagaaatcattggagaagaatccccttctaatataaatttttaaactattcttytgagtgtttaggaagctgtgatctctgctgtgataatcctagaagacattgctcaagccacagctggctattattgagactatggaaagagaaagagctt

SEQ ID NO: 497118 - DNA, 201 bp, Homo sapiens
cttatagtgaagtttggtgggacagggatgctaggcaggccactttttgggccctattggtggtagcggtgggctgatcatacttgttcttaggccccagsacagtgtgcagtggcactagttttagtgggaccaagaggttcaattcttggctccccaggtggcttgctcagatgctgaggtggtggtggcagaggtggg

SEQ ID NO: 497119 - DNA, 201 bp, Homo sapiens
tttgaaaggcagacttaaaatgcttgcctcttttcagcgaatctgattttacatttggctgctgatcattcagcccctggcatttgttcatacattggaarcccaaagcttccacacagttgagtctacagagcagagtaatattaacaagacttatcttggttatgatgccaaaaccatggtgccacttcatttcacacc

SEQ ID NO: 497120 - DNA, 201 bp, Homo sapiens
aggagtcaggcattgggtagctcgtggccattagtattattttcaaagtcagaaatcattggagaagaatccccttctaatataaatttttaaactattcwtttgagtgtttaggaagctgtgatctctgctgtgataatcctagaagacattgctcaagccacagctggctattattgagactatggaaagagaaagagc

SEQ ID NO: 497121 - DNA, 201 bp, Homo sapiens
ctgaagatctgactgaaggaaagttgtcttgggatcagaattaaggttcctttttcttgttttcgtttccgagttgcaagttatgcccctttttagcgttyccatacccagctgtctacattttaagcaatcgttatatggaattatatcttaaatgtaaaataacaagaattcatttaaaataactgctttccctccaga

SEQ ID NO: 497122 - DNA, 201 bp, Homo sapiens
aaatcctcacactctgggcaaggtgataattgaaagcattctccaccatgacgtgctctccagtgccagggcagcaggcagctgggacagctaaagctggrgaaggcctgggccggggcccagctctccctctgaccaggtgaattttggtggtcaagtcacttctctgcctatgaaacgggaataaggattgtatccatg

SEQ ID NO: 497123 - DNA, 201 bp, Homo sapiens
ctctccccttgaaccacccttccgagtctctggttatctgttgatctattctctatgtccatgagatgaagttttttagctcccacatgtgaatgagaacrtgtggtatttgtctttctgtgctgggcttattttgcgtaacataatgacgtccaattccatccatgtcacttcaaatgacatgatttcattcttttttat

SEQ ID NO: 497124 - DNA, 201 bp, Homo sapiens
ttttatatatttatggggttcatgtgagagtttgctgcatgcatagaatgtgtaatgatcaagtctccatcatcatgagtgcttatcatttttatgtggtrtcatttcaagtcctctcttctagttactctgacatatacataatattgttactaagtgtagtcactgtggtctgctatcaaacattagatcttgtttctt

SEQ ID NO: 497125 - DNA, 201 bp, Homo sapiens
cttaaataattaagtattcatgcttggaaacccaacttctgttgcagggttaacatatgaactggtgattaactgacaaaaattaagcatatgtgtttggrtcatggtttctgtggaggccatagatttgctttatggaaacttgagcttctgtataacagagtttgaaaccattacatgatcaggtcatttagtaggaca

SEQ ID NO: 497126 - DNA, 201 bp, Homo sapiens
attcacataatcagtcattgttgatgcctgttatatccaaggcactctatattctatatgctttatattctatgtactctatattctggagacatcaagawgaaaagttcagattaaaattttcctgactccatttttaaaaagttagtttttacttttatggttaattgtcttaatttaacaagtgtccatttaggatgt

SEQ ID NO: 497127 - DNA, 201 bp, Homo sapiens
gatgctttgttacatcctcttttcaagtcagctttccaccagagcttcccaagaacagagaggcctgcctcaaatatttggttcaaattatgcaacataarttaccttatatctcttttcctgttgcttatctaaaaggacagagactcagaggcagtttaaaagtggaggtgggcatatctccaaggcgatttatgactt

SEQ ID NO: 497128 - DNA, 201 bp, Homo sapiens
gaaaaaaatattttcttgtgttcccttccagtcaatctcaagcctccttaggcaatcactcttctgatttctatcactacagattagtttttcctgtgctygaaactcacatacgtagaaatcaagcactgatatctggcttctttcagacggcctttctttttagatttatccatgttttgtgtgtattttttgttaatt

SEQ ID NO: 497129 - DNA, 201 bp, Homo sapiens
tctgcggacctgctgaaggaagtgaactacagggcattgttccattccctgagaacagcaaacaccttaaagtttgtattatgtggagatcaaatcagttyggtagccttctcatatgagataatatagatcagtgttcctcattcattttttcattattgtctcctaagaagcctttttaacaattttttcttaaccaca

SEQ ID NO: 497130 - DNA, 201 bp, Homo sapiens
caaaagggattctggacagggaaagacaaatgtcaactaaaatgttactattctcacttcatttatgaggaagttgaggattaattaagtgaattttcacraggctgcatagctaatgagtgataggatcttaactttgacccaaatctgcctaaatctaaagcccatctcttttctccacaccttgtatccctagaacat

SEQ ID NO: 497131 - DNA, 201 bp, Homo sapiens
atttttcttgaataaacacttctcgattattgcaagtctttggttaatttccagagctccagaagaattgattctgacaattttgctggtgttcttgttgcttttaggaaacagcagattttctaagattcttacactaccattctaaagttgctttagtattcttctaaagttgaatactcctttttgttcgtttttatg

SEQ ID NO: 497132 - DNA, 201 bp, Homo sapiens
gtttttgttgttggtttttttcctttccaacttttattttaggttccagatatacatgtgcaggtttgttacatgggtaaattgtgtgtgtgtcacagggsttttgtgtacaaataattgtgtcacctgagtaatcagcataatacccaattaagtagtttttaaaatcctcaccatcctcccactctccacccttaagta

SEQ ID NO: 497133 - DNA, 201 bp, Homo sapiens
gtttttgagtccatgtgtactgaatatttagcccccacttataagtgagaacatgcagaaccaaatactgtttttctgcattatatcttaggattatgacyaccagctccatccatgttcctgcaaaatgacatgatctcacttttttaatagctgcatagtattccatggtatgtatgtaccacattttctttgtctaat

SEQ ID NO: 497134 - DNA, 201 bp, Homo sapiens
cccaattccgcaagccatctgattagcccccttgaaggtagctcaagttactagtttcttttatttccttccataaatatttgatatgcataggagaaagwtatatatatatatatgtatttatgtatgtatgtatgtatgtatatgtatgtgagaatgaatggataaataagcattcctctttcatacagttacttgctt

SEQ ID NO: 497135 - DNA, 201 bp, Homo sapiens
ttagcccccttgaaggtagctcaagttactagtttcttttatttccttccataaatatttgatatgcataggagaaagatatatatatatatatgtatttdtgtatgtatgtatgtatgtatatgtatgtgagaatgaatggataaataagcattcctctttcatacagttacttgcttaccatacctgctgttctatacc

SEQ ID NO: 497136 - DNA, 201 bp, Homo sapiens
ggagtattcttttcccctaaattttgcgctcgttgtatcataactgctggtttcttagcctactctgatgttgtgcagaaaattgtacaatacttaaaaaygtgatatctaggaaagaaaattagtagaaaaaagccattagaactgatatatattagcattggtttggtggttacttattaaagataaaaatggagaata

SEQ ID NO: 497137 - DNA, 201 bp, Homo sapiens
cagcatggaatgttcttccatttgtttgtatcctcttttatttcattgagcagtggtttgtagttctccttgaagaggtccttcacatgccttgtaagttsgattcctaggtattttattctctttgaagcaattgtgaatgggagttcactcatgatttggctctctgtttgtccgttattggtgtataagaatgcttgt

SEQ ID NO: 497138 - DNA, 201 bp, Homo sapiens
ggtccttcacatgccttgtaagttcgattcctaggtattttattctctttgaagcaattgtgaatgggagttcactcatgatttggctctctgtttgtccrttattggtgtataagaatgcttgtgatttttgcacattgattttgtatcctgagactttgctgaagttgcttatcagcttaaggagattttgggttgcga

SEQ ID NO: 497139 - DNA, 201 bp, Homo sapiens
atgagatcctggggcaactgacaaaaagctggaaaaattagaattcttatcaaagtcagctctcccagatctctgtctgtagtgcttggtcaagagagacrttagaaatttctccttgtcccttccttcccaaattcagattatcaggaaaaaaaaaaaaatgtctatattgtgactctctgactaaatctggctttaagg

SEQ ID NO: 497140 - DNA, 201 bp, Homo sapiens
ttctagatatacaatcatgtcatctgcaaacagggacaatttgacttccccttttcctaattgaataccctttatttccttttcctgcctgattgccctgrccagaacttccaacactatgttgaataggagtggtgagagagggcatccctgtcttgtgccagttttcaaagggaatgcttccagtttttgtccgttcag

SEQ ID NO: 497141 - DNA, 201 bp, Homo sapiens
tttttttttaaataagccttgtgacttacagtcctatgttaccactttgtctcaaagtgggaaggggagtgaatagaggcccatccctgatcctttgactwaccctagaaaaatgtgctttatgtgcagattcttattgccaagtcccctctggctcccttcacctcatttgtctacaccatcaaggaggaaggcctggtt

SEQ ID NO: 497142 - DNA, 201 bp, Homo sapiens
gccatagagtaataagtagcagaaccagaatgtgaagccaagtctaactctaaagcccatctttttcatacttgactatcctatatttttcatggatattstacaaaatccatatttttatagagtatgatgtcttcattacgctcctcaatctttgaagaggattttaaccctgctctttggttcagctattgctgaata

SEQ ID NO: 497143 - DNA, 201 bp, Homo sapiens
cagggcaaggtctgggggctttagccccttcaaagccaggcattaaatctttccagcctttggccttgtgacctatcttacccaggttgttagtgacctcmagctgtcctctgtagaatcactttgtacctgctcctccatcagagatttttagtgcattgagggctagaatcaagtctcatcctatttcatgtctcctat

SEQ ID NO: 497144 - DNA, 201 bp, Homo sapiens
attggacttatagttccacatggctggggaagccgcacaatcatggcagaaggcaaggaagagcaagtcatgtcttacatggaatggcagcaggcaaagastttgtgcagagaaactcccgttcttaaaaccatcagatctcgtgagactcattcactatcatgagaacagcacaggaaatatccacccctgtaattcagt

SEQ ID NO: 497145 - DNA, 201 bp, Homo sapiens
gtcttgctctgttgcccaggctgaagtgcagtggcacaatcttggcttactgcaacctctgcctcccaggttcaagtgagtagctgggattgcaggcatgyatcaccatgcctggctaattttttgtatttttactagagatggggtttcaccatgttgtccaggctggtctcaaactcctggcctcaggtgatccaccca

SEQ ID NO: 497146 - DNA, 201 bp, Homo sapiens
atgcaccagtgagtttgttacttctcagcaaaccttgggggagatatctgaacctaattgttggtgttctcccttagatttgggctttattgcctcttgcwgtcagctttgggccctagttactgattctggaaaaagtggaaaaataccccttaacatcttgttagattatgaataggtaagtttaggaaatattattgc

SEQ ID NO: 497147 - DNA, 201 bp, Homo sapiens
atatattttgataataagaaaataaatttaataaatatatattacccagtggttaccatttcctgtgatctttcctttgtatagactgatttactgaatgmgatttacctgaagaattttctctatcaggtcttgtggtgtaggtctccttgtgatgaattattttagcttttgtttatctgagaggtctttattttacct

SEQ ID NO: 497148 - DNA, 201 bp, Homo sapiens
aagccacaggggtactaaaaccacaatgcgaatgtcatgttaatggcattataatgagttgggccaagttaaggacatttaggttgacttattgcgcctgygcctaagttgggatggtcccttctgagcaacatcctggcatgagggtaagttcttaatcatatttcttctcattagctacagggacagtgcaggtgcagt

SEQ ID NO: 497149 - DNA, 201 bp, Homo sapiens
tttcttacataggtcttgtacatattttgtttggtttatacctaagtatttcccttttgttgatgctagtctaaatggtattgtgtttttaatttcaaatyccaattgctcattgctagtatataactaagcaattgacttatgtacattaaccttatatcttatttgtttttggatttgtgtttttatgattccatttac

SEQ ID NO: 497150 - DNA, 201 bp, Homo sapiens
tctgatgataaagggttaatatccaaaatatataaataactccaaaactcaatagtaaaacaagaacaagcaagcaaacaagagacaatacaattaaaaartgggcaaaagaactgaatagaaatttctcaaaagaagacatacatatggttcacaggtataagattcacaaagttactaatcataagggaaatggaaatc

SEQ ID NO: 497151 - DNA, 201 bp, Homo sapiens
agaatatttctccacttatttagatcttcgatttctttcatgaaagttttataattttcttacataggtcttgtacatattttgtttggtttatacctaartatttcccttttgttgatgctagtctaaatggtattgtgtttttaatttcaaattccaattgctcattgctagtatataactaagcaattgacttatgta

SEQ ID NO: 497152 - DNA, 201 bp, Homo sapiens
tgttattgtagtatcttaatgggtctgcttctctcttttctgtatcggtaatagtacatatgggtacataccattgctacatcattttcccaaagtgtatytctgatcacatccctcctatgctcagaagcattgtatggtaccatgatgcttatagaattaagccactagactataagcagtatgggggcagagaaacta

SEQ ID NO: 497153 - DNA, 201 bp, Homo sapiens
aagtgcccacttcattggcttatatacattaggttttcaataaatatttttatataatggtaaatgaagaagttgttctttatattttaaacaactcttayggaaggagattacaacacagctggaaggaattattgtgagagtgaaacatggaaccaaaaaagataaagcaagggaaattaaaaaaaaaaaaagagcttt

SEQ ID NO: 497154 - DNA, 201 bp, Homo sapiens
ctcactctttcctacttctccacatcttcacacaggttctttcctctccatggaataatagtcttccttccccaatcttcaccttgccaattgctattatyctatgggtctctgtgtaaaaatcactcctttaagaaaattagatctccccttataattcctcttcctcctctttttattcactgtatttattataattgt

SEQ ID NO: 497155 - DNA, 201 bp, Homo sapiens
tttgagtatgttcagactgcagttttgagaaacagttgtagaagtctggtagaatcttttctcctgaagtttatggaggaggtgtaagtgatactctgccrttgggatggaagatgcggaacctttgtctttttaaagtgttcacactagtattgaaaaaacagtaggctctgaagctgtttagagatactggataaaagt

SEQ ID NO: 497156 - DNA, 201 bp, Homo sapiens
taacacgtagtggatccttcatatgaaaccattaattgtcaggggactttgaggctcatataatttggcccataattatggctacataagtaaaagctgtraacactcttagggttttttttaaattgttttttcagtaaaggtgaaagtatagcagtgttgggagggggtgttccttgtgcctatttgtacacaatgtct

SEQ ID NO: 497157 - DNA, 201 bp, Homo sapiens
gaattatgtggagtaactttttcagtgttcttctttgttatagccttttggttgaagtctttcttgaaaaacaaaaaaaattaaatgaataaaatgttctrtatttaattaattaagtggtgtattatttatctattgtttcattaacaaattgtctcacagtttagtagcttaaaacagcaaatacatattatttcacat

SEQ ID NO: 497158 - DNA, 201 bp, Homo sapiens
taaatttgttccttgagttagaaatataatattttaaatccatgcttaatttaatttagaagacatctccaaggcctaaaattgacttgctgttttgtaartcaacatgacaggataaacagaggccatagtttatttgggaagcagcatgatcgtcatgatttaataatagtgataattatatgtaataagtaaaagtag

SEQ ID NO: 497159 - DNA, 201 bp, Homo sapiens
gcaaatagtttccctaatcaaaaatttacacttttcccccaaaccctcaggatttggctgctctgcctgtgccaatgccatctcatttcttgatttcctcmcttacctcatttccttcttccatttcaatccctgtgcctctcttaagctcttttcctggatggttatttgatccattttattctcactcttcacacctct

SEQ ID NO: 497160 - DNA, 201 bp, Homo sapiens
ttctgacaccagtgtggaggtgaggagccagtgctgccccagagccttcttgcttaacaagctaaagaaccatctgggttggcagcctctggggcacaatrtcatggctccatgagccctacttccctgactccttctggttatcttgtttccttttcctgtcctgtcctgacatggtcttcctgctggggaccagacctt

SEQ ID NO: 497161 - DNA, 201 bp, Homo sapiens
ggggtaaattccagcactgttagaagagtcagcccacaatgtcagatgtacaaaactgctttgtggatgaggaaggatctgcacagaagtgctcaggatayacatctgtcctctgctgtggggcaggagaccccaaccacagagatgcttaggtgaatatctggcctgaccctagaggagcatattgtcactgctgtccat

SEQ ID NO: 497162 - DNA, 201 bp, Homo sapiens
gctgcccattgctagtggtaattagtgctatggttctgatagaagctagctccagacagaatcaaaaaccaagatgcattggccagtgatatttaccctartgagagcaagagagcggcagttgtggcaagaatttgacagagaagattgaggtagggccgaaggagacctacagaatttcctaacagaatgagacaatca

SEQ ID NO: 497163 - DNA, 201 bp, Homo sapiens
gtcatcaaatttgccatccacaattgaggcatgtcacaaaatgagcaaaggagtccttttctctagagtgtaactgccagaatgggccaagaaaggtaatrttggactaagacttgtttctgagaaaagtttttcttccagattcaagactgacactgagtgtacaatgccacattgacttccaatggcaaacagcacata

SEQ ID NO: 497164 - DNA, 201 bp, Homo sapiens
aaattgttctttgaaaagtatatatggaaacagatttttaaaaatgtataaatagataaacatgtataagcagagttttaaatgtatagaaaaacagattyaaaaaacatgtccaccaaatggacatcttttcctactatattcagtaacctaaatgaccctatcccttctcagcttatcttaattttagtatacagttgc

SEQ ID NO: 497165 - DNA, 201 bp, Homo sapiens
taatatttgcccatgagaaaggaacagaatgttctctacctttctccagccatactttgaatcctggggaatcagcatttcccagaaagatcaaactatcratgacataaagcaacagattgattccattgatgatctttttataatactgacgtaccacattcttccccatggcttttgcatttctatctttccatctga

SEQ ID NO: 497166 - DNA, 201 bp, Homo sapiens
gggtagaggagtactctttttaagaaaagtagttgactttgataatgaaaaggtatcatcatgattatcgtcatgctgttgagtgctttactacatttcasgcacgataaggttatatatttaatacttacaactttatgagcagctgtcgtcattatcgccactttacaaatatggaaacccaggcaaaaagaggctaag

SEQ ID NO: 497167 - DNA, 201 bp, Homo sapiens
ttgaattagaggttctaatatatatagcagaggttctagatgacctctttgttcaccttacagtagtgtcatttctctgcttgtttgcactgcacttacarcaaagacttttctaaattaaacaagtcttgtttatatgttttgtgtatgtgatcacaaaaaatagcaaagaatactgttctatggactcttagctgtggt

SEQ ID NO: 497168 - DNA, 201 bp, Homo sapiens
gtagataaaatttctgctctggtcacaatggatgccaagtgttataaaatgattgtgggagtgtgtttctatattggcattttgatatagaggcaggtaaragcaatgccaccttcctgcagagtactctaaaaccctttcttccttcattaatagttttcctttgaagataaaggaactgctttcattatgtgtgaagca

SEQ ID NO: 497169 - DNA, 201 bp, Homo sapiens
atttgagataagaatacctgtatctttcctaccacccacaaacaaacaagcaaaccatgggactccctttgaaaaaagtcaatatatccaagaaatcactrtttctgaatgagctcaagtagagagaactttctcttaagagggttccgctggaaattgccagctgaaaatacacaggtacaatgactcccacgctggaga

SEQ ID NO: 497170 - DNA, 201 bp, Homo sapiens
tgcttgaggggcgagcctgaagtacctagtaaattgttgacagaaccaatatcactcaagctgctgatccacacttgaatctgtaggcttttctcaaagtyctagttttgcatcttagaagtattgcatcttggaagtatttctttgcatcttggaaatattcaatgtttcctttctggtgataggattctcagtgtccat

SEQ ID NO: 497171 - DNA, 201 bp, Homo sapiens
tccctcttcattaagatgtttataaacattcaggactggtataaacatgcttggctatgacacagttaagctgacagggatataggatgtgaagtctataracaattattccttttttaccttagtgctccatgagagctagaagagacgctaaaacctagtacttttcacatcaaaaaacgtaaaatactaaggaataaa

SEQ ID NO: 497172 - DNA, 201 bp, Homo sapiens
agatgtttataaacattcaggactggtataaacatgcttggctatgacacagttaagctgacagggatataggatgtgaagtctataaacaattattcctkttttaccttagtgctccatgagagctagaagagacgctaaaacctagtacttttcacatcaaaaaacgtaaaatactaaggaataaattgaacccccaaa

SEQ ID NO: 497173 - DNA, 201 bp, Homo sapiens
tatgaaactaggttttcttaaaaagtcaggaaacaacaggtgctggagaggatgtggagaaataggaacacttttacactgttggtgggactgtaaactarttcaaccattgtggaagtcagtgtggcgattcctcagggatctagaactagaaataccatttgacccagccatcccattactgggtatatacccaaatga

SEQ ID NO: 497174 - DNA, 201 bp, Homo sapiens
cattgtggaagtcagtgtggcgattcctcagggatctagaactagaaataccatttgacccagccatcccattactgggtatatacccaaatgactataamtcatgctgctataaagacacatgcacacgtatgtttattgtggcattattcacaatagcaaagacttggaaccaacccaaatgtccaacaatgatagact

SEQ ID NO: 497175 - DNA, 201 bp, Homo sapiens
cctctgcctcccaggttcaagtgagtagctgggattgcaggcatgtatcaccatgcctggctaattttttgtatttttactagagatggggtttcaccatkttgtccaggctggtctcaaactcctggcctcaggtgatccacccacctgggcctcccaaagtgctgggattacaggtgtgagccactacacctggccaac

SEQ ID NO: 497176 - DNA, 201 bp, Homo sapiens
ctagaaataccatttgacccagccatcccattactgggtatatacccaaatgactataactcatgctgctataaagacacatgcacacgtatgtttattgyggcattattcacaatagcaaagacttggaaccaacccaaatgtccaacaatgatagactggattaagaaaatgtggcacatatacaccatggaatactat

SEQ ID NO: 497177 - DNA, 201 bp, Homo sapiens
tgaaagttctaggggcataaatactttcaggaaacttctaaacaagaacagattattttcttacattctgatagtcataatttaactgtggattttttttccttggagatagggaccctgttttagatactatattttatttcctgtcttccaagagagatttaaagatttatatgagcaacacctagcagatgcctatta

SEQ ID NO: 497178 - DNA, 201 bp, Homo sapiens
attcaagaaaacaaaaacaggtaagagatggttgataccctctggttgttcacagtctacttgaggaaacagataagcatgtaaaccggacttgcagtaaragcacagtgaatgaagtaagtctagaggagatggggggtcctggcactaaggaaggttctctagcgatgaatgaggcagagcatgaggcagagaggagtg

SEQ ID NO: 497179 - DNA, 201 bp, Homo sapiens
cacgtatgtttattgtggcattattcacaatagcaaagacttggaaccaacccaaatgtccaacaatgatagactggattaagaaaatgtggcacatatayaccatggaatactatgcagccataaaaaatgatgagttcgtgtcctttgtagggacatggatgaaattggaaatcatcattctcagtaaactatcacaag

SEQ ID NO: 497180 - DNA, 201 bp, Homo sapiens
gcattataaaatggttagcagcatcaccagcctctaccctctagatgccagtaacactgcgagttagacattgccaataaaatcaccctccagccaagaaycactgaactacatttgtctgttgcagcatttgggcccaggtgcttaaggccatgtgcagttagtagaccaccctgaaaggtgtctgccctggaaaaaaaa

SEQ ID NO: 497181 - DNA, 201 bp, Homo sapiens
ttaaacaaggtttattacagtgtgatccacagtcataaacttacttatttaaatagcaaaaacattgaacttaaggaagattaactgggaaattctttttmctttttaagttttagaataatttttaatactttttcacttagcttttattaattattttttaaaatccaaacagaagttacaagccttttaggtgttttg

SEQ ID NO: 497182 - DNA, 201 bp, Homo sapiens
cagggaactacatattcaacaccacatacaaaacttgagaaagcaaagtcttcaacagcagatgccaaagtggtttctttgtctttacagactagctctgygcatcacagagtggggcatggtgttccacatgggaaactgttaaaacagaaatcagaggagccatcggtgtcaatacccttcctacaaactgcattatta

SEQ ID NO: 497183 - DNA, 201 bp, Homo sapiens
cttccctcccctttgttcactgggatgggaaggacaataaagcggcaggctggagagactgaggggctggttagagatttctcaggctgctttttgaaacwcttgaaggagccggtccatgctattgttgtagtaaaatagaaagcggaactattctccttttgcaaaaaaaaaaaaaaaggaagaaaaaaagtaaatgaa

SEQ ID NO: 497184 - DNA, 201 bp, Homo sapiens
gaaagcaaagtcttcaacagcagatgccaaagtggtttctttgtctttacagactagctctgtgcatcacagagtggggcatggtgttccacatgggaaaytgttaaaacagaaatcagaggagccatcggtgtcaatacccttcctacaaactgcattattaagaggttcagggagtcttgggcacagaccaagccagga

SEQ ID NO: 497185 - DNA, 201 bp, Homo sapiens
gactatgaaggtcggggaatgagatataccaagcaatctgagcgtcttctgaaaatgctggccgcattgtctgtcctgagccagcagcagctattagggcmtaaagaaaccagcatttctgcttgtcccaacaacagttataataaagtggggagacaagtcacacacaggaaaaaacataagaattgatcccacagagtc

SEQ ID NO: 497186 - DNA, 201 bp, Homo sapiens
aggatagtttatagtttgaatggcagaagggtcatggggcattaattcagatcaaaaaaagggaggaatctatatgtatccacaaagatacatggcaagcrtcactttttttcctgaaatatattgggctagaaagctaatttacacttcccctcactagtatataatactatagaatcttcaggttagaaaactcaaaag

SEQ ID NO: 497187 - DNA, 201 bp, Homo sapiens
tttttgtaaatggtaaaaggtaggggtccagtttaattattctgcatatggctagctggtaatctcagcagcatttattgaataggaagtcctttccccatttttttattttcgttgactttgtcaaagatcagaggttgtaagtgtgtggtttcatttctgggttctctattctgttccattgatcactatgtctgtttt

SEQ ID NO: 497188 - DNA, 201 bp, Homo sapiens
tcacagagtggggcatggtgttccacatgggaaactgttaaaacagaaatcagaggagccatcggtgtcaatacccttcctacaaactgcattattaagargttcagggagtcttgggcacagaccaagccaggagatggataaaatgttaaaaaatcaagcaacttctgctacttctgaaaaggataatgatgatgacca

SEQ ID NO: 497189 - DNA, 201 bp, Homo sapiens
atatttgtaagtgaccaaggaccacacctctaagggtatccaattctctatctctaaatgatcatttcacttagattgtatttgttgaggactaatttgtrtatgaattaaataatgatgatgctttttcttgaagtatgtgtactttgaaaatcttaggccagcagatgctgccaagtgaataaattattccccagatac

SEQ ID NO: 497190 - DNA, 201 bp, Homo sapiens
taaaattttattattattatactttaagttttagggtacatgtgcacaacatgcaggtttgttacatatgtatacatgtgccatgttggtgtgctgcacchactggtcattttgcattaggtatatctcctaatgctgtccctccccccctcccccacaatgctgtcttttacattgtgtctctgccagattttggtgtca

SEQ ID NO: 497191 - DNA, 201 bp, Homo sapiens
gctctcctttgtataaaacaaacacacacacacacacacacagacacacacacacaaatgcatagcttatctttgttgtaaggttgtttccaggggggggttttgctgtgtgagaaacaggaaaaagagactttcttttcagtgcaaatccttttatgttttatcattttcaggctttgcctgttccataaaaataaaatt

SEQ ID NO: 497192 - DNA, 201 bp, Homo sapiens
ggtttttaaagagttttaacaggccagggcttgccagccacaactcataaaaatgttcttataattttaccctactctctaaaagtgctggataactgctsaggtttctctgccacttgggatgcaaagccaaattcacgtcactttcaaggttcactaatcagaatttacagcatttcttttgcagtcctcttcataccc

SEQ ID NO: 497193 - DNA, 201 bp, Homo sapiens
catctgaaagcgtgcttttaccatttcatttcaggcacttctggatccagctgtgtgatagccgcactaggaaatacctggagtcacagtgtgaatacccrgctgatcctccagtaccttgattcagagagaagacaggtgggtgctttgacagtattctctgactatgaaggtcggggaatgagatataccaagcaatct

SEQ ID NO: 497194 - DNA, 201 bp, Homo sapiens
gcacaacatgcaggtttgttacatatgtatacatgtgccatgttggtgtgctgcaccaactggtcattttgcattaggtatatctcctaatgctgtccctccccccctcccccacaatgctgtcttttacattgtgtctctgccagattttggtgtcaggctgatactggtcttatagaatgagttattgaggagtccctc

SEQ ID NO: 497195 - DNA, 201 bp, Homo sapiens
tgtgtctttgtataaaattgttcttgttttcctttgacagcttcaggctttgccttattaacagcagtgcttatttttcaaaaccctttgattgagacaaraaaaaaagcaggttcatctagcctaggcagaactggaagaagccctgaaagggataaattacctaaggggtggcagtgtggggcatgggagcactcccac

SEQ ID NO: 497196 - DNA, 201 bp, Homo sapiens
ataacaaaggtgagcatcattgagtcttagaggccgcctaccactgatatatgcatgtgtgtaaacatatgtacgcatgcatgtgtgtatgtgtataattaaaaaaaaaactttatgaccattctgttctcagaaatgttgtagtaggcagaatttcttaaatggcctctcaaagatgttctgccctaatccctggaacct

SEQ ID NO: 497197 - DNA, 201 bp, Homo sapiens
tattctaaatggttttttttttttggcttgtatagatgagaaagttgaggtacagaaagattgaaccttgtactttgtgtcagtcatagaagcagatactrcatacataaatcattcttttatcaaaactcttaagaggacagttctttgtgtctttgtataaaattgttcttgttttcctttgacagcttcaggctttgc

SEQ ID NO: 497198 - DNA, 201 bp, Homo sapiens
aaaaaaaaagctgggcatgtgtgaatttgaggccacttgcagtaagttatgttcatgccactgcactccagcctgggcaacagagtgagaacctgtctttaaaaaaaaaaaaaaaaagatgggtgaagcatgtttttttaaatgaaaagacaagagatgtcaaatttgctgacccttttttgtatgacaagtgactatgta

SEQ ID NO: 497199 - DNA, 201 bp, Homo sapiens
tcccagattcaagcgattctcttgcttcagcctcccgagtagctgggattacaggcgcccgtcaccacacctggctaatttttgtatttttagtagagacrgggttttgccatgttggccaggctggtcttgaactcctgacctcaggtgatccgcctgccttggcctcccagggtgctgggattgcaggcgtgagccacc

SEQ ID NO: 497200 - DNA, 201 bp, Homo sapiens
ggagtacagtggtgctatcatggttcactgcagctttgacccctcagactcaagcaatcctctcacctcagcctctcgagtagctgggaccacaggcataygccaccatgcccagctaattttttaatttttagtacagataaggttttggtatgttgccctggttggtcttaaacttctgggctcaagagatcctcctgc

SEQ ID NO: 497201 - DNA, 201 bp, Homo sapiens
agagttgatcactcactttttcttgaaaagctctcttcccttgactttttatttttttagacaggttctcacctaactctgtcacccaggctggagtacaktggtgctatcatggttcactgcagctttgacccctcagactcaagcaatcctctcacctcagcctctcgagtagctgggaccacaggcatatgccaccat

SEQ ID NO: 497202 - DNA, 201 bp, Homo sapiens
tagaaataagcaaaatgggactcagaaaccatgtgatttgcccaagatcatatggctaataagatagctgagaggtgaactcatatcctctttccactgamctgtggttggaaaaaatgattgactccgagaaaagatccaagtagtgttttcattcattcattcagtaatgcctgtttgacatttgggctttctgtctat

SEQ ID NO: 497203 - DNA, 201 bp, Homo sapiens
ttgtgtagcctggcactaaccagactgagttacagggactgccttggggagaggggaatgctattcaggcaaagatctagatcctcttctgattgatccaragaagatctgctgtttttttgttgtttttttttaacctactggacttctgcttaagatctcatatagtcttaggcaccatatgcttgtatataccttgag

SEQ ID NO: 497204 - DNA, 201 bp, Homo sapiens
ttgaatgtggcccaacaaattcataaactttcttaaagcgttatgactttttttgtgatttttttttttaaagcccatcagctatcattagtgttagtgtrttttatatgtggccctagacaattctttttcttcctctggggcccaaggatatcaaagttggacacccttgaattagataattgtgtagcctggcactaa

SEQ ID NO: 497205 - DNA, 201 bp, Homo sapiens
ttctctcatataacaagacctgagtaggtggttgctggcactgggtcactcaggtctcagtgatgacagagagacctagggcatgcacattttcagacatyggattcattctgtgctcaagtcagtgtgaagaaaaagggccagctatatcttttatcaggaaagtgtacttttattcataatatctgcctcctcccatct

SEQ ID NO: 497206 - DNA, 201 bp, Homo sapiens
attttgctttgactggcttgtgatgtttatctaaataactttttttttttttttttttttttttttttttttttttttagattacaggtccaccaggttgkggaaaaactcagttttgtataatgatgagcattttggctacattacccaccaacatgggaggattagaaggagctgtggtgtacattgacacagagtctg

SEQ ID NO: 497207 - DNA, 201 bp, Homo sapiens
ttgagaccatcctggctaacagggtgaaaccccgtctctactaaaatacaaaaaaattaaccaggcatggtggggggcgcctgtagtcccagctgctcagraggctgaggcaggagaatggcatgaacccgggaggcagagctttcagtgagccaagatcctgccactgcactccagcctgggcgatactgactttgtctc

SEQ ID NO: 497208 - DNA, 201 bp, Homo sapiens
agcaccatctttttctgggtgccagaaaggcactcagcccaacagtataagcctatgactgctcaagcacatgtgtgtgcatgcacttgggtgtgcatgcrtgtgtgtatgtttacacaggtaggcacctaggtgttttgttctccatttttagaatgatctttgttgctggccagtaccagagtgatctaattatacatg

SEQ ID NO: 497209 - DNA, 201 bp, Homo sapiens
actacattggtgaagttccctgaagtccttaaaaaacaaacaagatttaaagtgcaaaatgttattgttaagttaaaatgacccttgtgtgtttgcaaagstccgcgggctttctggggctagtgatccccttggtgagcattgtggagtgtggtgggaaccagccatgttttggtgatttcttttagatttctaaaactg

SEQ ID NO: 497210 - DNA, 201 bp, Homo sapiens
tggttagtaggctaaactaacgtagtagggaagagagtgtaagaaaagtgctgttgaattcatcattcccattagcaccagtctgcggattcccaaacatrtatttctaggctcagatatttttcctgatccccagacttattaatccaggaactagtcaacttctttacctggatgccctgtaatgatttgtagcacaac

SEQ ID NO: 497211 - DNA, 201 bp, Homo sapiens
ctaatcagatgccctctgcatagttcatatttttaaaaatcttggtccttatattatttataaaaaaagtgactctatattagttttaaggtataaatgakacacttttcctatctgtaaactagctgatctatttgtagtctggcttaaaatgtgacttgcccaaacataggaaaatcttccaaaacaggatctagactg

SEQ ID NO: 497212 - DNA, 201 bp, Homo sapiens
tactacattggtgaagttccctgaagtccttaaaaaacaaacaagatttaaagtgcaaaatgttattgttaagttaaaatgacccttgtgtgtttgcaaasctccgcgggctttctggggctagtgatccccttggtgagcattgtggagtgtggtgggaaccagccatgttttggtgatttcttttagatttctaaaact

SEQ ID NO: 497213 - DNA, 201 bp, Homo sapiens
gacttctacaggctcaatcccataacaatgaaaatcctcaaaaatgaaaatattttcaaagctcagttcacgtatttgatttttgtatttgcattggaatwaaccaaattccagacaatgaagttatactgctttggcaggtctaaatatcacaatcatcaaaaaggagagagagggagtgagcacctcaatttttagaac

SEQ ID NO: 497214 - DNA, 201 bp, Homo sapiens
agtgggatttaatgatgagaacacatggacacagggaggggaacttcacacaccggggcctgttggtgggtggggggcaagggcaaggggagcattaggasaaatacctaattcatgcagggcttaaaacctagatgatgggttgatgggtgcagcaaaccaccatggcacaagtatacctatgtaagaaacctgcacatt

SEQ ID NO: 497215 - DNA, 201 bp, Homo sapiens
gcaggcagatcacaaggtcaggagatcgagaccatcctggccaacatggtgaaaccccgtctctactaaaaatacaaaaaaattaaccaggcatggtggcrggcgcctttagtcccagctactcgggaggctgaggcaggagaatggcgtgaacccaggaggcagagcttgcagtgagccgagtttgcgccactgcactcc

SEQ ID NO: 497216 - DNA, 201 bp, Homo sapiens
ttgccaggagaattggatattcctgggaaaagaaaaaaagtgtctcacttctggagccattgtaaccatgtaggtatttaagaggtttttgttttgttttkttttgttttttcaaagataaatccctttttggatgattagtcagttgatcttaaatatcatgtaattggccatgaaaattgatggaaggctctgttctta

SEQ ID NO: 497217 - DNA, 201 bp, Homo sapiens
aggcatggtggcgggcgcctttagtcccagctactcgggaggctgaggcaggagaatggcgtgaacccaggaggcagagcttgcagtgagccgagtttgcrccactgcactccagcctgctcaggcgacagagcaagactccgtctcaaaataaataaataaataaaaagccatagagtttctttataattaggttctaac

SEQ ID NO: 497218 - DNA, 201 bp, Homo sapiens
gccttgagtatatgaatgggaaatataggggctcatattccagttagcggtactgtatagtgataattcataaataacaattgtacattgtaacacacacaacacacacacacacacacacacacacacacacacacacacacatacacacagtaatgctttttgtccctggaaaaccacaagtaacaatgaagtattctg

SEQ ID NO: 497219 - DNA, 201 bp, Homo sapiens
ttgcctcattgttaacagaataaaaaatgcaggagataatgattaaacttctttcctccctagaatttcatcttcagtgtttgatcatcattgttcctgtmacttatacatatcaagtatcttcatctaagggtcatcaagaacctctggttgcctggaggccagaattattattcacattttacagatgggttagcaatc

SEQ ID NO: 497220 - DNA, 201 bp, Homo sapiens
ccataagatattttgtgagaggacagagtggcctttctaattcttaaaagttagggttctactccagacattccttatctactgcaaatacaaattatttatttgttcattcattcaaataacagttattacagatgacactatgtcaggctctctgctaagtctaggtgaaaagacagaacctccccacaaagacttaga

SEQ ID NO: 497221 - DNA, 201 bp, Homo sapiens
ccttgagtatatgaatgggaaatataggggctcatattccagttagcggtactgtatagtgataattcataaataacaattgtacattgtaacacacacamcacacacacacacacacacacacacacacacacacacacacatacacacagtaatgctttttgtccctggaaaaccacaagtaacaatgaagtattctgc

SEQ ID NO: 497222 - DNA, 201 bp, Homo sapiens
ctggatttatttcaatcctgaaaacatttgtaggtattgttattcctttatttttttaaatttcctctttctactctaaataaatgggctttcatctgcarggactggagggaccaaatatccagaatatccagtccgctaaggccatgaacttttccttcccctctgttcctattttgggagtcattgctttgttttttt

SEQ ID NO: 497223 - DNA, 201 bp, Homo sapiens
cataagatattttgtgagaggacagagtggcctttctaattcttaaaagttagggttctactccagacattccttatctactgcaaatacaaattatttatttgttcattcattcaaataacagttattacagatgacactatgtcaggctctctgctaagtctaggtgaaaagacagaacctccccacaaagacttagaa

SEQ ID NO: 497224 - DNA, 201 bp, Homo sapiens
ttcttaaagtctaaatgatcattgtaaagattataaaccagcatatagttttaaatatgggaatttttttttttttttttttttttgagacatggtcttgytttgttgctctggctggtctagaactcctgggctcaagtgattctcttgcctcagcctctgggattacaggcgtgtgctaaacatttgtgttttaaggtt

SEQ ID NO: 497225 - DNA, 201 bp, Homo sapiens
ccttcaaagacagtactcttaaatctgaatgatttttttttctttttgagacgaagtctcactgtgttgcccaggctggagtgcagtggcgtgatcttggyttactgcaacctccacttcccgggttcaagcgattctcctgcctcggcctcctgagtagctgggactacaggcgcacaccaccacgcctggctaattttt

SEQ ID NO: 497226 - DNA, 201 bp, Homo sapiens
cctggatttatttcaatcctgaaaacatttgtaggtattgttattcctttatttttttaaatttcctctttctactctaaataaatgggctttcatctgcmgggactggagggaccaaatatccagaatatccagtccgctaaggccatgaacttttccttcccctctgttcctattttgggagtcattgctttgtttttt

SEQ ID NO: 497227 - DNA, 201 bp, Homo sapiens
ataagatattttgtgagaggacagagtggcctttctaattcttaaaagttagggttctactccagacattccttatctactgcaaatacaaattatttatttgttcattcattcaaataacagttattacagatgacactatgtcaggctctctgctaagtctaggtgaaaagacagaacctccccacaaagacttagaac

SEQ ID NO: 497228 - DNA, 201 bp, Homo sapiens
catgttggccaagctggtattgaacttctggcctcaagtgatctgcccaccttggcctcccaaagtgctgggattataggcgtgagccactgtgcctggctttttttttttttttttttttgagatggagtctctctctgtcgcccaggttggagttcagtggcaggatctcagctcactgcaacctccgcctcccgggtt

SEQ ID NO: 497229 - DNA, 201 bp, Homo sapiens
cacttttcaacacttcagagatcctccttcaaagatctctgtgcaattcaaaacatttattactaaaatttcaaaacatctctggagatattctaaatggttttttttttttggcttgtatagatgagaaagttgaggtacagaaagattgaaccttgtactttgtgtcagtcatagaagcagatactgcatacataaatc

SEQ ID NO: 497230 - DNA, 201 bp, Homo sapiens
taagatattttgtgagaggacagagtggcctttctaattcttaaaagttagggttctactccagacattccttatctactgcaaatacaaattatttatttgttcattcattcaaataacagttattacagatgacactatgtcaggctctctgctaagtctaggtgaaaagacagaacctccccacaaagacttagaact

SEQ ID NO: 497231 - DNA, 201 bp, Homo sapiens
attactgggtatatacccaagggactataaatcatgctgctataaagacacatgcacacgtatgtttattgtggcattattcacaatagcaaagacttggraccaacccaaatgtccaacaatgatagactggattaagaaagtgtggcacatatacaccatggaatactatgcagccataaaaaatgatgagttcatgtc

SEQ ID NO: 497232 - DNA, 201 bp, Homo sapiens
gaatgagttaggaaacaaaagctaagatggatttagcaaaggccagagcaagaaaagaaagtttaggctgggcgtggtggcacatgcctataatcctagcrctttgggaggccttggtgggcggaatgcctgagctcaggagtttgagaccagcttgggcaacgtggtgaaaccccatctctactaaaaatacaaaaaatt

SEQ ID NO: 497233 - DNA, 201 bp, Homo sapiens
atttgacatttattttaccaatttctatttttttcatgtgcctactggaaaattttaacttacatatgtgacttgcattgtgtgtgtgtgtgtgtgtgtgtatatatatatatatatatatatatttttttttttttaattgaggcagcctctctctgtcacccaggctggagtgcagtggcacagtctcagctcactgca

SEQ ID NO: 497234 - DNA, 201 bp, Homo sapiens
tatacaccatggaatactatgcagccataaaaaatgatgagttcatgtcctttgtagggacatggatgaaattggaaatcatcattctcagtaaactatcrcaagaacaaaaaaccagacaccgcatattctcactcataggtgggaattgaacaatgagaacacatggacacaggaaggggaacatcacactctggggac

SEQ ID NO: 497235 - DNA, 201 bp, Homo sapiens
caggggtacatgtgcagttttgttatatagggaaattcgtatcacagggttggttgtacagattatttcattacctaggtactaagcttagtacccaatctttttttttttttagctcccccctcctcccactctcttccttcaagtaggctccagtgtctgttgttctcctctttgtgtccatcagttttcatcatttag

SEQ ID NO: 497236 - DNA, 201 bp, Homo sapiens
agccataaaaaatgatgagttcatgtcctttgtagggacatggatgaaattggaaatcatcattctcagtaaactatcacaagaacaaaaaaccagacacygcatattctcactcataggtgggaattgaacaatgagaacacatggacacaggaaggggaacatcacactctggggactgttgtggggtagggggagggg

SEQ ID NO: 497237 - DNA, 201 bp, Homo sapiens
ttgttatatagggaaattcgtatcacagggttggttgtacagattatttcattacctaggtactaagcttagtacccaatctttttttttttttagctccyccctcctcccactctcttccttcaagtaggctccagtgtctgttgttctcctctttgtgtccatcagttttcatcatttagctcctactgataagtgaga

SEQ ID NO: 497238 - DNA, 201 bp, Homo sapiens
cacctaagtcagacaatgattagaactccccagatttatgggatggatgaacatctgaaccagcacagcctaaattacctgctggggggttgtctgctttrgaagaggatagtttatagtttgaatggcagaagggtcatggggcattaattcagatcaaaaaaagggaggaatctatatgtatccacaaagatacatggc

SEQ ID NO: 497239 - DNA, 201 bp, Homo sapiens
ttgaacccacagcccgtgggccgcatacagcccaggatggctttgaatgtggcccaacaaattcataaactttcttaaagcgttatgactttttttgtgatttttttttttaaagcccatcagctatcattagtgttagtgtattttatatgtggccctagacaattctttttcttcctctggggcccaaggatatcaaag

SEQ ID NO: 497240 - DNA, 201 bp, Homo sapiens
gtgttactgtgccactttacgtatagtataagaaccttaacaatagtcttacagtacttgtcatacatttaaatatacattagttataaatcccacactcrattttgttttagtcaattatctgtaaaatatattttgataataagaaataaatataataaataaatttgaattatccagtggttatcctttccagtgatc

SEQ ID NO: 497241 - DNA, 201 bp, Homo sapiens
tccactttctgagcctcttggaagtgggatcaggccaggaaaaacatgtgatgctatagcaagctgaaaccaaagacttgactttgggcctggccaagccragaatcttggcagtgattgactgggaagcctgctgttttctatggcattttctgagtcccctaactctgggaagagggaaccagataagtcctaaaaatg

SEQ ID NO: 497242 - DNA, 201 bp, Homo sapiens
agcctcttctccattgggcagttagagcagtccttttaaaaaaagaagtcagatcatgttgttcctgcttctaggcttcctattttgctaaataaaagctaaaaaaaaaaaataccactttagcaaaaaaaaaaaaaacaaaaaccacagacctaaaggtcttatgtgatcttggccttggctagctctttgttttctttt

SEQ ID NO: 497243 - DNA, 201 bp, Homo sapiens
gagtgcagtggcgtgatctcagctcactgcaagctccgcctcccgggttcacgccattctcctgcctcagcctcccaagtagctgggactacaggtgcccrccaccatgcccagctaattttttgtattttttagtagagacggggtttcaccatgttggccaggatggtctcgatctcttgatctcatgatccacccgcc

SEQ ID NO: 497244 - DNA, 201 bp, Homo sapiens
aggattttgaaaaatatttcctttagaaaatgttggaattttcctagctaaattgatacatttaaatggaaaatctctcacacaggtccgagatttaattaaaaaaaaaaaaaggaaatcatgaacttttacacatttatactgtactttgaacaggcaccatagtactgttcaaattaattatgtcaatttaatatgtta

SEQ ID NO: 497245 - DNA, 201 bp, Homo sapiens
aatggaaagaatttgttctggttttaaagtggacatataacaaggttaaattttttattattatttgagacaagcacaaatttttttttcctctttttaayggtgaacttcatgtgggcctggatttatttatttatttatttattttacaccatgagctgttccattatgccaagtgggtttaatttatgcaggattata

SEQ ID NO: 497246 - DNA, 201 bp, Homo sapiens
aatgcattaaaaaaaccctaagatggattggtgaatggattaatcatacagaaagcatacagtatagtcatagtatagtataacaaatacagtaaaaattktaaatgcagagtctaagtggtgggtatatggatggtccctgtaaaagtctttcaacttttctgttgcatcatccttaggtaatctatagcaacacatagg

SEQ ID NO: 497247 - DNA, 201 bp, Homo sapiens
ctttgaaatgcattaaaaaaaccctaagatggattggtgaatggattaatcatacagaaagcatacagtatagtcatagtatagtataacaaatacagtavaaattttaaatgcagagtctaagtggtgggtatatggatggtccctgtaaaagtctttcaacttttctgttgcatcatccttaggtaatctatagcaaca

SEQ ID NO: 497248 - DNA, 201 bp, Homo sapiens
ctgcagtggcagagggcctgtcagttgcctttggaagctccaccctagagaaacagagctgctactcactgaagtgattatgtgggggtaggggtgcctgwgctggcggcccaagtcaggaggccctgccctgtaaggagcagcaggggctgggcctctgagagcaaagagtctggccacctttcctgaaggcagctgcat

SEQ ID NO: 497249 - DNA, 201 bp, Homo sapiens
gctgtctcaaaaaattaaaaaaaaaaattttttttaaaaagtgtgttggtaaagataaatatgtaggtaaatgcaaaagacaatagaatgtattttcattkgtaagtcttttcctctcccatctgatttgaaagataactgcaaaaagcaagaattataaaactgtgtagatgggcttataatgtataaagatgtaatttg

SEQ ID NO: 497250 - DNA, 201 bp, Homo sapiens
caatcctcccacctcagccttccaagtagctgggactataggcgtgtgccatcatgcctggctaattttttaattatttgtatagacagtgtcccaccgtsgtcttgaactcctgggctcaagcaatcctcctgctttggcctccagggttggagtgctgggatggattacagacatgagtcaccgtgcctggctggcact

SEQ ID NO: 497251 - DNA, 201 bp, Homo sapiens
atggccattatgttgtctggatttcttgtacctggatatctacatctctagcaatattagggaaattttcttgaattattccatcaagtatgttttccagrttgtcaactttttctcctctctcaggaatgccagtaattcataggtttggttgctttacgtaatcccacacttctcaaagactttgttcattttataaaa

SEQ ID NO: 497252 - DNA, 201 bp, Homo sapiens
tgtggcatagtgggatgcatatgcacatgggtgccagcgatggaggggaggtgaggtctacccacacgtgtgccagcaaaacggtagggcaggtgggggcrtggccgagtgcatgttcctgctggcaaagcagcacagaggaggctgcagtcagtggtggtctggtgtgcctcagtggaggctgctctactggagctcttg

SEQ ID NO: 497253 - DNA, 201 bp, Homo sapiens
cctttccccatttttttattttcgttgactttgtcaaagatcagaggttgtaagtgtgtggtttcatttctgggttctctattctgttccattgatcactrtgtctgtttttgtaccagtaccatgccgttttggttgctatagtttgaagtcaggtagtgtgatgcctctagctttgttctctttgcttaggattccctt

SEQ ID NO: 497254 - DNA, 201 bp, Homo sapiens
atcatgacagaccatttctcttttttgagagtcttatattacaatgcagacacacctgagagggctaatgcgtgaaggtttaccagccctcactttagggktagagataattagctgacagcttatttactaagagcaaaatagaaacctggggagagggacataaaagaaggaggagagagtttacaaggagaagcccat

SEQ ID NO: 497255 - DNA, 201 bp, Homo sapiens
tctctgaaagacggtgaactggggcagcaccactaagtttcaccatcagtgaggcgtcagtctagatgggcactttctttccactgtaagctgcttcctaytcttgttgcctttgatgatctttgtttgccttcaagtcgggtttgttacatttgttttcatctccaattcctgccatataaaaatgagggcagtgagaaa

SEQ ID NO: 497256 - DNA, 201 bp, Homo sapiens
gtcacctattcattgttaatagaattcaatttgcagtttccctggaaataaggcagtttctgatcttcaaatcacccaagttcttactcgttagaatgcargttcctttgtcacattaggaaggacagtaatatttatttatgaaaaagttgaaaaaatactgtaataaatggtgctgggttaattaatatattattaata

SEQ ID NO: 497257 - DNA, 201 bp, Homo sapiens
atgagtgataggatcttaactttgacccaaatctgcctaaatctaaagcccatctcttttctccacaccttgtatccctagaacatcatgcttcttcctcyttctccttaatgtgaaaccatgatggttgccatcactttacagcagtattcttcaaaaaggagggattttgcccccagaggaaatttggtaatttctgga

SEQ ID NO: 497258 - DNA, 201 bp, Homo sapiens
aacaccaaatatgtctctgcttcttacaacttagaaatcttactctgttttgcaatgccctgccaagtcatattggagcctgaggcaaaatgaaagaccartgacactgatcctgtctttatttaaaattctgatattttcttcactatggatttgtgggattaattttgattttttaaaatattgcattaaatattatat

SEQ ID NO: 497259 - DNA, 201 bp, Homo sapiens
tttgacatttattttaccaatttctatttttttcatgtgcctactggaaaattttaacttacatatgtgacttgcattgtgtgtgtgtgtgtgtgtgtgtatatatatatatatatatatatatttttttttttttaattgaggcagcctctctctgtcacccaggctggagtgcagtggcacagtctcagctcactgcaa

SEQ ID NO: 497260 - DNA, 201 bp, Homo sapiens
caagggcaggctgaggtcctcagagagagcagatggaatagagcttacaaccagttgcctttacaactggacttggagataaataataacattatacccattttttttttatcatgaagcctttgactttcaggggatatctattctttattccttttaccctgtatgtggaaaaaaaatgctctgtatgaaagaaaagca

SEQ ID NO: 497261 - DNA, 201 bp, Homo sapiens
agaataggcaaattcatagagacagaagagagataagagattgccaggatctagagagaggcaggaatgggaagggacagtgactactaatgagtatcggktttcttttcagagtaatgaaaatgttctggaattagatattggtgatggttataaaactctgtgagcactctaaaaacactgaattatatactttaaaag

SEQ ID NO: 497262 - DNA, 201 bp, Homo sapiens
ccctggatttatttcaatcctgaaaacatttgtaggtattgttattcctttatttttttaaatttcctctttctactctaaataaatgggctttcatctgsagggactggagggaccaaatatccagaatatccagtccgctaaggccatgaacttttccttcccctctgttcctattttgggagtcattgctttgttttt

SEQ ID NO: 497263 - DNA, 201 bp, Homo sapiens
tgaacgagaatgcagttccagtggtaacataccatcttcttccctggatttatttcaatcctgaaaacatttgtaggtattgttattcctttatttttttwaatttcctctttctactctaaataaatgggctttcatctgcagggactggagggaccaaatatccagaatatccagtccgctaaggccatgaacttttcc

SEQ ID NO: 497264 - DNA, 201 bp, Homo sapiens
ttatgcctttttgtgtggaaggttggtttctcctttatctacttaccagcttttaggggaatccctttttaagtcaagaaagcaccttagaaaatttctcyctctctctctctctctctctctctctctctctctctctgcctttatgaaactgacagtagcatatcttgctattcttgggtcttagtttggaattaagct

SEQ ID NO: 497265 - DNA, 201 bp, Homo sapiens
ctggagggaccaaatatccagaatatccagtccgctaaggccatgaacttttccttcccctctgttcctattttgggagtcattgctttgtttttttgacttttttttttttaacatggaaaagcattcttttaaagttgacccttttgctgcagggcaaatgcttttctgttatgcactagagattcagtttgatctcct

SEQ ID NO: 497266 - DNA, 201 bp, Homo sapiens
cacttcttcctgtcttctgcttcacatttcttacctttctcagtaacgagtttgctgagacttgcatcagcctaggtatgttgtgcaagtaaagcctctgkactgcattcactcctttcacctccagccaagagacatcaggaatgaaattttctgctttactaaagtgaagcagcccattctttaccagccaaatgcctt

SEQ ID NO: 497267 - DNA, 201 bp, Homo sapiens
aaaaaatacaaaaattagccaggtgtggtggcatgcacctgtggtccaagctacctgggagactgaggtgggaagactgcttgagcctgggtggttgagtmagcagtgaaccatgattacaccactgcactccagcctagttgacagagcaagagcctatctcaaaaacaaaataagcaaaagggacttactttggggatt

SEQ ID NO: 497268 - DNA, 201 bp, Homo sapiens
ctgtagacttcataaaccccgtatccttaggctatattcattgatagagacatttttctttcttcaataataaattaacctttgattactatcactttttkacttcataaatgttttaattttttaactttttgatcttgtaataacataactgaaaatacaaacattgcatagctgttcaaaaacattttctttatatcc

SEQ ID NO: 497269 - DNA, 201 bp, Homo sapiens
tccctaactcttgcattccagaggttctgattgcctcacttcttcctgtcttctgcttcacatttcttacctttctcagtaacgagtttgctgagacttgsatcagcctaggtatgttgtgcaagtaaagcctctggactgcattcactcctttcacctccagccaagagacatcaggaatgaaattttctgctttactaa

SEQ ID NO: 497270 - DNA, 201 bp, Homo sapiens
acggtggctcacgcctgtaatcccagcactttgggaggctgcggtgggcggatcatgaggtcaggagttcgagacaagcctgaccaacatggtgaaacccygtctctactaaaaatacaaaaattagccagccacgatggcgtgtgcctgtaatcccagctactcgggaggctgaggcagaagaatcacttgaacctggga

SEQ ID NO: 497271 - DNA, 201 bp, Homo sapiens
taggtgtgtgcttggaggaggttaatcaggtagtaaaacagagggtggctttagtagggagaaagcgacagcagcacagacaacaggcaactaaagcagtyacaccaggtgaaagctaatgtgggtctaaggttgatttaggaggaatggagagtcaggaatggatctaagggtgaggtaggagaaatgaatggatggata

SEQ ID NO: 497272 - DNA, 201 bp, Homo sapiens
catatgccttttgattgtgtgtttgtcttcttttgagaaatgtctgtttatgtcctttgcccatttttaatggatctgtttgtttttacttgttaatttcytcaaattctctatagattctggatattagatctctgttaagatacatagtttgcaaatattttctccctttaggttatctgtttattctgtttatagttt

SEQ ID NO: 497273 - DNA, 201 bp, Homo sapiens
ttcaggcacgataaggttatatatttaatacttacaactttatgagcagctgtcgtcattatcgccactttacaaatatggaaacccaggcaaaaagaggytaagtaactttgccaaggtctcacaggtagcaaattgcagagccagaatgcaaaactactgccttatgatctgcttctctaagtagctgggaatggagaa

SEQ ID NO: 497274 - DNA, 201 bp, Homo sapiens
tgtttgatttgttgtctaatgagtggttaaaacagtaactgctttgactctaaaggaaggtaacatcatcagaggcatattaagtcttttcaggaaaaggygagacttgagtattaccttaaaatcagtgattctcggcaggacgcagtggctcatgcctgtaatcccagcacttttgggaggccaaggtgggtgaatcgc

SEQ ID NO: 497275 - DNA, 201 bp, Homo sapiens
ttataaatatttctcgggaggctgaggcaggagaatggcgtgaacccaggaggcggagcttgcagtgagccgagatcgcgccactgcactccagcctgggygacagagcgagactctgtctcaaaaaaaaaaaaaaaaaaaaaaaaaaaaaaaaaaaaatatttaaataaaaataatgtttcactgaagaaattgtaaaag

SEQ ID NO: 497276 - DNA, 201 bp, Homo sapiens
tctaaaggaaggtaacatcatcagaggcatattaagtcttttcaggaaaaggtgagacttgagtattaccttaaaatcagtgattctcggcaggacgcagwggctcatgcctgtaatcccagcacttttgggaggccaaggtgggtgaatcgcctcaggtcaggagttcgagaccagcctgaccaacatggtaaaacccca

SEQ ID NO: 497277 - DNA, 201 bp, Homo sapiens
caacctccgcctcccaggttcaagcatttctcttgcctcagcctcctgagtagctgggaccacaggcatgctccaccacacccggctaatttttgtatatrtatttttagtaaagacgaggtgtcactgtgttggccaggctggtctcaaactcctggcctcaagtgatccacccatctgtgcctcccaaagttctaggat

SEQ ID NO: 497278 - DNA, 201 bp, Homo sapiens
catggaataatagtcttccttccccaatcttcaccttgccaattgctattatcctatgggtctctgtgtaaaaatcactcctttaagaaaattagatctcsccttataattcctcttcctcctctttttattcactgtatttattataattgtataattatatatttatttgtatgacttttttatttaatattagtggcc

SEQ ID NO: 497279 - DNA, 201 bp, Homo sapiens
tcaggaaaaggtgagacttgagtattaccttaaaatcagtgattctcggcaggacgcagtggctcatgcctgtaatcccagcacttttgggaggccaaggwgggtgaatcgcctcaggtcaggagttcgagaccagcctgaccaacatggtaaaaccccatctctactaaaaaaaaaaaaaaaaaaaaaaaatagccaggc

SEQ ID NO: 497280 - DNA, 201 bp, Homo sapiens
tgggcttattttgcgtaacataatgacgtccaattccatccatgtcacttcaaatgacatgatttcattcttttttatggctgaatagtatttcattgtakgtgtgtgtgtgtgtgtgtgtgtgtgtattatataatatattcattgtgtgtgtgtatatattatatatatacacatatataatgtgtgtgtcttttatgg

SEQ ID NO: 497281 - DNA, 201 bp, Homo sapiens
cttataattcctcttcctcctctttttattcactgtatttattataattgtataattatatatttatttgtatgacttttttatttaatattagtggcccrcactagattacaggttccccgatatctaagaccagatctgttttgtttattgctatatctacaatacctggtatagtcctagcataatcagcaaatattc

SEQ ID NO: 497282 - DNA, 201 bp, Homo sapiens
cataatgacgtccaattccatccatgtcacttcaaatgacatgatttcattcttttttatggctgaatagtatttcattgtatgtgtgtgtgtgtgtgtgwgtgtgtgtattatataatatattcattgtgtgtgtgtatatattatatatatacacatatataatgtgtgtgtcttttatggttccatacaaattttagg

SEQ ID NO: 497283 - DNA, 201 bp, Homo sapiens
tatgacttttttatttaatattagtggcccacactagattacaggttccccgatatctaagaccagatctgttttgtttattgctatatctacaatacctrgtatagtcctagcataatcagcaaatattcttggtatgaactttggatcaaatgctatgcttgccccacaaaggtgaataaaacatagactttattctca

SEQ ID NO: 497284 - DNA, 201 bp, Homo sapiens
tattcaataagtagttttcaatctttgtcttcctccctccctcctacctcatgtattttccagcatctgttgttcccatctttatgtccatgtgtacccartgtttagctcctgcttttggattttctttcataggagatgtatcaatggtgctagttgggtgggctctttggctttgattctgggtgcattcagttgtgt

SEQ ID NO: 497285 - DNA, 201 bp, Homo sapiens
taagaccagatctgttttgtttattgctatatctacaatacctggtatagtcctagcataatcagcaaatattcttggtatgaactttggatcaaatgctrtgcttgccccacaaaggtgaataaaacatagactttattctcaaggagttctactcttttgacatggagtatactttgtttgaagacaggtatctaaaag

SEQ ID NO: 497286 - DNA, 201 bp, Homo sapiens
aagtatgagtattaagaagtgagagaaaagttagggctagaatagttagcaaagatatcatggaaaaggtaggatttgaactggcccctcaaagatggaamcttacagagtaaaggaggctatttcagactggggcatttggggtgggtaaaccatgagaaatagagaaattagaacgagaatgttataagccttggtttt

SEQ ID NO: 497287 - DNA, 201 bp, Homo sapiens
ggggcatggagtgggaagaaaactaaagcacattttaatgggctcttttgtaccaccaagacaatttcatcttagagtacgtgcctctaagaagtaaagatttttttttttttttttttttgacagagctggagaataattttaggaaaactaaatctccctgttgctatgtttgtgccagctttgtcacttggaaagtat

SEQ ID NO: 497288 - DNA, 201 bp, Homo sapiens
taacacttccttgatttttggcataagttattctaggcacaccttgtacctactctgcctaagctctgaaatcacccattttcccaagaaaccccagttctttttttttttttttttttgagacggagtctcactctgtcacccaggcggttatgcagtggcgcgatctcggctcactgcaagccccgcctcccgggttca

SEQ ID NO: 497289 - DNA, 201 bp, Homo sapiens
tactcttaatggcatctagaatggtaaattctttccagaagaatttcaattttctttatccagatccatcagaagaatcacaatctatggcagaaatagcrttacgaaatgtatgtcttaaatagtgaaacttgaaagttgaaattattccttgatccatgggctgcagaatggatggctgtgttaagaggcatgaaaaca

SEQ ID NO: 497290 - DNA, 201 bp, Homo sapiens
ttcaacagaactgttttcttggcctcaaatgagtctaagaaggggaaatcacttaataccagccgtctgtgagggaccgatcacaaagctgtgtctttctmatcctccttgtaaatcaaagggaggggaatccccagagcccaggagtacacatgaatagaaagcaccacaagtaataaaaacacctaaaaaggtcagcag

SEQ ID NO: 497291 - DNA, 201 bp, Homo sapiens
gtcaatgaattcttttcaaaatattttgaaaagaatcttttcttctgagcagtaggtcttaacagcgggcttaaaatattcagtaaaccatgctataaacrgatgtcctgtcatccagaccttattgttccatttctagaccacaggccgagtagatttagcataacttttgggggccctaggattttcagagaatggcca

SEQ ID NO: 497292 - DNA, 201 bp, Homo sapiens
tggacctaccctgttctcactctcttccttctgcctcttgccctcattgctttccttattctctttcttcctcttgtctccttctcacctccagctcctaycacagcagacaggttggggcagacaccgtcatggttggggagcaggaggacagcatggggaaaaccactccaggcctttctctcaaaccttagtgatgaa

SEQ ID NO: 497293 - DNA, 201 bp, Homo sapiens
aatagccattctggctggtgtgagatggtatctcattgtggttttgatttgcatttctctaatgattagggatgttgagcattttatatttgatggccacrtgtatgtcttcttttgagaagtgtctgttcatgtcctttacccacttttaatggggtcattttttgcttgttgatttgtttaagttccttatagaatctg

SEQ ID NO: 497294 - DNA, 201 bp, Homo sapiens
ttcaaaatattttgaaaagaatcttttcttctgagcagtaggtcttaacagcgggcttaaaatattcagtaaaccatgctataaacagatgtcctgtcatmcagaccttattgttccatttctagaccacaggccgagtagatttagcataacttttgggggccctaggattttcagagaatggccagtgagtactggctt

SEQ ID NO: 497295 - DNA, 201 bp, Homo sapiens
caggtgtgtgctaccatgcccagctaattttattttttagtagagatggggtttcaccatgttggccaggctggtctcaaactcctggcctcaagtgatcygcccacctcagcctcccaaattgctgagattataggcatgagccactgtgcctggccattttgacttcttaataatagccattctggctggtgtgagatg

SEQ ID NO: 497296 - DNA, 201 bp, Homo sapiens
ctattgtggatactgtggcagtgaacatacgagtgcatatgtctttttggtagagtgatttattttcctttgggtatatatccagcaatgagattgctggstcaaatggtagctctgttttaagttctttgggagatctccaaactcctttgcacagtgattgaactaatttatatttccacctacagtgtataagcattc

SEQ ID NO: 497297 - DNA, 201 bp, Homo sapiens
ccaataagtagtttttttagcctttttccctgctcccttcttcctccttctaataatctccagtgttgattgttcccatctttgtgtccatgtatacccartgtttagctcccacttataagtgagaacatgcagtctttggttttctgttcctgtgttaattcacttaggataatgaccaagagctgcatccatgttgct

SEQ ID NO: 497298 - DNA, 201 bp, Homo sapiens
agactggttctcatcatcatttgaccactcaagttcagctaccttggtcatacaacccgttaaatctatccccagccctaccagttattttgtatattatrtcactttttatttttatttatgtatatattttttgagacagggtcttttgctgttgcccaggctggagtgcagtggcatgatcatagcacactataactt

SEQ ID NO: 497299 - DNA, 201 bp, Homo sapiens
atttaatttttttgtggggttattctttgcttctaacttcttaaattagatatttaatctattaattttcagtttttctttttactctgaccttttaagaytgaatttttcttgaagcattctattttgagatatagtatttccattttcattctgttctagaagtatttaaacattcccatcacaattgcttctttgact

SEQ ID NO: 497300 - DNA, 201 bp, Homo sapiens
cttttagtagtgtctttgtctgaattagtatttatcttatactagtttggtagaatggattatggaatatctctttttttaatattctgcaatagtttgcmtatgatgggaattatttgttccttgaagatttggtagaacttgtctgaaaaattgtctgatcttgatatttttccttctgagaagattttttaaaaattc

SEQ ID NO: 497301 - DNA, 201 bp, Homo sapiens
ctgccaccaggtggtgccagaatcacatgattttacataaactttttgggctgaagttccacttgcttaaacaaggtttattacagtgtgatccacagtcrtaaacttacttatttaaatagcaaaaacattgaacttaaggaagattaactgggaaattctttttactttttaagttttagaataatttttaatactttt

SEQ ID NO: 497302 - DNA, 201 bp, Homo sapiens
tgatgctgaactaaatgtggacatccaattggcatagcacacaacagcccagaactcctgtactcaagcagtctttctgctttagcctcccaatagctggractacaagtgcatgccaccatgcctgtcagattactgtagctttatagtaagtcttgaagttgaagactttttttttttttgagacagagtttcactctt

SEQ ID NO: 497303 - DNA, 201 bp, Homo sapiens
tattcaacaccacatacaaaacttgagaaagcaaagtcttcaacagcagatgccaaagtggtttctttgtctttacagactagctctgtgcatcacagagkggggcatggtgttccacatgggaaactgttaaaacagaaatcagaggagccatcggtgtcaatacccttcctacaaactgcattattaagaggttcaggg

SEQ ID NO: 497304 - DNA, 201 bp, Homo sapiens
tccttgtgatctacaaatcaatggataagaattctcacagtgaaggtttacatgtatatatttgtatgtatatatgagacatgtgaccatgtttaatgaayggagaaggacttggatcttttctagtagagaagagaagcagaaagctttgcctaaccctatttctttactaaggtaatgaaaaaattatacagggaaaat

SEQ ID NO: 497305 - DNA, 201 bp, Homo sapiens
gccaactaacacaaaaccaattcactaaacaaaaacacaacaaaggaccctcagagagtccacttcactccctgctacctccactggagcaggtactggtwtcctcggctgcaagacctgaagacagatcacatcacaggacgctttgcagacactcgccagtaccaacccagagcccaagagctccactagatggctagg

SEQ ID NO: 497306 - DNA, 201 bp, Homo sapiens
atcagtacttcattactttttcctgcaaagtagttttccactgtatgtatatactacatttgcttatccattcatctgttgatggatattttgggttcttkctagtttatggctattacaaataaatctactatgaacatttgactacaaatttttgaaaagaggtatgctttcttttttattgggcaaatacctaggagt

SEQ ID NO: 497307 - DNA, 201 bp, Homo sapiens
agcattgtcttttgttgatgagtagagctttttgagatacaatgagttgttctctgctgctctttctggaaacttcgttaactatcttgccctatacctgkcagtgccaacccacatttctgtttatataaaaggaactccatatcctcttcagaagctagtaaacaaaaaaacctcaaagcatatctgtattggggtttg

SEQ ID NO: 497308 - DNA, 201 bp, Homo sapiens
cccctcccaaccatgccagtgcattgaaaagcagcagctgtcattgctcaacaagttccttgtgatctacaaatcaatggataagaattctcacagtgaargtttacatgtatatatttgtatgtatatatgagacatgtgaccatgtttaatgaatggagaaggacttggatcttttctagtagagaagagaagcagaaa

SEQ ID NO: 497309 - DNA, 201 bp, Homo sapiens
ctatgaaggttttaagttattgcgcttgcacagactgactttgtggccttaatatggaaagcaaaacaagattaaaatctcacacagtcattgtcttttgyagtagagcattgtcttttgttgatgagtagagctttttgagatacaatgagttgttctctgctgctctttctggaaacttcgttaactatcttgccctat

SEQ ID NO: 497310 - DNA, 201 bp, Homo sapiens
cacacccaagcttcttatctctttgctgttaatctccaatgtgtttattgacttgtgtgccaaaaggcaaaatccccagccccctcccaaccatgccagtkcattgaaaagcagcagctgtcattgctcaacaagttccttgtgatctacaaatcaatggataagaattctcacagtgaaggtttacatgtatatatttgt

SEQ ID NO: 497311 - DNA, 201 bp, Homo sapiens
ctttggatcacttccacttgtataattcaccatttcggcaggacagtaacatttcaggccaaagttcaacttttttttattattaaattcttttattgtckccaggaaactagagaaaatgaattcttcacagtatgcttgtgcatgcaacttgaaacggtttgcacactaaatgaaattaaatgaaagacagctgtttga

SEQ ID NO: 497312 - DNA, 201 bp, Homo sapiens
ttcttcttatgcctactattgttttccttgccatctttgagaccttgatgatcgacactgcagacacagcagagaatcctagtacagactgaagcttttcktataaagtgagcatgctcactgtgattctggacagttcctacatagtatctctgtaggataacatatgtcttggttttctcagggcaagctcagtttatc

SEQ ID NO: 497313 - DNA, 201 bp, Homo sapiens
ctcttcagagaagcatctggaaagattgatccaagagtgctgatagcaagttcgctatcatcgccctgcctcgaggaaaataagcattcgataaaaggacrcttccactgcccagttcactcctactccactgtgtcttctcctgtccctccccctacccctctgacccctgcactcattctgatccctcttcctgcccga

SEQ ID NO: 497314 - DNA, 201 bp, Homo sapiens
aaataatagataagattcaggtagtcagaaaggggaggtgctggggtagagtgagctgcagctgaagaacaaacaggaggataggctgcatcgtcagaggrcacaggctgggttttgccttgtaacaagagcagagggtttgggcactcattcatttgacaaacctttatttaatcacctcttctctgctagtcactgtgt

SEQ ID NO: 497315 - DNA, 201 bp, Homo sapiens
ccagttgctcttatttaggaggaaacagcttctgctcagtttctgtccactcacaagacctctcctgcatggaaccctgtccacagtttctatcactccayctgtgcttacttcagattatctctgaaacaatcagatgtaatggccagtggatgcaaaatacatataaagtaagatttgggattaggaggctcaaggggg

SEQ ID NO: 497316 - DNA, 201 bp, Homo sapiens
attccttttcctgaaattccctcctttttccttttcccctaaaccatcattctagtcctccccacacccaagcttcttatctctttgctgttaatctccartgtgtttattgacttgtgtgccaaaaggcaaaatccccagccccctcccaaccatgccagtgcattgaaaagcagcagctgtcattgctcaacaagttcc

SEQ ID NO: 497317 - DNA, 201 bp, Homo sapiens
gcaaaccatgggactccctttgaaaaaagtcaatatatccaagaaatcactatttctgaatgagctcaagtagagagaactttctcttaagagggttccgytggaaattgccagctgaaaatacacaggtacaatgactcccacgctggagatgaagggtcccctttcccatgctttgaccacgatagaccgtgtaccttt

SEQ ID NO: 497318 - DNA, 201 bp, Homo sapiens
ttagagatcccaggttttgaaggcttgagtctagtaaacaaactgtaatggttaaatcacgattttattttctcgttgacacctagtgtgtgttatatgcrgcgtcctctgcctcatgtcattctccaatatgctttctcagggctactttcccagaccctatgccttcttatgggttgtagctaacagttacacttccag

SEQ ID NO: 497319 - DNA, 201 bp, Homo sapiens
aaacaacaaaagacatcttaaaaagctattcttttttttttgagaaggagagtctcactgtgttgcccaggctggagtacagtggcgcagtcttggctcamtgcaacctctacctcccaggctcaagcaattctctgcctcagcctcccgagtagctgggattacaggtgtccgctgccacgcccagctaatttcatattt

SEQ ID NO: 497320 - DNA, 201 bp, Homo sapiens
agtccccaaacccaatcaaattattgggtttgcaggtgatatatttatatctctcatgactttcagtggtttataaagagctcctaaagaactgtgcaggaaaaaaaaaaaatttaagcaccatctcaccccacattgcaatcaattacaagataaaagtcatcttttaaattcttgaacccaaatctgaatatgtggctt

SEQ ID NO: 497321 - DNA, 201 bp, Homo sapiens
aggttagtgcagatggaactgcttcaacaaccaaaacttagcgttaccctatttaaacttgggaagggtctgctgcttaatcttaagaaatagcacttcasgagccagggtgtgaggatgtcctttaatctctttgtatgtgatggtaaagctgaattttcctaacaccctccttccccgctctcagcttcagtggctggg

SEQ ID NO: 497322 - DNA, 201 bp, Homo sapiens
aacccttctcagacattcaaccattttctttctcccttgttaacaaattttttaaaatattttttaaaaggaaagaaaagaaaatcctaccttatgaaatyatcttggccttgatgagaatcttggccttgatgagcttagattctcaattgactattttccattctgtcactaagatgtatttggaaaacaacaaataac

SEQ ID NO: 497323 - DNA, 201 bp, Homo sapiens
atttgaaagcttatcacacatgtggctaaagcaggtccagcttggagcattcgtcttctggctgctgttgctgggggagtatccctgctgtgagatgctaygccgcctgagcctgtggcctctgcttatctcctggggtggctgtggctgtgaggtgcacagcatggtacaatgctagttttcatttcaagtcctttcttg

SEQ ID NO: 497324 - DNA, 201 bp, Homo sapiens
tggcctggctttccatccatttctcctgcttggaaaaactgacacagtcatggtttgtaaaggttagtgcagatggaactgcttcaacaaccaaaacttarcgttaccctatttaaacttgggaagggtctgctgcttaatcttaagaaatagcacttcaggagccagggtgtgaggatgtcctttaatctctttgtatgt

SEQ ID NO: 497325 - DNA, 201 bp, Homo sapiens
aacacttccttgatttttggcataagttattctaggcacaccttgtacctactctgcctaagctctgaaatcacccattttcccaagaaaccccagttctttttttttttttttttttgagacggagtctcactctgtcacccaggcggttatgcagtggcgcgatctcggctcactgcaagccccgcctcccgggttcat

SEQ ID NO: 497326 - DNA, 201 bp, Homo sapiens
tcagcaatggtgatcttcttgctggtcttgccattcctggacccaaagcactccatgcctccacaatattcgtgccttctttcactttgccaaagagcacrtgcttgccatccaaccactcactcttggcagtgcagatgaaaaactgggaaccatttgtgttgggtccagcatttgccatggacaagatgccaggacctg

SEQ ID NO: 497327 - DNA, 201 bp, Homo sapiens
atagatgtgtcacacttagcacagatggtctcagaagtttttcctggcttcccataccctaacagtatctagtatgttaatgtcaatattagctttactghtttaggtaactttggtatgcttctcattagctgaaaccgtaaagagctcagttttacctgcgctgagggatcactaaattcctattggcatctgaatgca

SEQ ID NO: 497328 - DNA, 201 bp, Homo sapiens
ctctgagaggaattgtccctcccactaagattcccttctagaagatgagtttttccatgagcattttaaaattttctttgttgccttgttcattttttttyccaacatttaaaagagcagaagtgagggcgaagagaaaggagaatatttagatctgaaaaatgcaccagtccacttttaatctacttttgggaagatgat

SEQ ID NO: 497329 - DNA, 201 bp, Homo sapiens
agcctggacatccaggcagaaatttatcacaggggcagagccatggcagagagccccatctagggcaatgcttactggaactgtggggttgcagctgccayagagagtcccctctacacctagtataggtgtcatggcagggtcacttgagactccagaactgcagagcaaccaatgtgcagccccagcctcggacagctg

SEQ ID NO: 497330 - DNA, 201 bp, Homo sapiens
aaaagaaaattaaaaaaaaagaattatctgtgtattttttatcttaaacaactgagaatggtgtcattttttccattcctagagttatttaggccaaaaamatctagaatgttgaagagaacagattggggtgggaggtgcaggttaggggattaagagttctgtcctagagggccgggtgtggtggcttacgcctgtaat

SEQ ID NO: 497331 - DNA, 201 bp, Homo sapiens
cttttttttttttttttgagacagagtcttactctgtcacccaggctggagtgcagtggcgccatctcagctcactgcaacctccgccacccgggttcaartgattttcctgcctcagcctcctgaggagctaggacaacaggcgtacgccaccatgcccagctaatttttgtatttttagtagagacaggatttcaccat

SEQ ID NO: 497332 - DNA, 201 bp, Homo sapiens
ccttgcttttggtttttagacatgaagtccttacccatgcctatgtcctgaatggtattgcctaggttttcttctagggtttttatggttttaggtccaayatgtaagtctttaatccatcttgaattaatttttgtacaaggtgtatggaagggatccagtttcagctttctacatatggccagccagttttcccagcac

SEQ ID NO: 497333 - DNA, 201 bp, Homo sapiens
taacaggtatgacaataatgaaaaagtttgaaatattgtgagaataagcaaaatgtgacacggacatgaaatgagcacatgctattggaaaaatggcagtyatagacttgctcagtgcatggttgccacaaaccctgaatgtgtaaaagaccacaatatatgtgaagtacaggtgaggtatgcctgtacgtagttggtgcc

SEQ ID NO: 497334 - DNA, 201 bp, Homo sapiens
ccatctcagctcactgcaacctccgccacccgggttcaagtgattttcctgcctcagcctcctgaggagctaggacaacaggcgtacgccaccatgcccarctaatttttgtatttttagtagagacaggatttcaccatgttggccaggctggtctctaactcctgacctgaggtaatcacctgcctcagcctcccaaag

SEQ ID NO: 497335 - DNA, 201 bp, Homo sapiens
tgtggtttttgtctttggttctgtttatatgctggattacgtttattgatttttgtatgttgaaccagccttgcatcctagggatgaagcccacttgatcrtggtggataagctttttgatgtgctgctggattcagtttgccagtattttattgaggatttttgcatcgatgttcatcagggatattggtctaaaattct

SEQ ID NO: 497336 - DNA, 201 bp, Homo sapiens
agcagcagtaatgactcttactgggcatgtgccatgtactaggtctttttcatactcatctctaatcctcccaacaactctacatcgtatatgatattgtstcctttttagagatgaggaaattgggacttaggtggggtggaaagatgtgatacctttcctcactcatcatgagggtcacagctgacacccctttaacaa

SEQ ID NO: 497337 - DNA, 201 bp, Homo sapiens
caagagtcacaagagagtaggcagaaagattactgctttatcaataggtgaaagttcaggtttatctgaatttagaatattaaattgtactttaaccataccacatgtttttataacatataaatcataactgacttcatactattctgttattttatgaggtgatctgatgtggctgcaaagttgttaaagttaaccttg

SEQ ID NO: 497338 - DNA, 201 bp, Homo sapiens
tggatcacttgaggtcaggagttcgagactagcctggccaacatggtgaaaccccatctctaccagaaaatacaaaaaatagctgggtgtggtgttacacrcctgtagccccagctacacgggaggctgaggtgggagaaccacttgaacccgggaggcagaggttgcagtgagcccaaatcatgctgctgcacttcagcc

SEQ ID NO: 497339 - DNA, 201 bp, Homo sapiens
aagcgtatttgaggggataattgaggattaagtgggtttcagatgcagagatggtttaacatatgtcagtcaataaatgtgatataccacataaacagaawtaaaattaaaaatcacatgatcacctcaagagacacagaaaaagcatttgacaaaatccagcatccctttatgattaataccctcagcaaaatcggcata

SEQ ID NO: 497340 - DNA, 201 bp, Homo sapiens
attgatttttgtatgttgaaccagccttgcatcctagggatgaagcccacttgatcatggtggataagctttttgatgtgctgctggattcagtttgccartattttattgaggatttttgcatcgatgttcatcagggatattggtctaaaattctctttttttgttgtgtctctgccaggctttggtatgtggatgatg

SEQ ID NO: 497341 - DNA, 201 bp, Homo sapiens
tagcaacagtattgtcacaaaagattcaacagtcatctcctcaggtaaccaattgttacacaaaccatatgtagaaaatgctcactggcttcatttatagaaaaaaaaaaagataactggaagttagaaacagttgtccaaacttttgaactataataagctattttgaagtgtcattgtcaatacaaagtacataccagt

SEQ ID NO: 497342 - DNA, 201 bp, Homo sapiens
cattaaaaaggggcttataggccaggcaccagtggctcactcgtataatcccagcacttaggccaaggtggatggatcacttgaggtcaggagttcgagamtagcctggccaacatggtgaaaccccatctctaccagaaaatacaaaaaatagctgggtgtggtgttacacgcctgtagccccagctacacgggaggctg

SEQ ID NO: 497343 - DNA, 201 bp, Homo sapiens
gaactcaaacaaatcatcaagaaaaaacaaacaattccatcaaaaagtgggctaaggacatgaatagacaattctgaaaagaagatatacaaatggccaayaagcatatggaaaaaatgctcaacaccactaattatcagggaaatgcaaatcaaaaccacgacgtgataccacctcactcctgcaagaatggccataatc

SEQ ID NO: 497344 - DNA, 201 bp, Homo sapiens
gatgttcatcagggatattggtctaaaattctctttttttgttgtgtctctgccaggctttggtatgtggatgatgctggcctcataaaatgagttagggwggattccctctttttctattgattggaatagtttcagaaggaatggtaccagctccttcttgtacctctggtagaattcggctgtgaatccatctggtcc

SEQ ID NO: 497345 - DNA, 201 bp, Homo sapiens
ctttgcaatcaaattacctggaattttcaggtcaaacctgacagagtgtaggtttcattaaaaaggggcttataggccaggcaccagtggctcactcgtakaatcccagcacttaggccaaggtggatggatcacttgaggtcaggagttcgagactagcctggccaacatggtgaaaccccatctctaccagaaaataca

SEQ ID NO: 497346 - DNA, 201 bp, Homo sapiens
tattctaagtgaagtaactcaggaatgtaaaaccaaatattgaatgttctcactcatatgtgggagctaagctaggaggacacaaaggcataagaatgatrcatgggactttggggacttgcgggaaaaggttggggtggcgagagataaaagagttcacattaggtacagtgtacactgcttgggtgatgggtgcaccaa

SEQ ID NO: 497347 - DNA, 201 bp, Homo sapiens
cttaatcctttttgtgtctctatctttagcttagattctcacccagagaaatagaccttcaataaagttaatgtgaagagaagtcaattagatcgcaagargagtttctttgcaatcaaattacctggaattttcaggtcaaacctgacagagtgtaggtttcattaaaaaggggcttataggccaggcaccagtggctca

SEQ ID NO: 497348 - DNA, 201 bp, Homo sapiens
actttgggaggccgaggcgggcggatcacgaggtcaggagatcgagaccatcccggctaaaacggtgaaaccccgtctctactaaaaatacaaaaaattarccgggcgtagtggcgggcgcctgtagtcccagctacttgggaggctgaggcaggagaatggcgtgaacccgggaggcggagcttgcagtgagccgagatc

SEQ ID NO: 497349 - DNA, 201 bp, Homo sapiens
agccatcctagtagttgtgaagtggtatttcatggtgattttgatcagaaacatttttcacaaaatagaattccttagtttagtttagttttgttttgttrtttttttgttttttaagatgaggtcttgctctgtcgccccagctggagtacagtggcacaatcatagctcactgcagccttgaacttctgggctcaagca

SEQ ID NO: 497350 - DNA, 201 bp, Homo sapiens
ttgaggttgtagtgagccatgattgcacatgccagtgcactccagcctgggagaccctgtctctatacacacacaccacacacacacacacacacacacaytctctctctctcacacacacacacacaatttgaaaccaagtttttattgtttttggttgatttttcttattccagaaacatatctctttaactagtaata

SEQ ID NO: 497351 - DNA, 201 bp, Homo sapiens
tatttggggagcttcttatttttatatctgtggatcctacagtcaaaggaaggcaagagaaagtgaaaagaaaataaatttgaaaaagaaggaccaaagaratgaagatggccagaggaagttttagagaaataaaacaggtaacatttgatggagaatgatagtaccatttataacactcggatcgctgtctccagtcag

SEQ ID NO: 497352 - DNA, 201 bp, Homo sapiens
agaaaaaaatgtctacgtaaggatgccgactgaaatatttcttatatcaaaaaattggaaacaataataataggaaggagataaattatattacatttatkttagggaatattatgtaggcactaaaatctttaaaaaatatttgtttgtttattgatttttacagaggcaaggtcttgctatgatgcccaggctggtctt

SEQ ID NO: 497353 - DNA, 201 bp, Homo sapiens
aagcctgttacttatttgtaaaggtccatagtaagattgaacttactatttggaattttaaattggtagcttcaagaactcttagaagatctttttttttcctattttaatgaagaacatttaatatacaggttttcttagtattgactttcataagtattttctggggcaattactatctcagttgattatctctgaagg

SEQ ID NO: 497354 - DNA, 201 bp, Homo sapiens
ataggcaatcctttccccattgcttgtttttatcaggtttgttgaagataagatggttgtaggtgtgcggtcttatttctgagttcttctgttccattggwctatgtgtctgtttttgtatcagtaccatactgttttggttactagagtcttgtagtatagtttgaagttggatagcatgatgcctgcagcttcattctt

SEQ ID NO: 497355 - DNA, 201 bp, Homo sapiens
gagtttgaacctgatcctaattctctaggggaaattacaaattattctttcttttcaaatggtagccatatacagtgattttacttttaacatcttttttttttttttttttttttgaggcagagtctcgttctgtcaccaggctggagtgcagtggcgcaatctcggctcactgcaacctctacctcctgtgttcaagct

SEQ ID NO: 497356 - DNA, 201 bp, Homo sapiens
gatttcattgcttgaacagctttcttttatgggagaaaacagaagttaaaatactatgcaatgattctgtgactagattcaaattaacttgttattatttygaaggttgtaaagcaccagaaaaacctttaatttgtcatctgtcattctaattagtcaatatccatggcatatttcccgttaataaatagagagcatggt

SEQ ID NO: 497357 - DNA, 201 bp, Homo sapiens
ctgtgcctggccaaacaacagatattttcttttgttcagatttagcttgtgatctgaggaaaatattttaaagacaggatagtcagaaggagaatcagaaytggagttagaaactggcattagtcttagctttatcattgatttcattgcttgaacagctttcttttatgggagaaaacagaagttaaaatactatgcaat

SEQ ID NO: 497358 - DNA, 201 bp, Homo sapiens
agtgattctcctgcttccatctcctgagtagctgggattacaggcacatgccaccacacccagctaatttttggatttttagtagaaacggggtttcaccrtgttggccaggctagtctcaaattcctgatctcaagtgatccgcctccctcagcctcccaaagtgctagcattacagacatgagccaccgtgcctggcct

SEQ ID NO: 497359 - DNA, 201 bp, Homo sapiens
gagaatacattgttagcaccttaaagaaagtaatataaatgggataacagaaatgattttattatttatgtgattttaatttatttttaaagtatcaattyttttgcaaagagaatatattcatgtattgcttatgtcattgaaaattaaaaatttctagagagactttcaatgtggaaatgtctctgccatgaagaactc

SEQ ID NO: 497360 - DNA, 201 bp, Homo sapiens
tagttcaaccattgtggaagtcagtgtggcgattcctcagggatctagaactagaaataccatttgacccagccatcccattactgggtatatacccaaakgactataactcatgctgctataaagacacatgcacacgtatgtttattgtggcattattcacaatagcaaagacttggaaccaacccaaatgtccaacaa

SEQ ID NO: 497361 - DNA, 201 bp, Homo sapiens
agatcgcgccactgcactccagcctgggcgacagagcgagaccccgtctcaaaaaaaaaaaaaaagaaagaaaaaagaaaaatttccaaacagggtgttcycttgtttcacattctctttggtgatggtcctgcaacagattttgataatcactatattgagaaactgcttcagattcgatctgttaggctgatcatagta

SEQ ID NO: 497362 - DNA, 201 bp, Homo sapiens
tgagccgagatcgcgccactgcactccagcctgggcgacagagcgagaccccgtctcaaaaaaaaaaaaaaagaaagaaaaaagaaaaatttccaaacagrgtgttcccttgtttcacattctctttggtgatggtcctgcaacagattttgataatcactatattgagaaactgcttcagattcgatctgttaggctgat

SEQ ID NO: 497363 - DNA, 201 bp, Homo sapiens
agggactggcagaaaacacattctgagacaaaggccatttatttagctctggccagttggtttatctagcctgacatttctcaacctgggcgctattggcrttttgtgccaaattattcttgattgtagagagctatcctgtgcattatggtatgtttagtagcatttctgcctcttcccactgggtagatgccaatggca

SEQ ID NO: 497364 - DNA, 201 bp, Homo sapiens
atgtacaaatagagatattattaatagtatttcccaagtctttaatatttcatttttattggatgtgagatcatctgccagagataattaatttcatattrtttgtgtaagtattatttattgagtgttaatacatagcagatactgtgaagaatattttatgtaccatctcatttaatcatcttagtaatttttagtatg

SEQ ID NO: 497365 - DNA, 201 bp, Homo sapiens
tatcaagtctccactaaaaaaggggttgggggcttgcagtgagctgagatggcaccactgcactccagcctgggcgacagagcaagactctgtctcaaggwaaaaaaaaaggcgcggagggcgagggggtggggggggagttattatgctgtctgagatggagtcctaaaggaacactgtgatttctgtggacaggtgact

SEQ ID NO: 497366 - DNA, 201 bp, Homo sapiens
ttattacacaagaccaaacactgaaggaagaaaagcctttagtctcattaaggagcccagacaaaaatcccacttaatccatcttgcttttccttttcctscaactcagctggtgtgcaggtgtagggcagcttggcagaagatttgaacgtttggaaaagggagtcattactgaaagtcactgacacacacttcccttgg

SEQ ID NO: 497367 - DNA, 201 bp, Homo sapiens
ttggccaggctggtctcgaactcctgacctcgtgatcctcccgccttagcctcccaaagtgctgggattacaggcatgagccaccatgcctggccaaatcygaatgatttttttaagattattttggcttgttaagaaaacttttttttttaaataattatatattcatagcaaggtacaaagaaatgtacagcgaggtca

SEQ ID NO: 497368 - DNA, 201 bp, Homo sapiens
tatgttttatctgtaagtactttgggatttcttttgaactaaaaatatacaaatacaattattggttatgactatttattgcctaagaactaaacagtggkgctttgatttgagtttgtttactaaagaggcatagtatgttttatctgtaagtactttgggattttttttaactaaaaatatacaaatatgtatagtttg

SEQ ID NO: 497369 - DNA, 201 bp, Homo sapiens
tcgtgtccttcccccaggactcaatttgtaagcctctttattgcattgtgctgtagtaaaaaattctcagttttgtgggcaacctgtgaaaccagccttcytttatttcaactttgttgttttgcctttatactgtgaattaaatgaatccttgggggttctaattatattatggaaaaaagaacttgatattctgagaag

SEQ ID NO: 497370 - DNA, 201 bp, Homo sapiens
agtgggaaacgcaaacagctgctgcctgaaatcacagcgcgtgggtactgggcagccagaccagatcagcagccattaagcagggcccacagttcctatgrccgttacctctctcagaagccaggcagagctgtgagttctttcaccttttgagggctcctcttggctacctcaaaggaatcatttggaatgctgctggca

SEQ ID NO: 497371 - DNA, 201 bp, Homo sapiens
gggacagtgggttggggggcaaccccccacaggccacaactgtagagagaactttcattcggaatttcctttattatgccagtaccttagccttgagggtrtgagtctttctttgaaattgtctgctttgcttgcatttacatgctcaaccctggatttttcccaatttaggcagttttattccccagcaatgagagtcct

SEQ ID NO: 497372 - DNA, 201 bp, Homo sapiens
gaaatgtgaatgttggtagtcttcaaagtttcagtgtcactggcaagtccttctttgttggaaattcaatttaacattcaagttctatagcaaatgcctcytattatgatgtcttgtgtttacagtttgcctctgtaagtagaaccctctaaagggaaaaatgctctggtcagattgttatggtctgtatgacagatacat

SEQ ID NO: 497373 - DNA, 201 bp, Homo sapiens
attaatcttcgagaaggtattattaaaaaaagtatataatattcataaattaaagtcaacttataagtacaaaggaatatctgtgactataaaaggaaaartaaactggaatttaaaatttaatcactgtgccttagtaaacacgatcctggtacatttcagcacagtatttgtgtttcagaataggattttgtcttctag

SEQ ID NO: 497374 - DNA, 201 bp, Homo sapiens
ttgactctttatccaacttgccagtctgtgtcttttaattggagcatttagcccatttacatttaaggttaatattgttatgtgtgaatttgatcctgtcwttatgttagctggttattttgctcattagttgatgcagtttcttcctggcatcgatggtctttacaatttggcgtgcttttgcagtggctggtaccagtt

SEQ ID NO: 497375 - DNA, 201 bp, Homo sapiens
gtgctctcaggttaaaatggtttatgcaagacttgatggtttgaaataaaattggctaaatggattctagtataaatgcaaaggatatttaactcacttgrgagctcataggcataatgcatatgtttgtttaaaaacaaaagaagcaattgaagattaacattgactttgtctcgcctggcgcggtggctcacgcctgta

SEQ ID NO: 497376 - DNA, 201 bp, Homo sapiens
gaggctgaggcaggagaattgcttgaacatggtaagcggaagttgcaatgagccaagattgcaccactgcactgcagcctaggcaacagaacaacactccrtctcaaaaaataaagaaataaagaaataaataaataataataaaaaagaaatgaaaaacaacatcttgtctattttttccaggatcaggtgtaataggaa

SEQ ID NO: 497377 - DNA, 201 bp, Homo sapiens
ttctttttattcttttttctctaaacttctcttcttgctttatttcattcatttgatcttcaatcgctgataccctttcttccagttgatcgactcggctmctgaagcttatgcattcatcacgtagttctcatgccatggttctcagctccatcaggtcatttaaggacttctctacactggttattctagttagccatt

SEQ ID NO: 497378 - DNA, 201 bp, Homo sapiens
gaatataatcaggaaggcactgatttctttctgttactgttgtttttaagcaaaaaagatcccattcctcctcttctatttctttgcatggtgaatagctycgctagttacccagccactaaacaacaacctgggaatcaacttcctctctattctgttgccccttcccccaaacaaccactcgatcatcaagatttcttc

SEQ ID NO: 497379 - DNA, 201 bp, Homo sapiens
tctgtacaatatagtgtgtttttgtactcagatatttcatgtgatggctctattttttgaagccatagaataattcttccttaagtaaaacagcaaactakctccttgatgtcactgagtttgtgaattattttcgttcattttgattagtacataggcctcacaagctattaaggagaaaaaagaagacaggttttctta

SEQ ID NO: 497380 - DNA, 201 bp, Homo sapiens
ttgctaagaccattggaaaagcgcagtattagggtgagagtgacctgattttccaggtgctgtcggtcacagcttcccttggctaggaaagagaattcccygaccccttgcacttcccgggtgaggcgatgcctcgccctgcttcagcttatgctcggtgggctgcacccactgtcctgcacccactgtctgacaagcccc

SEQ ID NO: 497381 - DNA, 201 bp, Homo sapiens
gtgagatggagtttcgctctgttgctcaggctggagttcagtggcgtgatctcgactcactacaacctctgcttcccaggttcaagtgattctcatgactyggcctcctgagtagctgtgactacaggcacacaccaccatgcccagctaatttttgtatttttagtagagatgggattttaccatgttggccaggctggt

SEQ ID NO: 497382 - DNA, 201 bp, Homo sapiens
ttgccagataattctggcctaaagataaagctggtgaaagtcagggctggggttttgctacctgtgtatttatcagtcttctcctaaaccatagtctgccytttgatagctctaataattaatttggtcttccctgtctttcttctcccttgccccctaccccttctccctgtctgttcacaggttatcttgacgaatcag

SEQ ID NO: 497383 - DNA, 201 bp, Homo sapiens
gattttccaggtgctgtcggtcacagcttcccttggctaggaaagagaattccctgaccccttgcacttcccgggtgaggcgatgcctcgccctgcttcascttatgctcggtgggctgcacccactgtcctgcacccactgtctgacaagccccggtgagatgaacccggtacctgagttggaaatgcagaaatcacccg

SEQ ID NO: 497384 - DNA, 201 bp, Homo sapiens
actatacttttgttctggaccatttgctagtaaattgcagaggttgcaaccctttaagctatgtagtttagtatgtgtcccttaagaacaaagacattccrttataagatgttatgtaagagactcagcacaaaagaggcatatgtaacatgtaggaagagaataacagtaattgatcaagttcaatataccataatctaa

SEQ ID NO: 497385 - DNA, 201 bp, Homo sapiens
aaaggtacgattagaatatcttccatagtaaaagagattaaaaataacctagactcttgcattagaaagcagagggagacatgacaaattattgcattcarttaacttttcttttacttactgagtgcccagaaattgctttaacaccctgaggtgtgaccataaggtaatgaggagtgatttttaaaaataaatatacca

SEQ ID NO: 497386 - DNA, 201 bp, Homo sapiens
aaaaattaaacaaggtcttagaacttaaatctgattttataataatattcattatcaatacttaattctaattttacatttttagatttatgtaattaacattagttacctatacagtaaagataaatatgtttcataatgctttttttctgacattagttcttgtttgaacacacaaagctacacttttctataagtaaa

SEQ ID NO: 497387 - DNA, 201 bp, Homo sapiens
attggtctgtatgtctatttttgtagcagtagcatggcgtttgggttactgtagcattatagtatagtttaaagtcaggtaatgtgatgcttctggctttrttatttctgcttaggattgctttgtctattcaggctgctttttggttccatgtgaattttaggacagttttttgtaattctgtgaagaattatgttggta

SEQ ID NO: 497388 - DNA, 201 bp, Homo sapiens
tatctcctccttgtcttctaatacatatatatacatattactatacttttgttctggaccatttgctagtaaattgcagaggttgcaaccctttaagctawgtagtttagtatgtgtcccttaagaacaaagacattccattataagatgttatgtaagagactcagcacaaaagaggcatatgtaacatgtaggaagaga

SEQ ID NO: 497389 - DNA, 201 bp, Homo sapiens
tacatgtgttttattaagcaagacaggtaaaatttaggcaaattaagtggcagaaaggaagagacattaaaacatttattctgtgacttgcgcctatatcmtagagcgtgctcctgcattagggaaataaagaaataaaatgcttctcttttgttatagacttgatcatggtgcctatttgggtaattgtttatatatatt

SEQ ID NO: 497390 - DNA, 201 bp, Homo sapiens
aaaattaaacaaggtcttagaacttaaatctgattttataataatattcattatcaatacttaattctaattttacatttttagatttatgtaattaacattagttacctatacagtaaagataaatatgtttcataatgctttttttctgacattagttcttgtttgaacacacaaagctacacttttctataagtaaaa

SEQ ID NO: 497391 - DNA, 201 bp, Homo sapiens
agcttccgcatctattgagatgatcatatggtttttctcttgaattctgtttatgtgatgaatcataaatatcgatttgcatatgttgaaccaaccttgcrcctcagaaatgaagcttacttgatcgtggtgaattaacttttttatgtactactggatttggtttcctactgttttgttgaggattttttcacatatgtc

SEQ ID NO: 497392 - DNA, 201 bp, Homo sapiens
acaaagaaagggcaataattgaaattttgtgttagcttcttcttgttattcaccaagaaaagttaaagtcaggtaatgatatcaatcaaaatgtaagtacrcctactgcctaaaaataacattgtggttaattgtgttccataatattcttggcatactttgcacaagccctggagaacaaagcctgagagcccatgggaa

SEQ ID NO: 497393 - DNA, 201 bp, Homo sapiens
tacaggcaagaaaagttggaatttcttccttggggaaatctcaaatgtagagttttaagtaaatattaaggttcaaaatgggcaatataatgagcacattygaggaatttgtaagtatttatgtaacacttcatgtttacaaaatgttttacagccatattcattaatttacataagtcccttggaaggtaacaatgttat

SEQ ID NO: 497394 - DNA, 201 bp, Homo sapiens
aaattaaacaaggtcttagaacttaaatctgattttataataatattcattatcaatacttaattctaattttacatttttagatttatgtaattaacattagttacctatacagtaaagataaatatgtttcataatgctttttttctgacattagttcttgtttgaacacacaaagctacacttttctataagtaaaaa

SEQ ID NO: 497395 - DNA, 201 bp, Homo sapiens
ccaaccttgcacctcagaaatgaagcttacttgatcgtggtgaattaacttttttatgtactactggatttggtttcctactgttttgttgaggatttttwcacatatgtccatcagggcctgaagttttcctttttcattgtgtctttgccagattttggcttcaggctgatgctagctttgtagaacgtaactcttcta

SEQ ID NO: 497396 - DNA, 201 bp, Homo sapiens
gtatctttatgcttgccatattttttttcttttttgaaggaaattttgtattattttaattatttttatggacagaaaactcaacagtgtacatttaaccsagttcagtggcaaagttctttaacctttgccttttcgagcttgataatgtgagctacagacttgagacccaggacattgcctccccagtgacagtggatc

SEQ ID NO: 497397 - DNA, 201 bp, Homo sapiens
agtttgaacctgatcctaattctctaggggaaattacaaattattctttcttttcaaatggtagccatatacagtgattttacttttaacatcttttttttttttttttttttttgaggcagagtctcgttctgtcaccaggctggagtgcagtggcgcaatctcggctcactgcaacctctacctcctgtgttcaagcta

SEQ ID NO: 497398 - DNA, 201 bp, Homo sapiens
tcctattgaattggactttgcttatttaaagaaaagtctataaagctacaggcaagaaaagttggaatttcttccttggggaaatctcaaatgtagagttwtaagtaaatattaaggttcaaaatgggcaatataatgagcacatttgaggaatttgtaagtatttatgtaacacttcatgtttacaaaatgttttacagc

SEQ ID NO: 497399 - DNA, 201 bp, Homo sapiens
cctgtaatcctagcactttgggaggctgaggcaggtggaacacctgaggtcaggagttcaagaccagcctggccaatatggtaaaaccccatttctactaataaaatacaaaaattagctgggcgtggtggcatgtgcctgtaatcccagctgctcgggaggctgaggcaggagaatcacttgaacccaggaggcggaggt

SEQ ID NO: 497400 - DNA, 201 bp, Homo sapiens
ctgtaatcctagcactttgggaggctgaggcaggtggaacacctgaggtcaggagttcaagaccagcctggccaatatggtaaaaccccatttctactaataaaatacaaaaattagctgggcgtggtggcatgtgcctgtaatcccagctgctcgggaggctgaggcaggagaatcacttgaacccaggaggcggaggtt

SEQ ID NO: 497401 - DNA, 201 bp, Homo sapiens
ctagtgtgcaaagttaatttaaagtgttagtacaaattgaggaagggaagtctctccagatttcattagaggatagactgaataagaacatgtcctacccrcaaggacaaaggagaagaaaatatattcttgactgtttcagaccacttcagataaggaggagacaatttaaaaaattaatttaaaaaaacacattaggat

SEQ ID NO: 497402 - DNA, 201 bp, Homo sapiens
atccataaaaatatcatgcctttatgtactttaatattaatattgctttgaaactgaatgctgaggtagaatttgttttttcaggtttctgtttactgttaagagttttctatattttcttccttttccttttttggactgttgttaatttccatattgctttttgaaaggagaaataagatattgttaaggggcccaaaa

SEQ ID NO: 497403 - DNA, 201 bp, Homo sapiens
gatctgatcagtctggcacaggtgatatgtctgcccttaatccaaccagacaacatggcttaaacatggctgccaagggcccacccatgtgtaggttaagwttggaggctatttagctatctcaaagtgtatctttatgcttgccatattttttttcttttttgaaggaaattttgtattattttaattatttttatggac

SEQ ID NO: 497404 - DNA, 201 bp, Homo sapiens
ctttgggaggccgaggtgggtggatcacgaggtcaggagatcaagaccatcctggctaacacggtgaaaccccgtctctagtaaaaaaacaaaaaattagycgggcgcggtggcaggcacctgtagtcccagctactcgggaagctgaggcaggagaatggagtgaacccgggaggaggagtttgcaatgagccaagatgg

SEQ ID NO: 497405 - DNA, 201 bp, Homo sapiens
tgaggtgggaggaacgcttgagctcaggagttcaaggctgcagtgagccgtgattgcactactgcagtttagtctggatggcagagcaagagcctgtctcaaaaaaaaatgaaaaaaaaaatagaagaaaaagaagtaaagtatgagtattaagaagtgagagaaaagttagggctagaatagttagcaaagatatcatgg

SEQ ID NO: 497406 - DNA, 201 bp, Homo sapiens
aatgcctgtattgagaaagcccagtcgagcagaagagtttttggtttctgcatttagaactgccgaacaactgaggaaaaccgattaaatctggaaggtgscagctcacttgacaggcttctccaggcacctttgaggagaatcaaagataaataaacacattttatgagaggagtatggggtgagagggagtgtttggac

SEQ ID NO: 497407 - DNA, 201 bp, Homo sapiens
gttagtaatttgcgttatttttaaatctccattattatgaagatattttatcagggacaaagattgccttttctctctccctctccttttcttttctttctttttttttttttttcccattaacagttgatggaggaaggtaactttgtatgagttattgttggacatgcaagccctgtttttttacatttgttgattctg

SEQ ID NO: 497408 - DNA, 201 bp, Homo sapiens
cttggaatcttttactgtttttcatagcatttcagagagttggaaaatagcttcagggatcatctaatagaatttatttatttaaatgaagaaattgtggycttgagagccttgttcagatgcacctggctaattaaaggtagagttagaatctgtaactactgattttctagtaacaagagcagaaagttctacagagcc

SEQ ID NO: 497409 - DNA, 201 bp, Homo sapiens
tttgggaggccgaggtgggtggatcacgaggtcaggagatcaagaccatcctggctaacacggtgaaaccccgtctctagtaaaaaaacaaaaaattagcygggcgcggtggcaggcacctgtagtcccagctactcgggaagctgaggcaggagaatggagtgaacccgggaggaggagtttgcaatgagccaagatggc

SEQ ID NO: 497410 - DNA, 201 bp, Homo sapiens
gaacgcttgagctcaggagttcaaggctgcagtgagccgtgattgcactactgcagtttagtctggatggcagagcaagagcctgtctcaaaaaaaaatgaaaaaaaaaatagaagaaaaagaagtaaagtatgagtattaagaagtgagagaaaagttagggctagaatagttagcaaagatatcatggaaaaggtagga

SEQ ID NO: 497411 - DNA, 201 bp, Homo sapiens
ccaataccatagtagcactttatatttactttgtttacgcctaattacagcctgcatattctagataaaacaaacagactcagccaggcacggtggctcaygcctgtaatcccagcactttgggagcccgaggtgggcggatcacgaggtcaggagatggagaccatcctggctaacaaggtgaaacaccatctctactaa

SEQ ID NO: 497412 - DNA, 201 bp, Homo sapiens
tgaggcaggagaatgacttgaacccgggaggcggagattgcagtgagctgagatcgtgtcactgtactccagcctagtgacagagcaagactccgtctcgwataaataaataaataaataaataaataaattttaactgcagaattacctatttaaaaagctgcttagtagttaagtagctgattgtccctttaaaacaat

SEQ ID NO: 497413 - DNA, 201 bp, Homo sapiens
aggccgaggtgggtggatcacgaggtcaggagatcaagaccatcctggctaacacggtgaaaccccgtctctagtaaaaaaacaaaaaattagccgggcgyggtggcaggcacctgtagtcccagctactcgggaagctgaggcaggagaatggagtgaacccgggaggaggagtttgcaatgagccaagatggcgccact

SEQ ID NO: 497414 - DNA, 201 bp, Homo sapiens
gcctcaagtgtgatctgcctttggccaggacatccttttttttttttttttcttttgagatggagttttgctcttgttgcctaggctggagtgcaatggcrtgaccttagctcactgtaacctccacctcctgggttcaagcgattctcctgcctcagcctccccagtagctgggattacaggcacgcaccacaacgcctg

SEQ ID NO: 497415 - DNA, 201 bp, Homo sapiens
tcccttggtatctgccctgccccatccccattcattttggtattcacatacccaataccatagtagcactttatatttactttgtttacgcctaattacarcctgcatattctagataaaacaaacagactcagccaggcacggtggctcatgcctgtaatcccagcactttgggagcccgaggtgggcggatcacgaggt

SEQ ID NO: 497416 - DNA, 201 bp, Homo sapiens
tgaggcaggagaaatgcttgaacctgggaggcagaggttgcagtgagctgagatcacgctattgcactccagactgggcaacagagtgagatcctgtctcaaaaaaaaaaaaaagagcaatgaacacagttccttatttatactcatagagctgaacagttatttcaaggaggctacttgaccatttccagccactttaat

SEQ ID NO: 497417 - DNA, 201 bp, Homo sapiens
agtgtcacttaatatcagcacttctgccaactcttattcatttttccagctgtatttggacaacatttacatagataattttgtgaaattttcaactagaagttgagttgagataaatcatgcagttttcaattcagtgtatcctgaaagataacgaaactcactgagctgcctggttttccaacaagctacatagaaagc

SEQ ID NO: 497418 - DNA, 201 bp, Homo sapiens
cttgcaatgcaacctctttttgatatataactctgttattatttggcccagtggtggtcactttcaccaaggctgaaggaaacccctgctggtttttagtytcatattccttaacccctctcctacttcactgattcctcaagttctgtggtaatgaactgagcctccgagtactctctggactactggcaatgagtaatg

SEQ ID NO: 497419 - DNA, 201 bp, Homo sapiens
gccacaagaaacccctgacttgtgttcatagcaaaggaagagttaccaggttatcctcccagaaatccaagaaagaatggaaataattgatttttctagatttttttttgtatagctgagcagataaagaggctatataaatatattcctatagtctataatgaaggtttttattagtggattaaaatgaacaatgtctta

SEQ ID NO: 497420 - DNA, 201 bp, Homo sapiens
gtgtcacttaatatcagcacttctgccaactcttattcatttttccagctgtatttggacaacatttacatagataattttgtgaaattttcaactagaagttgagttgagataaatcatgcagttttcaattcagtgtatcctgaaagataacgaaactcactgagctgcctggttttccaacaagctacatagaaagca

SEQ ID NO: 497421 - DNA, 201 bp, Homo sapiens
tgtcacttaatatcagcacttctgccaactcttattcatttttccagctgtatttggacaacatttacatagataattttgtgaaattttcaactagaagttgagttgagataaatcatgcagttttcaattcagtgtatcctgaaagataacgaaactcactgagctgcctggttttccaacaagctacatagaaagcat

SEQ ID NO: 497422 - DNA, 201 bp, Homo sapiens
agaaagagtagatattctgtggcgactctcctttccttctcggctgtgagacagaacaacagcgcctttgtgatgacctttacagggctgtttacatttgktgacctgcctgaacactcccgccagagtggacgcacctcttggctaatgaggaacagccatgctgtcttttactatggtagaccttggaggttaaaatga

SEQ ID NO: 497423 - DNA, 201 bp, Homo sapiens
agaaccagagactcaaatgcagctttccttatttctctttctttcatctctgcttctctcagagtattagctcattttccctctgcagacttactctctcmtgcacattatgtgaaacatgattgctaagcatgcctgggttatacatctcccaacaatcaagagaaactctctctagcacatttagtgagaaaaaccttg

SEQ ID NO: 497424 - DNA, 201 bp, Homo sapiens
tcacttaatatcagcacttctgccaactcttattcatttttccagctgtatttggacaacatttacatagataattttgtgaaattttcaactagaagttgagttgagataaatcatgcagttttcaattcagtgtatcctgaaagataacgaaactcactgagctgcctggttttccaacaagctacatagaaagcatga

SEQ ID NO: 497425 - DNA, 201 bp, Homo sapiens
ccacaaaggttatgtgatcataatctttgaatattggaaagaggaagatgagccttggtaaggatgtaaggcaatagttggaatatccatggaggcatatrtgtttcaacatcaggaagaacattctaacaattagagctcttaacaggctgtattgtgagttatggacttcttattcatagtaggatattcttttcattg

SEQ ID NO: 497426 - DNA, 201 bp, Homo sapiens
actgggatgggaaggacaataaagcggcaggctggagagactgaggggctggttagagatttctcaggctgctttttgaaacacttgaaggagccggtccrtgctattgttgtagtaaaatagaaagcggaactattctccttttgcaaaaaaaaaaaaaaaggaagaaaaaaagtaaatgaaagaacccccctcctccca

SEQ ID NO: 497427 - DNA, 201 bp, Homo sapiens
aagttctttccaactcagagatgatgtgattctagctgtttttcaggtaaggcaggcacatattggtttatactaggaattttctttttccacgtatttcwactcaaggattactctgtttggaaactgaggaatatttattcagctgtttttgaatttgaggatagaggaaaatgttttattttctaaaaatgaatgtct

SEQ ID NO: 497428 - DNA, 201 bp, Homo sapiens
ctagaacctaggtctcttggctgcttgttcaagcctctttctactataccttacgagttttctttgtatactgaggtaggatgctcacttccaggcaaacrctgattgctgaaactgagaaactgagaactctatgagtttagagtttggggtgacaacacagctaaaacttaaagacttacacatgtcacattattcttt

SEQ ID NO: 497429 - DNA, 201 bp, Homo sapiens
tagaacaactagtttgagtgaccccagaccatcatgccttgtgtgaaaagacttttggaaatgtgcccttccatttccattctgccgcttgttaccagacrtgatgcacgttccttcaaagccctgtgacttttccagaaagcagctctccctgcaagagagagaaactttcccttattattctttcagtaatgaattcct

SEQ ID NO: 497430 - DNA, 201 bp, Homo sapiens
aggcatgtctaaaatcattaagtggcctagctcagaacattctttgtgaccctttcccctccccacccagtgcctagtgactgatttatctgaatataagsctacttccacttttagttcaagggccttgctccctgcctgcaagaatctctctaatcacattgccctccctccacccgctttccccattgaaaccaatgt

SEQ ID NO: 497431 - DNA, 201 bp, Homo sapiens
aatctcacagagtttgtgtgagaattaaaggagaaaatacttgggaagaagtgctttgaaatctccattgcactctgcaaaagcaaggaaatgcgcttgtsatcagtatcatgttgacgtggagtgagttactccccagctgttcacgatatggtcgcccacaaagagcaagtaggtcacttcaccaaacagaattctgta

SEQ ID NO: 497432 - DNA, 201 bp, Homo sapiens
cgcacctcttggctaatgaggaacagccatgctgtcttttactatggtagaccttggaggttaaaatgaaaaataagaggatcctctgttgatgactagtygaagttaattttctttacagatttattgaggtataatttacatactataaaattcacccattgtaagtatacaattcaatgatttttagtataataaatt

SEQ ID NO: 497433 - DNA, 201 bp, Homo sapiens
tgccttaactaccatcttgctagaatagaaggtcctgtgtttaggcatcaaagaaaggaattgcactgagaaattttagtgataattcttttattgtaatsgtgattttcttcctcctgctaatctttttaagtggtattaaaggaagcttcttgccaggcagtaatattcctccatgagcacacgatctttttccttatt

SEQ ID NO: 497434 - DNA, 201 bp, Homo sapiens
ggtggatcacgaggtcaggagatcaagaccatcctggctaacacggtgaaaccccgtctctagtaaaaaaacaaaaaattagccgggcgcggtggcaggcrcctgtagtcccagctactcgggaagctgaggcaggagaatggagtgaacccgggaggaggagtttgcaatgagccaagatggcgccactgcactccagcc

SEQ ID NO: 497435 - DNA, 201 bp, Homo sapiens
gttgttctgaatcatgagtaagatgcctataaggaagaaaaattctcctaaatgactacatctggtcatgccttcttagcttttaaagtattttgtgatamacaggaatttatgtttttttcctgaggtgaagctctctgtaagaaggaaagcagatgtttctttttaagtgcttgtatacacctgccacaaggcagactg

SEQ ID NO: 497436 - DNA, 201 bp, Homo sapiens
gagccaagatggcgccactgcactccagcctgggcgacagagcaagactccgtctcaaaaaaaaaaaaaaaaaaaaaaagattaatttatggattctagtrtataacatacatacataaactactgtcttcatatgtgggtacctggaaaaatttttccattgcaaaaaagataatgttattctaaagtaaaattctagct

SEQ ID NO: 497437 - DNA, 201 bp, Homo sapiens
accagtctgcagcccaccagttgtgtaagaacactcctgctgccctacttctttgccaacattttatatgtttagactttctcttttttccaaactaatgkgtgtaaagtggtatttaattttaagttgcatttctctgattactaatgaaattgagtacctctttatattactagttagttatttggctttttattgttg

SEQ ID NO: 497438 - DNA, 201 bp, Homo sapiens
gagattccagtgggaaagacctggtagagaaagagtgggagaatgcgttgacctctggagggcagattatggcatgccaggcaatgggttgtgccatcagsgaaggaatctagaaagacgaggagactcaggagaaaggagatgacttctgttgacaggtcattgttgctcagacttagtgcagatgagaaaggaaatcca

SEQ ID NO: 497439 - DNA, 201 bp, Homo sapiens
aattgtgtgtgtgtgtgtgttttgaggtgaaagaggtttagggaaaatttgaaaagctattggaatggaaattaaaccatccagagtgttttattttagarggatagggtttaagatagactcagcagtggtggcattggccacagggctgcacctaccctgggatgcagaaactggcccatccaagtcagctccatggga

SEQ ID NO: 497440 - DNA, 201 bp, Homo sapiens
agctcttgccctttgactggatactacaaaactaaggtaaaccagcagaaagtcctgtcttagggtcattagaatgtgaggttttttttttgtttgtgtgtttttttttttttttttgagacatacttttactccatcgcccaggctggagtgcagtggcatgatctccactcactgcaacctccacctcccacactcaag

SEQ ID NO: 497441 - DNA, 201 bp, Homo sapiens
tgagcttttatgccctaaattatattattttagatttatatataaagtttaggaaagtaagcggaaactagaagtgctataaaaaactgagttacatattwaaaattcaagttattttttctggttttccagagtggccaaattattttcttatttaaaacctaggcaccctagagccatgtgtgtgcatgtgaactctac

SEQ ID NO: 497442 - DNA, 201 bp, Homo sapiens
cagaaaggagagatcatcatgatctttgtgatggaggcttggaccactgccttaggatgtcagggcagaactaagatgggccccttggttggtctgtcctkactcactgtgtctgcagtgcctggatatcagccagcagaccacctccatcattgagttagacccacttacaaggtggcaggctattaaccagtcccctgt

SEQ ID NO: 497443 - DNA, 201 bp, Homo sapiens
tgaatctttttgagatatcaacaggcttcagcaaataatagaacacatgaagtgatacaagattggcaagaaagaacagagacacttttgtgccctcaaartagtgtagcagtagaacacttgagagatttcttcaggacttagaagaaccagatatcatagaagacagaagagacaaaaacagcagattggtttaaaatt

SEQ ID NO: 497444 - DNA, 201 bp, Homo sapiens
acgggtgcagcaaaccaccatggcacatgtatacccatgcaacaaacctgcacgttctgcacatgtatcccagaatataaagtataataaaaaaaaaaaaraaaagaaaagaaaaagaaatacggaagtgacggagtcattttgtagttggaagcattttctcaggcagccatttacaggttagggggatggagatgaaac

SEQ ID NO: 497445 - DNA, 201 bp, Homo sapiens
agatgccagtagcagcactcccttgggggacaaaattgtccccagttcagaacaactgctgtggacatacatggtggtcctacacaactggagtttaaatrtggatcctgaacagctttcatcagtctgatgcacttccccaatatttgtaatcatgaggagcagagcaaaacaaaggcataaatgttggggtaatatttt

SEQ ID NO: 497446 - DNA, 201 bp, Homo sapiens
agcactgcatttagaattgggagacttgtattcaaggaccagctttgccacaaaccatctgtactattttgagcaaggcacttaacttccctggacctcarttccctcagctatacacataagagcttgcattaggtgaagctggcaggcctttcagtttgcttcttctgtcacattctgtcttcggtgagcaaattggta

SEQ ID NO: 497447 - DNA, 201 bp, Homo sapiens
atctcacttccagctgaccttgaggctgtgtgcaagaaggaagtgaagaatgaaacagagttatatggcttgatggagtattgaatgcatgccccaacatmcacacacacaggctgaaagatttactgattcacagcatttaaggaaatctgtcatgtcattagtggaccacgaagtggcttcatgtataagggaccttca

SEQ ID NO: 497448 - DNA, 201 bp, Homo sapiens
ggccttggatgttaggtgactgcctgttcagagaaagtggggagggtgaaagggagtgaaaaggcagagggcacatggacaacagttccttgctgtattcrtctgctcaggctgcataaaagaataccacaaactgcatggcttaaagatcagaaatgtattttcacacggctctggagactggaaatccgcaatccaggc

SEQ ID NO: 497449 - DNA, 201 bp, Homo sapiens
tactaaatggaactatgagggctctgtgtggtggctcatacctataatcccagcactttgggaggctgaggtgggcagatcacttgaggccaggagttcargaccagcctggccaacatggcgaaacaccatctctatgaaaaatacaaaaattagctggatgtgatggtgcatgcctgtaatcccagctacccaggaggc

SEQ ID NO: 497450 - DNA, 201 bp, Homo sapiens
tagatctgaaaaatgcaccagtccacttttaatctacttttgggaagatgattgtaagatattctgtacccacttagggatctcctgcccttcggatacayatgccttaactaccatcttgctagaatagaaggtcctgtgtttaggcatcaaagaaaggaattgcactgagaaattttagtgataattcttttattgtaa

SEQ ID NO: 497451 - DNA, 201 bp, Homo sapiens
agtaaatcatattaatttaggtttttggcattttttttgttttctgagagaaacatgaagagttctgcttatttattttttatcttgagaatgggaacacrttaacaagtacaagcgacaataaaacttactccataactacattatgaactatattaacttactctacaactcgataaccaacattatggttggttaaat

SEQ ID NO: 497452 - DNA, 201 bp, Homo sapiens
atggagtattgaatgcatgccccaacatacacacacacaggctgaaagatttactgattcacagcatttaaggaaatctgtcatgtcattagtggaccacraagtggcttcatgtataagggaccttcaataaaattaactgactgacttctcatcagaaaccacagaagccagaaggtaattgaataacatattcaaact

SEQ ID NO: 497453 - DNA, 201 bp, Homo sapiens
aggctcatcaaagcagctaaggtaatcacatttcctggcactgtcatctccagctatagaggatgaaagaaatccagtggacaggtttaaggagacaaatktttttttgttttaaaatatgatgtttaggtaaatgaagctagaaaagcctcaaaataaattccttctgagtaggactctaggccagagatagaataagca

SEQ ID NO: 497454 - DNA, 201 bp, Homo sapiens
cctaagatcttagagtgagaggagtagagattatgaaagcagttttactttttgattttagggtctttctatataatttcagcctgtatcagataattccrtttaggacacagctggtacatttaatgatcacaaactctgaaggtagtaactggatgcaataatcacacaacaaagtcattgagtaggtttgttgactta

SEQ ID NO: 497455 - DNA, 201 bp, Homo sapiens
atgattaattctagacatgaattagaacaagcccaagctgaacagctctctcagaggaagtcatctgaaattggtatgtgtgacccagtatatcttttgasaatttgcattggaaaccacagtgagcatggaagaaatataaccttgatcctctgacctaataaacattcttgcaattctaaatgtacctagagtttgtga

SEQ ID NO: 497456 - DNA, 201 bp, Homo sapiens
gaaggtaattgaataacatattcaaactgttgaaacaaaaagattgtcaatccagaattctatatccagcaatattatccttcaaaactgaaggagaaatyaagacatttccagagaaaacaaaatataagagaaacacctgccatacagaaaatactacaaagaattcttcaggctgaaatgaaaggacactagagagta

SEQ ID NO: 497457 - DNA, 201 bp, Homo sapiens
agttttattgttggaaggctttctattctggttggagtcaggggaattgatggctgatttcatgtgcaagagaaagtatttggggattcatattccctacyaaaccatccctgcgaaaagctggagtccatttgaaagattatatgcaagtttgtggcttgtgttctcttttaaaataagttcaacaagcaagacagctca

SEQ ID NO: 497458 - DNA, 201 bp, Homo sapiens
ttcatacagttacttgcttaccatacctgctgttctataccttgcttaatttcacttaacactatgtcttggaattcattccatgttagtacataaaatgctgcttttttctttcttgtggttttgtggtatctattgtatagctgtattataatttttttttaactaggtccttactgatggacatttatgttgttgcca

SEQ ID NO: 497459 - DNA, 201 bp, Homo sapiens
gtcattgttgctcagacttagtgcagatgagaaaggaaatccagaaacctacatgacagctcctcttggattggatgaaaatattgattttttttttttttcctagctggaatttgacagggtcagttcatgtctgggttttcagcacttaatacagggcgcttttgtcttgggaggcggctggactggtttttcctccag

SEQ ID NO: 497460 - DNA, 201 bp, Homo sapiens
gagaatggcatgaacccaggaggcggaggttgcagtgagccgagattgcgccactgcactccagcctgggtgacagagcgagacgctgtctcaaaaaattaaaaaaaaaaattttttttaaaaagtgtgttggtaaagataaatatgtaggtaaatgcaaaagacaatagaatgtattttcatttgtaagtcttttcctct

SEQ ID NO: 497461 - DNA, 201 bp, Homo sapiens
tttccgatagaccatagcacatgaaaactaaaaatgtaaaatgtgtggataggtcaaggaaagaacacaagagaaatagcagcacttcctagaaccaagaktggtttctagttttattgttggaaggctttctattctggttggagtcaggggaattgatggctgatttcatgtgcaagagaaagtatttggggattcata

SEQ ID NO: 497462 - DNA, 201 bp, Homo sapiens
tgttgctcagacttagtgcagatgagaaaggaaatccagaaacctacatgacagctcctcttggattggatgaaaatattgattttttttttttttcctakctggaatttgacagggtcagttcatgtctgggttttcagcacttaatacagggcgcttttgtcttgggaggcggctggactggtttttcctccaggcagg

SEQ ID NO: 497463 - DNA, 201 bp, Homo sapiens
aaccagaacaaaaaataagatgggttgatagataaatagatatgtgctaaaaaacaagtgtaataaaattattttggtctttttgtttccgttttttgagrcagggccttggtctgtcacccaggctggagagctaatcatagctcattacaacctcaaattcctgggttcaagtaataaaatgttaatggcagaaccagt

SEQ ID NO: 497464 - DNA, 201 bp, Homo sapiens
acagtattccattgtgtatacgtaccacattttctttattcagtctatcattgatgggcatttgggttgatttcatgtctttgctattgtgaatagtgctrcaatgaacatatgtgtgcatgtatatttataatagaatgatttgtattcctttgggtatatacctggtaacggcattgctggttcaaatggtatttctgc

SEQ ID NO: 497465 - DNA, 201 bp, Homo sapiens
agcagctctctaggcccaaagtaaaactttaggttttttttctttttttctttttttgagacagagtctcactctatcacccaggctggagtgcagtggcrtgatctctgctcactgtaagctccacctcccgggttcacaccattctcctgcctcagcctcccgagtagctgggactacaggtgcccgccaccacgcccg

SEQ ID NO: 497466 - DNA, 201 bp, Homo sapiens
tagtgaaacaggaaaagttcccttgtccccgtcgcagggcatgcgacaagggggagtggcttgcttcttcagtgccccactgctcaaacctctaggggagwacacagatgggcaggctgtggggctctgaccccacggcagtgtctaggggtaaatgtttacagctgaagccccagtgaatgttgaagaatacgctttgac

SEQ ID NO: 497467 - DNA, 201 bp, Homo sapiens
aaagtaaaactttaggttttttttctttttttctttttttgagacagagtctcactctatcacccaggctggagtgcagtggcatgatctctgctcactgyaagctccacctcccgggttcacaccattctcctgcctcagcctcccgagtagctgggactacaggtgcccgccaccacgcccggctaatttttttgtatt

SEQ ID NO: 497468 - DNA, 201 bp, Homo sapiens
aaggtagctttgaatttttttagtaaaacagctaagtttataaataaaattagagaatcaagctaggtttatttttgggcagaaaggtagctatttaagcmtgtgttataaaataatgagacttatttctagaagaattgattcaagaatatggcatttgatgacagaatagttggaataagcgtacagccttttaaggtg

SEQ ID NO: 497469 - DNA, 201 bp, Homo sapiens
aacagtgaggaagtggaagcaagaaaaatgattcacaaggtaaataattgaaatttgagtgtgatcttagttgttgtgtggtgtatttgactggtggaaaytattggagagtcagcatgagatgttgtcatgcagtcagtggtatgtgaattttagggttttattagggaactgcaagactaacagtaagaccaacatgct

SEQ ID NO: 497470 - DNA, 201 bp, Homo sapiens
tgtatttttagtagagacagggtttcaccatgttagccaggatagtctccatctcctgacctcatgatctgcccgccttggcctcccaaagtgctgggatwacaggcgtgaaccactgcacccagcccctaaaactttagttttacttgaactgactttatattaattttctactactagaacaagtcactgtcccccaga

SEQ ID NO: 497471 - DNA, 201 bp, Homo sapiens
gctgggattacaggcgtgaaccactgcacccagcccctaaaactttagttttacttgaactgactttatattaattttctactactagaacaagtcactgycccccagagtttgaagaaatgtgaatattaactagggcttatctgaatgagaacaacagcattgctcttttcgtagtgttgtaataaatatcatcttaga

SEQ ID NO: 497472 - DNA, 201 bp, Homo sapiens
gctggttttaagtttctgaagttgcctccctccttcatctcattccgtcctcccccttcagttctttggtccgagacccaatagaggatgtctacagccastctccctctagggagggcctgggtctcatcttccacccactgccattcaataatagcttgggtctgtcttggctaagccaagggaacatccagcttcact

SEQ ID NO: 497473 - DNA, 201 bp, Homo sapiens
aacaactccccagcaacccgccaatctcttttgtccccacagtcgagctctggaaaatatctgaatgccacagaagtgggagtaccctttgatgtttataytggctggctccttttcctttttgctttttctttttttcatttaataatcagggtagtagaaaatgcggagaattaaccgcatgacagcagcagaggaatt

SEQ ID NO: 497474 - DNA, 201 bp, Homo sapiens
atctgagccttcagtgagttgtaatctttttgctggtggagtgttttgcctggatgttagtggctgctctctgatcacggtggtggttactgaaggttggrgtggatgtgccactttctcaaaacaagtcaacagtgaagtttactgcattaatagactcttcctttcatgaaatattgctctatagcatgtcataatgtt

SEQ ID NO: 497475 - DNA, 201 bp, Homo sapiens
aatggggaaatactcatgatataggaagaagtgaaaagtaggttataaaacagaatgtatagtatggtccccattttgggaaatatatttacacttatgamaataaaaaaatcagacaggatacataatgagttgttagcagtggttatatatactctgagaccatgagttattttgatttttgagaggcgagtgtgcttg

SEQ ID NO: 497476 - DNA, 201 bp, Homo sapiens
aagcaggagctttttcttctctccatccaaacatgcatctcttaccagtttgtactggtcatggaatccactgttcttttcagtggttgatactgtaccaratcattttggtatataaactgtctcagatttagccagtatgttctggtatcatatctccaccgtctatttttttttttttaacacttccttgatttttgg

SEQ ID NO: 497477 - DNA, 201 bp, Homo sapiens
gaatccactgttcttttcagtggttgatactgtaccagatcattttggtatataaactgtctcagatttagccagtatgttctggtatcatatctccaccrtctatttttttttttttaacacttccttgatttttggcataagttattctaggcacaccttgtacctactctgcctaagctctgaaatcacccattttcc

SEQ ID NO: 497478 - DNA, 201 bp, Homo sapiens
tagcactttgcagaagtgctttcctctttcatgataggtgacccagtttggagatcaggaagattttgtcatccttcacattgcaagacttgaagacttgyaactcaaaatggtatatttttttcttttcttccaatagagaacaattccactctagcactcaagtatctaatacttttgggacatgttgaaactgtttcc

SEQ ID NO: 497479 - DNA, 201 bp, Homo sapiens
ggcacagcagccattgctaattgtccttgctgcagccttgttgggtgacacctctggcttccagggcctcatattttcacagcttcactgataactctctragaggaattgtccctcccactaagattcccttctagaagatgagtttttccatgagcattttaaaattttctttgttgccttgttcatttttttttccaa

SEQ ID NO: 497480 - DNA, 201 bp, Homo sapiens
tcaggggaaacttgggggtcatagagaaagctgaagaggggtgcttgcttctgtggatgacctcttcccacccagtgcagcgacactccccttttgtctakagctatccttagtcaagccagggctgcgggaccctaacccacacttccgctgtgtttctggatctctggtttgcaaggccagtggctctgtgggcaacac

SEQ ID NO: 497481 - DNA, 201 bp, Homo sapiens
ttcccttctagaagatgagtttttccatgagcattttaaaattttctttgttgccttgttcatttttttttccaacatttaaaagagcagaagtgagggcraagagaaaggagaatatttagatctgaaaaatgcaccagtccacttttaatctacttttgggaagatgattgtaagatattctgtacccacttagggatc

SEQ ID NO: 497482 - DNA, 201 bp, Homo sapiens
tctaactgcaggctaagcaagttatactgtgtgtataaagtgcccaagtctaagaggcattgtagacaggctatttttagggaaactcatgtttttctttraaagttcagctagcatttggaatcgatatacagtataatatttaaaaaaaaaacaacatatttcctcatcccccaagaggtttcttaaaatagcatgtaa

SEQ ID NO: 497483 - DNA, 201 bp, Homo sapiens
gttttccgatagaccatagcacatgaaaactaaaaatgtaaaatgtgtggataggtcaaggaaagaacacaagagaaatagcagcacttcctagaaccaakagtggtttctagttttattgttggaaggctttctattctggttggagtcaggggaattgatggctgatttcatgtgcaagagaaagtatttggggattca

SEQ ID NO: 497484 - DNA, 201 bp, Homo sapiens
aaaaaatatataaaatatatatataattatatatatattttatatatatttttttctaggttttatatatatattttctaggtttctaggttttctaggtwttatatatatatataaaataaactcctatatatataatgcttaataaactgtatatataggagtttattaagcattatatatatataggagtttattaag

SEQ ID NO: 497485 - DNA, 201 bp, Homo sapiens
attacttgttttccgatagaccatagcacatgaaaactaaaaatgtaaaatgtgtggataggtcaaggaaagaacacaagagaaatagcagcacttcctakaaccaagagtggtttctagttttattgttggaaggctttctattctggttggagtcaggggaattgatggctgatttcatgtgcaagagaaagtatttgg

SEQ ID NO: 497486 - DNA, 201 bp, Homo sapiens
gtcatccacacagagttaggagaaaatacatctagagtttgccaaatccaaaggcaagactgtaagaaaaagatactaaaagagaaaagagcagaggatgkctctgcattttgtgatacattaaaaagttatggtaggagaaggagataaattaagaatagcctggggaaagagatgtagagagtgaagtcaaagaagcag

SEQ ID NO: 497487 - DNA, 201 bp, Homo sapiens
cttagaggctgtggtgacactgaatgagagctctgaaggaaatcatagtgaaacaggaaaagttcccttgtccccgtcgcagggcatgcgacaagggggartggcttgcttcttcagtgccccactgctcaaacctctaggggagaacacagatgggcaggctgtggggctctgaccccacggcagtgtctaggggtaaat

SEQ ID NO: 497488 - DNA, 201 bp, Homo sapiens
tatagtctagtcatagcctagctaaagaaagatgagtcagctgaaggcagagggtctgcattgggcacatagactggcagagagttgggctcagttggctyaatcctctgactaatgaccagttaattctgcttattctctcttaactcaaggtatttgctgccttaagctactttttaaatacttagtggaaataagtca

SEQ ID NO: 497489 - DNA, 201 bp, Homo sapiens
gcttgagccaccgcacccggccaccccagttcttttctggtggaaatagtgttaaagactaagttctgggcataggtgtgctcattactattgaggtatcytggctcttggctctttcagtgaagtgaacttggggaaaaatacacacacacacacacatacatatatatataaatacacacacatatacacctacatatg

SEQ ID NO: 497490 - DNA, 201 bp, Homo sapiens
catttacttctgcttaaactctgatatatttgagaaagcagaaggtaccacagtataatggtatttttccctttattattagttgtagtatataatattastagcagtattggtaaatattttagaatttgaatgagcctgcctttcaaatgaaatctaaatctttctgttggtttttattttattactactgcatccagt

SEQ ID NO: 497491 - DNA, 201 bp, Homo sapiens
ctgtctactcttcatcaaacttaagcataaaaatacacagatttccctggtttgggggtggtctttcttcttattcttctttttttttttttttttttttgccagagtctcactctgtctcccagtctggagtacagcagtgctatcacagctcactgcagcctcaacctcccaggctcaagcaatactccaacctcagcc

SEQ ID NO: 497492 - DNA, 201 bp, Homo sapiens
tgatccgcccgccttggcctcccaaagtgctgggattacaggcttgagccaccgcacccggccaccccagttcttttctggtggaaatagtgttaaagacyaagttctgggcataggtgtgctcattactattgaggtatcttggctcttggctctttcagtgaagtgaacttggggaaaaatacacacacacacacacat

SEQ ID NO: 497493 - DNA, 201 bp, Homo sapiens
gggtggctgaggcaggcgaatcgcttgaacccgggaagtggaggttgcagtgagccaagactgcgccactgcactccatcctgggtgacagtcagactccrtctcaaaaatataaaaaataaaaaatgtgtgcttgttcttatatgtacataaggtggaaggtaaacattttaagtgtctgtgagctacctagtattctag

SEQ ID NO: 497494 - DNA, 201 bp, Homo sapiens
tgaggcaggagaaaggcatgaacccaggaggtggagtgtgcagtgagccgagatcgtgccacagcactccagcctgggcaacagagcgagactctgtctcaaaaaaaaaaaaaaaaattgatagcatgaaaatttgaagtaaagagtcaattatgttaaagaaaaaaacactccaaaatctaacatgatgctaggctatgt

SEQ ID NO: 497495 - DNA, 201 bp, Homo sapiens
caggctggtcttgaactcctgggctcaagtgatcttccaggctcaagccaccttcccagctcagcctcctaaagttctgggattacaggcatgagccacckcgcccagccaggtcttcatttctaaaggttctcatgtcacataaaacttacgttaaataaatttttatgcttttctcttgtaaatcttgttgttgttgct

SEQ ID NO: 497496 - DNA, 201 bp, Homo sapiens
acatctcagaattcaaggaaatattatatagataggccttaaaaaaggagggaccagtatggttctgagaaactcagctgagcctttcttttaatgctctrccactgagatgtttagcttccagttgacagtctatgtgcctttaaattcaaattctcaaatgagatactctaatttatttagtttaagttataagtctac

SEQ ID NO: 497497 - DNA, 201 bp, Homo sapiens
cgcttgaacccaggaggtggaggttgtagtgagccgagatcgcaccactgcactccagcctgggtgacagagtgagaccctgtgtcaaaaaaaaaaaaaaraaaaaagaaaaaagaaacagaaaatatgttatatttttctctgtacttttctgcatttacatttttctcaaaattaaaaaagtagatagccactctttca

SEQ ID NO: 497498 - DNA, 201 bp, Homo sapiens
ctaaagtactcagcataatactacacacacaatagtaaagaactcagtgaatattttctaaataaaagaatcaccaggaacaatgctagtagtttgatctyctactctgagcagtgatgctcagaatatagtagaggttccatcactgccttatcatgtcaccatttttaaggagcagaagacatgcacaggaaagttgcc

SEQ ID NO: 497499 - DNA, 201 bp, Homo sapiens
tcccacaatctgatttaggccaagaatgacttacatttgaaatcccaaaccaagactgttcaagattggtattaaagtcggagcaatgaggtggaggtagkgttcacctccacattattctgagaatgggcctgaccctcatggatctgtgggtgtgaggagtggtggttgtcaggagccggggaaggtagtgcggggagt

SEQ ID NO: 497500 - DNA, 201 bp, Homo sapiens
tgacccttctctctaggtgcctttaatattttttctctcacattgatgttggaggatttgacgactgggtgctttggggatggtcatgttgtatagtagcycacggcagttctttgaattttctgaatttgtatgtcaacctctctagtgaggttgggaaaatttttgttgacaatattctcaaatatgtttttcaagttg

SEQ ID NO: 497501 - DNA, 201 bp, Homo sapiens
catgatgaaacccagtctctactaaaaatacaaaaaactagccaggcatggtggcgggtgcctgtagtcccagctactcgggaggctgaggcaggagaatkgcgtgaacccaggaggcggagcttgcagtgagccgagatcatgccactgcactccagcctgggcaacagtgtaagactcaatctcaaaaaaaaaaaaaaa

SEQ ID NO: 497502 - DNA, 201 bp, Homo sapiens
tggcagaaccagttgatatgtttatgggtattcactataaaattctttcacttttgttttatgtttgaaaaggttcataataaaatgttgaggaaaaaacmgtaaactcaaaatgtcattctgaccctgaactatttactattccataatttactaagttaacatcctactgatcagaaaaaattaatattttctttaagg

SEQ ID NO: 497503 - DNA, 201 bp, Homo sapiens
gattctagtgtggcattttgtatcattaattacttttactgaaagtaattaatgatgcaattcagagatattttaggggtgtgtgtgtgtgtgtgtgtgtrtgtgtgtgtgtatcaaagttcaactttgtctccctaatcctgctagccttctggccattctattaaggtattgcagtcctggtgaagattcagaaatgtg

SEQ ID NO: 497504 - DNA, 201 bp, Homo sapiens
ctcaggacatcctttttaacgggcttgtaccacatgattgggagtttgaatgttagtaaccatgatagaagatctccactccaagggcatcaccgtgggakgaagcctgcccctacttaccatgtaaatatttagccatttcaatatatttgttctggacttgttcttcttatgtgtgtctcctgtgttgagtctgtttaa

SEQ ID NO: 497505 - DNA, 201 bp, Homo sapiens
aaaaatttgttgagaattgctttgtgttctagtgtgtggtcaattttacagtatgtgccatgtgcagatcagaaggatgtatatgctgtttttgttgggtgcagtgttctttagatgtatgtttagtgtatttggtcaactgtcaagtttaagtctccaatattctgcctcgatggtttgtccgatactgtcagtggggtg

SEQ ID NO: 497506 - DNA, 201 bp, Homo sapiens
ataagatgggttgatagataaatagatatgtgctaaaaaacaagtgtaataaaattattttggtctttttgtttccgttttttgaggcagggccttggtcygtcacccaggctggagagctaatcatagctcattacaacctcaaattcctgggttcaagtaataaaatgttaatggcagaaccagttgatatgtttatgg

SEQ ID NO: 497507 - DNA, 201 bp, Homo sapiens
gaaacttgtacaaacttttagttacagttgggctattttctttctttttcttttttttttttttttgagacagagttttgctctgtcgcccaggctggagyacagtggcgcgatctcagctcactgcaacctccgccttccgggttcacgctattctcctgcctcagcctcccgagtagctgggactacaggcgcccacca

SEQ ID NO: 497508 - DNA, 201 bp, Homo sapiens
catgatagaagatctccactccaagggcatcaccgtgggaggaagcctgcccctacttaccatgtaaatatttagccatttcaatatatttgttctggacytgttcttcttatgtgtgtctcctgtgttgagtctgtttaattgtaggttattattgtgtgtctatattgatgtcatttctttaagtacagacacagacag

SEQ ID NO: 497509 - DNA, 201 bp, Homo sapiens
atccattctgaattatttatttaagatatttttgctgttgtttgtcactccttcttcctgtctccctaccagtccccctcattcgtcctgtctttattttyacacttctctaattaattgatatcttctgctcttagcactgcagcaaatgtgcctgcatttttatgtggatcttcactatgcaggctatgcttttaagtt

SEQ ID NO: 497510 - DNA, 201 bp, Homo sapiens
tgtttaatttccatttaattgtatggttctgagagattttcttggtattggtttctgtttttattgtgctgtggtctgagaatgtggttggtataatttcrgtttttaaaaatttgttgagaattgctttgtgttctagtgtgtggtcaattttacagtatgtgccatgtgcagatcagaaggatgtatatgctgtttttg

SEQ ID NO: 497511 - DNA, 201 bp, Homo sapiens
acattcaaaagccacaaggacagaaaaagaattttctaagactgcctgaagcgcaacttcatttgatatgatttcctagcctagaatataatcaggaaggyactgatttctttctgttactgttgtttttaagcaaaaaagatcccattcctcctcttctatttctttgcatggtgaatagcttcgctagttacccagcca

SEQ ID NO: 497512 - DNA, 201 bp, Homo sapiens
cagaatgtcggattttacaagggaagccagaaatctgggttttcagataaattttttcactatttttattttatttatttattttttgagatggagtttcrctcttgttgcccaaggcggagtgcaatggcgcaatctcagctcaccacaacctccacctcccaggttcaagcaattctcctgcctcagcctcccaagtag

SEQ ID NO: 497513 - DNA, 201 bp, Homo sapiens
gctttagctctgtcccagagaatctgctatgttgtatcttgttttcattagtttcaaataatttcttgattcctgccttaatttcattgtttacccttaaktcattcaggagcagattgtttaatttccatttaattgtatggttctgagagattttcttggtattggtttctgtttttattgtgctgtggtctgagaatg

SEQ ID NO: 497514 - DNA, 201 bp, Homo sapiens
cagctcaccacaacctccacctcccaggttcaagcaattctcctgcctcagcctcccaagtagctgggattacaggcgcacgccaccacgcctggctaactttttttttttttattaaatttttctttaaatcttgaaattcaaaaattataaaatattgtataagccaaatgaatgctcttgtagtccgaatgcaccctg

SEQ ID NO: 497515 - DNA, 201 bp, Homo sapiens
taccacattttctttgtctaatctaccattgctgtgcatctgggttgattccatgtctttgctattgtgaatagtgctgtgatgaacatatgcatgcatgygtctttatggtagaatgatttattaatacatttctttgggtatataccagtaatgggattgctgggtcaaaaggtaattctatgttaaattctttgagaa

SEQ ID NO: 497516 - DNA, 201 bp, Homo sapiens
tgaggcaggagaatcccttgaacctgggaggcagaggttgtagtgagctgaggtcacgccattgcactccagcctgggcgacagagtgagattccgtctcaaaaaaaaaaaaaaaaaatgaccaatttcaccagtactgctctattagaaaaagggtgggggtagttcttcggttttgtgactatcctgtgtactggagga

SEQ ID NO: 497517 - DNA, 201 bp, Homo sapiens
actttaaaaagaactctgtaccattaatagtcactctgcatttcttcttctctctcacccctggcaaccacatccattttctttccctgtggatttgcctrttcttgacatttcatagaactctatcatacaaaatgtggccttttgtgactagcctcttttctctttgtagaatgttcactcatgttttagtatttatca

SEQ ID NO: 497518 - DNA, 201 bp, Homo sapiens
aggagattgagaccatcctggctaacagggtgaaaccccgtctctactaaaatacaaaaaaattaaccaggcatggtggggggcgcctgtagtcccagctrctcaggaggctgaggcaggagaatggcatgaacccgggaggcagagctttcagtgagccaagatcctgccactgcactccagcctgggcgatactgactt

SEQ ID NO: 497519 - DNA, 201 bp, Homo sapiens
gattgagaccatcctggctaacagggtgaaaccccgtctctactaaaatacaaaaaaattaaccaggcatggtggggggcgcctgtagtcccagctgctcrggaggctgaggcaggagaatggcatgaacccgggaggcagagctttcagtgagccaagatcctgccactgcactccagcctgggcgatactgactttgtc

SEQ ID NO: 497520 - DNA, 201 bp, Homo sapiens
tcctaattttgaagaaatggagtgaagaagaagacatgttccagaatgcacaggacattgatcttcagcaaatttttagagtggattactgaatgattacrtgtgagaaaaatgtgattattaggagtcaatatgagctcattgaaaacaaaacattcctatttctaacatccttaaagtctttcacagttcatcttattg

SEQ ID NO: 497521 - DNA, 201 bp, Homo sapiens
ctgggaggagtttggctaagatttttatgatactcttgttgtcttgttgaggttaagtagattcatagctggttgaacaaatgtccactggcagttttgasctgatggatggactaatgtccatctggagaggggtcctcagggtaagcctcaggaacctgtctagtgatgctgttctatccaattttctcattaaaaatt

SEQ ID NO: 497522 - DNA, 201 bp, Homo sapiens
caaccatatgtagcatttattgagtacttactgtgtgccaggcaaaatgctaaatgtgttgtatgacttctctcatttaatcctcacagtgaccctctgargtgtatactagtaatattccattctatagatagatgtagaggcacagatatgctaagtcatttacccaagtcccacagccaataagaggcacagatggca

SEQ ID NO: 497523 - DNA, 201 bp, Homo sapiens
agaaaaaccaaagaggaatatgaagacaaccttcaaatattaacatagttacatgatgagaaagagtagatgccattggtgtctaagagagtaaaaaaatsacttctcattccctgttgagaaatggactctggcatcaggttgatggagaacaaaatgtcagctttattccagtaaaaccatattagagaatgtggcctg

SEQ ID NO: 497524 - DNA, 201 bp, Homo sapiens
aagttgattaaaagatcagttgtctagtgctgtgaaaacttttaaaacagaaaaaggaggagtcaaaattgaatagggggagataaccaagatagatactsaatcaggatgtttacattttggcttaggagactcaattttcagcatagtggaataaggcactcccaaactctacacctccataaaagtaacaagaacatt

SEQ ID NO: 497525 - DNA, 201 bp, Homo sapiens
ccaactgtttgttcacgagtgttttgagttaaagggaattacagtctacaaatttatgcacatggcacttcacagaatagaagaggccaacttctggcctyttatacccacatgcaacaaatacagctcgtgtccttcccccaggactcaatttgtaagcctctttattgcattgtgctgtagtaaaaaattctcagtttt

SEQ ID NO: 497526 - DNA, 201 bp, Homo sapiens
ctttctcacttttgagttgtgtagactgacaggatttgagtctttgagggctttgactagggtaactgacctcaaaacaaatagctagagggatatttctrcttctatccgctgagggatttgtagcaagaagccatattgtggatggtatattttaataacaaaggggattttaaaaggaggatgacacattgatttgga

SEQ ID NO: 497527 - DNA, 201 bp, Homo sapiens
ttgggaggaaaaaacaggaaaattttctgagccagttccaaagtcataaggctcagggggaataactttgactttgtcaagtcagagtgaacagccagagkcagcagacataggatattgtcagaggtaaatcaccagcttggtctggtctgtcttattgcaaggtcagaggaccatagcaagccagccaaatgttttcaa

SEQ ID NO: 497528 - DNA, 201 bp, Homo sapiens
accctgctttctgcctgacatggaggtcacaactgctttctcatcacacgctgatcctccagagacggaagcagtcatcctgctccagcctcagcctctamttcccaaaaagctgtccttctccacagtcttttttttttttcttttttaaactgggcaccaggactccattctagtgcctgactttgatatgttttcttc

SEQ ID NO: 497529 - DNA, 201 bp, Homo sapiens
gttggtttgtctgatccatccagcaaatccacccatgcatggccattgtgtcctgtgagctctctggaaatgcctttggtcacactgcattccaagccackgggtgggtaatctctgggtagtcttgtacatggatttcctagactttcccataacaaaaatggcaaggcacaggtgttgtcttggcaattaatcatacac

SEQ ID NO: 497530 - DNA, 201 bp, Homo sapiens
gtctctgagaaccattatttggaagtctgtttctctgcctctctgtgataagttctcaccaaagatcctcttgtgtttttattagaattacatcgaattcrtaaattggggagaatttatgtatttataatattgaatcttttcatttatgaaaatggtttatttctctatttaggtattctataatattatagacttttg

SEQ ID NO: 497531 - DNA, 201 bp, Homo sapiens
ctgctttcctgggccacataggcaaaactcactttttcctaaggttggggctgtattgcaggaactcatgtaaactgccaggaccagaagtctataaaagmagcctccaggccgggcacagtggctcacacctataatcccagcactttgggaggctgaagcaggtggatcacctgaggtcaggagttcgagaccagcctg

SEQ ID NO: 497532 - DNA, 201 bp, Homo sapiens
attaaaaaactagcaggacaggaaattgtgtatggatgcaaagtcatattggggagctatctacttcaattgcttcttgctgaacttctctttgctgaacrtattacattgtctctgggccccacatcttatagcagatagcagggatagaaagaaagccagtcctaccacctgtccttacaggaagaaactcttctgctt

SEQ ID NO: 497533 - DNA, 201 bp, Homo sapiens
ttgcccttgatctcttaccccttctctcatacctacactatgattttcctgtaaggaaacatgcctcttcaatttttttcagcctatgttgtctagttagrgctgagggctgattgtacccactgggttcatgtctgaccaatggaaggatcacatttcctttctacagagattggtttgcaatagttggttaacccaagc

SEQ ID NO: 497534 - DNA, 201 bp, Homo sapiens
ttccctttattattagttgtagtatataatattactagcagtattggtaaatattttagaatttgaatgagcctgcctttcaaatgaaatctaaatctttmtgttggtttttattttattactactgcatccagtgttatctgaatatttaaagtatattaaaaacattaaagacaaaaagacaaaagttttttaaagtat

SEQ ID NO: 497535 - DNA, 201 bp, Homo sapiens
tttttcctttgtgtaggtactgtttttcctttaaaagcactgagtaatcagtgggaaacaaatagcttgctcttcatcactacccccaaatttattatctrttgatgattcttgtatagtccaaactttataagatgactgaaaaatcatgattttccatctttgacattccttccacattcgcctgtcaacagtagacat

SEQ ID NO: 497536 - DNA, 201 bp, Homo sapiens
tttgagaaagcagaaggtaccacagtataatggtatttttccctttattattagttgtagtatataatattactagcagtattggtaaatattttagaatktgaatgagcctgcctttcaaatgaaatctaaatctttctgttggtttttattttattactactgcatccagtgttatctgaatatttaaagtatattaaa

SEQ ID NO: 497537 - DNA, 201 bp, Homo sapiens
taacatacattatatatatataaaaaaataaaaagtatatatataaaactgtaacatttgatagatgcatatatatatatatatatatatatatatatatwtatatttttttttttttttttttttttttttttttgagatggaatctcactctgttgcccagcctggagtgcaatggcgtgatctcagctcactgcaacc

SEQ ID NO: 497538 - DNA, 201 bp, Homo sapiens
gatgtaaattttgatctccaggtcaaggcattgtctaatttttcctttgtgtaggtactgtttttcctttaaaagcactgagtaatcagtgggaaacaaayagcttgctcttcatcactacccccaaatttattatctgttgatgattcttgtatagtccaaactttataagatgactgaaaaatcatgattttccatctt

SEQ ID NO: 497539 - DNA, 201 bp, Homo sapiens
catttttcttgaataaacacttctcgattattgcaagtctttggttaatttccagagctccagaagaattgattctgacaattttgctggtgttcttgttkcttttaggaaacagcagattttctaagattcttacactaccattctaaagttgctttagtattcttctaaagttgaatactcctttttgttcgtttttat

SEQ ID NO: 497540 - DNA, 201 bp, Homo sapiens
gttatcaactttggtaaatttgattaaatacttctatctaatctaccatttatatgccagttttgtcagttggctcaaagatacaatagtgttgtttatarcactttttccctccagcataggatccagcataggattaggtattgcctttagttgtcatgttcctttagtctcctttaatctggaacatgtctacagcct

SEQ ID NO: 497541 - DNA, 201 bp, Homo sapiens
gaggcaggagaatcccttgaacctgggaggcagaggttgtagtgagctgaggtcacgccattgcactccagcctgggcgacagagtgagattccgtctcaaaaaaaaaaaaaaaaaatgaccaatttcaccagtactgctctattagaaaaagggtgggggtagttcttcggttttgtgactatcctgtgtactggaggac

SEQ ID NO: 497542 - DNA, 201 bp, Homo sapiens
ccaatacctaattgtagaatatcttcatcactttaaaaagaactctgtaccattaatagtcactctgcatttcttcttctctctcacccctggcaaccacatccattttctttccctgtggatttgcctattcttgacatttcatagaactctatcatacaaaatgtggccttttgtgactagcctcttttctctttgtag

SEQ ID NO: 497543 - DNA, 201 bp, Homo sapiens
tgaatgggctcttagagaatgggtctgatttcaacagtttttcatgaaaaggatgtgcatttcaggtagaggaaagatatgagcagagaaacaaaggtgayaaggtatgggagcaatttttagatcaatgaaaactttttttaaaaccagcttttaaataatactttcaatgtacaatttagtggttttttagtatattta

SEQ ID NO: 497544 - DNA, 201 bp, Homo sapiens
atggtgaaaccctgtctctactaaaaatacaaaaattagctgggtgtggtgatacacgcctgtggtcccagctactcaggaggctgaggcaggagaatcayttgaacccaggaggcggaggttgcagtgagccaagattgtgccacagcactccagcctggcgacagaatgagactccatctcaaaaagataaataaataa

SEQ ID NO: 497545 - DNA, 201 bp, Homo sapiens
gagaccatcctggctaacagggtgaaaccccgtctctactaaaatacaaaaaaattaaccaggcatggtggggggcgcctgtagtcccagctgctcaggargctgaggcaggagaatggcatgaacccgggaggcagagctttcagtgagccaagatcctgccactgcactccagcctgggcgatactgactttgtctcat

SEQ ID NO: 497546 - DNA, 201 bp, Homo sapiens
ggcagtgggtcatgaagggtctgggggtaaggcacctgagtccttgcccgaatggcaccaggccctctggcagaggggcagcagtggctgggctgagtcasttggaagatgctgccctcactaactcaggtttacagaacaggtgtttttaaagagcagtctgatcctggttcagctctgtcaccggtttggaaatactgc

SEQ ID NO: 497547 - DNA, 201 bp, Homo sapiens
ctcatgaatggtttagtttcatcactttgttggtgttctcatgacagtgagtgaatttttgggagatctggtcatttaaaagtgtatgggggctgggcgcrgtggctcacacctgtaatcccagcactttgggaggccgaagcgggcggaaatcatgaggtcaagagattgagaccatcctggccaacatggtgaaaccct

SEQ ID NO: 497548 - DNA, 201 bp, Homo sapiens
gtcatatggtcactgttctttgtggtgctatataggtggtgtgtatattataagaacttttgtgtcttccaataatgttttttggtttttggttttttggtttttttttttttttttttgagatggagtctcgctctgttgccagtctggagtgcaagggcacgatttcggctcacggcaaccttcacctcccaggttcaa

SEQ ID NO: 497549 - DNA, 201 bp, Homo sapiens
gacctcatgctctttggccttccattcaattcaaatgagaagggctgttgtaattgttggcaatgcctccccaggctgccactgtatgtggaggatcttcrtgtttggaaagaaaaaaaaaatgcagtttagtgaagttcatgattctacttttactcttctaacatagccttttttttttaatttatttgtttgttttta

SEQ ID NO: 497550 - DNA, 201 bp, Homo sapiens
tgatttgcatatgttgaaccattcttgcatccatggaacaaatcccagttgatcatgatgcataacctttttgatgtgctgctggatttaatttgttagtrttttattgaggatttttacatctgtgtttatcaggactattggcctgtagttttctcttttggttgtgtccttgtctggttttggtatcagggtaatgct

SEQ ID NO: 497551 - DNA, 201 bp, Homo sapiens
taatcatggtggaaggcgaaggaggagcaaagtcatgtcttacatggccgcagagaagagggcgcgtacagaagaactgccctttataaaaccatcagatytcgggagacttattcactatcatgagaacagcatgggaaaaaacctgtccccgtgattcaattacctcccactgggtccctcccatgacacgtggggatt

SEQ ID NO: 497552 - DNA, 201 bp, Homo sapiens
tcatatggtcactgttctttgtggtgctatataggtggtgtgtatattataagaacttttgtgtcttccaataatgttttttggtttttggttttttggtttttttttttttttttttgagatggagtctcgctctgttgccagtctggagtgcaagggcacgatttcggctcacggcaaccttcacctcccaggttcaag

SEQ ID NO: 497553 - DNA, 201 bp, Homo sapiens
agacgaggtttcaccatgttagccaggatggtctcgatcccttgacctcgtgatctacccacctcagcctcccaaagtgttgggattacaggcgtgagccwccgcgcctggccccaataatgttttaaacgagtaaaatgaagtttgtcacttctgcatgcttacaagcttaaacatcaaaagaattggccaggtgtggtg

SEQ ID NO: 497554 - DNA, 201 bp, Homo sapiens
tcacgcctgtaatcccagcactttgggaggccgaggtgggcggatcacaaggtcaggagatcgagactatcctggctaacagggtgaaaccccgtctctaytaaataaatacaaaaaaattagccgggtgcagtggcgggcgcctgtggtcccagctactccggaggctgaggcgggagaatggcgtgaacccaggaggcg

SEQ ID NO: 497555 - DNA, 201 bp, Homo sapiens
gcaagtctgaattgggagtgagcaggaggggcagaggtgagggctgagcctggagcagccagttggcccatactgaggaggaccttccaaaggctttggaragtagatactatagggagctgaggatggtcttcaagaagtgaaaaatgtgctaatccactggggagagcttacgggttatatacaagggtgttatttgtc

SEQ ID NO: 497556 - DNA, 201 bp, Homo sapiens
tgctgacattaaaatatatctataatgaagttcaaagataaatggaactttctgaaaactcctttgcaagttaatttagatataggaggtaggatttgaawacaggatcacattataaactcaatagtcctagaattattatttaatatataaaagatatcaaaatgcatttgtaaacatttgaaagataacagaattgga

SEQ ID NO: 497557 - DNA, 201 bp, Homo sapiens
ggctaacagggtgaaaccccgtctctactaaataaatacaaaaaaattagccgggtgcagtggcgggcgcctgtggtcccagctactccggaggctgaggygggagaatggcgtgaacccaggaggcggagcttgcagtgagccgaggttgtgtcactgcactccaacctgggcgacagagcgagactccgtctcaaaaaa

SEQ ID NO: 497558 - DNA, 201 bp, Homo sapiens
gggcccaagattcagatttagatagcttgcttaatgtcatacagctcgtgatcagagccaggatttaaattcttctcagacaagctgcagcctctctgatyctttgagagaatgtacattagcatccctccgagcttccctgaagcagagctgtctcccagcgacaccggagatgaggggaggggtctctttctccacctg

SEQ ID NO: 497559 - DNA, 201 bp, Homo sapiens
ttgacattttttatgagtgtaggctttttattttataaaaagctgctcttttgattttctctaatgatttcttattattagattcaggttatgaatttggrgaagtaacaccacagaattgatattttgtttttatctgttgttatgtaaaactatgaattcatattgataactacaatttcctttcagcatcacactatt

SEQ ID NO: 497560 - DNA, 201 bp, Homo sapiens
gcgggcgcctgtggtcccagctactccggaggctgaggcgggagaatggcgtgaacccaggaggcggagcttgcagtgagccgaggttgtgtcactgcacyccaacctgggcgacagagcgagactccgtctcaaaaaaaaaaaaaaaaaaagttatgtttacactctactctattaaaagtgcaatagtattatattttt

SEQ ID NO: 497561 - DNA, 201 bp, Homo sapiens
ttatacaaacatgatgtaattatcaaaaccaggaaattaacattgatacaatactattatctagtctgcagactgtatttgggtttttccagttgttccartaatggcctttataacaagttaaaatccctgagcatgtgttgcattcacttgtcatgcctcttaatctttagtctggaacaatttattctttgtcccctg

SEQ ID NO: 497562 - DNA, 201 bp, Homo sapiens
cgggcatggtggtgggcgcctgtagtcccagctactcaggaggctgaggcaagagaattgcttgaacccaggaggcagaggttgcagtgagctgagattgygccgctgcactccagcctgggtgacagagtgagattccgtctcaaaaaaaaaattaaaaaaaaaaagaaacgaacagaaatgttgttagctccttctcac

SEQ ID NO: 497563 - DNA, 201 bp, Homo sapiens
gcctctggggttcttgcacagtcctgggcaccactgggaggagagagggcaacctagagacatttgtgttcctggtaaacaactgaaaataggcggagcctttgtgcactgaacccagctactttcaaatcgcagtacttcccaattgcaaacttggtgcaaaaaaacctacattgccacagttgagactttcatgaggaa

SEQ ID NO: 497564 - DNA, 201 bp, Homo sapiens
agccaagactgtgctgctgcactccagcctgggcaacagagcaagactctgtctcaaaaaaaaaaaaaaaaaaaaaaaaaagaaaagaaaattaaaaaaaragaattatctgtgtattttttatcttaaacaactgagaatggtgtcattttttccattcctagagttatttaggccaaaaaaatctagaatgttgaagag

SEQ ID NO: 497565 - DNA, 201 bp, Homo sapiens
tttcccataacaaaaatggcaaggcacaggtgttgtcttggcaattaatcatacactttataaagaaaacaatgtcctaacatttgggtagatgaatggcrtggtagaaaagccccatgatgtttcttttggaaggagggttaaagaatgccgtaacactaactagctcagatgtgtctattgataccaaggtgaaaacat

SEQ ID NO: 497566 - DNA, 201 bp, Homo sapiens
ggcccagccagggtggggtctaacaaattggggtgggtataaatttagtacttcaaagatagtggctcttattggaaaactttataagctgaatgcctatytccccctcactaatttggggaactgcagctgctgctaaattctgagtcaaatagacttgcaactatggttgatcagatttgtgatgtattagtaacacat

SEQ ID NO: 497567 - DNA, 201 bp, Homo sapiens
tcatacctacatctcaatgactgcttaaaccagatacctgagggtctggggtctaacagaagaaaaaaggagagtagagctgagggttatggaacattccyaggaagggagagaatatcagaaaatgcaagactgccccagtgcagcagcagtgatgcagccagaggttaccagaagttctggcacctccaccttcatgga

SEQ ID NO: 497568 - DNA, 201 bp, Homo sapiens
aaaaaagtccccaaacccaatcaaattattgggtttgcaggtgatatatttatatctctcatgactttcagtggtttataaagagctcctaaagaactgtscaggaaaaaaaaaaaatttaagcaccatctcaccccacattgcaatcaattacaagataaaagtcatcttttaaattcttgaacccaaatctgaatatgt

SEQ ID NO: 497569 - DNA, 201 bp, Homo sapiens
gctcccaggacagacagtcccaatgatgttagcaacatattggaacaaaaaattaaacaaggtcttagaacttaaatctgattttataataatattcattrtcaatacttaattctaattttacatttttagatttatgtaattaacattagttacctatacagtaaagataaatatgtttcataatgctttttttctgac

SEQ ID NO: 497570 - DNA, 201 bp, Homo sapiens
ttcagatcacaggcctggaagggggtcaggtcaagctgagcagaccttcaagccgattaacccaagagctgaattgtgttgtctgagggaaggagtcctcyctggctgattattttctttacaccctggaaactttgcaaaattttataaccaagaaagaaatcttatcagggccacaagccaagttaattttcttgctta

SEQ ID NO: 497571 - DNA, 201 bp, Homo sapiens
aaatactcctgatttagggtggagaaagggaatggatttctgttgcttgaaattccttgcgacagtatttgtttgctttaattggcgctagattgaagttwccaaattcagatgatgatgaaaccagttcacacttatttgaaaattgaaattggtgatacttatgttaacttttgattttttaaaaaaacaataaaaaat

SEQ ID NO: 497572 - DNA, 201 bp, Homo sapiens
gaggttgtggtgagccaggattgtgctactgcactccagcctgggcaacaagagtgaaactccatctcaataaaaataataataataatacacatattagrtcctcatagttacatacaaatgtgggccagaaaattctaataatgagaacctgtattgttaagttaaagagtttattcccccattaagtagagataattt

SEQ ID NO: 497573 - DNA, 201 bp, Homo sapiens
tcgggaggctgaggcaggagaatcacttgacccaggaggcagaggttgtggtgagccaggattgtgctactgcactccagcctgggcaacaagagtgaaastccatctcaataaaaataataataataatacacatattagatcctcatagttacatacaaatgtgggccagaaaattctaataatgagaacctgtattgt

SEQ ID NO: 497574 - DNA, 201 bp, Homo sapiens
cttgtgttctcttttaaaataagttcaacaagcaagacagctcagaatggttgggacaaatcagagactcatggttgtgaaagaagcaaacttcaaagcgyggtatgaattttcaagtcttatttccactcttgctttccagctggatctgctctggatttactgcaggatgtttgaaaatgtggctccctgctaatctca

SEQ ID NO: 497575 - DNA, 201 bp, Homo sapiens
gttctatacattacgcaaaaagttacagagatgtggggctcatcttctaggaaaacagaatcagaattctgaatcagctctaaagtcggagaccaaacctygagctctctctaggtgctgtttctcctgaaaagttgacttgtaagtctaacccagtgcattgcctctgatggcctggtgttcttcagataggtaaaaagc

SEQ ID NO: 497576 - DNA, 201 bp, Homo sapiens
gaccctgactagggggtctcactctacaagggcagaaagaggttgtcttagtctggttctctgttgttacccagaagctggaacaacgcctgttccccagyggttgctcagtaaacacatgtggactcaatgagggattgaattggaagttatttacctctctcctggcttttgcttccctctcttcctttgtctctcttt

SEQ ID NO: 497577 - DNA, 201 bp, Homo sapiens
aagacaaggaagagcacctggaaattaataatataataggtgacagattcaattaaagagctagaagataatacaaaagtgaaatcatttgctgttttcarttttatgtgtaaacattaagttgattaaaagatcagttgtctagtgctgtgaaaacttttaaaacagaaaaaggaggagtcaaaattgaatagggggaga

SEQ ID NO: 497578 - DNA, 201 bp, Homo sapiens
atttccttttcttttcttcctgttttttctcttttattcttttgtctgagttatttcaaaaacttgttttgaaagtcagggattcttttttctgctttatytaatctgttattgagatttttctgttctatttttatttcatccactgaattcttcagctccaagttttctgtttggttctctttttattatgtctatccc

SEQ ID NO: 497579 - DNA, 201 bp, Homo sapiens
tagtgatgactgtggcctgtagagggtatagggaaggctctgtggaagaggagagatttaaataaggcttacaagaatatgtaggatgttagtcaatgacygttttttgagaatattgataaaaaggcatttaagatatgttgcctgcttctgatttggattggcatagaaaaggcatgaagacaacatcagaaagggagt

SEQ ID NO: 497580 - DNA, 201 bp, Homo sapiens
ttttttatatcagtgataaggaggaaggatagtgatgactgtggcctgtagagggtatagggaaggctctgtggaagaggagagatttaaataaggcttamaagaatatgtaggatgttagtcaatgaccgttttttgagaatattgataaaaaggcatttaagatatgttgcctgcttctgatttggattggcatagaaa

SEQ ID NO: 497581 - DNA, 201 bp, Homo sapiens
gctactctagtgggtatattgaataacatgtagtatgctgttaacttgcctttctttgatgattaagcacattaaacacttttttcatatacttattggtyatttgtataattttggtgaagtgatgtattgcttctcgacatgctataaagaaatacctaatactgggtaatttataaagaaaagaagtttaactggctt

SEQ ID NO: 497582 - DNA, 201 bp, Homo sapiens
cctacatttaagcatttaatccaccttgagttaatttttatatatggtaaaatgtaggggtctagttttattcttctgcctatggctacccagctatcccrgcaccatgtattgactagggagtcttttccccattgcttatttttctcaactttgctgaagatcagatgactgtaggtgtgcagctttatttctgaattc

SEQ ID NO: 497583 - DNA, 201 bp, Homo sapiens
agtcagtcttttgtggagtctataggcttgacaaaagaaaaaactcagactccagtgaataccacaaacagttatttgctttaggttcaggaaatgaaaaygtgctggttttaagtttctgaagttgcctccctccttcatctcattccgtcctcccccttcagttctttggtccgagacccaatagaggatgtctacagc

SEQ ID NO: 497584 - DNA, 201 bp, Homo sapiens
ctaaacttcagacctcatgctctttggccttccattcaattcaaatgagaagggctgttgtaattgttggcaatgcctccccaggctgccactgtatgtgraggatcttcatgtttggaaagaaaaaaaaaatgcagtttagtgaagttcatgattctacttttactcttctaacatagccttttttttttaatttatttg

SEQ ID NO: 497585 - DNA, 201 bp, Homo sapiens
catcctaaacttcagacctcatgctctttggccttccattcaattcaaatgagaagggctgttgtaattgttggcaatgcctccccaggctgccactgtaygtggaggatcttcatgtttggaaagaaaaaaaaaatgcagtttagtgaagttcatgattctacttttactcttctaacatagccttttttttttaattta

SEQ ID NO: 497586 - DNA, 201 bp, Homo sapiens
tatttttgctatataaatatgctgtagggaatagccttatggacaaattcttatatacaaccctggttgtttttataaaataaaaacctagaagtgaaatkgctaggtgaattttcacatttttaaaacttttgccacaggagtgctcattattgcactttgctaataatagagtttgttaatctaattttttttttttta

SEQ ID NO: 497587 - DNA, 201 bp, Homo sapiens
ccaagaatgacttacatttgaaatcccaaaccaagactgttcaagattggtattaaagtcggagcaatgaggtggaggtagggttcacctccacattattytgagaatgggcctgaccctcatggatctgtgggtgtgaggagtggtggttgtcaggagccggggaaggtagtgcggggagtgaaggaggggagacagcag

SEQ ID NO: 497588 - DNA, 201 bp, Homo sapiens
tattttatgagaattcatcttatgagttacccttgttaaaatattggcatatccaggagtttgaatagggtcattttctgaatggattttggaataattaygtaaattgatttttctgatcaaggaatttagtgataggttatattttcaaatgtgttgattgtcagcttcatcctaaattgcaatgtaacacaaaagctg

SEQ ID NO: 497589 - DNA, 201 bp, Homo sapiens
aatctttaaaatgcctaagaataaactaaaagggaaagttaccagatttctagaatcctgattttcttaaaaactggataaaataatgttaaaatttatayagaaaaattaatatttgaaaagaaccaagaagttcatgaaaaagattatctacttcttaaatttaaataaaaacatatattgcctgttttcttggcacta

SEQ ID NO: 497590 - DNA, 201 bp, Homo sapiens
cgtgagccactgtgccttactgcttagagtgagtttgctactgcaccactccagccagccagggtgatagagcaaggccctgtctaaaaaaaaaaaaaaamcaaaaaaaaaaaaacaggaagaagaagaaggagaacaattgtttcagagttaaaaagaatcttaaaaatcattgtgcttgacaacaatttttatgctgca

SEQ ID NO: 497591 - DNA, 201 bp, Homo sapiens
ccaactccaggagaaatattaaaaagggaaaaatttgattggatgagcagatattaaatatatatatatcaataagattttctctgtaccattaaataacyaactttaaaaaataaagaataattgtcattcatagtagtgtcaaaaatctttaaaatgcctaagaataaactaaaagggaaagttaccagatttctagaa

SEQ ID NO: 497592 - DNA, 201 bp, Homo sapiens
tatctttcatcaagatgttgcctctctttccttctttttctcttccatcacagtaagtgatagaaacctgcttgctgcactcataaataaatggccagacrtgtgctataataggcaggatcctcctgctgagcctggactccatttggatgctgtgttcgttagttggagtctcagagtatgtgccaactcaccaatcta

SEQ ID NO: 497593 - DNA, 201 bp, Homo sapiens
aatgaaatacactggggagtaactgaattttacagtatttagatagctacatagtgagcaatcaaaacattctttaagtatttaataagaggttaagatcrgcccgcctaaagcttatataatagaactgagtcagtgatgatgagcattttttcatgtgtctgttggctgcataaatgtcttcttttgagaaatgtctgt

SEQ ID NO: 497594 - DNA, 201 bp, Homo sapiens
agttttttcctcaagtctggaagcagaagcattcctcagtctttctctccttcgacatggcagcaacagcaacagcagcagcagccaccgctgctgccacsgccctggctccacctagggaaattgcagaagaccctatctcattctagtgaggaaggttctatgaagtagatagttcatcttgtagactttttagaccat

SEQ ID NO: 497595 - DNA, 201 bp, Homo sapiens
ttttattcagtgattctatcaaccagtgttatctgttaaaaaaacaaacaaaaacaaccactgatatgctggtgggctctatgctgtcatctaaaatgttrtagaaagatctgtttgtattgttattgttgctgtgaattagtccaatggcctacctactatataagatatatttgaccttaggagtgaaaaaaaaaatct

SEQ ID NO: 497596 - DNA, 201 bp, Homo sapiens
cattttagttcagttaatttttgaatgtgagggcagatcatttaattccgtatcttaatatataatccaggactggtgaataatacttcctgccaaaaatmcattaaccttacaggaaacaaaacccagtgaggatcatagaagtaaaaataacttaatttagatttcataagttgttatttttttagagaaaagcataaa

SEQ ID NO: 497597 - DNA, 201 bp, Homo sapiens
aaagtatgaagagattagagagagatgactttaggctggagaaatcggctgaagcttctggaagaggtgacatttgtatttagactttcagggatgaaggrcagaatgaagactgccagtgtggaagcttgcgaacagctgaggcagcccgcacggataccctgtccagctcccttctttgtcttgaatcatgcaatatcc

SEQ ID NO: 497598 - DNA, 201 bp, Homo sapiens
aactcactgagctgcctggttttccaacaagctacatagaaagcatgaggagggcagaaggctatggcttccactgttttgaccacttcacagcccttccygcagactgcttggagatggctcaagtggaacctgttgataaattaatgatcctctttttcccagtcaccattgagccaaagtaggctatggggctgaatc

SEQ ID NO: 497599 - DNA, 201 bp, Homo sapiens
tgaagcttctggaagaggtgacatttgtatttagactttcagggatgaagggcagaatgaagactgccagtgtggaagcttgcgaacagctgaggcagccygcacggataccctgtccagctcccttctttgtcttgaatcatgcaatatccatgcagggaaaaaaaaaaaaaaaaagcccttatttgctgttatgtatcc

SEQ ID NO: 497600 - DNA, 201 bp, Homo sapiens
gaatcattggtgctctgttctcaaggacaaggcatttcatttagttcaataaaattgcatcccaaacaatgtgtaggatttgttccaacattctaaccaarttgagatttgttttgatatcatgtttatctgatctaatatatgacctctttctctaaattttttgtcttctgttaccttcccatcaattcagcatctcat

SEQ ID NO: 497601 - DNA, 201 bp, Homo sapiens
tgttctcaaggacaaggcatttcatttagttcaataaaattgcatcccaaacaatgtgtaggatttgttccaacattctaaccaaattgagatttgttttratatcatgtttatctgatctaatatatgacctctttctctaaattttttgtcttctgttaccttcccatcaattcagcatctcatcattgggtttagtta

SEQ ID NO: 497602 - DNA, 201 bp, Homo sapiens
ttttggttagaattcaggctgcactgtagcatcaaagatgtcaaaatacagtggttgagccaagtggctctgccctgagaggactggtgaccccgagtggragacactgatgctctctgaagccacccagcttccctctctcatgctgccttgtcatccccagagtgttgtccacacccatttgcttggatctggttcctg

SEQ ID NO: 497603 - DNA, 201 bp, Homo sapiens
aaggtagctatttaagcatgtgttataaaataatgagacttatttctagaagaattgattcaagaatatggcatttgatgacagaatagttggaataagcrtacagccttttaaggtgaccactttgaaaggataacactcatttaaacattgggttataaaatggtttttttttttttaaataagccttgtgacttacag

SEQ ID NO: 497604 - DNA, 201 bp, Homo sapiens
agaggcatttcttcaccacgtgatcactgtgggggcttaatataactcaggcatttgctcagctggtttggagctaatggaattggctgtagtggctgtasttaggggagattataatgtctcaagggtttcattggcttccacttccttctgcagacttatagtaaaagacaagagatgcctcttcctggctctatttct

SEQ ID NO: 497605 - DNA, 201 bp, Homo sapiens
tgttgattctactagtgacccccacatttctaactgatatgcttgaattgctgtttcttaatttttctattttagacattatctcatgttttctatggacratgaccatagggtacttacaccattctctccttccatttcactcttccccttcttttttccggtatgattatatcataatattcagttaatatttacatt

SEQ ID NO: 497606 - DNA, 201 bp, Homo sapiens
cccccacatttctaactgatatgcttgaattgctgtttcttaatttttctattttagacattatctcatgttttctatggacgatgaccatagggtacttrcaccattctctccttccatttcactcttccccttcttttttccggtatgattatatcataatattcagttaatatttacattactgtgacaatgtaagca

SEQ ID NO: 497607 - DNA, 201 bp, Homo sapiens
ttgtgacattaattatttggagaaattggatatcaaatgccctatattctagatttggctgatggcttcttcaccacgtccttttaacttgttctgctagrtcttatatttcccataaactggtggttgctgctaaggtttgattagattagggtttagagggttttgttttgttttttctttttaggcaaaaacactcta

SEQ ID NO: 497608 - DNA, 201 bp, Homo sapiens
attcaatctagtttctcctaaaagcaggaggaagaagacgggtgattattttgattttttggataggacagaattcagaagccagatttgcccaccttgctaaatatatatcaaatccaggccatttagatacagaggcatgaaatgtcacactggtgatcctttctggagaaaatggcagaaaagctgttgttgccttta

SEQ ID NO: 497609 - DNA, 201 bp, Homo sapiens
actatgcttccagtatctacaggggagtctgtcagtcacatgttgagccaggttttctatttcagaagaggaaggaaaagaatgtgtaggggaattagtayggaactggagtgagaagaactagattcaaaacccgtccccaccacttcagagcaactgctttagtgcaattggtatgtcagcaggggccttccctcaaaa

SEQ ID NO: 497610 - DNA, 201 bp, Homo sapiens
tactttctacctccttttaagtcttctgtcttcattcttcattccaaagaaaaggacaccactgtctgacctctttggtaaagctttggtaaaatgtttcrtaataaaaaaattctttttcctaatgactaacctcaactttatcctgctgtgtgaccagattcaatctagtttctcctaaaagcaggaggaagaagacgg

SEQ ID NO: 497611 - DNA, 201 bp, Homo sapiens
agagtggaaacaaatgtggtgttggactgagaacggtttaaggtattggaggcaatgattctgttcaagtgccaagattaaaccaatagactctagagggkctcaaaagtgaggctacatgtcatggtttgacgtctaaattatagctatgcaactttctttcctacccatttctactgtatcctctgtgctttctataat

SEQ ID NO: 497612 - DNA, 201 bp, Homo sapiens
tcatataaatgtgtatattatatatatggcccgttcattattttaaagcaatgtaaataattcttatctattaccatagtatttcaaaggctacatcttgycacaggtgagaatcagaggtatgttctgggggttttttttgtttgtttttgagacagagtctcgctttgtcatccaggctggagtgtagtggcataatct

SEQ ID NO: 497613 - DNA, 201 bp, Homo sapiens
acatttctagagctcaaatcatcatgacttccaggaagaaaagttgtagtcactggattagggggcattgtttgaggaaataagcaaattccacaggtggraagaattgtgaattgtgtgtgtgtgtgtgttttgaggtgaaagaggtttagggaaaatttgaaaagctattggaatggaaattaaaccatccagagtgtt

SEQ ID NO: 497614 - DNA, 201 bp, Homo sapiens
cgtgttgtcaataaccagacagaaaaaagcttgcttgtcctctcattccaaagcatgtgggcatctgttctcggcagtgatgcctttccaggccttgatgraggcaggacggcttccatgagatttgctcagaactccaggattctgaattcagtgggactttaggtatgtaggattggtagtcagtgtttccagcttctg

SEQ ID NO: 497615 - DNA, 201 bp, Homo sapiens
aatcagcagctttgggggtgggtctagaaatctgcatttctacattgctgggcaattcttaaagatacaaagtctgagatccatggccagtcaacagcacrtagtgttaatatattctatgatgtgaattactttaactctctttactctgcgtccagtctgcagggtcttagcccagggcctactactgactggatgatt

SEQ ID NO: 497616 - DNA, 201 bp, Homo sapiens
gttcttatgtgacaaccaatcttctgaaactctcgtcatcacatttcagcagaagtgaaaatattagcagagtggttggtggccaagacagaaatagaacscaggagtctgtgtcctttcccttgccggacctactggagcatggttcctcctgcctgaagactcagtgtttccaactctaacaaacagaattctaacagt

SEQ ID NO: 497617 - DNA, 201 bp, Homo sapiens
tgtctcaaaaaaaaatgaaaaaaaaaatagaagaaaaagaagtaaagtatgagtattaagaagtgagagaaaagttagggctagaatagttagcaaagatwtcatggaaaaggtaggatttgaactggcccctcaaagatggaaacttacagagtaaaggaggctatttcagactggggcatttggggtgggtaaaccatg

SEQ ID NO: 497618 - DNA, 201 bp, Homo sapiens
aagtttgatcatctgaagccttcttctctcaactcgtcaaggtcattctccgtccagctttgttccattgctggcgaggagctgcgttcctttggaggggragaggcactctgatttttagaattttcagcttttctgctctgttttttccccatctttgtggttttatctacttttggtctttgatgatggtgatgtaca

SEQ ID NO: 497619 - DNA, 201 bp, Homo sapiens
  misc_feature (1)...(201): n = A,T,C or G
tcattgaggttaaaatatgtcctgttaagattttttttctcttttaaattattagtgttttgcattgttaaaaatcagctggcttcttggattgagtttanttcacttttccagtgggtaacttttatctgacctttaggtctgtaattgtttggtttgttttctgaagctatggaatgttttggaaaaaataagcctcat

SEQ ID NO: 497620 - DNA, 201 bp, Homo sapiens
gaatgattaagtcttagtttaggatatgatataatatttaaagttctcttccttctggctccaacctactcctcccatgttgtcatttctcttctgtgcargctgctggtatactaccccgagacctctctatggctttttagctgtggatgtcctcttctttcatctcttcctttctaaatttttttctttcctatctga

SEQ ID NO: 497621 - DNA, 201 bp, Homo sapiens
agcctgctggttgtaaatgggagggtggtgtgcttaggtgtgtgcttggaggaggttaatcaggtagtaaaacagagggtggctttagtagggagaaagcsacagcagcacagacaacaggcaactaaagcagtcacaccaggtgaaagctaatgtgggtctaaggttgatttaggaggaatggagagtcaggaatggatc

SEQ ID NO: 497622 - DNA, 201 bp, Homo sapiens
tctgttccttaagtctctgagaaagcacacaaattgattccccagcacttgcctatttttgaggacacctgtatgacccttcatcaaaccagctgacacaytctgcctgcctttattcacctgctatttcaattatgtgagcagtgatgtatctgtctcaaaaatctctgtcctgggaaatttcttcagaagagaattatt

SEQ ID NO: 497623 - DNA, 201 bp, Homo sapiens
gtccctgaaactcacagtctagactaaacctttatcagttagtgaaaataattctagaaaaagtgtatctttcttttatgtagctctttatgacttctgamactttgtttttattgtttctagcaaaaacctagaaacaacttaaaagttagtaagtaggtgattggctaaattaatgttgacatatccatacaatattat

SEQ ID NO: 497624 - DNA, 201 bp, Homo sapiens
gaaatcagattgttcttaaacctatcctatgttcattcaggtccctgaaactcacagtctagactaaacctttatcagttagtgaaaataattctagaaaragtgtatctttcttttatgtagctctttatgacttctgaaactttgtttttattgtttctagcaaaaacctagaaacaacttaaaagttagtaagtaggt

SEQ ID NO: 497625 - DNA, 201 bp, Homo sapiens
tgtacctccctcagtgtcactttttaccttccctcctcccttaaatcgcctagttctcattttgaaaaggtagagaaatcctttgtcagtagttaggaggwtgtagatcctgtatgattttctgtcattacattcttaatctattacatgtgtatttgtcccgtccttactgacttaacctctgaccacattgcaaaatgt

SEQ ID NO: 497626 - DNA, 201 bp, Homo sapiens
tttactgaaaacaagcaccacaggacttctgaggtaagaaaagtcctttacaggatttttcttttccataaatgcttactgttggctcactcacatttgawatcagattgttcttaaacctatcctatgttcattcaggtccctgaaactcacagtctagactaaacctttatcagttagtgaaaataattctagaaaaag

SEQ ID NO: 497627 - DNA, 201 bp, Homo sapiens
ctatcttcacacattccctaattttaaaatctctttatgtttgtttttattccagactacaaacatcaaatcttttttttttctatttggatgcttttaartataaagtgtcacttaatatcagcacttctgccaactcttattcatttttccagctgtatttggacaacatttacatagataattttgtgaaattttcaa

SEQ ID NO: 497628 - DNA, 201 bp, Homo sapiens
catgttgcccaggctggagtgtagtggccatttgcaggtgcatttccgctactgatcagcataggagtttgatgtgctctgtttccaaactgggcaagttyaaccctccttaggcaacctggttgtcccctgctactgtaacgtcaccatattgatgtcaaatttagtgaggatacctgatcagcattgtgtcctatagcc

SEQ ID NO: 497629 - DNA, 201 bp, Homo sapiens
tatatagtattttttacttattttatcatctcatcctattaaaaacttttttgtcaaaggaattttaatggcagcagaattgtttatttcacaactgtaayatgaattctataaccattctagatgttggacatttaggctgaatctattttttcatgattataattagcaagttgccttttggaaaggctatacaacttt

SEQ ID NO: 497630 - DNA, 201 bp, Homo sapiens
actaatattttccctaagaggccacattcacaggactgaaatgtcagttctggttgtctgagccaagggcatatatgctgattacattattttgtctggcyaatacactttatcatgaagcttattttagaagaaatgttcatttttagatttctgtttgtatatttaggtcatactataaggtccattctcttgctttta

SEQ ID NO: 497631 - DNA, 201 bp, Homo sapiens
ctagattttattgggtacagcacaaatatcactccttggggtgggccacatagtcacggacccacagatactcagataggaagaggctctaaaggacattktctctttatatatggaattgtatgaaatttaatagaaatggatctctagaattttactccttttaatcaggacagtagtacaaagcaaaacttttgtaca

SEQ ID NO: 497632 - DNA, 201 bp, Homo sapiens
cctgagttaatttttgtatatggggaaaattaggagttcaatttcatttttctttatatggctagccagctatcccagcaccatttattgaatagggagtkcttttcctattgcttgttgtcagtcttgtcaaagatcagatgattgaatgtgtggctttatttctgagttttctattctgctgtattgatctatgtgttt

SEQ ID NO: 497633 - DNA, 201 bp, Homo sapiens
caggtctttccagaaagcaattaacatgaaggggtaaattccagcactgttagaagagtcagcccacaatgtcagatgtacaaaactgctttgtggatgasgaaggatctgcacagaagtgctcaggatacacatctgtcctctgctgtggggcaggagaccccaaccacagagatgcttaggtgaatatctggcctgacc

SEQ ID NO: 497634 - DNA, 201 bp, Homo sapiens
aactgctgcagtcccacagctctgagcttttactcacaggatggctcccttccagctttcaaatctctccaagttgattaatcattttcttgttctgactyattcaggcctctagaaaaatagctgtaggtactggaagggctatgtagatcaaggaggtcagataaattggcttgatgttggtctatagaaaaatctaga

SEQ ID NO: 497635 - DNA, 201 bp, Homo sapiens
acattcccttttctccacaatccacaatctcatgaacatctattattttttggtatgtcttctttttttttgagacagtctccctctgtcatccaggctgsagtgaagtcctggctgactgcaacctccgcctcccaggttcaagcggttctcctgcctcgcctcctgagtagctgtgattacaggcgtgcgccatgaggc

SEQ ID NO: 497636 - DNA, 201 bp, Homo sapiens
ctctccgggagccctcctagttttcaggggctcataggcacaaacacctgcggacttggtgaaacagaacctaaggaaggggaggtccaggggaatgaagrgttgatctagcacagcctccccgttactcctttcctcagggatctggggaggatttgtaaaagaaaagccaggttgtttggaacaggacagaagatagtg

SEQ ID NO: 497637 - DNA, 201 bp, Homo sapiens
aaggaatttttcagaccttttcaaaatacatttaaatataagcagataatctaattttacacacttcctgtcccctttttaatcagtaattggttaacttyaatagacaatttagacaagctaagcttctgtgtaatttttctccctaaagattaagatttgatgaaataaataatctgtagcgtaccttgtagaaggaaa

SEQ ID NO: 497638 - DNA, 201 bp, Homo sapiens
tctcccagaggtcatggagaagaaggcaaagcaggcctgtcacattgtccccagcctgccaggtgccactgcagcctcggaaagtttgtctaggccaaggmgctctcctttgctgcttctgcctgcctcttagtgtgggacctcccagggagatgagaaaggagaggaaggactcgtatctgttcagttctcttctcccct

SEQ ID NO: 497639 - DNA, 201 bp, Homo sapiens
gtcactcaacacagtacttatcaaaaatgcttcaaaaatatttactgagtgagtcaggtaacaaaacgattaaaatgcttagccatcagcgtatgcctctrttttttaagggctttttataagcaaatacgggtagaaaaacattggcagtttgagagtaaaataaacatatataactcaccaactgactgatcaggataa

SEQ ID NO: 497640 - DNA, 201 bp, Homo sapiens
tcctaaaccattgagctagcgatttcagacctagcagggaaggtgaagatgaagaagcctttgttcaggtctctagatgtgtagggctgagggctttgccrccatgggatgtcaacagccataataataatttgcacttatatagcacctttcaaccaggcacctcaaagcggtttaaccacattaattaattaaagccca

SEQ ID NO: 497641 - DNA, 201 bp, Homo sapiens
ggtttacatgtatatatttgtatgtatatatgagacatgtgaccatgtttaatgaatggagaaggacttggatcttttctagtagagaagagaagcagaamgctttgcctaaccctatttctttactaaggtaatgaaaaaattatacagggaaaataaatgatgttaatgagagaaacagggacaggagaccaataaaca

SEQ ID NO: 497642 - DNA, 201 bp, Homo sapiens
acagttcacagtcactcaacacagtacttatcaaaaatgcttcaaaaatatttactgagtgagtcaggtaacaaaacgattaaaatgcttagccatcagcstatgcctctattttttaagggctttttataagcaaatacgggtagaaaaacattggcagtttgagagtaaaataaacatatataactcaccaactgactg

SEQ ID NO: 497643 - DNA, 201 bp, Homo sapiens
gataaaaagttgtttaatctatttttggtatcctttcaattattctagaaaattattagttgctatcgctttaaatattgcatatacaagtatatatgagkatgtgtgtgtatttttaatataactggtagcatactttacatactgttttgtaccttattttcttcacttaatatttcttggaaatccttgcatttcatt

SEQ ID NO: 497644 - DNA, 201 bp, Homo sapiens
gatgggcatcaccacacctggctaattttttattttttgtagagacagagtctctactgtgttgcccaggctggtcttgaactcctgggctcaagtgatcytccaggctcaagccaccttcccagctcagcctcctaaagttctgggattacaggcatgagccaccgcgcccagccaggtcttcatttctaaaggttctca

SEQ ID NO: 497645 - DNA, 201 bp, Homo sapiens
gtatccattctaccattctactgtgtgtgtgtgtgtttttttttttttttttttttttttttgagacagtgtctctctctgttgcccaggctggagtgcartggcagatctcagctcactgcaacctccgcatcccacgttcaaacaattctcctgcctcaggctcctgggcagctgggattacaggtgcatgccaccacg

SEQ ID NO: 497646 - DNA, 201 bp, Homo sapiens
acaagaaaaaggtaaatgtatatgtttttctcttgttaatctgtgttttcttgtagtgctctcagccacgaaccttgagataggtgaggaaaatatattayttttcctcccttacattgagcaagatgctgtctgttctctgcaactcctaattgttctctcttcacctccattgtctgccacgaaaaaaaaaatgctaca

SEQ ID NO: 497647 - DNA, 201 bp, Homo sapiens
catttttaattttaataattaattacttgagtaattttgttttctgagatattcagcttttatttcaactatgcttccagtatctacaggggagtctgtcrgtcacatgttgagccaggttttctatttcagaagaggaaggaaaagaatgtgtaggggaattagtatggaactggagtgagaagaactagattcaaaacc

SEQ ID NO: 497648 - DNA, 201 bp, Homo sapiens
agtggaagacaagtgttgagacaagccaaaggttgcgacaaaggcgtagaaaccatccaccttgtcaaatgggctctcatccttttcaaagtggagccatkccatgtagagcagacactgcaagcttgatgggaatgaggcatatctggctcaaaagcatgtttatttgtgtgtttttaaaagtgtaaatattgaaccaac

SEQ ID NO: 497649 - DNA, 201 bp, Homo sapiens
ggaaacaaaacttgaaaagtgcattggtatttgcttgatagatgaagtaggagactgaggaagatgtttgaacaaaggctctgaggtgggaactacaaatsgtccttctttagtgctacaggggagcactaaatgtgtctgtacaatgagtagggatcggggaggatggggcctgtatgtagttaaagataaagtaaggaa

SEQ ID NO: 497650 - DNA, 201 bp, Homo sapiens
tcaggctgatgctagctttgtagaacgtaactcttctatttttatctagacaagacaactaagtgttctttatgttgaacacctcccctttccctccattyctgcctcattttttcatccttcatatcctttctgggtacatatgtgtgccaaatgctgggaaaagtaagtcaaataaagctcagtttccttctatgaaga

SEQ ID NO: 497651 - DNA, 201 bp, Homo sapiens
agggaccgatcacaaagctgtgtctttctaatcctccttgtaaatcaaagggaggggaatccccagagcccaggagtacacatgaatagaaagcaccacargtaataaaaacacctaaaaaggtcagcagaaactcggggagctgctggaaattcacctcctctgcctttctatgggactcagtgggcagtgatcaggtag

SEQ ID NO: 497652 - DNA, 201 bp, Homo sapiens
acaaaggaatccttcacctctagcttgcagttcccctggaaccatcatagattgagtgacaatcagggagatgggggcttgggcattggtcttgagtgatrtaaatggtttttctaatagaaggcatttggaatgggctgacaatagctaggattgttcactaccaggattcttagtgcctagcttcctcctttttctctg

SEQ ID NO: 497653 - DNA, 201 bp, Homo sapiens
tggtggctcagactggggggtgtggtataggggatggcaagtggtcagattcaagataaatatgaagacattccttacaaaatctgcaaacagattgaatrtgaagtgtattttaaaaaatgaagaattggccgggcgcagtggctcatgcctgtaatcccagcactttgggaggctgaggcgagcagatcacgaggtcag

SEQ ID NO: 497654 - DNA, 201 bp, Homo sapiens
ataacactaatccaggagagagattatggtggctcagactggggggtgtggtataggggatggcaagtggtcagattcaagataaatatgaagacattccktacaaaatctgcaaacagattgaatgtgaagtgtattttaaaaaatgaagaattggccgggcgcagtggctcatgcctgtaatcccagcactttgggagg

SEQ ID NO: 497655 - DNA, 201 bp, Homo sapiens
acattgttgtatcacttttctagaaatgtaatttttggtttactcttattactttcatatttttactgaaaacaagcaccacaggacttctgaggtaagaraagtcctttacaggatttttcttttccataaatgcttactgttggctcactcacatttgaaatcagattgttcttaaacctatcctatgttcattcaggt

SEQ ID NO: 497656 - DNA, 201 bp, Homo sapiens
tcaagtttctggttctagaacctacgttctttcataaccatcactgctctgaaaaagagtaagcaccagacctgaaagaaacataacagaggccgggcgcrgtggctcacacctgtaatcccaacactttgggaggccaaggtgggcggatcacgagatcaggagatcgagaccatcctggctaacagggtgaaaccccgt

SEQ ID NO: 497657 - DNA, 201 bp, Homo sapiens
gaactgtcacttttgtgaaagcctgatgaagtcactctgattgtaaagtaggaatcctagacccttgatgtagacatagatatgccattaaaactgcagtyctgttttgctgtgtgtaacattgttgtatcacttttctagaaatgtaatttttggtttactcttattactttcatatttttactgaaaacaagcaccaca

SEQ ID NO: 497658 - DNA, 201 bp, Homo sapiens
ctatggactggacccaaatggtataattcttcagtgtaacactgaagtaatttttgcatctgccaagtaaatggtttagatttcaaacctatgaaatgccraactgtaattgttcaattctagtgaaccacagatgtgtttaatttccttcctttactttttgctgtcttctttaggtaagctgaaccaactaaagagtgg

SEQ ID NO: 497659 - DNA, 201 bp, Homo sapiens
tctgtttgctgtgcagtatactattttgtgattattcatacaatagaacatattacatatttatgtatccattctaccattctactgtgtgtgtgtgtgtktttttttttttttttttttttttttgagacagtgtctctctctgttgcccaggctggagtgcaatggcagatctcagctcactgcaacctccgcatccca

SEQ ID NO: 497660 - DNA, 201 bp, Homo sapiens
atttataaattgaaatataatgtatttatgggaaaattgcacaaatgataaatgtagctgtagctcaatgaattttcacaaactgaacaatctcatgtaaycagaatccagatgaagaaacaaaaaattaccaatgtcccagaagcccccactgtgtgccctttcagccactgccttttctgagggtgaccacctactcca

SEQ ID NO: 497661 - DNA, 201 bp, Homo sapiens
ttcatgggtttttaatagtttttaaaaaatgggatctgtttttattatgtaatccaatcagttcttggatcagaaaattgatttttatatttaaagtccarcaaaactgctttgcatgcttattaaaatggcttgcaaactatcgtatattttctatggaatcatatatgcagtagcagtttttcttctattccaaacctc

SEQ ID NO: 497662 - DNA, 201 bp, Homo sapiens
tcaatagctggaaatggtaaggatgtccgatggcagagagctcttgttttaagttctgcatgccaggaaggcagggggctgggtctccttctcagggctasgctggaggggcaggatgctctagcggaggaagcagtgttaacttgaagggaaacgcagttgaaaaggaactcgaagcacgggctgccaagcgcgtagaag

SEQ ID NO: 497663 - DNA, 201 bp, Homo sapiens
tagagagaacagtcagtgcaaaggctgcaagatgagagcatgcttggtgagttcaaggaactccaaggaagccaatagatctgaagtggagagagcaggargaagagccatgggaaatgaggtcttagaggtaacaatggtctgcttatgtaggggttttgtgaggcactgaatggatggatgcattgggcagagaagaga

SEQ ID NO: 497664 - DNA, 201 bp, Homo sapiens
cagaatatagagccatgaatcttagccatgaaatcatgttcacatttattacaaatccataattctttcctatttccccatatatcctgttttctttgtcytgtcaattgtcaaatttagctgctggaaatgatctcttattttggattaggaaaccaagtcctaatgaccgtaagtgacttttcagagtcacacagctag

SEQ ID NO: 497665 - DNA, 201 bp, Homo sapiens
tgctcaagggaaccaggagaatcaaacctgtctgtcctgctttttctgtagaagtgtcagctctgaggccttgactaggtggaataaatagtgacttacckcttaaccacagtgaaaaacccatcaagcatttggatattaagggctgcccctgtgttctcaagggaccctcagcctcagacactgcctcctttcaagcaa

SEQ ID NO: 497666 - DNA, 201 bp, Homo sapiens
aagccatgagaatatttggaaaaaaggcttgccagatagagagaacagtcagtgcaaaggctgcaagatgagagcatgcttggtgagttcaaggaactccraggaagccaatagatctgaagtggagagagcaggaggaagagccatgggaaatgaggtcttagaggtaacaatggtctgcttatgtaggggttttgtgag

SEQ ID NO: 497667 - DNA, 201 bp, Homo sapiens
cttaagtttgttaagctggtcattctgaaacttaatcttaggtctcctagagattttttaacagttttgcaagtctcaatttttcccctttaaaaggactscacatatcactccagtttgagaaacactgaactcttttcatctactcagaaactgaatctagcggtaggataaaacattagctttaactttcttatcctt

SEQ ID NO: 497668 - DNA, 201 bp, Homo sapiens
ttttctgttctagaagcacgaaactacaagttctctctcaactcttcaaatgaggttggaacaaacagaatgggggcatgaacttttttccccataacttyaataaacaacagttttagcctcagtaggctttatgcaagccttcaacatctttttctaggtatcttgacactcatgttctttttcttcttgcagcctatg

SEQ ID NO: 497669 - DNA, 201 bp, Homo sapiens
ataggcaatggtaagaacatgtttttttgtagttacaatgagtacattatacaagggccggaagtgaccaaaatcattgattggctaattagacataactsaagggtcataatgcttcagtcgttatgtgggaatattcataaagcacttgagttcagctccaataaagaggagaaatgtacccagggaaattgcagagta

SEQ ID NO: 497670 - DNA, 201 bp, Homo sapiens
tttattgataagttttatgcacaagttaactttataccttaatacctcttaaacttgaaatatgaaaatgtaggcttacaaaaaaaagataaatgatggtrcttttccataggctaattgtaaatatcaagcctccttgggtgcatttccaactgctatttcatttacccaaatttagtatttttgcattttgaggggaaa

SEQ ID NO: 497671 - DNA, 201 bp, Homo sapiens
tgcaagtgagaagcatgagagaaggaaacattttgaaaatggagctgaggttttaaaccagattaactggagggtcaaaggaaggaacagagatggagtabatttatatgggaaaatatgagcttgctttgatgatactgaatttgcagtgctaaaatttatgatgtaggcttgcagttcttgtggttaaaagtggaagac

SEQ ID NO: 497672 - DNA, 201 bp, Homo sapiens
ttgataaacaggattcatctgtatatgttattatcaaaacatgcctgttacttttccaagaagctttattcttatctactcctaaaatatctttatgaagwtaaaaggacttaacataagtatttagaaggaaaaatgttttttttttctaggaagcattatttatatttggcacttttttattagtgtcaaaaacaaggt

SEQ ID NO: 497673 - DNA, 201 bp, Homo sapiens
tctgtatgtctatttttgtagcagtagcatggcgtttgggttactgtagcattatagtatagtttaaagtcaggtaatgtgatgcttctggctttgttatytctgcttaggattgctttgtctattcaggctgctttttggttccatgtgaattttaggacagttttttgtaattctgtgaagaattatgttggtagtttg

SEQ ID NO: 497674 - DNA, 201 bp, Homo sapiens
catctgtactattggtcttaggtgactccagttcacttggtggaaaatggggattacaaaatttgcctctcagctgcccccacagaaatctcagtgatggygtttgtcagattcttgggtccttaaaaaatctgacttttaaatatcgaataattattttgctgatcatgaatatctcttctgctgaccaaacaggaccag

SEQ ID NO: 497675 - DNA, 201 bp, Homo sapiens
gcggcctttgagtaatttccctgaaatctatatgtgggaagcctgtacttcaagcagtttttgggacttgcaccaattaaatctgtctctggcacactttwaatggcatgctttcccctgagtcaacaactgctccaaaatctgaagtcatttgtttaatttaaaagcaaaggttatggaacaaccatttcaagcttcacc

SEQ ID NO: 497676 - DNA, 201 bp, Homo sapiens
tttagccaacatgcaacattaggtagaagaaatggggcctttctgactggtttgacctgtgggtgggccctcttccacatgtttctaattaggatgcaagraagagtagatattctgtggcgactctcctttccttctcggctgtgagacagaacaacagcgcctttgtgatgacctttacagggctgtttacatttggtg

SEQ ID NO: 497677 - DNA, 201 bp, Homo sapiens
tgggcttaattctctcctgggaacccaggttagttggactgcatatatggcaaagtcttaaaaggattttgctttgactggcttgtgatgtttatctaaawaactttttttttttttttttttttttttttttttttttttttagattacaggtccaccaggttgtggaaaaactcagttttgtataatgatgagcatttt

SEQ ID NO: 497678 - DNA, 201 bp, Homo sapiens
atattttaaggtcctattataaatatcttcatgaggaaaaggtatagaatgccaagttatgatggtataaatgagtgaatgtttcagcctttctcaactaraagtttctcatctgaactacaaaatacagtggatgatttgagtgactattttctcaattcctccaaggatggtacataactagtgccaattcagatgcag

SEQ ID NO: 497679 - DNA, 201 bp, Homo sapiens
tcgctcattatttcctgctccttccctaggctcgtgggtttcgatattgggggagcggagattttctcttgggtgctggtcacgcccccttaagactcggkatcgtcactaagaaccccgctgtgaattgggggagcttcgggccttcttttggtggggaatgcttggaagctgctcattgttggaaaaagctctttttag

SEQ ID NO: 497680 - DNA, 201 bp, Homo sapiens
aggaagcttttcagcctttcctaatggtctgatgccctctgtgtgggttacaatctttggaagtataagatttcttgtaaaagtcacagcacctgccaacrtagttgggcagggacccaagtggggtgacttgtaccgcattcctccctggtattcagagaccacatagtaccagaagcttgctaggcccagctcctgggg

SEQ ID NO: 497681 - DNA, 201 bp, Homo sapiens
aggtatattaatgacctgcaataaataggttggatctttcttagaagtccaggatataacatcaataaaagaagggctgctacaactgaagggatttgtgrgctcaaaatccctcctgctatctctctacgagcaagtgcaaaaactgctgacatttgttcttgtgtgtgaaaccagttttgaagttacaaattgctactt

SEQ ID NO: 497682 - DNA, 201 bp, Homo sapiens
gtcatggtttgtaaaggttagtgcagatggaactgcttcaacaaccaaaacttagcgttaccctatttaaacttgggaagggtctgctgcttaatcttaaraaatagcacttcaggagccagggtgtgaggatgtcctttaatctctttgtatgtgatggtaaagctgaattttcctaacaccctccttccccgctctcag

SEQ ID NO: 497683 - DNA, 201 bp, Homo sapiens
gaaaacgttgagaggggaagggtggagagctcccaaggccaaaagaagggaggggcagggaggaacactgcaggaaggacagcagagagaaagatggaccwtggagaggccaaggggagagcggggagttagaaaaaggctgagataagcaatgggaggcctcctcagaggggccttacactgtcaaactgcccctggagc

SEQ ID NO: 497684 - DNA, 201 bp, Homo sapiens
gaaaagctgagaattttaaaattcatttatattaattaatttgttcactcagtatttattcaatgcctactatatatcagacttgaggatataaaaaagtrtaaagtagagcaaggctgacagacatttgaaaggcaggttcatgaggattgaaggaacatgtgggaagggagccattacttcttaggagtggggaaaatc

SEQ ID NO: 497685 - DNA, 201 bp, Homo sapiens
tgggagccactgaaaggttttgagcctgctggttgtaaatgggagggtggtgtgcttaggtgtgtgcttggaggaggttaatcaggtagtaaaacagaggrtggctttagtagggagaaagcgacagcagcacagacaacaggcaactaaagcagtcacaccaggtgaaagctaatgtgggtctaaggttgatttaggagg

SEQ ID NO: 497686 - DNA, 201 bp, Homo sapiens
gtgggatcaggccaggaaaaacatgtgatgctatagcaagctgaaaccaaagacttgactttgggcctggccaagccgagaatcttggcagtgattgactrggaagcctgctgttttctatggcattttctgagtcccctaactctgggaagagggaaccagataagtcctaaaaatggatatgaatcagtagagcttctg

SEQ ID NO: 497687 - DNA, 201 bp, Homo sapiens
tttactaaactggttattataagtagaatagactctaaaatattgataaaaagtatagtaaatacatataataagatcaagtattatgtactatgcataaytgtatgtgctatacttttatacagctgagattatagtaggtttatttaccctgcatcaccacaagcatgtgagtatgcattgtgctatgatgttaccatt

SEQ ID NO: 497688 - DNA, 201 bp, Homo sapiens
ttctgaaaaggataatgatgatgaccaaagtgacaagggtacttataccattgagttagagaatcccaacagtgaggaagtggaagcaagaaaaatgattsacaaggtaaataattgaaatttgagtgtgatcttagttgttgtgtggtgtatttgactggtggaaattattggagagtcagcatgagatgttgtcatgca

SEQ ID NO: 497689 - DNA, 201 bp, Homo sapiens
gcaataacacgcatgaagctgtcatctcctatgataacaatgccttcttctgcaatacctcctgaaggatcttcctgaggctgttttacagttaacttctwaaaataagtagaatatactctaaaatcatgattaaaaaaagtatagtaagtacatagtacataaaagtatagtaaatacattaaaagtatagtaaataca

SEQ ID NO: 497690 - DNA, 201 bp, Homo sapiens
ttcacacttatttgaaaattgaaattggtgatacttatgttaacttttgattttttaaaaaaacaataaaaaataaaatttaaatgtagtatttgatggcratgagcttactgacaataaagtcaattctcacttccttcagcatacccaatggtaatattaaacaaatggtaacattaacaattttagaaatggttagaa

SEQ ID NO: 497691 - DNA, 201 bp, Homo sapiens
cttcttgaataatgtcttacttaaagtctttaacaactgtcatgaaaaatttctctttcacagtctcagctctagacaattgttatcttgtgggatgctgrcctcatgttgccagaatgtcggattttacaagggaagccagaaatctgggttttcagataaattttttcactatttttattttatttatttattttttga

SEQ ID NO: 497692 - DNA, 201 bp, Homo sapiens
ggcatacatcaaagatttatggggtagtgttcaggaagaccaaacagttttgcagcctattttagtccacaggtgaccttttgaaatagaggggtagccargaaagaccagttaactctgggtacttttcccctagagctttcagacacaagtaactctgggaagggatagtgggttcaagggagccatggcctgatttca

SEQ ID NO: 497693 - DNA, 201 bp, Homo sapiens
caagggtaagttataaacagagaagctgtttctgattgtgaagattggctcagcctgcactgacacttctgaaaaggtggaaagagcaaaatcgcagttcyctagagtctctcagttgtgtgatatccatgcatgttcggagcagaatgtataacggatccaccgttctgcttctctgctgtcttctagtttaaaacatgt

SEQ ID NO: 497694 - DNA, 201 bp, Homo sapiens
catctcccattttcccaaccccacacacctcatctttgcatggatgaagtgcagtctctccagaacgtttttgtgagtggagggatgcagagtagattgtyggtgccatgtctacgttgttaactgcagtccaacatgtaatctagttaaaaaaagaaagaaaagaaaaacccataaaataaattttaatagactacccct

SEQ ID NO: 497695 - DNA, 201 bp, Homo sapiens
ccagagtgtgacgttccccttcatgtgtccatgtggtctcattgttcaattcccacctatgagtgagaatatgcggtgtttggttttttgttcttgcgatwgtttactgagaatgatgatttccaatttcatccatgtccctacaaaggacacgaactcatcattttttatggctgcatagtattccatggtgtatatgtg

SEQ ID NO: 497696 - DNA, 201 bp, Homo sapiens
aataatctgaggatttttattttaaataagttaatgttaaaaatattttttgggccgggcccggtggctcacgcctataatcccagcactttgggaggccraggcaggtggatcacgaggtcaggagatcgagaccatcctgaccaacatggtgaaaccccgtctctactaaaagtacgaaaaaatgggctgggcatggcg

SEQ ID NO: 497697 - DNA, 201 bp, Homo sapiens
ataatagaagggaaaaggatggattagggttaaaattgctaaaatttagagaattaaagttggtttatgtttttgaatatatatagaggttgaaaaaaaayttaatcattttcttgtttaggcttatgggataaaagcacaaaggtctgctgatttctcaccagcattcttatctactaccctttctgctttggacgaagc

SEQ ID NO: 497698 - DNA, 201 bp, Homo sapiens
ctacagaaggtccaggctactgaaaagcatcaagaccaagctgttgtaagtcaaactgcttttatgattgcattctttgatgaagacaatcccagaaaaaraaggtcatattctttaactcaaagtgcgggaatcttgtgtcagggaactacatattcaacaccacatacaaaacttgagaaagcaaagtcttcaacagca

SEQ ID NO: 497699 - DNA, 201 bp, Homo sapiens
ctaatttttgtatttttagtagagattagatttcacgatgttgatcaggctggccttgaactcctggcctcagatgatccacctgccttagcctcccaaartgctgggattacaggcatgagccactgcacctggcctcccttaaatttaaattcccttaaatattccttttgaaagatgctttttaccattgctaaagaa

SEQ ID NO: 497700 - DNA, 201 bp, Homo sapiens
tccattgtccctttaagtatacattgctgacaagagccctggtttttagttgagaaaatcaggccagtataactgtaatttaatatctaaattaaaaagtraaaggtcttaggttggatgtgaaaaagctacattagtcacattgttttgggccacaactgttccttatttttacacagtctgtccatccagaaggccact

SEQ ID NO: 497701 - DNA, 201 bp, Homo sapiens
ataacaccttacacaatatcccttccttgaggacatcaaataaataacttttgttcaagagcatatctgatgaggtggctaacttggaaatttgttcctargcagaccttgtgacctctgtttcaatacatagtgagtggcctttgctcccattttatgctacagattcactctggagatagaattggttgcacctctcca

SEQ ID NO: 497702 - DNA, 201 bp, Homo sapiens
tctcacagtaggagcagggatggggtggaggtggtggtggtgattttagtaaaccagttttctggtgatgggggggcatatttctgtttttaccccttaayaatgagacagcaacccaaataacagatccctcagtacactgaaatgccaaggctaaatgaactggtggaactttgtggctttggctcttggcccacaggc

SEQ ID NO: 497703 - DNA, 201 bp, Homo sapiens
tataaaaaaaaaaaaaaaaaaagacaccaccattcagaacacaaaaagctacagaaggtccaggctactgaaaagcatcaagaccaagctgttgtaagtcmaactgcttttatgattgcattctttgatgaagacaatcccagaaaaagaaggtcatattctttaactcaaagtgcgggaatcttgtgtcagggaactaca

SEQ ID NO: 497704 - DNA, 201 bp, Homo sapiens
aagaaatgtgcgcatgtgcctctgactcttccagggcagaaggaacctgggagtggttttccacatgctatacatatcaacgtagcttttaagttttcatmactcacatgatgaccaaaaaaattcagatgctgacaaatgagaggagggtgatatgtgagccttatgtggatttgcaagtaatcagaaagccagggaatc

SEQ ID NO: 497705 - DNA, 201 bp, Homo sapiens
tgagtgttataaagaataatgaggtgatatttgtaaagtgctttgagctgctgggaaagaggagggggtgagctccgtggaaaacattattagctggaagsacttatcaattgagctatttaacaatagcagagagtaaggatactcagaaatgaattccagggactagccctgctttgaatttaggaggaggattagtgg

SEQ ID NO: 497706 - DNA, 201 bp, Homo sapiens
atagcacaaaacatctaaatcatggtcccctgcctttgtgagggcttcctggctacagatggcagctggctttctcaggggaaacttgggggtcatagagraagctgaagaggggtgcttgcttctgtggatgacctcttcccacccagtgcagcgacactccccttttgtctagagctatccttagtcaagccagggctg

SEQ ID NO: 497707 - DNA, 201 bp, Homo sapiens
tctgctgcattttctaatgggcctggacaggaggacccagctctgtttcttatgggtcttgtggatggcgctgggaaatcaggcttgcctaactggatatrcagagcttagcattaacagctggacagagctcttgtgcatcttgttttttttggttatttaaatactcctgatttagggtggagaaagggaatggatttc

SEQ ID NO: 497708 - DNA, 201 bp, Homo sapiens
gcttccttgctaggcacatcttatcatcgttatttctgtaattcttcctttcattggctgacatccatgacatcagggcccaaccttaggtggctagcacratgcctgtggcagtagtggcagcagtagtcttcgtgttaccagcagcagcagtaatgactcttactgggcatgtgccatgtactaggtctttttcatact

SEQ ID NO: 497709 - DNA, 201 bp, Homo sapiens
cttcataaatgttttaattttttaactttttgatcttgtaataacataactgaaaatacaaacattgcatagctgttcaaaaacattttctttatatcctkattctataatcttatttctgttttttagatttttttacctttttaaacttttttgttaaaaattaagacacagacacacacattagcctaggactacaca

SEQ ID NO: 497710 - DNA, 201 bp, Homo sapiens
attgtttatacttgctgtaaatatggttttatgtaatttccaagtgtgtctgccctttttaggtcctgtattttcattttggcatagtctgctttcagtgrcacccagctagaatttgcctgctaaacagaaaatctctggtgacaccgaattgcatatcctggcttgattgctgatggagaatggcagagcacacactct

SEQ ID NO: 497711 - DNA, 201 bp, Homo sapiens
aatctcgatctgcattttagcgagaggatatgagccacagagtgatttctttggtattttgtcccaacagctggactgggcctctatgtgtgtaggtgagrgatggggtacagagaggaggacttgtgggaagtgctggaatatcagggctagaatattgccacagaaatgtgtctattttttctcctgtctctttctcag

SEQ ID NO: 497712 - DNA, 201 bp, Homo sapiens
agttgagtgagattaagtaacttgctgagccagagtatgtgctgtctttctggaaaccccttgccctgggttatcactgtacatcagaacagaggaagccragtatggagcctgagtgacatgcagagctcagatgagtgataagatcctcatgacacacttccatcggtatcctcccagagatgggcctttgagctctca

SEQ ID NO: 497713 - DNA, 201 bp, Homo sapiens
ttgtgttggcatggtggccatggggacacccctcgtgtgtgtgtgtgtaggcccccaaaaggagaagtgtagcagcttccctcagccttgcctcagaaagycgggtccagatggccaaggaagcacactgcattgaaggaactctgcagccagagtgaatttaccagtgtgggaaacaaaaacgttcgggttctggtctaa

SEQ ID NO: 497714 - DNA, 201 bp, Homo sapiens
cagcctcgctgctgccttgcagttcaatctcagactgttgtgctagcaatgagcgaggctccatgggcatgggatcctccaagccaggcgtgcgttataayctcctggtgtgtcatttgctaagaccattggaaaagcgcagtattagggtgagagtgacctgattttccaggtgctgtcggtcacagcttcccttggcta

SEQ ID NO: 497715 - DNA, 201 bp, Homo sapiens
ctctacacctagtataggtgtcatggcagggtcacttgagactccagaactgcagagcaaccaatgtgcagccccagcctcggacagctgaagcagcaagrctaacccgtaagagctgctgtgagggtgagactagcaaagccatggggttggagcttcccaaggtcttctgggtacaacccctgccttagtgtgaacaga

SEQ ID NO: 497716 - DNA, 201 bp, Homo sapiens
aatgtgtctccaaaacagcatacttaagtagtagtttacttaatggccattataaactattaaaaggtaggacctgtaagaggtgatcagcccatgagggscctgccctcatgaatgattaatgccattatcaagagaagtgggtttgttattgcaggagtaggttctttataagaagacaagttcagcccccatttgtct

SEQ ID NO: 497717 - DNA, 201 bp, Homo sapiens
cagaaaggagtttgatgcacaacttcaaggcaatctcaaagaaagaaacaagttcttggcaagagaggcatcctccttgaagtatttggctgaggagtttkcaatcccagtaagtttttctttttttctcttttttcttttcctttcttttgtttcttttatattacattcactgacttatggtatcaaataataaaatta

SEQ ID NO: 497718 - DNA, 201 bp, Homo sapiens
gaggtttcatctgcattacaagactgcctttgctagccatgcttttcttctcttccacccataactggtcttgccagactctaagcctctattccttctgyaacctcaggatgaaaacttcaactatctgaccctttctttgagtttttcttattttttataactcctgtgcacatgcgtgcatattactatttttgtatg

SEQ ID NO: 497719 - DNA, 201 bp, Homo sapiens
tcattacacatgtgaaaattttctcatctttaaacaggcttaaatacaaagaataactgaaaaatattggaaacctaagtggttataatgttgtatctagyagtgggactaggagtgattctttgtttggtttggttctgtttttatttccaaattttatgcactgggagtgtactccttttgtatttactacttcacccc

SEQ ID NO: 497720 - DNA, 201 bp, Homo sapiens
tttacatctgtagagaaaatctacattgctgaaataaacagccagcctttctgtgctgtgacttgtctggatctaggacagatgggctcctgggagagagrgactgagagtttgacacctctggggatctaatagaaacttactcttttggagggctgctacctgtgaggtttcatctgcattacaagactgcctttgcta

SEQ ID NO: 497721 - DNA, 201 bp, Homo sapiens
actttctgccctagttaacacagggcatctccatgtccccagttctccctatgggcatttttctctttgaaattccaaatcttttctgttctagaagcacraaactacaagttctctctcaactcttcaaatgaggttggaacaaacagaatgggggcatgaacttttttccccataactttaataaacaacagttttagc

SEQ ID NO: 497722 - DNA, 201 bp, Homo sapiens
aacaagccaaccacaccagctacccgtgggggtagggaatgatccctcagtgccttttatcccttggcaagccccaagatgcctactggcctgctagcccrgagattttataatacctgaagaactcctgagtgctcaagcagagggagggaataaaaggtgagggcagaattcgatttaccagctccacaggccatttcc

SEQ ID NO: 497723 - DNA, 201 bp, Homo sapiens
cctttgtgaagacaacagtggtgcaggtcttcctgtggactagatgtcccagtcttgccttccccttgataatgcagtaagggaccccctttttacaacayggggcaggcaggcagaagacagccagctcgatgggatcgacatcgtgtgcagtcatcaccagctgagctttcttgttctccaccaaggtggtgaccatgt

SEQ ID NO: 497724 - DNA, 201 bp, Homo sapiens
cacttgttccaacttatgatgttggtttatgattttgattttagtttggttaacttcttatttgggggattttgactgacttaatttgttctcatcttgtrttagggttctctagaggggtagaactaacaggatagatgaatatatgaagggaaatttattaagtagtattgactcacacgatcacaaggtgaggtccca

SEQ ID NO: 497725 - DNA, 201 bp, Homo sapiens
tcctgagtagctgggaccacacctggctaatttttgtatttttggtagaggtggagtttcaccatgttgcccaggctggtctcaaactcctgagctcaggrgatctacctgcctcagcctccaaaagtgctgggattacagccatagccactgcgcccaacacaatgacttaatatttataatacacttagaacagtgctt

SEQ ID NO: 497726 - DNA, 201 bp, Homo sapiens
aagccatagtaggaggtataatgttatgatcttctctcttagccctacacatctgtaaaaagtaatcttgctccgtactgcaagactagggcagcccagtygcccactccccttttattctccctcctcacattcccctgtccttttctaacccaccttcccacttagggtctaatttagccaatttatacactcgccaag

SEQ ID NO: 497727 - DNA, 201 bp, Homo sapiens
gccataattctcaggtggaggtttttaaaattttcccttgcctaggctatatcccagaccagctgaatcagaatccctggggacagagcaggggtatttgwgtttttaaaacctcttcaggacattctgatgctcaacctgaattaagaaccacttgcttattgcctaggttagaaatttttatttgttttgttttgtttt

SEQ ID NO: 497728 - DNA, 201 bp, Homo sapiens
taaaagtggataaataaatataagttgaatgaatgatagaattaatgaatagatggtattgggtgaggaaagagcacagagtaacgagggcttaaacaackttgtggtgctgtatttctgtaactattacttatcagttgtgagactggacaaagtgattttcctctggccaggtctgatgcctcctatggacacattctg

SEQ ID NO: 497729 - DNA, 201 bp, Homo sapiens
ccccaggctggagtgcagtgacatgatcacagctcactgcagcctcgacctccttggctcaggcaatcctcccacctcagcctccttagtagctgggactmcaggcctgtgccaccacactcagcaaattttttagtttttgtgttttgttttgtttttttttaagagatggggtctcactatattgcccaggctggtctt

SEQ ID NO: 497730 - DNA, 201 bp, Homo sapiens
ggtaactgttggtacttgtggcctctacatcttgtaaattcatacatgtccacgtttgacctaattgtagacttttttgaaattttcagttttaggtgaawaccaatgagtacccagagttttctgtctttgttgtcctctggatgttggtcccaaatccactcaggcaacaaatcctggagttacctgctccttatcttt

SEQ ID NO: 497731 - DNA, 201 bp, Homo sapiens
agattgaatcctgtctctcctacttactagctatacagatatcagtaaggttttgtcatctataaaataggggcaacactagagatatactttgtatggtygttgagacaattaagagatttttatcacgtaaagcacttggaatagtttctggaacctggtcggtactatgtcgttgtccctcttcccatcccacatcca

SEQ ID NO: 497732 - DNA, 201 bp, Homo sapiens
gttaatgagcaaaagatttccttaccataaagtgaagcccatcaagtgaaagcaagtagaaaggcgcagaaaggtttatccttgtcaccatgtggaaggacacttaggggagcagatcatttggtaactgttggtacttgtggcctctacatcttgtaaattcatacatgtccacgtttgacctaattgtagacttttttg

SEQ ID NO: 497733 - DNA, 201 bp, Homo sapiens
gggctgacagattgaatcctgtctctcctacttactagctatacagatatcagtaaggttttgtcatctataaaataggggcaacactagagatatacttygtatggttgttgagacaattaagagatttttatcacgtaaagcacttggaatagtttctggaacctggtcggtactatgtcgttgtccctcttcccatcc

SEQ ID NO: 497734 - DNA, 201 bp, Homo sapiens
cggcagagttgggctgacagattgaatcctgtctctcctacttactagctatacagatatcagtaaggttttgtcatctataaaataggggcaacactagrgatatactttgtatggttgttgagacaattaagagatttttatcacgtaaagcacttggaatagtttctggaacctggtcggtactatgtcgttgtccct

SEQ ID NO: 497735 - DNA, 201 bp, Homo sapiens
ctgggagggattgaaaacaatccccccaaagccccagcggccctggctctctggttgctatgctgagttgattcatccatttattgagagtctactttgtrccagttattctgctaagtgctttgtgggcattttctttttcaagcctcacgaaaactctgaggtgggtattactagatatactttacaattggagcacat

SEQ ID NO: 497736 - DNA, 201 bp, Homo sapiens
gtccttattatcttcctctctgactttcctgaacgatgattagacctagaatgtcatttggtttacctgtaaaacttagtgagttatgtattaggatagcmcctcccaccctggggcaggaacatgaaagcagtgagatgaggagcttcttcttgctttttttctcttgctctaggcattatttgactttgaaatactcct

SEQ ID NO: 497737 - DNA, 201 bp, Homo sapiens
cggagtcactctggttcaaatgcctctgacagttatcactgttttaatttaggaataaaatgaggtgctagaaaaggaggccttgacttggtgatgattcygctgggttgcaatgaatggtccttattatcttcctctctgactttcctgaacgatgattagacctagaatgtcatttggtttacctgtaaaacttagtga

SEQ ID NO: 497738 - DNA, 201 bp, Homo sapiens
atcagcaccacttgctagtgttgagggacttttcatgttgttgtggatccccattgtgttggtcaaatcatcactccctagaatctcttgtaaaaagataygcctcagatgttgttttttgtttgtttttgcttttttaacttaacaaattggtaattgttttaacttttttattaggttcaggggtacatgtgcagtttt

SEQ ID NO: 497739 - DNA, 201 bp, Homo sapiens
taaaagttttgctgtggtaagaacacagagtgtaatcttcctccccatggaaatgttatatcacaccttatcagaccacatatatgaactcatatatgtcytcaactactggactctaaaacacatataaacccaagattttgacagatacgttgagaatgtaggctgtggcagggctactctctgttagcctttgagtta

SEQ ID NO: 497740 - DNA, 201 bp, Homo sapiens
ggaaaccaagggggaaaaagtttctactattttaaataattagaatagattttattttatagttaaatttgaagaaaactacaattttagttagatttacwatgccatctttactcatttgttcactcccattcgttcatttttcaagttaatgggtgctggaaacctgagtcatccttgacatgtccctttcatttgccc

SEQ ID NO: 497741 - DNA, 201 bp, Homo sapiens
gtcacttaatatcagcacttctgccaactcttattcatttttccagctgtatttggacaacatttacatagataattttgtgaaattttcaactagaagttgagttgagataaatcatgcagttttcaattcagtgtatcctgaaagataacgaaactcactgagctgcctggttttccaacaagctacatagaaagcatg

SEQ ID NO: 497742 - DNA, 201 bp, Homo sapiens
gggtagacaggttctcagcctgatcgagtcatgtatttatagaagaggttctctttttcttgaagaatttctgacttacttgatctgtcatcattgtctcwtatttgtaactttagagcctgacagaacaaaaaagaaataagccatttctgtagcagaatcttatttggagaaaaggattcaagactacagcgtcctatt

SEQ ID NO: 497743 - DNA, 201 bp, Homo sapiens
gagttttagaccagggtttccagaagtaaaatgttcatgtcttggttttggcctttgggtagaaaaaagtaagtttttaccaggagtccctgaaagggaargccctgctggccaggggtttcaggctcctcctccataacccatcaagtggccaaagtcttgattttctgtgtaaacgggtagacaggttctcagcctgat

SEQ ID NO: 497744 - DNA, 201 bp, Homo sapiens
tttattctcatttctgaacataaaatgttgatgaaaaaaatgtattgggaatgataacttcactgagttttagaccagggtttccagaagtaaaatgttcmtgtcttggttttggcctttgggtagaaaaaagtaagtttttaccaggagtccctgaaagggaaagccctgctggccaggggtttcaggctcctcctccat

SEQ ID NO: 497745 - DNA, 201 bp, Homo sapiens
tgccatgtttctcctacttcctgtttcctttaaccactaacttctcacgatttttaaaatcaagcctatccaattctaaaaggaaattgaaaccctgcccmccaaaaaagtaaaactagggggaaaaagccatagtaggaggtataatgttatgatcttctctcttagccctacacatctgtaaaaagtaatcttgctccg

SEQ ID NO: 497746 - DNA, 201 bp, Homo sapiens
gcatggtattttcaataatctttatggagtaaaacggagggttgtttttttctttcaaccaacagggacttaagtatatttcttaagtactttcagatgtycttctgtatggagattttaaaatcactttaaaatgaaatttattcttttgtcccattagtaacttgttgggaactttgtactagttaacattatgtttaa

SEQ ID NO: 497747 - DNA, 201 bp, Homo sapiens
ctcacgtatttgtcttagtaaatcagacaaagtaaacaaatctggtagattaacttggtaaatagagtgtggttaagtgttacctttggagttgaactcartgccatataaatagcattaatcgcatggtattttcaataatctttatggagtaaaacggagggttgtttttttctttcaaccaacagggacttaagtata

SEQ ID NO: 497748 - DNA, 201 bp, Homo sapiens
cacccagctgaggactgttagctggtccatgaatagaatgctctcaccctttctgcctctgcatatactgctctgctacagagccactcagcagagtggtrtccccttgacccagttggggccatcccgggactcctgtaacctaggaccttctagccttaatcatatcatcatatgtaaagaatgcctacaaatcaataa

SEQ ID NO: 497749 - DNA, 201 bp, Homo sapiens
atcatagtggagggaccaggaaaatggataggtagatgaaagagaaccagaggaccctgtccacaacccacccacccagctgaggactgttagctggtccmtgaatagaatgctctcaccctttctgcctctgcatatactgctctgctacagagccactcagcagagtggtgtccccttgacccagttggggccatcccg

SEQ ID NO: 497750 - DNA, 201 bp, Homo sapiens
acaaaacaattactgaatcaagcaagtggaaatgcagaatctaagggggtgaaaaaagattgtcttgtgtttacttcttttttaattctctcattgtcttyagttgatattcctctcagatgccagatacctgtcattgttgccagatgactggactctgctggctcatcaaggggctgtggcagtgcttgtttccatgag

SEQ ID NO: 497751 - DNA, 201 bp, Homo sapiens
aaggattttgacaattagtccagcttgatggatctcttctcacctgtattttggccaaactgaccaattatttcccattccaactgccatccaaatttccytccccatcccttccacatgtttcagttgcttttgctgcctttgcttcatattgactgtcaggatgtatggccctgtaatactaggtttttatttaaaaag

SEQ ID NO: 497752 - DNA, 201 bp, Homo sapiens
gaaggaagaaataataatagtgtttttcttttaattcatgcatgaagaactatgttcgacttctgtatggtatcttgaaggggtccaaaataaatctgacyggcagtttgaaggcctataagagagcatattacataatttcactcaaggattttgacaattagtccagcttgatggatctcttctcacctgtattttggc

SEQ ID NO: 497753 - DNA, 201 bp, Homo sapiens
tgaaagtcagggctggggttttgctacctgtgtatttatcagtcttctcctaaaccatagtctgccttttgatagctctaataattaatttggtcttcccygtctttcttctcccttgccccctaccccttctccctgtctgttcacaggttatcttgacgaatcagattacaacccatctgagtggagccctggcttctc

SEQ ID NO: 497754 - DNA, 201 bp, Homo sapiens
tgcttagcatgtagtaagcactagattaaataaatgtataaaatgaaggaagaaataataatagtgtttttcttttaattcatgcatgaagaactatgttygacttctgtatggtatcttgaaggggtccaaaataaatctgaccggcagtttgaaggcctataagagagcatattacataatttcactcaaggattttga

SEQ ID NO: 497755 - DNA, 201 bp, Homo sapiens
gattacagccatagccactgcgcccaacacaatgacttaatatttataatacacttagaacagtgcttagcatgtagtaagcactagattaaataaatgtrtaaaatgaaggaagaaataataatagtgtttttcttttaattcatgcatgaagaactatgttcgacttctgtatggtatcttgaaggggtccaaaataaa

SEQ ID NO: 497756 - DNA, 201 bp, Homo sapiens
aaaattttcccttgcctaggctatatcccagaccagctgaatcagaatccctggggacagagcaggggtatttgtgtttttaaaacctcttcaggacattytgatgctcaacctgaattaagaaccacttgcttattgcctaggttagaaatttttatttgttttgttttgttttgtttgacaggatctcactctgtcccc

SEQ ID NO: 497757 - DNA, 201 bp, Homo sapiens
tttgacatattaaaatgtgttatcattttaatatctttaaagagcctgaggagactctcaagccttagactgtaaatagctaacagctttgagatgagctkacataggagtcaaatgattgttccaagatggctgttctaattctgcagagctaccgtagtattcagcctactgcctgccaaaggcaaggggccttgcccc

SEQ ID NO: 497758 - DNA, 201 bp, Homo sapiens
tccctaagtcactcttggcctttctgcttcttcactgttcctccttagggaaagtggaatggcttatctaactggtgagtctgagataaggaagcacttcrcacattcagatattgtcctccaccagccatagagggacgggacagggggccctgcctaacccagttttggggaagctcactgttgctatgtacccatgcc

SEQ ID NO: 497759 - DNA, 201 bp, Homo sapiens
tatttttactagagacggggtttctccatttggtcaggctggtttcgaactccagacctcaggtgatctgcccaccttggcctcccaaagtgctgggattrcaggcgtgaaccaccatgcccagccataaagactattttaatgttctcgtgttatgtagctttgaaatgattccagacacataatttgctgcatgaatga

SEQ ID NO: 497760 - DNA, 201 bp, Homo sapiens
cagatgcttttttcatattcactctaattccctaggttacaactaattagtacttcctgtttgctccccatataatttgcttaccccttgactctatcacrtgtttatcttccttctagaggcctatcttacagaaataggatgtgaacacttgaagacagaactttgtcttttatctctttatttccagtgcctagtcca

SEQ ID NO: 497761 - DNA, 201 bp, Homo sapiens
ctctctctccaactcactttatggcaaatgaggagtagcaaagcatcatttaggaagagaaagtgtagaaaatcagagagatgaaatactacaggttttcyaaaggctcaggtttatctggctcaagcaatacaaattacaaactatggcaccacctgtataatctggttttaattaacttgaggaaggtacatcaatgtt

SEQ ID NO: 497762 - DNA, 201 bp, Homo sapiens
catgctattgtttgtggcttaagaatgcctttaagcagttttccaccctgggcaggccaggtgttcttgccctcattcccataaacccacaaccttccagygtgggcattatggccatcatgaacatgtcacagtgctgcagagattttatttatggccagttttggggccagtttatggccagattttggggggcttgct

SEQ ID NO: 497763 - DNA, 201 bp, Homo sapiens
ctttccaaagtctgtgggttctcaaatgtgatctcatcaacatttagggcagtatcctttggaggttattgttgcccccttttttacaaatgggcactttragataaaagcaggccacatacaagctattggcagaacccaggagtccagcttttgtgctgtgggttccatctgctatgtgtctctcccagtcataattag

SEQ ID NO: 497764 - DNA, 201 bp, Homo sapiens
taaaccagcagaaagtcctgtcttagggtcattagaatgtgaggttttttttttgtttgtgtgtttttttttttttttttgagacatacttttactccatygcccaggctggagtgcagtggcatgatctccactcactgcaacctccacctcccacactcaagcaattcccatgcctcagcctcctgagtagctgggatt

SEQ ID NO: 497765 - DNA, 201 bp, Homo sapiens
agaaattgaagcctttggacttcgctcattcttccaaaagacttttctaggcagtgggatagattttcgccttacaccccctagcactctcttcccttccrgcactccttcaaggcaactgcaatttcaggctgaccatcttggaagtttgatggcactgagtaccaccagccaaatgctctcacattttctgtgcctctc

SEQ ID NO: 497766 - DNA, 201 bp, Homo sapiens
gcctttgggtagaaaaaagtaagtttttaccaggagtccctgaaagggaaagccctgctggccaggggtttcaggctcctcctccataacccatcaagtgrccaaagtcttgattttctgtgtaaacgggtagacaggttctcagcctgatcgagtcatgtatttatagaagaggttctctttttcttgaagaatttctga

SEQ ID NO: 497767 - DNA, 201 bp, Homo sapiens
ctccccttcagttctctgctgctagatcacccatagttggaatggaggctcagaaacctagtatttagctcctttgagcatctgtaattgaactggcaaascaagagcttggggctgactgttggattagctgaagaatagtttccgtcatattctagaaaagaaagctttttttttctttttctttttctccagggaatg

SEQ ID NO: 497768 - DNA, 201 bp, Homo sapiens
ctttccttctcggctgtgagacagaacaacagcgcctttgtgatgacctttacagggctgtttacatttggtgacctgcctgaacactcccgccagagtgracgcacctcttggctaatgaggaacagccatgctgtcttttactatggtagaccttggaggttaaaatgaaaaataagaggatcctctgttgatgactag

SEQ ID NO: 497769 - DNA, 201 bp, Homo sapiens
caaatatttttataattaacttaagattcaacaaggagccaaaggtaaacagactgtaattatttcaagttctaaccattatgagtagatattaatcttcragaaggtattattaaaaaaagtatataatattcataaattaaagtcaacttataagtacaaaggaatatctgtgactataaaaggaaaaataaactggaa

SEQ ID NO: 497770 - DNA, 201 bp, Homo sapiens
atgagtagatattaatcttcgagaaggtattattaaaaaaagtatataatattcataaattaaagtcaacttataagtacaaaggaatatctgtgactatraaaggaaaaataaactggaatttaaaatttaatcactgtgccttagtaaacacgatcctggtacatttcagcacagtatttgtgtttcagaataggattt

SEQ ID NO: 497771 - DNA, 201 bp, Homo sapiens
catttaaatttctccaattttccccactaatatcctttttctgcttcaggatctaatccagcatcccacattgcatttagttgtcatgactccttatgctkttccaacctgtgacagttctaatgaggacatttaaaggaagtgtgcccctcgcccaccaaaaggaagaaagagccatagactctgaatgtaattccaaaa

SEQ ID NO: 497772 - DNA, 201 bp, Homo sapiens
gaaactaaaacgagtgggtttatcacaagagctgtgtgaccgtctgagtagacatcagatccttacctgtcaggtaaattttatttaacatttttattgakaagttttatgcacaagttaactttataccttaatacctcttaaacttgaaatatgaaaatgtaggcttacaaaaaaaagataaatgatggtgcttttcca

SEQ ID NO: 497773 - DNA, 201 bp, Homo sapiens
aattaatagagtactttcggtctgaaactggccttaaagaatctttgtccgtgtgtatcacactgcaatgcaatagacgcagaaatctgggcactagaagrtgttaactttggatgcctcctgttttatatgcatatgattaaaccaatggggaaagaaagccctgaaactttattacaacatttttgtagtattaaattt

SEQ ID NO: 497774 - DNA, 201 bp, Homo sapiens
gccagggagaggtcttactttagccaacatgcaacattaggtagaagaaatggggcctttctgactggtttgacctgtgggtgggccctcttccacatgtytctaattaggatgcaagaaagagtagatattctgtggcgactctcctttccttctcggctgtgagacagaacaacagcgcctttgtgatgacctttacag

SEQ ID NO: 497775 - DNA, 201 bp, Homo sapiens
tacttcctcaacttctggcttggggagggtttgatcagagtcattctctcttcagagaagcatctggaaagattgatccaagagtgctgatagcaagttcrctatcatcgccctgcctcgaggaaaataagcattcgataaaaggacacttccactgcccagttcactcctactccactgtgtcttctcctgtccctcccc

SEQ ID NO: 497776 - DNA, 201 bp, Homo sapiens
cttatttcattcaagaaaatgaaagcattcttatttagtaaacatatcttatagctgctactctaaatatcacttacaaaaaacatatttaatcccagaargataaatctcaagagacattgttgtttgctcaagattagatgagatccaacagcccttgctggttgcatgctctgactgctaacctctgttagtgcttac

SEQ ID NO: 497777 - DNA, 201 bp, Homo sapiens
ccatagaataattcttccttaagtaaaacagcaaactagctccttgatgtcactgagtttgtgaattattttcgttcattttgattagtacataggcctcmcaagctattaaggagaaaaaagaagacaggttttcttattcttattttaatgatgagatatatacagttgaaaggaattatgtaaggccgggtgtggtgg

SEQ ID NO: 497778 - DNA, 201 bp, Homo sapiens
atccaggtcctgcttatttttcttgaatgagctattaaaatgcatgtatgtgtgcacatacacacatacatacacatcatgcagccatttgcctctgtgtrtacatacatatcattgtgtagattgcactttttcagaaaagacaactgatcaccagcacgtcactctcacttcctcccatgtacattttgtatcttcccc

SEQ ID NO: 497779 - DNA, 201 bp, Homo sapiens
atttccacctagggagactggctccagaggtacatttttatccactaagctcttttgtaaggatacaattgagattatcatgactatgtataaataggaastaaaagacagccagatcacatgggtattgggaaggttgaaacttaggttattctcttcatttatctcatctctgtcttgcctttccatgacactgacact

SEQ ID NO: 497780 - DNA, 201 bp, Homo sapiens
gccatgctgatctactctgggttcccagggcatcgtaagcatctttctctttaggacctttctacacatctcccctgcctgggaccctgccctgaaccctrtgctaccgcaggatcgtcactcagatctcagcctgaatgtcctgtctcagacaggactcccctgactgtcctatcagtatctacacccgatattttattt

SEQ ID NO: 497781 - DNA, 201 bp, Homo sapiens
cccataaagaaaaacttcaagaggagaaaaaggtaatctaaatgcatattattattttaaagttctaatactgtgtacaattttatgaagttaagtttctrtaatatgtggtcacccaggggtctgagaacattagttaatccagtcaacaaacattgatggcatatgtgctgtatgacaggctctgtgcttggtcttagg

SEQ ID NO: 497782 - DNA, 201 bp, Homo sapiens
tgacaacacaggcacaagtcacaacttgttataccacgtgacaccttccgagcagcggaggcttccctctactctaggagtcacacaaaaggccaaaggtrcacgattctcctcggggctccttcctctccgctcccttcccaaccaagaaggacacgcagaactttgctggagagatcaatgtttctagaacaccctgaa

SEQ ID NO: 497783 - DNA, 201 bp, Homo sapiens
acgtctaacaggcaggaatttagaggtggccaaggtaacgagaactagtggttttcaccctgtttggtgaccttcatagggcttatttatgcacttcaagygcatgacctaatacatgttggtttggcttctcttctcgtaatagcagcctgtaaaaagcttttgagaattccccgtgttttctcattttgggtcaagaaa

SEQ ID NO: 497784 - DNA, 201 bp, Homo sapiens
aaaagtgtagagtatcacgaagtgtctgtgttcattttctgaccgtaaactgaaatactggtgaacaaacgtggggtgcgagcgggtgagcggggcggccrgccggtgcccgctgcatccagagggggcgctgcaggcctcccttcggctgcgcacggcccgggccctccgcggctctgcaactctgcaccccgaaaggtt

SEQ ID NO: 497785 - DNA, 201 bp, Homo sapiens
ccctaacgtgtaaggccctcagaggcagagcccaagtattattcaccttttgtagccccagagcccgccacggtgccggccacaaagctggcccctaataratactgcttgaatgagtacaagaatttgagggcgcacaggggaggaagtaattaaggggaggggcgaagggtggtcttgaatgatgaatagacatttacc

SEQ ID NO: 497786 - DNA, 201 bp, Homo sapiens
tgaatagacatttaccagagagacaaagaacattccagccggaggggacggctttcgcaaagcaccggaggctcagggccgcgtgtttggggaaaacgggwagtcctttgagccggcaaaaaattaggatagcaagagaatttcatcgtagggaattaggaatttgttctagagaaaatgagaagccacagatggatttaa

SEQ ID NO: 497787 - DNA, 201 bp, Homo sapiens
atcctttaaaaggcatcccttacgcctttgaaaagtgtagagtatcacgaagtgtctgtgttcattttctgaccgtaaactgaaatactggtgaacaaacstggggtgcgagcgggtgagcggggcggccggccggtgcccgctgcatccagagggggcgctgcaggcctcccttcggctgcgcacggcccgggccctccg

SEQ ID NO: 497788 - DNA, 201 bp, Homo sapiens
atgaatagacatttaccagagagacaaagaacattccagccggaggggacggctttcgcaaagcaccggaggctcagggccgcgtgtttggggaaaacggkaagtcctttgagccggcaaaaaattaggatagcaagagaatttcatcgtagggaattaggaatttgttctagagaaaatgagaagccacagatggattta

SEQ ID NO: 497789 - DNA, 201 bp, Homo sapiens
tgtgtgtatatgtgtgtgtgtgtatgtatgtgtgtgtgtgtatgtatgtgtgtgtgtgtgtgtgtatatatatatatatatatatatatatatatatatatttttttttttttttttagacggagtctcactctgtcgcccaggctggagtacagtggcgcaatctcggctcactgcaacctccgcctcctgggttcaagc

SEQ ID NO: 497790 - DNA, 201 bp, Homo sapiens
gtgtgtatatgtgtgtgtgtgtatgtatgtgtgtgtgtgtatgtatgtgtgtgtgtgtgtgtgtatatatatatatatatatatatatatatatatatatwtttttttttttttttagacggagtctcactctgtcgcccaggctggagtacagtggcgcaatctcggctcactgcaacctccgcctcctgggttcaagcg

SEQ ID NO: 497791 - DNA, 201 bp, Homo sapiens
agggaaatagtgtgtgcaaaggccctgaggttggattgaactttctgtgtccaaagaaaaaagtttactctaatgacgcattttggtgtttgatgaccacrtgccacatccttcttgggtccaaacccccaagcaaacctgactggcttgaacagaaatgtttaaaaagataaatgcaaacccagtagtaagagaaacttg

SEQ ID NO: 497792 - DNA, 201 bp, Homo sapiens
gaggcaaggagaatcatgtgaacctgggaggcggaggttgcagtcagctgagattgcgccactgcactctagcctgggcaacagagccagactccatctcaaaaaaaaaaaaaaaaaaaaaaaaaggccaggcgtggtggctcacgcctgtaatcccagcactttgggaggccgaggtgggcggatcacgaggtcaggaga

SEQ ID NO: 497793 - DNA, 201 bp, Homo sapiens
caggctgtggtcggtcccctctgggtataaagaaaagcatgaagttgctgggtgcggtgactcacgtctgtaatcccagcactttggaaggccgaggcgggtgtgggtcaggagtttgagaccagcctgaccaatatggtgaaacctcatctctgctaaatacaaaaaattagctgggcgtggtggtgcatgcttgtaatc

SEQ ID NO: 497794 - DNA, 201 bp, Homo sapiens
tggagtgttaggtgagctcaaccagtcccagctgtcagacctcagcgagcccgtgaacgtctccttcccaggtaaggcccttctatgggatctcactgccrggggcttaattttctcacatggacctcttgtgtgtactgttgactcagaggccttcccagaaaaagccaggcttacaccctgccaggacttactcgcctt

SEQ ID NO: 497795 - DNA, 201 bp, Homo sapiens
aggctgtggtcggtcccctctgggtataaagaaaagcatgaagttgctgggtgcggtgactcacgtctgtaatcccagcactttggaaggccgaggcgggtgtgggtcaggagtttgagaccagcctgaccaatatggtgaaacctcatctctgctaaatacaaaaaattagctgggcgtggtggtgcatgcttgtaatct

SEQ ID NO: 497796 - DNA, 201 bp, Homo sapiens
acaatgctggccaggctgctctcaaactcctgacctcaggtgatctgcctgcctcggcctcacaaagtgctggaattacaggcgtgagccaccatgcccasctccccccaattttttttttttttttgagacagtctcggtctgtcgcccaggctggagtacagtggcacgatctcggctcactgcaacctctgcctcccg

SEQ ID NO: 497797 - DNA, 201 bp, Homo sapiens
actgcaatctccatctcccaagttcaagtaattctcctgcctcagcctcccaagtagctgggattacaggcacatgccaacacacccagctaatttttgtrattataataaagacagatttttgtttttgtttttgtttttgttttgttttgttttgagacggagtcttgctgtattgccaggctggagtacagtggtacc

SEQ ID NO: 497798 - DNA, 201 bp, Homo sapiens
aaagtgctgagattacaggcgtgagctaccccgtccggctaatgtttttttttttttttttttaattaggagggactgctggcatgtgtcagtaggctgargcaggtggatcacttaagccggggaggtagaggatatagtgagccatgatcgcaccactgcattccagcctgggtgacagagggagaccctgtctgtaaa

SEQ ID NO: 497799 - DNA, 201 bp, Homo sapiens
tctctcaccttggccttgtggccttggagtagggagctgacaacaccccttctgccccaggtgaatcaatgaacaaggctgacattgtgagaataccaagygtctgtcttcttccctcttctggcttagctcctcacctcccttggggtcagggcatctcctctttctccaggaaggggaagcgaagtcttgtgctgagaa

SEQ ID NO: 497800 - DNA, 201 bp, Homo sapiens
ggagacccacagagggtggtttggggaaagaaggacacttccctggcagggtgggcactccatgccccccacaaacagcgcctcctggtgggcatgctgcrtaataggaacaggagccatttattaagtgcctcctgtgtgctggaggactgagctgggactctctgaagctggagctccttatccttatggcagccctgg

SEQ ID NO: 497801 - DNA, 201 bp, Homo sapiens
gtccgaccattcttcttacccctcggtagaaatacaattaggcggccaggcgcggtgactcacaactgtcatcccagcactttaggaggctgaggcaggcrgatcacgaggtcaggaattcgagatcagcctggccaacatagtgaaaccccgtctctactaaaaatacaaaaaaattagcagggtgtggtggcggacacc

SEQ ID NO: 497802 - DNA, 201 bp, Homo sapiens
tgcactccagcctgggcaacagagtgagactccttctcaaaaacaagaaaaaaaaaatgggtgatggagcaattggaggagagcctggggaggaggaggarctggcaggtgctccttctggaaggcctgagataagacacccattttcctgagggcagtgagagatacccctaggaagactgtgtgtagaaggacttggtt

SEQ ID NO: 497803 - DNA, 201 bp, Homo sapiens
ctgcattgcaggctccttggcgatcccagcaccatccatccggctggtgcccccgtacccaagcagccaagaggaccccatccacatcgcatgcatggccsctgggaacttcccgggggcgaatttcacactgtatcgaggggggcaggtggtccagctcctgcaggcccccacggaccagcgcggggtgacatttaacct

SEQ ID NO: 497804 - DNA, 201 bp, Homo sapiens
tgagcggcggcagcagcaaggctccagggggacccttccactgccagtatggagtgttaggtgagctcaaccagtcccagctgtcagacctcagcgagccygtgaacgtctccttcccaggtaaggcccttctatgggatctcactgccgggggcttaattttctcacatggacctcttgtgtgtactgttgactcagagg

SEQ ID NO: 497805 - DNA, 201 bp, Homo sapiens
cttcccgggggcgaatttcacactgtatcgaggggggcaggtggtccagctcctgcaggcccccacggaccagcgcggggtgacatttaacctgagcggcrgcagcagcaaggctccagggggacccttccactgccagtatggagtgttaggtgagctcaaccagtcccagctgtcagacctcagcgagcccgtgaacgt

SEQ ID NO: 497806 - DNA, 201 bp, Homo sapiens
gggccagggctttcccgatcaagcctcctgactcaaggggcaaccctggtccctgtcactttctcctgaattcctttgcagagatcgagaatcctgctggscccagattaacttcgacagcacaggtctgtgcctccacactcctgactccagtggggaaaggattacacctccaaatgccatcaggcctcatcacacacc

SEQ ID NO: 497807 - DNA, 201 bp, Homo sapiens
gacccatgggtcagtgggtggggagcaaaggctacattttgggtgtggtttggggccagggctttcccgatcaagcctcctgactcaaggggcaaccctgrtccctgtcactttctcctgaattcctttgcagagatcgagaatcctgctgggcccagattaacttcgacagcacaggtctgtgcctccacactcctgact

SEQ ID NO: 497808 - DNA, 201 bp, Homo sapiens
gtgcagaaccgtgccatgaccatgggtatgcaaatttcttttggagtctctgctttcacttctagtttccttttgaagccttatactgctttgtcgttggytgaaatggtaaggcagcagctgacctgtctctagctttccccattaccttgctgagtgtctgatatgcaactttgtaacaccctttcaggtgggatcgat

SEQ ID NO: 497809 - DNA, 201 bp, Homo sapiens
tggccggcagtgccccctaccacccgcaagggcatgacactggaggcaccctgcccactcagcccacctgtgttatagcttgtatctgcattcggcagttytcaagctcttgtcctgcatccaagaagaatgaggaaatgctgacaattgaagggtgaagatgggaggagaatttttttgagcgacagaacagctctcagc

SEQ ID NO: 497810 - DNA, 201 bp, Homo sapiens
tacgcctgtaatcccagcactttgggagcccaaggtgggaggattacttgagcccaggagtttgagaccagctaggcaatgtagtgagaccctttctctamaaaaaaaaaaaaaaaatttagccaggtgccgtgcatgcctgtggtcccagctacttggaaggctgaggtgggaggatcacttgagcctgagagatggaga

SEQ ID NO: 497811 - DNA, 201 bp, Homo sapiens
gcaagctctccttcccgggttcacgccattctccagcctcagcctcccgagtagctgggactacaggcacccactaccacatctggctaattaaaaaaaawttttttttaataaaaagagtttatataagcatccatcttaagaagctattaatacaaatttctgctggtgaagtttaaatttaaaaacaaaacatgagct

SEQ ID NO: 497812 - DNA, 201 bp, Homo sapiens
gaggcatcagcgtatcagtttcctcgtaagtcgggagtgatggaacgaccaccctgtagtgcggctgtgagaattgagatgaggcttggttcatattgagygctcagctttcctggcttatagacagtggaggggcgtggccccaccatgcaccccaagggtctcagactcaagggccagcaggtaaatagagccattaca

SEQ ID NO: 497813 - DNA, 201 bp, Homo sapiens
tggggagacatcctgctgcctggagatgaaaacctgctctggggattgaatcccagcttcacctggctgtgggcctcctaaccaggagaatatatatatgtttttttttttttttttgagatggagtttcactcttgttgcccaggctggagtgcaatggcctgatctctggctcaccgcaacctctgcctcctgcgttca

SEQ ID NO: 497814 - DNA, 201 bp, Homo sapiens
ccgggtggtcttgaactcccaacctcaggtgatccgcccgcctgtgcctcccaaagtgctgggattacaggcatcagccaccgtgcctggcttttatatatgtgtgtgtgtgtgtgtgtgtgtgtgtgtgtgtgtatgtgtgtgtgtatatgtgtgtgtgtgtatgtatgtgtgtgtgtgtatgtatgtgtgtgtgtgtgt

SEQ ID NO: 497815 - DNA, 201 bp, Homo sapiens
cgggtggtcttgaactcccaacctcaggtgatccgcccgcctgtgcctcccaaagtgctgggattacaggcatcagccaccgtgcctggcttttatatatgtgtgtgtgtgtgtgtgtgtgtgtgtgtgtgtgtatgtgtgtgtgtatatgtgtgtgtgtgtatgtatgtgtgtgtgtgtatgtatgtgtgtgtgtgtgtg

SEQ ID NO: 497816 - DNA, 201 bp, Homo sapiens
cctcccaaagtgctgggattacaggcatcagccaccgtgcctggcttttatatatgtgtgtgtgtgtgtgtgtgtgtgtgtgtgtgtgtatgtgtgtgtgwatatgtgtgtgtgtgtatgtatgtgtgtgtgtgtatgtatgtgtgtgtgtgtgtgtgtatatatatatatatatatatatatatatatatatattttttt

SEQ ID NO: 497817 - DNA, 201 bp, Homo sapiens
ctggcttttatatatgtgtgtgtgtgtgtgtgtgtgtgtgtgtgtgtgtatgtgtgtgtgtatatgtgtgtgtgtgtatgtatgtgtgtgtgtgtatgtakgtgtgtgtgtgtgtgtgtatatatatatatatatatatatatatatatatatatttttttttttttttttagacggagtctcactctgtcgcccaggctg

SEQ ID NO: 497818 - DNA, 201 bp, Homo sapiens
gtgtgtgtgtgtgtgtatgtgtgtgtgtatatgtgtgtgtgtgtatgtatgtgtgtgtgtgtatgtatgtgtgtgtgtgtgtgtgtatatatatatatatrtatatatatatatatatatatttttttttttttttttagacggagtctcactctgtcgcccaggctggagtacagtggcgcaatctcggctcactgcaac

SEQ ID NO: 497819 - DNA, 201 bp, Homo sapiens
gagcgggggataggctaattggccagacacaaagtttgctaagtctcttgggtccagctgcattcatgttctttggttgggggttatggggtaagggctgrctactcaaaggtaacctggagagacgacactgacctgcccactctcttttctgattttcctccagtgcccacttggatcttggtgctctccctgagcctg

SEQ ID NO: 497820 - DNA, 201 bp, Homo sapiens
aggtgggtagattacgaggtcaggagttcaagaccagcctgaccaacatggtgaaaccctgtctctactaaaaatacaaaaattagccaggcatggtggcrcacgtgtaatccccgctactcaggaagctgaggcaggagaatcgcttgaacccaggaggtggagtttgcagtgagatgagatcgcaccacttcactccag

SEQ ID NO: 497821 - DNA, 201 bp, Homo sapiens
ggaacttcccgggggcgaatttcacactgtatcgaggggggcaggtggtccagctcctgcaggcccccacggaccagcgcggggtgacatttaacctgagyggcggcagcagcaaggctccagggggacccttccactgccagtatggagtgttaggtgagctcaaccagtcccagctgtcagacctcagcgagcccgtga

SEQ ID NO: 497822 - DNA, 201 bp, Homo sapiens; identical to SEQ ID NO: 345429

SEQ ID NO: 497823 - DNA, 201 bp, Homo sapiens
tacttttttttttttttgagacggagtctcactctgtcacccaggctggagtgcagtggcgcgaccttggctcactgcaagctccgcctcccgggttcacrccattctcctgcctcagcctcccgagtagctgggactacaggtgcccgccaccatgcctggctaattttttgtatttttagtagagatgggttttcaccg

SEQ ID NO: 497824 - DNA, 201 bp, Homo sapiens
ttgctttcaggctttaaactgtctttggcttggaggtggggtttcaccagggacctgcccctatctgcctaggcatttgtctgcctcttgccactatcaawatcaatcagaaggcttccctgaccctgctgtagctgggttgagccccctcggccactgcctctgttactgcacttcaccactggactctccttgtcttct

SEQ ID NO: 497825 - DNA, 201 bp, Homo sapiens
gaccttgtctccaaaaaaaaaaaaaggcatgaggatgaattcaataaattcaagaatattctgtgtactaccttgaccaaattgtattaatatttagagamtattataccaaacaactacaccgtgtacttgaatttctagcgtacgtacaatgtggatcgagataccctgcaccattctaaaaagtcagtacatttcaaa

SEQ ID NO: 497826 - DNA, 201 bp, Homo sapiens
acctgggaagcggagcttgcagtgagcccagatgatgccactgcactccagcctgggcgacagagcaggactccgtgtcaaaaagaaaataaaaataaccmttttaaaattaacaattcagtggcatttagtacattccagtgttgtgcagtgacttctatgtagttccaaaacattttcatcggctcagtaaagatccct

SEQ ID NO: 497827 - DNA, 201 bp, Homo sapiens
ttgcagtgagccaagatcgcaccactgcactccagcctgggcgacagagcgagactcagtctcaaaaaaaaaaaaaaaaaaatggtggcgcgcgcctatartcccagtgactcgtgaggttgaggcaggagaatcgcttgaacccgggaggcggaggttgcagtgagccaagattgtgccactgcactccagcctgggcga

SEQ ID NO: 497828 - DNA, 201 bp, Homo sapiens
ctcccaaagtgctgggattacaggtgtgcgccactgtgcctggcccagaagtggtcaagttataattgtcatccctatctccaggccaactcagtccagcrtggacgatggcttccatcctggaggatggactttgaggacaggttcattcatttaccagtttttttgttttgtttttaccacctattacgtgctaggccc

SEQ ID NO: 497829 - DNA, 201 bp, Homo sapiens
agggatccccagctgagggcatgagaacctgagtctctgctgctgtgtaaggtggatgctggccataggagcacaaaaggttgatgagtcagaggaaggartgatcgttctcatcctgtggatcagggagggccaagaaggaggtggccttggagtcagatcttaacgttttggagggattttgacaagcttggggaaaga

SEQ ID NO: 497830 - DNA, 201 bp, Homo sapiens
gttgtgggcctttgagtcagaaggcgtcacgtctgggtcccatttctgtggccctgctgaggtgtggtccagtggtgaagagggcgatggatgggtttgcrtgtctgtgatgagcgcgttgcatgggggctgcgcgtctagaactcagatcccaaagatcatgagaggagcgaggaaccccggggtatgtctcaggggcct

SEQ ID NO: 497831 - DNA, 201 bp, Homo sapiens
aagcaatcctctagctgcagcctcctgagtagctgggactatgggtatctgccatcacgcctggctcacgctgagtactgtgtgtttgaagaggataacayaaggcaagattaaaaaggaagattggagctagaccagagcccttgactgcctggtagaagaatttgaactttcttctagagtcagtggggaccagtggag

SEQ ID NO: 497832 - DNA, 201 bp, Homo sapiens
tgggactatgggtatctgccatcacgcctggctcacgctgagtactgtgtgtttgaagaggataacacaaggcaagattaaaaaggaagattggagctagwccagagcccttgactgcctggtagaagaatttgaactttcttctagagtcagtggggaccagtggaggttttgagcccaggagtgatagtcctgaactgt

SEQ ID NO: 497833 - DNA, 201 bp, Homo sapiens
tcacttccctccttgaggaccctcttctgctcctcctctaggttcccctgacataatttctgtttctccgcagaaggaagaggcccagcagaagggactcrctgagccaccccccgccccactccatgttggctgtgctctcaggtgagaaggtacccagaggcctacagtgaggacaaagtagacccaaggcagcaggcc

SEQ ID NO: 497834 - DNA, 201 bp, Homo sapiens
cactgtggttagctgaggtgggaggatcgcttgtggccaggagtctgggacgagcctggacaacatagagaccccatctctacaaacaatttttttttctttttttttttttttttgagacagagcctctctctgtagcccaggctggagtgcagtggtgccttctcggctcactgccacctccgcctcccaggtcccagt

SEQ ID NO: 497835 - DNA, 201 bp, Homo sapiens
gctgggaaggggtggctgccgtgggagcctgctcaacaggtgcacagtgacggtctggtgaagagaaaggagccatggtccagggctgaggagctctggcrtctttaccattccctcactggcacttgatctgaaggaagctcagttcctcatctgcagaatggggctgattgtctgccctgcgtatcttccaaaagcaca

SEQ ID NO: 497836 - DNA, 201 bp, Homo sapiens
gagcctgcagccacacccaccagcccagccacagcagtcagcccagccaccgctgcagggccagccatggccaccaccacggaggaggccaagggccggartccacgggctggaaggactctgacttacacagccaagccagtgggcgggattggtggaggtgggggtccccccacaggggctggccggggcccctctcag

SEQ ID NO: 497837 - DNA, 201 bp, Homo sapiens
tgaggcaggagaatcgcttgaacccaggaggcggaggttgcagtgagcccagatcgcaccactgcactccagcctgggcgacagagctggactgtgtctcaaaaaaaaaaaagaaaaagtgttactaagtgccaaggagcaaaataaagtagggtcgggagataggaagttttagaaggtggggagtggccagggaaggcc

SEQ ID NO: 497838 - DNA, 201 bp, Homo sapiens
atgtggggagggaggtggcgtgacaagggcagtgtgggcctcagacccaagaggccagccgcaagcaggctgtgtgtgcgtgcctgccgtctgtgtgcttragtggcggtggggctgcggaggggatttggtatgaggaaggcgggagataaatgcagggtagcgcatggaggccggcgggaggcatgggtgttgtcagat

SEQ ID NO: 497839 - DNA, 201 bp, Homo sapiens
ccatatgggatggagaagggaatctactttctccctgtttttttttcctgatggtttctcccagactagaccaaatagccagaaaaatgataggggtcggwtgggtgggtaagcccaggatttgcacatgaccttccatccttacctgtattcccatctccccagtgtcactcccctcaccaatcactccagatggttttg

SEQ ID NO: 497840 - DNA, 201 bp, Homo sapiens
gaggaccctcttctgctcctcctctaggttcccctgacataatttctgtttctccgcagaaggaagaggcccagcagaagggactcgctgagccacccccygccccactccatgttggctgtgctctcaggtgagaaggtacccagaggcctacagtgaggacaaagtagacccaaggcagcaggccagcaggggcggcca

SEQ ID NO: 497841 - DNA, 201 bp, Homo sapiens
atggaccggagaattggaacttcagaataggtcaaaattccaaaaccatggacatttttttttgggagaattgagattgtagacattttttttttcttaartatgatcaaggaaaatagcttccagaatgtggtggttctgggcaacaaatgagattgtggcgacgtggagattaaaatatatgtatttgagctggggaat

SEQ ID NO: 497842 - DNA, 201 bp, Homo sapiens
actccttcattcctcctctgtctctttgcacttttcttggtcttggccacagcctgagtgacgaatttcctactgaatgtaccaagttccaatttttaagsgggggaaaggtttcaaatggggaaaaacacacaaaaaaaaaatcactaaaaattcccacaaatcttgtttctggcactttagaaaaactgcaaaaaaata

SEQ ID NO: 497843 - DNA, 201 bp, Homo sapiens
ccatcacgcccggctaattttttgtatttttagtagagacggggtttcaccgtgttagccagtatggtctcgatttcctgaccttgtgatccacccgcctyggcctcccaaagtgctgagattacaggcatgagccaccgcgcccggcggcatttttttttttttaagacggcattttttttttttaagaccgagtctcgc

SEQ ID NO: 497844 - DNA, 201 bp, Homo sapiens
ctcaggtgattcgccaacctcagcctcccaaagtgctgggagtacagggatgagccactgcgctcagcctctacaagcaatttgagaatttaaaaaaaaarccatcctgaggcccctgctcaccaccactcaccggtctgcctccctccagccccagttccttcagctgaggttttttttttttttttttttctttttttg

SEQ ID NO: 497845 - DNA, 201 bp, Homo sapiens
tcttggtcttggccacagcctgagtgacgaatttcctactgaatgtaccaagttccaatttttaagggggggaaaggtttcaaatggggaaaaacacacamaaaaaaaatcactaaaaattcccacaaatcttgtttctggcactttagaaaaactgcaaaaaaatacgtaataaagaatacatatatatatatctacaca

SEQ ID NO: 497846 - DNA, 201 bp, Homo sapiens
ggaaaatggaagggttgaggatggaccggagaattggaacttcagaataggtcaaaattccaaaaccatggacatttttttttgggagaattgagattgtwgacattttttttttcttaaatatgatcaaggaaaatagcttccagaatgtggtggttctgggcaacaaatgagattgtggcgacgtggagattaaaatat

SEQ ID NO: 497847 - DNA, 201 bp, Homo sapiens
gttttgtcttttgaaaatgatcaagtcttgtcagttcgtgccctctttccccatgttccctgggaagacgggtggtggcagagtgagaaggccactggttytgtgccgcagcacgcaaaatttagaattctacagactagctctatacgtagtgaggacccagatttagagaaactgaccaatatttatctccgcatttgt

SEQ ID NO: 497848 - DNA, 201 bp, Homo sapiens
aaaactctaaaaccacagagccaccaaacctaccaggaagcccaatttgtgcctttttttcttcactacttctccccaccattttccaggactgagttctmcaaactaaatattgccagttgttagctcatttaatctttacaacaaccccacaaggtaggaactattaattgtccccaccgtatggacaaagaaacagat

SEQ ID NO: 497849 - DNA, 201 bp, Homo sapiens
acaagcaatttgagaatttaaaaaaaaagccatcctgaggcccctgctcaccaccactcaccggtctgcctccctccagccccagttccttcagctgaggttttttttttttttttttttctttttttgacagagtctcactctgtcgcccaggcgggagtgcagtggtgcaatcttggctcactgcacctcacctccagg

SEQ ID NO: 497850 - DNA, 201 bp, Homo sapiens
ggcaaaggcatgaaggtgtgggtcatgtagaagctggagagcacactgggtgtctggggttttgttcatttgtttagaaactgggtctcaatatattgccsaggctggactcaaactcctgggctcaagcaatcctctagctgcagcctcctgagtagctgggactatgggtatctgccatcacgcctggctcacgctgag

SEQ ID NO: 497851 - DNA, 201 bp, Homo sapiens
ggcccttgactcaagtgcctgtgttcctgccctattccctgctgtcctgacccaggtaccagtgcatcttctgttgggagacctttgtcacttactataayctgaagacccaccagcgagccttccacggcattagcccgggcctccttgccagtgagaagacacccaatggaggctacaagcccaagctcaatacactca

SEQ ID NO: 497852 - DNA, 201 bp, Homo sapiens
gaggccctccacccgctttacctgcccccactgcgccaaggtgtgcaagaccgcagctgccctgagccgccacgggcagaggcatgctgctgagcggccckggggcaccccaacccctgtcattgcctattccaagggcagcgctggcaccaggcccggggatgtcaaggaggaagccccccaagagatgcaagtctcctc

SEQ ID NO: 497853 - DNA, 201 bp, Homo sapiens
ggaggctacaagcccaagctcaatacactcaagctctaccgcctgctccccatgcgggcagccaagcggccctacaagacctacagccagggagccccggmggctcccctttctccaaccctcaacacaccggcccctgtggcaatgccagccagcccgccgcctgggcctccacctgccccagagcctggccctccaccc

SEQ ID NO: 497854 - DNA, 201 bp, Homo sapiens
ccggacggaggccctccacccgctttacctgcccccactgcgccaaggtgtgcaagaccgcagctgccctgagccgccacgggcagaggcatgctgctgadcggcccgggggcaccccaacccctgtcattgcctattccaagggcagcgctggcaccaggcccggggatgtcaaggaggaagccccccaagagatgcaag

SEQ ID NO: 497855 - DNA, 201 bp, Homo sapiens
tcggctcactgcagcctctacttcctgggttccagcaattctcctacctcagcctcccaagtatctgggattacagacacccaccaccatgcctggctaattttttttttattattatttttagtagagatcgccacattggccaggctggtctagaactcctgacctcagatgatccgcccgccttggcctcccaaagtg

SEQ ID NO: 497856 - DNA, 201 bp, Homo sapiens
caacctcagcctcccaaagtgctgggagtacagggatgagccactgcgctcagcctctacaagcaatttgagaatttaaaaaaaaagccatcctgaggccyctgctcaccaccactcaccggtctgcctccctccagccccagttccttcagctgaggttttttttttttttttttttctttttttgacagagtctcactc

SEQ ID NO: 497857 - DNA, 201 bp, Homo sapiens
tcggttatcacttacactgctcccccgaggccacccaagaaacgagaatacccacctcctccccctgagcctgcagccacacccaccagcccagccacagyagtcagcccagccaccgctgcagggccagccatggccaccaccacggaggaggccaagggccggaatccacgggctggaaggactctgacttacacagcc

SEQ ID NO: 497858 - DNA, 201 bp, Homo sapiens
agtagagtcagggtttcatcatgttggtcaggatggtcttgaactcctgacctcgtgatctgcccgccttggcctcccaaagtgctgggattacaggcgtragccaccacacctggcatttttttttttttttttttttgagacagagtctcgccctgttgcccaggctggagtgcagtggcgtgatctcggctcactgca

SEQ ID NO: 497859 - DNA, 201 bp, Homo sapiens
ccaagaaacgagaatacccacctcctccccctgagcctgcagccacacccaccagcccagccacagcagtcagcccagccaccgctgcagggccagccatsgccaccaccacggaggaggccaagggccggaatccacgggctggaaggactctgacttacacagccaagccagtgggcgggattggtggaggtgggggtc

SEQ ID NO: 497860 - DNA, 201 bp, Homo sapiens
ttgtcacttactataacctgaagacccaccagcgagccttccacggcattagcccgggcctccttgccagtgagaagacacccaatggaggctacaagccyaagctcaatacactcaagctctaccgcctgctccccatgcgggcagccaagcggccctacaagacctacagccagggagccccggaggctcccctttctc

SEQ ID NO: 497861 - DNA, 201 bp, Homo sapiens
ccatttgggcttgagaagaaggctccgtgagttaggctgcgtcccagatggaatagctgaggcctagagtctcacagccagtggaggcactgagctcagaygggcaccctgcactgaggctggcctggtgagggaggcagcacaaggctacgggagtcacaggtttgagtgcagggtgtaggaggacctgggaggcttcag

SEQ ID NO: 497862 - DNA, 201 bp, Homo sapiens
agactcagtctcaaaaaaaaaaaaaaaaaaatggtggcgcgcgcctatagtcccagtgactcgtgaggttgaggcaggagaatcgcttgaacccgggaggyggaggttgcagtgagccaagattgtgccactgcactccagcctgggcgacagagctagactctgtcccccgccgcaaaaaaaaaagagaagcagttgggc

SEQ ID NO: 497863 - DNA, 201 bp, Homo sapiens
gcaaggaggaggcctgaggcagggctggagcaagggcagaggggtgggcagccccagggccctcccctaggggcctccccgcttcatgtctaggtcacatyctctgtcctgggcatctgttataggcgaagtttcctgtggcttttgtctatttggaccactagaaaaggtcatgacagcaaggacctagttagcctcccc

SEQ ID NO: 497864 - DNA, 201 bp, Homo sapiens; identical to SEQ ID NO: 407709

SEQ ID NO: 497865 - DNA, 201 bp, Homo sapiens
cggtacacaggaatattggatgcatagagatcatccaggattggccaccaggaacccgtcaagtagtccacgccgtgcctgcggggtggccacaggtcagrtgggaactggggaccgagggcggggacgcggcagtctgacttgcgcaggacggcacgcaccgatcacagaaagcgctgatggtctcccagtagtgctcgt

SEQ ID NO: 497866 - DNA, 201 bp, Homo sapiens
gaggcaaaaccagagctgccagtgtacatccagccagctcggccccagagtttcccttaccaggtcagcagtggccccaggagccctggagattgggcacrgccccctgccccagctctctgggacgatggtccggctccagccgctctgataagagtgcccgctacccccagatggctgcctcagtcctttcacagccaa

SEQ ID NO: 497867 - DNA, 201 bp, Homo sapiens; identical to SEQ ID NO: 407716

SEQ ID NO: 497868 - DNA, 201 bp, Homo sapiens
ggggcgggggcctgggcctgggggagcagccgggaccagccggtggccaggggggtgcgcggtgtacgctggagctgggtatggatatgggtgaggcagcragtgccgctgctcctataggagataaacagggatgcaggatgaggaatagagagcgtgggacttgtaggtgagaggtgaaaggcaacaggcaggggctca

SEQ ID NO: 497869 - DNA, 201 bp, Homo sapiens
tttccgactgctgtgtgccgagggccccaggcggccatggtgagagacctccagcgcgggagtttggtaatggtcagcgccgggctgcaagtgtagaagcrggtggtaggagcattgctcgggctgcctcaagacaagctccacccatccccccctccaccctcagttgtcactcacaatgcctgggttcggctccacgcc

SEQ ID NO: 497870 - DNA, 201 bp, Homo sapiens
ttgtcctacctaggcaggagggggctgatgcacggaagcccacagaatgacaggaacccatggagaatgacacagattgagggatacagagatggaaagasgtgtgcctggagacagagggccccaacttctcacctgcctccaggcagccatgcgctacgaggagggggatgaggcgggcaggagctccaggccccagca

SEQ ID NO: 497871 - DNA, 201 bp, Homo sapiens; identical to SEQ ID NO: 407720

SEQ ID NO: 497872 - DNA, 201 bp, Homo sapiens
tccctcccttggttttatcctcacaggccatctcctgggtcaaccttcctttcagctctacccatgttaccatccccaatgtctcacgtcctctagaggakaaagtaggaggctgtgcagcaaatctcagaagtcataggttcttcataatgaagctcattcagttaacattattcaacacaaatccaccatgcaccccaa

SEQ ID NO: 497873 - DNA, 201 bp, Homo sapiens; identical to SEQ ID NO: 407724

SEQ ID NO: 497874 - DNA, 201 bp, Homo sapiens
cctcctgttcagccagagggtaggcaggcctgggtcagagacctttcgagagccctcccaccgcagccccgtcccaggacctgcctctggccacgttctcrtctcacctgcagagactcctggaaggatgaggcctggtactgtgcgtacttggcaatggtggtgtgggaacgggagctctcacaaggccagatctgccga

SEQ ID NO: 497875 - DNA, 201 bp, Homo sapiens; identical to SEQ ID NO: 407728

SEQ ID NO: 497876 - DNA, 201 bp, Homo sapiens
ggctctccgggcgcctgaagcttcctgaggtattttggtggcaggaggaaggaggggctggaggcagggcaagagtcaggggtacaagaggtgggtcctgkgggttctgtgctgggctgggaggccggggaagggggtctatacttctggccagatagggtggtgggggaaaggacacaggcccagcagggctgctgctgt

SEQ ID NO: 497877 - DNA, 201 bp, Homo sapiens
ggcgctctgggggtgctgaacccttgcgctctgggccccaggcatctccatgcagggtactccacagccctggcttggttagctgaaatggggggctggtrgccaggccaggcaggggtggtggtggtggtggtggtggtggtggtggtggtggtggtggtaatggtggtggaggcagtggcagccctgggggaaggccag

SEQ ID NO: 497878 - DNA, 201 bp, Homo sapiens
ggggagcagccgggaccagccggtggccaggggggtgcgcggtgtacgctggagctgggtatggatatgggtgaggcagcgagtgccgctgctcctatagragataaacagggatgcaggatgaggaatagagagcgtgggacttgtaggtgagaggtgaaaggcaacaggcaggggctcacctggcgctctgggggtgct

SEQ ID NO: 497879 - DNA, 201 bp, Homo sapiens; identical to SEQ ID NO: 407730

SEQ ID NO: 497880 - DNA, 201 bp, Homo sapiens
ttggcctttgccctgccctcacggggccgacgacccacactgtccttacaggcccgcctgtgccgccgatgctccttctgatgctccttctgtcgccgctkacagctgcctgacactgccgccaccccgccagcctcctccttggcctgtgcggggggcagcagtcgctcagtcccactgtccgctggctctgctgtgtcc

SEQ ID NO: 497881 - DNA, 201 bp, Homo sapiens; identical to SEQ ID NO: 407733

SEQ ID NO: 497882 - DNA, 201 bp, Homo sapiens
gaaggtctgtgttttttaaagttggccggggctgggaaggacggggttccttttcctcatagttctttctttaaaacctttaatttttttattttatttatttttttttacaaaataccatttcagttcccacttcttcccctacagtacaggagttgctcaccctcaggtggggctggggtcgggtcgggagtgggggga

SEQ ID NO: 497883 - DNA, 201 bp, Homo sapiens
cagcctctcccgacccgacccacaacctcgggagccagcggctctgaaagggttaattccgctcccgccgaggccacaccctctccatccgggcactcccrgcgaagcccagctccgccccctccatccgggccctggactcgggactttaaccgaccccctaccccccgcccccgctggagccccaagagagaacactcc

SEQ ID NO: 497884 - DNA, 201 bp, Homo sapiens
taaaaaggccaaagtcggtgaggggaggcgctggtgggcgaggggctgccagccccctcccccgtctcccattttttttccttttttcctcatatttgctaaaaaaaaaaaaaaagtttttcttaataaattaagtgaggggagctgccaatggggtggaagggctgggcccgacccccttctcggccacaggcgggacct

SEQ ID NO: 497885 - DNA, 201 bp, Homo sapiens
gtaggatcttgaattcggctggctcctcaaactggtcctccagcggagtggggggaaaatcaaagagtcgagggcctcgggcaggcagctccccaaccccrggcggcacaggctggggggctttactcagggggcctgggggtggccccggccccacctcgggggtctttgggaaggagaccctgggccgggggctctccg

SEQ ID NO: 497886 - DNA, 201 bp, Homo sapiens; identical to SEQ ID NO: 271976

SEQ ID NO: 497887 - DNA, 201 bp, Homo sapiens; identical to SEQ ID NO: 271977

SEQ ID NO: 497888 - DNA, 201 bp, Homo sapiens; identical to SEQ ID NO: 53968

SEQ ID NO: 497889 - DNA, 201 bp, Homo sapiens; identical to SEQ ID NO: 271971

SEQ ID NO: 497890 - DNA, 201 bp, Homo sapiens; identical to SEQ ID NO: 348532

SEQ ID NO: 497891 - DNA, 201 bp, Homo sapiens
aggaagggagtttggaatcaggacagagagtagagggtcccactggaatccacagccaccttccaattgtcccactttaagagcactaacacttgtaacasaatctgaagtatagttgccagtctccctgttcaaactccagtcttcttcatctgaatgctgggcactgattcctacactagtgcttggacttgactgccc

SEQ ID NO: 497892 - DNA, 201 bp, Homo sapiens
gtaaagagtgctgtaagatgagacatgacagggcaaggcacagcaggaatctatagcaatgcactatgcctgatgcatagagtggtggggagaagagcccrctctgctctagaagggcagaattgtgcaggaatttctgtgccaagttaaaagctagaattatatcctgagggcaactgagagtcactagaaggttttaag

SEQ ID NO: 497893 - DNA, 201 bp, Homo sapiens
ccactgggccccatccctgcaggcatcatggtaacttctagggcaagaggtgtattgggagcagggtaggtggggataggatgcaatctggggataatgayggagagcaggtatgagagccttgggcatgcggtcactgaggaagagatgagaatgtggtcagctcctggggataccaccatttcctaaactcttcttggc

SEQ ID NO: 497894 - DNA, 201 bp, Homo sapiens
cagcctgggtgacagaatgtctcaaaaaaaaaaatgcaggatgtgttcagtcctcttattcccctactcagaacctcctgtctactccctactcctcaagsccactgtatttctttttcttcttcaaattgaacttcttcatcttcctgtttaaacaggaagttttataaagaaattcatgtcattcaaccccgaacaatt

SEQ ID NO: 497895 - DNA, 201 bp, Homo sapiens
ctcccctgtcctgttctcactactattcactgtccttgacttgccccaggaggaggagactgggttactcttggacatggccccttctcttagttttaggrccttctcacttccccctggttactcatcctctcccatcctaggtaacacagcccgcccagtgttccctgctaggcagacagagctggtggaagtggctaa

SEQ ID NO: 497896 - DNA, 201 bp, Homo sapiens
gtcgctgcaaacacagccacgaagaacatgcagccactgggccccatccctgcaggcatcatggtaacttctagggcaagaggtgtattgggagcagggtwggtggggataggatgcaatctggggataatgatggagagcaggtatgagagccttgggcatgcggtcactgaggaagagatgagaatgtggtcagctcct

SEQ ID NO: 497897 - DNA, 201 bp, Homo sapiens
agtcccagctactcgggaggctgaggcaggagaatggcgtgaacccgggaggtggagcttgcagtgagccgagattgcgccactgcactccagcctgggcracagagcgagactccgtctcaaaaaaaaaaaaaaaccaaaaaacaaaaaacaaaaaaaaacagaagggtcatggcccaccccagatatagggcccagaga

SEQ ID NO: 497898 - DNA, 201 bp, Homo sapiens; identical to SEQ ID NO: 348534

SEQ ID NO: 497899 - DNA, 201 bp, Homo sapiens; identical to SEQ ID NO: 348535

SEQ ID NO: 497900 - DNA, 201 bp, Homo sapiens
tcaaagacaaaatacttggcactctaatgagagataccaataagtacaaggacaattataattcactctaataattgctataatcaaggttatcctagackgctgcatgagcagaaaaaaaaggggcatcttatctggagtgcttgaggaatagtaagccttggaaggaatgacttctcagctgatatctgtaagatgagt

SEQ ID NO: 497901 - DNA, 201 bp, Homo sapiens
acaaggagctatggatggcaataggaggggcccagacagacaggggaagtcagggacacctttttggtggaggtgacatttcagttgagcctttaattggractaagaatcctacacctggcagtcccactgcatggggcctcatacaggattcttggctagaagttggggtactctcagttctcatggagaatgagaaaa

SEQ ID NO: 497902 - DNA, 201 bp, Homo sapiens
ctgaagacacttctggggtaatgagaaaaccctgaggaaaaagaaaatctaaggggtagaggtgaggacttccaggtggagataaagatacctgggggtgrggagaggtaagttccccccaccccctcacctccatcaagggataggtaagaacacttcgggggagcttagaatttttttacttctcacttttaatcctgc

SEQ ID NO: 497903 - DNA, 201 bp, Homo sapiens
tccgagaagccatcctcagcaactctgacttccaggccctgcagatacaggggccctctggccttcccagctcccaccctagtcccccggggctccctggytcacacggtctccagcctggcctcccttctgacccccatacctgaccctttcacctctgctctttcttcctccagggacagacactgtcagcaactggca

SEQ ID NO: 497904 - DNA, 201 bp, Homo sapiens; identical to SEQ ID NO: 348536

SEQ ID NO: 497905 - DNA, 201 bp, Homo sapiens; identical to SEQ ID NO: 348539

SEQ ID NO: 497906 - DNA, 201 bp, Homo sapiens
gataaagatagcccaaacctaccaaaaccaagatggtgacaaaggtgacctctggttgtcctcagtgctcattatacactaattataatgcattagcatgytaaaagactctcccactagggccatgacagtttataaataccatggcaacatcaggaagttaccctatacagtctaaaaaaagaaggaaccctcagttcc

SEQ ID NO: 497907 - DNA, 201 bp, Homo sapiens
aaaaaatcagttttaggccaggtgcggtggctcacgcctgtaatcccagcactctgggaggccgaggcgggtggatcacgaggtcaggagttcaagaccakcctagccaagatggtgaaaccccgtctctactaaaaatacaaaaattagccgggcgtggtggcgggctaattaggtggtgcctgtaatcccagctactcg

SEQ ID NO: 497908 - DNA, 201 bp, Homo sapiens
gtccagtaaacgtgaaaatcatattttgggcttcttttgtgaaattcttggctaggtcaaatattgtactccaatacatacatctcatcaaggtagaagtrcttcgaaagaaggggaaatgatgtttccatttactattcctaaagcattagatgtgttaaaaaactgggattctggccaggcgcggtggctcacgcctgt

SEQ ID NO: 497909 - DNA, 201 bp, Homo sapiens
aaaataatgtttgaccatatattgggcaccctatggcccagtcaagtagacatataaaattaatcctcatagtatgccatatagccattgtttctctttasctctgaggacaaaaacaaaaagtctgtagtatactatgttacgttcaaaactgagttgaagagtttacctgattagctgttaagggtcgagctatagcta

SEQ ID NO: 497910 - DNA, 201 bp, Homo sapiens
cagtggtgtgatcgctgctcactgcacctccgccgccctgggttcaagtgattctcgtgtctcagcctcctgagtagctcagattataggcatgctctaatttttttttttttttttgagacagaatctcgctctgtcgccagattgcaatgcagtggcatgatctcagctcactgcaacctgattccctggttcaagcaa

SEQ ID NO: 497911 - DNA, 201 bp, Homo sapiens
gaattacaggcatgtgccaccatgcccagttaattcttgtatttttagtagagacagggtttcaccatgttggccaggatggtctcgatctcctgacctcmtgatccacctgtctcagcctcccaaagtgctgggattacaggcatgagccactgcgcccggccaggcatgctctactttgcccaggtatttttagtagag

SEQ ID NO: 497912 - DNA, 201 bp, Homo sapiens
tgctaaattcactataattgaagacagtgcccactgtctacaattatgtatgataaaaattaagtggggagaaacaagttatgttcataggaatgagagtwatagataataactaaacaaagagaagaagaaataggccgggcgcagtggctcacacctgtaatcccagcactttgggaggccgaggtgggcagatcacaa

SEQ ID NO: 497913 - DNA, 201 bp, Homo sapiens
atttttcttccatattaagtttttaatatcttttaaattattatttagttgttaagctggattttgtgattacataatgcatatttgatttattacgtgcyttttttttttttttttttgagagtctcgctttgtcgcccaggctggagtgcagtgacaggatctcggctcactgcaacctccgcctcccacgtgcaagct

SEQ ID NO: 497914 - DNA, 201 bp, Homo sapiens
gcaggagaatcgcttgaacctgggaggcagaggttgcagtgagccaagatcactctactgcactccagcctcggcaacagagtgagattccgactccaacmaaccaaccaaccaaccaaccaaccaaccaaccaacaaacaaacaaaaagtgacttggtataaatacagcaaaagaaaaaaaagtgttttgagaaatgcaa

SEQ ID NO: 497915 - DNA, 201 bp, Homo sapiens
gaactatgattgtgccactgcactgcagcctgggtaacagagtgagaccctgtctctaagaaaaagaaaaagaaggccaggcgcggtggctcacgcctgtwatcccagcactttgggaggccaaggcgggtggatcacaaggtcaggagttcaagaccagtctggctaacatggtgaaaccctgtctctactaaaaataca

SEQ ID NO: 497916 - DNA, 201 bp, Homo sapiens
gagacggggtttcaccttgttagccaggatggtctcgatctccttattctcgtgatccgcccgcctcggcctcccaaagtgctgggattacaggcgtgagscaccgcgcctggctcaaactaactatagttttaactaaaaactatatataaactaactgtagttttagttagttagttagttagttgctctgtcacccag

SEQ ID NO: 497917 - DNA, 201 bp, Homo sapiens
ggttcaagcaattctcctgcttcagccttccacgtagctgggactacaggtgtgcaccaccatgtccagctattattattattattattattattattattgttattttgagacagagtctcgttctatcacccgggctgaagtgtagtggcatgatctcaattcactgccacctctgcctcctgggttcaagcaattctc

SEQ ID NO: 497918 - DNA, 201 bp, Homo sapiens
cttccaaaaacagagcctacaacttgtgaccaccacaagatatcctgatggccgctgaagtttgcttcagatgggcgccttccctttccctgcctagtttycttttattccttgagccctctcagaattccattctctggtcagtagtcagccttcagttaaagcatcgcccctgttctgtaaagttctgtgcatagttcc

SEQ ID NO: 497919 - DNA, 201 bp, Homo sapiens
gttcaagcaattctcctgcttcagccttccacgtagctgggactacaggtgtgcaccaccatgtccagctattattattattattattattattattattgttattttgagacagagtctcgttctatcacccgggctgaagtgtagtggcatgatctcaattcactgccacctctgcctcctgggttcaagcaattctcc

SEQ ID NO: 497920 - DNA, 201 bp, Homo sapiens
ggccctaaaatatatttcttatgaaaggagctgtgcagttatccaagtgtttctagagagagatcagaaatggtagagaaatgggcctggtgcagtggctsactcctgtaatcccagcacttcaggaggctgaggccagtggatcgcttgagcccaggagttagaaaccagcctgggcaacacagcaagaccctgtcccaa

SEQ ID NO: 497921 - DNA, 201 bp, Homo sapiens
ttcaagcaattctcctgcttcagccttccacgtagctgggactacaggtgtgcaccaccatgtccagctattattattattattattattattattattgttattttgagacagagtctcgttctatcacccgggctgaagtgtagtggcatgatctcaattcactgccacctctgcctcctgggttcaagcaattctccc

SEQ ID NO: 497922 - DNA, 201 bp, Homo sapiens
agcctaagttttgtacttttagtagagatcaggttttgttatgtcagcccggctggtctcaaactcctggcctaaagttatccacctgccttggcctcccmaaatgctgggattataggcatgagccaccacgcccagccaaaactataaatctttttttttttttgagacagagtctgtcggccaggctggagtgccgtg

SEQ ID NO: 497923 - DNA, 201 bp, Homo sapiens
gcatagacataaatcttaatctaatccaaatctgaattatcaaaaattataaacttcttagcattagtagtaagttaatactatagtaagtacagggaaaraagaatgctacccataattaaattgctacacatttcagggactggcatcacattttgctgaaagaaaagacaaatgtaagacatctctcaaaggtatcat

SEQ ID NO: 497924 - DNA, 201 bp, Homo sapiens; identical to SEQ ID NO: 406318

SEQ ID NO: 497925 - DNA, 201 bp, Homo sapiens
tttgggagactgaggcgggtggatcatttgaggtcaggagttcgagcccgtctacatttgctttgacaaacagattcaaaaaattacaatgagcaaataayttatcgacatgtacagagctgcttttaaaaaatattttggaattcttgaaactagcttatatattttctttaaacaaggtacctacaatcttttttgaca

SEQ ID NO: 497926 - DNA, 201 bp, Homo sapiens
agtatacaagtgatatctctgaattatttcttataatggcaagtgaatctacaattatctcagtaaaattttcaattaaaaatgataacaggccatgagcrgtggctcatgcctgtaataccagcatttgggagactgaggcgggtggatcatttgaggtcaggagttcgagcccgtctacatttgctttgacaaacagat

SEQ ID NO: 497927 - DNA, 201 bp, Homo sapiens
tgcaggcagctattaaagtataaatatctctaggctggacgtggtggctcatgcctgtaatctcagcgctttaggaggctgaggtggacagatctcttgakcccaggagtttgagaccagcctgggcaacatggcgaaatctcatctttatacacgaaaaagcacaaaaattagccaggcatggtggcatgcacctgtagt

SEQ ID NO: 497928 - DNA, 201 bp, Homo sapiens
actagttatatcgaacttaatacacaaacacacaattgaatacaagtaaaactggggaaatctgaataaactcagtggattgtattaatgtcaatattcaygctgttacattagactataattttgcaaaattttacctttgggggacactgggctaagtatacaagtgatatctctgaattatttcttataatggcaagt

SEQ ID NO: 497929 - DNA, 201 bp, Homo sapiens
ctgcatgttccaagtttaattatagcttctcataagtttcttataaatagagacactaacaaggatggcgtgttcctcctcctgctttctggcgataactwactcagtaacattgtatgaacttgctttttctctgtgctgtgtgacttcccttgaattatttcctgtgcaagatccagtaacctgctcttggggtctgga

SEQ ID NO: 497930 - DNA, 201 bp, Homo sapiens
gccactacgcccggctaatttttttaatgattatttgtagagatggagtcttactatgttgtcaggctggtcttgaactcctaagctcaagagatcctccygcctcagactcccatagtgttgggattacaggcatgagccactgtgctctgctgctactaacattttttttttttttcagacagggtctagctctgtcac

SEQ ID NO: 497931 - DNA, 201 bp, Homo sapiens
agctgaccaccaattataattacagaatattggtggccatacagaacatctcccaccaatcctgcagaatgtccagatgtcctaagagtgtagcccacttyattaaagatgccattaatgagcaggcttaggttgaaagattaatggtcatctataacaccaatagcccctacctttagtgagcacatctgcatgttccaa

SEQ ID NO: 497932 - DNA, 201 bp, Homo sapiens
tgtgctgtattgactttacttaatgagtttcactcacactgtctctaagaaacaagctactagggaggctgaggcaggagaatcgcttgaacccaggaggyggaggttgcagtgagccgagatcgcgccactgcactctagcctgggcaacagagcaaaactctgcctcaaaaaataaaaaagaaaaagaaaaaaaagaaa

SEQ ID NO: 497933 - DNA, 201 bp, Homo sapiens
aactaatatagatgatgatagtgctattctcccaaactaaccttataaagatacaataaaaatgtattaggaatctaaagtaaaaataaaatatagcaccrttacatgattattctgtgattttaggtttgtacatgactactttattttttacacactcaaaagatgtagtatgctatgctgcatttagtaagaagtgaa

SEQ ID NO: 497934 - DNA, 201 bp, Homo sapiens
aaaactataactcttaaaagaaaatatagatgtaaatctttcatgatcctggatttgacaataatttctcagctatgacaccaaagacacacatacacatmcacacacacacacacacacaactccatcaaaattaaaatttttgcttgaaatgacacttttaggaaagtggaaagatgacccacaaattgggagaaaata

SEQ ID NO: 497935 - DNA, 201 bp, Homo sapiens; identical to SEQ ID NO: 406345

SEQ ID NO: 497936 - DNA, 201 bp, Homo sapiens
aaagacaggtagcaaacaaaaatataaagaaataaagtcattttagatggtagtaagtgctatgaataaaacaggttaatgagatagtaatggggatgtaratggagaggtaacttttgatagtgtaatcaaagaaggcctttttttggatatagcaacataatattatacattttattaacctgtctttatcatttaaaa

SEQ ID NO: 497937 - DNA, 201 bp, Homo sapiens
ttacaaagaaaagaggtttaattggctcacagttccacaggctgcatgggaagcatggctagggaagcctcaggaaacttacaatcatggcagaaggtgarggggaagcaggcacatcttacatggccagagcagaaggaatagagtgaggtgagaggtgctacacacttttaaacaaccagatctcatggtaactcactc

SEQ ID NO: 497938 - DNA, 201 bp, Homo sapiens
agaaggtgaaggggaagcaggcacatcttacatggccagagcagaaggaatagagtgaggtgagaggtgctacacacttttaaacaaccagatctcatggyaactcactcactatcatgagaacagcaccaaaggggaaatacacccccatgatccaatcagctcccaccaggccctaacactggggattatactttgaca

SEQ ID NO: 497939 - DNA, 201 bp, Homo sapiens
atggccagagcagaaggaatagagtgaggtgagaggtgctacacacttttaaacaaccagatctcatggtaactcactcactatcatgagaacagcaccaraggggaaatacacccccatgatccaatcagctcccaccaggccctaacactggggattatactttgacatcagatttgggcagggacacagactcaagcc

SEQ ID NO: 497940 - DNA, 201 bp, Homo sapiens
ctcacatttcaaaatacaatctgccttcccaacagttcccccaaagttctaactcattccagcattaactcaaaagcccaaagaacaaagtctcatctgaracaaggcaagtcccttctgcctgtgagcccgtaaaatccaaaacaagttagtaacttcgggctgggcacggtggctcatgcctgtaatcccagcactttg

SEQ ID NO: 497941 - DNA, 201 bp, Homo sapiens
taaatcttttttttttttttttttttttttttgagacagagtttcactcttgctgctcaggctggagtgcaatggcatgatctcagctcaccacaacctcmgcctcctggatttaagctattctcctgcctcagcctcctgagtagctgggattacaggcacctgcctgtagttagtagagatggggtttcgccatgttgg

SEQ ID NO: 497942 - DNA, 201 bp, Homo sapiens
tacatttattattattatttttgaggcatggtctcactcttgtcacccagtttggagtacaatggcgatcacagctcactgcagccttgacctcccaggcycaggtgatcctcccatctcagcctccccagtagctgggactacaggtaggtgccactacgcccggctaatttttttaatgattatttgtagagatggagt

SEQ ID NO: 497943 - DNA, 201 bp, Homo sapiens
tcctgggttcaagcaattctcctgcctcagcttcccaagcacctgggattacaggtgtgcacaaccactcccagctaatttttgtatttttagtagagacmgtatatccaaagtgctgggattacaggcatgagccaccgcccccagccaagtatgtaacatttttgaaatcacattttagaaatggaaaagggattagtg

SEQ ID NO: 497944 - DNA, 201 bp, Homo sapiens
tgcctcagcttcccaagcacctgggattacaggtgtgcacaaccactcccagctaatttttgtatttttagtagagaccgtatatccaaagtgctgggatwacaggcatgagccaccgcccccagccaagtatgtaacatttttgaaatcacattttagaaatggaaaagggattagtggttgtcaatagttggggatgag

SEQ ID NO: 497945 - DNA, 201 bp, Homo sapiens
ctgaggcaggagaatcacttgaggctaagagatcaaggctgcagagatccgtgattgtgccactggatttctttttttaggatcagagaatggaaaaaaargggggggggcatttagaaactgtgcaatggaggggttgcatgtaagtgcggtgtgtttctgctgggtggtgtctcccaaaaaatcaaacaggcccaaaat

SEQ ID NO: 497946 - DNA, 201 bp, Homo sapiens
gtgctgggattacaggcatgagccaccgcccccagccaagtatgtaacatttttgaaatcacattttagaaatggaaaagggattagtggttgtcaatagytggggatgagaaggaagtggatgtggatacaaaagggctacctgaaggatacttgtgatgttagaactgttcagtatattgactagttatatcgaactta

SEQ ID NO: 497947 - DNA, 201 bp, Homo sapiens
catgtgccaccatgcccagttaattcttgtatttttagtagagacagggtttcaccatgttggccaggatggtctcgatctcctgacctcctgatccaccygtctcagcctcccaaagtgctgggattacaggcatgagccactgcgcccggccaggcatgctctactttgcccaggtatttttagtagagacggggtttc

SEQ ID NO: 497948 - DNA, 201 bp, Homo sapiens
aacaaacaaaaagtgacttggtataaatacagcaaaagaaaaaaaagtgttttgagaaatgcaagactcagaagagccccaacctatgagatgacctgatrcatactaaccaatacaaaatagaaataggctacagtagtgtgcacatctgaatagaatagcttttcatattgtgtgagtttctcaaatattattcttatt

SEQ ID NO: 497949 - DNA, 201 bp, Homo sapiens
atgacccacaaattgggagaaaatatttacaaattatacacttaataaaagtccagtatccagaaaatataaagaacacttacaactcagcaataaaaagmcaacccaattttaaaagggacaacaaatatgaataggtatttctacaaagaagatatacacatggccaataagcacatgaagagatgttcaatgtattag

SEQ ID NO: 497950 - DNA, 201 bp, Homo sapiens
cgtcccagctacttgggaggctgaggcaggagaatcgcttgaacctgggaggcagaggttgcagtgagccaagatcactctactgcactccagcctcggcracagagtgagattccgactccaaccaaccaaccaaccaaccaaccaaccaaccaaccaacaaacaaacaaaaagtgacttggtataaatacagcaaaaga

SEQ ID NO: 497951 - DNA, 201 bp, Homo sapiens
taaatggaaaaatattccatgttcatggaaaagctgatcttaaaatacatatggaaaagcaagggacccaaaatagccagaatgatcttgaaaaaaatgarattaagttggaatttttcacacttacccatttcaaaacttactacaaagctacattaatcaagacagtgtggtgctggtataaggacagacatacagacc

SEQ ID NO: 497952 - DNA, 201 bp, Homo sapiens
ttctactttaatacttttgtgatactccctaaataaaacacttatgatagcttaactccatttaccatttcttgcccttgtactactgatatgttttactytttcatatattataaattgtataggatttttaaaaattaattgtcagtattaatttctatttaccctttctttactccttattctaccctacatttctct

SEQ ID NO: 497953 - DNA, 201 bp, Homo sapiens
tttcatttttcttccatattaagtttttaatatcttttaaattattatttagttgttaagctggattttgtgattacataatgcatatttgatttattacrtgctttttttttttttttttttgagagtctcgctttgtcgcccaggctggagtgcagtgacaggatctcggctcactgcaacctccgcctcccacgtgca

SEQ ID NO: 497954 - DNA, 201 bp, Homo sapiens
ctgaggcaggagaatcgcttgaacctgggaggcagaggttgcagtgagccaagatcactctactgcactccagcctcggcaacagagtgagattccgactmcaaccaaccaaccaaccaaccaaccaaccaaccaaccaacaaacaaacaaaaagtgacttggtataaatacagcaaaagaaaaaaaagtgttttgagaaa

SEQ ID NO: 497955 - DNA, 201 bp, Homo sapiens
gcacctgggattacaggtgtgcacaaccactcccagctaatttttgtatttttagtagagaccgtatatccaaagtgctgggattacaggcatgagccacygcccccagccaagtatgtaacatttttgaaatcacattttagaaatggaaaagggattagtggttgtcaatagttggggatgagaaggaagtggatgtgg

SEQ ID NO: 497956 - DNA, 201 bp, Homo sapiens
tggtctcaaactcctggcctaaagttatccacctgccttggcctcccaaaatgctgggattataggcatgagccaccacgcccagccaaaactataaatctttttttttttttgagacagagtctgtcggccaggctggagtgccgtggcatgattttggcccactgcaacctctgtctcccgggctcaagctattcttct

SEQ ID NO: 497957 - DNA, 201 bp, Homo sapiens
ttttacttggttgaatccacagatatggaggactaactgtacctattatcatttgaattttaaagtgaggagtcatgaatatactaaaatgatctggacayaaatgagatatatccacttaaacatgctgattcaatcatttgatagacttgaccagtaaattaaaacaaactggcaattaattttaggttatcatgtaaa

SEQ ID NO: 497958 - DNA, 201 bp, Homo sapiens
atactcaaaacagcaaactagaacagcaagaggtattgaaatgatagtatggagaaactgctttgagaatacaagaaaattagcttagaggagcagctaamcaaagagtcccacttgataagggtaaactcattacagaaaaatgtgagctaataagtgtataagaaatgatagaaattttaaaaatcagcatttttgaaa

SEQ ID NO: 497959 - DNA, 201 bp, Homo sapiens
tgtatacattggtttaaaaaataaatagaaagcttcgatatataaaaataagacattttagtcagtactgagaaataaggctgtataatgaattttaaaaragcagagtatttttaaaaatggggaactctaaacaggctactgtgtagcaggtttcactaacacactgaatctaagccatatacaggcgtccctagcgtc

SEQ ID NO: 497960 - DNA, 201 bp, Homo sapiens
tactcaaaacagcaaactagaacagcaagaggtattgaaatgatagtatggagaaactgctttgagaatacaagaaaattagcttagaggagcagctaacmaaagagtcccacttgataagggtaaactcattacagaaaaatgtgagctaataagtgtataagaaatgatagaaattttaaaaatcagcatttttgaaat

SEQ ID NO: 497961 - DNA, 201 bp, Homo sapiens
aagggtcgagctatagctaacttcatgtgcttgcttaacactgagaagatatttggatgatgaatttcttttaatcagtctttcacttgaactttgtgagwtctttttattcatacactctctgcacaaccagaaaaaagcaaaccccattttccttgtttcaggcccttaagtttaactaatatctcaatctgagtaaag

SEQ ID NO: 497962 - DNA, 201 bp, Homo sapiens
cctgtctaggattcttaccaccttcttgccaccttcaacctcgggagctgagtaagcaagttcagtttctgggcttcttgtcgtgtaaaaccaagacataraaggaaagctggaattgttaaagtaatgataagtttgcatcactaaaagccttggaaaaacaagcagcataaaagaagaaaagatcagagctgtatggac

SEQ ID NO: 497963 - DNA, 201 bp, Homo sapiens
agatgccaaaatttatgaatactcaagtctttgatacaaaatggtattgtgcttgtatctaacctattcacatcctcctgtacactttaaatcatctcaattttttttttttttttttttgagaggaagactcgctctggtcccccgggctggagtgcaatggcgcgatctcggctcactgcaacctctgtctctcgggag

SEQ ID NO: 497964 - DNA, 201 bp, Homo sapiens
cagcactttgggaggccgagacgggcggatcacgaggtcaggagatcgagaccatcctggctaacacggtgaaaccccgtctctactaaaaatacaaaaarttagccaggcgtggtggtgggcgcctgtagtcccagctacttgggaggctgaggcaggagaatggcgtgaacctgggaggcggagcttgcagtgagccga

SEQ ID NO: 497965 - DNA, 201 bp, Homo sapiens
aggcagtagatttagagaagaaacatcaggtttggggcctataccagccacagctatgcagctttgggtattatccttcaaagtctatccctctgtaaaaygggatttctgccatcttcctcaacaaataagaaagctggaatagtcaatacctatttgatagtataagacaaaagattcactatctgcaatttaccagaa

SEQ ID NO: 497966 - DNA, 201 bp, Homo sapiens
ttgccatgttggccaggctggtctcaaactcctgacctcaggtgatccacccacctcggcctcccaaagtgctgggattacaggcatgagccaccacgccyggcctgacaaagttcttaagaatttcatcctttacttttatttctatttctttaccattttatgaaacttgtgctgtattgactttacttaatgagtttc

SEQ ID NO: 497967 - DNA, 201 bp, Homo sapiens
gtaatcatcctgtttccattagaaatatgacaggaaaaaaacaataataatgttctacttctttctccaaactcccacaggagaattctaccaaatcttctttgttttgttttgttttgttttgttttgttttgagacagagtctcactgtgtcgcccaggttggagtgtggtgccatcattgctcactgtagcctccacc

SEQ ID NO: 497968 - DNA, 201 bp, Homo sapiens
agattgagaccatcctggccaatatggtgaaaccctgtctctattaaaagtataaaaattagctgggcgtggtggcaggcgcctgtagtcccagctactcrggaggctgaggcaggagaatcgcttgaacccgggaggcggaggttgcagtgagctgagatcacgccattgcactccagcctgggagacagagcaagacac

SEQ ID NO: 497969 - DNA, 201 bp, Homo sapiens
caatatcagcctgggcaagatagtgagacacatctttacaaaaaaacaaagaaaaaaaaatagctgggcatggtggcaagcacctgtggtcccagctactyaggaagctgaggcaggagaatcacttgaggctaagagatcaaggctgcagagatccgtgattgtgccactggatttctttttttaggatcagagaatgga

SEQ ID NO: 497970 - DNA, 201 bp, Homo sapiens
taatcatcctgtttccattagaaatatgacaggaaaaaaacaataataatgttctacttctttctccaaactcccacaggagaattctaccaaatcttctttgttttgttttgttttgttttgttttgttttgagacagagtctcactgtgtcgcccaggttggagtgtggtgccatcattgctcactgtagcctccacct

SEQ ID NO: 497971 - DNA, 201 bp, Homo sapiens
cctgcgattctaattctaggaaattctttttttttttttttttttttctgagacagagttttgatctgtcacccaggctggagtgcagtgctgcaatatcrgctcactgcaacctctgcctcccgggttcaaaggattctcctgcctcagcctcttgagtagctgggactacaggcacgtgccaccatgcctggctaattt

SEQ ID NO: 497972 - DNA, 201 bp, Homo sapiens
gaggcaggagaatcacttgaggctaagagatcaaggctgcagagatccgtgattgtgccactggatttctttttttaggatcagagaatggaaaaaaaggsgggggggcatttagaaactgtgcaatggaggggttgcatgtaagtgcggtgtgtttctgctgggtggtgtctcccaaaaaatcaaacaggcccaaaatga

SEQ ID NO: 497973 - DNA, 201 bp, Homo sapiens
gcacgtgccaccatgcctggctaattttttctatttttagtagagactgggtttcaccatgttggccagactggtcttgaactcctggcctcaagtgatcygccgcctccgtctcccaaagtgctaggattacaggcgtgagccactgcgcctggccttaggaaaatatttttacagcagaaaaagtatgtcccaaatttg

SEQ ID NO: 497974 - DNA, 201 bp, Homo sapiens
aagacctaaagaagaaaatcaaagaacttaaattttagtagacgaaaatgaagaatgaactgtttctcagtcctagaacaagaatgatactggagacaaarttctttatttttcaagatggagttttttgctcttggcacccaggctggagtggaatgatgtgatctcggctcactgcaacctccgcctcctgggttcaag

SEQ ID NO: 497975 - DNA, 201 bp, Homo sapiens
gctcacacctgtaatcccagcactttgggaggccgaggtgggcagatcacaaggtcaggagttcgagaccagcctggccaacatagtgaaaccccatctgyactaaaaatacaaaaattagcagggcatggtggctcacgcctatagttccaactactcgggaggctgaggcaggagaattgcttgaacccgggaggctga

SEQ ID NO: 497976 - DNA, 201 bp, Homo sapiens
gtttaaattctggctgggtgctgtggctcacgcctgtaatcccaacactttgggaggccaaggctgacggatctcctgaggtcaggagtttgagaccagcytgaccaacatggtgaaaccctgctgtactaaaaatgcaaaaattagctgggcatggtggcacatgcctgtaatcccagctacttgggaggctgaggcagg

SEQ ID NO: 497977 - DNA, 201 bp, Homo sapiens
ggtgctgtggctcacgcctgtaatcccaacactttgggaggccaaggctgacggatctcctgaggtcaggagtttgagaccagcctgaccaacatggtgamaccctgctgtactaaaaatgcaaaaattagctgggcatggtggcacatgcctgtaatcccagctacttgggaggctgaggcaggaggattgattgaaccc

SEQ ID NO: 497978 - DNA, 201 bp, Homo sapiens; identical to SEQ ID NO: 406375

SEQ ID NO: 497979 - DNA, 201 bp, Homo sapiens; identical to SEQ ID NO: 406376

SEQ ID NO: 497980 - DNA, 201 bp, Homo sapiens; identical to SEQ ID NO: 406377

SEQ ID NO: 497981 - DNA, 201 bp, Homo sapiens
gagactcgcctcccgaacccgcgaaactatctcccgcgagactgccccgccccaaccccgccccgcaactctactccctgattggctggaattacggccgsattccggagtcctttccagctccctcttcggccgggtttcccgccgaatacaaaggcgcactgtgaactggctctttctttccgccaatcatttccgcca

SEQ ID NO: 497982 - DNA, 201 bp, Homo sapiens
ccgcctcagcctcccaaggtgctggaattacaggcgtgagccactgcacccggcctacagtatgtttcttgaaaaatgcttagcattagttttcttttttwaaatcttgtcttgtactgaaatgattatactgaaaccgcctgtgcaaaattatgcctgagacagtgaaagagatctaacttaactgaccccatcttgttt

SEQ ID NO: 497983 - DNA, 201 bp, Homo sapiens
ctgggatctgggagacccaggggagccaataatgtagtttgagtctaagtttgaaggcctgaaaatcaagagagctgatagtgtagctccagtccaaaggycagcaggctcaagacccaggaagagccaatggtttgagtccaaaggcaggaaaaagagctgatgtcccattttgaaggccatcaggcaggaagaattcgc

SEQ ID NO: 497984 - DNA, 201 bp, Homo sapiens
ggagtgcagtggcaggatcttggctcactgcaagctctgcctcctgggttgacccattctcctgcctcagcctcccgagtagctgggactacaggtgcccrccaccacacccggctaatttttttgtgtttttagtagagacggggtttcaccatgttagccaggatggtctcgatctcctgacctcgtgatccgcccgcc

SEQ ID NO: 497985 - DNA, 201 bp, Homo sapiens
agagtctcgctctgtcacccaggctggagtgcagtggcaggatcttggctcactgcaagctctgcctcctgggttgacccattctcctgcctcagcctccygagtagctgggactacaggtgcccaccaccacacccggctaatttttttgtgtttttagtagagacggggtttcaccatgttagccaggatggtctcgat

SEQ ID NO: 497986 - DNA, 201 bp, Homo sapiens
atactgtgactctacctatggagtagccattctttattcctttactttcccaataaacttgctttcactttatggatttgcccctaattctttcttgcgtraggtccaagaaccctctcttggggtctagattgggacccattcccggtaacagttccacatagatgcagctttctttagggtaatattcacattacccaa

SEQ ID NO: 497987 - DNA, 201 bp, Homo sapiens
aaagactctcccactagggccatgacagtttataaataccatggcaacatcaggaagttaccctatacagtctaaaaaaagaaggaaccctcagttccgasaaatgcctgccccttttccagaaaactgatgaataatccaccccttgtttagcatataatcaagaaataactgagtatactcagttaagcagcccatact

SEQ ID NO: 497988 - DNA, 201 bp, Homo sapiens
cagtgcactccagcctgggcaaaaagagagaaactccacctcggaaaaaaggaaaaaaaaagaaagaaagaaatcgtagagaaatgaagagaaaaacaatyctgtgttaagtcctgcaatatttcccatgggggaggtcaattttgaagccattctttttaaggtgaaatttgggtgtgaatagctgcctgctgctactgg

SEQ ID NO: 497989 - DNA, 201 bp, Homo sapiens
ctccatctcaaaaaaaaaaaaaggaaagtagttgctgaactttttaaagggaaccctgcacattatttgagtcatataggaccttgttttacatgcagatyatataacaaacttatagtctaaggatttctttcttttttttgagatggagtttcgcccttattgcccaggcaggagtgcaatggcgcgatcttggctcac

SEQ ID NO: 497990 - DNA, 201 bp, Homo sapiens
cttccaatataataatgaacagcctcttctcttctttcactgtaatagtaaaactagaattataactataattcagagccacagagtttcctaaattgackgatattaaaatctacatcataaaagaatcaaactggaaagaataacttttatatctatatacttacagatttccaagatttctcatttgcaccaatttcc

SEQ ID NO: 497991 - DNA, 201 bp, Homo sapiens
acctagacataaatatattttttaaagctatacaagttggtctaatgtgaatttactgctaaattcactataattgaagacagtgcccactgtctacaatyatgtatgataaaaattaagtggggagaaacaagttatgttcataggaatgagagtaatagataataactaaacaaagagaagaagaaataggccgggcgc

SEQ ID NO: 497992 - DNA, 201 bp, Homo sapiens
cttctcttctttcactgtaatagtaaaactagaattataactataattcagagccacagagtttcctaaattgactgatattaaaatctacatcataaaaraatcaaactggaaagaataacttttatatctatatacttacagatttccaagatttctcatttgcaccaatttcccaaatcctctctctcacagcctcct

SEQ ID NO: 497993 - DNA, 201 bp, Homo sapiens
gccaatatggtgaaaccctgtctctattaaaagtataaaaattagctgggcgtggtggcaggcgcctgtagtcccagctactcaggaggctgaggcaggaraatcgcttgaacccgggaggcggaggttgcagtgagctgagatcacgccattgcactccagcctgggagacagagcaagacaccatctcaaaacaacaac

SEQ ID NO: 497994 - DNA, 201 bp, Homo sapiens
tttaaagctatacaagttggtctaatgtgaatttactgctaaattcactataattgaagacagtgcccactgtctacaattatgtatgataaaaattaagkggggagaaacaagttatgttcataggaatgagagtaatagataataactaaacaaagagaagaagaaataggccgggcgcagtggctcacacctgtaatc

SEQ ID NO: 497995 - DNA, 201 bp, Homo sapiens
aatcatcctgtttccattagaaatatgacaggaaaaaaacaataataatgttctacttctttctccaaactcccacaggagaattctaccaaatcttctttgttttgttttgttttgttttgttttgttttgagacagagtctcactgtgtcgcccaggttggagtgtggtgccatcattgctcactgtagcctccacctc

SEQ ID NO: 497996 - DNA, 201 bp, Homo sapiens
acaacaaaaacatgtagctctttctccaattaatgaagtgaaaacacaaatgattttcatcaagcattagtactttaagtaatcttaagaaagtgatcccmccaaaagtgaacagtccagtaaacgtgaaaatcatattttgggcttcttttgtgaaattcttggctaggtcaaatattgtactccaatacatacatctca

SEQ ID NO: 497997 - DNA, 201 bp, Homo sapiens
atcatcctgtttccattagaaatatgacaggaaaaaaacaataataatgttctacttctttctccaaactcccacaggagaattctaccaaatcttctttgttttgttttgttttgttttgttttgttttgagacagagtctcactgtgtcgcccaggttggagtgtggtgccatcattgctcactgtagcctccacctcc

SEQ ID NO: 497998 - DNA, 201 bp, Homo sapiens
gctggtctagaactcctgacctcaagtgatccacccaccttggcctcccaaagtgctgggattacaggcatgagacaccatgccaggcctcctcacttgtmttctaaggtgggatgctcttggggttttccttagaacacactggactctcctttccttttaagagacagggtcttgctctgttgcctaggttggagtgca

SEQ ID NO: 497999 - DNA, 201 bp, Homo sapiens
tcatcctgtttccattagaaatatgacaggaaaaaaacaataataatgttctacttctttctccaaactcccacaggagaattctaccaaatcttctttgttttgttttgttttgttttgttttgttttgagacagagtctcactgtgtcgcccaggttggagtgtggtgccatcattgctcactgtagcctccacctcct

SEQ ID NO: 498000 - DNA, 201 bp, Homo sapiens
actgtagcctccacctcctgggctcaagcaatcctcccaacttggcctcctgagtagctgggaccacaggtgtgcactaccacacccagctaattttttcttttttttttttgtagagacagggtctcactatgttccccaggctagtctcgaactcctggcctcaagcgatcctcctgccttggcctcccaaattgttag

SEQ ID NO: 498001 - DNA, 201 bp, Homo sapiens
ccacacccagctaattttttcttttttttttttgtagagacagggtctcactatgttccccaggctagtctcgaactcctggcctcaagcgatcctcctgycttggcctcccaaattgttaggattataggcgtgagccaccaggcctagcctgtctaggattcttaccaccttcttgccaccttcaacctcgggagctga

SEQ ID NO: 498002 - DNA, 201 bp, Homo sapiens
aaaagccttggaaaaacaagcagcataaaagaagaaaagatcagagctgtatggactctaattctgagagagttattcagagatcttagagattagtgacwtttttttttttttttttttgagatggagtcttgctctgtctcccaggctggagtgcaatggcacaacctcagctcactgcaacctccgtctcccaggttc

SEQ ID NO: 498003 - DNA, 201 bp, Homo sapiens
caatggcacaacctcagctcactgcaacctccgtctcccaggttcaagcgattcccctgcttcagcttccctagtagatgagattacaggcacctgccacygtgcccagctaatttttttgtatttttagtagaggtggggttttgccatgttggccaggctggtctcaaactcctgacttcaggtgatccacctgcctct

SEQ ID NO: 498004 - DNA, 201 bp, Homo sapiens
caacccactccagcctgggtgacagagtgagactccatctcaaaaaaaaaaaaaggaaagtagttgctgaactttttaaagggaaccctgcacattatttragtcatataggaccttgttttacatgcagattatataacaaacttatagtctaaggatttctttcttttttttgagatggagtttcgcccttattgccca

SEQ ID NO: 498005 - DNA, 201 bp, Homo sapiens
tcaccatcttggccaggctggtcttgaactcctgacctcggttgatccacctgccgcggcctcccaaagtgctgagattacaggcataagccaccacaccyggccctaaaatatatttcttatgaaaggagctgtgcagttatccaagtgtttctagagagagatcagaaatggtagagaaatgggcctggtgcagtggct

SEQ ID NO: 498006 - DNA, 201 bp, Homo sapiens
acaccgtctctactaaaaatacaaaattagcctggcgtggtggcgcatgcctgtaatcccagctactcgggaggctgaggcaggagaattgcttgaacccrggagacagaggttgtggtgagccaagattgcaccagtgcactccagcctgggcaaaaagagagaaactccacctcggaaaaaaggaaaaaaaaagaaaga

SEQ ID NO: 498007 - DNA, 201 bp, Homo sapiens; identical to SEQ ID NO: 406400

SEQ ID NO: 498008 - DNA, 201 bp, Homo sapiens
ctcatctgatcttgcagtccccacccaggaattgactcagctcaagaagacagcttccattccctatgatttcagctctgaccaatcagcactcccagctyactggcttcctcccacccaacatgttgtccttaaaaattctgaaggcggaatgcttgtggatactgatttgagtaataataaaactctggtctcccatac

SEQ ID NO: 498009 - DNA, 201 bp, Homo sapiens
atctatttcccttcttttgaaatatcaagtcatagcacaaaacttcaggagaaaagaccctcaatggaatgagttagtcatggccaggcactgtggctcaygcctggaatcccagcactttgtggggccaaggcgggtggatcctctgaggtcaggagttcaagaccagcctgaccagcatggtgaaaccccgtctctact

SEQ ID NO: 498010 - DNA, 201 bp, Homo sapiens
aatcagttttaggccaggtgcggtggctcacgcctgtaatcccagcactctgggaggccgaggcgggtggatcacgaggtcaggagttcaagaccatcctrgccaagatggtgaaaccccgtctctactaaaaatacaaaaattagccgggcgtggtggcgggctaattaggtggtgcctgtaatcccagctactcgggag

SEQ ID NO: 498011 - DNA, 201 bp, Homo sapiens
gcctgccacgctcccgtgcggggacccgcccaaaactccctggaagccaggcgattcagaccccgccaccgcgtccccagagactgggcggaaaccggagwctcgcctcccgaacccgcgaaactatctcccgcgagactgccccgccccaaccccgccccgcaactctactccctgattggctggaattacggccggatt

SEQ ID NO: 498012 - DNA, 201 bp, Homo sapiens
aaggctggcaattcccaagatctgctgggatctgggagacccaggggagccaataatgtagtttgagtctaagtttgaaggcctgaaaatcaagagagctratagtgtagctccagtccaaaggccagcaggctcaagacccaggaagagccaatggtttgagtccaaaggcaggaaaaagagctgatgtcccattttgaa

SEQ ID NO: 498013 - DNA, 201 bp, Homo sapiens
aggcaggagaattgcttgaacccgggaggctgaggttgcggtgagccaagattgtgccactgtactccagcctgggcaatagagtgagaatccatctaataaaaaaaaaaaaagaaatactctgtttttcctctaaaacaagatttttaaaaatatgtttctggcctggcgtggtggctcacgcctgtaatcccagcattt

SEQ ID NO: 498014 - DNA, 201 bp, Homo sapiens; identical to SEQ ID NO: 401965

SEQ ID NO: 498015 - DNA, 201 bp, Homo sapiens; identical to SEQ ID NO: 401936

SEQ ID NO: 498016 - DNA, 201 bp, Homo sapiens; identical to SEQ ID NO: 401963

SEQ ID NO: 498017 - DNA, 201 bp, Homo sapiens; identical to SEQ ID NO: 401932

SEQ ID NO: 498018 - DNA, 201 bp, Homo sapiens; identical to SEQ ID NO: 401816

SEQ ID NO: 498019 - DNA, 201 bp, Homo sapiens; identical to SEQ ID NO: 401915

SEQ ID NO: 498020 - DNA, 201 bp, Homo sapiens; identical to SEQ ID NO: 401933

SEQ ID NO: 498021 - DNA, 201 bp, Homo sapiens
tgtattctggttgtaaggttcttacatatgaagtagtataatattgtaggctgtatgtggtaagttacagatgtatatagtagtaaaccctaaagcagtgytgaccaatgtaactttctatgatgataaaaatgctctacatatgcactaagtaataagatagccactggccacataaaacattttattttatatttaaat

SEQ ID NO: 498022 - DNA, 201 bp, Homo sapiens
ctagcacttgacttcccacccatcaggcagttgctcatccagaatcaggatcatcaatgtgagctgggatgttgaaaataacaccagtgctgcgtgcagcrgctcacgcgtgtcatctcagcactttgggaggccgaggaggaaggatcgctcaaggctaggagtttgagaacagcttaggtgacacagcgaggctccatc

SEQ ID NO: 498023 - DNA, 201 bp, Homo sapiens
atgaagccagccaaccacagatttaaggagaaataagacacatacctctgtctgtagactgaggagttctgtccaaggcacagcatcctgccagtgttgtrtgcacactatttcatcctcttcttttacttccagaaagcacgggatactgtcatcttttgtatcacattttatttgtaaaaagcagctgtcttgaagtac

SEQ ID NO: 498024 - DNA, 201 bp, Homo sapiens
aaaccataagctgggagaatgacctgatgaagaacacctgtgttcccgctggtgcagtcctgaggcagggctcacacctgcggcagtgcttgcctctttamggctcccctctcattcaaggaaacacagatattcctatttcttagtctcggaagaataagagatttccaaacataaatataaaaccagatgtttaaaaaa

SEQ ID NO: 498025 - DNA, 201 bp, Homo sapiens
cagctggaaccgggacctagggggtccagctccagagctcttgttcttcaatttcatactaggctgcccctcaccacacaggcagggtcgggtacccacarttgtcagctctacagaatgtgattcacatgtaggggaagcacacgcaggaccagggccaaagcgcactcacctgtgccgaactggataatatttactttc

SEQ ID NO: 498026 - DNA, 201 bp, Homo sapiens
tgtggattacaatccattagttctagaatctaggaaattaagatctcaccccatcatctgttcagagatgttcattttcatgtgaggaatagtaacattcmccagcatgaggttctggtctaatgtttgtagagaaacaccagccagcatcaagcacactgttttgttcagctgtctgttttgttttgtagcaagagttcc

SEQ ID NO: 498027 - DNA, 201 bp, Homo sapiens
tacctctgtctgtagactgaggagttctgtccaaggcacagcatcctgccagtgttgtgtgcacactatttcatcctcttcttttacttccagaaagcacrggatactgtcatcttttgtatcacattttatttgtaaaaagcagctgtcttgaagtacttctgatagctcatcactttctgtgtcagaactttgaaaagc

SEQ ID NO: 498028 - DNA, 201 bp, Homo sapiens
ggacctcactctgttgtgcatgctggagtacagtggcgcagtctctgctccctgaaacctcgacttccagggctcaagagatccttccatcttaccaagtrgctgggactacaggcacgcgccaccatacctggcttattttttgtatttttagtagagacaggatttcaccatgttgcccaggctggtcttgagctcctg

SEQ ID NO: 498029 - DNA, 201 bp, Homo sapiens
tcctggcctccctccattcccacctggaaaacaggatgtgctttcagaagctgcactcgggaaacatcaaactacatgtgccatttgaaaatgttgattayaattataaaatatgttcatttagagatataatttagaaaatatagaaaagtatcaagaagaaaattaaaatctcctaaaatcccgagagcaatacgatca

SEQ ID NO: 498030 - DNA, 201 bp, Homo sapiens
acttactcattttttgagacagggtcttgctctgttgcctggggctggagtgcaatggcacaatcacaactcactatagccttgaactcctgggctcaagygatcctctcgcctcagactccccagtagctgggactatgagcatgtgacaccatacccagctaatttttaaattattcttttgtagagatgtggtctcat

SEQ ID NO: 498031 - DNA, 201 bp, Homo sapiens
tttttctttttttttaatttttgtatgatggggttattttaaaagatctgtcttcaagttctgaaatttgttatactgcttgacctagtctgttgttgaatttttttttttttttttttttttgagacagagtctgtctctgttgcccaggctggagtgcagtggtgccatcttggctcactgcaacctctgcctcctggg

SEQ ID NO: 498032 - DNA, 201 bp, Homo sapiens
cctgagctcaagagatccacctgccttagccccctaagtagctgggactataggcaagtgatgccacatcagacactagtgttgattttcatttgtggggaaaaaaaaaaaggattttgtttttctttctaatgcaaaaggaatggaaacgcaacatagtgtaaatacttagtgtcaaaccttccttttccaaatacaaga

SEQ ID NO: 498033 - DNA, 201 bp, Homo sapiens
gtagtcccagccacctgggaggctgaggcaggaggagtgcttgagcctgagaggctgaggcagctatgagaacagatttgcactactgctctccagcctgygtgagagggcaatattctgtctcaaaaaaaaaaaaaaaaaaaagaaagaaagaaaataatgccaccagagacattcaagatcatttcagtacaaggctgt

SEQ ID NO: 498034 - DNA, 201 bp, Homo sapiens
atttgcatttctctaggatcagtgatgttgagcgctttttcatgtttgttagctgtgtgtatgtcttcttttgagaagtgtctgttcatgtcctttgccctttttttttaatgacgttttttgcttgtaaatttctttaagttccttatagattctggatattagacctttgtcagactccacctcctgggttcaagcaat

SEQ ID NO: 498035 - DNA, 201 bp, Homo sapiens
ctcctgggttcaagcaattctcctgcctcagcctcctgagtagctaggattacaggcacctgccaccacacctggctaatttttgtatttttagtagcaaygggttttcaccatattggccagactggtctcaaactcctgacctcgtgatccacccacccgcctcagcttcccaaaatgctgggagttctttaggtttct

SEQ ID NO: 498036 - DNA, 201 bp, Homo sapiens
agaaagaaagaaaataatgccaccagagacattcaagatcatttcagtacaaggctgtctatttctagacatggaagctgagacctggagagaatatcagyaatcaatatattgaaagaccttctctcttagttcttagttcttagaattgcggaattttaaacacccctcattttacacatgagggaactgaggagcaca

SEQ ID NO: 498037 - DNA, 201 bp, Homo sapiens
tgtgttggtttaagaatcgtttctagcttttatggttgatattacaccaccaaaaatccctttgtacaggctcatgatatacatcttaataaaaacatgasagatttaagttacagatcaagtgtgtgactccagaacatggaaccatttatttctaaattagaaattaacattatttgatagtgaaaccatgggtttctt

SEQ ID NO: 498038 - DNA, 201 bp, Homo sapiens
gtattctggttgtaaggttcttacatatgaagtagtataatattgtaggctgtatgtggtaagttacagatgtatatagtagtaaaccctaaagcagtgckgaccaatgtaactttctatgatgataaaaatgctctacatatgcactaagtaataagatagccactggccacataaaacattttattttatatttaaatg

SEQ ID NO: 498039 - DNA, 201 bp, Homo sapiens
gtcttgctctgttgcctggggctggagtgcaatggcacaatcacaactcactatagccttgaactcctgggctcaagtgatcctctcgcctcagactcccyagtagctgggactatgagcatgtgacaccatacccagctaatttttaaattattcttttgtagagatgtggtctcattatgttgaccagactggttttga

SEQ ID NO: 498040 - DNA, 201 bp, Homo sapiens
tggaaaaaacatccttgcatccttaagagaaatggcacttggtgttgatacatggtgtttctacattgctgaattcactttgaaaatatatgtatattttwaaatctacatttatatgtgagactggtgtaaaaatatcttttattctactgtatttgtgcaattttggaatcagttatattaatatactaaatgagttgg

SEQ ID NO: 498041 - DNA, 201 bp, Homo sapiens
actcacttctatcagtcgaatgctgtcctgagggctgcttgcctgcaatgtcctccgcaagatctgggatgtccttcataattccggggaattgccatttyctttcttgaattaaagctcacagagttggtctttatgtacttgcttgctatttccaaatgactgaggcatgctaaaagcctgtaatctgccatcttggaa

SEQ ID NO: 498042 - DNA, 201 bp, Homo sapiens
ctctctcacttactgaggcttcactcacttctatcagtcgaatgctgtcctgagggctgcttgcctgcaatgtcctccgcaagatctgggatgtccttcawaattccggggaattgccatttcctttcttgaattaaagctcacagagttggtctttatgtacttgcttgctatttccaaatgactgaggcatgctaaaag

SEQ ID NO: 498043 - DNA, 201 bp, Homo sapiens
agaagatgtgcaaatggtcaacaagcatgaaaaaaagcccagcataactaattatcagaaaagtgcaaattaaaactgcaatgagataccatcttacaccrgtcagaatggttattattaaaaagtcaaggaacaacagatgctggcaaggctttattgaaaaggaaatgcttatacactgtcagtgggaatgtaaattag

SEQ ID NO: 498044 - DNA, 201 bp, Homo sapiens
ggttttctgagatgatcagtgttttgtggccattttgagtctgaccctactaggctagatatcaagaaatctgtttctagtgctaaagtagtcttttgtcytttgttatttttctgtccattttctgaggtaataagtctaatttttttttagtatttctggacaattctctgcctatggtatctttgacaaacccaagcg

SEQ ID NO: 498045 - DNA, 201 bp, Homo sapiens
attatttattttgatttgtaattttagaaaatcttgttttttttgtagagatagggtcttgctatgttgaccaggctggtcttgaactctcagcctcaagygattctcccatctcagctgagtttacaggcatgagccaacatgcccgcttataattttatttattttttaataaatagtaaattcacattgtagaatatc

SEQ ID NO: 498046 - DNA, 201 bp, Homo sapiens
gcctcaagtgattctcccatctcagctgagtttacaggcatgagccaacatgcccgcttataattttatttattttttaataaatagtaaattcacattgyagaatatctaaaaaataaaataatgacgacgtattaacttcatccccactgttgtccccagttcctctctgcagaggcacctgctgtcacttgctcctcg

SEQ ID NO: 498047 - DNA, 201 bp, Homo sapiens
ggggcctgctgacctgtctgcaacccacacttcccaggcccagggtgtggatgtcgtcattaaccatcaaagcaagggtgactttcttaatgtggaaatayaaataaaataatttaacctcgaattaccaataatacatacccttttctcaactgccacaaagcttgtaaattgtgttatgagagagttttctttactgag

SEQ ID NO: 498048 - DNA, 201 bp, Homo sapiens
aatttggaaatcaactagtcaaattacacacaccggatagaaatttgtttggaattgcattgaatttatagactggggagaattgaatctttacaacattractcatcccacccatgaacagaggtattctctcatttagttaggtcctcttcagtttctctttacaatgctttctcgttttctgtatagaaagcttgcat

SEQ ID NO: 498049 - DNA, 201 bp, Homo sapiens
cctcccaagtagctgggactacaggcgtacaccaccacacccagctaatttttgtatatttagtagagatggggtttcaccatgttgcccaggctggtctygaactcctgacctcaggtgagccatctgcctcagcctcccaaagtgctggggttataggcatgagccaccacgcccagctagaattttaaataatagcat

SEQ ID NO: 498050 - DNA, 201 bp, Homo sapiens
ctattcaacttcattcatcatcggtcaggcattctagaatgtagtggatgtgataatccctttgctgtatagactcattaggtttccaggatgttttgttktaagtccaatgcaccagcaatagatttacctatatcaaactgccaagatttaaaaaatgtctctcagcacccaaggttgttgttagaaactttccagaag

SEQ ID NO: 498051 - DNA, 201 bp, Homo sapiens
ggaggctgaggcggtggatcactggaggtcaggagtttgacaccagcctagccaacatggtaaaaccccatctctactaaaaatacaaaaattagctgggyatggtggcgcacatctgtagtcccagctattcaggtggctgaggcaggagaatcacttgaactggggaggtggtggttgcagtgagctgagatcatgcca

SEQ ID NO: 498052 - DNA, 201 bp, Homo sapiens
caagggctgccagcacgctgtcacctttcagtacctttgccctgtgtgtgttggatggtggtacccattccctgggctctcaattgaggacacaatgccastgcctccctgacacctcacctctgggtctccttggcaccacagaggtgcgacgtccccagcctaggcctccctctcccccttggctggagacaaccactg

SEQ ID NO: 498053 - DNA, 201 bp, Homo sapiens
gtggctcccaatttaaagctgaggaattggaaagatggaatgacttgttcaggataaaagggccttaaacaaaacagcacacagaggctgccaacccagcrgcatctgaggagaatagggagaccaccaggtgaccatctgtcactagaactgactgtgagggtctccagggcctgctgtcaccttcttgtggggatggca

SEQ ID NO: 498054 - DNA, 201 bp, Homo sapiens
tcagtacctttgccctgtgtgtgttggatggtggtacccattccctgggctctcaattgaggacacaatgccactgcctccctgacacctcacctctgggtctccttggcaccacagaggtgcgacgtccccagcctaggcctccctctcccccttggctggagacaaccactgggtgctattcttgactccctgcacccc

SEQ ID NO: 498055 - DNA, 201 bp, Homo sapiens
ataggagggatgaaatgaggggtaccataaaagagattacaccacactatttaggttaatctatgctagtcgtaatctctgacaattaaaaacaacacacaaaaaaaaacactaaaagcctttaatgactctttaataatttccaggacagcctctatgtgataattgcacccccacttatgctgaccaaggttggctgac

SEQ ID NO: 498056 - DNA, 201 bp, Homo sapiens
tgcaagctccgcctcccgggttcacgccattctcctgcctcagcctcccgattaactgggactacaggcgcctgccacaatgcccggctaattttttgtattttttagtagagacggggtttcaccgtattagccaggatggtctctatctcctgacctcgtgatccgcccgccttggcctcccaaagtgctgggattaca

SEQ ID NO: 498057 - DNA, 201 bp, Homo sapiens
tgagtgagaacctgcaaactttgttcttctgtggctggcttattttacttaacataatgtccttcatttccatccatgttgttgtaagtgtcaagatctcrtttttttatgcctgaatagtactccattgtgtctatgtaacactttttctttaccctttcttctatggatgaacagttatttcccaaatcttggctattg

SEQ ID NO: 498058 - DNA, 201 bp, Homo sapiens
aaaagggacctggtagtcaatgttttgctacaatgaagaaatgcctaaaactatataccttttctgaaacagtaagaaagcatccttcatggtctaataaycataaacttttagaattcctacccaggcctttgtctcaaattctcctattactaaccctattccctgccaccccctcctcactccgcccccggctttttt

SEQ ID NO: 498059 - DNA, 201 bp, Homo sapiens
tgtacttggtgtagactaatgtttcttcctactcagtagccttcctgcctgttctagttagcaggcccgcctttgcgcaggagtccccagacatcaggcckgtggcagctgcactctcttttcatatcacactgtgtggctgggcactcacaaaggtcaataattttagataacgataataaaagtatttttaccaggcct

SEQ ID NO: 498060 - DNA, 201 bp, Homo sapiens
ttcttctatggatgaacagttatttcccaaatcttggctattgggaataatgcttcagtaaatatgaatgtactcatagttcttcaatatactgattgccytcccttggggtttatacctagcagtgggattgctagatcatatggtaattctattcttagtcttttcaggaacttcaaaactattctccaaggtggttgt

SEQ ID NO: 498061 - DNA, 201 bp, Homo sapiens
tcttcaatatactgattgccttcccttggggtttatacctagcagtgggattgctagatcatatggtaattctattcttagtcttttcaggaacttcaaarctattctccaaggtggttgtactaattcacttgggtggtggggaacgtgtctgtactggggacagatgactgagactacacgtagtttgtttaccggaag

SEQ ID NO: 498062 - DNA, 201 bp, Homo sapiens
agcccggagccccatccctctatgctgtaaggcttctgtattctagtgtcaacttccaagcttgccaaagtcccctgcagggcaacaagacgacctccccrtgggtctggactatgtgaccagctctctgagactcacccgataccgcaggcgaataacctggtgtgcgggcggctcctcttcacgagctgtaatgtcagg

SEQ ID NO: 498063 - DNA, 201 bp, Homo sapiens
ttcccccttaaacttatgaaggggaagggctctcagggaacccaggccttttcggccttttctattttttgagggtcttggattaataaaagacaataaaygccaaaactgtaacaaaattatagtataaccgaaaagtacacattagccaattgttaataataacattaaaaatgataacatactcaactcatttagaaa

SEQ ID NO: 498064 - DNA, 201 bp, Homo sapiens
ctttgcctttttaaaaaaaaaacagaaagcacatatatttaaattgtttaaggggaggtccatgctcttgacctttaaactaaattgccttaaaacctccygaagaattttctgtgttgtctgagaacagagctacaaagagccataacactttccaaagttagagacaaaatattccttttaagcttgaggggcaagccc

SEQ ID NO: 498065 - DNA, 201 bp, Homo sapiens
aatgttcctccctgctcactttgcacacccaggacccagctcagatgggactcctcagggacacctacccacctggccagtcacaccttcctgtggcaccygctccttgctgtctcctcaccaatcatactcaaagcagatgctatggattgtgtttatttaccagctacaggagcattaacattttataattaatattta

SEQ ID NO: 498066 - DNA, 201 bp, Homo sapiens
ggctgacactagtatggaggctgtgaaggccccgagctctgggagcccacactatttattggtgatcaaacaaagaagcaggcggtgaggacatgggggtygaaagaaagtggtgcatcaagtgtttgatctatagctgtgtcagtttagcattttctttgaagcatatggaacgagttcagttacagaaaatagcacatc

SEQ ID NO: 498067 - DNA, 201 bp, Homo sapiens
ttttttctaggtctattataacactttgttttttgagacagtctcgcttttgtcacttaggcggaagtgcagtggtgagacctcggctcacggcaccctcygcctcccgggttcaaacgattctcctgcatcagcctcccgagtagctgggattataggtgcctgccaccatgcctggctactttttgtatttttagtaga

SEQ ID NO: 498068 - DNA, 201 bp, Homo sapiens
aggaaatattgagaaattcattgttttttcactgaaactcattattcattataatttcaacagactacctttgagaatgttccacagaaatatgatagtcrcttaactggagctgatgatggtcaaagaggaaaaattacaataaaggaacaagaaggtaagaactgtattttatttaaaaatttgacagaatgtttaaaa

SEQ ID NO: 498069 - DNA, 201 bp, Homo sapiens
ggggtttcaccatgttggccaggctggtctcgaactcccaaccttaagtgatctgcacaccttggcctccctaagtgctgggattacaggcatgagtcacygcgcccagccacagactgtattttttatcaaaattgacatcacactacctatcccgctgttatcagtcagcatctttagcattttgtcattaaatattat

SEQ ID NO: 498070 - DNA, 201 bp, Homo sapiens
gtttcaccatgttggccaggctggtctcgaactcccaaccttaagtgatctgcacaccttggcctccctaagtgctgggattacaggcatgagtcaccgcrcccagccacagactgtattttttatcaaaattgacatcacactacctatcccgctgttatcagtcagcatctttagcattttgtcattaaatattattgg

SEQ ID NO: 498071 - DNA, 201 bp, Homo sapiens
tgcagaaggtgggttctggggaggtcctgtgggacaagacgccgactgtgggatccagtcagcacaagtgccaggcacagggccttggctgaattgagatkcatcaaactgtctgggaggagcagctgaaccgaaactagctacctgacgatatgaggcaaaagacaaggaagcaggactgtgagcgcgggcagtcggggg

SEQ ID NO: 498072 - DNA, 201 bp, Homo sapiens
ttgaagctgttttccttcactttaatgaatattgaacttttttcctttaacctacagtattgtgcacagaagtgcactcagtctttgtagactatgactcrtcaagggaattacatgtgtgttgccaatgcatgttttagagttgactaagcttttaagaaagtatattagcaacttcagtttggatttgctcatatagcc

SEQ ID NO: 498073 - DNA, 201 bp, Homo sapiens
tgtggcatatcgtaggccttactaaatttgaaatttgaaatgtcatacatttgaaagttggatacggaattaaattttattaaattaattgtcccacaaamgctgtcccacattaaattgtcctacaaaaggtgttatgaagctaaaaatctttatataacttaaatgtacatattgttttaaagattacactaccatggc

SEQ ID NO: 498074 - DNA, 201 bp, Homo sapiens
aggtgaaacagccattggaaaaaaaatttttttttttgagacggagtctcgctctgtcgcccaggctggagtgcagtggcacgatctcggctcactgcaasctccgcctcccgggttcacgccattctcctgcctcagcctcccaagtagctgggactacaggcgcccgccactacgcccggctaattttttgtattttta

SEQ ID NO: 498075 - DNA, 201 bp, Homo sapiens
cttcagactattattaacacctttatgcacacaaactaggaattctagaggaaactgataaattcctggaaacacaaacctcccaagaatgaatcaggaaraaactgaaacctgaactgaccaatcttgagttgcaaaattgaagcaggaataaaaaccaactaagcaaaaaaagtccaggattagatagatttacagctg

SEQ ID NO: 498076 - DNA, 201 bp, Homo sapiens
accaatcttgagttgcaaaattgaagcaggaataaaaaccaactaagcaaaaaaagtccaggattagatagatttacagctgaattctaccagatgtacamagaacagctgataccaattctactgatactattccaaaaaatagagaaactcctccttaactcatctatgaagtcagcatcatcctgatatcaaaaccta

SEQ ID NO: 498077 - DNA, 201 bp, Homo sapiens
atatgcaaatcaataaatgtgatttaccacataaacattaaaaacaacacctataggatcatctcaatggatgtagaaaaagcttttgataaaattcaacwtcccttcatgttaaaaaccctcaacaaagtaggcatcaaagaaacatacctcaaaataataagggccatctgtgacaaacccacagccaacattatatgg

SEQ ID NO: 498078 - DNA, 201 bp, Homo sapiens
gggctggctggagggctcaggctccggcgcgagtcctgcaaggatgctgcctccaagtgtgcttgtgggtggcggatcccagggcctgccgggagagtgtscactcctcaggaggcctggctgctcagcggcgcccctctgtggcgagactcgcccaggcccatgtccggcccatctcgccccagccaggctcccctgggc

SEQ ID NO: 498079 - DNA, 201 bp, Homo sapiens
agcacatcatctaattttttagcaaaaagctagcatttactttttagggcaaggtatttgcattttctgtgtgggcctaatatgctcaaaactgagttttytgatatttgacaggacgtgtttttttaaactgctcttagttaatacatactaaattcagtgaaagaaaacagcacatgtattatttgtgtgctatatctt

SEQ ID NO: 498080 - DNA, 201 bp, Homo sapiens
ataataagggccatctgtgacaaacccacagccaacattatatggaatgggcaaaagctggaagcagtccccttgagaactacaacaaaataggattcctrttctcaccattcccattcagtgtcatactagaagtcctagccagggcaatcaggcaagagaaagaaatataaggcatccaagtagaaaaagaagaagtca

SEQ ID NO: 498081 - DNA, 201 bp, Homo sapiens
tatgctcaaaactgagttttctgatatttgacaggacgtgtttttttaaactgctcttagttaatacatactaaattcagtgaaagaaaacagcacatgtrttatttgtgtgctatatcttgcttttagcatttagggatgtatatgcatatcttcctgaaagtacaaagtgggctcagaaatgctttttttaaagttgtc

SEQ ID NO: 498082 - DNA, 201 bp, Homo sapiens
tcacagaattagaaaagacttttctaaaattcatatggaaccaaaaaagagcccaaagatccaaaacaaacgtaagtaaaaggagccaaactagaggcctytcattacccaacttcaaactatactgtaaggctacagtaaccaaaataacatgctactgttacaaaaacagacacatagaccaatggaacagaacagaga

SEQ ID NO: 498083 - DNA, 201 bp, Homo sapiens
gtgggctcagaaatgctttttttaaagttgtctgaaacattgtttaaaaaaaggatcaatatctaaacatgttctgttcagtgaaagaaagcagcacatcvtctagatttttggcacacagctttcatttacttttcagagctagatatttgcattttctgtgtgggcctactatgctcagaattgtgttgtttgagattt

SEQ ID NO: 498084 - DNA, 201 bp, Homo sapiens
cacagaattagaaaagacttttctaaaattcatatggaaccaaaaaagagcccaaagatccaaaacaaacgtaagtaaaaggagccaaactagaggccttwcattacccaacttcaaactatactgtaaggctacagtaaccaaaataacatgctactgttacaaaaacagacacatagaccaatggaacagaacagagaa

SEQ ID NO: 498085 - DNA, 201 bp, Homo sapiens
acatgtaccctctgaatctaaaataaaagttgaaaaataaagagcaaataaaactgggccagggcagcaattcaaagcatgatagatagatagatagatadatagatagatagatagatagataaatagattaaaataaatctaaactacaaacttgtcttttcactatcttgataatgttcttttatggattctagtttt

SEQ ID NO: 498086 - DNA, 201 bp, Homo sapiens
tgtatatatatatgtatatgggtgtatgtgtatatatttcaccttgtaatattttaccttgttaataaaaccctggaccaaaaaatgtaagttaaaggatttgtgtgtgtgtgtgtgtgtgtgtgtgctcataaccaaatttctgcaggaataaagggaacgtttctatatgatgactttgcctttttaaaaaaaaaacag

SEQ ID NO: 498087 - DNA, 201 bp, Homo sapiens
ggtgtatgtgtatatatttcaccttgtaatattttaccttgttaataaaaccctggaccaaaaaatgtaagttaaaggatttgtgtgtgtgtgtgtgtgtstgtgtgctcataaccaaatttctgcaggaataaagggaacgtttctatatgatgactttgcctttttaaaaaaaaaacagaaagcacatatatttaaatt

SEQ ID NO: 498088 - DNA, 201 bp, Homo sapiens
ccaccaatatacaaaaaccacaggagtaggggtgctctgatggtggcttgagtggcctaagccctggaggtccccttaaagcatggtaggaaaagacccargagatacaggaagcctcttgcactcaccatgatgaactctgctgccgtggtattgcttgtgatatgcttaggatacgaaaatagctccttgtaacctgtg

SEQ ID NO: 498089 - DNA, 201 bp, Homo sapiens
tttaatgttatagccagttgctctttactttttaaataggactttcactttcacagcttatttagcttttagtgatatcctccccatgtcactaaatattmtttgaaggtgtttttagtggttacataagctttgcgtttatttcatccttccccaagtcatcagatacttggttacttaaaagtgttcactattggccgg

SEQ ID NO: 498090 - DNA, 201 bp, Homo sapiens
tgggactcgtggggcctgctgacctgtctgcaacccacacttcccaggcccagggtgtggatgtcgtcattaaccatcaaagcaagggtgactttcttaaygtggaaatacaaataaaataatttaacctcgaattaccaataatacatacccttttctcaactgccacaaagcttgtaaattgtgttatgagagagtttt

SEQ ID NO: 498091 - DNA, 201 bp, Homo sapiens
aagtggctttttctctgtaataacctacaaaatacaaactcaaacacgttttaaaatttttaaatttaaccctcaacaagattaggtaaccttgaaatcgsagtggaatatagagggtgttttcaagcacagaaaactgccccaggcaccgttctgaacagagaagaaagtaatgtgtcatcacaccaccgctactgtggc

SEQ ID NO: 498092 - DNA, 201 bp, Homo sapiens
tggcgcactctcggctcactgcaagctccgcttcccgggttcacgctattctcctgccccagcctcctgggtagctggtactacagctatctagtcccagsacataattgctatggaatcataaagatgtcagttctcccaaaattaatccataaacttgatgcaattccaataaaaattcaagaggattttttacaatac

SEQ ID NO: 498093 - DNA, 201 bp, Homo sapiens
agctgggattataggtacctgccaccacgcccagctaattgtttgtatttttagtagaaatggggtttcaccatattagccagactggtctcgagctcctraccttgtgatctgcccgccacggcctcccgaagtgctggaattacaggcgtgagccactgtgcccagcctctttttactgtttttgacttaaagtctgtt

SEQ ID NO: 498094 - DNA, 201 bp, Homo sapiens
ttgtgtgtgtgtgtgtgtgtgtgtgtgctcataaccaaatttctgcaggaataaagggaacgtttctatatgatgactttgcctttttaaaaaaaaaacaraaagcacatatatttaaattgtttaaggggaggtccatgctcttgacctttaaactaaattgccttaaaacctcccgaagaattttctgtgttgtctgag

SEQ ID NO: 498095 - DNA, 201 bp, Homo sapiens
tgcaggaataaagggaacgtttctatatgatgactttgcctttttaaaaaaaaaacagaaagcacatatatttaaattgtttaaggggaggtccatgctcttgacctttaaactaaattgccttaaaacctcccgaagaattttctgtgttgtctgagaacagagctacaaagagccataacactttccaaagttagagac

SEQ ID NO: 498096 - DNA, 201 bp, Homo sapiens
gtctttgctcaaacaattactgagagagtgttagactcttttcatacaattgaattgtgccttttgtaaaaagaattcttctgagttttcttgtaatgtasaacatgtaaaatacatatagcctctttcacctgaaaagcagtgtagtatggaagggcatagggacaaaaacacacaaacaaaaactttcaccgatatcat

SEQ ID NO: 498097 - DNA, 201 bp, Homo sapiens
atacaattgaattgtgccttttgtaaaaagaattcttctgagttttcttgtaatgtacaacatgtaaaatacatatagcctctttcacctgaaaagcagtrtagtatggaagggcatagggacaaaaacacacaaacaaaaactttcaccgatatcattggaaccacagcaaaaacaaatacaaagcacctaccgtatgca

SEQ ID NO: 498098 - DNA, 201 bp, Homo sapiens
ttaaaacaacaacaaaaaaccttaacactttttatcatatctaaaaatattataccttaaaaatccttcatatcaaatttgtagtccatgtttgtttccaraattgtcttaaaatctttgaaaatttagtttgtttaatcagaattcaaacaaagtccacacatttcatttggttgctgtgtctcctaagtctcttttaag

SEQ ID NO: 498099 - DNA, 201 bp, Homo sapiens
acaattgaattgtgccttttgtaaaaagaattcttctgagttttcttgtaatgtacaacatgtaaaatacatatagcctctttcacctgaaaagcagtgtrgtatggaagggcatagggacaaaaacacacaaacaaaaactttcaccgatatcattggaaccacagcaaaaacaaatacaaagcacctaccgtatgcagg

SEQ ID NO: 498100 - DNA, 201 bp, Homo sapiens
aagcagtgtagtatggaagggcatagggacaaaaacacacaaacaaaaactttcaccgatatcattggaaccacagcaaaaacaaatacaaagcacctacygtatgcaggaaacctgctgggccctggggtacctgctccggctaatttccatgacaacccgaaagaccaggacacagatgaggagactgaaggtcaaaga

SEQ ID NO: 498101 - DNA, 201 bp, Homo sapiens
aggaaacctgctgggccctggggtacctgctccggctaatttccatgacaacccgaaagaccaggacacagatgaggagactgaaggtcaaagaggtgagrtcctgtggcaggtggcagaactagggctgaacaaggtttgcttgctccaaagcccaggttgtggggtggagagcaagggccacggaaggcctgtgccctc

SEQ ID NO: 498102 - DNA, 201 bp, Homo sapiens
ggaaacctgctgggccctggggtacctgctccggctaatttccatgacaacccgaaagaccaggacacagatgaggagactgaaggtcaaagaggtgagakcctgtggcaggtggcagaactagggctgaacaaggtttgcttgctccaaagcccaggttgtggggtggagagcaagggccacggaaggcctgtgccctcc

SEQ ID NO: 498103 - DNA, 201 bp, Homo sapiens
agaagcagcctctccccagccgcagcaaggccagcagggccagcacggggccatctgagtcctcaggagagggctaccagcagggacttgtgggcctcatmcaggtggccaccagggtgttggccaccagaaggtgcgatacgtcctccacatccaactcattggcagtgtggccagctggtgcatgccgtggggcttccc

SEQ ID NO: 498104 - DNA, 201 bp, Homo sapiens
acttgtgggcctcatacaggtggccaccagggtgttggccaccagaaggtgcgatacgtcctccacatccaactcattggcagtgtggccagctggtgcaygccgtggggcttccctgtggggagagtgcctcaggatgggctggccccttccccacaccgcctcacctacccagctgattgggccacaggtaaatcctgt

SEQ ID NO: 498105 - DNA, 201 bp, Homo sapiens
ccttaagacgtgacgatttgctgtagaactgatcacatttcacatgttttaattttgaagacattagaaatatttttgaagtacatgttaacagtgttgaraaagctcacaactcaataggagagacatgacgtggggaagaatgtactcgtgtgtcgctgaggttaaacagagaaagtgataatagaaggaaacatctga

SEQ ID NO: 498106 - DNA, 201 bp, Homo sapiens
ctgccaccacgcccagctaattgtttgtatttttagtagaaatggggtttcaccatattagccagactggtctcgagctcctaaccttgtgatctgcccgycacggcctcccgaagtgctggaattacaggcgtgagccactgtgcccagcctctttttactgtttttgacttaaagtctgttttatctgatataagtata

SEQ ID NO: 498107 - DNA, 201 bp, Homo sapiens
ccgtggggcttccctgtggggagagtgcctcaggatgggctggccccttccccacaccgcctcacctacccagctgattgggccacaggtaaatcctgtcyctatgcacctggcctgggtagcttccttcccacaggactgcagagacctgtgtccctttggagggacccccacgccatgccatccccagaacccacagct

SEQ ID NO: 498108 - DNA, 201 bp, Homo sapiens
gatcaccctaagtcccaacaccgaagccccccatgaatgggaggctgggactcgtggggcctgctgacctgtctgcaacccacacttcccaggcccagggygtggatgtcgtcattaaccatcaaagcaagggtgactttcttaatgtggaaatacaaataaaataatttaacctcgaattaccaataatacatacccttt

SEQ ID NO: 498109 - DNA, 201 bp, Homo sapiens
agagttttctttactgagtttaataatcagagatttcaaggtttgttttttcatctaggatagaataaaacataaatcatgtcctgttttatttctatttmgctatgtcagtaaatcattttaagattcgtatttcagactaaatattgaattgcaggtcccatctaaatcggtggctcaatattccctttaaaatgagat

SEQ ID NO: 498110 - DNA, 201 bp, Homo sapiens
aaaaaattgtaaattctaatcagtatttttagggctatcctatgaccaaaagtctccatatagatctgtacttctccatgtaccttactgtagttaatatmataagaatgacactcataaatattatctcctaagtatgtctaatgaaaaaatttgggaagaaatgtgaaatccttttgtaaactgtgaagtgtgtataca

SEQ ID NO: 498111 - DNA, 201 bp, Homo sapiens
cccctcactgcctggggccggtagggcccgcccgccgctctgagtgcggggcccgccaagcccacgcccacccagaactccagctggcccacaagcgccgygcgcagccccggttcctgctagcgcatctccctccacacctccctgcaagctgagggagccggctctggccttggccagcccagaagggggctcccacag

SEQ ID NO: 498112 - DNA, 201 bp, Homo sapiens
ttacagtaaaaacgtcctgaaacagaaacatatgacttagcttccaacttgaaagcatacccattatatgccagctaactccacgtacttcttaagcaacytgaatgacaacctgccaaattcttcctcagaaaacagtaataaaacctaaaagacacattggtggggctaacggagaatcctggagccattcaccagtgg

SEQ ID NO: 498113 - DNA, 201 bp, Homo sapiens
tcctgctagcgcatctccctccacacctccctgcaagctgagggagccggctctggccttggccagcccagaagggggctcccacagtgcagcggcgggcygaagggctcctcaagtgccgccaaagtgggaacccaggcagaggaggcgccgagagcaagcgagggctgtgacgactgccagcacgctgtcacctctcaa

SEQ ID NO: 498114 - DNA, 201 bp, Homo sapiens
ttaagaaaatttttgtaaaagagcaaagacttgccctttgatatatcaaagtgtgatattaagttccatttgctaaaagatgagaagacagataaatgtgyggaacagaataaaaaatgcacaaacactgaactatatgtaaaattttagaacctgatcctgatgacatttcatatgtgtatgaaaagatgagttatttgt

SEQ ID NO: 498115 - DNA, 201 bp, Homo sapiens
tctcttttcttaatttcaacttttatttgagatacagagggcacatatgcagatatcatacatgggaacattgagtgatggtgaagtttggaggacagatsgcatcactcttgccatgagcatagtacctggtagtagtaatttaacccactcccttatagaagtcttaaagactaatattaatcattgataatatctgat

SEQ ID NO: 498116 - DNA, 201 bp, Homo sapiens
gagacttggtgtgactgtcggctccggtgggcgccccccaccgcacccggtttctcgtcaccagggctgcgccgcggggcagagcggaacgaccgcaatayccctccccgagggcgctggctgcactagctagtccactcccgagcctagcagcgccgtcaggcccacagcgccaacgccgcgcagggcaagggtgcagcc

SEQ ID NO: 498117 - DNA, 201 bp, Homo sapiens
cactcttgccatgagcatagtacctggtagtagtaatttaacccactcccttatagaagtcttaaagactaatattaatcattgataatatctgatttacwtatatcatataaatcaaaatattgaataaaatgagccatgcttattcatttgaattttgatgtttctttggcctaaagttttctgaaagccaagtaagaa

SEQ ID NO: 498118 - DNA, 201 bp, Homo sapiens
ttttttggaatgggtgctttcatacatggaagacttcaatgttggagactgtcattgagtcctagagggatctgtaagtaggagcccataggaaagaagawcttgagatagcaattgggaaaaacagagatacagctttcaggactctatttttccagcagtctctctccttgggtatcagagcatctgtgaagattctca

SEQ ID NO: 498119 - DNA, 201 bp, Homo sapiens
gggtttgataactgttctaagttgcaatgtgtttaattcagtgaacgaaaatagcatatcataaaaatttttggcacaaaccttgttataccttttagggmtggatattcatatgcttctatcattctctgctattctcaaaatgtgtcttctgagcatcaacaaaacttgtgtttgaaaactgttctaagtaaaaaaaat

SEQ ID NO: 498120 - DNA, 201 bp, Homo sapiens
gtagggatatggtgacaccgaaaatattttctttccctaatttgtgaaacaactaaacttatgtccttttagtttatttcatgtcacacagtaactataayattatcacctcacgcttatttgattttttacagtttccagaggactatgacatctacaggaagaaatgtcccatccaatcagccctggatttgccagcct

SEQ ID NO: 498121 - DNA, 201 bp, Homo sapiens
ggaatattatctattgtataggtagctgacctttccccagattttgtttttgtttttgttttttttggtggggggtgatacccagacacaaaacaaataatttttttttttaagagaagtgaactcactcatttttcttgtatgtttttatctttaggctgtccaacgaacagagttctggtgactcatggctttcaatag

SEQ ID NO: 498122 - DNA, 201 bp, Homo sapiens
taatacatgttgaattcaatgaaagaaaacagcacatcatatattatttgtgtgccatatattgcttctagcaattagggttgtataatgcataccttccaaaaaagcactaactggcctacacaatgtttttttctgaccttgtacaaaatgtgtttctgaaaagtgatcaatatcaaaacatgtttccttcagtgaaag

SEQ ID NO: 498123 - DNA, 201 bp, Homo sapiens
gtgatcaatgtcaaaacatgtcaaattaaatgaacaaaaacagcacatcatctaggtttttggaacaaagcttgtgtttaccttttagagctagatattcrcattttttctgtgggcctactaagttcaaaattgggttttatgagatttgacaagatatgtctttaaaactgctcctagttaatacacgttgagttcagt

SEQ ID NO: 498124 - DNA, 201 bp, Homo sapiens
tacgatcttaaatttctatctgaaattatttcaaacaattctaaatggaaatttaaaccagaaaaccaatatccattgaattgacaggttttatattttasgtactaacctttgctttgttcctatttcttttatacaaatcttctctactgtatcctgttaaaagaaaaatacatttgtataactaagcatatattaagt

SEQ ID NO: 498125 - DNA, 201 bp, Homo sapiens
tccccgattccgcgctccttgctcgcggtacttccgtaatctaggctctccctgcccccggggctgggcgggcgccactgcgccggaaccccgccccgcaycaggcgggcgcagcgtcccaagcagggacgatagccggaacgcgcccggaatcgggtccgccaggtggggagcgggtccccggcctctggcggggtttct

SEQ ID NO: 498126 - DNA, 201 bp, Homo sapiens
gccggaaccccgccccgcaccaggcgggcgcagcgtcccaagcagggacgatagccggaacgcgcccggaatcgggtccgccaggtggggagcgggtcccyggcctctggcggggtttctcttccaagatcagccggagggttcagggctttcagtttcatatttcaggagggattttgtcaatgaggattaatacaaagc

SEQ ID NO: 498127 - DNA, 201 bp, Homo sapiens
atgtaaattagttgaaccactgtggaaaccagtttgaagatttctcaaagtgctgaaaacagaactgctattcaacccagctatcccattactgggtacayattcaaaacaagagaactcattctaccaaaaagacacatgcactagtatgttcgtcacagcacgcttcacaataggaaagacatggaatgaacttaggtg

SEQ ID NO: 498128 - DNA, 201 bp, Homo sapiens
ctcatttagaaagatcaccctaagtcccaacaccgaagccccccatgaatgggaggctgggactcgtggggcctgctgacctgtctgcaacccacacttcmcaggcccagggtgtggatgtcgtcattaaccatcaaagcaagggtgactttcttaatgtggaaatacaaataaaataatttaacctcgaattaccaataa

SEQ ID NO: 498129 - DNA, 201 bp, Homo sapiens
ctgtaattagactccaataacattgtggacatgtagctgggcatgctggcacatgcctgtagtcccagctctttggaaggctgaggcagtaggatcacttragtccaggagttccagaccagcctgggcaacataagaagacctcacctctagttttttttttttaattatactttaagttttagggtacatgtgcacaac

SEQ ID NO: 498130 - DNA, 201 bp, Homo sapiens
ggagcttgtgctgtgggccacaagcgtgaggggaagtggggaggtggagtggctttcctctttacggagcactggcaggtgctggccactgtgctgggcaygttacgtgaatttcccccttaaacttatgaaggggaagggctctcagggaacccaggccttttcggccttttctattttttgagggtcttggattaataa

SEQ ID NO: 498131 - DNA, 201 bp, Homo sapiens
ggaagcacacgcaggaccagggccaaagcgcactcacctgtgccgaactggataatatttactttctgcttctcacccaccaaggacagcgcatgcaaggygatttgcttggcttgcaagaatgtcacaccctccatggaactggagcagtcaagacaaataatcacttcgctctcactggctaggtcagggaggtcgaca

SEQ ID NO: 498132 - DNA, 201 bp, Homo sapiens
aatgtggtacatttgcaccatggaatactacgaagccataaaaagaatgaatggaatcatgtccttcacagcaacgtgactgcaactggaggccattgtcstaagtgaattaatgaaggaacagaaaaccaaataccacatgttctaatttgtaagtgggagctaaacactgggtactcatggatataaagatggcaacaa

SEQ ID NO: 498133 - DNA, 201 bp, Homo sapiens
agggtacatgtgcacaacatgcaggttagttacatatgtatacatgtgccatgttggtgtgctgcacccagtaactggtcatttaacattaggtatatctscaaatgctatccctcccccctccccgcaccccacaacaggccccggtgtgtgatgttccccttcctgtgtccaagtgttctcattgttcaattcccacct

SEQ ID NO: 498134 - DNA, 201 bp, Homo sapiens
atagtattccatggtgtatatgtgccacattttctcaatccagtctatcattgttggacatttggattggttccaagtctttgctattgtgaatagtgccwcaataaacatacgtgtgcatgtgtctttatagcagcatgatttataatcctttgggtatatacccagtaatgggatggctgggtcaaatggtatttctag

SEQ ID NO: 498135 - DNA, 201 bp, Homo sapiens
cttcaacaaaaaattatgaggcatgcaaaaaaaaaggcgaaaaaatggccaattcaaaggaaaaaagaaatgaacagaaattgtccctgagctgaggaagsacagacataggaattattagacaaatacttcaaataaactgtcttaaacatggacaaaaagtgaaaggaaacatagaaaaataactgaaagaaacaacca

SEQ ID NO: 498136 - DNA, 201 bp, Homo sapiens
tattgtgaatagtgcctcaataaacatacgtgtgcatgtgtctttatagcagcatgatttataatcctttgggtatatacccagtaatgggatggctgggycaaatggtatttctagttctagatccctaaggaatcaccacactgacttccacaatggttgaactagtttacactcccaccaacagtgtaaaagtgttcc

SEQ ID NO: 498137 - DNA, 201 bp, Homo sapiens
aatggccaattcaaaggaaaaaagaaatgaacagaaattgtccctgagctgaggaagcacagacataggaattattagacaaatacttcaaataaactgtsttaaacatggacaaaaagtgaaaggaaacatagaaaaataactgaaagaaacaaccaggagaacaaagtctcaataaatagagaatatgcaatagaagat

SEQ ID NO: 498138 - DNA, 201 bp, Homo sapiens
atatacccagtaatgggatggctgggtcaaatggtatttctagttctagatccctaaggaatcaccacactgacttccacaatggttgaactagtttacastcccaccaacagtgtaaaagtgttcctatttctccacatcctctccagcacctgttgtttcctgactttttaatgatcgccattctaactggtgtgagat

SEQ ID NO: 498139 - DNA, 201 bp, Homo sapiens
ctgctttttctttaaggtagccggttttttaaataggatgcctgttttgtaaaagtttatcatggatgacatgatatgccaacccaaactaagtttggaamcaaaaaaaattacaaagtttattcctcaaatacaaaaggcattactttacataaatattacacccattttggtatataaaagctcagtagtaactaataa

SEQ ID NO: 498140 - DNA, 201 bp, Homo sapiens
ctacaaattaccttggcagtatagccattttcacgatattgattcttcctacccatgagcatggaacattcttccatttgtttgtatcctcttttatttcmttgagcagtggtttgtagttctcctggaggaggtccttcacatcccttgtaagttggattcctaggtattttattctctttgaagcaattgtgaatggga

SEQ ID NO: 498141 - DNA, 201 bp, Homo sapiens
atattacttattaatcattttgtcttaaaaccctttcagcctaaggttgaaatgaaagagtgtgtttcgaaccaggcagtcggaatgaaagatgtacaagyatgcacatcaggtaaaaatttttgcaatacaaatttaactctggaaagaagcacattaaaaatagtttaaatgctagcagtcttcgtattcctgtctttt

SEQ ID NO: 498142 - DNA, 201 bp, Homo sapiens
tgcctatcagcttaaggagattttgggctgagacaatggggttttctagatacacaatcatgtcatatgcaaacagtgacaatttgacttcctcttttccyaatcgaataccctttatttccttctcctgcctgattgccctggccagaacttccaacactatgttgaataggagtggtgaaagagggcatccctgtcttg

SEQ ID NO: 498143 - DNA, 201 bp, Homo sapiens
gatttggggtggagagttctgtagatgtcagatgtctattaggtccgcttggtgcagagctgagttcaattcctggatatccttgttaactttctgtctcrttgatctgtctaatgttgacagtggggtgttaaagtctcccattattattgtgtgggaatctaagtctctttataggtctttaaggacttgctttatgaa

SEQ ID NO: 498144 - DNA, 201 bp, Homo sapiens
tggtttaaagtctgttttatcagatactaggatggcaacccctccctttttttgttttccatttgcttggtagatcttcctccatccctttattttgagcytatgtgtgtctctgcatgtgagatgggttttctgaatacagcacactgatgggtcttgactctttatccaatttgccagtctgtgttttttaattggagc

SEQ ID NO: 498145 - DNA, 201 bp, Homo sapiens
ttgttctgaccttgtatgaatgggtttttgaaaagtgatcaatgtcaacacatgttgaatttaatgaaagagaacagcaaataacctaggtttttggaacmcagcttgcatttacattttagagctagatactcgcattttttgtgtgaggctattatgctctgaattgtgttttttgagttttgacaagatgtgtctttg

SEQ ID NO: 498146 - DNA, 201 bp, Homo sapiens
ccgggactgactgcaaagagcctcaggtaaagcagaggccattggcagcctaaggttggcagtcaaagaggctgcggaaggttgaaaatgaaaaggagagkaagcagagggatgataagacccaaaacctctgatgggatcagggtctgtaggaagagagaaatgaagctggggagaatccagctcagggaaggtgccagc

SEQ ID NO: 498147 - DNA, 201 bp, Homo sapiens
ttaaaaatgataacatactcaactcatttagaaagatcaccctaagtcccaacaccgaagccccccatgaatgggaggctgggactcgtggggcctgctgrcctgtctgcaacccacacttcccaggcccagggtgtggatgtcgtcattaaccatcaaagcaagggtgactttcttaatgtggaaatacaaataaaataa

SEQ ID NO: 498148 - DNA, 201 bp, Homo sapiens
gccttttctattttttgagggtcttggattaataaaagacaataaacgccaaaactgtaacaaaattatagtataaccgaaaagtacacattagccaattrttaataataacattaaaaatgataacatactcaactcatttagaaagatcaccctaagtcccaacaccgaagccccccatgaatgggaggctgggactcg

SEQ ID NO: 498149 - DNA, 201 bp, Homo sapiens
gaacccaggccttttcggccttttctattttttgagggtcttggattaataaaagacaataaacgccaaaactgtaacaaaattatagtataaccgaaaartacacattagccaattgttaataataacattaaaaatgataacatactcaactcatttagaaagatcaccctaagtcccaacaccgaagccccccatgaa

SEQ ID NO: 498150 - DNA, 201 bp, Homo sapiens
tgtccgcctcaacctcccaaagtgctggaattacagctgtgagtcaccgtgtctggcctaaaattgtttgtcttatgtactcaagtgccaacaaaccattwtgctagcacagtagcagtaatggagtaagagcaatatgctggaatatacttgatcaattttgaaaatctttactttatgatattacagttcaaaagcagg

SEQ ID NO: 498151 - DNA, 201 bp, Homo sapiens
tcacatttgaaaatatggtttaactttcataaggatccagggctttctaaaatggttcaacaatttattttctagtacaactctggagacaatttcatgaytcagtgttacctcattcatcagatttctaaagacccccaccctcaacatattttataataaatagaattctatatttcagaggtttacctggcagaggtc

SEQ ID NO: 498152 - DNA, 201 bp, Homo sapiens
aggcactctgatttttagagtttccagtttttctgctctgttttttcctcatctttgtggttttatctacctttggtctttgatgatggtgacgtacagayggggttttggtgtggatgtcctttctgttttttagttttccttctgagtcaggaccctcagctgcaggtctgttgaagtttgctggaggtccattccaga

SEQ ID NO: 498153 - DNA, 201 bp, Homo sapiens
atgaacctggtacctcagttggaaatgcggaaatcacccatcttctgcatcactcatgctgagagctgtagactggagctgttcctatttggccatcttgrctctgtagggtccagccccacagggtcggtgggtttctccccatgtgtggagatgagagagtgtagaaataaagacacaagacaaagagataaaagaaaa

SEQ ID NO: 498154 - DNA, 201 bp, Homo sapiens
tccagaagcagagactgttaataaccatgtggtaagactttaatttcaaacactttttgccctgtattataaaaaatattcacagagcatctttgtatcatagtttaaagtttcaaatttcagaagtttttgtatttcattgtttacataatcattttaaagatcctgcaccactgtgagctactgaatgttacgaaacat

SEQ ID NO: 498155 - DNA, 201 bp, Homo sapiens
ccagaagcagagactgttaataaccatgtggtaagactttaatttcaaacactttttgccctgtattataaaaaatattcacagagcatctttgtatcatagtttaaagtttcaaatttcagaagtttttgtatttcattgtttacataatcattttaaagatcctgcaccactgtgagctactgaatgttacgaaacata

SEQ ID NO: 498156 - DNA, 201 bp, Homo sapiens
cagaagcagagactgttaataaccatgtggtaagactttaatttcaaacactttttgccctgtattataaaaaatattcacagagcatctttgtatcatagtttaaagtttcaaatttcagaagtttttgtatttcattgtttacataatcattttaaagatcctgcaccactgtgagctactgaatgttacgaaacatat

SEQ ID NO: 498157 - DNA, 201 bp, Homo sapiens
ggcaggttcctactgaacttctggcattcagagaactctgcaatcagggtgaagccatggttgtttccggaaacacaagggaaatttctgccttttattakataaacatctattgtttgaatttcacattaggagattgaatgaattttgtaaaatagcttttgggttttggtcctacttagaaagctcatccctacttaa

SEQ ID NO: 498158 - DNA, 201 bp, Homo sapiens
agaagcagagactgttaataaccatgtggtaagactttaatttcaaacactttttgccctgtattataaaaaatattcacagagcatctttgtatcatagtttaaagtttcaaatttcagaagtttttgtatttcattgtttacataatcattttaaagatcctgcaccactgtgagctactgaatgttacgaaacatatt

SEQ ID NO: 498159 - DNA, 201 bp, Homo sapiens
gaagcagagactgttaataaccatgtggtaagactttaatttcaaacactttttgccctgtattataaaaaatattcacagagcatctttgtatcatagtttaaagtttcaaatttcagaagtttttgtatttcattgtttacataatcattttaaagatcctgcaccactgtgagctactgaatgttacgaaacatattc

SEQ ID NO: 498160 - DNA, 201 bp, Homo sapiens
tgctataaaatcttgttacttcatgggacagtatcttaggggccaaaagaagagcattggaaagaagagggtaggattaattatggaaagatcaaggaagytatagcctgataaaaagttcattagtaactttacgacttgtaatgcagcttagatttggaggacgtgatagggtggagcttgaggctggattccaaaagg

SEQ ID NO: 498161 - DNA, 201 bp, Homo sapiens
tgagcagtagcaagatttattgcagagagtgaaagaacaaagcctccacagtgtggaaggggacccgagcggattgccactgctggctggggcagcctgcwtttattctcttatctggccccacccacatcctgctgattggtagagctgagtggcctgttttgacagggcgctgattggtgcttttacaatccctgagct

SEQ ID NO: 498162 - DNA, 201 bp, Homo sapiens
ggaggaaggcaccctgagggatgtcctggcctaaacgatgctatggttttctttctcaatgaagaaaacaataacacattctatcatgtttttcaccttcrtttttacttacttcttacccaaacaactatatcctccacaaaatccagtatgcatttcagggtacaagggtaacaaaaccctttctccttcttggacaca

SEQ ID NO: 498163 - DNA, 201 bp, Homo sapiens
cctttgttatttttctgtccattttctgaggtaataagtctaatttttttttagtatttctggacaattctctgcctatggtatctttgacaaacccaagygtgtactatggcacctatgatacgttaaatgcttgctatgaaatacctaccagaactgctcgccttctgatcaggaggtggtgtgatgtccaggggctta

SEQ ID NO: 498164 - DNA, 201 bp, Homo sapiens
atgtcctggcctaaacgatgctatggttttctttctcaatgaagaaaacaataacacattctatcatgtttttcaccttcgtttttacttacttcttaccyaaacaactatatcctccacaaaatccagtatgcatttcagggtacaagggtaacaaaaccctttctccttcttggacacatttgaccatggattagcttt

SEQ ID NO: 498165 - DNA, 201 bp, Homo sapiens
agaccaagtggaactctggggcctacaacagtgcaaattatcttagcctctagcatgaaattcgtatttcatatcttgttctaactctctttccctctccwgtatgcatgcggcatgcacaccaagccataccggagcatcctgactcatcaggtaagcgccatggccctgggtcacggcttctaggtactcttgctgggc

SEQ ID NO: 498166 - DNA, 201 bp, Homo sapiens
aagagaaagttgtcttagtctacgatcttaaatttctatctgaaattatttcaaacaattctaaatggaaatttaaaccagaaaaccaatatccattgaaytgacaggttttatattttaggtactaacctttgctttgttcctatttcttttatacaaatcttctctactgtatcctgttaaaagaaaaatacatttgta

SEQ ID NO: 498167 - DNA, 201 bp, Homo sapiens
tcagttcatgtgtatcactgaaaatgaattcaatcacatacggcatctcaatagacatagtcaaagagaagctagcaaaaatgaagagaaagttgtcttastctacgatcttaaatttctatctgaaattatttcaaacaattctaaatggaaatttaaaccagaaaaccaatatccattgaattgacaggttttatattt

SEQ ID NO: 498168 - DNA, 201 bp, Homo sapiens
tacgtatacttcatggaatactacacagccataaaaagaacaaaattatgttctttgcagcaacatggatgcagctggaggccattatcctaagcaaattmacacaggaacagaaaaccaaataccgcatattctcacttgtacgtgggagctaaacatcaggtattcatggtcacaaagatggaaacaaaagacattgtg

SEQ ID NO: 498169 - DNA, 201 bp, Homo sapiens
gggatagatcattataaagcctccatatgaatgaattattcatgattatttaaaattgaaatatgtctgcagttacagaataagttgcatagtatgatccratatgtatataaacaacatcatatatgtatgtgtgtgtgtatatatatatgtatatgggtgtatgtgtatatatttcaccttgtaatattttaccttgtt

SEQ ID NO: 498170 - DNA, 201 bp, Homo sapiens
tgacaattagattaaggttaaataatgtggtctgtgtgatgacaatcctatgacacatgcagcttaggatttcatcatttattctagatttaatgcatggkctactggacatatataaaatattagactttaaaataggaaggttgaaatattacataaactaaaagggcatcaagtttttattttttgctacttatattt

SEQ ID NO: 498171 - DNA, 201 bp, Homo sapiens
gaaagcagggtgtggtcctaggcaggtgcacaggttgaagaatctatggcaataccttgaaaaatgaccgcagtgataatatgtaccaacccatagagaastggtaccaggtgctgttctttgatatgtttagccacttcctgtggagtactattgttgggaaaaaactgagtgttgggagggaaactgaggcagggcttg

SEQ ID NO: 498172 - DNA, 201 bp, Homo sapiens
gatggtgggttgggtttggacaaattagtttcacagacattaaccatgtctcttattagctgtaggtggaaataatacacagatgtcagaatcaccacatrtcaaaattaatatttatatcacattaacactttctcaaaaagataggaaaagtccattttcccccaaagcttgttttactttatttatttttgagatggg

SEQ ID NO: 498173 - DNA, 201 bp, Homo sapiens
ttgcagcctcaacctcctgagttcaatagatcctcctaccttagcctccagaattgtatttgaatgggcactatacgttccctcttagcaacactcatgaytgacattttttttttttttttagatggagttttgctcttgttgaccaggctggagtgcagtggcatgatcttgactcactgcaatctctgcctcctgggt

SEQ ID NO: 498174 - DNA, 201 bp, Homo sapiens
aatcagaatcttgcctttgaaatgttaactgcatgttttattcaacctatcttcttagttttcttcaggatatttctgtcatgttgttgtcctgacaaaagaaatgcacccctaaatctaaactcattatttttaaaacgaagcactaagattcagcttgatactaactctgagtgtatggttagatttatcatatttata

SEQ ID NO: 498175 - DNA, 201 bp, Homo sapiens
aggaaagctttccttgctaacatgtcaattttgtataaagtttaattacttcatcctagtgttagactgattatctgaagcaaattggatgttttgattagtgtgtgtgtgtgtgtgtgtgtgtgtgtgtgcagggaatatcttggagtacaaaaatgaggaaagtaatctttttttcatggctatttggcagacacactc

SEQ ID NO: 498176 - DNA, 201 bp, Homo sapiens
ggaaagctttccttgctaacatgtcaattttgtataaagtttaattacttcatcctagtgttagactgattatctgaagcaaattggatgttttgattagtgtgtgtgtgtgtgtgtgtgtgtgtgtgtgcagggaatatcttggagtacaaaaatgaggaaagtaatctttttttcatggctatttggcagacacactca

SEQ ID NO: 498177 - DNA, 201 bp, Homo sapiens
cgggaaacatcaaactacatgtgccatttgaaaatgttgattataattataaaatatgttcatttagagatataatttagaaaatatagaaaagtatcaaraagaaaattaaaatctcctaaaatcccgagagcaatacgatcactattaatattttggtatgtttccctcctgtatttttaccatcccataaatagatct

SEQ ID NO: 498178 - DNA, 201 bp, Homo sapiens
ataaattttttcttgtacatctttacaaaatacatgatagattccttacaaaacacatggtaagtccacatggtaagtccctaaggcctccttagctcttycagaaattgttaaaagatcattggaaatgagctggatgcctcctctgcataatctccagctcagatacccagcactgtagcgtctgcactggaagatggt

SEQ ID NO: 498179 - DNA, 201 bp, Homo sapiens
acaggatgtacactggtaaagtataaacagttacagtaattctggaaatcattgattataggcataatgtgttgttaagaatggcactactggaccgagcrcggtggctcacgcctgtaatcccagcattttgggatgctgaggcaggcagatcacctgaggtcaggagttcaagatcagcctggttaacatggtgaaacc

SEQ ID NO: 498180 - DNA, 201 bp, Homo sapiens
ttgttaaaagatcattggaaatgagctggatgcctcctctgcataatctccagctcagatacccagcactgtagcgtctgcactggaagatggtctccacrcggcagaggcagaaagaagtgggccgcacactctggggatgggctacttgtgtttgctttggatctgactcttagaagctatgtcactcctctccagacc

SEQ ID NO: 498181 - DNA, 201 bp, Homo sapiens
ccaggttgtaatacagcctgaaaggagtgtagtcattgcatggtgtaatacagctctgtttttgcagttttaaaatcaaatttatgccttctaattggctttttttttttttttttttggcaggacctcactctgttgtgcatgctggagtacagtggcgcagtctctgctccctgaaacctcgacttccagggctcaaga

SEQ ID NO: 498182 - DNA, 201 bp, Homo sapiens
aaggtggctggtgtgagggggcactggcatggggtctggatggcattttgatgggtggggtggggtattcacgtttgcaggcaaaccctcttagggtgctrggggtcaaccaagggccgaatttgaacctggccttccaggtggttatgaagttgtatttgccaagggaggagattagaacacatttaatctaatagtttg

SEQ ID NO: 498183 - DNA, 201 bp, Homo sapiens
taagattcataaatatatccttaaattagttataattttggtgatcaaaggataacccagtgggaaaagaggaaggtataaccttataaaatagggagaayatactctaattctattttaataagcatatcaggaggattctcatctgttattatttgaaactcattgatagccatacaattttcaattggcactttcttc

SEQ ID NO: 498184 - DNA, 201 bp, Homo sapiens
cattttatacttttctgtcttaaactagctttttgtgtaactttgaagctgttttccttcactttaatgaatattgaacttttttcctttaacctacagtrttgtgcacagaagtgcactcagtctttgtagactatgactcgtcaagggaattacatgtgtgttgccaatgcatgttttagagttgactaagcttttaag

SEQ ID NO: 498185 - DNA, 201 bp, Homo sapiens
ggggtttcaccatgttggccaggctggtctcgaaatcctgagctcaaatgatctgccccctttggcctcccaaagtgcaggcattactggtgtgagccacygtgcctggcttatctttggttttcaacagtttgactctggcctatctaaatgtggtcatttttgtatttatagtgcttggagttctgctgagtttgttgg

SEQ ID NO: 498186 - DNA, 201 bp, Homo sapiens
gaccctactaggctagatatcaagaaatctgtttctagtgctaaagtagtcttttgtcctttgttatttttctgtccattttctgaggtaataagtctaatttttttttagtatttctggacaattctctgcctatggtatctttgacaaacccaagcgtgtactatggcacctatgatacgttaaatgcttgctatgaaa

SEQ ID NO: 498187 - DNA, 201 bp, Homo sapiens
ctagctttttgtgtaactttgaagctgttttccttcactttaatgaatattgaacttttttcctttaacctacagtattgtgcacagaagtgcactcagtstttgtagactatgactcgtcaagggaattacatgtgtgttgccaatgcatgttttagagttgactaagcttttaagaaagtatattagcaacttcagttt

SEQ ID NO: 498188 - DNA, 201 bp, Homo sapiens
tttgacctacaagccagtagatggcgccatgggtaagagctggctgttgccagtgctgctggctgtgtacttgatccttgtttattgggaggagctctctsctgccccaggcaaagggctgatttcctgagtacacattaatctgagctccctcagccctaggggtagggggattgggggcacaagatgggtggagccaga

SEQ ID NO: 498189 - DNA, 201 bp, Homo sapiens
accgcagtgataatatgtaccaacccatagagaactggtaccaggtgctgttctttgatatgtttagccacttcctgtggagtactattgttgggaaaaarctgagtgttgggagggaaactgaggcagggcttgcgtaacgtcctctggaatgtgtctagacttgctggctccttgcttctagccttcctaggctcctgt

SEQ ID NO: 498190 - DNA, 201 bp, Homo sapiens
tctggggaaaaactgaacagctgataataaaaatatacaactatgtttaaatggaatatgtatgtgtgtgtatacacatatatattctgcatttaggttctttttttttttttttttttttttggagacggaatctcactctgtcacccaagctggagtgcagtggtgcgatctcagctcactgcaacctccgcctccctg

SEQ ID NO: 498191 - DNA, 201 bp, Homo sapiens
ttgtgtaactttgaagctgttttccttcactttaatgaatattgaacttttttcctttaacctacagtattgtgcacagaagtgcactcagtctttgtagwctatgactcgtcaagggaattacatgtgtgttgccaatgcatgttttagagttgactaagcttttaagaaagtatattagcaacttcagtttggatttgc

SEQ ID NO: 498192 - DNA, 201 bp, Homo sapiens
cacatttcatccgttctttcccactccactcacacccctcaaccccactctccactcttgctttccctaaatctgagttattttaaaggaaatttcagtcrtcagatcattttatcccatagcattttagtatgacatttaagtactcttaaaacaacaacaaaaaaccttaacactttttatcatatctaaaaatattat

SEQ ID NO: 498193 - DNA, 201 bp, Homo sapiens
agggcttgctcaggtagccctggagggctgaactgcagctgccactcccggggcttgacgtggctcttcctgtcttcctggagaaagcttattgccctccygattctaccttccatgtcaccggactcttagtacagatctcagcggacacctaggggagggtcaaaagtcaaaccaaaagaatttgattacatataaaaa

SEQ ID NO: 498194 - DNA, 201 bp, Homo sapiens
taataaaaatatacaactatgtttaaatggaatatgtatgtgtgtgtatacacatatatattctgcatttaggttctttttttttttttttttttttttgsagacggaatctcactctgtcacccaagctggagtgcagtggtgcgatctcagctcactgcaacctccgcctccctggttcaagcgattcccctgcctcag

SEQ ID NO: 498195 - DNA, 201 bp, Homo sapiens
atgtcagtttgtagctttttcttctgctgctgaggtaagtacttcactttcaaacagaagatacaatttgcaaagattcccatcaccatcctgtaggaaamaaagtttttaaggaccctctcttaagtcaatatgacagtgaatttagaattattatacaagcaaactgtgggaaaattgggcattatcttaagaaagata

SEQ ID NO: 498196 - DNA, 201 bp, Homo sapiens
taactttgaagctgttttccttcactttaatgaatattgaacttttttcctttaacctacagtattgtgcacagaagtgcactcagtctttgtagactatractcgtcaagggaattacatgtgtgttgccaatgcatgttttagagttgactaagcttttaagaaagtatattagcaacttcagtttggatttgctcata

SEQ ID NO: 498197 - DNA, 201 bp, Homo sapiens
tcctgggcataagcagtcctcccccttcagcctcccaagtagctggactataggcatgtgcttccctgccagctcttgctctcatgctctctctctgtgtstgtgtgtgtgtgtgtgtgtgtgtgtgtgtgtgtttgtcccctgtggctttgtttttttttttttttggagacagagttttgctctttggcccagcctgga

SEQ ID NO: 498198 - DNA, 201 bp, Homo sapiens
tatggaggctgtgaaggccccgagctctgggagcccacactatttattggtgatcaaacaaagaagcaggcggtgaggacatgggggtcgaaagaaagtgrtgcatcaagtgtttgatctatagctgtgtcagtttagcattttctttgaagcatatggaacgagttcagttacagaaaatagcacatcatctaatttttt

SEQ ID NO: 498199 - DNA, 201 bp, Homo sapiens
atgacatttaagtactcttaaaacaacaacaaaaaaccttaacactttttatcatatctaaaaatattataccttaaaaatccttcatatcaaatttgtastccatgtttgtttccagaattgtcttaaaatctttgaaaatttagtttgtttaatcagaattcaaacaaagtccacacatttcatttggttgctgtgtct

SEQ ID NO: 498200 - DNA, 201 bp, Homo sapiens
ttttctgtgtgggcctactatgctcagaattgtgttgtttgagatttgacaagttgtgtatttgaaaactgctattagttaatacacgttgaatttagtgaaaaaaaaaaaaacagtgtattagacattatttgtgtgccatatcttgcttttagcatttaggactgtattttcatatcttcctgaaagttctaactaggc

SEQ ID NO: 498201 - DNA, 201 bp, Homo sapiens
ttagtgtacttaaagaaatgttgatctttattgaactttgctggatttctgttacaatttttttatccatgattttttactagaaattcatatctactaawgtgtttggatttattctgaagactttttctaatatttctcagattagaaactcaattcactaatttacagtctttcttaccttctaatatatcatttata

SEQ ID NO: 498202 - DNA, 201 bp, Homo sapiens
tttctgtgtgggcctactatgctcagaattgtgttgtttgagatttgacaagttgtgtatttgaaaactgctattagttaatacacgttgaatttagtgaaaaaaaaaaaaacagtgtattagacattatttgtgtgccatatcttgcttttagcatttaggactgtattttcatatcttcctgaaagttctaactaggct

SEQ ID NO: 498203 - DNA, 201 bp, Homo sapiens
tagcctggtcatttggtcttctatctatttataaaagaggaattatttctctttcaatgctccatccagaaaatagttacttcacatttaaaataaagtayacattctatcctttgggaattttataactctttggtattttctctccttcctgctacagggtactttcccgaaaatagtttaaacagaattttattttat

SEQ ID NO: 498204 - DNA, 201 bp, Homo sapiens
gggccacaagcgtgaggggaagtggggaggtggagtggctttcctctttacggagcactggcaggtgctggccactgtgctgggcacgttacgtgaatttyccccttaaacttatgaaggggaagggctctcagggaacccaggccttttcggccttttctattttttgagggtcttggattaataaaagacaataaacgc

SEQ ID NO: 498205 - DNA, 201 bp, Homo sapiens
gttttactttatttatttttgagatgggtcttgctctcacccacgctggagtgtagtggcatgaccatagctcattgcagcctcaacctcctgagttcaakagatcctcctaccttagcctccagaattgtatttgaatgggcactatacgttccctcttagcaacactcatgattgacattttttttttttttttagatg

SEQ ID NO: 498206 - DNA, 201 bp, Homo sapiens
aattgagatgcatcaaactgtctgggaggagcagctgaaccgaaactagctacctgacgatatgaggcaaaagacaaggaagcaggactgtgagcgcgggyagtcgggggaagataggaaccaacggccggagccaaaataggaaaaaagctagaagtagatgtttcccatggactgactttcttaaatagtggttcagtt

SEQ ID NO: 498207 - DNA, 201 bp, Homo sapiens
gcatcaaactgtctgggaggagcagctgaaccgaaactagctacctgacgatatgaggcaaaagacaaggaagcaggactgtgagcgcgggcagtcggggkaagataggaaccaacggccggagccaaaataggaaaaaagctagaagtagatgtttcccatggactgactttcttaaatagtggttcagttgctgttggt

SEQ ID NO: 498208 - DNA, 201 bp, Homo sapiens
gaagtagatgtttcccatggactgactttcttaaatagtggttcagttgctgttggtttacatgactctgtccaacttaaatccaatagcttttccacacstccacgttccaaatttgatgtgaaagctggtagtacacctaagccatcctcttcaaaatcttcagaaacttctggctgagataattccatttttcttttg

SEQ ID NO: 498209 - DNA, 201 bp, Homo sapiens
agttgctgttggtttacatgactctgtccaacttaaatccaatagcttttccacacctccacgttccaaatttgatgtgaaagctggtagtacacctaagscatcctcttcaaaatcttcagaaacttctggctgagataattccatttttcttttggaaaatggaattttcctatgttttcgtttggataaacgtaattc

SEQ ID NO: 498210 - DNA, 201 bp, Homo sapiens
tgagtggcctaagccctggaggtccccttaaagcatggtaggaaaagacccaggagatacaggaagcctcttgcactcaccatgatgaactctgctgccgyggtattgcttgtgatatgcttaggatacgaaaatagctccttgtaacctgtgtaataagatcagcatgaggtgctgcttccacacgttcacttgcttgag

SEQ ID NO: 498211 - DNA, 201 bp, Homo sapiens
aaagctgttgaaaatgtaaataagctttacaacaacaaaggcaaaggcatgtgctagagtgtcacatgaccacaaagtctctccactcctgtctgcgtgcycctttgcaatgtgacttttgaagttcctcctgccacgaggcagcagctatatttccacccttgaaactggagttggccaaaggacttgctgtggccaatg

SEQ ID NO: 498212 - DNA, 201 bp, Homo sapiens
aagcatagagaattcagtcccagtgtagctgtacttggcttcataataccatagttgtaacttttaaagaatcattttgtggcaaagtgtgtattgtgttyacaccccccttatacaagctacaaccaaacagaggacctatcagcagggcatttatgttcttcctttaaccaaagcaacataaaaataagaaagagaatg

SEQ ID NO: 498213 - DNA, 201 bp, Homo sapiens
agaaggtaataaagaagcatagagaattcagtcccagtgtagctgtacttggcttcataataccatagttgtaacttttaaagaatcattttgtggcaaastgtgtattgtgtttacaccccccttatacaagctacaaccaaacagaggacctatcagcagggcatttatgttcttcctttaaccaaagcaacataaaaa

SEQ ID NO: 498214 - DNA, 201 bp, Homo sapiens
taaaaattttttgtgacattttattcaccagaggacctatttacattttagcacttactctcctaaagtccagtttatctaattttctcttcagtcttcaktcaatgtgagacttcatcataatggttttgtagagctattaatcattatcatgcagttgggttgttgggaagttaaaactgtcataactaatcaagttac

SEQ ID NO: 498215 - DNA, 201 bp, Homo sapiens
cgaagtcaggattaaggacccttgactcatggcctaggttgtaaagacatctcccaaaagctgggagggtctgctgctgaaataagcaatacatctcctgkcttgttctaaaacacattccccactcaacttccatgcctttctatgagttcagatttccttttctgaactcctcctcttccctcctgacatttatttatt

SEQ ID NO: 498216 - DNA, 201 bp, Homo sapiens
taatgaaaaacttgaaatatatcagattgtccccatttatggaatttaagcttgtcagaaagatccagatagctatatattttatctgcatttggttgcgrttgcttttaaaaataagttttgttataagtcatttcaatttttttgtttacattccatatttcaatataaaaagttaaaagagagtacctcctgtaattt

SEQ ID NO: 498217 - DNA, 201 bp, Homo sapiens
taacggtcttggtatatagattgcataaatattgttaaattttaaatgtttactaaactaagataggacagctctaagtatagattgttttacatagatgygtttagcccagcccctgctggtaaccaaggtcctcctccaatgacgggtatgaatatgaacaacagagcaactatacctggcccaccagtgggtcctggt

SEQ ID NO: 498218 - DNA, 201 bp, Homo sapiens
ttctgagatttgacaagatgatctttgaaaaatgttcttagttaatacatgttgaattcagtgaacaaaatagcagatcatacatattttgtgtgccataycttgctgttagcatttaggactgtgtatgcatacattcctggaagtgctaactgtgcttggaaatgttgcttttggagcttgtagaaaacgtgtgtttaa

SEQ ID NO: 498219 - DNA, 201 bp, Homo sapiens
tcttggtatatagattgcataaatattgttaaattttaaatgtttactaaactaagataggacagctctaagtatagattgttttacatagatgcgtttarcccagcccctgctggtaaccaaggtcctcctccaatgacgggtatgaatatgaacaacagagcaactatacctggcccaccagtgggtcctggtcctgcc

SEQ ID NO: 498220 - DNA, 201 bp, Homo sapiens
gcattttctgtttgtgccacctaagttaaaaattgtgttttctgagatctcacaagatgtgtctttgaatactgttcttagttaatacatgttaaatttartgaaagaaaacagcacatcatacaatatttgttcgccacgtattgcttttaacatttagggctatatatgcatatctttctagaagcactacttgggctt

SEQ ID NO: 498221 - DNA, 201 bp, Homo sapiens
ttggtatatagattgcataaatattgttaaattttaaatgtttactaaactaagataggacagctctaagtatagattgttttacatagatgcgtttagcmcagcccctgctggtaaccaaggtcctcctccaatgacgggtatgaatatgaacaacagagcaactatacctggcccaccagtgggtcctggtcctgccat

SEQ ID NO: 498222 - DNA, 201 bp, Homo sapiens
atatagattgcataaatattgttaaattttaaatgtttactaaactaagataggacagctctaagtatagattgttttacatagatgcgtttagcccagcmcctgctggtaaccaaggtcctcctccaatgacgggtatgaatatgaacaacagagcaactatacctggcccaccagtgggtcctggtcctgccatgggac

SEQ ID NO: 498223 - DNA, 201 bp, Homo sapiens
tcttgcttttagcatttagggctgcatatgcatattttcctggaatcaataacttggctccaaactgttttctttctgagcttgtacagaatgtgtttttkaaagtgatcagtgtcaaaatacgttgaattcagtgaaagagaacagcccattatctaggtttttggcacaaatcttgcatttacttcttagggctactca

SEQ ID NO: 498224 - DNA, 201 bp, Homo sapiens
catgattgatgatcataatgtccccactctacagtaagttttatgctaagctggctatcagaagagggctaaatatattgggcttgattttttgaagatattttaactaaaaatcttaaacttgaaatcagtgagatggtggttttcaccaaggaagtaaatgagtggatggctcaagatcttgaaaacatcgtagcgatt

SEQ ID NO: 498225 - DNA, 201 bp, Homo sapiens
gctgcatatgcatattttcctggaatcaataacttggctccaaactgttttctttctgagcttgtacagaatgtgttttttaaagtgatcagtgtcaaaayacgttgaattcagtgaaagagaacagcccattatctaggtttttggcacaaatcttgcatttacttcttagggctactcacatgttctgtatagctttac

SEQ ID NO: 498226 - DNA, 201 bp, Homo sapiens
ttacttcacataacaatgacttccagttccatccatgttgctgcacacgacatgattttattcttttttatggctgaatagtacttgaaaaaaaaaaaaatatatatatatatatatatcacattttctttccttctttctttctttctttctctttgtctgtctgtctttctttctttctttcctttttttcttttttga

SEQ ID NO: 498227 - DNA, 201 bp, Homo sapiens
ttttagggctggatattcatatgcttctatcattctctgctattctcaaaatgtgtcttctgagcatcaacaaaacttgtgtttgaaaactgttctaagtmaaaaaaatggttaatttagtcaaagaacacagcccatcataaaatatttttgcagaaacctagttattaggttttaggtctgatatttgcattttctgtg

SEQ ID NO: 498228 - DNA, 201 bp, Homo sapiens
cttagaataatttttaagctggatctggatggcctccagctccattcatattactgcaaagtgcatgatcttgtttttattttagggctgcatagtattcyatggtatatgtgtgccacatttttttaattcagttcaccattgatgggcacctaggtcaattctgtgtgtttgctattgtgaatagtgctgcgatgaaca

SEQ ID NO: 498229 - DNA, 201 bp, Homo sapiens
aaagaacacagcccatcataaaatatttttgcagaaacctagttattaggttttaggtctgatatttgcattttctgtgagggcccactatgctcagaaaatatatatatatatatatatatatatataaaatttttttgagatggagtctcactttgtcacccaggttggggtgcagtggtgtgatcttggctcactgta

SEQ ID NO: 498230 - DNA, 201 bp, Homo sapiens
gatggcctccagctccattcatattactgcaaagtgcatgatcttgtttttattttagggctgcatagtattccatggtatatgtgtgccacatttttttwattcagttcaccattgatgggcacctaggtcaattctgtgtgtttgctattgtgaatagtgctgcgatgaacatatgcatgcatgtgtcttcatggtaga

SEQ ID NO: 498231 - DNA, 201 bp, Homo sapiens
tatttttgcagaaacctagttattaggttttaggtctgatatttgcattttctgtgagggcccactatgctcagaaaatatatatatatatatatatatatatataaaatttttttgagatggagtctcactttgtcacccaggttggggtgcagtggtgtgatcttggctcactgtaagctccgcctcccgggttcatgc

SEQ ID NO: 498232 - DNA, 201 bp, Homo sapiens
tttttgcagaaacctagttattaggttttaggtctgatatttgcattttctgtgagggcccactatgctcagaaaatatatatatatatatatatatatatataaaatttttttgagatggagtctcactttgtcacccaggttggggtgcagtggtgtgatcttggctcactgtaagctccgcctcccgggttcatgcca

SEQ ID NO: 498233 - DNA, 201 bp, Homo sapiens
gggactacaggtgcccaccaccacgcctggctaattttttgtattttttcgtagagatggggtttcaccatgttagccaggatggtcttgatctcctgacytcatgatctgcccgcctcggcctcccaaagtgctgggattataggagtgagccactgtgcctggccgaatattttttttttgaaatttgacaagatgtgt

SEQ ID NO: 498234 - DNA, 201 bp, Homo sapiens
aagaagggaagaacattttctggtggtctggaggcatgcctgcctttcctaagacagaaggtgcgagactgtggagtcactaggaaatggactgcggttarggcatctgactggggaccaagaccacccataaccctccagcttcctgcaagcctcttggcacagaggatcaggcctcctaattggccagcaccagaagcc

SEQ ID NO: 498235 - DNA, 201 bp, Homo sapiens
aaggctgctcaggaaaataataggatgaaaataggtttttttttaaaagaattaaaaaaaaaacccactggttttctttttaaaaatcaattcaataattrcacccaatctcatttaatactgagaatttaaaataatgatcactatactagttgaagaaaaagactcaaataaaaaatcacttgagttagatatgcaaaa

SEQ ID NO: 498236 - DNA, 201 bp, Homo sapiens
taagataaaagtagtgttaaaataacagctcttaagaaatcaaagatgcactaaccttttgtttcagttcatgtgtatcactgaaaatgaattcaatcacrtacggcatctcaatagacatagtcaaagagaagctagcaaaaatgaagagaaagttgtcttagtctacgatcttaaatttctatctgaaattatttcaaa

SEQ ID NO: 498237 - DNA, 201 bp, Homo sapiens
attttggcttatttgtattctctatgcttatctagttcttcatgatgaacttgcactacagatataacattttttgagtgattaagcagaataaaaatatscttattgatcatatctgtaacttttattcttttcattttatacacataatgtatctaaatgcatgtcagtaaaattaactttatgcctaaaagattattt

SEQ ID NO: 498238 - DNA, 201 bp, Homo sapiens
gatataacattttttgagtgattaagcagaataaaaatatgcttattgatcatatctgtaacttttattcttttcattttatacacataatgtatctaaaygcatgtcagtaaaattaactttatgcctaaaagattattttacatgtttttctccccaggcataaattcctccacagccctccaccactccccctccact

SEQ ID NO: 498239 - DNA, 201 bp, Homo sapiens
ttactttgaacctattggtgttgttacatgtgagatgggtctcttgaagacagcagacagatgggttttgtttttttaatccaatttccactctgtgacctttctttctttctttctttctttctttcttttttttttcagaatctctctctgtcatcaggctagagtgcagtggcatgatattggctcacagcaacctct

SEQ ID NO: 498240 - DNA, 201 bp, Homo sapiens
tactttgaacctattggtgttgttacatgtgagatgggtctcttgaagacagcagacagatgggttttgtttttttaatccaatttccactctgtgacctttctttctttctttctttctttctttcttttttttttcagaatctctctctgtcatcaggctagagtgcagtggcatgatattggctcacagcaacctctg

SEQ ID NO: 498241 - DNA, 201 bp, Homo sapiens
actttgaacctattggtgttgttacatgtgagatgggtctcttgaagacagcagacagatgggttttgtttttttaatccaatttccactctgtgacctttctttctttctttctttctttctttcttttttttttcagaatctctctctgtcatcaggctagagtgcagtggcatgatattggctcacagcaacctctga

SEQ ID NO: 498242 - DNA, 201 bp, Homo sapiens
ttccaggctgttttctttttctctttctctctagggcatgccagtaattcgtaggtttgatcactttacataatctcatatttctgactttcttcactttwaaaaaatcttttttctttatctttgtctgactggattagttcaaaagaccagtcttcaagctctgaaattatgttttctactttgtccagtctattgata

SEQ ID NO: 498243 - DNA, 201 bp, Homo sapiens
tctttctctctagggcatgccagtaattcgtaggtttgatcactttacataatctcatatttctgactttcttcacttttaaaaaatcttttttctttatytttgtctgactggattagttcaaaagaccagtcttcaagctctgaaattatgttttctactttgtccagtctattgataaagctttcagttgtattttga

SEQ ID NO: 498244 - DNA, 201 bp, Homo sapiens
ccctaggggtagggggattgggggcacaagatgggtggagccagatagggaagattcccccagtgttgtcctgctcccagtccaggtttgggacaatgccrgcagcgtttccctgtgtctttcccccacaaagtctccaagtctctcctcaaatgagctccaaggcttgggagaaacaatctcttcctctgcccgggttgc

SEQ ID NO: 498245 - DNA, 201 bp, Homo sapiens
taaggtagtttgtgataatctttctcaaatttcgaaaaacctctataaatatcacagtttctagttacataaacattttaaaaatcaactgtttttaaagratatggctacgaatgcaccataattgattaaccctagaggttatttctaaattttcattattgtaaacaacgctgtgatgactatcctcatgtacacatc

SEQ ID NO: 498246 - DNA, 201 bp, Homo sapiens
tgaggcatgctaaaagcctgtaatctgccatcttggaaaaaacatccttgcatccttaagagaaatggcacttggtgttgatacatggtgtttctacattrctgaattcactttgaaaatatatgtatattttaaaatctacatttatatgtgagactggtgtaaaaatatcttttattctactgtatttgtgcaattttg

SEQ ID NO: 498247 - DNA, 201 bp, Homo sapiens
aaaagacataattgttgctttcttatagatttagtaaaaacctcatcgtgtccttttgtggagcgatggtgagagatatttttactgtaaatgtaacttgygtatttttcacctgtgaggcagaggttgcaatgagccaagattgtgccactgcactccagcctgcgtgacacagcaagaccctgtctcaaaaaaaagaaa

SEQ ID NO: 498248 - DNA, 201 bp, Homo sapiens
agcaagaccctgtctcaaaaaaaagaaagaaaatcaacttaaaatgcactccttgaatatttctgagtgtatttttataccacgtatgttccttgaactarcttcttttcttttctaggaagaaccggaactatgatttgtgccttccttattgcctccgaaatatttttaactgcagaggtatgaaagatgttctacaaa

SEQ ID NO: 498249 - DNA, 201 bp, Homo sapiens
tacaacaatgcagttgcacaagttgtaccattggggtatcttcttttgtctgctcttttcattgcaattatgcttaatcaagaagggaagaacattttctrgtggtctggaggcatgcctgcctttcctaagacagaaggtgcgagactgtggagtcactaggaaatggactgcggttagggcatctgactggggaccaag

SEQ ID NO: 498250 - DNA, 201 bp, Homo sapiens
actagagtgaggtcaatgaggtgcaacatttaagggaatgctaaaaattgtaataattaaaataaataattttaacacaatattttaataaaaattaatgyaaaaaaatctatgatgtatacaatatcaacattttaaataaagacaagacctgatggggcaggattaaggtgcggggtgtaaagccatgttacacagaaa

SEQ ID NO: 498251 - DNA, 201 bp, Homo sapiens
ctgtgacaaacccacagccaacattatatggaatgggcaaaagctggaagcagtccccttgagaactacaacaaaataggattcctattctcaccattccyattcagtgtcatactagaagtcctagccagggcaatcaggcaagagaaagaaatataaggcatccaagtagaaaaagaagaagtcaaactatttctcttt

SEQ ID NO: 498252 - DNA, 201 bp, Homo sapiens
tggttatgaagttgtatttgccaagggaggagattagaacacatttaatctaatagtttgctagtttgatttataacctttaaacacttgttataaactayaaagttataaactttaaatacttgtattgtattcttgtcccaggccctgccattgttgggaacagggctgggcccaacagtcacattgtgggtcttctgg

SEQ ID NO: 498253 - DNA, 201 bp, Homo sapiens
gtaaccattatgtttacagatcctaagtggtgccaaagggattggtggaaatggaacatgtcccatgagcccacagctgggtcttttcaaagtctatgackttgctctgagctgccttgaggatgtgtgtatgggtcagagtgggcccaggggtggaggtcagctatatccaaactgctcttctcacccaacgccccgtct

SEQ ID NO: 498254 - DNA, 201 bp, Homo sapiens
atgactctgtccaacttaaatccaatagcttttccacacctccacgttccaaatttgatgtgaaagctggtagtacacctaagccatcctcttcaaaatcwtcagaaacttctggctgagataattccatttttcttttggaaaatggaattttcctatgttttcgtttggataaacgtaattctggccactcagaggatg

SEQ ID NO: 498255 - DNA, 201 bp, Homo sapiens
gcctcagcctcatgagtagctaagactacaggtacaccaccattcctgggtaatgtttttcagtttacgtagaaatgggtctctctatgttgccaaggctrgtcttgaactcctggcctcaagtgatcctcctgccttggcctcccaaactgctgggatacaggcatgagccaccaagcctggcccagtcttttatttgta

SEQ ID NO: 498256 - DNA, 201 bp, Homo sapiens
atataacattttttgagtgattaagcagaataaaaatatgcttattgatcatatctgtaacttttattcttttcattttatacacataatgtatctaaatrcatgtcagtaaaattaactttatgcctaaaagattattttacatgtttttctccccaggcataaattcctccacagccctccaccactccccctccactg

SEQ ID NO: 498257 - DNA, 201 bp, Homo sapiens
ggacacaggatctgtgtgaactcctcccggctgagagtgggtaagcttactggtttagaagaattgggagctcctgacccaaggggagtttgcattctctygcaggcgtttccccatatccccacagccttccactgggcccactggaaaggctgagcagggcaggagaccaagaggagcacctctcagtggagcaggtgt

SEQ ID NO: 498258 - DNA, 201 bp, Homo sapiens
tgacccaaggggagtttgcattctctcgcaggcgtttccccatatccccacagccttccactgggcccactggaaaggctgagcagggcaggagaccaagrggagcacctctcagtggagcaggtgtgtgggaggtgctggggccacttccctggatcctttccccacatgaagcaaaagcctccagctgctgggggaagg

SEQ ID NO: 498259 - DNA, 201 bp, Homo sapiens
taaaaaccaacatctccacagtccccccagcccccggtaaccaccattctactctctgcttctatgaatatgattttttaaaattccacaaataagtgagwcatgcagtatttttctttctatgcctggcttatttcacttagcataatattctccaggttcatccatattatcacgtgacaggatatcctctaaggctga

SEQ ID NO: 498260 - DNA, 201 bp, Homo sapiens
ctccacagtccccccagcccccggtaaccaccattctactctctgcttctatgaatatgattttttaaaattccacaaataagtgagtcatgcagtatttktctttctatgcctggcttatttcacttagcataatattctccaggttcatccatattatcacgtgacaggatatcctctaaggctgaattgtatgccttt

SEQ ID NO: 498261 - DNA, 201 bp, Homo sapiens
tactctctgcttctatgaatatgattttttaaaattccacaaataagtgagtcatgcagtatttttctttctatgcctggcttatttcacttagcataatrttctccaggttcatccatattatcacgtgacaggatatcctctaaggctgaattgtatgcctttatttatagatagcacatattctttatccattcatcc

SEQ ID NO: 498262 - DNA, 201 bp, Homo sapiens
tttttaaaattccacaaataagtgagtcatgcagtatttttctttctatgcctggcttatttcacttagcataatattctccaggttcatccatattatcwcgtgacaggatatcctctaaggctgaattgtatgcctttatttatagatagcacatattctttatccattcatccactgatgacatttagattgactcca

SEQ ID NO: 498263 - DNA, 201 bp, Homo sapiens
ttttaaaattccacaaataagtgagtcatgcagtatttttctttctatgcctggcttatttcacttagcataatattctccaggttcatccatattatcaygtgacaggatatcctctaaggctgaattgtatgcctttatttatagatagcacatattctttatccattcatccactgatgacatttagattgactccat

SEQ ID NO: 498264 - DNA, 201 bp, Homo sapiens
ctttgatttcaatgtaaaaaagatccaagtctttcacaaacccttacttgggcaattcaacccttgcaaaacatcacaaagaactgtttttggatgactcmtggttgtgtgtgtgtgtgtgtgtgtgtgtgtgtgtgtgtgtgtgtattttctgtgtgttgtgggggaggtgtattttaaaagagaaaataaaaggagaaa

SEQ ID NO: 498265 - DNA, 201 bp, Homo sapiens
cttgggcaattcaacccttgcaaaacatcacaaagaactgtttttggatgactcatggttgtgtgtgtgtgtgtgtgtgtgtgtgtgtgtgtgtgtgtgtmttttctgtgtgttgtgggggaggtgtattttaaaagagaaaataaaaggagaaataaacttttcaaaaccccttctgtataccagacagtattgcacttt

SEQ ID NO: 498266 - DNA, 201 bp, Homo sapiens
actcatggttgtgtgtgtgtgtgtgtgtgtgtgtgtgtgtgtgtgtgtgtattttctgtgtgttgtgggggaggtgtattttaaaagagaaaataaaaggrgaaataaacttttcaaaaccccttctgtataccagacagtattgcacttttacgtatctcatttaatacccataacacctatatgaaatatacactgtta

SEQ ID NO: 498267 - DNA, 201 bp, Homo sapiens
ctcatggttgtgtgtgtgtgtgtgtgtgtgtgtgtgtgtgtgtgtgtgtattttctgtgtgttgtgggggaggtgtattttaaaagagaaaataaaaggaraaataaacttttcaaaaccccttctgtataccagacagtattgcacttttacgtatctcatttaatacccataacacctatatgaaatatacactgttac

SEQ ID NO: 498268 - DNA, 201 bp, Homo sapiens
tgtgtgtgtgtgtgtgtgtattttctgtgtgttgtgggggaggtgtattttaaaagagaaaataaaaggagaaataaacttttcaaaaccccttctgtatmccagacagtattgcacttttacgtatctcatttaatacccataacacctatatgaaatatacactgttactctgttttttcttttagaaacattttgtta

SEQ ID NO: 498269 - DNA, 201 bp, Homo sapiens
agctgactttgaaagccgagagcgggcacgatgcatcttcttgccttacctctccaactatgtgcttcccattgatgaaggcttcgaagccacacacagcrgccttgtcatccaaaggaaagatatattttgcctcaatgggcacgtgacttttatttgtgtatgtctgaaaaacaatgacctgaagaagaaaaaaaatcc

SEQ ID NO: 498270 - DNA, 201 bp, Homo sapiens
ttaaatcattccttacatgaagagtgacttcaggctttaatgaagaaaacaacatcaatgtttactaaaacccaggcaaaaactaaaaactgagtctaagrtgaatggaaacttaaatgaagtgatcatcgaaatatacttatctgataagaacttgaaccagaaaaggccaactaaagagaagtctctttcagttgggat

SEQ ID NO: 498271 - DNA, 201 bp, Homo sapiens
gtttgcattctctcgcaggcgtttccccatatccccacagccttccactgggcccactggaaaggctgagcagggcaggagaccaagaggagcacctctcmgtggagcaggtgtgtgggaggtgctggggccacttccctggatcctttccccacatgaagcaaaagcctccagctgctgggggaagggcagcaaactctc

SEQ ID NO: 498272 - DNA, 201 bp, Homo sapiens
ctgcactagtacaaagcaggggttgctacaactggaggaaaggcaggaaaccatctcccaaacaactcttaacagacacaaggcagaatttggctgccacyaagataggacaatgaacagaagtgctaattagttcccatcctaaggtccaggactgcaggccctgcctaagactgaggctgaaccagaagaatgcccctg

SEQ ID NO: 498273 - DNA, 201 bp, Homo sapiens
gatagcacatattctttatccattcatccactgatgacatttagattgactccatagcttgggtattatgaataatgctgcagtgaacacgggagtgcagwtttcatttcctttggatatatacccagaagtggactctccaaatcatatggtagttctatttttggttttttgaggaatctcagtgctgttttccacaat

SEQ ID NO: 498274 - DNA, 201 bp, Homo sapiens
caaaacaaaacaaaacaaaacaaagatattcatagaccctaagctaaaagtgataggtgaatttactgaagtgcagccctaatcatgccatttccatgctyaaaatccatactatgtccccactgccaatggcaataaactaaacgtttcaacctggcactcaagagccacagtttgacttttccaaccttctcttccact

SEQ ID NO: 498275 - DNA, 201 bp, Homo sapiens
tacccagaagtggactctccaaatcatatggtagttctatttttggttttttgaggaatctcagtgctgttttccacaataactactaatttacattcacrccaacagtgtacaagggggatcccttttctcttcatcctcaccaactcttctcttgtctttttgttagtgaccatcctaacaggtgtgaggatatctctt

SEQ ID NO: 498276 - DNA, 201 bp, Homo sapiens
tggcccattttccagagaagtaacttgttctcttgctattgtgttgtttgatttcctttttaaaaataatctattaacctattgttgaatgtatgctttgkagatattttctcccattctgtaggttgtctcctcactctataaatgtttcctttgctgtgcaaaagtgttttagtttgataaagtatcatttgtctgctt

SEQ ID NO: 498277 - DNA, 201 bp, Homo sapiens
aaaaataatctattaacctattgttgaatgtatgctttgtagatattttctcccattctgtaggttgtctcctcactctataaatgtttcctttgctgtgyaaaagtgttttagtttgataaagtatcatttgtctgctttttcttttgttgcctatgcttttcagtcatatccaaaaataccttggcccagaccaatgtc

SEQ ID NO: 498278 - DNA, 201 bp, Homo sapiens
agattaagtgagccaacagagatgctatttcaaaaattatactggaatttttgtagtgtaatgatacaaagaagttgacattggtggggttaaaatggggraaaaagccattgtaaatccaaccaatttaagttcaattaggttttctctcattcaggtttaggctttaaataatcatctaagcatatttcacaaattttg

SEQ ID NO: 498279 - DNA, 201 bp, Homo sapiens
taagaatatagaggttgaatcctttgaaattgccagtttttaaccatcttttgctttaaaaatggccatttcacattgcccaacctaaaatgttattattmaagaagttagcatcagttttctattaactaatgctaattccttgcttgaaggaaaacattcatttcaaatttgacttttttcttttttgctgagaggggg

SEQ ID NO: 498280 - DNA, 201 bp, Homo sapiens
gtaatttttataagaaccttagccttagggggtaagtttccaacacttacagtaaaaacgtcctgaaacagaaacatatgacttagcttccaacttgaaarcatacccattatatgccagctaactccacgtacttcttaagcaacttgaatgacaacctgccaaattcttcctcagaaaacagtaataaaacctaaaaga

SEQ ID NO: 498281 - DNA, 201 bp, Homo sapiens
ttgcccaacctaaaatgttattattcaagaagttagcatcagttttctattaactaatgctaattccttgcttgaaggaaaacattcatttcaaatttgayttttttcttttttgctgagagggggtttacattattctgtgttcacataatattttgatgattttgttaaaggttgtttagagggctaatattcagctgg

SEQ ID NO: 498282 - DNA, 201 bp, Homo sapiens
atttttatttttagcctttgggtgtttgtgtgatggcatcttatggtggtgatcatttgcatttctataattacgaataagattgaggaagttttcttaakattattaagtatttggatatcctttatgtaaagtaactttttaattttcttaaccatttttctcctggattattcatcttttttctcctgattgtaggag

SEQ ID NO: 498283 - DNA, 201 bp, Homo sapiens
atttttagcctttgggtgtttgtgtgatggcatcttatggtggtgatcatttgcatttctataattacgaataagattgaggaagttttcttaagattatyaagtatttggatatcctttatgtaaagtaactttttaattttcttaaccatttttctcctggattattcatcttttttctcctgattgtaggagttcttt

SEQ ID NO: 498284 - DNA, 201 bp, Homo sapiens
catggggccaggatgctggtgtccacacagacagcgtagtatttttagccttctgagtttagttctacatttcactgatttctggtagacatcaatagaargaagttctgcacctggaatgggaaagagggaactgaggcaataaactgtgatttctaatgacaaatgaatatcatggtgttagtgaaaacaaaattaaat

SEQ ID NO: 498285 - DNA, 201 bp, Homo sapiens
ttttagccttctgagtttagttctacatttcactgatttctggtagacatcaatagaaggaagttctgcacctggaatgggaaagagggaactgaggcaakaaactgtgatttctaatgacaaatgaatatcatggtgttagtgaaaacaaaattaaatgaaaagaaaacaaacagcatatgagatgagcaatcaaagata

SEQ ID NO: 498286 - DNA, 201 bp, Homo sapiens
ccccaaagcttgttttactttatttatttttgagatgggtcttgctctcacccacgctggagtgtagtggcatgaccatagctcattgcagcctcaacctyctgagttcaatagatcctcctaccttagcctccagaattgtatttgaatgggcactatacgttccctcttagcaacactcatgattgacatttttttttt

SEQ ID NO: 498287 - DNA, 201 bp, Homo sapiens
ttctagaagacagagatctactggggtagtccgggactgactgcaaagagcctcaggtaaagcagaggccattggcagcctaaggttggcagtcaaagagsctgcggaaggttgaaaatgaaaaggagagtaagcagagggatgataagacccaaaacctctgatgggatcagggtctgtaggaagagagaaatgaagctg

SEQ ID NO: 498288 - DNA, 201 bp, Homo sapiens
tttatgtaaagtaactttttaattttcttaaccatttttctcctggattattcatcttttttctcctgattgtaggagttctttatgtattctgatttcarttttgttattggtcataaatgtatttcaagaaagcttttctgctctgtgatttgccttttctctctctcaggagtatcttctggttaacagaagttctta

SEQ ID NO: 498289 - DNA, 201 bp, Homo sapiens
tgatttgccttttctctctctcaggagtatcttctggttaacagaagttcttagttgtcttaccatcataggtatcatgctttccctttataaagtttgtrtttttgtgtcctgattaagacaattctccttgagtttaaaggacattttactactatattttcttctagaaggttcattccttttaaaattgatttatgt

SEQ ID NO: 498290 - DNA, 201 bp, Homo sapiens
ttttctctctctcaggagtatcttctggttaacagaagttcttagttgtcttaccatcataggtatcatgctttccctttataaagtttgtatttttgtgwcctgattaagacaattctccttgagtttaaaggacattttactactatattttcttctagaaggttcattccttttaaaattgatttatgtgtgcgatgt

SEQ ID NO: 498291 - DNA, 201 bp, Homo sapiens
tttctctctctcaggagtatcttctggttaacagaagttcttagttgtcttaccatcataggtatcatgctttccctttataaagtttgtatttttgtgtyctgattaagacaattctccttgagtttaaaggacattttactactatattttcttctagaaggttcattccttttaaaattgatttatgtgtgcgatgtg

SEQ ID NO: 498292 - DNA, 201 bp, Homo sapiens
gcaggtgccaccatgcccaggtgattttttttatttttttgtacagattgggtttcgctatgttgcccaggttggtctcaaactcctgggctcaagtgatmtgccagcctcagcctctgcctcccaaagtgctaggactgcaggcctgagccaccatgcccagcctaaactcacttattagttctactaatttatctatag

SEQ ID NO: 498293 - DNA, 201 bp, Homo sapiens
attggccatgtgatactgtgtggctttcattcaacactgggaatctcagtttcctcaattatgagaataacctgaggtcctatgggtttgtggtggaaatyaacaaagcttacaaacttaacatgcttactagtccctagtgcacagtaggcactcaataaatgttcgctgaatgtcatgatactaaatcatgatgaacat

SEQ ID NO: 498294 - DNA, 201 bp, Homo sapiens
ttttttttcagacagggtctcgctttgttgcccaggctggagtgcagtggcacgatcacaactcactgcagcctcaacctcctgggctcaagcaatccccmcgacctcagcttcctgagtagtcacacactaccacactcgggtaattttaaatttttttgtggagacagggtcttgctatgtggtcaaggctggtcttga

SEQ ID NO: 498295 - DNA, 201 bp, Homo sapiens
ttttttcagacagggtctcgctttgttgcccaggctggagtgcagtggcacgatcacaactcactgcagcctcaacctcctgggctcaagcaatccccccracctcagcttcctgagtagtcacacactaccacactcgggtaattttaaatttttttgtggagacagggtcttgctatgtggtcaaggctggtcttgaac

SEQ ID NO: 498296 - DNA, 201 bp, Homo sapiens
atcccagggctcaggtgatcctcccacctcagcctcctaagtagctgggaccacaggtacacgccaccatgcctggctaatttttgtagagatggggtttyaccatgttggccaggctggtctcgaaatcctgagctcaaatgatctgccccctttggcctcccaaagtgcaggcattactggtgtgagccactgtgcctg

SEQ ID NO: 498297 - DNA, 201 bp, Homo sapiens
tgaaatacctaccagaactgctcgccttctgatcaggaggtggtgtgatgtccaggggcttataaggatcataattctttacatccaagagtctcttttcyctgatagatttccatataaaatctgggtttgcaatatgaacgtggttcttttggatagaattcagttggtactgactcagaacatcagcattatctaaga

SEQ ID NO: 498298 - DNA, 201 bp, Homo sapiens
aaaactctggcattttagaggtgatggtggggcagtgagacgctgctgctctatctatccatgaatattggctagttgtttaataatgtgtattttatttwaaaaaaaaatctccaggctgagcatggtggctcatgcctgtaatcccaacactttgggaggccaaggtgggcagattgcttgagctcacaagttcgagac

SEQ ID NO: 498299 - DNA, 201 bp, Homo sapiens
gaattattatacaagcaaactgtgggaaaattgggcattatcttaagaaagatattgcaatcatgttatcaatagaacattgcaaaaattgaataatatcstagcttgcaatatgtgtgttggtttaagaatcgtttctagcttttatggttgatattacaccaccaaaaatccctttgtacaggctcatgatatacatct

SEQ ID NO: 498300 - DNA, 201 bp, Homo sapiens
atattggtcttcccatagaataacaaactctgcgtcttcttacctgtgtgcagtgaggaatgaatccatagacaaggagtcgatcattgagaaacaaggayggcacctgggctggggcctgcagggcctcgggcacatctggattgagttgctgccatttgacggagacagagtggcaactcggagaacatagcctggtca

SEQ ID NO: 498301 - DNA, 201 bp, Homo sapiens
gaagagtgacttcaggctttaatgaagaaaacaacatcaatgtttactaaaacccaggcaaaaactaaaaactgagtctaaggtgaatggaaacttaaatraagtgatcatcgaaatatacttatctgataagaacttgaaccagaaaaggccaactaaagagaagtctctttcagttgggatcaaaatatttcagaatca

SEQ ID NO: 498302 - DNA, 201 bp, Homo sapiens
tgtttaataatgtgtattttatttaaaaaaaaaatctccaggctgagcatggtggctcatgcctgtaatcccaacactttgggaggccaaggtgggcagaytgcttgagctcacaagttcgagaccacactggacaacatggcaaaaccccatctctaccaaaaaatacaaaaattagtcaggcatggtggcaggtgcctg

SEQ ID NO: 498303 - DNA, 201 bp, Homo sapiens
ccagcctgggcaatggagccagaccttgtctcaaaacaaacaaacaaacaacagctcctgtcctagggctagcatttgaccttcaaaccacttgctgggtyaaggatgctcaggacttcctcatctatccccttgttgtcatgataggaaacaggtccagaggttgaacaactgcctctggcagaggctggctaggagctc

SEQ ID NO: 498304 - DNA, 201 bp, Homo sapiens
gcatttgaccttcaaaccacttgctgggtcaaggatgctcaggacttcctcatctatccccttgttgtcatgataggaaacaggtccagaggttgaacaaytgcctctggcagaggctggctaggagctcatcagagctcttttctcctcctggacacgcagcttaacagtacatttctcaggccttcgtacatggatggg

SEQ ID NO: 498305 - DNA, 201 bp, Homo sapiens
ataattttaaagacatatattgaagatggtggagccacagtatggaaggagtcaaggtctctaaatgaccacataagtggaactttcttcctgaccaatayttgactgtgatacggacaaaaaagtaatctttgattaccatgttaagcttctgagattttttttacagcacttggtgctatttatgctaataaatttgct

SEQ ID NO: 498306 - DNA, 201 bp, Homo sapiens
tgaagatggtggagccacagtatggaaggagtcaaggtctctaaatgaccacataagtggaactttcttcctgaccaatacttgactgtgatacggacaaraaagtaatctttgattaccatgttaagcttctgagattttttttacagcacttggtgctatttatgctaataaatttgctcagataataccctaattagt

SEQ ID NO: 498307 - DNA, 201 bp, Homo sapiens
tgcatctaaaataaaactttaacaaattaaatgaaaaaagaagttatgtgataaatgtttccatttatttcagttaattaaggcatttctaacatttttaytactgtaaaataaagttcttcatacactagtgacatagtattgtttggaacctcataaatgctatgaacactacatatctggtggcacttataaaaagtg

SEQ ID NO: 498308 - DNA, 201 bp, Homo sapiens
cacttataaaaagtgtggaaagaggctcatgggtagagattttttaatttttattttagtagagacggggtttcaccgtgtcagccagaatggtctcaatytcctgacctcatgatccacccgcctcggcctcccaaaatgctgggattacaggcgtgagccaccatacccggccgagatttttttaaatggtactttttt

SEQ ID NO: 498309 - DNA, 201 bp, Homo sapiens
acttcacagtgggaaatttatgtggattacaatccattagttctagaatctaggaaattaagatctcaccccatcatctgttcagagatgttcattttcaygtgaggaatagtaacattccccagcatgaggttctggtctaatgtttgtagagaaacaccagccagcatcaagcacactgttttgttcagctgtctgttt

SEQ ID NO: 498310 - DNA, 201 bp, Homo sapiens
agcacccaaggttgttgttagaaactttccagaagtaattctggaaatctgaggtttcaggccttggtgaagaactccttcactcttcctgcaggtgaagsaggatgtgggttttcttgggtttgcctagaggccagacacatgcatctctcagtgcatcttcccaacctgttagaattcccctttctggcctggaagaca

SEQ ID NO: 498311 - DNA, 201 bp, Homo sapiens
gcatgaggttctggtctaatgtttgtagagaaacaccagccagcatcaagcacactgttttgttcagctgtctgttttgttttgtagcaagagttcctcartgaaggaagcagtatgatttataccccagtgtacaaccccttccttcactacagactgatgatagacggttccttgaccagctgctttgaggagccccgt

SEQ ID NO: 498312 - DNA, 201 bp, Homo sapiens
gagcagggtacaataagctaagatatcggagtgttttccagaagtctgtgttccccatggtaggtgtggcagactggaggaaatgaagtgaaagattatgwtctccttgttggatgcagtcaccatttgctgtcatcattgacacatctaaggacagtgtagggatatggtgacaccgaaaatattttctttccctaattt

SEQ ID NO: 498313 - DNA, 201 bp, Homo sapiens
gtcatcatcttttgcaattgctctgctgtttctccatttttcagtgctgcctttactagaaggagaatcccctctgccttgctcacctttcaacagatcayatatgcttattacaatgaaatctcaatacagaaattaaggagcatgcacaaaactatataaataattgttagacatgtcaagactatccattttctactg

SEQ ID NO: 498314 - DNA, 201 bp, Homo sapiens
gcctgagaggctgaggcagctatgagaacagatttgcactactgctctccagcctgtgtgagagggcaatattctgtctcaaaaaaaaaaaaaaaaaaaagaaagaaagaaaataatgccaccagagacattcaagatcatttcagtacaaggctgtctatttctagacatggaagctgagacctggagagaatatcagca

SEQ ID NO: 498315 - DNA, 201 bp, Homo sapiens
ctgtgtgagagggcaatattctgtctcaaaaaaaaaaaaaaaaaaaagaaagaaagaaaataatgccaccagagacattcaagatcatttcagtacaaggctgtctatttctagacatggaagctgagacctggagagaatatcagcaatcaatatattgaaagaccttctctcttagttcttagttcttagaattgcgga

SEQ ID NO: 498316 - DNA, 201 bp, Homo sapiens
ttaaatctatgtgaaggtcactttggaatttaaaaaatttcatgattttggccgggcatggtggctcatgcctgtaatcctaacacttcgggaggccgagkcgggcagattgcctgggctcaggagttcaagaccaccctgggcaacatggtgaaactgcatctctactaaaaatacaaaaaattacctgggcatggtggt

SEQ ID NO: 498317 - DNA, 201 bp, Homo sapiens
tgtgtgagagggcaatattctgtctcaaaaaaaaaaaaaaaaaaaagaaagaaagaaaataatgccaccagagacattcaagatcatttcagtacaaggctgtctatttctagacatggaagctgagacctggagagaatatcagcaatcaatatattgaaagaccttctctcttagttcttagttcttagaattgcggaa

SEQ ID NO: 498318 - DNA, 201 bp, Homo sapiens
ccgaggcgggcagattgcctgggctcaggagttcaagaccaccctgggcaacatggtgaaactgcatctctactaaaaatacaaaaaattacctgggcatsgtggtgcatgcctttaatcccagctactcgggaggctgaggcatgagaatagcttgaacccgagaggtggaggttgcagtgagctgagattgcaccactg

SEQ ID NO: 498319 - DNA, 201 bp, Homo sapiens
gtgtgagagggcaatattctgtctcaaaaaaaaaaaaaaaaaaaagaaagaaagaaaataatgccaccagagacattcaagatcatttcagtacaaggctgtctatttctagacatggaagctgagacctggagagaatatcagcaatcaatatattgaaagaccttctctcttagttcttagttcttagaattgcggaat

SEQ ID NO: 498320 - DNA, 201 bp, Homo sapiens
gttcaagaccaccctgggcaacatggtgaaactgcatctctactaaaaatacaaaaaattacctgggcatggtggtgcatgcctttaatcccagctactcrggaggctgaggcatgagaatagcttgaacccgagaggtggaggttgcagtgagctgagattgcaccactgcactccagcctcggcgacagcaagactctg

SEQ ID NO: 498321 - DNA, 201 bp, Homo sapiens
tgtgagagggcaatattctgtctcaaaaaaaaaaaaaaaaaaaagaaagaaagaaaataatgccaccagagacattcaagatcatttcagtacaaggctgtctatttctagacatggaagctgagacctggagagaatatcagcaatcaatatattgaaagaccttctctcttagttcttagttcttagaattgcggaatt

SEQ ID NO: 498322 - DNA, 201 bp, Homo sapiens
aaactcctgggcataagcagtcctcccccttcagcctcccaagtagctggactataggcatgtgcttccctgccagctcttgctctcatgctctctctctstgtgtgtgtgtgtgtgtgtgtgtgtgtgtgtgtgtgtttgtcccctgtggctttgtttttttttttttttggagacagagttttgctctttggcccagcc

SEQ ID NO: 498323 - DNA, 201 bp, Homo sapiens
actgtgtccagccaaaagctttcaagtaattaaatgaacatataattatactagaacatgaacaatatgtatgtaaaacaaattttgagggatgctatattactactattgtttcaatctaaatgtaaagagtgttccttaaaaagttgcatgtataaaatccagttttatatgcatgtcaagtccttgatatttttgaaa

SEQ ID NO: 498324 - DNA, 201 bp, Homo sapiens
ctgtgtccagccaaaagctttcaagtaattaaatgaacatataattatactagaacatgaacaatatgtatgtaaaacaaattttgagggatgctatattactactattgtttcaatctaaatgtaaagagtgttccttaaaaagttgcatgtataaaatccagttttatatgcatgtcaagtccttgatatttttgaaat

SEQ ID NO: 498325 - DNA, 201 bp, Homo sapiens
tgtgtccagccaaaagctttcaagtaattaaatgaacatataattatactagaacatgaacaatatgtatgtaaaacaaattttgagggatgctatattactactattgtttcaatctaaatgtaaagagtgttccttaaaaagttgcatgtataaaatccagttttatatgcatgtcaagtccttgatatttttgaaata

SEQ ID NO: 498326 - DNA, 201 bp, Homo sapiens
atcttcagaggttttctttatagcaaactgtcttctagtctgtgaattatggtgtatagcaaaagtacagtcattatttacatatctagctttattgaacrtaaataaagcattaggtccttgacatgaagaagcttagaaattagtttttttcaaagaattacttaaattttaaattctttttcttttctttttcttttt

SEQ ID NO: 498327 - DNA, 201 bp, Homo sapiens
ggtgattttctctcccctttcaataaaaactagaagcctccccaaagccctggctaaccaccagctgtgttcccagaagaagaaaatctgctggtgagaargggagggaagaagacagaaaaaaaattagcaaaatatattggtcttcccatagaataacaaactctgcgtcttcttacctgtgtgcagtgaggaatgaat

SEQ ID NO: 498328 - DNA, 201 bp, Homo sapiens
atcattatgattagaagtctgaggaaagcaacatattagcaagaaaggttgcaagtcaccttcccagaattgtctttttcttttcttttcttttcttttcttttttttttttttggagacagagtcttgttctgtcatccaggctggaatgcagtagtgtgatctcggctcactgcaacttccacctcccgggttcaagca

SEQ ID NO: 498329 - DNA, 201 bp, Homo sapiens
cactgcttgcaattgttcagatgctaattgggttgcttcaggtgtgaaatgttctcttagtagaaatccttgtttcttcagttcttcaatgtaattttcawagtattcacttgcatcttcagaggttttctttatagcaaactgtcttctagtctgtgaattatggtgtatagcaaaagtacagtcattatttacatatct

SEQ ID NO: 498330 - DNA, 201 bp, Homo sapiens
taaccaacctaacttttttatttcatttaggtgttggaacaggcgatgtatgtgatctaaaattccaaatagtaatggagaaaaaggttgtcttttccagyacttcattaggaaattgttcagtaagagaaaacatgtgaattgaaaaactctgatgtttgttttaaggctgaatgtcaaaccagcaatgttcacctccct

SEQ ID NO: 498331 - DNA, 201 bp, Homo sapiens
ttgagtggcctaagccctggaggtccccttaaagcatggtaggaaaagacccaggagatacaggaagcctcttgcactcaccatgatgaactctgctgccrtggtattgcttgtgatatgcttaggatacgaaaatagctccttgtaacctgtgtaataagatcagcatgaggtgctgcttccacacgttcacttgcttga

SEQ ID NO: 498332 - DNA, 201 bp, Homo sapiens
catttttcatttagtatacttttatggtttgattttaaatatttaaatatttgctctgtctggagttaaagtatgagaaatgaggtaaaggtccaactttrtattttttccttgtggttacccatttatctctatagatagtattgaagaacttgtctttcttccacagagataagatctacttgtatcatatcctaaatc

SEQ ID NO: 498333 - DNA, 201 bp, Homo sapiens
actcctgggcataagcagtcctcccccttcagcctcccaagtagctggactataggcatgtgcttccctgccagctcttgctctcatgctctctctctgtstgtgtgtgtgtgtgtgtgtgtgtgtgtgtgtgtgtttgtcccctgtggctttgtttttttttttttttggagacagagttttgctctttggcccagcctg

SEQ ID NO: 498334 - DNA, 201 bp, Homo sapiens
attagccaggcgtggtggcgtgcgtctatagtcccagctgaggggggtggctgaggcaggagaatggcgtgaacctgggaggcagagcttgcagtgagcckagatcgcgtcactgcactccagcctgggcgacagagcgagactccgtctcaaaaaaataaaaaataaaataaaaaaacaaaagaaatcatagccatctta

SEQ ID NO: 498335 - DNA, 201 bp, Homo sapiens
gcctggccaacatggtgaaaccccatctctactaaaaatacaaaaattagctgagtgtggtggcgcgtacctgtaatctcagcaactcaggagactgaggmacgagaattgcttgaacccaggaggtagaggttgcagtgaattgagatcatgccactgcactcaaccctgggcgacagagcgagactctatctcaaaaaa

SEQ ID NO: 498336 - DNA, 201 bp, Homo sapiens
aaaacaacactaaacaaaaagaagaaacacaaagattaaaaatttgactgcattaaaaaatctgcatgaccaaaagataataagcaacatcaaaataacaygtggaataccgggaaacaaattttcacaactcatatcacaaagggctaatttccctaacataaaaagtttacctaagataaataaaaaaatgactaaaat

SEQ ID NO: 498337 - DNA, 201 bp, Homo sapiens
tccctaacataaaaagtttacctaagataaataaaaaaatgactaaaatctcaattaaaaaaataaaagatgtgaacagataacacccaggaagtgatacrtagggctgtaagaatataaaacatgctcctcttcattcataaagaaacaaaaacttaaatgtcaccaatacatttttcacctgtaagatatgcaaagatc

SEQ ID NO: 498338 - DNA, 201 bp, Homo sapiens
tcatttgttttggcagccaatgaagaagaaaattttgtgacatcatatgttgatttactagagatagtttttaagtagtccaagaattaggattactgtcygtggcatgctgtggtacctcagtatttagcaaatacatatgctaattacattatttttctgtgcttttaatttgtatccatcgtttaccagcattctaat

SEQ ID NO: 498339 - DNA, 201 bp, Homo sapiens
tcacctgtaagatatgcaaagatcaaaaaattgattaagtcaggtattgtggagcatcccagctactcaggaggctgaggtgagaggatcgctggaggccrggagttcaaagctgtagtgctctgtgatagagcctgtgaatagtcactgcaccccagcctgggtgacagagtgagactccatctcaaaaaaaaaaaagaa

SEQ ID NO: 498340 - DNA, 201 bp, Homo sapiens
gctgaggtgagaggatcgctggaggccaggagttcaaagctgtagtgctctgtgatagagcctgtgaatagtcactgcaccccagcctgggtgacagagtragactccatctcaaaaaaaaaaaagaatcatactgagaaatacgggtcatttttgtttattttataaaactccttcttgaatagtatttttgtatttttt

SEQ ID NO: 498341 - DNA, 201 bp, Homo sapiens
caggagctagacgtgttggaatggtcttagaactcttcacaaccacctgaggtggattttactgctctccccactagggcattaggactggggcactgggraggtcaagtcccagagagtgaagcgcgggctggggttcagacctgagcattcggccacagcacctgtgatcttaaccactgtgtttactgactttcaatc

SEQ ID NO: 498342 - DNA, 201 bp, Homo sapiens
attaggactggggcactgggaaggtcaagtcccagagagtgaagcgcgggctggggttcagacctgagcattcggccacagcacctgtgatcttaaccactgtgtttactgactttcaatcatctaccttttgtgatctttgccaacctgacagagttaaaaaataaaaaggaatctcatggcagtttacattttaacttc

SEQ ID NO: 498343 - DNA, 201 bp, Homo sapiens
ttaggactggggcactgggaaggtcaagtcccagagagtgaagcgcgggctggggttcagacctgagcattcggccacagcacctgtgatcttaaccactgtgtttactgactttcaatcatctaccttttgtgatctttgccaacctgacagagttaaaaaataaaaaggaatctcatggcagtttacattttaacttct

SEQ ID NO: 498344 - DNA, 201 bp, Homo sapiens
ttttgtgatctttgccaacctgacagagttaaaaaataaaaaggaatctcatggcagtttacattttaacttcttttagaaacaaggttgcacatctttcrtatattattttcttatttatgatcaaatcctcactctgtcactaaggctggagtgtaggggtgccattttggctcactgcaacctctgcttcctaggtgc

SEQ ID NO: 498345 - DNA, 201 bp, Homo sapiens
gggctgccagcttgtggatcatctgtgtttaagcagcaaaggaaaaaaaatattcacatggcttctaatataagacttgcaaagaacatcattttaaaaayggaggtataatctgcatacagtaaaatgcactcctcttaaatacacagtttgatgagtcttaagggatgtatacagttgtgtgactactgttgaagtgaa

SEQ ID NO: 498346 - DNA, 201 bp, Homo sapiens
tcacacccagtgggatggctgttattaaaaaacaagtggtggctgggcagagtggcttatgcctgtaatcccagcactttgggaggtcaaggcaggcagaytgcttgagcttggaatttgagaccagcctgggcccatggcgaaacactgtctctacaaaaaattagctgggtgtggtggtgtgggtgtggtggtatgggc

SEQ ID NO: 498347 - DNA, 201 bp, Homo sapiens
ctgcaaatggcaccagcattcttccactcacgccttgggctttgattctctttgcctcagccccctaaatccagctagtcatccatctctgttgattatgsctttgacagttttctatgttctccttcctttctgttctcactgccactaattgtccagaatctcctttgctcagcgtagatttctgcagtggtctcctta

SEQ ID NO: 498348 - DNA, 201 bp, Homo sapiens
ccctccaagacggatactctttataataagattcattatttattcgattcgtggtaagtgctttatgtgtaattgaagaattgggcaggagggccaatgtycccactctgggagagttttgctcatagttatatatacagatgagcctaactcatacctgtctttttacatattgtcacacaggaactcctccttatttat

SEQ ID NO: 498349 - DNA, 201 bp, Homo sapiens
actcctgggctcaagcaacgcgtccacctcagcctcgcaatgtgctgggattataaacatgagccacactgcctgatattgtttgttgttgtttttccaattttttttcttttctttttgtttttgagacagagttttgctcttgttgcccaggctggagtgcattggcacaatctcggctcaccacaacctctgcctcct

SEQ ID NO: 498350 - DNA, 201 bp, Homo sapiens
gattcattatttattcgattcgtggtaagtgctttatgtgtaattgaagaattgggcaggagggccaatgtccccactctgggagagttttgctcatagtyatatatacagatgagcctaactcatacctgtctttttacatattgtcacacaggaactcctccttatttatgcccctcctcctgcaattgcccattgatt

SEQ ID NO: 498351 - DNA, 201 bp, Homo sapiens
attagcaaaatatattggtcttcccatagaataacaaactctgcgtcttcttacctgtgtgcagtgaggaatgaatccatagacaaggagtcgatcattgmgaaacaaggacggcacctgggctggggcctgcagggcctcgggcacatctggattgagttgctgccatttgacggagacagagtggcaactcggagaaca

SEQ ID NO: 498352 - DNA, 201 bp, Homo sapiens
tggcagaaacgtgctgtgttgactcaaggtttaatggatttagggctatgcatgatgtgctttgttaaacaaatgcttgaaggcagcatgcttgttaaaartcatcaccactccctaatctcaagtacccagggacacaaaacactgtggaaggcggcaggaacctctgcctaggaaagccatgtattgcccaaggtttct

SEQ ID NO: 498353 - DNA, 201 bp, Homo sapiens
atctaaactgcttcatgcccaattcaatttctacctccttaatgaaatttttgcattctgtaccttctgttaactagcccccaatagtgcataacagcacrcccagtctttatcatacagattatgttatgtcccattctactattgtttcttatgtgtacagctcccaaaaggggccaactgagtctgcacctccttttg

SEQ ID NO: 498354 - DNA, 201 bp, Homo sapiens
tccagagctcttgttcttcaatttcatactaggctgcccctcaccacacaggcagggtcgggtacccacagttgtcagctctacagaatgtgattcacatrtaggggaagcacacgcaggaccagggccaaagcgcactcacctgtgccgaactggataatatttactttctgcttctcacccaccaaggacagcgcatgc

SEQ ID NO: 498355 - DNA, 201 bp, Homo sapiens
tctactattgtttcttatgtgtacagctcccaaaaggggccaactgagtctgcacctccttttgtgttttctacagggcctagcatagacctttcttattrtgggtgcctttatttatatgagagtgagtcaaagaaatagtatagcctcaaagtcattcataccataacttgagctatctttggttactccatccagcag

SEQ ID NO: 498356 - DNA, 201 bp, Homo sapiens
ccccatctctactaaaaatacaaacaattagccaggcatggtggctggtgcctgtagtaccagctagttgggaggctgaggcagaagaatggcgtgaaccygggaggcagagcttgcagtgagccgagatggcgccactgcactccagcctgggcgacagagcaagactctgtctcaaaaaaaaaaaaaaaaaaaattaaa

SEQ ID NO: 498357 - DNA, 201 bp, Homo sapiens
tttcttttaaagggatgttgataatagctatataaggtggcaaccccatgactagctagggcagaaaaaagaggctagatacatttttttctgataactaygcagagatcctctcaacatccccaactatgttcaccattctagttgaccaccccatcatgaaaattttgtatatttagattaggattaatttaggcttaa

SEQ ID NO: 498358 - DNA, 201 bp, Homo sapiens
ccgctggtgcagtcctgaggcagggctcacacctgcggcagtgcttgcctctttacggctcccctctcattcaaggaaacacagatattcctatttcttastctcggaagaataagagatttccaaacataaatataaaaccagatgtttaaaaaacatacctgttttctccaactatgcttggattttgcattaaaatat

SEQ ID NO: 498359 - DNA, 201 bp, Homo sapiens
gaaatgtcccatccaatcagccctggatttgccagcctggctgaggcagctggtcagtctcagcttgctcaattttattattatttcattttatttatttwttttttctttgagatggagtctcgctccattgcccaggctggagtgcagtggcacaatctcggctcactgcaacttctacctcctgtgttcaagcgattc

SEQ ID NO: 498360 - DNA, 201 bp, Homo sapiens
tatcctcagatcgcagatgaggaaacggaggcaccagaagttcaagtagtgcgcccaaggtgacacacagaacctgtgagtggtacagctggaaccgggayctagggggtccagctccagagctcttgttcttcaatttcatactaggctgcccctcaccacacaggcagggtcgggtacccacagttgtcagctctacag

SEQ ID NO: 498361 - DNA, 201 bp, Homo sapiens
gttgctgccatttgacggagacagagtggcaactcggagaacatagcctggtcatttggtcttctatctatttataaaagaggaattatttctctttcaaygctccatccagaaaatagttacttcacatttaaaataaagtatacattctatcctttgggaattttataactctttggtattttctctccttcctgctac

SEQ ID NO: 498362 - DNA, 201 bp, Homo sapiens
acctctcagtggagcaggtgtgtgggaggtgctggggccacttccctggatcctttccccacatgaagcaaaagcctccagctgctgggggaagggcagcwaactctcacttccagagctgcggggaaggggcagaagtaaaccagggatcagaagccttcctttctagccctgtgcccaggtaaagctccactgctttag

SEQ ID NO: 498363 - DNA, 201 bp, Homo sapiens
tgtgaatgtagctaataccactaaattgtacacctaaaaatggttaaaatggccaggcgcggtggctcacgcctgtaatcccagcactttgggaggccaasgtgggcagatcatgaggtcaggagatcaagaccatcctggctaacacagtgaaaccccatctctactaaaaatacaaacaattagccaggcatggtggct

SEQ ID NO: 498364 - DNA, 201 bp, Homo sapiens
ggttaaaattcatatggaaccaaaaaagagcctgtagagccaagacaatcctaagcaaaaagaacaaagctggaggcatcacactaccagacttcacactrtactacaaggctacagtaatcaaaacagcatggtactggtacaaaaatagacacatagaccaatggaacagaatagagatctcagaagtaacaccacaca

SEQ ID NO: 498365 - DNA, 201 bp, Homo sapiens
tgaggtcaggagatcaagaccatcctggctaacacagtgaaaccccatctctactaaaaatacaaacaattagccaggcatggtggctggtgcctgtagtmccagctagttgggaggctgaggcagaagaatggcgtgaacccgggaggcagagcttgcagtgagccgagatggcgccactgcactccagcctgggcgaca

SEQ ID NO: 498366 - DNA, 201 bp, Homo sapiens
accgttctgaacagagaagaaagtaatgtgtcatcacaccaccgctactgtggcttgttgctgaagattatctaggtaattactgtaattagctctttaayggagtctcaaagagcattatattataacagatcctgagatatttcctttatgcttacctgtgatgattctgcaaaacctcttttctaaccctgagaaatt

SEQ ID NO: 498367 - DNA, 201 bp, Homo sapiens
taatatacaggttctgtgtttagctctacaggttggaatattgtgtataaactggcaatttacaataccatagttaaattaagaatatagaggttgaatcmtttgaaattgccagtttttaaccatcttttgctttaaaaatggccatttcacattgcccaacctaaaatgttattattcaagaagttagcatcagttttc

SEQ ID NO: 498368 - DNA, 201 bp, Homo sapiens
cttcctgagaccattccttatagattttctatgactgcgctgagggcaaatgttttgtccttagacttgggacctcctactcaacagaccaggggttttgyatttggttcagttgctaatgacaacagtagcatttatatctcacttactgtgaacaggcacagtttaaaaatcctttacatacattagctcaatcctcct

SEQ ID NO: 498369 - DNA, 201 bp, Homo sapiens
ccatgatgagttacacattgctttttgaatgtcaatgctagctttaaaattgagcttcttaatatattctcaaaaaaggccctaacacatgaaaatcaaakgacacacattaaatgataatatttaattgattaaagtctaatagaaaattcaatactttttaaaagtgtggcacttttgaaaagtgcctcatggccaggc

SEQ ID NO: 498370 - DNA, 201 bp, Homo sapiens
gtcaagacaaataatcacttcgctctcactggctaggtcagggaggtcgacatcgagatcgggttgaaagacaagcatgcaagcctgaaaggagaaagaargtgctggactggagcttcttgtcacttcaactgcaaaaggtctacttagaaaactccaaaactttctagtgaggtaaactaatgctataaaaacagaaag

SEQ ID NO: 498371 - DNA, 201 bp, Homo sapiens
gagtttgagaccagcctggctaatatagtgaaaccccatctctactaaaaattcaaaaattagctgggtatgatggcatgtgcctatagtcccagctactygggaggctgaggcacaacaatcacttgaacctgggagacagaggttgccgtgagccgagatcacgccactgcactccagcctgggtgacagtgagactct

SEQ ID NO: 498372 - DNA, 201 bp, Homo sapiens
tcactatatttttaatagcagttttaaagtctgtgtctgctaattctaacatctgggtcatctgtgggtcagcatttatagcccattttccccttgatcaygatcatattgtcctgcttcttcgtatgttattaaattttcattccatactgaacattaaaaatgacgccttgtagagactctcagctatgctatcttact

SEQ ID NO: 498373 - DNA, 201 bp, Homo sapiens
tctaaactctggccagtactaggcagcagctgaaatctctgcttagctctgtagcttcccagctgttgcttttttctggattccttgaggttgcacctgtrtatgtagaggttaggagacagccaaggatctgcggggtatctggatgcagatttcagagttccctgctctgtggttccctcctttataggattttaatcc

SEQ ID NO: 498374 - DNA, 201 bp, Homo sapiens
taaagctccactgctttagagagaaacagccacctccccatggggcaggggatgacaccctcctaggcccaggatcctgcactagtacaaagcaggggttrctacaactggaggaaaggcaggaaaccatctcccaaacaactcttaacagacacaaggcagaatttggctgccactaagataggacaatgaacagaagtg

SEQ ID NO: 498375 - DNA, 201 bp, Homo sapiens
gcactattcacaatagcaaagacatggaatcaatccaaatgcccatcaatgatagactggataaagaaaatgtggtacatatgtaccatggaataccatgmagaccatgtcctttgcagggacatgaatgaagctggaagccattatcctcacaaactaacacaggaacagaaaactgaacacaggatgttcttacttaca

SEQ ID NO: 498376 - DNA, 201 bp, Homo sapiens
gaatcttgagatgtgagagttcattttgtaatgctagtttttcaggacaatcaataatttgcaagtttaaccagcttattctgaaacattttttcaatagygtctcctatgtctaagtaaaaaggagtatacctcgctttctttttctggatgtttttcaacccacattcttgggagataggcagcagacaaaccgatgtg

SEQ ID NO: 498377 - DNA, 201 bp, Homo sapiens
atgggtctctctatgttgccaaggctggtcttgaactcctggcctcaagtgatcctcctgccttggcctcccaaactgctgggatacaggcatgagccacsaagcctggcccagtcttttatttgtaatagagaaaacatttctattaaaaatattcaatcaacaacaaaaaaattataaatcaatctcactgcttgcaat

SEQ ID NO: 498378 - DNA, 201 bp, Homo sapiens
taaatctgaccagatcagtaattgtattaaataaaaatgacctaaacaatacaaagtgcagaaactcccagattggataaagcagcaaaattcaacagtaygctatctaagtagtatagggttatagtgacaagtcagtcagtctagatgttttgaaaaggagaaaaccatcaaatggtcacataaattgaagtcttggaa

SEQ ID NO: 498379 - DNA, 201 bp, Homo sapiens
tggtggctggtgcctgtagtaccagctagttgggaggctgaggcagaagaatggcgtgaacccgggaggcagagcttgcagtgagccgagatggcgccackgcactccagcctgggcgacagagcaagactctgtctcaaaaaaaaaaaaaaaaaaaattaaaatgctaaattttatcataataaggaaacaatttcagca

SEQ ID NO: 498380 - DNA, 201 bp, Homo sapiens
agtctagatgttttgaaaaggagaaaaccatcaaatggtcacataaattgaagtcttggaaacactgccatttaatctggcaatgaggaggacataagtcrtcctaggctgggcactgtcttcatccttggtttcggcaccacaattttctctttattgtaccactaactatccttttctgttacttccacacttaaatat

SEQ ID NO: 498381 - DNA, 201 bp, Homo sapiens
atgagaacattatagtcacaagatgtcaatacattctgggagacctgaaggcttgggttagcaatagttctgatcagactttacccataggtaataccttytgtgaaggctgttttcttgtggaccatattcctagggaaatatgtaggtattaaggaggaaacatttaccaacacacgtaggaggataacctgataatat

SEQ ID NO: 498382 - DNA, 201 bp, Homo sapiens
ggagcaaaaaactaaggcctttctttgagcattcaagaccctctttgcttcttccttgaaataaaaatacctcaaagtctgtggtgacagaggctgtttgygaaactccatgcacactgtcgtagcctggtggtgcttcagttaaggaaaagtccttctcatgtaagtccatacactttccgagggctacgtcacaaatga

SEQ ID NO: 498383 - DNA, 201 bp, Homo sapiens
caatacattctgggagacctgaaggcttgggttagcaatagttctgatcagactttacccataggtaataccttttgtgaaggctgttttcttgtggaccmtattcctagggaaatatgtaggtattaaggaggaaacatttaccaacacacgtaggaggataacctgataatattaagtggcagcctctcaaatgaaccc

SEQ ID NO: 498384 - DNA, 201 bp, Homo sapiens
aaggcttgggttagcaatagttctgatcagactttacccataggtaataccttttgtgaaggctgttttcttgtggaccatattcctagggaaatatgtargtattaaggaggaaacatttaccaacacacgtaggaggataacctgataatattaagtggcagcctctcaaatgaaccccaggcttctatacatacagtt

SEQ ID NO: 498385 - DNA, 201 bp, Homo sapiens
aaaccccattaaaaagtgggcaaaggacatgaacagacacttctcaaaagaagacatttatgtggcaaaaaaatatgaaaaaaagctaaacatcaccgatyattagagaaatgcaaatcaaaaccacgatgagacaccatctcatgccagtcagaatggcgatagttaaaaaatcaagaaacaacagattctggcaaggct

SEQ ID NO: 498386 - DNA, 201 bp, Homo sapiens
ggcaaaaaaatatgaaaaaaagctaaacatcaccgatcattagagaaatgcaaatcaaaaccacgatgagacaccatctcatgccagtcagaatggcgatrgttaaaaaatcaagaaacaacagattctggcaaggctgtggagaaataggaatgcttttactctgttggtgggagtgtaaattagttcaaccattgtgga

SEQ ID NO: 498387 - DNA, 201 bp, Homo sapiens
tcaaatgaaccccaggcttctatacatacagtttggccatacatagagccagcattcttaactgttcaataatcacctcttcattacttattcccatcctrcaggtggatatcttagatgtcaagagcaataatttacccctttgatctatattaatcttgaatgtgcccctagccccagcaaacattaaattttcaaaac

SEQ ID NO: 498388 - DNA, 201 bp, Homo sapiens
tgcttgatatcataaatatttttagttgcagaatcttgagatgtgagagttcattttgtaatgctagtttttcaggacaatcaataatttgcaagtttaaycagcttattctgaaacattttttcaatagtgtctcctatgtctaagtaaaaaggagtatacctcgctttctttttctggatgtttttcaacccacattct

SEQ ID NO: 498389 - DNA, 201 bp, Homo sapiens
agttgatgcagtttcttcctagcctcgatggtctttacaatttggcgtgtttttgcagtggctgataccggttgttcctttccatgtttagtgcttccttsaggagctcttttagggcaggcctggtggtgacaaaatctgtcagtatttgcttgtctgtaaagtattttatttctccttcacttgtgaagcttagtttgg

SEQ ID NO: 498390 - DNA, 201 bp, Homo sapiens
gagccagcattcttaactgttcaataatcacctcttcattacttattcccatcctacaggtggatatcttagatgtcaagagcaataatttacccctttgatctatattaatcttgaatgtgcccctagccccagcaaacattaaattttcaaaacaccatggccatgtgtcaccctcagaggcgatactcaaacatatgg

SEQ ID NO: 498391 - DNA, 201 bp, Homo sapiens
tcttagatgtcaagagcaataatttacccctttgatctatattaatcttgaatgtgcccctagccccagcaaacattaaattttcaaaacaccatggccaygtgtcaccctcagaggcgatactcaaacatatggccccatctgcaagaataactaaaatacctgcactagagttagacgctgactacacacaatctagca

SEQ ID NO: 498392 - DNA, 201 bp, Homo sapiens
ttcagtaacgattctgtgattaaggatcgaacatacctgagcgaatcactgaaataaatcccacttccaaggtttccgacgtctgttctttgcacaccacratcttccactactttgggtaaaagcaaccctctgaaaagagaagggcaggataaggtgtaagcccaacactgactgcatctcttccttgctcagaatttt

SEQ ID NO: 498393 - DNA, 201 bp, Homo sapiens
gcactccagcctgggtgacagtgagactctgtctcaaaaaacaaaaaacaaacgaaaacacacacacacacacacacacacacacacacacacacacacasacaacagtattgcaactagaaaagattattaataattatttatgcatgtagtgattgggctgtgagaccaaaagtacttgataaatataggaagtcatga

SEQ ID NO: 498394 - DNA, 201 bp, Homo sapiens
ccagcctgggtgacagtgagactctgtctcaaaaaacaaaaaacaaacgaaaacacacacacacacacacacacacacacacacacacacacacagacaayagtattgcaactagaaaagattattaataattatttatgcatgtagtgattgggctgtgagaccaaaagtacttgataaatataggaagtcatgataagt

SEQ ID NO: 498395 - DNA, 201 bp, Homo sapiens
aggtcagggaggtcgacatcgagatcgggttgaaagacaagcatgcaagcctgaaaggagaaagaaggtgctggactggagcttcttgtcacttcaactgsaaaaggtctacttagaaaactccaaaactttctagtgaggtaaactaatgctataaaaacagaaagaataagatgtaattaacaacaagatggcctacta

SEQ ID NO: 498396 - DNA, 201 bp, Homo sapiens
tttctttttttgtttcttccagctctaactaacgtgggtatccaactgcgtggcttttcggtgagccccaatataaaatgtaataattttttttctattcktaggctttatctaccaagaaatgaattggataatccacatcaacaaaaagcatggaaaatttatccaccagaatttgccgtggagatactttttggcgag

SEQ ID NO: 498397 - DNA, 201 bp, Homo sapiens
ctttttttgtttcttccagctctaactaacgtgggtatccaactgcgtggcttttcggtgagccccaatataaaatgtaataattttttttctattcgtargctttatctaccaagaaatgaattggataatccacatcaacaaaaagcatggaaaatttatccaccagaatttgccgtggagatactttttggcgagaaa

SEQ ID NO: 498398 - DNA, 201 bp, Homo sapiens
tttcggtgagccccaatataaaatgtaataattttttttctattcgtaggctttatctaccaagaaatgaattggataatccacatcaacaaaaagcatgraaaatttatccaccagaatttgccgtggagatactttttggcgagaaatgacttccaatgacgtagctggatccgattaagtatagtttccccttcccct

SEQ ID NO: 498399 - DNA, 201 bp, Homo sapiens
aattatttatgcatgtagtgattgggctgtgagaccaaaagtacttgataaatataggaagtcatgataagtgaaaaggaccttttgttatcgttatctargtttgtagttctcaattccatgtgttcattcacagatactgcatgacattgaaacagctggtgtattaactaatgtatatgacagtccatctctgtacga

SEQ ID NO: 498400 - DNA, 201 bp, Homo sapiens
ccacattctcaccatctgtttctttgttggattatcaataaataccgtgggctcccagagctcggggccttcgcagcctccaccatagtgatggcatactrgtgtcccacctttctctctcaaactgtctttttctcaatcctttgactccactggactttgtcacccccatgacctggtgttgggtctgatcaccccaac

SEQ ID NO: 498401 - DNA, 201 bp, Homo sapiens
cttcaatttcatactaggctgcccctcaccacacaggcagggtcgggtacccacagttgtcagctctacagaatgtgattcacatgtaggggaagcacacrcaggaccagggccaaagcgcactcacctgtgccgaactggataatatttactttctgcttctcacccaccaaggacagcgcatgcaaggcgatttgcttg

SEQ ID NO: 498402 - DNA, 201 bp, Homo sapiens
tgacaggcctagctcttcttgtttgtctggaactactgatgctgtttcctcctttgttaagtcaaatgggtctgactggcgtggcttccccttactcagascaagtggaactctggggcctacaacagtgcaaattatcttagcctctagcatgaaattcgtatttcatatcttgttctaactctctttccctctcctgta

SEQ ID NO: 498403 - DNA, 201 bp, Homo sapiens
gttaataataacattaaaaatgataacatactcaactcatttagaaagatcaccctaagtcccaacaccgaagccccccatgaatgggaggctgggactcrtggggcctgctgacctgtctgcaacccacacttcccaggcccagggtgtggatgtcgtcattaaccatcaaagcaagggtgactttcttaatgtggaaat

SEQ ID NO: 498404 - DNA, 201 bp, Homo sapiens
caggtacctgccaccatgcccagctaatttttgtacttttagtaagagggggtttcaccatgttggccaggctggtctcaaattcctgacctcaggtgatmtgcccacctcagcctcccaaagtgctgggattacaggcataagtcattgcgcccagccagtatatcacactcttatcagaagatgaaagttatatacctc

SEQ ID NO: 498405 - DNA, 201 bp, Homo sapiens
agaaccagaaataccatttgacccaccaatcccattactgggtatatacccaaaggaatataaatcattccattataaagatacatgcatgtgtatgttcrttgcagcactattcacaatagcaaagacatggaatcaatccaaatgcccatcaatgatagactggataaagaaaatgtggtacatatgtaccatggaata

SEQ ID NO: 498406 - DNA, 201 bp, Homo sapiens
agagggggtttcaccatgttggccaggctggtctcaaattcctgacctcaggtgatatgcccacctcagcctcccaaagtgctgggattacaggcataagycattgcgcccagccagtatatcacactcttatcagaagatgaaagttatatacctcaaatgttatctttttgtctgtcattccttctgggaaactcagtt

SEQ ID NO: 498407 - DNA, 201 bp, Homo sapiens
agaccatgtcctttgcagggacatgaatgaagctggaagccattatcctcacaaactaacacaggaacagaaaactgaacacaggatgttcttacttacasgtgggagctgaacaatgagaacacatggacacagggagggaaacaacatacactggggcctgtagcggaggcagggagagggagagcatcaggataaata

SEQ ID NO: 498408 - DNA, 201 bp, Homo sapiens
gttatatacctcaaatgttatctttttgtctgtcattccttctgggaaactcagttcccaatgacaggcctagctcttcttgtttgtctggaactactgaygctgtttcctcctttgttaagtcaaatgggtctgactggcgtggcttccccttactcagaccaagtggaactctggggcctacaacagtgcaaattatct

SEQ ID NO: 498409 - DNA, 201 bp, Homo sapiens
ttatatacctcaaatgttatctttttgtctgtcattccttctgggaaactcagttcccaatgacaggcctagctcttcttgtttgtctggaactactgatrctgtttcctcctttgttaagtcaaatgggtctgactggcgtggcttccccttactcagaccaagtggaactctggggcctacaacagtgcaaattatctt

SEQ ID NO: 498410 - DNA, 201 bp, Homo sapiens
tcgctttgttgcccaggctgtgcagtggcgccattatggctcattgcagcctccacctctcaggctcaagtgatcctcccaactcagcccctcaagtagcygggactacaggcatgcatcaccacacccagctaatttttgtattttttgtagatctggggtttcaccatgttgcccaaggggtcttgaactcctgggctc

SEQ ID NO: 498411 - DNA, 201 bp, Homo sapiens
tggctcattgcagcctccacctctcaggctcaagtgatcctcccaactcagcccctcaagtagctgggactacaggcatgcatcaccacacccagctaatwtttgtattttttgtagatctggggtttcaccatgttgcccaaggggtcttgaactcctgggctcaggtgatccatctatctcagcctcccaaagtgttag

SEQ ID NO: 498412 - DNA, 201 bp, Homo sapiens
caagaagggtcaaaatgtatgagccatgcacatataagaatctacaccccagcctctgcttggatactcaagctaaatctacagtctggctgtttcatcawaaaatgagtgagaaattcactgctaaatcgagttattttggggcaaacttccccagggaacaggcctcttcgggtttgaaatatcaaatggtacaagtca

SEQ ID NO: 498413 - DNA, 201 bp, Homo sapiens
gtggtttgacctacaagccagtagatggcgccatgggtaagagctggctgttgccagtgctgctggctgtgtacttgatccttgtttattgggaggagctytctcctgccccaggcaaagggctgatttcctgagtacacattaatctgagctccctcagccctaggggtagggggattgggggcacaagatgggtggagc

SEQ ID NO: 498414 - DNA, 201 bp, Homo sapiens
ttcaaccacgtgcatacattgctttgataagataaaagtagtgttaaaataacagctcttaagaaatcaaagatgcactaaccttttgtttcagttcatgwgtatcactgaaaatgaattcaatcacatacggcatctcaatagacatagtcaaagagaagctagcaaaaatgaagagaaagttgtcttagtctacgatct

SEQ ID NO: 498415 - DNA, 201 bp, Homo sapiens
gcatgatcatagctaactgtagcttcaacctcctgggctcaagcaatcctcccacctcagcctcccgagtagctgggagcactgactggaaagagagttakgtttgggtgactcagctaggtgaaacacagaggaggtagcacaatacaacacatgaaataaccaaaacagttttttattaattccagagagaagagggca

SEQ ID NO: 498416 - DNA, 201 bp, Homo sapiens
agaaagtttgctcatggaatgacaggaacttctaaaatacaactcaccattttgacagagattttaaactctacatatgtctgtgtgtatacacacacacrcacacacacacacacacacattttatacatgtgctgtacatacaaagtaggaagtttggagggatataccgaagtattaaccattaactctgggcaatgg

SEQ ID NO: 498417 - DNA, 201 bp, Homo sapiens
caccaaggacagcgcatgcaaggcgatttgcttggcttgcaagaatgtcacaccctccatggaactggagcagtcaagacaaataatcacttcgctctcaytggctaggtcagggaggtcgacatcgagatcgggttgaaagacaagcatgcaagcctgaaaggagaaagaaggtgctggactggagcttcttgtcacttc

SEQ ID NO: 498418 - DNA, 201 bp, Homo sapiens
acctgagagtggaagcctttattgggatgtaaggtggtacctgagcaggtttcctgtggggaggtctaatttggtttaacacaagcagccatgagtctctrctgtgactgagaggtggtcactgatatatccacgtggtccctgcagagtatgggggcctatggggggagtcaagtaggttatatctagctgtcccataat

SEQ ID NO: 498419 - DNA, 201 bp, Homo sapiens
gagtggaagcctttattgggatgtaaggtggtacctgagcaggtttcctgtggggaggtctaatttggtttaacacaagcagccatgagtctctactgtgrctgagaggtggtcactgatatatccacgtggtccctgcagagtatgggggcctatggggggagtcaagtaggttatatctagctgtcccataataaagtg

SEQ ID NO: 498420 - DNA, 201 bp, Homo sapiens
aagattcgtatttcagactaaatattgaattgcaggtcccatctaaatcggtggctcaatattccctttaaaatgagatgaactgacttagtcatagaaartgtcgctcttcattattcagctccctctagttcagagagctctcccgggcagtgggctttctcattctttcacagtctgtggctcccaatttaaagctga

SEQ ID NO: 498421 - DNA, 201 bp, Homo sapiens
ccaatgacaggcctagctcttcttgtttgtctggaactactgatgctgtttcctcctttgttaagtcaaatgggtctgactggcgtggcttccccttactyagaccaagtggaactctggggcctacaacagtgcaaattatcttagcctctagcatgaaattcgtatttcatatcttgttctaactctctttccctctcc

SEQ ID NO: 498422 - DNA, 201 bp, Homo sapiens
gacttagcagacgcaatatagctcttgttaagacagctggaaaattgcccctttcgttttgtgggctttgatgcctccttcgtgccatgttggctggaaaygattccagaatagtccttctatcctatcagctctcaggacttggcctttcctcctggggacctctctgtggctttccccctctctacacagccctcatct

SEQ ID NO: 498423 - DNA, 201 bp, Homo sapiens
acaataaacagtaagattttaaacatgtgacaataataaggcaaaaatatttaatgatctgtaatcaataatccagggaagacaccaaaatgaaaaatttaaaaaaaaaatctaacttatttgaaaacattgtccacacctggatttgctgcaagcttggctgcccctagggtgtgtagggtgccaggcaaaatttttcaa

SEQ ID NO: 498424 - DNA, 201 bp, Homo sapiens
ctaacttatttgaaaacattgtccacacctggatttgctgcaagcttggctgcccctagggtgtgtagggtgccaggcaaaatttttcaaggagtccttgttaatatgagcaatttgagtctccccaaatcagcaggtcagcaccgtcctagagacagaatctcttgccatcctgcaaatgaacaccttgctggccagtgg

SEQ ID NO: 498425 - DNA, 201 bp, Homo sapiens
taacttatttgaaaacattgtccacacctggatttgctgcaagcttggctgcccctagggtgtgtagggtgccaggcaaaatttttcaaggagtccttgttaatatgagcaatttgagtctccccaaatcagcaggtcagcaccgtcctagagacagaatctcttgccatcctgcaaatgaacaccttgctggccagtggg

SEQ ID NO: 498426 - DNA, 201 bp, Homo sapiens
aacttatttgaaaacattgtccacacctggatttgctgcaagcttggctgcccctagggtgtgtagggtgccaggcaaaatttttcaaggagtccttgttaatatgagcaatttgagtctccccaaatcagcaggtcagcaccgtcctagagacagaatctcttgccatcctgcaaatgaacaccttgctggccagtgggt

SEQ ID NO: 498427 - DNA, 201 bp, Homo sapiens
tacaggtgtacgccactgcgctcagccaatttttgtagagatggggtttctccatgttccccaggctggtctggaactcctgagctgaagcaatcctcctrcctcagcctccctcccaacgtcctgggattacaggcatgaaccaccgcaccggccaccaccctggtatttatgatagcaaaatgtgtatattttagtagc

SEQ ID NO: 498428 - DNA, 201 bp, Homo sapiens
acttatttgaaaacattgtccacacctggatttgctgcaagcttggctgcccctagggtgtgtagggtgccaggcaaaatttttcaaggagtccttgttaatatgagcaatttgagtctccccaaatcagcaggtcagcaccgtcctagagacagaatctcttgccatcctgcaaatgaacaccttgctggccagtgggta

SEQ ID NO: 498429 - DNA, 201 bp, Homo sapiens
tttcttcctactcagtagccttcctgcctgttctagttagcaggcccgcctttgcgcaggagtccccagacatcaggccggtggcagctgcactctctttkcatatcacactgtgtggctgggcactcacaaaggtcaataattttagataacgataataaaagtatttttaccaggccttagaacagaaactaatataat

SEQ ID NO: 498430 - DNA, 201 bp, Homo sapiens
gcaggagtccccagacatcaggccggtggcagctgcactctcttttcatatcacactgtgtggctgggcactcacaaaggtcaataattttagataacgayaataaaagtatttttaccaggccttagaacagaaactaatataatgtaacaaattttgacatcttaattttcttccattagataaaaccatgatgtaact

SEQ ID NO: 498431 - DNA, 201 bp, Homo sapiens
ttttcatatcacactgtgtggctgggcactcacaaaggtcaataattttagataacgataataaaagtatttttaccaggccttagaacagaaactaatayaatgtaacaaattttgacatcttaattttcttccattagataaaaccatgatgtaactaagcttaacatcatcaatttattccaagaagggtcaaaatgt

SEQ ID NO: 498432 - DNA, 201 bp, Homo sapiens
ggcctcttcgggtttgaaatatcaaatggtacaagtcatctaatcccaagtaaggcatggaggacacacgcctctccctgtaacctcgtcataatttgttktgcacacaaaaacaatgccctaagtcctttatatttattagattgaatagccactacactgatgggcagatattattatttccattttacacatgaggaa

SEQ ID NO: 498433 - DNA, 201 bp, Homo sapiens
ccctacctcaaaggagaccagaatgcaacagcagcccccatgcatgccctctggctggtttatgctcttcctgcgcagtagggctgtctatgtccacagcyttatgccctgtgccctctaaaaccctgagtcaggtctgagctggagcatcctgcagccctcctcctgcagcagccccagctggtttccaggcacataggc

SEQ ID NO: 498434 - DNA, 201 bp, Homo sapiens
aaacatatgacttagcttccaacttgaaagcatacccattatatgccagctaactccacgtacttcttaagcaacttgaatgacaacctgccaaattcttyctcagaaaacagtaataaaacctaaaagacacattggtggggctaacggagaatcctggagccattcaccagtggtgggaacagggtgatgtccgtggca

SEQ ID NO: 498435 - DNA, 201 bp, Homo sapiens
tgcccctagggtgtgtagggtgccaggcaaaatttttcaaggagtccttgttaatatgagcaatttgagtctccccaaatcagcaggtcagcaccgtcctrgagacagaatctcttgccatcctgcaaatgaacaccttgctggccagtgggtaggattcctggaatcccggtctggccagccacccaagaggaggcaaac

SEQ ID NO: 498436 - DNA, 201 bp, Homo sapiens
ggcctactatgctcagaattgtgttgtttgagatttgacaagttgtgtatttgaaaactgctattagttaatacacgttgaatttagtgaaaaaaaaaaamacagtgtattagacattatttgtgtgccatatcttgcttttagcatttaggactgtattttcatatcttcctgaaagttctaactaggcttttattagtt

SEQ ID NO: 498437 - DNA, 201 bp, Homo sapiens
ttacacatgaggaaaacgaggcaaaagagttaagtaactttcccaaactcacagcactagaaagaataaacaagaattcaaagctaagccttacaaactcyggatcctttgctttgtatgatctaccatgctgcactatggtgtactggttaagaatctggacgctggaatcagaatgatctgagttcaaatttgggcttt

SEQ ID NO: 498438 - DNA, 201 bp, Homo sapiens
gaatcagaatgatctgagttcaaatttgggctttatcatattgtttgtctctgggcctcagcttcttcttccaaacaatgggcataattatagcacttggcatggagtctgagagaattaagtactgcatgtggaaaactcggctgagggcctgactcttaggaaatggtaaccattatgtttacagatcctaagtggtgc

SEQ ID NO: 498439 - DNA, 201 bp, Homo sapiens
tggtgccaaagggattggtggaaatggaacatgtcccatgagcccacagctgggtcttttcaaagtctatgacgttgctctgagctgccttgaggatgtgygtatgggtcagagtgggcccaggggtggaggtcagctatatccaaactgctcttctcacccaacgccccgtctccccagattaaggtgatcactgaaatg

SEQ ID NO: 498440 - DNA, 201 bp, Homo sapiens
cttctcacccaacgccccgtctccccagattaaggtgatcactgaaatggaactaattttcctctacagggatcagaacatcatggcactgtacttgaacrttcttaatctcctcaaaggcctttatggttgttcaatgcaatcttcagagtcagaagctgatcatgaggccaaatcttagcaaaccaattcaattttaga

SEQ ID NO: 498441 - DNA, 201 bp, Homo sapiens
ccccgtctccccagattaaggtgatcactgaaatggaactaattttcctctacagggatcagaacatcatggcactgtacttgaacgttcttaatctcctmaaaggcctttatggttgttcaatgcaatcttcagagtcagaagctgatcatgaggccaaatcttagcaaaccaattcaattttagaaaaccaaaaactta

SEQ ID NO: 498442 - DNA, 201 bp, Homo sapiens
ccactgcatctggccacttggcacccctgaaacgctgccttccatcctgtgactgtggatgatgaacctgctgcgagctcctggctgcggccccagcaccygcattagataaccctcctgtgatgcttgtcttttgctttgaccagttcttactcacttggtatttaatgctctttctgagcttcagtgcagataatttaa

SEQ ID NO: 498443 - DNA, 201 bp, Homo sapiens
acaaaggtttgggagaacagtagaattcatctctctctgggaagaaagtgctttgagcactgcctggcacaacataagggcaatatacatgtttgttacawagaaatgttaaataaataagggcataataaagttctaaattgagtctttggagatatttcgataaacgtaaaattcagaacagtttaccaggaaagtctt

SEQ ID NO: 498444 - DNA, 201 bp, Homo sapiens
atctctctctgggaagaaagtgctttgagcactgcctggcacaacataagggcaatatacatgtttgttacaaagaaatgttaaataaataagggcataakaaagttctaaattgagtctttggagatatttcgataaacgtaaaattcagaacagtttaccaggaaagtcttttcaacaatgtttcctatttatgcaata

SEQ ID NO: 498445 - DNA, 201 bp, Homo sapiens
gtttgttacaaagaaatgttaaataaataagggcataataaagttctaaattgagtctttggagatatttcgataaacgtaaaattcagaacagtttaccmggaaagtcttttcaacaatgtttcctatttatgcaataaaacatagagaagggtatagagaaggaagcagttccagcaattcccctctcccaggtcgcca

SEQ ID NO: 498446 - DNA, 201 bp, Homo sapiens
atgctgctgactccccacttataagtccaacttgggtctcctccctggtcctatgtagtcacaagacctacgtggccaaagataaactcctgatggccccyaacctgccctcctgtgactttgaccattctagtaagtgcaaacatgatccttctagttattcagggcaaacactctgctgtcttcctgggccgctgtctt

SEQ ID NO: 498447 - DNA, 201 bp, Homo sapiens
aatgtgcaagacactgaagatgaagactggacagatgggggtagaaacccttcatcacggagggatgcttgagggaggctcactgcgcaagaactgattcytcaaagaatattctcgttttatgataaggctgctactcaaccttgtagccatggggactccaaaaacaaaggttctgggaaatggaagctgactttgaaa

SEQ ID NO: 498448 - DNA, 201 bp, Homo sapiens
gaattgacaggttttatattttaggtactaacctttgctttgttcctatttcttttatacaaatcttctctactgtatcctgttaaaagaaaaatacattygtataactaagcatatattaagtttcacaatgagactaaagtgaatgtaatcttggcaaggccacaactgtcagcaagacagctggtttcactttcaagc

SEQ ID NO: 498449 - DNA, 201 bp, Homo sapiens
tcttcttacctgtgtgcagtgaggaatgaatccatagacaaggagtcgatcattgagaaacaaggacggcacctgggctggggcctgcagggcctcgggcrcatctggattgagttgctgccatttgacggagacagagtggcaactcggagaacatagcctggtcatttggtcttctatctatttataaaagaggaatta

SEQ ID NO: 498450 - DNA, 201 bp, Homo sapiens
atgtttacctgaatgaatgtcttattttgtagaaagaaaattgaagtctttattacagaaatacttacaaaaaaattgtaaattctaatcagtatttttasggctatcctatgaccaaaagtctccatatagatctgtacttctccatgtaccttactgtagttaatatcataagaatgacactcataaatattatctcct

SEQ ID NO: 498451 - DNA, 201 bp, Homo sapiens
atttgacaagatatgtctttaaaactgctcctagttaatacacgttgagttcagtaaaagaaaactgcacatcatacattatttctgttgctatcttgctkttagcatttagtgctgtatatgcgtatcttcctggagatgctaagtgggctctgaaatgctttgttctgaccttgtatgaatgggtttttgaaaagtgat

SEQ ID NO: 498452 - DNA, 201 bp, Homo sapiens
tgccatgtcttactttcagcatttagggctgtatatgcctattttcctggaagtgctaactgggctccaagatgtttctttctgatcttgtacaaacgtgyttttgaaaagtggtcaatgtcaaaacatgttgaattcagtgaaataaaacagcacattgtctaaatttttggcacgaagcttgaatttacatttcagggc

SEQ ID NO: 498453 - DNA, 201 bp, Homo sapiens
atcaaaggtcatggagatttatttctatgttttcttttaagagttttaacatttatgttaaggtttttaattcattttgagttaattgttgtatatactgycatgtaagaacatcacctcactcctttgcatgtggctatcattatcccagcaccatttgttaaaaagagcgttttttctccattgaattttcctggcaat

SEQ ID NO: 498454 - DNA, 201 bp, Homo sapiens
gggtaacctggggacctgctacttgctaccggtgtctggagttggaatcagtcttgtgggactgagccctcaactctgtgaggtctgtgccaaccccaggyggccagtgtcagaattgaattaaattgtaggacatgcaactggtgtcagagaattggttgggaaaaacacatatctggaaaccagaaatggtgtatttgg

SEQ ID NO: 498455 - DNA, 201 bp, Homo sapiens
catcacttcctacacccccactgcaaaccttcttctccacatcaccaggtcccttaactgaattgtcaatcgtctcctctatgtgatgtgacgttgggccygctgtgtccccttcagggctgagactgctaggagtgtcacctgtggggcgcctccccaggaaccatcctcagccaaagacaaactgccttagccaaggtt

SEQ ID NO: 498456 - DNA, 201 bp, Homo sapiens
tcaatcgtctcctctatgtgatgtgacgttgggcctgctgtgtccccttcagggctgagactgctaggagtgtcacctgtggggcgcctccccaggaaccrtcctcagccaaagacaaactgccttagccaaggttctgacccctccccggagcagcccacatcccaggactggccccagtggggctacaaagcccggccc

SEQ ID NO: 498457 - DNA, 201 bp, Homo sapiens
gatagatcattataaagcctccatatgaatgaattattcatgattatttaaaattgaaatatgtctgcagttacagaataagttgcatagtatgatccaayatgtatataaacaacatcatatatgtatgtgtgtgtgtatatatatatgtatatgggtgtatgtgtatatatttcaccttgtaatattttaccttgttaa

SEQ ID NO: 498458 - DNA, 201 bp, Homo sapiens
tcagggctgagactgctaggagtgtcacctgtggggcgcctccccaggaaccatcctcagccaaagacaaactgccttagccaaggttctgacccctcccyggagcagcccacatcccaggactggccccagtggggctacaaagcccggcccccttgccttgattcagaccttctctcaaggaccactctggcccagagc

SEQ ID NO: 498459 - DNA, 201 bp, Homo sapiens
aagttaaaggatttgtgtgtgtgtgtgtgtgtgtgtgtgctcataaccaaatttctgcaggaataaagggaacgtttctatatgatgactttgcctttttaaaaaaaaaacagaaagcacatatatttaaattgtttaaggggaggtccatgctcttgacctttaaactaaattgccttaaaacctcccgaagaattttct

SEQ ID NO: 498460 - DNA, 201 bp, Homo sapiens
tcatgattattgcctactcccccacacagtgtgtgctccacaagggcagagcttttgtattgtgcactgctggatgctcagagcctagctagtccctggcrtggagtgctcagtgaatatctcttgaataaaatacattttagaaatctatctattcccttcagttcatgcaactgcaatcaaattctcatgtatggttta

SEQ ID NO: 498461 - DNA, 201 bp, Homo sapiens
tggtgcttcagttaaggaaaagtccttctcatgtaagtccatacactttccgagggctacgtcacaaatgagcaggagtctggtgccatctgtctctcccrggtgtgagtacttgatacttgtactacatgcgaaaggaaataaacacatatttacagcttagagtgacttgtcaataacatactattgaaaagactttcc

SEQ ID NO: 498462 - DNA, 201 bp, Homo sapiens
aatatctccaaagactcaatttagaactttattatgcacttatttatttaatatttcttctttttttttagacagaattttgctctgttactcaggctagrgtgcagtggcatgatcatagcttattgcagtctccaactcctgggctcaactgatcctcctgcctcagcctcctgagtagctgggactatagatgtgcac

SEQ ID NO: 498463 - DNA, 201 bp, Homo sapiens
tctatgtgacaaatatgtatactgcccttatgttgtgctaggcagtgctcaaagcactttgtttccagagagaaatgaattctactgttctcctaaatctytgttagctactaaaatatacacattttactatcataaataccagggtggtaaagagaaggaaaaatcaccaccttattaattaggaaaaagtagatttaa

SEQ ID NO: 498464 - DNA, 201 bp, Homo sapiens
ggcaacaagacgacctccccgtgggtctggactatgtgaccagctctctgagactcacccgataccgcaggcgaataacctggtgtgcgggcggctcctcytcacgagctgtaatgtcaggctctcatcctggaggtgcccatcagacaccaggaggatgttccgtgaccctcgagcagggtacaataagctaagatatcg

SEQ ID NO: 498465 - DNA, 201 bp, Homo sapiens
gccatgtgcatgttcatatgtcctaagtcttccttgatgatgtatctatatttatatatgtttatatatgttcttcataaatctattaaatatatatagawaaaatgtcagtgtttttcttcttttttgaaggcacatacttcacagtttccatcttgtatttacataaattgggaacacagtatgcaggaacatcaggca

SEQ ID NO: 498466 - DNA, 201 bp, Homo sapiens
ccctctatgctgtaaggcttctgtattctagtgtcaacttccaagcttgccaaagtcccctgcagggcaacaagacgacctccccgtgggtctggactatrtgaccagctctctgagactcacccgataccgcaggcgaataacctggtgtgcgggcggctcctcttcacgagctgtaatgtcaggctctcatcctggagg

SEQ ID NO: 498467 - DNA, 201 bp, Homo sapiens
cagaatctcttgccatcctgcaaatgaacaccttgctggccagtgggtaggattcctggaatcccggtctggccagccacccaagaggaggcaaacgtgcrtcctggagtttctcagcgatctgggctatgctgcctgcaatgactgcttagagtgtgcctggtgaggaggcaccaggactggggcccacctagtactgac

SEQ ID NO: 498468 - DNA, 201 bp, Homo sapiens
cagtgggtaggattcctggaatcccggtctggccagccacccaagaggaggcaaacgtgcgtcctggagtttctcagcgatctgggctatgctgcctgcartgactgcttagagtgtgcctggtgaggaggcaccaggactggggcccacctagtactgactggggggacgtcagacactgtccccttgaccgtgcacgga

SEQ ID NO: 498469 - DNA, 201 bp, Homo sapiens
ctgcctgcaatgactgcttagagtgtgcctggtgaggaggcaccaggactggggcccacctagtactgactggggggacgtcagacactgtccccttgacygtgcacggaactccttctcatcctgtcttggatttcctcagttttacgaaaccctcaaaggcatgtatgcttgccctgagtttgatgatcaggatcacta

SEQ ID NO: 498470 - DNA, 201 bp, Homo sapiens
aacaaaacaaacagcacaagctacactgcgaagatgagtctgcactgcatgtatttctttctacacccaggaacctggcttaccagtatatcaccccagcrttgacatactggtgagtgacgacagtgcgctttttgcaaatcctgtgcactatgacttttctccttcaagaatagatatggctggtctgaaattctattt

SEQ ID NO: 498471 - DNA, 201 bp, Homo sapiens
tcctgcacccactttccaacactccccagtaagatgaacctggtacctcagttggaaatgcggaaatcacccatcttctgcatcactcatgctgagagctrtagactggagctgttcctatttggccatcttggctctgtagggtccagccccacagggtcggtgggtttctccccatgtgtggagatgagagagtgtaga

SEQ ID NO: 498472 - DNA, 201 bp, Homo sapiens
tattttcatatttggctgtgctctagtaatatcctgcttcacaggacatgtaggattgtcctgcagttcagggaacagggaggggacagggctgggccacytctgcctctaggagcccagcctcccaatgggccatgtcagtctctcctgatgaacttcgagtagctcactcactctctcctgctgctaatctctgcttcc

SEQ ID NO: 498473 - DNA, 201 bp, Homo sapiens
gaatttgaacctggccttccaggtggttatgaagttgtatttgccaagggaggagattagaacacatttaatctaatagtttgctagtttgatttataacytttaaacacttgttataaactacaaagttataaactttaaatacttgtattgtattcttgtcccaggccctgccattgttgggaacagggctgggcccaa

SEQ ID NO: 498474 - DNA, 201 bp, Homo sapiens
ggtatgcagtggcacgatcacagctcagttcaacctcaacctcctggactcaagtgatcgccctgtcttagcctcctgagaagctgaaaccacaggtgtgyatgaccacacctggctaattttttttcttaattttttacagagacgaggtctcactatgtttcccaggctggtttcaaactcctgagctcaagcaatcca

SEQ ID NO: 498475 - DNA, 201 bp, Homo sapiens
cttgttataaactacaaagttataaactttaaatacttgtattgtattcttgtcccaggccctgccattgttgggaacagggctgggcccaacagtcacaytgtgggtcttctggaggcacccaggatcagcagactgcagtgaagagtaccacatccagagcccagaagcgccagcctccagcgggagctgcactgaaac

SEQ ID NO: 498476 - DNA, 201 bp, Homo sapiens
gtcagcatttatagcccattttccccttgatcatgatcatattgtcctgcttcttcgtatgttattaaattttcattccatactgaacattaaaaatgacrccttgtagagactctcagctatgctatcttactctaaagaatgttcagttttgttctggtaggtcctgtgtaggctttgttttaggctttattaggatgg

SEQ ID NO: 498477 - DNA, 201 bp, Homo sapiens
aatctctgcttagctctgtagcttcccagctgttgcttttttctggattccttgaggttgcacctgtatatgtagaggttaggagacagccaaggatctgmggggtatctggatgcagatttcagagttccctgctctgtggttccctcctttataggattttaatccttaacttccagccactttggcaaccttaaactc

SEQ ID NO: 498478 - DNA, 201 bp, Homo sapiens
ttatcagcttaacaaatggagtgataagctctaacacaatatacatgttgaataatatctgtattcccatgacctatgtgaaaatatttagagtacaggtrcaagtgcttgtgctctacttcacagtgggaaatttatgtggattacaatccattagttctagaatctaggaaattaagatctcaccccatcatctgttca

SEQ ID NO: 498479 - DNA, 201 bp, Homo sapiens
cactgactgcatctcttccttgctcagaattttggcaggttcctactgaacttctggcattcagagaactctgcaatcagggtgaagccatggttgtttcyggaaacacaagggaaatttctgccttttattatataaacatctattgtttgaatttcacattaggagattgaatgaattttgtaaaatagcttttgggtt

SEQ ID NO: 498480 - DNA, 201 bp, Homo sapiens
cagatgtttaaaaaacatacctgttttctccaactatgcttggattttgcattaaaatattcaaatactccggcaccacactgggacaaaatccttaagaygtgacgatttgctgtagaactgatcacatttcacatgttttaattttgaagacattagaaatatttttgaagtacatgttaacagtgttgagaaagctca

SEQ ID NO: 498481 - DNA, 201 bp, Homo sapiens
ggtgccaaggcaaagaatgtgcaagacactgaagatgaagactggacagatgggggtagaaacccttcatcacggagggatgcttgagggaggctcactgygcaagaactgattcttcaaagaatattctcgttttatgataaggctgctactcaaccttgtagccatggggactccaaaaacaaaggttctgggaaatgg

SEQ ID NO: 498482 - DNA, 201 bp, Homo sapiens
gaggaaacatttaccaacacacgtaggaggataacctgataatattaagtggcagcctctcaaatgaaccccaggcttctatacatacagtttggccatayatagagccagcattcttaactgttcaataatcacctcttcattacttattcccatcctacaggtggatatcttagatgtcaagagcaataatttacccct

SEQ ID NO: 498483 - DNA, 201 bp, Homo sapiens
ggcagtggtgcagtcacagcttaatgtagccttgaaaccccaggtctaagccatcctcttaagtagatgggactacaggcacgcaccaccatgcctggctkatttttaaatatttttgtacagatggggttgcccaggctggtctcaaactccaggcctcaagtgactcttccaccttctgctcccaaagtgctgggatta

SEQ ID NO: 498484 - DNA, 201 bp, Homo sapiens
gttggcctctgtgctctactgattctctgggtgtttaatctgggctcatgactttaaacactatgtgaatgctgctgactccccacttataagtccaactkgggtctcctccctggtcctatgtagtcacaagacctacgtggccaaagataaactcctgatggcccccaacctgccctcctgtgactttgaccattctag

SEQ ID NO: 498485 - DNA, 201 bp, Homo sapiens
ggcacatgcctgtagtctcaattaattgggaggctgaggcaggactatcccttgagcccaggagtttgaggctgcagtgaggtatgatcgcaccaccacamtccagcctgggagacagattgagaccatctctaaaacaacaacaacaggccgggcacagtggctcacacctgtaatcccagcaatttgggaggccgaggc

SEQ ID NO: 498486 - DNA, 201 bp, Homo sapiens
gcttggattataggcatgagccaatttgcctagcccagaacttcctgaacacctgttttgtgtttgagaactttttcttaatcatgacacttaaaaaatarttatcaatatttctttaatatcataaaatatccaggtagtgtttaatttttcctatctcatttttttaaatgcagtgggttttgtttgtatcaggaccta

SEQ ID NO: 498487 - DNA, 201 bp, Homo sapiens
tatgtctctaaaggtttatttacaggttctgctcctcaaccttttttttctattgccatttatttttctcttgccatttatttccccacattccagacttygctgactgcatttccatggtgtcaagtaacatgttcctctattctctgatctaattcaagtttagaaatcaaggggttttgtttaacttctttgatttta

SEQ ID NO: 498488 - DNA, 201 bp, Homo sapiens
aagaaaatctgctggtgagaaggggagggaagaagacagaaaaaaaattagcaaaatatattggtcttcccatagaataacaaactctgcgtcttcttacytgtgtgcagtgaggaatgaatccatagacaaggagtcgatcattgagaaacaaggacggcacctgggctggggcctgcagggcctcgggcacatctggat

SEQ ID NO: 498489 - DNA, 201 bp, Homo sapiens
cattctgtttacaggttcaaagcccctgtctttcacagctcctatctgtgaaagcagctcctcctgctttcctttttctctttagcacctgtcaccacctracatgttatgtgtttcactctttcatcatgattattgcctactcccccacacagtgtgtgctccacaagggcagagcttttgtattgtgcactgctggat

SEQ ID NO: 498490 - DNA, 201 bp, Homo sapiens
cctgggtatgcacagtgaatgagggcccaagtgtaactggtatttaggaacgtgttttccaggttttcaggggcagtttttcatgccacagagaggccacrttagagacgccatacccatattcctgcacatttaaatcagtttaagtggctttttctctgtaataacctacaaaatacaaactcaaacacgttttaaaat

SEQ ID NO: 498491 - DNA, 201 bp, Homo sapiens
ttctgtttctgggtaggatataggtggatgcagaaaatgtcacttctgttataacacaccaggcaatctacaaaatcataacttgttttgaactcatcaaycaagcgaactgaattccaaagaggggacagatgggacacaggatctgtgtgaactcctcccggctgagagtgggtaagcttactggtttagaagaattgg

SEQ ID NO: 498492 - DNA, 201 bp, Homo sapiens
aacccctacactaacctgaaagaacaggagttgccacttctgggcataaatgtcatttatttcagtctctcttcttcttttacacacaatgtccaacattyaatcacaaattccaaaatatacacatttttaaaaagcaaggaaaaaatgacccaatgtcaagataaagcaattaacaggcagattcagagatgaccatga

SEQ ID NO: 498493 - DNA, 201 bp, Homo sapiens
aggaccactctggcccagagcttcccccaagatcatctgaggactctgttgtctcctcggccacgtcctgcctccctcactccctcacaggtgcggctccygcaggcacagtcccacaggcttcctgaaaacaaattccatccagagtctgctttctagggaacttgacctaacatttctcccactgggcctcttcctact

SEQ ID NO: 498494 - DNA, 201 bp, Homo sapiens
ttttatacaaatcttctctactgtatcctgttaaaagaaaaatacatttgtataactaagcatatattaagtttcacaatgagactaaagtgaatgtaatyttggcaaggccacaactgtcagcaagacagctggtttcactttcaagcagtgaaacacagaaagtttgctcatggaatgacaggaacttctaaaatacaa

SEQ ID NO: 498495 - DNA, 201 bp, Homo sapiens
aaagttattaggtcatgcacatgttaaaggctccagctcctccctcatcccaaactgcctgtggaggcggcactttctgctcttctgggcaactcctgccyctgtagtaggcagtgatcctaacattaaccccaggaaaatctggaagaacctgccccagctcaaagccatggtgtccttgtaggtgttggttgagcccct

SEQ ID NO: 498496 - DNA, 201 bp, Homo sapiens
cactgcaacctctgactccttggttcaagtgattctcctgcctcagcctcctgtgtagctgggattacagacacgtgccaccacacccagctagtttttgyatttttagtagagacggggtttcaccatcttggccaggatggtctcaatctcttaaccttgtgatctgtccgcctcaacctcccaaagtgctggaattac

SEQ ID NO: 498497 - DNA, 201 bp, Homo sapiens
gaagatagcttgacaaaaaaagacaccttcacatatagatgaacaacacaagaattagagctgacttctgctcagaaaccatataagccagaagacaatgmagttaacatatttaaaatgctgaaaggaaaacaaataaactgtcacctagaatcccatactcagcaaaaaatatctttcaaaaatgaaggtgaaagactt

SEQ ID NO: 498498 - DNA, 201 bp, Homo sapiens
ggaaaacaaataaactgtcacctagaatcccatactcagcaaaaaatatctttcaaaaatgaaggtgaaagactttgttagataaaagaggaatgcactcyttgctagcacacttgcgctagaaaaagaaaataaagaaaactcttcaagcagaaggaagatttctttgtatctatagaaagaaatgaagagcaccagaaa

SEQ ID NO: 498499 - DNA, 201 bp, Homo sapiens
gtcacctagaatcccatactcagcaaaaaatatctttcaaaaatgaaggtgaaagactttgttagataaaagaggaatgcactctttgctagcacacttgygctagaaaaagaaaataaagaaaactcttcaagcagaaggaagatttctttgtatctatagaaagaaatgaagagcaccagaaacggtaaaaatgtgaat

SEQ ID NO: 498500 - DNA, 201 bp, Homo sapiens
caacccacacttcccaggcccagggtgtggatgtcgtcattaaccatcaaagcaagggtgactttcttaatgtggaaatacaaataaaataatttaacctygaattaccaataatacatacccttttctcaactgccacaaagcttgtaaattgtgttatgagagagttttctttactgagtttaataatcagagatttca

SEQ ID NO: 498501 - DNA, 201 bp, Homo sapiens
aatccctttgtacaggctcatgatatacatcttaataaaaacatgacagatttaagttacagatcaagtgtgtgactccagaacatggaaccatttatttytaaattagaaattaacattatttgatagtgaaaccatgggtttctttaatatataattctatgcattcaaaaagactctttatgtggacttctattaggc

SEQ ID NO: 498502 - DNA, 201 bp, Homo sapiens
agactgttaataaccatgtggtaagactttaatttcaaacactttttgccctgtattataaaaaatattcacagagcatctttgtatcatagtttaaagtwtcaaatttcagaagtttttgtatttcattgtttacataatcattttaaagatcctgcaccactgtgagctactgaatgttacgaaacatattcttgtgta

SEQ ID NO: 498503 - DNA, 201 bp, Homo sapiens
aaaaatattcacagagcatctttgtatcatagtttaaagtttcaaatttcagaagtttttgtatttcattgtttacataatcattttaaagatcctgcacyactgtgagctactgaatgttacgaaacatattcttgtgtatcctaatgtacctaaggtcttgcatgtaagaagtgttttaatcatttttgaacatgaaga

SEQ ID NO: 498504 - DNA, 201 bp, Homo sapiens
ttctaatcagtatttttagggctatcctatgaccaaaagtctccatatagatctgtacttctccatgtaccttactgtagttaatatcataagaatgacaytcataaatattatctcctaagtatgtctaatgaaaaaatttgggaagaaatgtgaaatccttttgtaaactgtgaagtgtgtatacaagtgtaggacaaa

SEQ ID NO: 498505 - DNA, 201 bp, Homo sapiens
gaggatattctggacagagagaacaatgggtcacatctgtttttcattttgttctcaacatccaaaaagcaggaagtacggtaagcatcctcgtcctcatrtgtattattagaatgtgtagaaaagagaatgtgtaaataagggcctgggactgtttagatgcttcataataaatgttcctctccttccctttttactaac

SEQ ID NO: 498506 - DNA, 201 bp, Homo sapiens
cagtagcaagggtatagctgtgccttcagagaaatctcgaagaagagcccttggatcaccactcaagacataacaggatcaagggaaagcatgattttccytttatttctgagcgtgtctctggccagaggggaaggagaaagagatgaagaaacagaaatcatcattggaagatactactgctaaatgaagagaagagaa

SEQ ID NO: 498507 - DNA, 201 bp, Homo sapiens
gtccaaagagatgcattgctattttcagaagtagttctagttgagtttacatttcctatagtatttcatgctatgacagtaccacatttaattcaactctsttttgtggtgagaaaaagataaaaacattaaaaaatgatggcatatcccaaagagcttttgtttaagtggattgtatctattgatatttactatatcaga

SEQ ID NO: 498508 - DNA, 201 bp, Homo sapiens
tagtggttacataagctttgcgtttatttcatccttccccaagtcatcagatacttggttacttaaaagtgttcactattggccgggcgcggtggctcacrcctgtaatcccagcattttgggaggccgaggcgggcggatcacgaggtcaggagatcgaggccatcccggctaaaacggtgaaaccccgtctctactaaa

SEQ ID NO: 498509 - DNA, 201 bp, Homo sapiens
ccatgaccctgttccctgaatgcgcaatgttttatcacactgtagtttatgacacttggaaatacctgaggatttaacgaaaaggaaaactttccgccatkttccttaatgtcagtttgtagctttttcttctgctgctgaggtaagtacttcactttcaaacagaagatacaatttgcaaagattcccatcaccatcctg

SEQ ID NO: 498510 - DNA, 201 bp, Homo sapiens
agaaacccatctcccatttcctttaatggttaaatataattccattcgaatataactttcataattattacattaatacactagcttacaaaacagtttayaacaattaggagcatgcttattaatgaatgaaaataatgacttaataaatggaaacatagtgccttacctagagattgaatgcctttttgtttaagaaag

SEQ ID NO: 498511 - DNA, 201 bp, Homo sapiens
ttttgtctgctcttttcattgcaattatgcttaatcaagaagggaagaacattttctggtggtctggaggcatgcctgcctttcctaagacagaaggtgcragactgtggagtcactaggaaatggactgcggttagggcatctgactggggaccaagaccacccataaccctccagcttcctgcaagcctcttggcacag

SEQ ID NO: 498512 - DNA, 201 bp, Homo sapiens
ggcccgatacttcctgagaccattccttatagattttctatgactgcgctgagggcaaatgttttgtccttagacttgggacctcctactcaacagaccargggttttgtatttggttcagttgctaatgacaacagtagcatttatatctcacttactgtgaacaggcacagtttaaaaatcctttacatacattagctc

SEQ ID NO: 498513 - DNA, 201 bp, Homo sapiens
agagggctaaatatattgggcttgattttttgaagatattttaactaaaaatcttaaacttgaaatcagtgagatggtggttttcaccaaggaagtaaatkagtggatggctcaagatcttgaaaacatcgtagcgattcactgtaaaggaggcaaaggtaataacattttccttttcatttctccctttctaaatacatg

SEQ ID NO: 498514 - DNA, 201 bp, Homo sapiens
agatcttgaaaacatcgtagcgattcactgtaaaggaggcaaaggtaataacattttccttttcatttctccctttctaaatacatgtaaatataaagtamaagaacaagatacgtattgctattaatacgtattaataactgttatcattttaaaatattagctccaaggtggaaagaagggaaggagaaaggaaagagg

SEQ ID NO: 498515 - DNA, 201 bp, Homo sapiens
tcgtagcgattcactgtaaaggaggcaaaggtaataacattttccttttcatttctccctttctaaatacatgtaaatataaagtacaagaacaagatacrtattgctattaatacgtattaataactgttatcattttaaaatattagctccaaggtggaaagaagggaaggagaaaggaaagaggagaggaggaagggt

SEQ ID NO: 498516 - DNA, 201 bp, Homo sapiens
accatgcctggctaatttttgtattttttatagagacagggtctcactgtgtttcccagactggtctcgaactcctggactcaagtactcaagtgatccamcaacctcggcttcccaaagtgctgggattacaggcatgagccttcatgtctggagagaagtttgtaattttgaatgtagtaaaatttgttcatctatgtg

SEQ ID NO: 498517 - DNA, 201 bp, Homo sapiens
atgtttatgaaattcacccttatactgatgtagtaaagatattccacatttcttaaaaaatattcaagttccatttttagtatttgggtctttaatctaaytggaagttgggggggaagtattttttttcatatggatagccaattgtcctaacaccatcaattgcatgctaatttgttctccattaatttgtagtccctc

SEQ ID NO: 498518 - DNA, 201 bp, Homo sapiens
caccaacaacagacaagcagagagccaaatcatgaatgaactcccattcacaattgctacaaagagaataaaatacataggaatacagctagcaagggaaktgaaggacctcttcaaggagaactataaaccactgctcaaggaaatcagagaggacacgaacaaatggaaaaacattccatgctcatggataggaagaat

SEQ ID NO: 498519 - DNA, 201 bp, Homo sapiens
caaaaaataactcgatacggactaaagacttaaatataaaaccaaaaactataaaaactctagaagaaaatctaggcaataccattcaggacataggcacrgtcaaagattttatgaggaaaacatcaaaaattgcagcaaaagcaaaaattgacaaatgggatctaattaaactaaagagcttctgcacagcaaaagaaa

SEQ ID NO: 498520 - DNA, 201 bp, Homo sapiens
ttagttcaaactattttccaattttgactgtgcttgtttttttttttttgacccatgagttatgtagaagtatacttccttatttccaaacatatgagaattttgtttttaaatttttgatttctgattatattgtgttgtggacacagaacatactatgtatttttttcttttagttctttgaaatttgtttagacttgc

SEQ ID NO: 498521 - DNA, 201 bp, Homo sapiens
tgaaacagcaggctaggggaccggcagctcccagacactgaggagggtgctgtaaagagtcagcagctgtggccctgacaggctggggctccaggcatttrttcagtacagatttaaggacaaaggtcttaagtaaacaccactagagggtaattaacattgctgacctcccaagtagacggcagtcacgtgcctgcagat

SEQ ID NO: 498522 - DNA, 201 bp, Homo sapiens
gtcaaatatttgagactgttgaatattcaagtctattcaacactcagaaaaattctgaggttgttcattaatattaattagctacttcctcatttgttctstcatctgctagaacttgttagtgaacaaggggcaacatataccaaagttcttcagaaaattctatggggaaacttaatattttgaaaattctctccctgt

SEQ ID NO: 498523 - DNA, 201 bp, Homo sapiens
ccagcagaaggcctggtagtaaagcctccaggatgttgcagtggagcagactgtgcagagcttaatgagctccctgaaaaaacaatgccacaatagggtgmagaaggtgggttctggggaggtcctgtgggacaagacgccgactgtgggatccagtcagcacaagtgccaggcacagggccttggctgaattgagatgca

SEQ ID NO: 498524 - DNA, 201 bp, Homo sapiens
acttcctgattactcaccaaaccaccttactttttgcacaattcgaaacctaactttaggaaagaaggccgtttggcatactggaaacaagaaacaacgcrtgctactgcgaaccgcaccgcacggggtgcggagacttggtgtgactgtcggctccggtgggcgccccccaccgcacccggtttctcgtcaccagggctg

SEQ ID NO: 498525 - DNA, 201 bp, Homo sapiens
acaaaccgatgtggagagaaaatccactgctgtctaaggagctgccttccatggtgctaatgacagctttgcagtctgtgcgctgcaaaacaaacaccgcracaacaaggtgagtaatggagtaacaccatattagcagtctgcacttacctgtcatggagcaaacccttgcatagcttacataactctattaagaatcaa

SEQ ID NO: 498526 - DNA, 201 bp, Homo sapiens
ttcctgattactcaccaaaccaccttactttttgcacaattcgaaacctaactttaggaaagaaggccgtttggcatactggaaacaagaaacaacgcgtkctactgcgaaccgcaccgcacggggtgcggagacttggtgtgactgtcggctccggtgggcgccccccaccgcacccggtttctcgtcaccagggctgcg

SEQ ID NO: 498527 - DNA, 201 bp, Homo sapiens
cagacaaaccgatgtggagagaaaatccactgctgtctaaggagctgccttccatggtgctaatgacagctttgcagtctgtgcgctgcaaaacaaacacygcgacaacaaggtgagtaatggagtaacaccatattagcagtctgcacttacctgtcatggagcaaacccttgcatagcttacataactctattaagaat

SEQ ID NO: 498528 - DNA, 201 bp, Homo sapiens
gttgtttaagctccctagcctgttgcatttattaatagcagcctgagctaagacaacaggtaagaagaaaaaggttgggaggtcggctgattcattgaaaygagttatgaacagaggtcagtaaacacataggaatcaatataaacagcattacctccatgccatcatccaggaggaagtgtgaggatatcaggaaaggac

SEQ ID NO: 498529 - DNA, 201 bp, Homo sapiens
tataatctcctggtgtgctgtttgctaagactgttggaaaagtgcagtattagggtgggagtgacacgattttccaggtgccgtctgttactcttttcttygactaggaaagggaattccctgacctcgtgtgcttcccgggtgaggcaatgccttgccctgcttcggctcacactcggtgtgctgcacccactgtcctgc

SEQ ID NO: 498530 - DNA, 201 bp, Homo sapiens
actattttactgttgctttctaatacgtcctcatttccagtcatgtgagtataatcatctttttctttttcttcacaattgtttgggtgttttaggtcacytacttttccatataaatttggaaatcaactagtcaaattacacacaccggatagaaatttgtttggaattgcattgaatttatagactggggagaattga

SEQ ID NO: 498531 - DNA, 201 bp, Homo sapiens
aaaattctctccctgttcctgaattttccctgtgaactgggaaagggccgtcagtatagcgtggtggttaagagctgggtttgagtcctgactctgcaatmacatgatattggccatgtgatactgtgtggctttcattcaacactgggaatctcagtttcctcaattatgagaataacctgaggtcctatgggtttgtgg

SEQ ID NO: 498532 - DNA, 201 bp, Homo sapiens
gcccaacagtcacattgtgggtcttctggaggcacccaggatcagcagactgcagtgaagagtaccacatccagagcccagaagcgccagcctccagcggragctgcactgaaactctttgagcccatttcctgtgcagcccaaggcacaaatacatcagccctgcccgccacaggagactatgggcaagctgtcacctgc

SEQ ID NO: 498533 - DNA, 201 bp, Homo sapiens
aagcgccagcctccagcgggagctgcactgaaactctttgagcccatttcctgtgcagcccaaggcacaaatacatcagccctgcccgccacaggagactrtgggcaagctgtcacctgcaaacaaattctcttgctacatacttatagtgtacacatgtaagataattccctatagctgtttctaaggtttattaaataa

SEQ ID NO: 498534 - DNA, 201 bp, Homo sapiens
tttcttaagctttcttttagccccaacctatgctcttttaaatatatcttttcaggttgtatgttactctttataattttgatttcctatgatttctcctrgtggaatattgatgaaacatttcttttctcttttatctctctgtagtaataatgttccagctttcacatagtggtagatgaccatgtttacctgaatgaa

SEQ ID NO: 498535 - DNA, 201 bp, Homo sapiens
acaaatagaaaacaactagcaagatggtagatataaatctgaccagatcagtaattgtattaaataaaaatgacctaaacaatacaaagtgcagaaactcmcagattggataaagcagcaaaattcaacagtatgctatctaagtagtatagggttatagtgacaagtcagtcagtctagatgttttgaaaaggagaaaac

SEQ ID NO: 498536 - DNA, 201 bp, Homo sapiens
aacaacagattctggcaaggctgtggagaaataggaatgcttttactctgttggtgggagtgtaaattagttcaaccattgtggaagacagtgtgggtctycctcaaagacctagaaccagaaataccatttgacccaccaatcccattactgggtatatacccaaaggaatataaatcattccattataaagatacatgc

SEQ ID NO: 498537 - DNA, 201 bp, Homo sapiens
gaacgtatactggttgtaatgtaatgtattctggttgtaaggttcttacatatgaagtagtataatattgtaggctgtatgtggtaagttacagatgtatrtagtagtaaaccctaaagcagtgctgaccaatgtaactttctatgatgataaaaatgctctacatatgcactaagtaataagatagccactggccacata

SEQ ID NO: 498538 - DNA, 201 bp, Homo sapiens
ggcacttataaaaagtgtggaaagaggctcatgggtagagattttttaatttttattttagtagagacggggtttcaccgtgtcagccagaatggtctcamtttcctgacctcatgatccacccgcctcggcctcccaaaatgctgggattacaggcgtgagccaccatacccggccgagatttttttaaatggtactttt

SEQ ID NO: 498539 - DNA, 201 bp, Homo sapiens
ccacccggagagcgaggagctcattgcccagtatgaccaaatcattaaagagctggattccggcgccgagggcttgatggaacagaattaccccacacctkatcccttgcttctcactaaggaggaagaagggaaggaagagagtaaaggagaaaaggagaaggaggggaagaaggagctagaagatgaggaggatgactt

SEQ ID NO: 498540 - DNA, 201 bp, Homo sapiens
tttttgttgtaccatttgaaattaagttacagacattagatactttagtctgtgtttcctatgaatggggatattctcccacataaccacaatactgttaytgtacctaagaacattatacaataattccttaatacgactagtatccagttctcctactgtgccccaaattacttccatagtttttttctccccatttgt

SEQ ID NO: 498541 - DNA, 201 bp, Homo sapiens
caggaacaccaaatcttgccttggcccagcaatccctcttcttctctggaacgctgtgagaagcatctgtttttgtgaaggaaagcaatgatgcttccttrttagctcatgatttagccccgaatctctgcacagaactctagaaactcctggttagaccatggtgtacatctttccttctttttggtaaacccagatcct

SEQ ID NO: 498542 - DNA, 201 bp, Homo sapiens
atgtgctttcccaggaaaagaaggagattgaagatactctagggaacaatttggtgccaacaaaaggatggggactaaatgaccctgtcacttttttttttaaaaccaaatattgatggttaagcccatgccactgttatatattggcaaatgtagaaaacagtgtgtacataaatcaagtgatgcaaattaaagcaagcg

SEQ ID NO: 498543 - DNA, 201 bp, Homo sapiens
tggatactaggaataaatgctcaatttcagcttttttggatggtacatataaaagaggggaaggcaaaaaaatcagagccaggcagagatgtgggaccaaragtaagataaggaatgagatcttcagctgggggaaatgaatgctacttatttgttgttttggagtttcatacgttagctcttggctgtgagttgttgggc

SEQ ID NO: 498544 - DNA, 201 bp, Homo sapiens
caggaagaagtacattttatgtgccaggctttgtgcattgcattgaggtaataaagaaaagacacagtgtgcatcccagggcagcattaggagtgcttcayatatgggactagaaaacatcaggaaacacaaagacggaagtagtttgtttcagaagcaggggcagaccatgaaaagcactcttcccagtgcaatttattt

SEQ ID NO: 498545 - DNA, 201 bp, Homo sapiens
gtatcttttctgcttggaccatctggagttagttctcataagattgttgggactcaaataactgaaacaatatgcttcgaatagtccttagttgcatactmggtgctcagtaactggtcagtgatgttgtttttattgtttcttaaattgtaaccaagaagtttgaatcaaaaaaggactctgtggaacaattagtaaaca

SEQ ID NO: 498546 - DNA, 201 bp, Homo sapiens
ttatttgttaaatgtttgatggttgcctatttctgttgctgtatatgggccacagagagctctttacagttggtcagatgacatagtggtgtattgaatgwctgagaacttgcattgttggcaccgagctaggggaaggggatttgcgctatgatatgtactcagaccactgtggaatgacttctcgttagatactaatgc

SEQ ID NO: 498547 - DNA, 201 bp, Homo sapiens
aggtgtttatagtattctcttattgtagtttgtatttctgtgggatgagtggtgatatcccctttgtcttttttttttttgagatggaatctcgctctgtygcccaggctggagtgcagtggtgcgatctcggctcactgcaagctccgcctcctgggttcatgtcattctgtctcagcctccggagtagttgggactaca

SEQ ID NO: 498548 - DNA, 201 bp, Homo sapiens
cggaagtagtttgtttcagaagcaggggcagaccatgaaaagcactcttcccagtgcaatttatttgttaaatgtttgatggttgcctatttctgttgctrtatatgggccacagagagctctttacagttggtcagatgacatagtggtgtattgaatgactgagaacttgcattgttggcaccgagctaggggaagggg

SEQ ID NO: 498549 - DNA, 201 bp, Homo sapiens
cattctgaaggagatagcagaggcactttttgtagtggcaggaacatggcaggacttcttattcagctgtcacttctgtacagacaatgtccttctgttcygggagtatccttatgcatagagagtatccttctgtacagggactaccttctggatgggcaggcttctgctcacatctcagccatgccctttcacaatatt

SEQ ID NO: 498550 - DNA, 201 bp, Homo sapiens
acagaagaaaacaggcaggggattcaagagaagggaaaggtgtggagaaaaagacagacacaagtgattcaagatttaagagataagggattgtcctgctytctagctataaaacctttctacactacctaaaagagatgactgcttctcccttaaggactatacccagctttttcctcaccaggctaataaatgcactta

SEQ ID NO: 498551 - DNA, 201 bp, Homo sapiens
atatgtgcagtctgggtgaatgaatctgaactctgagcgcagtctaggaagggaggatataaataccataaagatttagaatcttgtttctaagactatgyaatactctttattccgcagaatattttctcccctgtttctttgccattctgaaggagatagcagaggcactttttgtagtggcaggaacatggcaggact

SEQ ID NO: 498552 - DNA, 201 bp, Homo sapiens
cataaaaatactgaggtttccatgttattttagtagtttatgggcacaaaggaaccaagtctgtgaaattagatctctgttggaaaataagggattaactytggaaaatacagaacttgtatttgtttctaggttaactttatgtttgtcagtattctgttgttccagggatggaatgggtatcttgcattgaagacctct

SEQ ID NO: 498553 - DNA, 201 bp, Homo sapiens
agaaaaaataaaatacagaaaacttaaaacactaagatgaacactgcacaccacctagattcaaagttgttaatattttgccatcctttggtattttatgsttttatttgtttttgttgtaccatttgaaattaagttacagacattagatactttagtctgtgtttcctatgaatggggatattctcccacataaccaca

SEQ ID NO: 498554 - DNA, 201 bp, Homo sapiens
aatctaatattttgtggtcctgagatgagacagctctgtatgtgttgacacgaggtgtggtctctagggtgtattgttaaaaatactaggtctctctgtgkgtgtgtctctctctctctctctctctccccctccctctccctctctctccttggcaggcaagataatgcattgggtaagagcactggaacaggtggtatg

SEQ ID NO: 498555 - DNA, 201 bp, Homo sapiens
agggtacatgcatgttacttggatatttttagaagaacagcagttgttctttaaagtgacttttatatcgctttgcaatatacttgaccataattatatcytctctctctctcttccctgctgatttccttccagttcttaagctctaataatactaaaatacacatttattaaacatttaccaagtactctgttgagtac

SEQ ID NO: 498556 - DNA, 201 bp, Homo sapiens
agatctgcttgcccacttataccttagagcctgtcagaggcagctagttatacaaccagccatcatccaagcagtctgtgattctggagagttgccagggragagaccttaaatggcccagtggtgcacttgaggttcccaactgcttctgggtccagtgatctcatggcatccccagaatcattctagagtagactttca

SEQ ID NO: 498557 - DNA, 201 bp, Homo sapiens
attcttggttcaaggcctctctcctatactcagtccgttttctctgcttggaacattctcttccttcctcctctgtggtcaagagttactctttcttcaargaccagcctaaatcccacagcctcctgcagctgtcccttacattggaggttctagtcttctctgttccctagagttggcagctctcggtgcccatgttat

SEQ ID NO: 498558 - DNA, 201 bp, Homo sapiens
taaagcatttatgtgaatcagtggaaactgaatttgtacggctgaggatctgtactgcagtttcagaaaagtcagtatagtttaattgaggtataaagggytctcctccccatctgagttgtgacaagttgagaaatacaaaaaatgaggcagatggaagatcaaaacaccatctttattaccagtaaaactgttgccaga

SEQ ID NO: 498559 - DNA, 201 bp, Homo sapiens
actccgtaccattctcattcttggttcaaggcctctctcctatactcagtccgttttctctgcttggaacattctcttccttcctcctctgtggtcaagasttactctttcttcaaagaccagcctaaatcccacagcctcctgcagctgtcccttacattggaggttctagtcttctctgttccctagagttggcagctc

SEQ ID NO: 498560 - DNA, 201 bp, Homo sapiens
tgaatgaatgattaaaggttgccaggaaatagaacagagaaatgtatattatttttttgatttctctagtactgaaatggttcatctgtttgtcttcttgytctttatactccactgggggctcctataccatctccccaacccctcctaggccctcccatgacttcatatggtctctccatgttaacatctgaaactcaa

SEQ ID NO: 498561 - DNA, 201 bp, Homo sapiens
atgttttccgcttttgaatattatctatttttctgaaaatatttttaaatgccttttctttaatataaatgactatcaggaaatacatatttaaaatgagraaatgttttctgctagcaaaataaatgtatttaattgttttgacagttatactcagtttttaaaattagttacaggttgagatgtgatttagaagaaagt

SEQ ID NO: 498562 - DNA, 201 bp, Homo sapiens
gcgctggttccgggacagacaggtattccatttagagccacccagcagttggggaagttggggattcttaaacttggcaggaaagctcaatgcccctggtrccatctcacacttacacccttatcagatgctgtccgagatccagttgtaaccaagggagccataattaaggagcctggctcagctgggataggagtggtg

SEQ ID NO: 498563 - DNA, 201 bp, Homo sapiens
taagaaaaccaaaaagcaaggaaaacagagaaggagtttagtctgtttattttatcttcttgctaaattttctctcaccgcacactaagttttttttgagrgcttgctgtcccctcatttttgtgtctgacttgcgtttcaggtgaggtaaagcaggaatcattctgatgggatgctcctctgtgattatccagtgccaga

SEQ ID NO: 498564 - DNA, 201 bp, Homo sapiens
tggaggttgcggtgagccaaaatcgcaccactgcactccagcctgggcaacagagcgagactccgtctgaaaaaaaaaaaaagagagattgtaaagaatcrctttattaacaacccctggggcttctgactccctggacccgggtttcctcttttccccctttgatgccacactctgaactctcttagttctccttagggt

SEQ ID NO: 498565 - DNA, 201 bp, Homo sapiens
gtattctctctgatctgtgagtatatttcagttaaattcagtaaaaatttgatgagtatttgctgtgaactgaaaggtagcaaaggtttgtcctttggacrgaagtacaggtgggaaaggttttatgaagtggctgggatttgaggacgagtattaggagtcaaagtgcacagctattaagaagacattcatttggcagtt

SEQ ID NO: 498566 - DNA, 201 bp, Homo sapiens
atcactataatcagtcagtaaacacaattgaacgaggtaattaaaaggcccagtcctgttgtgggcctgcaactaggtaacatggagtgacggtagcactrttaaatctggattgaaaaaatcatattaagcaggccagttttagacagactaaattaataatttctctatccagtgacagccagctattaagtagatcta

SEQ ID NO: 498567 - DNA, 201 bp, Homo sapiens
gaaaaggggagtctgagaggtttaataagaattctggaataggaaagttgagttttggggggacagcatttctccatcaccacttattaagatgagggcasggtaaggtacaatttaaattacagcaggtggaatctccctttataatgaggagtactttcttctgatgcaaaagattatgagcctcgactaagctgtgtt

SEQ ID NO: 498568 - DNA, 201 bp, Homo sapiens
tccttctctgtagactcacttctccagctattctgggccatttgctataccctgagtgtgattccagccttctagttaaatgcccatgcttatgcctttcytccacttgagatgccaactatatttagcatctattccaactacatttatccaaatcttctcatcctccaatgtccagactgcatgccacctcccagattc

SEQ ID NO: 498569 - DNA, 201 bp, Homo sapiens
tctcttgtccagttcatgaactccctggagttttgcaatgcagtcatacaggtaccagagcacaataaaggatccctttgctatggcttcattcagagcamaagcactgcaaaggattaattttaaaacgttcattttttaaaatgttaataaatgtttatggaatattggtgctttaagccaattgaatgtccttgaatg

SEQ ID NO: 498570 - DNA, 201 bp, Homo sapiens
cactgaatcggtgtgcctaaggtttagctgtggataacagaaaactccctttacattacagaaaactccctttaatgatcctttcatattctgcacaccasttctatttacaactcactagccaaaacatacatagtaacatctagatgcaaaggaagcagggaaatgtggttttttattataaagtcagggtttattccc

SEQ ID NO: 498571 - DNA, 201 bp, Homo sapiens
taatggaaccacgtgtgcaaagacttggaatgggaacagagtatgttgcttctagctaacgacaagtatatgacctgccctgaggataagagatgttttgrgttaggctaagtacagctctttctttacagcattgttgtagatttcattggccagattttaagcccaacctgcctagaagacagactagcatttattctc

SEQ ID NO: 498572 - DNA, 201 bp, Homo sapiens
aaagctccttctacctccttctctgtagactcacttctccagctattctgggccatttgctataccctgagtgtgattccagccttctagttaaatgcccrtgcttatgcctttcttccacttgagatgccaactatatttagcatctattccaactacatttatccaaatcttctcatcctccaatgtccagactgcatg

SEQ ID NO: 498573 - DNA, 201 bp, Homo sapiens
tttcacagccagcatcacttttgattttctttttcttttttcttttctttttctttcttcttctttttttttttttttttttttttttgagatggcgtctmactctgttccccaggctgaagtgcaggggcatgatctcggttcactgcaacctctgcctcccagattcaagcgattctcctgcctcagcctcccaagtag

SEQ ID NO: 498574 - DNA, 201 bp, Homo sapiens
ggagaggagcagtggtagcacaagtgccatagatttgccatctacttaataaaacataattttttattgtaacaattttgtgacagcaaaaattaaagtgragccaaattaaggtcccatcaaatgttggctgtctcattagcacaactgaatttcttatgactctctcattttgtataataaatcaactgatatcttttc

SEQ ID NO: 498575 - DNA, 201 bp, Homo sapiens
agatgtggcaccgatggttctgcaattgtcagggaaaggcatccctgtgagcccagccagccctgaagccttgtgttcttcctgcaggcccattcatcagygtagtcctgtcaaagctggagaacatgctggagaactctttacatgttaatttgctgcttatcgggatcattactcagctagccagctacccccagccac

SEQ ID NO: 498576 - DNA, 201 bp, Homo sapiens
tcatgaactccctggagttttgcaatgcagtcatacaggtaccagagcacaataaaggatccctttgctatggcttcattcagagcacaagcactgcaaasgattaattttaaaacgttcattttttaaaatgttaataaatgtttatggaatattggtgctttaagccaattgaatgtccttgaatgagtgaaaatgtta

SEQ ID NO: 498577 - DNA, 201 bp, Homo sapiens
gaagagtaccgtggaagcagagggccagatgtaaccatcactataatcagtcagtaaacacaattgaacgaggtaattaaaaggcccagtcctgttgtggrcctgcaactaggtaacatggagtgacggtagcactattaaatctggattgaaaaaatcatattaagcaggccagttttagacagactaaattaataattt

SEQ ID NO: 498578 - DNA, 201 bp, Homo sapiens
taatatgcttgttgctccttaacatacttttacattatttcacagccagcatcacttttgattttctttttcttttttcttttctttttctttcttcttctttttttttttttttttttttttttgagatggcgtctcactctgttccccaggctgaagtgcaggggcatgatctcggttcactgcaacctctgcctccca

SEQ ID NO: 498579 - DNA, 201 bp, Homo sapiens
aactagccaggtgtggtggcatgtgcctgtagtcccagctactcaggaggctgaggcaggagaattgtttgaacctgggaggtggaggttgcggtgagccraaatcgcaccactgcactccagcctgggcaacagagcgagactccgtctgaaaaaaaaaaaaagagagattgtaaagaatcgctttattaacaacccctg

SEQ ID NO: 498580 - DNA, 201 bp, Homo sapiens
tcaaactcattctccgtccagttttgttcccttgctggcgaggtgttgtgatcctttggaggagaagaggcattctggtttttggattttcagcctttttkgtgctgatttttcttcatctttgtggatttatctacctttggttttcgatgttggtgaccttcggatggggtttttgagtggacgtcctttttgttgatg

SEQ ID NO: 498581 - DNA, 201 bp, Homo sapiens
atgggggggtggagtgggagttcaacagtcagttagtgtgcaggggccacgctgacaacaacaaatgctggcaagatgtggaggagtagaaactctcattygttgctgatgggaatgcaaattggtacacttactttggaagacagtttggcagtttcttactaaactaaacatactcttgccatgtggtccagcaattgc

SEQ ID NO: 498582 - DNA, 201 bp, Homo sapiens
attattgggaagttgggaagaggagatgccagaatgggtgacaggagggtggtagggacccaactacaatttagaatttcctgtgcagggttctctgttargattgcccgtgtgttgccatgagtttgtcttggtgtcccttctgtcatttgccatcagttggcagtgtctagaatacagttccatttcattgaagcactc

SEQ ID NO: 498583 - DNA, 201 bp, Homo sapiens
ttgtactagactaaatgacagagaaaaattaagtaaagcctttgagagatgaacagttgggacgtattagagaactctgattcattttctaaatatcttaktaaattgatgtttgttaacatttcaaaaagttctctctctcttccaagacttacaggtagctctagccttgacagtagaaggtaaagtgaaccaaagtta

SEQ ID NO: 498584 - DNA, 201 bp, Homo sapiens
cacaggggtactaggagatattttcagtttgtgagggaaacacagtgacatctgttggacaccacatgaactaacagctcaaaataatttgcagttttggyatgaaatcatattcattactttcaatttggtcttaccaatttaaaaatgaatttttgggccgggcatggtggctcacgcctgtaatcccagcacttcggg

SEQ ID NO: 498585 - DNA, 201 bp, Homo sapiens
ttctctgttccctagagttggcagctctcggtgcccatgttattctgagcacgtgctcctttctattgttaggtgattttgcatttgaccctgcttccctrctctttcctgaaacccctggaagggcctgcatctgtggttcccaaacagtgcaccaaggagccctggggcttttcaattaattcacaggggtactaggag

SEQ ID NO: 498586 - DNA, 201 bp, Homo sapiens
cacactacttcttcatatcacttagtacaggtaaagttaaatcattacatgtgctattgcttgcttaatgtcttctccacagtggtatgcgtgctttcagktatggcatattatcacatgtgttttattcactgggatatctccaatgctgagcacagtaccttagacttaggaggctgaagaaacaacacacaaatggaa

SEQ ID NO: 498587 - DNA, 201 bp, Homo sapiens
tggtaaaatcagtggtgatatgtttttgtaattatgataaacatcagatggatgacaaatgcttgacttggttacaggttgtgaaaatcttggagaagcaygaccccttgaagaacacccaggcaaaatatgggtctatccctccagatgaggccagtgccgtgcagaattacgtagaacacatgctcttcttgttgattg

SEQ ID NO: 498588 - DNA, 201 bp, Homo sapiens
gggggccacgggagaggcgtgtatcacagcatcaaaaggatgctcacctgtgctcactccgttgtttgtcctaggtgactgtggaagaggtcatgaccacractgcatatctggaccttttcctgcgtagcatctccgagccagcactacttgagatcttcctccgttttatcctattgcaccagcacgagaatgtccaca

SEQ ID NO: 498589 - DNA, 201 bp, Homo sapiens
gtgttctagaaatatgtgcagtctgggtgaatgaatctgaactctgagcgcagtctaggaagggaggatataaataccataaagatttagaatcttgtttstaagactatgtaatactctttattccgcagaatattttctcccctgtttctttgccattctgaaggagatagcagaggcactttttgtagtggcaggaac

SEQ ID NO: 498590 - DNA, 201 bp, Homo sapiens
ccaaatctaagtggagagattaaattggagatagaaaaatgattatgtacatttgtagaactttagtactagacataattccagagattatctagttccarttcctcatttttcagacaaaggcattgaggaccagagaggttaagtgacttgcttatgctcacatcatgtcaagcttggacctaacccagatctccagat

SEQ ID NO: 498591 - DNA, 201 bp, Homo sapiens
attgttttcctatttattctaattctcagtgtcacatgttctcaaacttgaatgtgcagctagttactggggaacttcttcattgcaaactcctgggttcyggagattctgctttaataggtagggttgaggcccaggaatttgcacatgagccggcacccaggtgctccagtgaccacacttggaggagcactgatctat

SEQ ID NO: 498592 - DNA, 201 bp, Homo sapiens
aagagtaccgtggaagcagagggccagatgtaaccatcactataatcagtcagtaaacacaattgaacgaggtaattaaaaggcccagtcctgttgtgggmctgcaactaggtaacatggagtgacggtagcactattaaatctggattgaaaaaatcatattaagcaggccagttttagacagactaaattaataatttc

SEQ ID NO: 498593 - DNA, 201 bp, Homo sapiens
tttaaaaaatctattagtgcataatcatatgtttttaactgagaacattttcagctccagtcatttcattaggcttaggaagtctatcttactacgtaatyttcgctcccagcccattttgtttattcgtttgcgcataatacctttgattataatcatttctgctggggtaactgtgatatgatccatttagtattctgt

SEQ ID NO: 498594 - DNA, 201 bp, Homo sapiens
catttacaatggatttttggtaccagtcttggctcctgctctccataaggtcagtgattggctcatgtaatcttctgtctctataatacaagtgatggacwctgaggagggtaaacacagtgtaattgatttgatggtgattttagcctgatttttcttttcattccgtctatatttcttagcaatatcaaacacaggtat

SEQ ID NO: 498595 - DNA, 201 bp, Homo sapiens
aggccctgaatttcccttcctaccatgcctctgacctcccacctcacacatcctcccagcccctgtgccaggcatcctatagctctttgaccacaccaaayatagatcccaaagatggcagagccttcccccccaccacaggtaagagccctccctcacctgtgagtgtgatgttgactccacccagcccgacctgcagcc

SEQ ID NO: 498596 - DNA, 201 bp, Homo sapiens
gtttctcaccgtctttccccgaatgccaggcaggatgacgatgaacgtggccagtgcagtcagaaagatcatgatgatgctggccaaagtggtgtccatcrggaaggttggcttggggccagcatagaaggggaatgtgtgtcccaaagtagccatcttggtgaggtggtgcagggggggcaatgctgtacaacaacaata

SEQ ID NO: 498597 - DNA, 201 bp, Homo sapiens
tatgggaactcagagatgactgggcattactaggttagagtcagaaggagaaatacaaggggtccatgtctgttttggtcataactggatacccgttaacyagccagggtctggctcatggtaagtctgccaaccacatgtgtgggatttcccttggccatattctgtttacctcttccctccctttctccctgctttagg

SEQ ID NO: 498598 - DNA, 201 bp, Homo sapiens
agacctctgattggtaatgcacagctactgcaatgtgatgcttttttctctgattggggtagaccccattaaacgtttacagctgtggctagctaaggggmccctgtcaggaactcctgtgctagactttcctcttcaaggaaggggtctgtgtgtacgtgtgtatctgtgtatgaatgtatatgtgtgttgttgcacaaa

SEQ ID NO: 498599 - DNA, 201 bp, Homo sapiens
agtagccccagagggtttgaattctgcctctgcctcttgcaagttacttgacctttacagacatccagttttattaaaaatttgagatagtaatgtctatmttgtaagcatcattgtgagcatgaaatgagattgtgtatataaagtgctgagaatagtactggaaacaaataagctatcaagttgggaaagagggggcat

SEQ ID NO: 498600 - DNA, 201 bp, Homo sapiens; identical to SEQ ID NO: 193982

SEQ ID NO: 498601 - DNA, 201 bp, Homo sapiens
aacatatgggcagggtctggaagccaccctgaagcaagggcccaccgctgtggggaaacaaggagaggagatgcaggctgctgagggagttgaagggatgsaggcagcagcccaagtcagctgcacttcgcactcacccaggattgcagccccgatgaataagctggtcaccacccgaagcagccagaacagcctctgagt

SEQ ID NO: 498602 - DNA, 201 bp, Homo sapiens
gtctatagccatactgaatgactgacctctccctgaatctgacacgctctttcaagccttcaatacctttggatatgctatttcctctgcctggaatgcaytcactctcttggcaaatgccttttcacccttcaagtctcagtttgtgttccctcctctgtgaagtttcctctgatgccactgggccaatgtagaggttcc

SEQ ID NO: 498603 - DNA, 201 bp, Homo sapiens
aaccacatgtgtgggatttcccttggccatattctgtttacctcttccctccctttctccctgctttagggagagtcactcagggagctgggaaggaaacrtgaaccaaaaccatgccaggcaaggcaaacgcagatagcttcaacaaaaactttctttgagacggagtcttgctctgtctcccaggctggagtgcagtgg

SEQ ID NO: 498604 - DNA, 201 bp, Homo sapiens
ataagctggtcaccacccgaagcagccagaacagcctctgagtcacaaggtaggtgggttaagtaaagagtgccttccttccacatctacccttcctgttwccagacttgggggaggggcgggaattctaaagctgagatcacttggtcaattgaaatcagagtgtctggcacataataagtgcttatgtatttatgtatg

SEQ ID NO: 498605 - DNA, 201 bp, Homo sapiens
caggatctcactctcttgcccaggctggagggcagtgatgcgatcttatatcactgcagccactcaagtgatcctcccacctcagcctcccaagtagctgsaactacagatgcacaccatgatgcccagctatttttttttttttaagagatgaggtctatactataaacccaggctggcctcgaactcctgggctcaagc

SEQ ID NO: 498606 - DNA, 201 bp, Homo sapiens
cttaaaagaaacactaacaaaaggcttttcgtattttaagtatagaacaatgttaacttatttccagttctccaaaatgtcatatttattaaagatgacaraagcaaaaaaacagttggtaaatgaaatttgcctttcttaatttcttcttgttccatttcataacttaggtcttcctttatttgcattgcctaatttaaa

SEQ ID NO: 498607 - DNA, 201 bp, Homo sapiens; identical to SEQ ID NO: 193974

SEQ ID NO: 498608 - DNA, 201 bp, Homo sapiens
acaagggggagctatgctcccttattgccctgtgctaataattcaatattaactgagtgtcaccaatacagagctaaggactgggcacaaagggatttgaytaaccctgtcaacttttagtaatttctcaaaattttcagaaagcctcttccaatagttagagtctccaagactaacaaagacccaaacatgaattttcat

SEQ ID NO: 498609 - DNA, 201 bp, Homo sapiens
tcccaaagttctgggattgcaggcatgagccaccatgccccaccagcgctcaatagtgaactgctgaatcaatgaatggggagctttctgcctggggtcgkggctatcttttctccgcactggggtctccttccttagcctggttgtagtcagagactctgaacccctcagcctgaggctgaggtctctctgggctggggt

SEQ ID NO: 498610 - DNA, 201 bp, Homo sapiens
caccgttccactgcccctcagccatccatctccccatcttttaggtgacagaatgagggtctttgccatcagtctctgttgccccattctcctctcttaayctccaggttccataagtcagtgctaccaccaccctgggggcttctctgtttcttctgggactgtctcaagaaataaaattctcttctctctccttcaggc

SEQ ID NO: 498611 - DNA, 201 bp, Homo sapiens
aagtgttaggaaggttgaggagatgcatccagcttgttttccagggtgacacctctccaggcaagggtaagagtggggagataaggccatggtgagagaarcatatgggcagggtctggaagccaccctgaagcaagggcccaccgctgtggggaaacaaggagaggagatgcaggctgctgagggagttgaagggatgga

SEQ ID NO: 498612 - DNA, 201 bp, Homo sapiens
catcctgtgggccaccgccatagccaggcccagcagcacacacagcagtcctggagatgagggcaacaattgtcccaccttagtgctagtaacacctgccraggatatcttcccctgggagtgtcagaacaactctaagggaagcctagagcccctgcttcagggcaacttgggctcagagaggtgactggctgaggggca

SEQ ID NO: 498613 - DNA, 201 bp, Homo sapiens
ggactgtctcaagaaataaaattctcttctctctccttcaggcccctagcacagatagatcacagaacataaaaggagctatattatcaggtgaaggcatraggtgaaagatggtacagattacaaaaagattggctttcttcctcagtccccaaaggaacaaaggccaggcagctctctgctaagtatataatccagcca

SEQ ID NO: 498614 - DNA, 201 bp, Homo sapiens; identical to SEQ ID NO: 194008

SEQ ID NO: 498615 - DNA, 201 bp, Homo sapiens
gctgcatcctgtgggccaccgccatagccaggcccagcagcacacacagcagtcctggagatgagggcaacaattgtcccaccttagtgctagtaacaccygccgaggatatcttcccctgggagtgtcagaacaactctaagggaagcctagagcccctgcttcagggcaacttgggctcagagaggtgactggctgagg

SEQ ID NO: 498616 - DNA, 201 bp, Homo sapiens
cagtgatgcgatcttatatcactgcagccactcaagtgatcctcccacctcagcctcccaagtagctggaactacagatgcacaccatgatgcccagctatttttttttttttaagagatgaggtctatactataaacccaggctggcctcgaactcctgggctcaagcaatcctcccacttcagcctcccaaagttctgg

SEQ ID NO: 498617 - DNA, 201 bp, Homo sapiens
gtccttcccttggcctggagaagtctggtgaggcgcccagggggaggttacacggtgtccaggacaagcagtccgagggagcaaaagtgtgcaaaagtctyggagtgagacagcccttattctactacgatgaaacttacctaaaatttattgaggcttaagacctcagtgtctttgctcatcctgtttcttaactctgga

SEQ ID NO: 498618 - DNA, 201 bp, Homo sapiens
ttcattccgctagcatttattgagcgcttatgatatgtcagtccccggagtccgaaagaggaatcagacacagcttccctgccctgtgtatgtggagaggkcggaagggagggccatgagtgcgtggagagcctgacattccagctgaagctggaagaatgagtaggcttttgccttaagaagaaaaggagaggacgctcc

SEQ ID NO: 498619 - DNA, 201 bp, Homo sapiens
agaagcctggagtgatccgctgcctcgggtcggaacgtttccattcattccgctagcatttattgagcgcttatgatatgtcagtccccggagtccgaaasaggaatcagacacagcttccctgccctgtgtatgtggagagggcggaagggagggccatgagtgcgtggagagcctgacattccagctgaagctggaaga

SEQ ID NO: 498620 - DNA, 201 bp, Homo sapiens
aatcgtaatgatgaaaccaaaagtcaaagtcctggtctccaaatcttgtggttccccagtatgcataattatcaataactgccttgctttccaatactttyattctttcttctacaatattcctcactgttaccagtaagtttggctgtctgaactgacatcaaatttaaaaggactgcagaaaagagaatcagttcaatg

SEQ ID NO: 498621 - DNA, 201 bp, Homo sapiens
ctgtagataaggttgaagttccctaggatggcctcttctcgtcagacacacagcaccctggaagcctggtcttcctgccctctccgtggaggctgctatgyattcacatgtgattttcccttgccagattctgagcatcctgaggggaaggactggttttgtcttttcagtcttgcgcagtacctgaaaaagtaccctttc

SEQ ID NO: 498622 - DNA, 201 bp, Homo sapiens
cagtggcacaatctcagctcactgcaagctccatatcccaagttcacgccattctcctgcctcagcctctcaagtagctgggactacaggcacctgccacsaagcctggctaattttttgtatttttggtagagacagggtttcaccgtgttaaccaggatggtgtcgatcccctgacctcacgatccacccacctcagcc

SEQ ID NO: 498623 - DNA, 201 bp, Homo sapiens
acattttttttttttttgagatggagtctcgttctgtcacccaggctggagtgcagtggcacaatctcagctcactgcaagctccatatcccaagttcacrccattctcctgcctcagcctctcaagtagctgggactacaggcacctgccaccaagcctggctaattttttgtatttttggtagagacagggtttcaccg

SEQ ID NO: 498624 - DNA, 201 bp, Homo sapiens
atgatcagaagactcttctttaggacttgtcttttatctgtgttcccagtaaaatcctacttttcttgcagatcctatcacttcatggattgtcataaaayttggtattcattaatcagtttgtcacagcaaataattcttcccagcaagactgcaggctgaaggtgtactgtctagaaacatccagttttgttgagtcaa

SEQ ID NO: 498625 - DNA, 201 bp, Homo sapiens
caccaggaggtatggctgtctctcttgtttgtgttgatagcatcctctgatgctcaatttgtagattcattaaatcattatgggttggaatatgatgataytttaattcttttatttctttaaaatgttatagctaggatacttttatgatatttccctcacttactatttagtgatcttatggtgaaaagccactggttt

SEQ ID NO: 498626 - DNA, 201 bp, Homo sapiens
tcttcaccaggcacatgaaatgtatttccccagttgttccataggtgatatagtttctacatattgcataattcttcttagtttgtccttgccttgtgggyactacttcacagagtatcagacccagtgcacgtggcatctgaccttgtggtggaacatggacacctaacataatctgacctattaagtaattactcattt

SEQ ID NO: 498627 - DNA, 201 bp, Homo sapiens
cattagaaaccaagatgtgagtggtagatgtgctcattaccactgaggtgtcattgcttccaggccctctccactgacagaggaaggaaatgtatgtatayattctaacctgtgcatataaacatatctataaatattcctacatgtaaccatctctatctatattaagctatacatgagttcatatggatgtctccaact

SEQ ID NO: 498628 - DNA, 201 bp, Homo sapiens
ctattttattgtgagcaaagccaatttctttgaacctcacttttcttatctgtcaaatgggaacattaatatagttcataagtttggcgttaatgtagttmataagtttgaagcattctattattttcctgtttgaacttcagtgcctagcataatcacataaaagaagaatcttataattgtgaagttgacatcatcaaa

SEQ ID NO: 498629 - DNA, 201 bp, Homo sapiens
ttagttgtgtgcttattgcctgccaaagttaaggactccttgtctcatctctgttctgtcctcacctggccccacttatccttttatatctcagttgtgarcatgaactaatcaagagctagattaactggatttgaatcccagctctaacacctatgcaaccttggacaaaatctttaagctttctatgtctcagtttcc

SEQ ID NO: 498630 - DNA, 201 bp, Homo sapiens
tttccttgagtcatgtggtcagaatgaatcactaattttgatgcaaagcagtctagtaactaaaagcacagacttggtctctgggttcaaatttcagctcrgatattacacagacatgtgacctgggataaatcctcatctacgaatgggaattggaatgctgcctcactcatcagttatttttgaggctttttgagacaa

SEQ ID NO: 498631 - DNA, 201 bp, Homo sapiens
taaattcaggttatctatatctctaatgatttcctgcctacatgatgtattaattactgacagagggatgttgaagtctccaactataatagtgggtttayttatttttcttttcaattctatctgtttttgccttatgtagtttgacattctcttgttaggcacataaatgttcatattgctcgttcttcttagagaatt

SEQ ID NO: 498632 - DNA, 201 bp, Homo sapiens
acccatgcaatgcatagcacaggctaggtggtctgtggctagactgtcaatgggcaagtcccatgtttgttcagggtgctgtactctggctcttctagaakaatcttccctggtcacagaaatcaacctcaggcatgctgttcctcccttagatgtgaatgctattaaataaaacacactagaaactatctgtagtatgca

SEQ ID NO: 498633 - DNA, 201 bp, Homo sapiens
agacaagagcagtggctatggcatcatggtaggctcagattccagtccctctctgacagtttgactttggaaaagcttcatagtagtttctccatgtcacstttcaccaagtataaaatgaagctcataataacatctactttttattactgtttttgtcagttgatttatgcagacagcttagaaatagtgcctggtact

SEQ ID NO: 498634 - DNA, 201 bp, Homo sapiens
agaggcagcatagtcaacagacaagagcagtggctatggcatcatggtaggctcagattccagtccctctctgacagtttgactttggaaaagcttcatartagtttctccatgtcacctttcaccaagtataaaatgaagctcataataacatctactttttattactgtttttgtcagttgatttatgcagacagctta

SEQ ID NO: 498635 - DNA, 201 bp, Homo sapiens
gagctgtcagatgacttgacagtaatatctgaataacttatttgtaccagaaactaccttgaaaagatcacataaaggaagacagactgctttggaaaaamatattcaaaaagaaaaataaagtagggtgaggatcttcttgaaaattttattgagttggccttattgcaatcctttcctcttgtcttgatgactttgaca

SEQ ID NO: 498636 - DNA, 201 bp, Homo sapiens
atcaaatactatgagctgtcagatgacttgacagtaatatctgaataacttatttgtaccagaaactaccttgaaaagatcacataaaggaagacagactrctttggaaaaaaatattcaaaaagaaaaataaagtagggtgaggatcttcttgaaaattttattgagttggccttattgcaatcctttcctcttgtcttg

SEQ ID NO: 498637 - DNA, 201 bp, Homo sapiens
ctgatcaaatactatgagctgtcagatgacttgacagtaatatctgaataacttatttgtaccagaaactaccttgaaaagatcacataaaggaagacagmctgctttggaaaaaaatattcaaaaagaaaaataaagtagggtgaggatcttcttgaaaattttattgagttggccttattgcaatcctttcctcttgtc

SEQ ID NO: 498638 - DNA, 201 bp, Homo sapiens
aaagacaaaacctcaaacaggggtccatttctgacagcaaataaagagggtcaacacgaaatttggggacaccagtaaacaaatggtatattaacatataacattatgatatatgcaatataatattatgaacatttccagtctttatggcttctatcaagttttcaaattggaacaagcaactttgcagctgaataaaaa

SEQ ID NO: 498639 - DNA, 201 bp, Homo sapiens
ggaaagacaaaacctcaaacaggggtccatttctgacagcaaataaagagggtcaacacgaaatttggggacaccagtaaacaaatggtatattaacatataacattatgatatatgcaatataatattatgaacatttccagtctttatggcttctatcaagttttcaaattggaacaagcaactttgcagctgaataaa

SEQ ID NO: 498640 - DNA, 201 bp, Homo sapiens
gagctgctgaaagggaaagacaaaacctcaaacaggggtccatttctgacagcaaataaagagggtcaacacgaaatttggggacaccagtaaacaaatgktatattaacatataacattatgatatatgcaatataatattatgaacatttccagtctttatggcttctatcaagttttcaaattggaacaagcaacttt

SEQ ID NO: 498641 - DNA, 201 bp, Homo sapiens
gttgttttccaattttgtctcaagaaattttaaaattttcctttaagttccttcattgatccattggttgtccaggagcatgttgtttaatttcaatgtakttgtgaattttgtgaagttcctcctgttattaatttctagtgttatacccttgtggtcagaaaatatactttatatgatttgaatcttcttaaatttgtt

SEQ ID NO: 498642 - DNA, 201 bp, Homo sapiens
ttgtattactgactcaatctccttacttgctattggtctattaagattttctatttcttcataattcagttctggtagattgcatgcatcaaatgaatttrttcattttattttatttgtttttttcttaattagtccagcaataggtctttcaactttatcttttcaaaaaaaatcaactcttggttttgtttatttttt

SEQ ID NO: 498643 - DNA, 201 bp, Homo sapiens
tatttcagtgatgcaatttatgatatacagaaagggaatgtgttaaaaatttaagcctatgtaaatcttggttagaatgaaagtaaagcatatgggcaaasaatggacattagaaacagcctaaaaattagtttaataaaatgccaccgctatattttcctgattgatgaatggatcctcatcacaatgcaatgcaaaata

SEQ ID NO: 498644 - DNA, 201 bp, Homo sapiens
atgagtggatagacgaaaggtcaagtgcctttataagaagattgtcgaacacatggacacagggtggggaacatcacacaccggggcctgttgtggggtcrggggagtggggagggatagcatttggagatatacctaatgtaaatgacgagttaatgggtgcagcacaccaacatggcacatgtatacatatgtaactaa

SEQ ID NO: 498645 - DNA, 201 bp, Homo sapiens
gactcactggctactgcttccttgctattttcagagtaaggctatcttgttcataggtgcatgatcagatttcttgggtatatttcagtgatgcaatttawgatatacagaaagggaatgtgttaaaaatttaagcctatgtaaatcttggttagaatgaaagtaaagcatatgggcaaacaatggacattagaaacagcc

SEQ ID NO: 498646 - DNA, 201 bp, Homo sapiens
gcatggttcagagttctagaaagagcatgggttgtttatttatttttttaactctatagagctttctctttggttgctttcatgcagtgtttcaaaacatsatagctagaattccttcccactttaacctgtatagcccttattgtaagtgattttgatttcactcacacagttcctttcaggcctttatcatgagaggga

SEQ ID NO: 498647 - DNA, 201 bp, Homo sapiens
catacatgtggcttttgccattcttaacagctagcatgactcattgttcaagcctttgtttccaggaaaaaaaaaaaaacctttggttcttggtttaaaakgctactgtgcaaacagctcagtaaaaggcaaatgacagggaaaaaggtttccctcatactcgtacttttgattgacttgactcttgcccactttgcattt

SEQ ID NO: 498648 - DNA, 201 bp, Homo sapiens
gatagacgaaaggtcaagtgcctttataagaagattgtcgaacacatggacacagggtggggaacatcacacaccggggcctgttgtggggtcaggggagkggggagggatagcatttggagatatacctaatgtaaatgacgagttaatgggtgcagcacaccaacatggcacatgtatacatatgtaactaacctgcac

SEQ ID NO: 498649 - DNA, 201 bp, Homo sapiens
aatatcctcactttgtagataaagaaactgagggtttgaataactgagtaactcaaccacaccttcacagattgcaaatagagaatccagtgagttttgcwctagaatgcagggactcactggctactgcttccttgctattttcagagtaaggctatcttgttcataggtgcatgatcagatttcttgggtatatttcag

SEQ ID NO: 498650 - DNA, 201 bp, Homo sapiens
gtgtgttctccatgagccagttgtggaaggaggttaaggtcactagtgaaagcactttattctttattagctcctggacaaggcagatgtggtagtctttrgatttagctatagtagttgtgactgaggtctcacagtgtgggccaactcattgctgatatggaaaagacctagcgagaacgccaggctcagcaatctcaa

SEQ ID NO: 498651 - DNA, 201 bp, Homo sapiens
agtagttgtgactgaggtctcacagtgtgggccaactcattgctgatatggaaaagacctagcgagaacgccaggctcagcaatctcaaggcacagctgtrcagcttctgtctttcatgctgagatgtcctaacctttcccaaagactctgcttattttcagtttcaggctggaatcttcattcagaagtaggtagggcca

SEQ ID NO: 498652 - DNA, 201 bp, Homo sapiens
cagtagtttccccaacctattctgggagcacgcttccattacccctgtggcagcatgtttctgtgcctaacttggaagcctctgtacctctattttaaacytgatgcctgcagcctttgggttgtggaaaaggcagaggttccacctttcagttcttatgaacttcctatgtcctacaagacacaggaaaaacagtgagcc

SEQ ID NO: 498653 - DNA, 201 bp, Homo sapiens
tgaagggatctgtgacatcctttgattgacttttgttccttggtgtcctgaaatttcagtctatgatgaagaaaataaaacaatgacaaggcaggtgcccygactctggctgataccacactaggcacttactcatttgctactcattggaaccccacaacctcactcttggcctttcaactaatattggtaaactggagc

SEQ ID NO: 498654 - DNA, 201 bp, Homo sapiens
cattctagattttgtcccttagagctggcctaaggaatccagccaggttaacttgggtcaagtggggtctgacaatgattccctcctgcctgagaagcttrcctgactctattccaccaatctattagctaatcctagatgcttgcctctgatattattctttgagctccttaaaaagaagattctcatctcagtttggga

SEQ ID NO: 498655 - DNA, 201 bp, Homo sapiens
tgccaggattcacatgggactcacaagtaggggagagagaaactgaaacattggtggtttgttcatagggccacagggtaggtgtgaattgaaatatctcytagcactgaattagctgggttgaaatgtcattggctgtagttggtgagatgaccactatcccattgactgaatgaccttgggttggcaacctggagaatt

SEQ ID NO: 498656 - DNA, 201 bp, Homo sapiens
gagaaaaggctttagaatcataaatattgtatgtatttaaaaaattctaagacatatattcttaataaaaatgttcaattttccttaaaatgtacaccttracatctctgaaatcagcatgcaccttattatcaggggaatcctaaaatcttgagttctttccagggaggtttgcaattgcttctgtggtcaccaggtggc

SEQ ID NO: 498657 - DNA, 201 bp, Homo sapiens
cacacgaaatggtacttgatatcatttgactacctagagggtggtagaaacagctgtaattttgcaagataatatcaagacaataaaggagtcttataagkctactgtctcattaagggatggatttcttcccgaagcctctttgaaacctgtccttcacatctgaaggaggaggccaagatattcatactatgttgggac

SEQ ID NO: 498658 - DNA, 201 bp, Homo sapiens
gattgcaaaggaacaattatttttccatttccatttttcctttcagaaaacatacttttatggtccagacttgttcccaagaagaaaggtagggcagtggsaagagaaaaggctttagaatcataaatattgtatgtatttaaaaaattctaagacatatattcttaataaaaatgttcaattttccttaaaatgtacacc

SEQ ID NO: 498659 - DNA, 201 bp, Homo sapiens
tctttgatttatttcatcagtgttttgaagatttcttgtacaaattttgttaaatttatatttaagtatttcatttttggtgctattgtaaataatattgtttctttaatttcaaatttcaacgttagatggctgatataaaggaaaacaattgacttttgtatattgacattgtattctgtgacttatttgtttattagt

SEQ ID NO: 498660 - DNA, 201 bp, Homo sapiens
ctttgatttatttcatcagtgttttgaagatttcttgtacaaattttgttaaatttatatttaagtatttcatttttggtgctattgtaaataatattgtttctttaatttcaaatttcaacgttagatggctgatataaaggaaaacaattgacttttgtatattgacattgtattctgtgacttatttgtttattagtc

SEQ ID NO: 498661 - DNA, 201 bp, Homo sapiens
tgtgctttgcctggcattaaatgcctcacctcttgcttcagttcaacctactcctgggtcatggctttagacacagatgtactctcctggttctcttgagrtgtgatgtgggcaagtggtccgctgtggcttctctccaggttcaaccacaattccccgtgattgggcagagttctcaggataagaagactgagacctcac

SEQ ID NO: 498662 - DNA, 201 bp, Homo sapiens
gcatccaattttatcagtaccattagttaaaaagaatatcctttctccatggaattttcttaacatctttgctacaaatcaattgattatatttgtgtggstgtattttggggcttttctttctgttctattgagcgatgtgtttattctttctttagcatcatactgtagctttatagtaagttttgaaatcaggtagta

SEQ ID NO: 498663 - DNA, 201 bp, Homo sapiens
tggaaattcctagtctctttgccctgtgctggaatggtaatccagctgtcttcgaagaggcttggatgcatgcagaattactctggatccactttgatcaycaagctggccagcccagcctaatgtagtctggggcggtagcctaatgtagggcaggaaagcttggccagataatgcttaaaattctattaagagatggcg

SEQ ID NO: 498664 - DNA, 201 bp, Homo sapiens
atccttacccggagggtgtaagcccagtttattagtgtgtgtgtgtatgtgtgtgtgtttcctcttagaaacccatattgaggtttttttttttttttttycctttctgagagctgcatagaaaatacagcatctcacagttgatgacaccttagagtcaatgaaatatagtagctggattttgagatctaagatctccac

SEQ ID NO: 498665 - DNA, 201 bp, Homo sapiens
actattgtcaggccttctgaataaggcctccaagctttcattctctggctctgtcacttcaaagctcattttctgacactcctctaatatagctctcctaygctctctccagctattcaagtaattggcaattctccagattcaacgtactatttggtgcttactaacaatctcctactgtccaattctgctcaaaagtca

SEQ ID NO: 498666 - DNA, 201 bp, Homo sapiens
tctgacactcctctaatatagctctcctatgctctctccagctattcaagtaattggcaattctccagattcaacgtactatttggtgcttactaacaatytcctactgtccaattctgctcaaaagtcatcttcctaagtttactttagtgttcatttgaatgaaagaatgcttaatattttgattggcttttggaatgc

SEQ ID NO: 498667 - DNA, 201 bp, Homo sapiens
aagtatttatgcaataccatgaattatataaaagtcctgtttcacataatgttgtggataggcacgccaattattataggcaaacgtgaccagggaatgtstgaatgatatttctgtacatttcgatggagctttgttcatttcggtgtttgaacatttcagtgttttcataaaggtggaaaggcaaacgggttcctatat

SEQ ID NO: 498668 - DNA, 201 bp, Homo sapiens
tgcaagatgttaaaaataaatgtgtgaaagatgttttcactctcttgagaaatgtgctgaataaatacaaaatattcccaagatgcattttgttaatacayatgaactcaataatattgacctgggagaataacagatcgtttgaccttccatgaaatggaagtccccatccgctttctcagatgaatctgagttaagact

SEQ ID NO: 498669 - DNA, 201 bp, Homo sapiens
tacacacatacactaatgcacacatacatgtggcttttgccattcttaacagctagcatgactcattgttcaagcctttgtttccaggaaaaaaaaaaaaacctttggttcttggtttaaaaggctactgtgcaaacagctcagtaaaaggcaaatgacagggaaaaaggtttccctcatactcgtacttttgattgactt

SEQ ID NO: 498670 - DNA, 201 bp, Homo sapiens
tgtgcagggtgccaccactagaccaccccatatgtaatttccccctgtaaaccctatgtcttatttgctgtctctaggtctcatcttcagcctgagacacmgtaccatccctactggatgcaataggggtccagcactacacagctccaattttctcattggtaaagtaggagcccacttccagaccttccattagttagg

SEQ ID NO: 498671 - DNA, 201 bp, Homo sapiens
cagcagtaagtctctcactagatatggtccctcagccttggacttctcagcctctagaactataagaaataaattccctttcttttttttttttttttttwaattgatcattcttgggtgtttctcacagagggggatttggcagggtcacaggacaatagtggagggaaggtcagcagataaacaagtgaacaaaggtct

SEQ ID NO: 498672 - DNA, 201 bp, Homo sapiens
taaatgcatgagcatttttcatgccattgaatattaatgtaaaccatgatgtttaatggttatccatttttctttttcttttcttttttttttttttttttgagacagagttttgctcttattgccccggctagggtagtgcaatggcatgatcttggctcaccacaacctctgcctcccgggttccagcaattctcctgc

SEQ ID NO: 498673 - DNA, 201 bp, Homo sapiens
cattgtccctaacccaaagatgactaataatagctcctattatgcactataaataaaacagagttaatcctcacaacaaccctctaaggtgggttgttttwtatctccatttcaccggtgagaagtagttgttagtttggtggattcccaatcttaaagacacaactcttacaaaatttcaaagaacaacaagcattaaga

SEQ ID NO: 498674 - DNA, 201 bp, Homo sapiens
taactagcctccacaattttgtgaaccaatttcttaaaacaaatttttataagtaatacacaccctgttggttctgtttctccagagaaccctaacacaaacaccttcctgtcatctctacctgtcaatacttttcctttttgaaataacattttcttttctagttctattagttatacatgattattcccaaatattaaa

SEQ ID NO: 498675 - DNA, 201 bp, Homo sapiens
acagaggagctagctaacagtaacaacctgggctggatgtcaccctcaccaactctgaatctgtgatctttccctgaaaacagaggtgaaagcactttggmaaaaatctaagtggggacaggagctaatagtcattgagcatgtactatgtgccaggcaatgtactaaatgcattacacctatctcagtcttcaggaccac

SEQ ID NO: 498676 - DNA, 201 bp, Homo sapiens
ttattactcgtctgaggcagacattggataatgatgtgatgatgttcacgtccagggtttgttattcttccaacaaaatgtggagctggtagcctccttgraactctttggatcccaaatacatggttgtatatacgcatatatattatataaaattattttatacaaaaaaataaaatgtatgtaatatatataatacat

SEQ ID NO: 498677 - DNA, 201 bp, Homo sapiens
tggattagtccttatggtgtggccttccacattattatccccatttcctcaggaagaaactgagattcagcatgtttaaaattcttggaagcagggcctggtgcagtggcatttgcctataatcccggctacttggaaggctgaggtgggaagatcccctgagcccaggatttccaggctgcagtgagctatgattgcacc

SEQ ID NO: 498678 - DNA, 201 bp, Homo sapiens
ttccacgataaccctatataaatgttacctactgtcaatcaattaattatacttattttatttctatactttcatctatgtgaagcttgccttttcaatgktgttgccttgcaggatgctgtcttctattcctctgtacagtattgtaccttgcactcagcggtgaccccaaaagtgttgactgatttttccaccatgtta

SEQ ID NO: 498679 - DNA, 201 bp, Homo sapiens
taaaaaatgtgacataatcatcatttgtccagactaaagttgcgtaagatattatattttcaattttcttcagatggcaaattgggtggagacaaagtacrgagacgtactttgcttttagatttgtcactattttattgtgagcaaagccaatttctttgaacctcacttttcttatctgtcaaatgggaacattaatat

SEQ ID NO: 498680 - DNA, 201 bp, Homo sapiens
gtcatcaaatggcagcctgtgagaggtgacataggaccttgcagatcctcttgccaaaccttcagatatcgatgagcctcagagagacttgctcatttgcygccaagccagatctgctgactccaggaccacagctggagtcaggagctttgacctctgtgaagccatccagcccaccccataaggattctccctatggtg

SEQ ID NO: 498681 - DNA, 201 bp, Homo sapiens
ttcagtcaggtcaagaaataataaaatcagtccaatctgttgttggtatggtgtttgcaataaacagttacatgatttttattcttttctgacttcttggkgtggtctgggttttagactgaaccccacttcttagtgtcatagctaaggtttggagaatatcctgtagttgttgagctctctggatgaagcacaatgctg

SEQ ID NO: 498682 - DNA, 201 bp, Homo sapiens
gaactgaggcctacgtatcttgcctataatcatgaagagctagaatttgaaccaggaagcctggctctggcatccatcctctttattgctcagctatgctmtttttgaagaaagaaaagtcattgctatgacaggtgggaagtggacaggctcttagatcacttggtttaacacattccctttatgaatccataagcccaa

SEQ ID NO: 498683 - DNA, 201 bp, Homo sapiens
ccccaaaaatgatcatctccaactgagtagattccacattttcgtgtgacctttcatttaatggtggtggagagacttggggtcttatggcttgcattttktttttttagcattactcatagaaagacagccaaatatgccaggatctgctccttaaacttgataaagattgctaaattttttacttcgctaatatgtccc

SEQ ID NO: 498684 - DNA, 201 bp, Homo sapiens
agacagtgtttatcactgaccgcttacatcaagttattgggtgccctcatttattatgttaaaatggttgcagctgatgtgaattcatctaaaagcaaagktaagtggctgttaatgccacttggcttaataatctgaaagtggaagaaactcttgatgcttactgagttaaaggagtctttgttctttgagtcttctttt

SEQ ID NO: 498685 - DNA, 201 bp, Homo sapiens
gtggtgatagctgccatccttgaacactttacctaatcaaggtgttgccctgaagactttcatattaactgtgaggtaggtgcattcattatcctcatcayacagaggggaactcacgctcagagaggttactttacttatctaagttcacatagcaagaaagtggcagaggtggaattcaaatttgactctgaatccaca

SEQ ID NO: 498686 - DNA, 201 bp, Homo sapiens
ttttaaatgttcctttggagattcgaatgtgcagccaagtctaaggaccaatgctgtgcagggcagagacccgaacacctcagtgttattccacatccttrttgcctctgatgcattttactagattttggaagctaatagttgtatgatgtttcagtgtctggtctccttccaaataattgcttcctagatctaaccctg

SEQ ID NO: 498687 - DNA, 201 bp, Homo sapiens
tggctttatgtcttcctatatcatctcagtataagatgcccaatggagtggacacaaacagaatccaaaccaagcatactgaatgctctgagctgttcctratggacttcccaagaatcaatagcatgaatgctctgagctctgctggaggcacttcccaagaatcactagagtgaacactctgagccatgcctgatggac

SEQ ID NO: 498688 - DNA, 201 bp, Homo sapiens
cccaagaagaaaggtagggcagtgggaagagaaaaggctttagaatcataaatattgtatgtatttaaaaaattctaagacatatattcttaataaaaatrttcaattttccttaaaatgtacaccttgacatctctgaaatcagcatgcaccttattatcaggggaatcctaaaatcttgagttctttccagggaggttt

SEQ ID NO: 498689 - DNA, 201 bp, Homo sapiens
ccatctttaggcagaattggaagtttccgactattgtctggatgctaactttgatagggatgaagggatctgtgacatcctttgattgacttttgttcctyggtgtcctgaaatttcagtctatgatgaagaaaataaaacaatgacaaggcaggtgccccgactctggctgataccacactaggcacttactcatttgct

SEQ ID NO: 498690 - DNA, 201 bp, Homo sapiens
tttgatttatttcatcagtgttttgaagatttcttgtacaaattttgttaaatttatatttaagtatttcatttttggtgctattgtaaataatattgtttctttaatttcaaatttcaacgttagatggctgatataaaggaaaacaattgacttttgtatattgacattgtattctgtgacttatttgtttattagtct

SEQ ID NO: 498691 - DNA, 201 bp, Homo sapiens
ttgatttatttcatcagtgttttgaagatttcttgtacaaattttgttaaatttatatttaagtatttcatttttggtgctattgtaaataatattgtttctttaatttcaaatttcaacgttagatggctgatataaaggaaaacaattgacttttgtatattgacattgtattctgtgacttatttgtttattagtctt

SEQ ID NO: 498692 - DNA, 201 bp, Homo sapiens
agcttaagagtcactttcttcaagaagtcttctctcatctaaaggtcatgtgttacctctgtgtttccatggcccccagacttaccttcctcataacacayggcacattttacattccttacctattaatgaatacctaactagacttaattccaggaagggaggaggtgtgttttcatcattctcatattcctaacacat

SEQ ID NO: 498693 - DNA, 201 bp, Homo sapiens
aactgagtctttattcatttccttattcattcaacaagtatttatgcaataccatgaattatataaaagtcctgtttcacataatgttgtggataggcacrccaattattataggcaaacgtgaccagggaatgtgtgaatgatatttctgtacatttcgatggagctttgttcatttcggtgtttgaacatttcagtgtt

SEQ ID NO: 498694 - DNA, 201 bp, Homo sapiens
aagttcccttctgctgctagttttctgagagtttttaacataaatggacgttgaagtttatccaatgcatttatttggcaattgataagatcatatgattktccttctttaacttactaatatagttaaccactattgtttgattttagaatgttgaataaactttatatacctgggagaagttctgttggagcatggcgt

SEQ ID NO: 498695 - DNA, 201 bp, Homo sapiens
gattcatctgggaaatgtgggaagagctgaagaaggcctttggcaactgcaataggtctcctctcccctatccagagttctgcttagaaagtcctgatgaytggctgggtagtgaaggaagatgttgagtcactaattctaacctggctgaggcccaagccttgggtcacatgacttgttacatatcatccacactgggtg

SEQ ID NO: 498696 - DNA, 201 bp, Homo sapiens
ttttcattttcatttagttcaattttgttttgttttgttttgtttttttagaccgagtctcactctcccaggctgaattgcagcggcgcaatcttggctcwctgcaagctccgcctcccaggttcacgccattctcctgcctcagcctcccaagtagttgggactacagacgccggccaccacgcctggctaattttttgt

SEQ ID NO: 498697 - DNA, 201 bp, Homo sapiens
gtcttattttagcaccctgcagcctcgcagtgggcaggagacgccccgccgccccgagctgagttcatcttcccgaaacccccggagccgcgggcatctcrccacgctgctctgagaatagcccgggagcaacagggccggcggctggtttctgcatcaattctcctccccctagtagcggctctgaaaacgcggagacac

SEQ ID NO: 498698 - DNA, 201 bp, Homo sapiens
gcattcttcttttaataagaaaatatccaataagaaatattcaataaggaaataccaatgtgattggtagcatctgacagacacattaagttttctacatmtctttaccatagttctgatttgtgcttgcccatgagatctgtaagcccacttaggaaatatctagcctgactaaagaagggcaaatgattcatctgggaa

SEQ ID NO: 498699 - DNA, 201 bp, Homo sapiens
acccccggagccgcgggcatctcgccacgctgctctgagaatagcccgggagcaacagggccggcggctggtttctgcatcaattctcctccccctagtarcggctctgaaaacgcggagacacggagagcagaaaacgaaattttaatgtactgtggcgtgaacttctggaaaagggtctccagcacaagaactcagttc

SEQ ID NO: 498700 - DNA, 201 bp, Homo sapiens
atttgctttcttaatttggctcacagcacttctcagtgcatatctgttggctgtattgagatccttttgttccccggtgtgacatgcccagtacttctttstgctttctcccatacaggtactgatatcacacagattttggggctattgggggattgttgctacccacttctatattggaatgtatgggtctatcaccct

SEQ ID NO: 498701 - DNA, 201 bp, Homo sapiens
ccagcacaagaactcagttcaatgacttaaaataaatgggcggggttggaggggtgggggcagaagaaactagctgcttaagagtaacgggagcactgaaraaggattcctgcagaaagcgagccgccgaacatgctgtttattgcacttaaggcacctgagcatgttggtgtggacgcgctggcttgttgaattttcctt

SEQ ID NO: 498702 - DNA, 201 bp, Homo sapiens
gatctcagttcactgcaacctctgcctcccaggttcaagcgattcttgtgcctcagcctcccgagtagctgggattacaggtgtgtgccaccacacctggmtaatatttgtatttttagtaggggcagggttttgccatgttggccaggctggtcttgaactcctgacctcaagtgatccacccgcctcattctcccaaaa

SEQ ID NO: 498703 - DNA, 201 bp, Homo sapiens
tcttttctttttttttttttttgagacggagtttcgctctgtcgcccaggctggagtgcaatggagctgcaacctctgcctcccgggttcacgctattctyctgcctcagccttgatggtctcgatctcctgacctcgtgatcctcccgcctcggccttgcaaagtgctgggattacaggtgtgagccaccacgcccgtcc

SEQ ID NO: 498704 - DNA, 201 bp, Homo sapiens
acctggctaatatttgtatttttagtaggggcagggttttgccatgttggccaggctggtcttgaactcctgacctcaagtgatccacccgcctcattctyccaaaatgctaggattacaggcataagtgaccactcccggccgggtttgattgttctgggaggctatttctggctttgtcttctcttgagccatcttgtc

SEQ ID NO: 498705 - DNA, 201 bp, Homo sapiens
ccccagccatgtgtaactgtaagtccaataaacctctttcttttgtaaattgccccatcttaggtatgtctttttcagcagcatgaaaatggactaatacrgttgtgtacataagtctatagattcacactcatgtaagaccagaatgacagatgccagaatggtaacagtggttaccctgggttgaaagatccaaagaga

SEQ ID NO: 498706 - DNA, 201 bp, Homo sapiens
gcccctcagccccccatatccttacccggagggtgtaagcccagtttattagtgtgtgtgtgtatgtgtgtgtgtttcctcttagaaacccatattgaggttttttttttttttttttcctttctgagagctgcatagaaaatacagcatctcacagttgatgacaccttagagtcaatgaaatatagtagctggattttg

SEQ ID NO: 498707 - DNA, 201 bp, Homo sapiens
cccctcagccccccatatccttacccggagggtgtaagcccagtttattagtgtgtgtgtgtatgtgtgtgtgtttcctcttagaaacccatattgaggttttttttttttttttttcctttctgagagctgcatagaaaatacagcatctcacagttgatgacaccttagagtcaatgaaatatagtagctggattttga

SEQ ID NO: 498708 - DNA, 201 bp, Homo sapiens
tatttaactattatgagcctcagttccctcctctttaaaatgaggataatcatggcacctacctcataaggttgtcatggggattccagaagtttttgtaygtaaagtagaacagtggctggccacaaacaggtgtttgcattattattaaagtgttgattttgcggacccaaggagctacgatgctgtatctgtgaatga

SEQ ID NO: 498709 - DNA, 201 bp, Homo sapiens
atttttaatcatgtgaaaggggaaaactcatagtaagtatagggagaaggcaatttagctgagaaaagaggcaggagctagcttatagtttagaggagagraaaaagcatagctattggactaatccagaactaggttcaaatcctggctagagcatctataacctggacaatatgtgtttaatagagggttaagaaccca

SEQ ID NO: 498710 - DNA, 201 bp, Homo sapiens
tccctaagtactcttcctcagaaagaatctgtgtcttgcagttctttcagctgttagtatccgtggttagtatacagggtccttgttggtgtgacattaargtgtggggaagaaggctctgtcaatcttttaaattttctttttgacttaaaaaatgatgttctttctttcactttctatatttcttaagtaatttttgct

SEQ ID NO: 498711 - DNA, 201 bp, Homo sapiens
atcactcaataagagaacataatgaccatggtgaaaacaggaccttgaaagcaggcaaagtgtgatgatgtctgtaatgatgtttgggtgtttatctacayaaaatcataagttatgcttagagaaaagggtaaatctcattccctagttaggtaagattttacctcaaatactttttaatttttttttctttaactcctg

SEQ ID NO: 498712 - DNA, 201 bp, Homo sapiens
cttgataaagattgctaaattttttacttcgctaatatgtccctccctcagcataggccattatatatctatatattcatatagatatatgtgtgtaattycttttaggtaaaaaatgcaagcaacttgcagcctcccaccatttcacagggttacacagcacgagacggggaaaggcataaccaccatggttggtcactg

SEQ ID NO: 498713 - DNA, 201 bp, Homo sapiens
ttttttgcacgccttcatattcacaaaaaagaggcttgccccttagtttgaatccaccctttaggggcagaaagaagaaggaaagaaatcaaatcccaggsaacaatatcactcaataagagaacataatgaccatggtgaaaacaggaccttgaaagcaggcaaagtgtgatgatgtctgtaatgatgtttgggtgttta

SEQ ID NO: 498714 - DNA, 201 bp, Homo sapiens
aataagcatcttgataggattgcctttcttaagctgaatgataaaagtaagatgagtttgaatttaaaaaatgcatttttttgcacgccttcatattcacraaaaagaggcttgccccttagtttgaatccaccctttaggggcagaaagaagaaggaaagaaatcaaatcccagggaacaatatcactcaataagagaac

SEQ ID NO: 498715 - DNA, 201 bp, Homo sapiens
gataaatgcatggctgaatgaatgaatgaacaaataagcatcttgataggattgcctttcttaagctgaatgataaaagtaagatgagtttgaatttaaaraatgcatttttttgcacgccttcatattcacaaaaaagaggcttgccccttagtttgaatccaccctttaggggcagaaagaagaaggaaagaaatcaaa

SEQ ID NO: 498716 - DNA, 201 bp, Homo sapiens
atgtgtgtaatttcttttaggtaaaaaatgcaagcaacttgcagcctcccaccatttcacagggttacacagcacgagacggggaaaggcataaccaccayggttggtcactggatatggatacatggatgcagaaactgcattggcttacgaagacacaccaggtttggcaaggagacctttcctcctggtgattcagta

SEQ ID NO: 498717 - DNA, 201 bp, Homo sapiens
agtccctggaattaaatgctattagtgcagcatcccagagagcaaaggaagctgaactgtcagccacttggtggatttctcattggttttttggtcagaartttttttcatatggcatggaaagtgataaaactccattttccgtcttggagaagagatggaaatgacagtccagctgtcctcgtctgaccatacattctg

SEQ ID NO: 498718 - DNA, 201 bp, Homo sapiens
aaaggaagctgaactgtcagccacttggtggatttctcattggttttttggtcagaagtttttttcatatggcatggaaagtgataaaactccattttccrtcttggagaagagatggaaatgacagtccagctgtcctcgtctgaccatacattctgaccttgggatgccagggtgccctcgtaagtgcttggagctggg

SEQ ID NO: 498719 - DNA, 201 bp, Homo sapiens
atgaggtttttcttgatcttggtgaagttcctggtttctgggtcattgtttttactttaactcccaagttaaaaagcatatggtactttatatctactgayaatgaaaactgtaggagccatttaaaaaaaattgacaaggcaagagaagaaatggaatccagcctttgagaggagcacatcagtttctgaggcacttttc

SEQ ID NO: 498720 - DNA, 201 bp, Homo sapiens
gaatttcttgttagggcagccagagtctagggggaaagcacatgcaaacacaataaacctgctagtcccctttagataaaacagaaatgcaatgtttttaratcatgttgcattgcaaacagtaatagcattccatgcagttgtattcagtgaaacctacagaagttgatctgatagcatttggtgcagagaaatacaacc

SEQ ID NO: 498721 - DNA, 201 bp, Homo sapiens
agttaaatgtgcaatgagatagtatgtaaatactaaaattactgtgtaagtgaatatttaataatgaggaaaaaagctcaagcaaagaatgtttaacactrtgttacgaagccctgtgcatacaatggtctatttttataaaaatttttgatatggtttggctctctgtccccacccaaatctcatcttgtagctcccata

SEQ ID NO: 498722 - DNA, 201 bp, Homo sapiens
aagtccccaaaaatgatcatctccaactgagtagattccacattttcgtgtgacctttcatttaatggtggtggagagacttggggtcttatggcttgcattttttttttttagcattactcatagaaagacagccaaatatgccaggatctgctccttaaacttgataaagattgctaaattttttacttcgctaatatg

SEQ ID NO: 498723 - DNA, 201 bp, Homo sapiens
taatagtgaaaaactttttttaaaagcctgaaatagttaaatgtgcaatgagatagtatgtaaatactaaaattactgtgtaagtgaatatttaataatgrggaaaaaagctcaagcaaagaatgtttaacactatgttacgaagccctgtgcatacaatggtctatttttataaaaatttttgatatggtttggctctct

SEQ ID NO: 498724 - DNA, 201 bp, Homo sapiens
ctaagacttttggatttcacagaggagagaagtttcaaaaaatagtttggggattgatttctttaaatttcagtagcagcagcagcagtagcaaccacagytctttaatatgaccattatgtaatagaagaaagggcgtttttttttttccttaacaggaatgatgtagtctcagaataaaagacagtcctttacattgaa

SEQ ID NO: 498725 - DNA, 201 bp, Homo sapiens
acactctaaacaattggctaaagaataggaaaaacaaatggacaaaatggaataaaatggaaaatgccataatacttgactataatataatatatatatawtagaatacatatatttgaacgtatgcttcaatgtatgattgaagtatacattgtatttatatataatatatgtatatgtgtatacttagctggtgttttt

SEQ ID NO: 498726 - DNA, 201 bp, Homo sapiens
tgcaataatagcctagacatttctataagcctactgtaggatttcagcacccctctgttgtctggtttcccagttatgagtaaacaatgtcagtctggggmtcaggtcatttgggaaatcgttgcttcccatctttaggcagaattggaagtttccgactattgtctggatgctaactttgatagggatgaagggatctgt

SEQ ID NO: 498727 - DNA, 201 bp, Homo sapiens
ttatgcgtgtgtgtgtttgtgggtgtgcatgtttgtgtgttttggggtgtgcatgtttatgtgtgtgtttgcgggtgtgcatgtttgtgtgtgtggttgtsgttgtgttttcttaatagaaattttgagaaaattgaaatagaattatttaaatgtttagctttgaaggttcagaagtaacttttaatttaggcagatgaa

SEQ ID NO: 498728 - DNA, 201 bp, Homo sapiens
ggttgtgcctgctacttccttttaccctaactttcccaacacacacatttctataagaatggtgtaattggtttagcttttctggttttttattatcccgygtgtttatttccaggcttatcccttatcagtggtcctgtgtttaagttttccccagacatgaagtccagagtgggtgatacttcatacaatgtatccaaa

SEQ ID NO: 498729 - DNA, 201 bp, Homo sapiens
taccctaactttcccaacacacacatttctataagaatggtgtaattggtttagcttttctggttttttattatcccgcgtgtttatttccaggcttatcmcttatcagtggtcctgtgtttaagttttccccagacatgaagtccagagtgggtgatacttcatacaatgtatccaaagtccttactatctcacagtgtg

SEQ ID NO: 498730 - DNA, 201 bp, Homo sapiens
actcccctgcccacaaacctctaaaggctctgccacttatccaatgaagtgaaagtgtttttactattactaagttggtgcaaaagtaattgcggtttttrccattaatacattttgatagtcaccctgactcatctccatatattctaactctgagcttttgcagatgttattgcctaagggagggaggaacactgtgat

SEQ ID NO: 498731 - DNA, 201 bp, Homo sapiens
gaatgagttactttgcagcagagtgcagtgtttgaggttgagggaaacatcaagaagaaacaaggcaattagattttttttaaattaagaataattcataycttaataaaaccttcacagagcattatccccatccctcctgccaactttccagtgagagcccaggagtaaatacaatgggagggatactttgcatgagct

SEQ ID NO: 498732 - DNA, 201 bp, Homo sapiens
aactttcccaacacacacatttctataagaatggtgtaattggtttagcttttctggttttttattatcccgcgtgtttatttccaggcttatcccttatsagtggtcctgtgtttaagttttccccagacatgaagtccagagtgggtgatacttcatacaatgtatccaaagtccttactatctcacagtgtgacatga

SEQ ID NO: 498733 - DNA, 201 bp, Homo sapiens
actgtaattaaaaaaagagagaatgagttactttgcagcagagtgcagtgtttgaggttgagggaaacatcaagaagaaacaaggcaattagatttttttwaaattaagaataattcatatcttaataaaaccttcacagagcattatccccatccctcctgccaactttccagtgagagcccaggagtaaatacaatggg

SEQ ID NO: 498734 - DNA, 201 bp, Homo sapiens
aagcaaactttgtattgccgtgataaatagaagaacgataaatgcacagaccaagtttgacttgaacacttcatccctcatttgagaatactgtaattaaraaaagagagaatgagttactttgcagcagagtgcagtgtttgaggttgagggaaacatcaagaagaaacaaggcaattagattttttttaaattaagaat

SEQ ID NO: 498735 - DNA, 201 bp, Homo sapiens
acacaacacacataaatactcactcaccttctgagactgacagatgacctgaaaacaaggtagaagatgacacccagcatatatcttcaggccacaaagayggaagcagtgtgaactgatggaaagcatggggctttttgagtcagatatatggggctctaattccatctctgttatttaccagctatgtgtccttcaggg

SEQ ID NO: 498736 - DNA, 201 bp, Homo sapiens
ccttgtaattttctgttgaaaactgttcatattgtatcaggtaatagaaaatgaagtaaatagatattttctgtgaggatttatatcactctggctgggarttaagctatggttaaggtttgctatagttgtatgttccagtagcttcaaattcctctagtgtattagtttcccctcttgatatgggcttccctaagtact

SEQ ID NO: 498737 - DNA, 201 bp, Homo sapiens
ctagatctaaccctgaatttctgtacacaggaaacccactgtcacaaaataagccaatgacaaccgttaagcatgaaaagggctttgctttatcttacccrgggattcctccagattcgagtttgtttgcaatatccacatcccaagaccagacatcaaactgccacttccttagtcccaaaacaccgcacagcaccgagc

SEQ ID NO: 498738 - DNA, 201 bp, Homo sapiens
catgaaaagggctttgctttatcttacccagggattcctccagattcgagtttgtttgcaatatccacatcccaagaccagacatcaaactgccacttccktagtcccaaaacaccgcacagcaccgagccggagtggattccaatcctcatgtcaacatcgtgttttgtccttgaccgcacatacctgttgacataggta

SEQ ID NO: 498739 - DNA, 201 bp, Homo sapiens
taccatggccctcttccacgttatagtcaccgttgagacagtccagcgtggctttggaaatgtgaatcctcctgtgtgtagaaggcataggtcattacacrctcctgatgttgcctgcaaaggctatatttttttgacctgtacaaaaccaacaccaggttacacaagggtattattaggacatgtcctcagggacaatac

SEQ ID NO: 498740 - DNA, 201 bp, Homo sapiens
tgttgacataggtaaatggagagacacatgtataagaccagagtgggcatcgttggctctgcactttcttttctttttttttttttttgagacggagtttygctctgtcgcccaggctggagtgcaatggagctgcaacctctgcctcccgggttcacgctattctcctgcctcagccttgatggtctcgatctcctgacc

SEQ ID NO: 498741 - DNA, 201 bp, Homo sapiens
tctgaagtgtatgtggctcaccagtatggccacagtcttggagcctgtgtctgaggtagggaaactgaatagggcaatgtcagagctgaaaggaattgttsgatcatccagtccagttttgctattgttcaaatgaggacaccgagccttggaggggagaagtggttgcccaaggtctcttagtagcaactggacaaatct

SEQ ID NO: 498742 - DNA, 201 bp, Homo sapiens
ttcagtgttccaatatcatcaaacttctccaggtctttcgatcccaccatacattatgcacctgtatctttgtacatgctatgcctgctccctggtatagmtttttcccccttttgctacctgttaaaatctgacttgtccttcagagccccactcaggtgttaaaatcatgttaagagtctatacccctctggagacttc

SEQ ID NO: 498743 - DNA, 201 bp, Homo sapiens
taaacaatgtcagtctggggctcaggtcatttgggaaatcgttgcttcccatctttaggcagaattggaagtttccgactattgtctggatgctaactttgatagggatgaagggatctgtgacatcctttgattgacttttgttccttggtgtcctgaaatttcagtctatgatgaagaaaataaaacaatgacaaggca

SEQ ID NO: 498744 - DNA, 201 bp, Homo sapiens
tttattgactgacattttcctctttcaatatcagttctgctaaagtattagaaatgtaccaatgtatgtaggatctcctaaactatatgttgatcctttgrgtattgatggcaaatttcaggcatcagtagcaattgcacaaatctggagttgggaggtgggctaccatgatgactaagatagacggctttgaagtcagat

SEQ ID NO: 498745 - DNA, 201 bp, Homo sapiens
ataaaaataggggatcaaaatatttagatactactggtctataagatacaatggaaaattcctagtctggcacacaaaattcctcatgatctgtccagtgycttagttattcttctcattcctcatgcacacattagactccagccatccaaacaacaagtcattgtctgaaccttgtgttccttctttcctctctgggac

SEQ ID NO: 498746 - DNA, 201 bp, Homo sapiens
tatctgtcaaatgggaacattaatatagttcataagtttggcgttaatgtagttcataagtttgaagcattctattattttcctgtttgaacttcagtgcytagcataatcacataaaagaagaatcttataattgtgaagttgacatcatcaaatataaaatgctgtgtttcagaatgtggtgcattgttactctggaaa

SEQ ID NO: 498747 - DNA, 201 bp, Homo sapiens
tatatataagatgcttagaacagtgccttccacgataaccctatataaatgttacctactgtcaatcaattaattatacttattttatttctatactttcwtctatgtgaagcttgccttttcaatggtgttgccttgcaggatgctgtcttctattcctctgtacagtattgtaccttgcactcagcggtgaccccaaaa

SEQ ID NO: 498748 - DNA, 201 bp, Homo sapiens
gataatactttgtagtagaattactagaaaaaccttcattgccccccaaatgcaatgattatgtgacttcaaaatgcttaaaagagttgtcagacttaaargtgagctattcatttgtctttgacagaagacaagtgttccaaatttgctgatatttttgtgataataagtcgccattaatattccttctagcatatattt

SEQ ID NO: 498749 - DNA, 201 bp, Homo sapiens
aggcactgtgttttatctataactgagtctccggcacctggtatatctgctaggttcataataagtgtatatgaaaggaaggaatggatgagtggatagaygaaaggtcaagtgcctttataagaagattgtcgaacacatggacacagggtggggaacatcacacaccggggcctgttgtggggtcaggggagtggggag

SEQ ID NO: 498750 - DNA, 201 bp, Homo sapiens
ttctattagttatacatgattattcccaaatattaaaaaatatagtaaagaataaagaagaaaattaaaactactcaatttcatcacagagctttatgtcmtttctttttataaaaatagatgtattaagaagtggaggttcccattccagcaggggtagctaaaaataaataaaaaattaaaaaagctgaagttggttta

SEQ ID NO: 498751 - DNA, 201 bp, Homo sapiens
atcctgggagattgttggaagcacctcttccaatgagctacaaggctgtacttgcttagattaatgacggttggaaccctggtaccctgggatacaagacrcattaagattggcccatatgagatttatcttaaagagggtcttgccttgtgcaggtttgggttagaagaggattaattagaaggacaagggaaaagaaag

SEQ ID NO: 498752 - DNA, 201 bp, Homo sapiens
cccatttgtgaagtaggcacatcacacttaccctgtaaggttggtgtgagaattaggtggaaaaacatgggcacaccactcccgacatgctacctgtcccraagctctctactcctgtcagtgttggtgaccttgtggatgtttatctatattccaggcaatgaagtgtgtttgctctccatttgttacatggagatagaa

SEQ ID NO: 498753 - DNA, 201 bp, Homo sapiens
gtagctgggattacaggcacgcaccaccatgcctggctaattttgtatttttagtagagatggggtttctccatgttggtcagactggtctcgaactcccratctcaggtgatctgcctgccttggcctcccaaagtgctgggattacaggtgtgagccactgcacctggtcgttacccatttttctattttttacatatg

SEQ ID NO: 498754 - DNA, 201 bp, Homo sapiens
ggagttcgtgaccagcctggccaacatggtgaaatcccatctctactaaaaatacaaaaattagccaagggtgctggcacgcgccggtaatctcagctacytaagaggctgagttggaagaatcgctggaacccgggaggcggaggttgcagtgagccgagatcgtgccattgcactccagcctgggcgacagagtgaaat

SEQ ID NO: 498755 - DNA, 201 bp, Homo sapiens
cctggccaacatggtgaaatcccatctctactaaaaatacaaaaattagccaagggtgctggcacgcgccggtaatctcagctacttaagaggctgagttrgaagaatcgctggaacccgggaggcggaggttgcagtgagccgagatcgtgccattgcactccagcctgggcgacagagtgaaattccatctcaataaaa

SEQ ID NO: 498756 - DNA, 201 bp, Homo sapiens
ttaaataacagaatgaacaatagctcaagcccagatatagattttactcagagcatgcagcagaaaaggaaaatataacctttatgataaggatcctgttsttatcttcctttcatttgcaatgttgtctttcaactgagagattcaatgtccatgttgataactcatttaataatctagccttgaacttcctggatattc

SEQ ID NO: 498757 - DNA, 201 bp, Homo sapiens
cagacacttcaagctccacatgtcccaaagagaattcctagtcttcctcacacaatctcctattccagtactgcttattttagttggaagttctatcatcsacgcagttccaagcaaaaaatctagaattcaaacttgactgattcctctccctcactacccatatctatcatttaattcacttattcaacaaactttaat

SEQ ID NO: 498758 - DNA, 201 bp, Homo sapiens
ataatttctatcttcattaagaatataaaccactggctgactttgtctctaaagtgattttttttccccatccctcctcttttttttttttttttttttttactagcagtagttggcttgtaatagatgctcaattaatccttattgaatgaatgaatacatgaggatgtaactatctgaacatctgctatctacatagca

SEQ ID NO: 498759 - DNA, 201 bp, Homo sapiens
atctctagctaataatgacatctcttataataggtatttggtgacatcaggaaatatctttaggaaatcagcaaataaatatttcaagcattcctatacartttaaccacatcaatcaactatagaataaaaccaagaacctccacctccctcttcttggctctcagttattagtagcaagttcatgtacaatacagatta

SEQ ID NO: 498760 - DNA, 201 bp, Homo sapiens
gccattgtcatcatggcccgttctcaatgagctgttgggtacacctcgcagacggggtggtggccgggcagataaattccctttctttaggcatagtctgwttcaaatattctgtcagtaagcaacagaaaacgggctaataaagatgaacatgattcagagcctttgctatgtcacttacaagctgtgtgtcattggtca

SEQ ID NO: 498761 - DNA, 201 bp, Homo sapiens
aggaagtatataacaccattattttataaaacagcaaactgtaccatgcacaccaactcagagatggaaagaacctaggcattgcaatcagttatgacttktgtgggcataataatttttgggggaaattaaacactcacaaaagagctgtcgaagacctaagggtcaactcttgcaaggcatgcagcctaggttcaacct

SEQ ID NO: 498762 - DNA, 201 bp, Homo sapiens
gtatataacaccattattttataaaacagcaaactgtaccatgcacaccaactcagagatggaaagaacctaggcattgcaatcagttatgacttgtgtgkgcataataatttttgggggaaattaaacactcacaaaagagctgtcgaagacctaagggtcaactcttgcaaggcatgcagcctaggttcaacctgcagc

SEQ ID NO: 498763 - DNA, 201 bp, Homo sapiens
atataaaaatagaatcatgtgggtggctttgaaattgcatgctcctcctgaactccctaactctaggcatcacttggtgctcctttcctatttccaaatcwgcagtgcccccctgattttgaatctcagagggtgacacagaactgatgatggccagctaccgaaaaaggggcattcccatgtacttgatcctccccttta

SEQ ID NO: 498764 - DNA, 201 bp, Homo sapiens
tacagattaatctccaaagcctcccttcttatagatctgagtttgctgagggtacttcaggagtcattgtggggtagggactgccattgtggtggccatgragcccaacttttccttcaaccctgatccattctattgcctctgctggactttagtgtcagcctgccgtatgaaacgtagggtccatctgcttcttaaaat

SEQ ID NO: 498765 - DNA, 201 bp, Homo sapiens
ctaccagagccagtttacaagtgagagaactgagtcacgagaggtatattgctttacgtcacacagttattgatggactagttagaatttcaccccgggtrtataagcctgaacccattggtccatttctacttccctgcatggcttctttaaagggaaatacaaaaggaagtatgtggactactggggtctgagctgact

SEQ ID NO: 498766 - DNA, 201 bp, Homo sapiens
tcagagttctagaaagagcatgggttgtttatttatttttttaactctatagagctttctctttggttgctttcatgcagtgtttcaaaacatcatagctmgaattccttcccactttaacctgtatagcccttattgtaagtgattttgatttcactcacacagttcctttcaggcctttatcatgagagggagattaga

SEQ ID NO: 498767 - DNA, 201 bp, Homo sapiens
acccggagggtgtaagcccagtttattagtgtgtgtgtgtatgtgtgtgtgtttcctcttagaaacccatattgaggttttttttttttttttttcctttytgagagctgcatagaaaatacagcatctcacagttgatgacaccttagagtcaatgaaatatagtagctggattttgagatctaagatctccacttaacc

SEQ ID NO: 498768 - DNA, 201 bp, Homo sapiens
agggtctgcctagtgctgggttttactgtggcaggcccagtgttggggtccaagtcaaagtcctatgcccacttccttctcttttccccaaatggatggtatatttttctgcactgtgctgcttgggatgggggaaggatgatatgggtaatataatataaatttgtcctgcctactccatttaatgtgccttttattatt

SEQ ID NO: 498769 - DNA, 201 bp, Homo sapiens
gtgaagagaagccacctggagccacttttcaatctatgtaatagaatctattatataaacctattttaattaatttaattttatgaacagacatgcatgagatgacattaagtgtttcattggaaataaaattacattcaatctcttttttgccattcatctagctaatatcatgtttctaaaattaagtatttttggtgg

SEQ ID NO: 498770 - DNA, 201 bp, Homo sapiens
ctgattttgaatctcagagggtgacacagaactgatgatggccagctaccgaaaaaggggcattcccatgtacttgatcctcccctttagtttaataacaragggtttattttttccaacatgagtggtttttttttttttttggtaaaattacaattcagcttcacataatatttatttttagctaggttacaaaaaaaa

SEQ ID NO: 498771 - DNA, 201 bp, Homo sapiens
tggacctccacatggcatacagggccttgagtgtctgctcttggctctctctcctgccttttttttttcctccctcacccttctgcaccccatggtctggrcaatgctgaactatgtgcagtctgtcgccagtgctatgcactttctgccttatgggcacttaacatggtgtgtcctgttattcctgcaaggctcagcttt

SEQ ID NO: 498772 - DNA, 201 bp, Homo sapiens
gctgctgaaagggaaagacaaaacctcaaacaggggtccatttctgacagcaaataaagagggtcaacacgaaatttggggacaccagtaaacaaatggtwtattaacatataacattatgatatatgcaatataatattatgaacatttccagtctttatggcttctatcaagttttcaaattggaacaagcaactttgc

SEQ ID NO: 498773 - DNA, 201 bp, Homo sapiens
gaactgatgatggccagctaccgaaaaaggggcattcccatgtacttgatcctcccctttagtttaataacagagggtttattttttccaacatgagtggtttttttttttttttggtaaaattacaattcagcttcacataatatttatttttagctaggttacaaaaaaaaaaaaagagagagagagagggtgttagga

SEQ ID NO: 498774 - DNA, 201 bp, Homo sapiens
cagcatcatagtggtaggatctcacaccagagtttaactgtgggatatgagggccagcagagaagagattcaggatggaggccatgtggtctcttgacttragccacattctgtattccagcttttatcacagttttgcataggctaaatgggcaattgtttggaaatttgtaaaattgatgtttttttttttctcattta

SEQ ID NO: 498775 - DNA, 201 bp, Homo sapiens
aactgatgatggccagctaccgaaaaaggggcattcccatgtacttgatcctcccctttagtttaataacagagggtttattttttccaacatgagtggtttttttttttttttggtaaaattacaattcagcttcacataatatttatttttagctaggttacaaaaaaaaaaaaagagagagagagagggtgttaggaa

SEQ ID NO: 498776 - DNA, 201 bp, Homo sapiens
ctattcatcatgaaattcaggaaaccaaaagcactttaaagttctatggcaagggtattaattacaagattagctttttaagcaaaagtactgacactgtrtattacatttctctggaaatctctgcagcagttcctcagcattcatttatttctttacatgtaaacattataacatcagattgtacattttatctaatta

SEQ ID NO: 498777 - DNA, 201 bp, Homo sapiens
cttccttagtctaccccaggaacttcagagaaaggaaggatgatgagtcaaagcaaatggatccaattgcctacttaatccattcaatgttctctggaagscttcaaatccacttgtcttttgaaacagagtgaaaaagcagaccccactaatgattctccctggctgaactcagcagctatcctcagattcagagctcag

SEQ ID NO: 498778 - DNA, 201 bp, Homo sapiens
aataacagagggtttattttttccaacatgagtggtttttttttttttttggtaaaattacaattcagcttcacataatatttatttttagctaggttacaaaaaaaaaaaaagagagagagagagggtgttaggaaccctctggcatttctggcatttcctgaaattgcatacgaggttaattctgtcctgaggagacag

SEQ ID NO: 498779 - DNA, 201 bp, Homo sapiens
tcccgggttcacgctattctcctgcctcagccttgatggtctcgatctcctgacctcgtgatcctcccgcctcggccttgcaaagtgctgggattacaggygtgagccaccacgcccgtccacctcttcactttcaatgtcaccccttccatgaagccttcttaggttctttaataactagaaagagtctctgaacatcct

SEQ ID NO: 498780 - DNA, 201 bp, Homo sapiens
ccttcttaggttctttaataactagaaagagtctctgaacatccttagccttttatctgtacttttaagggctctttgaaaccttcctccaaaacctgctstgtaacctctgtctcagggaatggcaccagcatctttttctacccaacattaacctgagatagattattgatttcatacttcattacacattccatttcc

SEQ ID NO: 498781 - DNA, 201 bp, Homo sapiens
taataactagaaagagtctctgaacatccttagccttttatctgtacttttaagggctctttgaaaccttcctccaaaacctgctgtgtaacctctgtctyagggaatggcaccagcatctttttctacccaacattaacctgagatagattattgatttcatacttcattacacattccatttccaaccaaaatgtcaac

SEQ ID NO: 498782 - DNA, 201 bp, Homo sapiens
gggatacatgtctggtcatcctctgactgtaagtatggaggaggcatcttgagaagacagaagaatttctaccattggatgatttcctgtagtcatgagcrttctttctttcagagtattttgaacaattttagtttatgattaaatgatgtcatttatgcagaaaatcaaatggtagaagataatactttgtagtagaat

SEQ ID NO: 498783 - DNA, 201 bp, Homo sapiens
tgaacaattttagtttatgattaaatgatgtcatttatgcagaaaatcaaatggtagaagataatactttgtagtagaattactagaaaaaccttcattgccccccaaatgcaatgattatgtgacttcaaaatgcttaaaagagttgtcagacttaaaggtgagctattcatttgtctttgacagaagacaagtgttcca

SEQ ID NO: 498784 - DNA, 201 bp, Homo sapiens
gttgacataggtaaatggagagacacatgtataagaccagagtgggcatcgttggctctgcactttcttttctttttttttttttttgagacggagtttcrctctgtcgcccaggctggagtgcaatggagctgcaacctctgcctcccgggttcacgctattctcctgcctcagccttgatggtctcgatctcctgacct

SEQ ID NO: 498785 - DNA, 201 bp, Homo sapiens
gacaagtgttccaaatttgctgatatttttgtgataataagtcgccattaatattccttctagcatatatttgaaaaaaacacacaaacttgcttaatttrtttcttccaactcaagatgatgacttaagaatgagcaagaaagtaactgatttttaaagaaattgatgctctgaagaaagcattttgagaatggaagttt

SEQ ID NO: 498786 - DNA, 201 bp, Homo sapiens
tcatttccaccacaggctacatatacagctcatccatttattctttcaacaagtgtctgttgaagaactctaaagatataagcagtgacccaaacagacaratcaagttctgcattcatggagcttacatcaatgtggtttattcccattttacaaccaaggaagctggagcccagagaggttaagtcacacgggtgttag

SEQ ID NO: 498787 - DNA, 201 bp, Homo sapiens
ttttgaaaatactcagcacagaacttggttcatagtaagcactatttacaatagttatcataatataaaactggcaaaagcttagttgtgtgtagcaaacraagctcattcaacttcagttttgtttaatatgaatttgatctttttttttttgagatggagtcttgctctgtcacccaggctggagtgcagtggtgcgat

SEQ ID NO: 498788 - DNA, 201 bp, Homo sapiens
aagggaaagacaaaacctcaaacaggggtccatttctgacagcaaataaagagggtcaacacgaaatttggggacaccagtaaacaaatggtatattaacmtataacattatgatatatgcaatataatattatgaacatttccagtctttatggcttctatcaagttttcaaattggaacaagcaactttgcagctgaat

SEQ ID NO: 498789 - DNA, 201 bp, Homo sapiens
aatgccagaaatagggacaaggagagctgctgaaagggaaagacaaaacctcaaacaggggtccatttctgacagcaaataaagagggtcaacacgaaatytggggacaccagtaaacaaatggtatattaacatataacattatgatatatgcaatataatattatgaacatttccagtctttatggcttctatcaagtt

SEQ ID NO: 498790 - DNA, 201 bp, Homo sapiens
tctcttttccccaaatggatggtatatttttctgcactgtgctgcttgggatgggggaaggatgatatgggtaatataatataaatttgtcctgcctactycatttaatgtgccttttattattattgtgctacagctgagtattatgacatctcacctgatttccttagctcttttgaagctattttcacatatgaatac

SEQ ID NO: 498791 - DNA, 201 bp, Homo sapiens
ttccagagtcctcaaccccaataattccttcccccttgatccatcatctgtttgtcagatatgctgaataaaaccaaaagcacttgccacacatccatgargccaaccctggtggcagccttctagtaatttcctattggccataggataaagtgcaacctcttaacatgactgagaaggtcatatgggctctggctgctg

SEQ ID NO: 498792 - DNA, 201 bp, Homo sapiens
ctcttggcaaaactgcaggaattatggcaaagtccagaatggtaggtctcctgacaaaagtgtgttttagaaggagattgtgtaaaatagtttattactcrtctgaggcagacattggataatgatgtgatgatgttcacgtccagggtttgttattcttccaacaaaatgtggagctggtagcctccttgaaactctttg

SEQ ID NO: 498793 - DNA, 201 bp, Homo sapiens
ggtatgctcatggatgctgagttggtcattctttctaaatctccccataggtgtttctccagtccaggatatcatcttccatttagttgttatgtctcctyaggtgcctccttgctgtgacattttctcagacttcccttgttttacatgactttgacaggtttgaggaatactggtgaggtgttttgtagactgtccctc

SEQ ID NO: 498794 - DNA, 201 bp, Homo sapiens
aagatatatgtttagctctgatagccactgaagcctggtatagagataaattgaacttaaaacctgacctttacattactatatcacaaactattaaaaattttttttaaaaagaattatgtttaaacccattgctctctaataaatggtgaaagcagaaaagtctaaattaaattgtaattaatttaagatattttaaaa

SEQ ID NO: 498795 - DNA, 201 bp, Homo sapiens
aaggttggtgcatcagtgagttcccagagggctctaggcagatgggaaacttccctccaaacaggctggaaaaacactccctgacaacacaccattatttstgggcaccagggggagataaatgaaagagaatgcaggcggatcgctttgtcaggaagtcccatgagagagggggccaattgcaaggctcatgtggctcat

SEQ ID NO: 498796 - DNA, 201 bp, Homo sapiens
catgggatcccctaaactcctaaataaaatgttttaaagcctgtatatattaaagttcattctctgtgctgtaaagttttataagttttgataaatgcatrgtgtcaggtatataccattacagtatactgaatgcactaccctaaaaaatatgctggacttcatctcttttattctcctttccctcattccccaagctcc

SEQ ID NO: 498797 - DNA, 201 bp, Homo sapiens
actattaaaaattttttttaaaaagaattatgtttaaacccattgctctctaataaatggtgaaagcagaaaagtctaaattaaattgtaattaatttaaratattttaaaattgtaatcaaattaaaatatttaaattaaattggatactgtaaattaaaatactttaaagtatttttattttctcattatcctttaaaa

SEQ ID NO: 498798 - DNA, 201 bp, Homo sapiens
gcccagcaggtttggctgaatcctgccaggccccaccaacactcacagctcgccaccccgaggtgccttcggtcaggaccctagtcctcattgtctcttargtagtcaagaaactcattctttcctggtattctctggtacccttcttctgatttattacttggataacacataactatcgccgtggctggcatattcata

SEQ ID NO: 498799 - DNA, 201 bp, Homo sapiens
tcttcatttatttacatctttgatttatttcatcagtgttttgaagatttcttgtacaaattttgttaaatttatatttaagtatttcatttttggtgctrttgtaaataatattgtttctttaatttcaaatttcaacgttagatggctgatataaaggaaaacaattgacttttgtatattgacattgtattctgtgac

SEQ ID NO: 498800 - DNA, 201 bp, Homo sapiens
attaaaaattttttttaaaaagaattatgtttaaacccattgctctctaataaatggtgaaagcagaaaagtctaaattaaattgtaattaatttaagatwttttaaaattgtaatcaaattaaaatatttaaattaaattggatactgtaaattaaaatactttaaagtatttttattttctcattatcctttaaaatcc

SEQ ID NO: 498801 - DNA, 201 bp, Homo sapiens
ttttttttaaaaagaattatgtttaaacccattgctctctaataaatggtgaaagcagaaaagtctaaattaaattgtaattaatttaagatattttaaawttgtaatcaaattaaaatatttaaattaaattggatactgtaaattaaaatactttaaagtatttttattttctcattatcctttaaaatccctatatta

SEQ ID NO: 498802 - DNA, 201 bp, Homo sapiens
tatggaggtcaactacgttcattgcccagggcgttttgtgcagctatggaatcatcttcataacaaacctgggtatcactaccagagccagtttacaagtragagaactgagtcacgagaggtatattgctttacgtcacacagttattgatggactagttagaatttcaccccgggtgtataagcctgaacccattggtc

SEQ ID NO: 498803 - DNA, 201 bp, Homo sapiens
ggaatgagggcaaggaacacctggcccacccagggcggaaaccgcttaaaggcattcttaagccacaaacaaaagcatgagcgatctgtgccttaagggcrtgttcctgctgcaattaattcggcccatcccttcgtttccctcaagggatacttttagttaatttaatatctatagaaacaatgctaatgattgctgtta

SEQ ID NO: 498804 - DNA, 201 bp, Homo sapiens
aggtccactaatgtcaacctaatagtggtgtgtgcctgagatcagactggccaagcaagcctgtagccttgagctgtgtggtcctatctgccatcggggcrtgtgtagaggcttagtctgtgggtaccagcctggtatatgggatcatgagggtctgcctagtgctgggttttactgtggcaggcccagtgttggggtcca

SEQ ID NO: 498805 - DNA, 201 bp, Homo sapiens
agtttatgattcatttttcttgaagtttttaaagcctccatttaactttgattttctttataaatgacagaaaaaaactgagagacattctggacatagckaagaaccaattgtactgagccaaataattatctaaagattctcttgtgtggcaaatccttggttttatgtggctgctaaccgaaaaaagaaataacatta

SEQ ID NO: 498806 - DNA, 201 bp, Homo sapiens
tccctggttgtagatgataatgatgtctacccatgaagcgttacaattgcttcagtgaccaggtcaatggcctcataattctgtaattctatattacactrttataggtgaaattggcacttctgactctgaaaatgctggctttatgggactggaactggctaattgatctgattaaaaaatacacacgaaatggtactt

SEQ ID NO: 498807 - DNA, 201 bp, Homo sapiens
attgcaactcttgaagaaggtcttgtttataatatcctcactttgtagataaagaaactgagggtttgaataactgagtaactcaaccacaccttcacagrttgcaaatagagaatccagtgagttttgctctagaatgcagggactcactggctactgcttccttgctattttcagagtaaggctatcttgttcataggt

SEQ ID NO: 498808 - DNA, 201 bp, Homo sapiens
gaaaatggatacaataataggaattatctcataagggttactgggagaatgaaatgaggtaatatatataagatgcttagaacagtgccttccacgataaycctatataaatgttacctactgtcaatcaattaattatacttattttatttctatactttcatctatgtgaagcttgccttttcaatggtgttgccttgc

SEQ ID NO: 498809 - DNA, 201 bp, Homo sapiens
gttaaggactccttgtctcatctctgttctgtcctcacctggccccacttatccttttatatctcagttgtgagcatgaactaatcaagagctagattaastggatttgaatcccagctctaacacctatgcaaccttggacaaaatctttaagctttctatgtctcagtttccttatctagaaaatggatacaataatag

SEQ ID NO: 498810 - DNA, 201 bp, Homo sapiens
ccttccatgtttccatgcctgggatagtcctaagaactcttcctaggtgagggggaggaaaaccacagtgctttcctagactctccattttgactgtaagstaaaaggcactgaaagattcttacatttctacaagatgtagaagatgcttataactaaaacaattatctagttaattgcctaaactgtaactgtactctg

SEQ ID NO: 498811 - DNA, 201 bp, Homo sapiens
ttcttcccaagcaaactgacctctgaacaaatgtggatttaatcatgttaagttgactcacaaggaaacatgctaacatgcgtttaagattgatgggcttsagaagtgcaaggctgggaggacacctgcccaggggtgacagaagaccctaggttggtaatacatttcctaatgttatgtccttccttgatagcggggtta

SEQ ID NO: 498812 - DNA, 201 bp, Homo sapiens
gcctctttgaaacctgtccttcacatctgaaggaggaggccaagatattcatactatgttgggacttactagagcagtaaaaactcaagagcagcctgatrctataacagaataaatctttaaaaatcattttaacaataagatcatgaaaatgactaggagatatgtgatttagaaaaatgaaagagaaaagctgagacc

SEQ ID NO: 498813 - DNA, 201 bp, Homo sapiens
aggtaaatggagagacacatgtataagaccagagtgggcatcgttggctctgcactttcttttctttttttttttttttgagacggagtttcgctctgtckcccaggctggagtgcaatggagctgcaacctctgcctcccgggttcacgctattctcctgcctcagccttgatggtctcgatctcctgacctcgtgatcc

SEQ ID NO: 498814 - DNA, 201 bp, Homo sapiens
ggcaaggacagcagactgtcctcaggctgcttaattaagtaagtttcgatattatgcttcctcaggaattcattcctctctttaccatggccctcttccaygttatagtcaccgttgagacagtccagcgtggctttggaaatgtgaatcctcctgtgtgtagaaggcataggtcattacacgctcctgatgttgcctgca

SEQ ID NO: 498815 - DNA, 201 bp, Homo sapiens
ttaatacgaaggcagtgatgctcctggaaggaacaggataagagggaaaggtctatgtcagcagaaggatcagttcttcagaaaggcttgagaaagaggcragcagggttaggtggtctgcaacttggggtaaggagaacctacctttgaaatatacttctacctgtctttctaaaatatttgaggtgtaacctaaatggg

SEQ ID NO: 498816 - DNA, 201 bp, Homo sapiens
agggaaaggtctatgtcagcagaaggatcagttcttcagaaaggcttgagaaagaggcgagcagggttaggtggtctgcaacttggggtaaggagaacctrcctttgaaatatacttctacctgtctttctaaaatatttgaggtgtaacctaaatgggggtttgaaggacccagaggtggaatggaatcataaagaaatt

SEQ ID NO: 498817 - DNA, 201 bp, Homo sapiens
gtgggatggagagcgtgaatgacttccagtaaaaagctggtggccaggtggatcctcaggtgaacctggagaagtctcagaggttgatagctgaagtcaayttgagcgttcaaagagtccagcttttagattgggaaacggaggcccacagggatgaggtgatgcagtcgaagtcttgccaagggtgtggctaccccagcc

SEQ ID NO: 498818 - DNA, 201 bp, Homo sapiens
atattattatttctcaatctttagggtcttagttgattcaaaaaaaggtcaaaatctaggataaggaatttgaataataaggactaatatctagtgcaagrctggtgctgtgatacacgctttacatgaatgttctcatttaactattgcaactcttgaagaaggtcttgtttataatatcctcactttgtagataaagaa

SEQ ID NO: 498819 - DNA, 201 bp, Homo sapiens
aatttaagcctatgtaaatcttggttagaatgaaagtaaagcatatgggcaaacaatggacattagaaacagcctaaaaattagtttaataaaatgccacygctatattttcctgattgatgaatggatcctcatcacaatgcaatgcaaaataatgagcccctttttaggccaggatgggtgaactgataatagggaaga

SEQ ID NO: 498820 - DNA, 201 bp, Homo sapiens; identical to SEQ ID NO: 285103

SEQ ID NO: 498821 - DNA, 201 bp, Homo sapiens
cctccaataagccgacggcgcatcccattccctccctctattttattttctgcatctttaaatggtctcattcattcgtgtattgtctgtctcccacttcyagattgtgagtgccacggggctgaggcctgcgccgacctggtctgctggtgctaccaggcttgaacagtcttcaaatccactgctattaggcaaattacc

SEQ ID NO: 498822 - DNA, 201 bp, Homo sapiens; identical to SEQ ID NO: 152030

SEQ ID NO: 498823 - DNA, 201 bp, Homo sapiens; identical to SEQ ID NO: 151995

SEQ ID NO: 498824 - DNA, 201 bp, Homo sapiens
cctcatgacaagccacatacacaatcattttgtagataaagaagatataaatgccagaggagaccttaagattgtcttacaacacaacccttcagttaacragagaggaaattgaggctcagattggggaagtgacttggcaaatcacacagtgggttagtcaatggcccaggattagacagaacccaggaatcctgacat

SEQ ID NO: 498825 - DNA, 201 bp, Homo sapiens
ttccctgttatttggcctctgtaccttgaacctaggttgacatcatgagcagaggacagttcttaggaaaggcaaatatcccataaatcctatttgcctcyctttctcctaacctctggctccaccaactccccaacaggcctcctgcacacacaataggagtcaggagggaggaggcaggactgtgctacacaagggaga

SEQ ID NO: 498826 - DNA, 201 bp, Homo sapiens
catgacaagccacatacacaatcattttgtagataaagaagatataaatgccagaggagaccttaagattgtcttacaacacaacccttcagttaacgagrgaggaaattgaggctcagattggggaagtgacttggcaaatcacacagtgggttagtcaatggcccaggattagacagaacccaggaatcctgacatcaa

SEQ ID NO: 498827 - DNA, 201 bp, Homo sapiens
ccctgttatttggcctctgtaccttgaacctaggttgacatcatgagcagaggacagttcttaggaaaggcaaatatcccataaatcctatttgcctctcyttctcctaacctctggctccaccaactccccaacaggcctcctgcacacacaataggagtcaggagggaggaggcaggactgtgctacacaagggagact

SEQ ID NO: 498828 - DNA, 201 bp, Homo sapiens
tttcttctttcttaagcctctttattatagttccccctacattttggttcacatgccactgttatgttgaagaaactgggtcctttgtcttctggataccrttttacaaacatacttgttttcatttaataaatggctaaatttctttctatgtcaataattatacacatcattattttaaatcaccacatcccattgtgt

SEQ ID NO: 498829 - DNA, 201 bp, Homo sapiens
gtccagtcctagaggacaaatgatgctccccatgccaccacccccaccaagcagctcctactgatgagaagatgcactaagcagtcttggtggaaacatcwtcctcacgccctgtgccccctttcaggtgcccagagaaggagctcagtgtctgcttcagccagggctttaagagagaaggaagctgggagtgaggggcag

SEQ ID NO: 498830 - DNA, 201 bp, Homo sapiens
ttaggaaaggcaaatatcccataaatcctatttgcctctctttctcctaacctctggctccaccaactccccaacaggcctcctgcacacacaataggagycaggagggaggaggcaggactgtgctacacaagggagactgggtggggaagatgtcagagaaccagtgactgagtgcagaggtgacttcacaccagcatc

SEQ ID NO: 498831 - DNA, 201 bp, Homo sapiens
gttcaagtgatcctcctgtctcagcctctggagtagctgggattataggcatgcaccaccatgcctggctactttttgtagagaaaaaaatttaaaaaggyctcactatgtggcccagagtgttcttgaattcctggcctcaagcaatcttcctgcctcagtttcccaaagcactgagattacaggcatgagccaccatgc

SEQ ID NO: 498832 - DNA, 201 bp, Homo sapiens; identical to SEQ ID NO: 235179

SEQ ID NO: 498833 - DNA, 201 bp, Homo sapiens; identical to SEQ ID NO: 235180

SEQ ID NO: 498834 - DNA, 201 bp, Homo sapiens
gcagcccctttccatgaatctatacatatcaaacatgtgcatgcatttgtaaacattaatgggagtgtactttacttttttcattttactcataaacagaygaggactttaaaaaaatcacaattattaaataattcccattactatacctgacaaaactaataataatttcataatagctaataccccgtcaatccatgc

SEQ ID NO: 498835 - DNA, 201 bp, Homo sapiens; identical to SEQ ID NO: 235181

SEQ ID NO: 498836 - DNA, 201 bp, Homo sapiens
tccatgaatctatacatatcaaacatgtgcatgcatttgtaaacattaatgggagtgtactttacttttttcattttactcataaacagacgaggactttwaaaaaatcacaattattaaataattcccattactatacctgacaaaactaataataatttcataatagctaataccccgtcaatccatgccatattttcc

SEQ ID NO: 498837 - DNA, 201 bp, Homo sapiens; identical to SEQ ID NO: 235182

SEQ ID NO: 498838 - DNA, 201 bp, Homo sapiens
tgagattacaggcatgagccaccatgcccagccaaaactttacttttttacacttgcttttctggaatcaggatctaaacatattgcatgcggttgatatwttaagcctgttttattttttattttttcttctttcttaagcctctttattatagttccccctacattttggttcacatgccactgttatgttgaagaaac

SEQ ID NO: 498839 - DNA, 201 bp, Homo sapiens; identical to SEQ ID NO: 235183

SEQ ID NO: 498840 - DNA, 201 bp, Homo sapiens
cctacattttggttcacatgccactgttatgttgaagaaactgggtcctttgtcttctggataccgttttacaaacatacttgttttcatttaataaatgrctaaatttctttctatgtcaataattatacacatcattattttaaatcaccacatcccattgtgtggatagactatcatttataaagcaaattgcagtat

SEQ ID NO: 498841 - DNA, 201 bp, Homo sapiens
cttgaattcctggcctcaagcaatcttcctgcctcagtttcccaaagcactgagattacaggcatgagccaccatgcccagccaaaactttacttttttayacttgcttttctggaatcaggatctaaacatattgcatgcggttgatatattaagcctgttttattttttattttttcttctttcttaagcctctttatt

SEQ ID NO: 498842 - DNA, 201 bp, Homo sapiens
ccctagcactcgtggagctgactgggtggggacctcagtgttgactgaaagcgtgaatcaagtgccaggcactggtgacagagcacacagaggctgctggkcctcccaaggtcggggagcttgtggggaattcacattcttggttccgggactgattcactgagtcaatcaatattgattgagcacttagttggttgtggt

SEQ ID NO: 498843 - DNA, 201 bp, Homo sapiens; identical to SEQ ID NO: 235259

SEQ ID NO: 498844 - DNA, 201 bp, Homo sapiens
tcaatcaatattgattgagcacttagttggttgtggtggtggtaggaatgaattcctgggcttcctgcagcccctttccatgaatctatacatatcaaacrtgtgcatgcatttgtaaacattaatgggagtgtactttacttttttcattttactcataaacagacgaggactttaaaaaaatcacaattattaaataat

SEQ ID NO: 498845 - DNA, 201 bp, Homo sapiens
cccaaagcactgagattacaggcatgagccaccatgcccagccaaaactttacttttttacacttgcttttctggaatcaggatctaaacatattgcatgyggttgatatattaagcctgttttattttttattttttcttctttcttaagcctctttattatagttccccctacattttggttcacatgccactgttatg

SEQ ID NO: 498846 - DNA, 201 bp, Homo sapiens
ttttcgtggctgcaaaacagcggcttctccatcattacgcaactggcctctctgatcgtttccagattgctctcggccatgcacctccttgtctaaactcygttctgcaccaccagcagtatcatggcctggggagaaggggctgtgtgctccattccaggatcaagactttgtagaaatcatgttttctagatggttgtg

SEQ ID NO: 498847 - DNA, 201 bp, Homo sapiens
caccgtgttagccaggatggtcttgatctcctgacctggtgacctgcccacctaggcctcccaaagtgctgggattacaggcgtgagccaccgtgcctggmcttttgtttttgtttttgtttggtttggagacagagtctcactgtgtcgcccaggctggagtgcagtggagcaatctcggctcactgcaaacttcccctc

SEQ ID NO: 498848 - DNA, 201 bp, Homo sapiens
ttgatctcctgacctggtgacctgcccacctaggcctcccaaagtgctgggattacaggcgtgagccaccgtgcctggccttttgtttttgtttttgtttkgtttggagacagagtctcactgtgtcgcccaggctggagtgcagtggagcaatctcggctcactgcaaacttcccctcctgggttcaagggattcttgag

SEQ ID NO: 498849 - DNA, 201 bp, Homo sapiens
aacattctctctccaggcatgattttcgtggctgcaaaacagcggcttctccatcattacgcaactggcctctctgatcgtttccagattgctctcggccrtgcacctccttgtctaaactccgttctgcaccaccagcagtatcatggcctggggagaaggggctgtgtgctccattccaggatcaagactttgtagaaa

SEQ ID NO: 498850 - DNA, 201 bp, Homo sapiens
caccgtgcctggccttttgtttttgtttttgtttggtttggagacagagtctcactgtgtcgcccaggctggagtgcagtggagcaatctcggctcactgmaaacttcccctcctgggttcaagggattcttgagcctcagcctcctgagtagctaggactacaggcgtgcgccaccacatcaggctaatttttgtatttt

SEQ ID NO: 498851 - DNA, 201 bp, Homo sapiens
ggtcttgaattcctggcatcaagtgatctgcccgcctcggcctcccaaagtgctgggattacaggcgtgagccaccgcgcccagcaacatttaccaatttygatgagaatgtggaacactagaactctgggacgctgtgggtgggaaggtaacgtggtgcaaggaccttggacaactatgtggaaaatactaaagttaaat

SEQ ID NO: 498852 - DNA, 201 bp, Homo sapiens
gcgcccaccaccacgcctagctatttatttttttgtctttttagtagaggtggggtttcaccgtgttagccaggatggtcttgatctcctgacctggtgayctgcccacctaggcctcccaaagtgctgggattacaggcgtgagccaccgtgcctggccttttgtttttgtttttgtttggtttggagacagagtctcac

SEQ ID NO: 498853 - DNA, 201 bp, Homo sapiens
gtggcgtgatctcggctcactgcaagctctgcctcctgggttcacgccattctcctgcctcagcctcccgagtagctgggactacaggcgcccaccaccasgcctagctatttatttttttgtctttttagtagaggtggggtttcaccgtgttagccaggatggtcttgatctcctgacctggtgacctgcccacctagg

SEQ ID NO: 498854 - DNA, 201 bp, Homo sapiens
gtgacacatgtgtccttggaggtgtacatatcagtagatttcagcctctactgaaatcttctactgaagccttctactccccttgtgtttccctgtctccbccggtcctcttgtagtcatcccaagggctggcttagctctcttctcctggagctctggaaggccatagcatccctgcaaacccatccctgctcatcctcc

SEQ ID NO: 498855 - DNA, 201 bp, Homo sapiens
gatttgtcctttcaaacagccgcactgcctgcagggctgagagccaggaggccccacgaggcagaggaggcccagccacgtgaggcccctcccttcctgcygccccaggccccgctgactcagagcctggcagtcctcccagggttctgcgtgccagtaagcgctgggtggggccaaggcaaccctcgctgcgccccttgg

SEQ ID NO: 498856 - DNA, 201 bp, Homo sapiens; identical to SEQ ID NO: 169305

SEQ ID NO: 498857 - DNA, 201 bp, Homo sapiens; identical to SEQ ID NO: 169265

SEQ ID NO: 498858 - DNA, 201 bp, Homo sapiens; identical to SEQ ID NO: 169323

SEQ ID NO: 498859 - DNA, 201 bp, Homo sapiens; identical to SEQ ID NO: 169324

SEQ ID NO: 498860 - DNA, 201 bp, Homo sapiens
actatggaagtgaatatcaggagcccctcactgggatgtcagaagacattcaaggaaggtttcctggaagatttagtacctcaggtggtacaggagaaggygagatggagagaaagcaaccccagtctgaagacgcagtggtaagaaagggtcattcccctgggcatgtgtggtctgctgggggatgacagccgaggtgaa

SEQ ID NO: 498861 - DNA, 201 bp, Homo sapiens
gggtcattcccctgggcatgtgtggtctgctgggggatgacagccgaggtgaacttgaagcagaggacactcagacaagctgcactctgaatcccgctacrctgaccgcagcacttgctgaagaagccgcctcgccacgcccaagccctgcagagggaaggactgaggaaggcagctcagaggcctcaggcagccacagtg

SEQ ID NO: 498862 - DNA, 201 bp, Homo sapiens
actgcgtccgtcctcctgctctcctggcctctggaatggtccccgcccagccagtttctgacaccagacgctgtcctgggcctcgccccgccttcccaccsccacccaaacgcgcgtactctcggcctggcctgcgtaggcccggcccgcacccgccctgccgggctcctgctccattgctgccccagcccacgtccctca

SEQ ID NO: 498863 - DNA, 201 bp, Homo sapiens
cgccgtgagagagccccagccacagagacaggctacgtgtaggtgctttcatcaaagtgccacctgtgcctccccgcagcagtgtcaggccaccagcttgracaggcagctccagcctccagtggaggcttcagaggacagcatcaaacagcatccacaaaggagacccaccttgtgaaaagcgcctagccaagccctgcc

SEQ ID NO: 498864 - DNA, 201 bp, Homo sapiens
gtaggcccggcccgcacccgccctgccgggctcctgctccattgctgccccagcccacgtccctcacggctagaccctgagtctgtcacccgttggcagcrcccagaatgggccaagcaccctccccgcccctctccagggtgctgctggcctcgcttccgcggcccctcccgcgaggcctacccccacccccaccccgcg

SEQ ID NO: 498865 - DNA, 201 bp, Homo sapiens
cttgccatactgtgttctttgcctgggcctgtgcctctccttgcagaggctgtggacaggagcaccgagagccacttcctggagcatgctccccacccccrcagcctgtggcttcagcctctgcttctgcagacagcggtggaggaagtcaggactgtcccttctgacctgaacacctacctccaagtcctccctgtcgcc

SEQ ID NO: 498866 - DNA, 201 bp, Homo sapiens
ggagcgccaatgccaggggtctctcaaggcccgcaacacggtgtccttcttggactagagtctcagttaaataacaaagaggggatctgatgacgtccacrtgggcttctccctgcctttggtggcgccccggccctcctgtgcgtcctcctggccctgctcagatcctaggagccatcacacactcaacatccccaggca

SEQ ID NO: 498867 - DNA, 201 bp, Homo sapiens
tgaccttgggcaagcgctcctttgcctcagtttgccacaggcctgttttctcatctgtaaaatggtcctttatgggaccagggtgctgagtttgactcccyggcgatctgtgctaggagcatcctgttccccaggggcttcggggctggacgtagcctgtacagccgcttggctccacagcagctgtttcacttcctcagc

SEQ ID NO: 498868 - DNA, 201 bp, Homo sapiens
ccacctgttgcttccaatgtgagcaaccccaggaaatggtcatttcaacagcttgccctgagtcaagggccccagtgctgatagtttatctgagaggggawccctctcagataaagtgtggaaatggaacgactaagtggggaaaagagaaaagtcagtgaagcatgaactaagcactaggcagtgggttacagcgacggc

SEQ ID NO: 498869 - DNA, 201 bp, Homo sapiens
tttgaggcagaggcctcagttcgcacacagcctctatctctgttgaaggttcactgagccacaattagactatagggtgaggaaaatcccccaaagcctcraccctttctttactctccagctgcagctgtcctgggcaagatttgaaactccttagttcattggtgtctgtggcaggggtgagggaggaagagcaatgat

SEQ ID NO: 498870 - DNA, 201 bp, Homo sapiens
agaacatcatggaaattgaggtgaggagaaagcctttgcaggtcattagagcagcttggatggaagtaggcatctgacacaacttctcctcactttccccrcctgtaaaggacataggttagaagctgagctgggcctagaacccaggcatcctgattcccagctctaggctttggcctttctgcaaggcatgctgggaag

SEQ ID NO: 498871 - DNA, 201 bp, Homo sapiens
agccacaattagactatagggtgaggaaaatcccccaaagcctcgaccctttctttactctccagctgcagctgtcctgggcaagatttgaaactccttakttcattggtgtctgtggcaggggtgagggaggaagagcaatgatgaggagcccatgttataagacaagaatcaaaaagagaaacaaggctgggcacggtg

SEQ ID NO: 498872 - DNA, 201 bp, Homo sapiens
tgcaggcctactagatgcccagccctgagccctgtttgactgtgggcctcagctaagcctgtttgtggctgtggctgagcctagcttgagtgagtgttgaragggcagactggttcacggacaagagaaacttccagcagttaatgtggttcaggtttagatctgccagtatttctccaatgattataagagcaatggttt

SEQ ID NO: 498873 - DNA, 201 bp, Homo sapiens
tttcttctgttgtgttgcctcgttctgcatcacagtgagtacctgtccccttggagcatgctgagatttgacccttgttatggatctagtggtaacaaagsgtgcttgtggcatctcctgaggataatggtcatgctatctcaaggcatctgccccatatgaggttatctccgcattttcaaacaaaggaaaactaacctc

SEQ ID NO: 498874 - DNA, 201 bp, Homo sapiens
ttgaacctgagaggcagaggttacagtaagccaagatcacgccactgcactccagcctgggcaacagagagagactccatctcaaaaaacaaaacaaaacaaaaaaaaaaaaaacaaagaaatgccatccatctctatagcctttcaatacccctccactgccctctattgacagagattaacattgcaccagcctgcaaa

SEQ ID NO: 498875 - DNA, 201 bp, Homo sapiens
caagctccactactcacccattgcgggactgagggcgtgttgtttcagctgctgcacctcatttgctgtggaccccagtgcgtgccccagtgtggctgccmcacagtcagtgatccctcactgtggatcgccctctctgtctccctaacaggagacatgacagtcatttgttcatgggttctccatgtacatttcttcctg

SEQ ID NO: 498876 - DNA, 201 bp, Homo sapiens
gcagaggttacagtaagccaagatcacgccactgcactccagcctgggcaacagagagagactccatctcaaaaaacaaaacaaaacaaaaaaaaaaaaamcaaagaaatgccatccatctctatagcctttcaatacccctccactgccctctattgacagagattaacattgcaccagcctgcaaacaaatgtttatag

SEQ ID NO: 498877 - DNA, 201 bp, Homo sapiens
tctagtaatcccccaaaggactgggtactttctttccccaaatgcagtcattctagtaagtggccacaggtccccttggagaaggcttggaggaagtttgkttttttttaattatttttatttcaaatgttttgggggcacaagtcgtttttggttacatggataaattccttagtggtgatttctgagattttagtgcac

SEQ ID NO: 498878 - DNA, 201 bp, Homo sapiens
atatatcaaattgttttggtaacatctgtctctcaggatttctgggaagattagggacaatgtccacattaggtataatgcaaggacctgccaaagtaggyacagaggtccatcagaccaaagctcagactacacccaagatttcatcaggctcagaaagcagatgcttaggccagtggcctgggcactaatgagcaatgc

SEQ ID NO: 498879 - DNA, 201 bp, Homo sapiens
tagtcccagctacttgggaggctgaggcaggagaatcacttgaacccaggaggcggaggttgcagtgagcctagatcgcgccactgcactccagcctgggygacagagcaagactctgtctcaaaaaaaaaaaaaaagaaaaagaataataccaacgggaagaaggagaaggaaacaattaacatagtcataaatatatac

SEQ ID NO: 498880 - DNA, 201 bp, Homo sapiens
agtttgcattgtgattcccctttaggggcttagctgtgactccatacagcatccctacctgctgtggacaatttgagaatcactggatctactggatcatycaagtggtagagaaactttttctgaagccttaatttgctgcagaacctccttgactcaagactggaagccttatggagatttttgctcatgagtcaaagt

SEQ ID NO: 498881 - DNA, 201 bp, Homo sapiens
ggaaggaaggaaggggagagagagagaaaaggaaaaagaaaaaagagagaaagaaaggagagaaaaaaaggaaggaaggaaggagagagaaagaaaaaagagaaagagagaagaaaaagaaaagaaatgggccgggcaaggtggctcatgcctgtaatcccagcactttgggaggccaaggcaggcggatcatgaggtcag

SEQ ID NO: 498882 - DNA, 201 bp, Homo sapiens
ttcttctgccttgagattctgttaatctatgaccttacccccaaccccgtgctctctgaaacatgtgctgtgtcaaactcagggttaaatggattaagggytgtgcaagatgtgctttgttaaacagatgcttgaaggcagcatgccccttaagagtcatcaccactccctaatctcaagtacccagggacacaaaaactg

SEQ ID NO: 498883 - DNA, 201 bp, Homo sapiens
ttgtctatgacgcaaagacctttgttcacgtgtttgcctgctgaccctctccccactattgtcttgtgaccctgacacatccccctctcggagaaacaccsacgaatgaataaatactaagggaactcagaggctggcgggatcctccatatgctgaacgctggttccccgggtccccttatttctttctctatactttgt

SEQ ID NO: 498884 - DNA, 201 bp, Homo sapiens
gagaagaaaaagaaaagaaatgggccgggcaaggtggctcatgcctgtaatcccagcactttgggaggccaaggcaggcggatcatgaggtcaggggttcragaccagcctggccaacatggtgaaactacatctctactaaaaatacaaaaattagctagacgtggtggcaggtgcctgtaatcccagctactcaggagg

SEQ ID NO: 498885 - DNA, 201 bp, Homo sapiens
gggaggccaaggcaggcggatcatgaggtcaggggttcaagaccagcctggccaacatggtgaaactacatctctactaaaaatacaaaaattagctagaygtggtggcaggtgcctgtaatcccagctactcaggaggctgaggcaggagaatcgtttgaacctgggaggcagaggttgcagtgagccgagattgcgcca

SEQ ID NO: 498886 - DNA, 201 bp, Homo sapiens
cacattgttccactttcaaaagaatagaaaataaaattcctggacaggttccctcttcccacttctgggagtaagtagggagtgggttgagatacatttcrtttttcttcaaaaggctttctcagctcctgctgactcaggccacctccaccctctgcagattcaagacattcaattgtccagtcactggcttttgctgca

SEQ ID NO: 498887 - DNA, 201 bp, Homo sapiens
ggaacaagattaggacaattatcatgtgtagcatttacaggtcctaggaaaaatattttcttgagtttggagactatctctgcttcctaagaaccattcartgttctggaagtgagccctgaaaatggtcccttaggaaaatagttgctaggtcctcctctttgtgtgtgtgggtgtgtatctgtgtgtgtagttgcttct

SEQ ID NO: 498888 - DNA, 201 bp, Homo sapiens
ggtgacagggcgagactctatctcaaaaaaagaaaagaaacaaatccatggtgttcggctaatgtttattccttaacaacagcagaaccactcctctgccstattgggtggcgtgggctgaacctcagattgttcagaggatgaggacctgtgtgtctgtattcataggcaggagcagagaaggcaggggtggaaagaccc

SEQ ID NO: 498889 - DNA, 201 bp, Homo sapiens
gggtcaggggctcaaagcgaccctgttgttatgtgtagggagtttgggaggggagagtaaatcttgtgtgacatgtgagggtgggcagggatgaaaatagrggaggaaaatgaggaagtggtggatgatgattgggaaaagttaggagccagaacataaaatgttgaattccaagttaaggatcttggccttcactccatg

SEQ ID NO: 498890 - DNA, 201 bp, Homo sapiens
tgccacaggcctgttttctcatctgtaaaatggtcctttatgggaccagggtgctgagtttgactccccggcgatctgtgctaggagcatcctgttccccwggggcttcggggctggacgtagcctgtacagccgcttggctccacagcagctgtttcacttcctcagcaaggattgtaattcctcctgctggaaactggg

SEQ ID NO: 498891 - DNA, 201 bp, Homo sapiens
ggcgatctgtgctaggagcatcctgttccccaggggcttcggggctggacgtagcctgtacagccgcttggctccacagcagctgtttcacttcctcagcraggattgtaattcctcctgctggaaactgggtccatgcgtttggcttgaatacgttgatttgtcaaaattaccatttcctggggctgctcacatcagaag

SEQ ID NO: 498892 - DNA, 201 bp, Homo sapiens
gggcactgttcaccacctctcgaggcattaactcctcctgtcccctgtactcctagctgacacctgccacacagacaagcaagttctccaggtgccagagagagaaagagatgcaggcatttgaggtgggaagctgtcagcatgctcagaactgtctgtaactgcagaactcagagtgccaaggggagggggacaccaacc

SEQ ID NO: 498893 - DNA, 201 bp, Homo sapiens
ccacctctcgaggcattaactcctcctgtcccctgtactcctagctgacacctgccacacagacaagcaagttctccaggtgccagagagagaaagagatrcaggcatttgaggtgggaagctgtcagcatgctcagaactgtctgtaactgcagaactcagagtgccaaggggagggggacaccaaccacatctgttaca

SEQ ID NO: 498894 - DNA, 201 bp, Homo sapiens
acagtcgaggagaaaggagagaatgccagagagatggagcccaaacctgaacccaggatcaaagggcaactgagtagcactcgctctggagttctcggtckgctgcgccgctgacttgccaaatttgcctaagcccgtttgttggtgtttgcaggtcctaactgatgcggtgccatttttcaagtacagaattggataagc

SEQ ID NO: 498895 - DNA, 201 bp, Homo sapiens
gggattggtaaggcagggaggcgagaggagaatgtcagccacctgcaggcacagaattcctcggggaaggtttcactggctttccattgccttcctacccytggacctgggagaagaatggggaagggttgaaaagaccagggctaggggtttcagtgcctaggctctcatccaagctctgctgctcactttctgtgtgac

SEQ ID NO: 498896 - DNA, 201 bp, Homo sapiens
ctagccaaacttcttgtctggcccatcatgactaaagggaaggggcccgcaccccaagtgtctatacccatccgtctagggctgctctgttccccagtctygctgggccttacaggcctgggagcatccagccttcagacatggtgttagccaattcagagctttggctgcagacagaggtgggttggagtccaagctcca

SEQ ID NO: 498897 - DNA, 201 bp, Homo sapiens
gtgtgtgtgaccttgggcaagcgctcctttgcctcagtttgccacaggcctgttttctcatctgtaaaatggtcctttatgggaccagggtgctgagtttsactccccggcgatctgtgctaggagcatcctgttccccaggggcttcggggctggacgtagcctgtacagccgcttggctccacagcagctgtttcactt

SEQ ID NO: 498898 - DNA, 201 bp, Homo sapiens
ctggattaacccatttccacagatgagctctgaccttaaagtttctattctgtcttcaccttctggaagctagatgaaggagggtggctcggggagacccsaggaagctgagtactccaagggctagggaagtaataatcctcagggcaagggagggctggatagtagaggacctagaggaacaagattaggacaattatc

SEQ ID NO: 498899 - DNA, 201 bp, Homo sapiens
ggtgggggctgaggggaaagcctgcaaggatttcacagttccagggagatggaaagcctgcagctcagcacagccaacctgggcttgcagacatggtctcyagccaaacttcttgtctggcccatcatgactaaagggaaggggcccgcaccccaagtgtctatacccatccgtctagggctgctctgttccccagtcttg

SEQ ID NO: 498900 - DNA, 201 bp, Homo sapiens
ttcttgtttctggacttggagctgtgatgaagtaagtgggtcaggggccaacacatagacagcgttggcctacaaatgcagcccaggcagaggacggtgcrgccaagccacacagagagacaacttcctagtgacacgctgtgaactcctgcatccacccctgcctgaactggagcttttcctcttcagctcttcagttat

SEQ ID NO: 498901 - DNA, 201 bp, Homo sapiens
agcactttaaaaggaggccgaggtgggaggatcacctgaggtcaggagttcacgaccagcctggccaacatggtgaaaccccgtctctactaaaaaatacwaaaattggccgggtgtggtggcatatgcctatagtcccagctacttgggaggctgaggcaggagaatcacttgaacccgggaggtggaggttgcagtgag

SEQ ID NO: 498902 - DNA, 201 bp, Homo sapiens
gccaacacatagacagcgttggcctacaaatgcagcccaggcagaggacggtgcagccaagccacacagagagacaacttcctagtgacacgctgtgaacwcctgcatccacccctgcctgaactggagcttttcctcttcagctcttcagttatgtgaggcaagatgttgccttttttgcttaatgctgtgagttgagtg

SEQ ID NO: 498903 - DNA, 201 bp, Homo sapiens
atgctgtgagttgagtgtacagcagttacaatcaaagaatcctaaataatgctgcaagcatggtgactatctacatgggaatatgcagtactccagtgaaracaaaacataaattaattttggaatctgatgaccataatctaaaaacattcatagaggtatataaaaattataacaaaatttaaagtagcatatctcctc

SEQ ID NO: 498904 - DNA, 201 bp, Homo sapiens
tgatttcgttggcccttaaaggaaagtgttattccatcctgtaatcctagcactttaaaaggaggccgaggtgggaggatcacctgaggtcaggagttcaygaccagcctggccaacatggtgaaaccccgtctctactaaaaaatacaaaaattggccgggtgtggtggcatatgcctatagtcccagctacttgggagg

SEQ ID NO: 498905 - DNA, 201 bp, Homo sapiens
atgtgttactaagatcataaaaatgaaggaaaatgcccaagcatatccccaacccctcaccccacaaccaccaccaccacaataaacaagttgctgacagyggattggcaagcgagtgtggaaccttaggctgcgttggcatcaaatactaataaccaagcaaaagggagcaagaccaggcctgggggctgtgccattgag

SEQ ID NO: 498906 - DNA, 201 bp, Homo sapiens
tcgcagcctgagctgacaatctgtaagaaggttttgttatcttcatgttacagatggtgaaccgaaacttacagagctcaagtcacttgaccaggctccayccctacaagaggcagcacgcaaactaaaaaccaggcggccttttccaaagcttgtgctctgctccactgctggaaggaacccttcggggaattgaagcag

SEQ ID NO: 498907 - DNA, 201 bp, Homo sapiens
cctgcagcaacacttctagatgccaaataaatcacagcaagtgcacttttaaatgtgttactaagatcataaaaatgaaggaaaatgcccaagcatatccmcaacccctcaccccacaaccaccaccaccacaataaacaagttgctgacagcggattggcaagcgagtgtggaaccttaggctgcgttggcatcaaatac

SEQ ID NO: 498908 - DNA, 201 bp, Homo sapiens
tctgggtgaggtcaaaaaccatgcagagactttcacttcctgttctgtggcagacaagacatctgaaaagctctcctgcagcaacacttctagatgccaartaaatcacagcaagtgcacttttaaatgtgttactaagatcataaaaatgaaggaaaatgcccaagcatatccccaacccctcaccccacaaccaccacc

SEQ ID NO: 498909 - DNA, 201 bp, Homo sapiens
tgtgtctgctaagaagtctgatttctgctcatctctccccatttctttcttcccataaagtgggctgatgcgctggaacgtcgatgcatcaaacacatcastggatgtgtttgatgagaatgtattgagagtaaagctgcccagaatccaagtgtgtgtcatctgaactcttgaatcatggatggaaggtatgtcctctgt

SEQ ID NO: 498910 - DNA, 201 bp, Homo sapiens
gtcgtgtctgggtgaggtcaaaaaccatgcagagactttcacttcctgttctgtggcagacaagacatctgaaaagctctcctgcagcaacacttctagaygccaaataaatcacagcaagtgcacttttaaatgtgttactaagatcataaaaatgaaggaaaatgcccaagcatatccccaacccctcaccccacaacc

SEQ ID NO: 498911 - DNA, 201 bp, Homo sapiens
gtgtgtgtgattgggccccgcgacctttttcttaggcaaacagggctttgtggatgcagaaagacttctttggttgtgtagtttgtctcagagcctctcgygggtggagcctggtaaaaagaggaaagagactcatgttgctcaatgtgaggaagcaccaggaattttggagaagttcccagcagctcaggagagtggctg

SEQ ID NO: 498912 - DNA, 201 bp, Homo sapiens
gtgtcatctgaactcttgaatcatggatggaaggtatgtcctctgttgatgtctcgcagcctgagctgacaatctgtaagaaggttttgttatcttcatgytacagatggtgaaccgaaacttacagagctcaagtcacttgaccaggctccacccctacaagaggcagcacgcaaactaaaaaccaggcggccttttcca

SEQ ID NO: 498913 - DNA, 201 bp, Homo sapiens
tacttgggaggctgaggcaggagaatcacttgaacccgggaggtggaggttgcagtgaggtgagatcgtgccattgcactccagcctggccacagagcgaractccatctcaaaaaaaaaaaaaaaaaaagacatctgcccaagggtcatagctgtagaggggcagatgtggtttgaacccagggcgtctggttcctctct

SEQ ID NO: 498914 - DNA, 201 bp, Homo sapiens
aggacttcgaggagaacgcctacagctatgcgagcgtggacagcagcgccgaggccagtgtcctcactgaacaggccatgaaagagatggcctactacaaygtgctatagcgcaagctgggccacccctaacgggggccgggggcgagggcatgggggtgagacccatgggctgcaggctgcacctcctgcagccgagaaa

SEQ ID NO: 498915 - DNA, 201 bp, Homo sapiens
tctaaacctcagccttctgagctgctaaatggggctgttgtgattgctggatgaggcgaggcctgcgaagtggctggcatgcagcaggtgctaatgagtgytgcaaaggtgatgtcacgcaggcagcttcccgtggccagagaaacattgcagagaagggataagtagggcttagtgactttgacgggtcaatggaagaat

SEQ ID NO: 498916 - DNA, 201 bp, Homo sapiens
gaatctcttgaacccaggaggcagaagttgcagtgagccgagatcatgccactgcactccagcctggacaacagagtgagagtctgtctcaaaaaaaaaamaaaaaaaaaaaacaaaagaataggattctggcccagccatagaggtgggagtgggctggggtccggggaaagcaggttccccacaggctcaggacaccgg

SEQ ID NO: 498917 - DNA, 201 bp, Homo sapiens
acagactattctctggggcccacaggacgggaccatagacttaataaacaaaatggggacggtgtacagagatccacaagtagaaattttctcaaggtgctttttttttttttttttttgagacggagtcttgctctttcacccaggctggagtgcagtggcgcgatctcggctcactgcaagctccacctcctgggttca

SEQ ID NO: 498918 - DNA, 201 bp, Homo sapiens
ctcaaaatgtggtaggaggatgagcagcctcggccccacctgggatcttgctggcctctcagctccacccacacctgctgagtcagactctacacttcaaraagatctctgggccatttgttgcagtcaagtttgagacccactggaccagactagtgcctcagagtctcctggagggcttgttgaaacaaagtgctggcc

SEQ ID NO: 498919 - DNA, 201 bp, Homo sapiens
accccagccttggcaatagagcaagaccttgtcaaaaaaagaaaagaaatggggccaggcgcagtggctcacgcctgtaatcccagcactttgagaggccraggcaggcggatcacctgagattgggagttcaagaccagcctgaccaacatggagaaaccccgtctctactaaaaatacaaaaaaaattagccgggtatg

SEQ ID NO: 498920 - DNA, 201 bp, Homo sapiens
cagagtttctgattcagtagatctggggtggggtctgagacgctgcctttcccacaagttcccagttcttagcaaagcagccgctggttcagggacctcaygttgagaacctttgatccagactgcagagggctggctggcaaatcagctgcatgttgggagtcacctgaggaatgttttaaatgctgatgcctgagtttg

SEQ ID NO: 498921 - DNA, 201 bp, Homo sapiens
aggaggccgaggcgggcagatcacaaggtcaggagttcgaggccaacctggccaacatggtgaagccccgtctctactaaaaatacaaaaattagttgggygtggtggtgggcgcctgtagtcccagctactcgggaggctgaggcaggagaattgcttgaacccgggaggcagaggttgcagtgagccaagaccgtgccg

SEQ ID NO: 498922 - DNA, 201 bp, Homo sapiens
gaggcaggagaatcgcttgaccccaggaggtggaggttgtgatgagccaagattgcaccattgcactccagcctgggcaacaagagcgaaactcggtctcaaaaaaaaaaaaaaaaagaagagaaaagaaatggttcaaagtctaggccctcttcagagctggctgattcagcttgccaacagtgacatcagggtgaggct

SEQ ID NO: 498923 - DNA, 201 bp, Homo sapiens
gggccagccacagcccctgccagcctcccagttcccccagatcctaccctgggcttcccctgtaagagctttataatgagatttcaattttataaaattayaaggggcctcttaggagtttttgcctgacatatctttatgaacctaccctgagtgtttgtccctggagagccaggcccaaggataccaatggctagaacc

SEQ ID NO: 498924 - DNA, 201 bp, Homo sapiens
tgagctgaaatcacgatactgcacttcagcctgggcaaccagactgagaccctgtctccaaaaaaaaaaaatcatttttataacccctgcaagacccaagraacacagtttgaggatcactgaagtatcttaccctccctattttctagatgggaggacagaggccagagagaggccaggatgcaacagggaggcgtcctg

SEQ ID NO: 498925 - DNA, 201 bp, Homo sapiens
agttgtctattaaggttgcttccagtagacgagaatgaaaccccgtcggctgctcttggtagctccttgctactcaaaatgtggtaggaggatgagcagcstcggccccacctgggatcttgctggcctctcagctccacccacacctgctgagtcagactctacacttcaaaaagatctctgggccatttgttgcagtca

SEQ ID NO: 498926 - DNA, 201 bp, Homo sapiens
cagttgtctattaaggttgcttccagtagacgagaatgaaaccccgtcggctgctcttggtagctccttgctactcaaaatgtggtaggaggatgagcagyctcggccccacctgggatcttgctggcctctcagctccacccacacctgctgagtcagactctacacttcaaaaagatctctgggccatttgttgcagtc

SEQ ID NO: 498927 - DNA, 201 bp, Homo sapiens
agaaattctggtgtgcctctgagtcacaccagctgggaacatgctttggcagtaaccaggtgagctgacttgccacgtgggattatttactggaatgcagkcaggcacgcgggaacagctgcagtagcttaactctggttttggaacagctgaccagtgaatggcctgggttttctggcagaaacaggtatctcagttgtt

SEQ ID NO: 498928 - DNA, 201 bp, Homo sapiens
ggctgggacctccccgagggtggtctggaatcagcatgcctgcagcagctgtggcccaccaagcgccagcctggccagtgcgggcaagaggagccccggcygggtgaaacttagcctgggctttgggggttgggagggcaggcggggattcacatcctgaaagctgctgaagttgggtttttctgagagctggggagggag

SEQ ID NO: 498929 - DNA, 201 bp, Homo sapiens
ccagcaagtttaatctcaagggcaacctgagccggcacatgaaggtcaagcatggcgtcatggacatcggcctggacagccaaggtgggtgggccaagcgyaatggacagagcaggaatgataccaacatgacgcactcaggagcctcctgcccagttagaggagtggggaggctggccaaggctgagacttcgttggggt

SEQ ID NO: 498930 - DNA, 201 bp, Homo sapiens
ggcaggagacagcaggtatctggatcgttacagtaaagcacagcctatttctattactgaaaggcttcctggagtaagtggctctgcccccacattcttcrgtggttttaaacaagtgttacctattttggaataccctcaaaaagagacatttcccagaaagtgtgcctttgtgatgctatggccctgcccctacccggc

SEQ ID NO: 498931 - DNA, 201 bp, Homo sapiens
agagaccacttgagccatgtctttttcacggccaactcctgcctctaaggatgtctgagctcccctctggccagtactgcccacctctaccttgtccaggsccccttccccgccctgtcgacggaccgccaggcagggcactctgccttctacctcccggggtctcccatgcgctcctcaagccaggtgtgcacgtggccc

SEQ ID NO: 498932 - DNA, 201 bp, Homo sapiens; identical to SEQ ID NO: 175543

SEQ ID NO: 498933 - DNA, 201 bp, Homo sapiens
aggctatggcagatggtgagggaaggacagtgagggagaaagagactcagatgcagcagaggctcagtggctagacttaggacccagccagggcttattgyaaaataagcacttggtaactttttatatctttgccttggcaaccaggaaactcaaagttaaattttatgcttcatttagttttggcttttgttgttgttg

SEQ ID NO: 498934 - DNA, 201 bp, Homo sapiens
gaaacttaaaaatatatacatattccaaccaagccgaagctccacccagactgtttccccatatatggagacaggaggatggagatccttggttagacttkgtttgggaaccctgaatttaaacttccaccacagatgtttaccttcatcgctttttcctttgctctttaaatagatccaccaaagcagtgacttagcaat

SEQ ID NO: 498935 - DNA, 201 bp, Homo sapiens
  misc_feature (1)...(201): n = A,T,C or G
tcattcaatgctggttactcagtgacccaggttccaagcaagtctctcacaaagctttaatgagtacctgcccctagagtaaagtaatgaagacaataccnagtgctgtatgggtcatgcctcacttaacaacagggatatgatctgagaaatacatctttaggcgattttgccattgtagggacatcatagagtacattt

SEQ ID NO: 498936 - DNA, 201 bp, Homo sapiens
ttaaaaatatttaggtctggtgtggtggcttacacctgtaatcccagcactctgggaggctgatgcaggctgatcacttgagtccaggagttcaagaccaktttcagcaacaaggggaaaccctgtctctacagaagaaaatatgaaaattagccaggcatggtggcatacacctgtagttccagctgcttgggaggctga

SEQ ID NO: 498937 - DNA, 201 bp, Homo sapiens
catagatcccaaaggaagtgagtcttgggtgaaagccaaggccgtatggaccacccagtgccaactctgaggttctgaactttatttttactaagaaaagkgcaatttcctcacagcactaggcaaaaatggaaagctatcctggcacacaagtatagaatgccaccagagacaagcagctggaagaaaaagccaggccac

SEQ ID NO: 498938 - DNA, 201 bp, Homo sapiens
ctgagaaatacatctttaggcgattttgccattgtagggacatcatagagtacattttcataaatctagatggtatggcctaccacacacttaggctatayggtctagcctattgttcctaggctctaaacctgtgcagcatattactacactgaatgctgtaggcaatgataacataacggtaagtatttatgtacccaa

SEQ ID NO: 498939 - DNA, 201 bp, Homo sapiens
gtttgggaaccctgaatttaaacttccaccacagatgtttaccttcatcgctttttcctttgctctttaaatagatccaccaaagcagtgacttagcaatyatcctgggcatccttagcaatcatcctgggcagagaacccacttgggcactctgcttgttcactcaggaaaataacattcccaacaataaggaaaactat

SEQ ID NO: 498940 - DNA, 201 bp, Homo sapiens
catgttttgcttttgtccagctgtgtatttttcctttcatcatattcttttttgcaggctaatgaagcttttgctcaaagcactagtttgtctgccactgsatattttaggtaagaggtatctaatactgtcctaaaattattcccctttagaatggaaaaggaactttgaaaaggtgtgctcagttgtttatatttttaa

SEQ ID NO: 498941 - DNA, 201 bp, Homo sapiens
tatttttaaagcaaaattaggaatgcctttgttctccagatatcgggatatctggactctctcaagtctgggtctgtttagtaagcattattaatttgttytcttaaccataaacacctagaggctaggaatgcctagctttcaggaaatgcagcctagcaagtcccagcctcatttttctagccctcactcaaaatggag

SEQ ID NO: 498942 - DNA, 201 bp, Homo sapiens
gcaaagccaggcgctgatagcgttatggctgccatgagagtcagcagtatcccagcttccaaggatgggtgtaaggtgggggtgaggaagaaaaggaactygaagctgcctcctgtcccagaatcacaagacatctgttaagcccttactacctcattcactccactcacattaggttgacccacttgggcagcaagacaa

SEQ ID NO: 498943 - DNA, 201 bp, Homo sapiens
tccagcagggcattcctgaaaataagaggagggacatatccaactaaggtacaatgcttgtaatgcttgtatatatgggcagatgtcttctgctacaaggstttgtgataaaggattaattttccctaattactatattttgcaataatcaatattattatttttaaagcaaaattaggaatgcctttgttctccagatat

SEQ ID NO: 498944 - DNA, 201 bp, Homo sapiens
cagctgagtatcttgccctcttaatcttggagatcagcccaaggcccatgtgttacaggaaaggggtcccgatctagaccccaagagagggttcttcgatstcacgcaagaaacaattcagagtaagtccacagtgcaaagtaaaagcaagtttattaagaaagtaaagtggtggctgggcacagtggctcacgcgtaatc

SEQ ID NO: 498945 - DNA, 201 bp, Homo sapiens
aggcacgtaccaccatgcccagctaatatttgtatttttagtacagatggggtttcaccatgttggccaggctggtcaagaactccggacctcaggtgatmcaccctcctcagcctcccaaagtgctgggattataggtgtgaaccacaatgcccagccagatttattattttaatgacttaataaatattttaaaattta

SEQ ID NO: 498946 - DNA, 201 bp, Homo sapiens
gattgtgtcactgcactccagcctgggaaacagtgcaagaccttgcatattagaaaaaagtttctgggaagtataccaaaagtcttaactaagatttgctmaatgaatattaattaaataacctaacggcaagtacatggggaagttggaggatctagaacctgacttccttcacactaactattcctgcatttagcaggt

SEQ ID NO: 498947 - DNA, 201 bp, Homo sapiens
gcaggagactggctcgaacccgggtggcggaggttgcagtgagctgtgatggcaccactgcactccagcctggagagcaaaactcaagtctcaaaaaaaawtttggtatctaagttctctagcactgtgattgctccaatgagacggattcagctataattctattccaacttttttcatacgtgtaagcttaggtacctt

SEQ ID NO: 498948 - DNA, 201 bp, Homo sapiens
tccatctttatgtccataactagctaatgtttagctcccacttgtaagtcagaacacgcagtatttgattttctgttcctgtgttaattcgcttaggatartggcctccagccgcatccacgccgctgcagaggacgtggttttgttcctttttgtggctgcaaagtttttcagttaacaagaaataccatatggcgtcat

SEQ ID NO: 498949 - DNA, 201 bp, Homo sapiens
gcctcaaattttatttaggttcagggggtacatgtgcaggtttgttacatgagtatattgcgtgatgctgaggtttggggtgcgaatgacctcgatacccragtagtgagcacagtaccagtagatagtttctcaacccttgcctgcctccctccagtcttgcagtccccagtgtctgttttttccatctttatgtccata

SEQ ID NO: 498950 - DNA, 201 bp, Homo sapiens
agacagagccaggggctgctgggcctccctctgacactgcagccctgggaaagtcttgggagtgaggggttgtggtgagggaaaatgcagtgaggggaggkcctcacccaggcagaagcccatcatccattcaacccagttccccagagcgaagggtttggagccgcagagtgcccagactcattgtcaggtatttgcacc

SEQ ID NO: 498951 - DNA, 201 bp, Homo sapiens
aatttttattattttttttatagagacaggagtctcacattgttccccatgctgatctcgaactcctggcctcaagtgatcctcctgcctcagcctcccartgtgctgagattgcaggcatgagccactgcgcctggcctcaaattttatttaggttcagggggtacatgtgcaggtttgttacatgagtatattgcgtga

SEQ ID NO: 498952 - DNA, 201 bp, Homo sapiens
catgttggtcaggctggtctcgatctcctgacttcaggtgatccacccacctcggcctcccaaagtgctgggattacaggcatgagcgaccgtgtgtggctttttttttttttttttggagacagagtctcactctgttgcccaggctggagtgcagtgtcacaatctcggctcactgcaacctctgcctcccaggttcaa

SEQ ID NO: 498953 - DNA, 201 bp, Homo sapiens
acacacacatatgcacacacataaacactatacatggatacacacacatacacatatacacatgcatgtgcacacaaatacactacacatagatacacacrtatacatacacaaaagtgcatatgtgcagatattgatgcccacaggcatacacatgtacactctcacacagacacacgtgtggcctcgcatgcacagacc

SEQ ID NO: 498954 - DNA, 201 bp, Homo sapiens
ttctgttgctaaatggtctctggtacgcttgtaacgtgtgtcccggatctgtgtttggaaaggaaatacaaatttttatttctactaaactctcacttaamagaacacttctgtgaccaaatgtgtggagattttctgcacacaccaagcaattctccagcagacaccaactgggtatcttataccgattgggcatcccta

SEQ ID NO: 498955 - DNA, 201 bp, Homo sapiens
tgttagccaggctggtctggaacttctgaccttgtcatttgcccacctcggttttccaaagtgttgggattacaggtattagccaccacacccggccttcttttttttttttttaatagagacggggttttgctatgtggctcaggttgttctcaaactcctaggctcaagcaatccacccaccttggcttcccgaagtgc

SEQ ID NO: 498956 - DNA, 201 bp, Homo sapiens
cccattcccaagatacctcattatgcattctccaaaatctgaaaaaatctgaaacacaaaacactagtcatcccaagcattttggatgagggatactcaayctgtataacaactatttatatatagcatttacattgtgttaagtattataagtacttactggtacttataggccaggtgcagtggctcaaacctgtaatc

SEQ ID NO: 498957 - DNA, 201 bp, Homo sapiens
taagcagctgggactacaggagcacgccaccatgcctggctaattttttgtatttttagtagaagcggggtttcaccatgttagccaggctggtctggaasttctgaccttgtcatttgcccacctcggttttccaaagtgttgggattacaggtattagccaccacacccggccttcttttttttttttttaatagagac

SEQ ID NO: 498958 - DNA, 201 bp, Homo sapiens
gtgttcacttcagcagcacatatgctaaaatcggaatgatacagagaggatcagcatgacccctgtgcaaggaggtcgtgcaaattcacgaagtgtttcayatttttaatataattttaaaataaaaaaatatatactgggctgggcccagtggctcacgcctgcaatcccagcactttgggaagctgagacaggagaatc

SEQ ID NO: 498959 - DNA, 201 bp, Homo sapiens
cagcctcttaagcagctgggactacaggagcacgccaccatgcctggctaattttttgtatttttagtagaagcggggtttcaccatgttagccaggctgstctggaacttctgaccttgtcatttgcccacctcggttttccaaagtgttgggattacaggtattagccaccacacccggccttctttttttttttttta

SEQ ID NO: 498960 - DNA, 201 bp, Homo sapiens
aaaactctgtctaaaaaaaaaaaaaaaaaagacactcctattattagtaaattctaagggtttcaggagctctgtgatgggaaccgaggtcaaagatcaamtatggttcatattataccacaatgcctttgtcctgcaaaaagatttgatattttaaaaacaattttgtagtgttggggaaatgttttcattttagcaagg

SEQ ID NO: 498961 - DNA, 201 bp, Homo sapiens
tccagaatattttttttctttcttttttttttgagagagcgtctcgctccatcgcccaggctggagtgcagtggcagatctcggctaactgcaccctcccmctcccgggtttaagtgattctcctgcctcagcctcttaagcagctgggactacaggagcacgccaccatgcctggctaattttttgtatttttagtagaa

SEQ ID NO: 498962 - DNA, 201 bp, Homo sapiens
taggccaggaggtaaacagagcaagcagaaggaataataataaagaaccacaaggccaggcccagaggctcacgcctctaatcctagcactttgggaggcygaggtgggtgaatcacctgaggtcaggagttcgagaccagccccgccaacatggtgaaaccctgtctctaccaaagatacaaaaattagctgggcgtggt

SEQ ID NO: 498963 - DNA, 201 bp, Homo sapiens
gttccttctatcagaagattgaacttgtccattgtaaataaattatttttttaacaatgaagatatatttcatgtgccataaaattagccattttaaatcrtacaattaaacgttttttagtatattcagagagttgtgcaaacatcgtcactaattccagaatattttttttctttcttttttttttgagagagcgtctc

SEQ ID NO: 498964 - DNA, 201 bp, Homo sapiens
aggatcattgtaaagagttatttttcctggaaaccaggaaattattgcccacaggattcaagaatgctaagaatgctgcccctcttctgttgctaaatggwctctggtacgcttgtaacgtgtgtcccggatctgtgtttggaaaggaaatacaaatttttatttctactaaactctcacttaacagaacacttctgtgac

SEQ ID NO: 498965 - DNA, 201 bp, Homo sapiens
ataaaggtgacatactccatcatgttgaaggatcattgtaaagagttatttttcctggaaaccaggaaattattgcccacaggattcaagaatgctaagartgctgcccctcttctgttgctaaatggtctctggtacgcttgtaacgtgtgtcccggatctgtgtttggaaaggaaatacaaatttttatttctactaaa

SEQ ID NO: 498966 - DNA, 201 bp, Homo sapiens
ggctggagtgcagtgtcacaatctcggctcactgcaacctctgcctcccaggttcaagcgattctcctgtttcagcctcctgagtagctgggactataggyatgtgccacgacacccggccaatttttgtatttttggtaaaaacagtgtttcatcatgttggtctcaaactcctgacctcaggtaatctgcctaccttgg

SEQ ID NO: 498967 - DNA, 201 bp, Homo sapiens
taggggaagtggctactgggacccaggacactggatgaccctggctttctttctgacaggtcctggactatagcccagtgcttggctccttcctcattggrtcctgcattgtttttatgacatttgtggtgctgaacctgtttatctctgtcatcctggtggccttcagtgaggagcaaaaatactatcaggtgagtcgct

SEQ ID NO: 498968 - DNA, 201 bp, Homo sapiens
gatcatgtgagaaacaaagcccctcttacatcctggcccccaccacatcctgatgtccttctaaatacaccccctactgcccaccatgttcccatgcgagycctggccttccgttcatctctggcctttagcacaatcctggcccactccctaccccagggccttccccatcctcaccctggctccatccagtctcttgcc

SEQ ID NO: 498969 - DNA, 201 bp, Homo sapiens
ctaccccagggccttccccatcctcaccctggctccatccagtctcttgccttcctctcctccctgatcatcctatccaccagcccatcgcatcctagtcyccactccaccccaaccctcaccccactctgcctccctgtcacctcaggcttgaccccttccatccctagccccacccgatcttcctctcccacccctgga

SEQ ID NO: 498970 - DNA, 201 bp, Homo sapiens
ttctctccttgcccagctctctcagccccaggcagaggggaccttccaggctctaggctctgcctaactctgaggaccattttccctctgagggttcccaktaggggaagtggctactgggacccaggacactggatgaccctggctttctttctgacaggtcctggactatagcccagtgcttggctccttcctcattgg

SEQ ID NO: 498971 - DNA, 201 bp, Homo sapiens
tcacagaggaacattgggtgctggctactcaggggagggctgtacaggggtctcccaaaggaaacaccccctaccctgggcagaaagggcagccgtctttsgaggtggcagccgtggaaagtgaggggctgcccgttctctccttgcccagctctctcagccccaggcagaggggaccttccaggctctaggctctgccta

SEQ ID NO: 498972 - DNA, 201 bp, Homo sapiens
acccctgctagagcccacagcttgcccttgggatccctgctcacagaggaacattgggtgctggctactcaggggagggctgtacaggggtctcccaaagraaacaccccctaccctgggcagaaagggcagccgtctttcgaggtggcagccgtggaaagtgaggggctgcccgttctctccttgcccagctctctcagc

SEQ ID NO: 498973 - DNA, 201 bp, Homo sapiens
aagattagaaaaagcactccctgtccaccccgccccgtgccatcccttgggcccatggcctggcaagcaccgggcaagtctggacaaacagaaatgttccycctcctctaggtagacacccctgctagagcccacagcttgcccttgggatccctgctcacagaggaacattgggtgctggctactcaggggagggctgta

SEQ ID NO: 498974 - DNA, 201 bp, Homo sapiens
ctcttgcctcagcctcctaagtagctgggattacaggcatgcgccaccacacctggccaatttttatatttttgctagagacagggattcgccatgttggycaggctggtctcgaactcctgacctcaggtgatctgcctgccttggcctcccaaagtgctgggattacaggtgtgagccaccacgcctggactataaaac

SEQ ID NO: 498975 - DNA, 201 bp, Homo sapiens
gacacccctgctagagcccacagcttgcccttgggatccctgctcacagaggaacattgggtgctggctactcaggggagggctgtacaggggtctcccamaggaaacaccccctaccctgggcagaaagggcagccgtctttcgaggtggcagccgtggaaagtgaggggctgcccgttctctccttgcccagctctctc

SEQ ID NO: 498976 - DNA, 201 bp, Homo sapiens
agtctcacattgttccccatgctgatctcgaactcctggcctcaagtgatcctcctgcctcagcctcccagtgtgctgagattgcaggcatgagccactgmgcctggcctcaaattttatttaggttcagggggtacatgtgcaggtttgttacatgagtatattgcgtgatgctgaggtttggggtgcgaatgacctcga

SEQ ID NO: 498977 - DNA, 201 bp, Homo sapiens
tggtgtgtgcctgtagtcccagctacttgtgaggctgagggaggagaatcgcttgaacccaggaggcggaggctgcagtgagcccagatcgaaccattgtwctccagcctgggtgacagagcaagactccatctcgcaaaaaaaacaaacaaaaacctgttgtgtacacacacccacttgcacacccctgtaggtacagta

SEQ ID NO: 498978 - DNA, 201 bp, Homo sapiens
tggccagtacccaaggtggcaaacccagtctgtgctttgtgtccctcggtgtggccctgtagagagctgccctgagtgagtccaaccttggaggagagcayggggaaagctctccagatcacagagcttcgggaaggtagtgtcaccttgaacctgtttgaaaaggcttcttctgtagaatagctagaaggcaggcctcac

SEQ ID NO: 498979 - DNA, 201 bp, Homo sapiens
cccgctaatcttttttgctttttaaaattgtgaaatgcggtatacacacagaaaagtgcgtgaacacacacatacgtaccatttaatagacagttataaartgatccgcccgcctcagcctcccaaagtgctgggattacaggcgtgagccaccgcttccggcctcaggagaggattcgtgtttgcttctcccaacgtcca

SEQ ID NO: 498980 - DNA, 201 bp, Homo sapiens
aaagtttctcaacaaaaacttaacggtggcatagttctgatgaaaatcttcatgttcatggcatggagttaaaatgtccaaacggtcaaggccacagattyaaacagggacatccgcaggccctggcccgaggggaggagcatacagggagtggttcacccactccaccgcctttggagcaccttttaattctctcactct

SEQ ID NO: 498981 - DNA, 201 bp, Homo sapiens
gggattacaagcgcccgccaccacgccccgctaatcttttttgctttttaaaattgtgaaatgcggtatacacacagaaaagtgcgtgaacacacacataygtaccatttaatagacagttataaagtgatccgcccgcctcagcctcccaaagtgctgggattacaggcgtgagccaccgcttccggcctcaggagagga

SEQ ID NO: 498982 - DNA, 201 bp, Homo sapiens
tctatgaaccatcctttgctgaaggctgaaacctcttcgtcccctgggagagttcctattcaggccttcttgtagttagttcatccttgtgttgacagctrtattagggttctccagagagacggatccagtaggatatagacgtagatccaggacaggagatggactgggggagctggcgtttgcaattacggaggccga

SEQ ID NO: 498983 - DNA, 201 bp, Homo sapiens
cagagagacggatccagtaggatatagacgtagatccaggacaggagatggactgggggagctggcgtttgcaattacggaggccgagaagtctgtgagcsggagaccccgggactcgggtagccgggctcagcccaggtcggaaggcctcagaagcggggaagcggatggtgtggccctcagcacgacccaccccaaatc

SEQ ID NO: 498984 - DNA, 201 bp, Homo sapiens
ctcccgggttcaagcgattctcctgcctcagcctcccgagtatctgggattacaagcgcccgccaccacgccccgctaatcttttttgctttttaaaattrtgaaatgcggtatacacacagaaaagtgcgtgaacacacacatacgtaccatttaatagacagttataaagtgatccgcccgcctcagcctcccaaagtg

SEQ ID NO: 498985 - DNA, 201 bp, Homo sapiens
gccaccacgccccgctaatcttttttgctttttaaaattgtgaaatgcggtatacacacagaaaagtgcgtgaacacacacatacgtaccatttaatagayagttataaagtgatccgcccgcctcagcctcccaaagtgctgggattacaggcgtgagccaccgcttccggcctcaggagaggattcgtgtttgcttctc

SEQ ID NO: 498986 - DNA, 201 bp, Homo sapiens
caccccaaatcatgccttgccaggtttctgggaattcctggtccagcccagctggcacctgacactggccgtaacggcagggccactgttagctgttagcytcagggccccaggtttaggggcggtgtctccgttgcacgtgcaccccgagcgcgcccgccactccccacatcaggagctctgttcctcgggttcagcaaa

SEQ ID NO: 498987 - DNA, 201 bp, Homo sapiens
aggccccagcccccagtcccctcttccggccgcctggacaggacccccattcagcccaggtgtttccggaagtcccacggccttggggccacaggagaagrgttgaagcgtggctggggcaccactccccccacctggagtggcattgggcccacagctgcccatctctgggcctcaggtggaccaggggatctctaaggg

SEQ ID NO: 498988 - DNA, 201 bp, Homo sapiens
ctaaccgcccctgcccgctgtgcagccgtgtgcgttggcgtgtgtttctgtgtcactggcgtgtcacgtgatgtagccgtgtttgctgacatgagcccctrcccccttctctgtttctccgttggtttctagagctctctccctccccttctcagaggggacaggactcctggggcctggctggggcccagagccaggccg

SEQ ID NO: 498989 - DNA, 201 bp, Homo sapiens
gccgtgtttgctgacatgagcccctgcccccttctctgtttctccgttggtttctagagctctctccctccccttctcagaggggacaggactcctggggyctggctggggcccagagccaggccgccctctcctgttagccctcagagtcccatttctgttagccctcagagtcccatttctattggtgaccaacttgca

SEQ ID NO: 498990 - DNA, 201 bp, Homo sapiens
acattctttacatgcataaggcttttctcctgtgtgcgttcgcatgtgcatattaagatttgtggaacgagcaaatgctttaccgcattccttacattcayaggccttttctccagtgtgagttcttaaatgggtactaaggcccgaggattgagtgaaagctttcccacattctttgcattcatatggcttctctccagt

SEQ ID NO: 498991 - DNA, 201 bp, Homo sapiens
tagatgtttagcaagtgctgaagattgagtgaagtttttcccacatttcttacattcatatggttttgctccagtgtgagttcgtgtgtgaacgttaaggyatgtggaatacctgaaggctttcccacattctttacatgcataaggcttttctcctgtgtgcgttcgcatgtgcatattaagatttgtggaacgagcaaa

SEQ ID NO: 498992 - DNA, 201 bp, Homo sapiens
atctttttttcgtctcattttgtgtatattccattgatattttatatgtagttaccatggggatttttttttctttttttgagatggagtatcactcttgytgcccaggctggagtccaatggtgcgatttcgagtcactgcaacctccacctcccaggttcaagcaatcctcctgcctcagcctctcaagtagctgggac

SEQ ID NO: 498993 - DNA, 201 bp, Homo sapiens
gcatgctgaggcaggagaatcgcttggaccgggagacagagtttacagtgagcctatatcacgccattgcactccagcctgggcaataagagcgaaactcygtctcaaaatatgtatatatacgagaggaaaaacgctgaatcaaaacatgtctctttcacagttaatacaactgtaatttctgatactggtataatgaag

SEQ ID NO: 498994 - DNA, 201 bp, Homo sapiens
cttggaccacatataaaatacactaacactaacgatcgctgatgagctacaacaaataaacaaaaaaactggtctgtgcataaatctcataatgctttaaraaagtttacaagcttgttctataaagtaatgcccaggccatgcatggtggctcacgcctgtaatcctagcactttgggaggccaaagcaggtggatcacc

SEQ ID NO: 498995 - DNA, 201 bp, Homo sapiens
cgctcagaagagaaggcgggaaccccccgcctcggggtcctggcggggaggaggcgccgcttctccggagcagcagcgggaggccggcgcgtctcagaccyagcagaagtccggagcgtcaccctccgaccctcgctccgcctcccgctaggccctcctgccccgccctgcctaggttgagcatgagcgctggctgaggtg

SEQ ID NO: 498996 - DNA, 201 bp, Homo sapiens
tcccaagcaattgggattaaaggcacccgccaccatacttggctaatttttgtatttttagtagagatgaggtttaaccatgttggcaggctggtctcaawctcctgacctcaaatgatctgcccacctcggcctcctaaagtgctgggattacaagcatgagtcaccacgcccagcatattctcatattttcacattcat

SEQ ID NO: 498997 - DNA, 201 bp, Homo sapiens
aagacttgtaaaatggatgcaacatttccctcattctgtattatcaagatttctctccagtatgaattatcatttatattaaaggatgaaataatacataygtgtgtgtatgtgtgtgtgcatatatatgtgtgtgtgtgtgtgtatatatatatatatatatatatatatatatatatatatatatataaagacattccc

SEQ ID NO: 498998 - DNA, 201 bp, Homo sapiens
cctcattctgtattatcaagatttctctccagtatgaattatcatttatattaaaggatgaaataatacatacgtgtgtgtatgtgtgtgtgcatatatakgtgtgtgtgtgtgtgtatatatatatatatatatatatatatatatatatatatatatataaagacattcccatatttctaacattcataatgtttctgg

SEQ ID NO: 498999 - DNA, 201 bp, Homo sapiens
ctcattctgtattatcaagatttctctccagtatgaattatcatttatattaaaggatgaaataatacatacgtgtgtgtatgtgtgtgtgcatatatatgtgtgtgtgtgtgtgtatatatatatatatatatatatatatatatatatatatatatataaagacattcccatatttctaacattcataatgtttctggc

SEQ ID NO: 499000 - DNA, 201 bp, Homo sapiens
caagatttctctccagtatgaattatcatttatattaaaggatgaaataatacatacgtgtgtgtatgtgtgtgtgcatatatatgtgtgtgtgtgtgtgwatatatatatatatatatatatatatatatatatatatatatataaagacattcccatatttctaacattcataatgtttctggcctctttgagattacc

SEQ ID NO: 499001 - DNA, 201 bp, Homo sapiens
cattgagataaaataatcatttctgtagggagacccactgaaactattgctacagaataaaagatgaaatgctcctgattactgtaaatacaaaattgcaygcaggattgtgtaaagacaatgccaggttggactgccagaatgagccaacagcgtgtgatgtgcttccccctgcacagagcctatgaatggacgtgcagt

SEQ ID NO: 499002 - DNA, 201 bp, Homo sapiens
tgaggtgggagaattccttgaacccaggaggcagaggttgcagtgggccaaggtcatgccactgtactccagcctgggtgagagagagagactctgtctcaaaaaaaaaaaagaaaaataaacaatagtggaagaaacaaaggctttaccacatgccttagaaccagatttttctcccaaaggtgagttcttacactttat

SEQ ID NO: 499003 - DNA, 201 bp, Homo sapiens
ggggaaccaatacttttgccttcggggattctaaagatggtcaagtgtaactttacaaatagcaaactaatcatataacatttccaatacatgcactaaamctatttttaaaataacaaaaatgttgcccaggtataatggctcatgcctcatacctcagcactttgggaagccaaggcagggagatcacttgaggttagg

SEQ ID NO: 499004 - DNA, 201 bp, Homo sapiens
atagctacacaacactaaaatggtaaatttttgtatattttacctaaaaaaagtatatggcacatttgtatatctttccaaacatgcataaaacatgattaaaaaaaaaaagagtgaagcaaatggaaagatggactataaagagtttggctatgtcagaagttttgcaatggtaaagatatggtgtcaaaactatcacta

SEQ ID NO: 499005 - DNA, 201 bp, Homo sapiens
attgatttcctaaaggggtcagtgaagaaatgatgccagttttacctagtataatgagattcttgtagttctccaacatcacatctctgtagagatctctstgggcttgatccaacaaagtccactcctcctgggtaaagtccacagccacatcctcaaaggtcactaagtgctaaaccattaaatacatgccagcttcag

SEQ ID NO: 499006 - DNA, 201 bp, Homo sapiens
tggcaatatttgcttttatttctataaacctacaactcctgcacacttgacaaagcatttaactgctgagcaatttcgcaaacttcaataagcgatgcccycccacagccagatcatctcctccgtccagggctcaccggaacgcactgcaatcgccctgtcggtgacaagaggacgctggggcccttttccacaacagct

SEQ ID NO: 499007 - DNA, 201 bp, Homo sapiens
aaaacatgtctctttcacagttaatacaactgtaatttctgatactggtataatgaaggcggcatcctacttcctggaagcccctccgttttgaagctctktgggaggtactgacctaggaagttcagctgcttttgatctcaaaaacacagcggagtattgctactttgctttataactgtggcaatatttgcttttatt

SEQ ID NO: 499008 - DNA, 201 bp, Homo sapiens
aaaaaccagagctctttaagcagttcctccccattcctgctccctaacccctgcaaccaccaatcttcattttgtttctgtgaattaattctgggtattaytatttttttgagacagtcttgctcttacccaggctgaagtacagtggcatgaacatggctcactgcagcctcgatttcctgggctcaagcaatcttccca

SEQ ID NO: 499009 - DNA, 201 bp, Homo sapiens
gccgtccacaagctgagaagagagccctcacaagagatggaattgactggagcctcagtcttggactttcagcctccagaacagagaaaataaatgtgtgwtgttaagccacccactctgtggtgttttgttatggcagcccacactaatacaggcagtgatggaatatctcgtgaggaagtgacgtttgaacacatctga

SEQ ID NO: 499010 - DNA, 201 bp, Homo sapiens
aatcattgagttttattctagatgggggagagggtgacagataataaacaatagaattcataatatgaattcattggagagtacgagaaaggtgaactgtrgggggaagagagcaaggtaagggggtgaaggagtgttggggagattgggattgcaatttcagaaatggtagtgttatgaactgaatgtgggtgtctcccc

SEQ ID NO: 499011 - DNA, 201 bp, Homo sapiens
aaagactcctacccttaatcattgagttttattctagatgggggagagggtgacagataataaacaatagaattcataatatgaattcattggagagtacragaaaggtgaactgtggggggaagagagcaaggtaagggggtgaaggagtgttggggagattgggattgcaatttcagaaatggtagtgttatgaactga

SEQ ID NO: 499012 - DNA, 201 bp, Homo sapiens
ctttaatcaaatcacatctcatatccagcagtcatagatgagtatgctagaatcatggactgcttggaagtcttttaatctggtgtttacctactcatccrttggtggaaatttgggctgcttattaattattaattatttttaattattgaataccagatctggtttctaaatggaatgaagactaccagctctcctcaa

SEQ ID NO: 499013 - DNA, 201 bp, Homo sapiens
ggagcaggattgttcgaccatatggtaatttttgtgtttatcttttttttttttttgagatggagtcttgctctgttgcccaggctggagtgcagtggtgygatctcagcacactgtaacctctacctcccaggttcatgtgattctcctgcctcagcctcccgagtagctaggactacaggtgtccaccaccacacctgg

SEQ ID NO: 499014 - DNA, 201 bp, Homo sapiens
atggctcactgcagcctcgatttcctgggctcaagcaatcttcccaccttggcctctcgaggagctgagactacaggcacgtgctgccacacccagatatkttttaaagttttttgtagagacaggtcttgctatgttgcccgggctggtctcaaactcctggactcaagcagtcctcctgccttgtcttcccaaagtgct

SEQ ID NO: 499015 - DNA, 201 bp, Homo sapiens
tatcttttttttttttttgagatggagtcttgctctgttgcccaggctggagtgcagtggtgcgatctcagcacactgtaacctctacctcccaggttcawgtgattctcctgcctcagcctcccgagtagctaggactacaggtgtccaccaccacacctggctattttttttttttttttttgtatttttagtagagat

SEQ ID NO: 499016 - DNA, 201 bp, Homo sapiens
ttctacctagctttatgttttccatgttcttccccattgcatcatgtatcagtactttctttctttttgtggcataatattccattatatgtatccactgsaattttgtttactgatctgttgatagacatttgggctgtttccaccttttggctgttgtgagcattgccgctgtgaacattcatgtataagtgtttgtgt

SEQ ID NO: 499017 - DNA, 201 bp, Homo sapiens
tcagcacactgtaacctctacctcccaggttcatgtgattctcctgcctcagcctcccgagtagctaggactacaggtgtccaccaccacacctggctattttttttttttttttttgtatttttagtagagatggaagagacagagtttcaccatgttggccaggcaggtttcaaactccagacctcaagtgatccacct

SEQ ID NO: 499018 - DNA, 201 bp, Homo sapiens
gagctcagaaggttggactgcttgttcaaagtcacctagctagagagctgcgcagctggaactagtatacaagtctagctgttgaaagcaccctgagcacrttacctcatgctgtaccttgcatgtcttgttgttttcaattttcagatgaagaaacagttccacacactaagagacttaacgagggtacagttagtttca

SEQ ID NO: 499019 - DNA, 201 bp, Homo sapiens; identical to SEQ ID NO: 388933

SEQ ID NO: 499020 - DNA, 201 bp, Homo sapiens
tagctagagagctgcgcagctggaactagtatacaagtctagctgttgaaagcaccctgagcacattacctcatgctgtaccttgcatgtcttgttgtttycaattttcagatgaagaaacagttccacacactaagagacttaacgagggtacagttagtttcaggagagctggtagttttcattccgtttagaaccgga

SEQ ID NO: 499021 - DNA, 201 bp, Homo sapiens; identical to SEQ ID NO: 388850

SEQ ID NO: 499022 - DNA, 201 bp, Homo sapiens
gtcacccaggctggagtgcggtggcatgacgtcggctcactgcaacctccgcctgcctggttcaagcgattcttctgcctcagcctcccgagtagctgggwctacaggcgtgcaccactacacccagctaatttttatatttttagtagagacggggtttcaccactttggccaggatggtctcaatctcttgacctcgtg

SEQ ID NO: 499023 - DNA, 201 bp, Homo sapiens; identical to SEQ ID NO: 388943

SEQ ID NO: 499024 - DNA, 201 bp, Homo sapiens; identical to SEQ ID NO: 388935

SEQ ID NO: 499025 - DNA, 201 bp, Homo sapiens
tggggggggtttgtttttgagacagtgtcttgctttgttgtccaggctggagtgcagtggtgcagtctaggcttactgcaacctccacctcctgttcaagygattctcatgcctcagccttacaagtagctgggattacaagcgcacaccaccatgcccagctaattatttgtatttttagtagagacggggtttcaccgt

SEQ ID NO: 499026 - DNA, 201 bp, Homo sapiens
gggcccgagctcaagacaaatgcaccatgttgtatctggaagccccttatctgaggctgtgagccaaggtgagagctccaggctgcttctctgtgtggagyggcctgcatggctgagcatctgcaggcgacaggattccagacagcaagctttctcagggcggagaagtggagtacgagatttctcagcacagaggctgag

SEQ ID NO: 499027 - DNA, 201 bp, Homo sapiens
gtaaccacccaacagcttcttcttgcctgtcgcccagatagagccaatttttcaagatgggaattgcaataaagagttcgatacacatagagctggctaamcaggagagcagaggcttattactcctcaaatcagcctctcctcaaattcggagtctaaggaattttttggggggggtttgtttttgagacagtgtcttgc

SEQ ID NO: 499028 - DNA, 201 bp, Homo sapiens
ttattattcttatttaaaataaatgaagcaaaagaagttacaagagaacttatgtctaaccaagaggcaggtgggtgagtgggaagggaggctgttctctkctcactgcaatgctgcacatcatggtggagagtaggtcatgctgtgagaaacaaactcactggtccaaacccaaagtttgggctcagagacccagagaac

SEQ ID NO: 499029 - DNA, 201 bp, Homo sapiens
tttctttctgcaggtggccttgcggttttctccagtccacagccgggctggcgtcggcccagagaggggggctcggcagtctggttccccgagcgtctcakggcgggccctcgccagattcaaggggttcccttggccagtttccttacggcgcggcggagctggccctcgtcgtccctggtagggggcagcctcacagcc

SEQ ID NO: 499030 - DNA, 201 bp, Homo sapiens
ctgtggcccaaaacactggacttgccccccaccggtcagcggagcccagacatccagggagccctaatggagcctggacaggaaggcagcaggaggtgggrcccggggtgcgagtgaccccgaggccgtcctccggagcgcagcgcgcccgcgtgggggaggcccgcctacagtcggtgatccccggccgcccccgccagc

SEQ ID NO: 499031 - DNA, 201 bp, Homo sapiens
accctactcttccccaagagaacttggcatttatgattcctgcctgccacatgggccattgtgtggtctcttttagcttcccgatggatgatccaacagaygtcatcttgcactgtagtgatagtcttgttgggaccacatgaagtgcagctgtaaaacaggtaatactgttcttggcaattggtcgactgtcctggtagg

SEQ ID NO: 499032 - DNA, 201 bp, Homo sapiens
atgaagtcttgctcttgtcccccaggctggagtgcaatggtgtgatctcggctcgctgcaacctctgcctcccgggttcaagcaattatcctgcctcagcstcctgagtagctgggattacaggcacctgccaccacgcccggctaatttttatatttttagtagagacagggtttcaccatgttggccaggctggtcttg

SEQ ID NO: 499033 - DNA, 201 bp, Homo sapiens
tttcctttttttcttggtcagcatctccagaaatgcctaagttttattacttctcttccccaagagctaacttttggctttgtggaactcctctgtatctttgtttaatatttttaaatttatttcatctttattatttctttctttgtacttagagtgtgttgttttttaaaattttctagtttaagctgaacacatatt

SEQ ID NO: 499034 - DNA, 201 bp, Homo sapiens
tcctttttttcttggtcagcatctccagaaatgcctaagttttattacttctcttccccaagagctaacttttggctttgtggaactcctctgtatctttgtttaatatttttaaatttatttcatctttattatttctttctttgtacttagagtgtgttgttttttaaaattttctagtttaagctgaacacatattaa

SEQ ID NO: 499035 - DNA, 201 bp, Homo sapiens
taagaacagacaaagtgagctattttgcaagctagtaaactttcatcttagactaaactcctttggtttgggtgagggcaactaaggcagtggggtagggkggagggtggggaggcgacaagcaggcattggctatccaagcaggggcctagtgtatcctgtttcttctgtagtttgctgacctaaaccaattcaaggcac

SEQ ID NO: 499036 - DNA, 201 bp, Homo sapiens
gcagcccacagagggcgagccaaagcagggtggggcattgcctcacctgggaacaacaaggggttgggggatttccctttcctagccaaaggaagccgtgrcagactgtacctggaaaaacgggacactctcccccaaatactgtgcttttccaaaggtcttagcaaatggcacaccaggagattatatcccgcacatggc

SEQ ID NO: 499037 - DNA, 201 bp, Homo sapiens
gaagcttccagaggaaggatcaggcagcaatatttactgttctgcaatatttgctgttttgcagcctccgctggtgatacccaggcaaacagggtctggcrtggaccttcagcaaactccaaccgacctgcagctgagggacctgttagaaggaaaactaacaaacagaaaggaatagcatcaacatcaacagaaaggaca

SEQ ID NO: 499038 - DNA, 201 bp, Homo sapiens
gaacaccaatcttatgttatataatagtaatattatctattggagcaattatggaggttaggaatcttgtggcttcgggctgcatgactcctaagccataattttttttttttttttttttttgagatgaagtcttgctcttgtcccccaggctggagtgcaatggtgtgatctcggctcgctgcaacctctgcctcccgg

SEQ ID NO: 499039 - DNA, 201 bp, Homo sapiens
gactgtacctggaaaaacgggacactctcccccaaatactgtgcttttccaaaggtcttagcaaatggcacaccaggagattatatcccgcacatggctcrgtggatcccacgcctatggagtcttgctcactgctagtgcagcagtctgagatcaacctgtgaggcagcagcctagcaggggaaggggcgtctgccattg

SEQ ID NO: 499040 - DNA, 201 bp, Homo sapiens
aacaccaatcttatgttatataatagtaatattatctattggagcaattatggaggttaggaatcttgtggcttcgggctgcatgactcctaagccataattttttttttttttttttttttgagatgaagtcttgctcttgtcccccaggctggagtgcaatggtgtgatctcggctcgctgcaacctctgcctcccggg

SEQ ID NO: 499041 - DNA, 201 bp, Homo sapiens
gagtaggtaaacaaagcggctggggaagcttgaactgggcagagcccactgcagctcagcaaggcctgctgcctttgtagtctctactgctgggggcaggkcatagcagaacaaaaggcagcagaaacttctgcagacttaaacatccctgtctgacagctctgaagagagcagtggttctcccagcatggtgtttgagct

SEQ ID NO: 499042 - DNA, 201 bp, Homo sapiens
cctcctgagtagctgggattacaggcacctgccaccacgcccggctaatttttatatttttagtagagacagggtttcaccatgttggccaggctggtctygaactactgacctcaggtgatctgcccaccctggcctcccaaagtgctgggattacaggtgtgagccatcgcgcccggcccataaattttaatcttgtgg

SEQ ID NO: 499043 - DNA, 201 bp, Homo sapiens
ttttcctttttttcttggtcagcatctccagaaatgcctaagttttattacttctcttccccaagagctaacttttggctttgtggaactcctctgtatctttgtttaatatttttaaatttatttcatctttattatttctttctttgtacttagagtgtgttgttttttaaaattttctagtttaagctgaacacatat

SEQ ID NO: 499044 - DNA, 201 bp, Homo sapiens
agaaaggaatagcatcaacatcaacagaaaggacatccacaccaaaaccccatctgtaggtcactaacatcaaagaccaaagagagataaaaccacaaagrtggggagaaaccagagcagaaaagctgaaaattctaaaaaccagagcacctcttctccttcaaaggatcgcagctcctcaccagcaatggaacaaagctg

SEQ ID NO: 499045 - DNA, 201 bp, Homo sapiens
tcttactcgaagtcaactttcagcctatcttataagaaatgcagttagagctttgcatttcctataagcacccttgtagctctgtcccacacatttggctrtattgtatttttgtaattgtcagtttggaacattttctaaagtccactattacagtgtttctctgtccatgtgttatttagaaatatttttgctctctcc

SEQ ID NO: 499046 - DNA, 201 bp, Homo sapiens
cctcctgttcaagcgattctcatgcctcagccttacaagtagctgggattacaagcgcacaccaccatgcccagctaattatttgtatttttagtagagayggggtttcaccgtgttggccaggctggtctcgaactcctgctctcaagtgatttgccctccttggcctcccaaagtgctgggattgtgccagtctggagg

SEQ ID NO: 499047 - DNA, 201 bp, Homo sapiens
tctgaggctgtgagccaaggtgagagctccaggctgcttctctgtgtggagtggcctgcatggctgagcatctgcaggcgacaggattccagacagcaagstttctcagggcggagaagtggagtacgagatttctcagcacagaggctgagggagctgcctcaggctggctatctttgttccttagccctgctctcctat

SEQ ID NO: 499048 - DNA, 201 bp, Homo sapiens
gaccaatttggtgaaacctgtttatatgatatgccatcctaatgttaccggatatgagcctgcatgcttgaaaatctaattctgccaatgtagataaaaamcagcttaagatttaaatgttgaatgttgaaatatataactgagcttaagcatcaaataataagtaaattaagaaaatactatacctcagcatcatattcc

SEQ ID NO: 499049 - DNA, 201 bp, Homo sapiens
tcaatggcatgccactgtctatagagtgaagagaaaagggatggtagagtttgtggagaccaagattttggttaagaattgagtatccaacataaactctrggagcaagattgtttagtttcagcctgtgttaggaatgattgcaacccactttgagttctctcacagtgatcgaagtgctgcggattagactcatcttgt

SEQ ID NO: 499050 - DNA, 201 bp, Homo sapiens
tatatggcaaacaatatatagcagtttaattacaacaaaagtttaatgaatgtgtattgagtttattcccctggtgataaaatttttagatactggagcayagcactgaaaggtattctttaacatagaaaatgaaaatgacagtggtaacctaactaaaatctttaagtgcaatagagttaaaaattaagtctaaaattc

SEQ ID NO: 499051 - DNA, 201 bp, Homo sapiens
cctgaagataattagaaggaaaatgaaagtgagtatgttccattagttactactgaaaaggctttgcttccctgaaacccagtttgccaaatgatgcttgsatgttcctgtaatcatgctgtttctagtttatttctgctgtaggtcttagtgcttgtattattttaaagaactaattttatttaaatgactagtaagaat

SEQ ID NO: 499052 - DNA, 201 bp, Homo sapiens
atcatctaattttccattctcattctaactcattaaaaacagaatattgagtgatttgttctccctagctaaaaacaaaaacaaaataactttatataacrtaacacaagtatcgcagaagtggtctttatcttaaaggatccttaagaaaagagctgcctgaattcaccagtatttcagagggatttttcttttaaaaca

SEQ ID NO: 499053 - DNA, 201 bp, Homo sapiens
caacaacaacaacaacaaaacaaaacaaaacaaaaaaagctgaaatacaaaaaaaaaaaacaaaaaaagacatgtaatcatcaagttcttttttccccctygtgctatttttagcagaaatttcagcacaactggaaccaagcagcagcttactttcgttttcacaccaatggaatgcatgatgaaaatctcatttttaaa

SEQ ID NO: 499054 - DNA, 201 bp, Homo sapiens
gatgccctcaattcaaacaggttaggccacatataagatgacagtgaattgaattcgtggttatttaaggactatttagttaggggtgtgagaaactacayttgaaatcaaagttgaccaaagaagtgcatttattactaacatgtgcttagtttcattcaattacaaggataagcaattagatattatattatgaatatg

SEQ ID NO: 499055 - DNA, 201 bp, Homo sapiens
ttatttaaaatattgactaaaaataggatcatctaaaccctaagatagtattgagttttgtttataatatagtattactttattgttctcctctagaatgyaaagccttggtattgcctgcaatgtagaatattttaatcgtaacatgtaaaaatacataagaaaaatattaacgattcatgcctttaaatatatttgcaa

SEQ ID NO: 499056 - DNA, 201 bp, Homo sapiens
tcccatctcagcttgccaagtagctggtactacaggcccatgccactacatccagctatattaactcaactttgaagacaatgtgacatccaggctgacaygcaacttactgccaaatatattttcctatagctttatttaaaatattgactaaaaataggatcatctaaaccctaagatagtattgagttttgtttataa

SEQ ID NO: 499057 - DNA, 201 bp, Homo sapiens
tgctttaaaatcatgcatattttagtgtttctattttatatattttgataacaaaattgtactgggaacacaacattttcttggtgctaggagatattcayaggcacttaatcatttatttaaataatccacaaacatggaggttaagcataaaatagtgacgttgtttatctatttgaaatgttaaccatttattttcca

SEQ ID NO: 499058 - DNA, 201 bp, Homo sapiens
cttagttatatctgtttttgttgcaaatgcctaattagtctacttttgttttgttttagagaaagggtctcactatattgcccaggctggccttgaactcytgggctctagcaatcctcccatctcagcttgccaagtagctggtactacaggcccatgccactacatccagctatattaactcaactttgaagacaatgt

SEQ ID NO: 499059 - DNA, 201 bp, Homo sapiens
attttttaagaagactagtttatatttttgtttttaaaccaaacatgaattttccacccatactgttcaaaactgctaggctagatcatcctctactctcrgtgatatttctccttgaagtgaacttttcttggaaaatgccactttaacaacaaagatattagtgtaaatgatgttaattatgtttgtaatatagaagaa

SEQ ID NO: 499060 - DNA, 201 bp, Homo sapiens
aaataaaaataaatgctttaaaatcatgcatattttagtgtttctattttatatattttgataacaaaattgtactgggaacacaacattttcttggtgcwaggagatattcataggcacttaatcatttatttaaataatccacaaacatggaggttaagcataaaatagtgacgttgtttatctatttgaaatgttaac

SEQ ID NO: 499061 - DNA, 201 bp, Homo sapiens
  misc_feature (1)...(201): n = A,T,C or G
acaaaatctagaaatgtcctttacacttgctgacagttataagttgcggaaaactagcgaggtgttcatgtttgcaaatcaatggacttctgaacaggaantttcagatgagtctcttcagaataaaattatgaaaacagattattagcatcgtctttctctcttcccttccctcccctccccttccctttcctttccttt

SEQ ID NO: 499062 - DNA, 201 bp, Homo sapiens
aaacatttttgaaattactcctttctagctgtggctacactgaccaaaacaacaacaacaacaacaacaaaacaaaacaaaacaaaaaaagctgaaatacaaaaaaaaaaaacaaaaaaagacatgtaatcatcaagttcttttttcccccttgtgctatttttagcagaaatttcagcacaactggaaccaagcagcagc

SEQ ID NO: 499063 - DNA, 201 bp, Homo sapiens
taaatatttctaaagaatcaatatactaatcataatttttttttttgagacagtcttgaggctgaagtgcagtggtgtgatcctggctcactgcagcctcygcctcccaggttcaagcaattctctcacatcagcctcccaagtagttggaattacaggtgcgtgccaccacatccagctaatttttgtatttttagtaga

SEQ ID NO: 499064 - DNA, 201 bp, Homo sapiens
gtgggtggggttgctttattaggttatacttgagtacctggttactgctggaaatgtatgctgtgcgtggacaagagtaaccgaaaagagagtaacagagytgggtatctggagtcacacttggtttacagaaagccaagaagggacaaaatctagaaatgtcctttacacttgctgacagttataagttgcggaaaacta

SEQ ID NO: 499065 - DNA, 201 bp, Homo sapiens
ggaggaagacgaaagcacagttctgagcatgagagctcacattctgtttctaccaggtgctgaagaaaagcaagacagggtaagttatggatctatcaaarcctgaagtgggtggggttgctttattaggttatacttgagtacctggttactgctggaaatgtatgctgtgcgtggacaagagtaaccgaaaagagagta

SEQ ID NO: 499066 - DNA, 201 bp, Homo sapiens
cagcctctgcctcccaggttcaagcaattctctcacatcagcctcccaagtagttggaattacaggtgcgtgccaccacatccagctaatttttgtatttktagtagagacagggtttcgtcatgttggccaggctggtctcgcagttctgaactcaagtgattcgcccacctcagcctcccaaagtgctgggattacagg

SEQ ID NO: 499067 - DNA, 201 bp, Homo sapiens
aacagtacctgttgaacctttcagagagcagtctaccatatatcccttgatcctcaatttctaatttagattcatttgtggttgttacagttataagtaaygtacatttaagaaagatatatctgtagaacagtttctgcacttatatgtgtatataaattatatgtctgctaaattttttttggcctttgtacttgaaaa

SEQ ID NO: 499068 - DNA, 201 bp, Homo sapiens
cttctgccaaccgcttaaaaggaaattatggggggctgggtcggtggttcggtggctcatgcctgtaatcccaacactttgggaggctaaggcgagaggaytgcttgagcccaggagtttgagaccagccagggaaacatacagagatgtcagctctacaaacgataataaaaagaaaattatccaagcatggtggtacac

SEQ ID NO: 499069 - DNA, 201 bp, Homo sapiens
gagaggaagcggcaaaatcaatgacagaacacaaataccctcttctgccaaccgcttaaaaggaaattatggggggctgggtcggtggttcggtggctcaygcctgtaatcccaacactttgggaggctaaggcgagaggactgcttgagcccaggagtttgagaccagccagggaaacatacagagatgtcagctctaca

SEQ ID NO: 499070 - DNA, 201 bp, Homo sapiens
cattcatattttatattaatggaccaatttggtgaaacctgtttatatgatatgccatcctaatgttaccggatatgagcctgcatgcttgaaaatctaaytctgccaatgtagataaaaaccagcttaagatttaaatgttgaatgttgaaatatataactgagcttaagcatcaaataataagtaaattaagaaaatac

SEQ ID NO: 499071 - DNA, 201 bp, Homo sapiens
ccatggagctgtgagccacatttttttagatggctttaatatcaaccctataaggaaggagtaaatgaagataagactgagaatatggagaggggcttacrattaaataatgaaatatttttggcaaaaggttattttagatataaaagattatattctcagccttcatcctagtaatacaatgctttttagtaccagatg

SEQ ID NO: 499072 - DNA, 201 bp, Homo sapiens
ccccagggcataaatacaatatagaattttcattaaaaaaatgactgtaacatatgtcccaaaggtgtttatcaaatgaatggccatgaaaaaatagtcamagaagtttcattccaggtacttctaaaaagccatagcccagaagaaaaattacaaatcttgtccttattgagacaaaaattatttttcatttaaaaacac

SEQ ID NO: 499073 - DNA, 201 bp, Homo sapiens
ttttatctggaaattattaggtttgatctcaattatttatcatttatatccattagctttttaacccataattgtcattattaaaatttttttcatgtttrctactgtgaaaggttcatggaattcactttgggtatactgaaaacattatatgtgaaatactttgcagagattctagcacacagacaaaattcagtagct

SEQ ID NO: 499074 - DNA, 201 bp, Homo sapiens
gtgtacaaatgccagtgtaaaaggaaacatcataacatccatttcagccttaattttctaatggctcaggccgtttttatacagtgtattcttctccagtstcttaagatagtttggaaacagtacctgttgaacctttcagagagcagtctaccatatatcccttgatcctcaatttctaatttagattcatttgtggtt

SEQ ID NO: 499075 - DNA, 201 bp, Homo sapiens
atgagaaaggtcatgtcagggtctttttgtttctcaaagatatctgatgaaatctgaggaagtcagctttacaaataacataaactctggagctccgtaarctgaacgagttagtcttggaagagttgcctctgcagcattgctactcagaacttctatgaaaaccacaagaagtggtgagaggaagcggcaaaatcaatg

SEQ ID NO: 499076 - DNA, 201 bp, Homo sapiens
ccgacctcatgatccacctgcctcggcctcccaaagtgctgggattacaggtgtgagccgccatgcccagcctcatgagggttattaagcacataattatrgaatgtgttttcttcttttaactacgataagcattgttcagtattctgtgggtttttctttctccttgcaatgtcaacagaatacataatgagaaaggtc

SEQ ID NO: 499077 - DNA, 201 bp, Homo sapiens
cttccagttgaggaacataaatgtcagtgattagtattgtaaaatttaaaatttgaaaatatggacatattgtcaatattatcctgtatgcacatcttcayacaaacctctcagataggcttagcttacctcttgcctaatttatgtttggcatgtacatggagataacaagttgtcatacacaaaactgattttattgtc

SEQ ID NO: 499078 - DNA, 201 bp, Homo sapiens
gagaaaaaaattggtggtcagacaaggtgagtaagatatagcgaaggcagtagcatcttaatcacactggtacaacataggaagaattctcagtgtttgcyctcaattatggcccagaagatgattttgtgtcctaagatcctggtaacactgtatgagtgttaggcccaaaattaaccctgcacaaccagtttcaaatcc

SEQ ID NO: 499079 - DNA, 201 bp, Homo sapiens
ttgtttatctatttgaaatgttaaccatttattttccaaaaaggcaatatataccaaaggaaaactaaattggcatattttaactctacaaaaatgtatamatatttaaatttacagcaaaagaacaattatatcatctaataatgcttacagtatttaaaatctgtcattatgcacaatctacttttataaatgttaaag

SEQ ID NO: 499080 - DNA, 201 bp, Homo sapiens
gtaaaatcctttaattattggataatacactctttaaaactaaaagctaggacatgttcttatttgcactctttacaagaattccatatcagtttgttgayttgacctgtgtaatgattcattttattgcttgctgaaaagatagtcacaaatcataaaagtgagagataaaagatacaacttaaaaaaatattgtttcac

SEQ ID NO: 499081 - DNA, 201 bp, Homo sapiens
atttgcgagtggatattcaaaatagttgattagtccagctatggcccttggcctcctcattctttcaccctaaaattaaataaatatcagggacaaattcrgaggataatttagctttaaggctttactttgaacagtatggtactcaaattgctcccacttatgtttttacaaggctaacctgggttgtgttccacatgt

SEQ ID NO: 499082 - DNA, 201 bp, Homo sapiens
taatttttgtatttttagtagagacagggtttcgtcatgttggccaggctggtctcgcagttctgaactcaagtgattcgcccacctcagcctcccaaagkgctgggattacaggcgtgagccaccatgcctggccccataacatgtttaatgaagatatttttccattattgttccatttctataattttttgagtgaca

SEQ ID NO: 499083 - DNA, 201 bp, Homo sapiens
ggctatagtttgcctcaaagagagttaatatttcataatatcgttcatcaagtatatttatgcatatatatgtttaaaataaagaaaaaaaacaaaaaaamccctactcattaaggatagactaaacacaacttaatatatgcagtccccaaattaatgagtagctaggaagtaaaagacagagagttaactccatggaga

SEQ ID NO: 499084 - DNA, 201 bp, Homo sapiens
actttagaaaggatatgccatatttgcatttaaccaaagtatctgaataaaaagaaacaaaaataaatgattccagtgtcttagaaacaatactttctttrgccctgttagttttttaatcgatttttttcagatctgatgacgcagaacctgttgtcatatagacatggctatagtttgcctcaaagagagttaatattt

SEQ ID NO: 499085 - DNA, 201 bp, Homo sapiens
gttgtcatatagacatggctatagtttgcctcaaagagagttaatatttcataatatcgttcatcaagtatatttatgcatatatatgtttaaaataaagaaaaaaaacaaaaaaaaccctactcattaaggatagactaaacacaacttaatatatgcagtccccaaattaatgagtagctaggaagtaaaagacagaga

SEQ ID NO: 499086 - DNA, 201 bp, Homo sapiens
agtccttgcacatttctatatgtggtatactatttccctttcaaaaagtatagtaattaagggttgatatgctctttattaggtatatcaacccttagttwtatctgtttttgttgcaaatgcctaattagtctacttttgttttgttttagagaaagggtctcactatattgcccaggctggccttgaactcctgggctc

SEQ ID NO: 499087 - DNA, 201 bp, Homo sapiens
tattatagtgctctgaaatactgcaacagataactactagtcatccaaaagagtaaatttatagaaatcatttatttatctacctatgtgaagctacctattttttttttcactttttacttaaaattccttagtattcaatagcattgctactagctgacagaaaatgtaaaccaaaatatacaccaaattgctaacagt

SEQ ID NO: 499088 - DNA, 201 bp, Homo sapiens
aggcagtccctgttcctactattgtatgaccagttctccaattctacaatgtcattttttcatatagaagtttaaatctttcttctgataacataagtacrtcgtgtaagttttattaaatactgtcagtgagcttctgaaggttgtagaagtatcttctctagagatcttattaaaggtaggctctacacttatctctct

SEQ ID NO: 499089 - DNA, 201 bp, Homo sapiens
tgaggcctcagtttaacaaaacaaacctttaaatacccattatttgctggcactgtagttctttcatgatacttgcattataaagctcacaataggttaartaaaataaagtttacaaactgcatggagctcagtgaaggcagtccctgttcctactattgtatgaccagttctccaattctacaatgtcattttttcata

SEQ ID NO: 499090 - DNA, 201 bp, Homo sapiens
atgatgttttggtgaggcctcagtttaacaaaacaaacctttaaatacccattatttgctggcactgtagttctttcatgatacttgcattataaagctcwcaataggttaagtaaaataaagtttacaaactgcatggagctcagtgaaggcagtccctgttcctactattgtatgaccagttctccaattctacaatgt

SEQ ID NO: 499091 - DNA, 201 bp, Homo sapiens
agctaattcatctctttgagtctttttcctcaactgcaaaatagggacaaagtcatctgttttatgatgttttggtgaggcctcagtttaacaaaacaaayctttaaatacccattatttgctggcactgtagttctttcatgatacttgcattataaagctcacaataggttaagtaaaataaagtttacaaactgcatg

SEQ ID NO: 499092 - DNA, 201 bp, Homo sapiens
gttgtttatctatttgaaatgttaaccatttattttccaaaaaggcaatatataccaaaggaaaactaaattggcatattttaactctacaaaaatgtatrcatatttaaatttacagcaaaagaacaattatatcatctaataatgcttacagtatttaaaatctgtcattatgcacaatctacttttataaatgttaaa

SEQ ID NO: 499093 - DNA, 201 bp, Homo sapiens
tcacatatttttaaacattatatttatattttagtttcttcataaattccaataattgtatgttaaccagtcattatatatcttctctttggcatttttaygtacattggaaatcacatttttggacttttcagatatacattttaaatcaacatgatttatacatactaattatatatatttctgctatttcatgggcaa

SEQ ID NO: 499094 - DNA, 201 bp, Homo sapiens
tggagctgtgagccacatttttttagatggctttaatatcaaccctataaggaaggagtaaatgaagataagactgagaatatggagaggggcttacgatwaaataatgaaatatttttggcaaaaggttattttagatataaaagattatattctcagccttcatcctagtaatacaatgctttttagtaccagatgagt

SEQ ID NO: 499095 - DNA, 201 bp, Homo sapiens
attatgcacaatctacttttataaatgttaaagaaccatgtgccaagcatatatctaaaacatttttgaaattactcctttctagctgtggctacactgaycaaaacaacaacaacaacaacaacaaaacaaaacaaaacaaaaaaagctgaaatacaaaaaaaaaaaacaaaaaaagacatgtaatcatcaagttctttt

SEQ ID NO: 499096 - DNA, 201 bp, Homo sapiens
tgttctttaaaaaatcctttatgatttttatagtataatacactgtgatagctttgtaaaaggaactgtgcacaggtgtccctggattaattattatacawctttgactgttatgaagtcatcattgtctaatatacctttatttgcagatggctaaagaaactgactgacatttatcaagcattgccaagaattcaggct

SEQ ID NO: 499097 - DNA, 201 bp, Homo sapiens
cgcggatttctttttttatgtactctaaattgaatttaaaaagtttccttctcttttttgaattcacattggtttaaatgtgatgcttctgtaaaggctcyatgaattcaatatccaatgtaatgtttttccttgtccaaaacttggaacattttgtaagatgaattcaccattcagaagtaatttaatatgtggccctgt

SEQ ID NO: 499098 - DNA, 201 bp, Homo sapiens
gcaattctgtacagcatcaatggcatgccactgtctatagagtgaagagaaaagggatggtagagtttgtggagaccaagattttggttaagaattgagtwtccaacataaactctgggagcaagattgtttagtttcagcctgtgttaggaatgattgcaacccactttgagttctctcacagtgatcgaagtgctgcgg

SEQ ID NO: 499099 - DNA, 201 bp, Homo sapiens
cccacctcagaaaaaaaaatgccctgatattcaacattttgcttacaattttaggaaattcacggattcacagagagctcatggtgaggggtgtctatatktaaagagcaaacctgaaatgctccaggttgtagattcttccctacagttgtaccaataaaaagtcaaaagaggaaggaataccagtggcaaaaatcattt

SEQ ID NO: 499100 - DNA, 201 bp, Homo sapiens
cttgagagttgaagctttttcaacttaagtaataatgctgtgcagggtctttttaccttagtaaggagaagaggaaatgaggggagaaaaggagtgtaaaratgaaaaatgggaattttacatgaggcctcaatggacttgagaggctgctattaatttaaggcaatggttcactgcctcttgggagtcatagccttcttt

SEQ ID NO: 499101 - DNA, 201 bp, Homo sapiens
aaaacaaaaaaagctgaaatacaaaaaaaaaaaacaaaaaaagacatgtaatcatcaagttcttttttcccccttgtgctatttttagcagaaatttcagyacaactggaaccaagcagcagcttactttcgttttcacaccaatggaatgcatgatgaaaatctcatttttaaaaaacattatagatatagccttaatca

SEQ ID NO: 499102 - DNA, 201 bp, Homo sapiens
tgttcttatttgcactctttacaagaattccatatcagtttgttgacttgacctgtgtaatgattcattttattgcttgctgaaaagatagtcacaaatcrtaaaagtgagagataaaagatacaacttaaaaaaatattgtttcacttaggcaaccacaaagaaatgcttagaaataattttctttataaaggtattaaa

SEQ ID NO: 499103 - DNA, 201 bp, Homo sapiens
ttggaatgtctttggcttgaatatagttctaagtaaaatagtaccccatatgttgtcccctcatccataatttcatttctagccttgttccaagacttctragctcaattgtttcctccactaacaatctttaagtggttcatctgaaccagaaaaatgccccaatcttccttgtgttctcattgtaaggtctgggacaaa

SEQ ID NO: 499104 - DNA, 201 bp, Homo sapiens
aataaagatgcataacaaaaacaatatgtattttttctagacagttctagttaaaaatcaacaaaattgtttcatttttgttacgtacctgtggtcttttrtgtatatattctctttcaaaaatatcacttaccattgcatacttctattagatccctttttaaaaaaagtatgatttttcatatatcaaatatgtcattg

SEQ ID NO: 499105 - DNA, 201 bp, Homo sapiens
attaaaggcaaagaaatttttttttttttttttttttttggctcatgatactacattgaaaatgggatgaaagtaaatgtaaggggtgggccataaaaatsgtagaggaacagcagccagacgattgtagtttgcttagattaggactgaaaacatcgtggactgcactgttgtaagaaatgatggaatggagaataggtt

SEQ ID NO: 499106 - DNA, 201 bp, Homo sapiens
cattggaaatcacatttttggacttttcagatatacattttaaatcaacatgatttatacatactaattatatatatttctgctatttcatgggcaatacytaggatcatattatatgaaaacctctccaaccagaagcgaagtatttgaatgtatgagagatgatttgcaaatatatcttgaaaatagcactctagatac

SEQ ID NO: 499107 - DNA, 201 bp, Homo sapiens
tttgtcttcttcagaaggttcatcgagacattggttactgttaacatgtcgcaacgtgagtctctgtaaaagataaccaataatcagtgcagcttatttcrtctttagctttgctagcacatcagataaaatctgttctttaaaaaatcctttatgatttttatagtataatacactgtgatagctttgtaaaaggaactg

SEQ ID NO: 499108 - DNA, 201 bp, Homo sapiens
aaagataaccaataatcagtgcagcttatttcatctttagctttgctagcacatcagataaaatctgttctttaaaaaatcctttatgatttttatagtayaatacactgtgatagctttgtaaaaggaactgtgcacaggtgtccctggattaattattatacaactttgactgttatgaagtcatcattgtctaatata

SEQ ID NO: 499109 - DNA, 201 bp, Homo sapiens
aatgaagattttataaggcatttacattatctctttcaatcaccatgacaaccaaaaataaaataacctccaattaaccctatgacatgagtgcaataaasatttttcttaaagcaaacacaatttgttttacaagttgttctgttgtttaatagtagtttgctattatttatattcttatgtgctttgatcagatacaaa

SEQ ID NO: 499110 - DNA, 201 bp, Homo sapiens
  misc_feature (1)...(201): n = A,T,C or G
acaagttgtcatacacaaaactgattttattgtcctcattcatattttatattaatggaccaatttggtgaaacctgtttatatgatatgccatcctaatnttaccggatatgagcctgcatgcttgaaaatctaattctgccaatgtagataaaaaccagcttaagatttaaatgttgaatgttgaaatatataactgag

SEQ ID NO: 499111 - DNA, 201 bp, Homo sapiens
ccacttaataatgtgggaaatgtaacacagacaaccaattcattttgttaatcaaaaaagaaaactgaaagaaatgaagctgttttcaagagtaagcttcsttatgcaaaggaaaatatttcttttttattagctccatctgatggctgatctggtttttacacactgcctggagataaatttccaacagtaattttgtgg

SEQ ID NO: 499112 - DNA, 201 bp, Homo sapiens
gggtagcaaggggtggaaccattctgtgaactaaagaaaccctaaatgtaaaactgaaaagcatagtaataaatgttatatttcaattttgtttaaaaaamatcctttttaacgaccttctcaaaaatataatcgcacatcaaagctgaaatttccagaaaggcaatgtattattcctacaattgctctattctcatgtca

SEQ ID NO: 499113 - DNA, 201 bp, Homo sapiens
gcatttctaacaagttcccaggtgatgctactactcctggaatcaccctgtgggtagcaaggggtggaaccattctgtgaactaaagaaaccctaaatgtraaactgaaaagcatagtaataaatgttatatttcaattttgtttaaaaaaaatcctttttaacgaccttctcaaaaatataatcgcacatcaaagctgaa

SEQ ID NO: 499114 - DNA, 201 bp, Homo sapiens
tgttcacatggtgagattcacaattgtactgatagctagcttgcttggaatactttattaggacctgaatcctagctctgctgctagcggtgtaatctttrtgctttagttcctcctgataaaggcttaaaggagagaactttaaggtacatttcagttctgtaattctatgaactccaacaatttttattctgccttgaa

SEQ ID NO: 499115 - DNA, 201 bp, Homo sapiens
caaacagaatataagaacacctgaaaacaatagaattaatggatgacagaactttataaaaataatttttaaaatgtctcagtgagatgaatttttttctyttcatttaatcctggcaataggcatttcatggcacagaagggtttgtgcaatttatttaagcttccagaccacgtaggtaccccacaattttgctaatga

SEQ ID NO: 499116 - DNA, 201 bp, Homo sapiens
cgggcatggtggctcacgcctgtaatcccagcattttgggaggccaaggcaggcagatcatgaggtcaagtgatcaaaaccatcctggccaaaatggtgacacactgtctctactaaaaatacaaaaattagctgaacatggtggcatgagcctgttgtcccagctacttgggaggctgaggcaggagaatcgcttgaacc

SEQ ID NO: 499117 - DNA, 201 bp, Homo sapiens
gggcatggtggctcacgcctgtaatcccagcattttgggaggccaaggcaggcagatcatgaggtcaagtgatcaaaaccatcctggccaaaatggtgacacactgtctctactaaaaatacaaaaattagctgaacatggtggcatgagcctgttgtcccagctacttgggaggctgaggcaggagaatcgcttgaacct

SEQ ID NO: 499118 - DNA, 201 bp, Homo sapiens
actagaataaggatatttacctggcttctcttcacttgcatcaattgaatttttaccctacaaaacaaggattcagaatattgattttattaaggaccttyatagtattatacgttaaaaggcactgattaacttgagaaaaaatatgtttcctgcaattgagccacatccacaatttttcactattatacttacctacat

SEQ ID NO: 499119 - DNA, 201 bp, Homo sapiens
ggcatggtggctcacgcctgtaatcccagcattttgggaggccaaggcaggcagatcatgaggtcaagtgatcaaaaccatcctggccaaaatggtgacacactgtctctactaaaaatacaaaaattagctgaacatggtggcatgagcctgttgtcccagctacttgggaggctgaggcaggagaatcgcttgaacctg

SEQ ID NO: 499120 - DNA, 201 bp, Homo sapiens
caggcacaattgctaaaacctggaatcccagcactttgggaggccaaggtgggtggactgcttaagcccaggagtctgagaccaacctgggaaacatggcraaatgccagtctctacaaaaaaatacaaaaaatttagccaggcaggtaaaggctgcagtgagcagtgattgtgccactgcaccacagcctgggtgacaga

SEQ ID NO: 499121 - DNA, 201 bp, Homo sapiens
ttacaatggaaatgttctataccttgatttggatggtggttacacaagtgtatgcaagtgtcgaaattcattaaaataccatacttaacaactatttcttactgactgactgtaagttataaaatgaagccaaaatcccatagtaaattacagaagattacatctagactttatcttaaaaatccaactaaatgtttatct

SEQ ID NO: 499122 - DNA, 201 bp, Homo sapiens
taaggttctctgaaatttcggaaagaagactgtctcagcttactgaaggattacaatcttcatgacaaatagcaccatacttatttttaataattataatmaaaaaaagtaacactttccaccaatataaaagtaatggaaatcaaaacagtaaattagaattaaacagtattcaccttaaattcttgtgtaacagggtct

SEQ ID NO: 499123 - DNA, 201 bp, Homo sapiens
tacaatggaaatgttctataccttgatttggatggtggttacacaagtgtatgcaagtgtcgaaattcattaaaataccatacttaacaactatttcttactgactgactgtaagttataaaatgaagccaaaatcccatagtaaattacagaagattacatctagactttatcttaaaaatccaactaaatgtttatcta

SEQ ID NO: 499124 - DNA, 201 bp, Homo sapiens
ggatctaagaaattcttagacagatttaatccagactgaccacctttgaaatgatctaaaaaaaatgagaaattaaaaacattaaaattccttttaaaacwacaatacaacatattacaaaccaatcacaatggcttgcattaagaaggacggcaaaaaaaagtgttgataaaaaataaaagcaaatgaagctctcaggct

SEQ ID NO: 499125 - DNA, 201 bp, Homo sapiens
acaatggaaatgttctataccttgatttggatggtggttacacaagtgtatgcaagtgtcgaaattcattaaaataccatacttaacaactatttcttactgactgactgtaagttataaaatgaagccaaaatcccatagtaaattacagaagattacatctagactttatcttaaaaatccaactaaatgtttatctaa

SEQ ID NO: 499126 - DNA, 201 bp, Homo sapiens
caatggaaatgttctataccttgatttggatggtggttacacaagtgtatgcaagtgtcgaaattcattaaaataccatacttaacaactatttcttactgactgactgtaagttataaaatgaagccaaaatcccatagtaaattacagaagattacatctagactttatcttaaaaatccaactaaatgtttatctaac

SEQ ID NO: 499127 - DNA, 201 bp, Homo sapiens
tgaggcaggagaatcacttgaacccgggaggcggaggttgcagtgagtcaagatcgcagcactgcattccagcctggcgacagagcgagactctctctccaaaaaaaaaaaaaacaaaaaaccagggtttcattctcttgcccatgctgcagtgcagtggcgcaatctcacctcactgcagccttcacctccccaggctca

SEQ ID NO: 499128 - DNA, 201 bp, Homo sapiens
cacttgaacccgggaggcggaggttgcagtgagtcaagatcgcagcactgcattccagcctggcgacagagcgagactctctctccaaaaaaaaaaaaaamaaaaaaccagggtttcattctcttgcccatgctgcagtgcagtggcgcaatctcacctcactgcagccttcacctccccaggctcaggtgatcctctcac

SEQ ID NO: 499129 - DNA, 201 bp, Homo sapiens
gcccaaaaccgatattccacaaccatttaacaaattaaataaacagctgtatgactggctaaacttcagtatggcatattaaaagtggtttttcttttttragatggaatttcactcttgttgcccaggctggagtgcaatggtgccatctcagctcactgcaacctccgcctccggggttcaagcaattctcctgcctca

SEQ ID NO: 499130 - DNA, 201 bp, Homo sapiens
agtatgtcccctctccagggtacattcaggatttctcttcctcattgtctgatatcctttcacacagggtctaaattgtgcctcttttggcctttatgctkttctattacagattgtgcattacttacatattcctaaggcctattctcttatatttggttctagttaacccactactataaattttcagggtctgtcttg

SEQ ID NO: 499131 - DNA, 201 bp, Homo sapiens
ctggggagtgtgagatacgaggatcacttgagtctgggaggttgaggctgcagtgagctgagattgtgccagctgcattcgagccagggtaatagaaacaytgtctcaaaaaaaaaaaaattcaatttcattgactacttactcctatatctctctctgtatgcaggctaaggtgaagacagcatttacctttctttacta

SEQ ID NO: 499132 - DNA, 201 bp, Homo sapiens
actcctatatctctctctgtatgcaggctaaggtgaagacagcatttacctttctttactaatggatttcatccacctatgacaaagtttgcccaaaaccratattccacaaccatttaacaaattaaataaacagctgtatgactggctaaacttcagtatggcatattaaaagtggtttttcttttttgagatggaatt

SEQ ID NO: 499133 - DNA, 201 bp, Homo sapiens
agattgcgccactgcactccagcctgggtgacagagcgagtccccgtctcaaaaaagaaaaaaaaaatagagtaagagaagacatgatagcacacctgacmcacagtatgtattcaataaattatttctcttttcactagcaaaacttcattacaggtttcaaagaaggtggccacttacaaaatgccttgaagtttaaat

SEQ ID NO: 499134 - DNA, 201 bp, Homo sapiens
atacaccaaacaagcatttctgcagtgacaccagctgggtgtcctctattgtaattcaattctgacactatctacggggtgaaagcaccataccccatagrttgagggttcagtccccaagacttttaactaccagttccagatgccaatcgcaaggcccaagtcgccttacctgtgcttcttactgaatagctataaatc

SEQ ID NO: 499135 - DNA, 201 bp, Homo sapiens
gttttgtctttcttaggctcccatcctgaagctacctaagggcagctagccattgatcattagcattaaaaaaaaaaaaacaaaaaaaaaaacactattaytttgaagattccaaggatttcaagagttgtataccaggaaatggtgatgaagaccaactatttactcactagcacaataccatgatttcatttatacaat

SEQ ID NO: 499136 - DNA, 201 bp, Homo sapiens
tcactaagaagataaacacctctggatccgtgttgaagctgtgcatctaaaagcaaaaaggatgtaaatacaacagattaaaataaattaaccaacaagaytgaaggagaaaaatgttttcaattacaactattaaagacttaaacaaaggaggccaaacaaatcattcagatctataaaacaattatgttaacaaaacct

SEQ ID NO: 499137 - DNA, 201 bp, Homo sapiens
gtgagccgagatcaagccattgcactccagcctgggcaacaagagtgaaactctgtcttaaaggaaaaaaaaagggggggggggggagacacaagacacaktaaacagtaattccaaaacatgaaacagccaacaggaatacccaggagtatggtaaaggaaggttccagatggaatcagttctacagtccaaactagaag

SEQ ID NO: 499138 - DNA, 201 bp, Homo sapiens
aggagaatggcgtgaacccgggaggcagagcttgcagtgagccgagattgcgccactgcactccagcctgggtgacagagcgagtccccgtctcaaaaaakaaaaaaaaaatagagtaagagaagacatgatagcacacctgacccacagtatgtattcaataaattatttctcttttcactagcaaaacttcattacagg

SEQ ID NO: 499139 - DNA, 201 bp, Homo sapiens
agggtgaggctaaatcccaaccctctaatccaggttttgtctttcttaggctcccatcctgaagctacctaagggcagctagccattgatcattagcattaaaaaaaaaaaaacaaaaaaaaaaacactattactttgaagattccaaggatttcaagagttgtataccaggaaatggtgatgaagaccaactatttactc

SEQ ID NO: 499140 - DNA, 201 bp, Homo sapiens
atcccaaccctctaatccaggttttgtctttcttaggctcccatcctgaagctacctaagggcagctagccattgatcattagcattaaaaaaaaaaaaamaaaaaaaaaaacactattactttgaagattccaaggatttcaagagttgtataccaggaaatggtgatgaagaccaactatttactcactagcacaatac

SEQ ID NO: 499141 - DNA, 201 bp, Homo sapiens
gaggctgaggcaggagaatcgcttgaacccgggggaggcagaggctgcagtgagccgagatcatgccactgcactccaaacaagagcaaaactccgtaccaaaaaaaaaaaaaaaaaaattggggccaggcacggtggctcacgcctgtaatcccagcactttgggaggccgaggagggtggatcacctgaggtcaggagt

SEQ ID NO: 499142 - DNA, 201 bp, Homo sapiens
gcccctaggaaaaatacaagcttgggtctctgactctggttatgacattttcaaccaaacgatacacaaccctgttttatttgtgtttctgtttttaaagrtatcttatttaatatatatgttgattaatattgaactcagggccagctgggtgcagtggctctcgcctgtaatcctagcactttgggaggctgaggcggg

SEQ ID NO: 499143 - DNA, 201 bp, Homo sapiens
gaagaaataatttaatgagatcatcttataaggaacatttatttggtaaactatctcatagaaatagactctaaaatcaaacagtttcttaaacaacagaragcataatcccaatctctccccatgaaaagcctacttcataactgaagtacctaaagcccatgaactgcattactagaagaaaggagggaaaaagacatt

SEQ ID NO: 499144 - DNA, 201 bp, Homo sapiens
acaatatgtagtctcctaaatttttatcaacatgacagctgtgaaatgaaatctgattttcatttgtattactgatttctaatcatccttgtctgttcatyagacatttctttctctcttggtaatagcctgctcttatattatccgttttcattatcaacttttatttacttgcatatcctaaacacttcctgttatatg

SEQ ID NO: 499145 - DNA, 201 bp, Homo sapiens
gttttctccatgttggtcagactggtctcaaattcccgacctcaggtgatccacccgcctcggcctctcaaagtgctgggataacaggcatgagccaccgygcctggcctaaatttttagtaagtattccagatgactgtaaagcaattaatacaaagattatcacttaacattttagcaggactccagatactaggaaac

SEQ ID NO: 499146 - DNA, 201 bp, Homo sapiens
agcatatgatttcagtttcgtaaaagtcttcaacaaaaaacaagaataaagttcttaagacaaggttaggggttacaaaaagttaaattatagtgacaatytctgactaggccaggctcagactcgtttaacaaagagctggtaccatctttttccctgaaatacttatctgctctggtcagacagtgtctttactaccct

SEQ ID NO: 499147 - DNA, 201 bp, Homo sapiens
ttttttctattttagtagagacagggtttcaccgtgttgcccaggctggtctctaactcctgagctcaggcaatccacctgcctcagcctcccaaagtgayaggattataggcatgagccaccacacccagccatcattctgggattttaattagaagaaaaattcaagaatataagttagttttggggaccactgactta

SEQ ID NO: 499148 - DNA, 201 bp, Homo sapiens
tggaaagaatttagttaggcgaagaggaaaagagagcaggaaattcagtaaatatacagaagaaagaagtaacagtaaatgaaagaataactggtatgggrccaggcatggtggctcacacctgtaatcccagcactttggaaggcagaggcaagcagatcacttcgggtcaggagtttgagaccagcctggccaagatgg

SEQ ID NO: 499149 - DNA, 201 bp, Homo sapiens
tatcaggaacatgtagttatccttgaccccttttctctgcccatctgctcttcatctacatatctacatactcgctaacattctttcttttatgtctatgrtgaccaacttagtttaggctcccaaattccccactgcttatttaaatcctgtcatatcaggctgttaatatttttttttttgagacagagtcttgttctg

SEQ ID NO: 499150 - DNA, 201 bp, Homo sapiens
tttaaacctgggagacagaggttgcagtgagccgagatcaagccattgcactccagcctgggcaacaagagtgaaactctgtcttaaaggaaaaaaaaagggggggggggggagacacaagacacagtaaacagtaattccaaaacatgaaacagccaacaggaatacccaggagtatggtaaaggaaggttccagatgga

SEQ ID NO: 499151 - DNA, 201 bp, Homo sapiens
gaggtaggagaatcgcttgaacccgggacacagagattgcagtcagctgagattgcactactgcactccagcctgggcgacagtgcgagactcaaaaaaaggggaaaaaaaggaaagaaagaaaaagtacaggcaacaagatttcctttagaatcagacatgaaatatgagggaaggaagagaagaatgactctaagattt

SEQ ID NO: 499152 - DNA, 201 bp, Homo sapiens
tagaatatcttgtgcttcaaaactgtcttggttctggccctttattactctctcatataaattttaacaacagtctgttttacaaaaagtcattctgggatttttttttttttttttaagagacagagtctcgctctgtcacccaggctggagtgcagtggcacaatctccattcactgcaacctccacctgccaggttct

SEQ ID NO: 499153 - DNA, 201 bp, Homo sapiens
taatatggatacttctttgttcttggtaaggctcagaaaattaccatctatttaagtacgcatggtactagttacatgtcaactgatataataaaaaaggkgaagtggacaatcagtatttcaaacccaatacagggaaatcactagatgtaaataagaacttttaaaagctattcttgagctccactttaaaacaaacat

SEQ ID NO: 499154 - DNA, 201 bp, Homo sapiens
ttactgaaggattacaatcttcatgacaaatagcaccatacttatttttaataattataatcaaaaaaagtaacactttccaccaatataaaagtaatggraatcaaaacagtaaattagaattaaacagtattcaccttaaattcttgtgtaacagggtctataggatattcaatcaaatatggatgattacaacattta

SEQ ID NO: 499155 - DNA, 201 bp, Homo sapiens
ttaaaaagcttggaaataggccggtgcagtggctcatgcctgtaatctcagcactttgggggccaaggtgggtggatcacctgagatcgggagttcgagaycagcctgaccaacatggagaaaccccgtctctactaaaaatacaaaatttgccaggcgtggtggcacatgcctgtaatcctagctactcggaaggctgag

SEQ ID NO: 499156 - DNA, 201 bp, Homo sapiens
aaagattctggattcccttggacttcctatgaagataatcaaaccagaccacttgcaaataaaagcagtttcgataatgccagcactttaggaggatgagscagacagatcacttgagcccaggagtgtgagaccagcttgagcaacatggcaaacccctgtctctacaaaatacacaaaacaaaattagcaggacatagt

SEQ ID NO: 499157 - DNA, 201 bp, Homo sapiens
actttcaagggatactaaaaatcaccacgttaggcttggtgcagtggctcatgcctgtaatcccagtgctttgggaggctggggtgggcacaacacctgaratcaggagttcaagaccagcctggccaacatggcgaaaccctgtctctactaaagatacaaaaattagccaggtgtggtggcaggcgactgtaatactag

SEQ ID NO: 499158 - DNA, 201 bp, Homo sapiens
cctccccaggctcaggtgatcctctcacctcagcctcctgtgtagctgggaccaaagtcatgcaccaccacacctggctatttctgtatttctttttgtasagacaggatttcgccatgttgcccaaactagtcttaaactcctgggcttaagtgatcctctcaccctggcctcccaaagtgctgggataacaggtgtcag

SEQ ID NO: 499159 - DNA, 201 bp, Homo sapiens
acttgaatatattcatttacaagtgttatttaccagtttacagaaaatatctgaattatggaagaagttaaagataatgacatttatgggcaaaatgtcaygtctgagatttgattttaatactctaagaagaaaaatgacaataaaacaagattggatacatgtggctgaatgaattgcacaaggggttcattacattat

SEQ ID NO: 499160 - DNA, 201 bp, Homo sapiens
gtgagccaagatcacaccactgtacttcagcccaggtgacgaagtgaaactgtttataaaaaaaaaaaaaaaaaaagccagatgtggtggctcacgcctgyaatcccagcactttgggaggccaaggcgggcagatcacaaggtcaggagttggagaccagccttaccaacatggtgaaacccagtctctactaaaaatat

SEQ ID NO: 499161 - DNA, 201 bp, Homo sapiens
atcgcttgaacccgggacacagagattgcagtcagctgagattgcactactgcactccagcctgggcgacagtgcgagactcaaaaaaaggggaaaaaaargaaagaaagaaaaagtacaggcaacaagatttcctttagaatcagacatgaaatatgagggaaggaagagaagaatgactctaagatttttggtttaaat

SEQ ID NO: 499162 - DNA, 201 bp, Homo sapiens
atgggtagaagacagggatgctgctaaatgtcctaagtgcacagaacattacctcctaagaaagaattatctggcccaaaatgtcaatattgccaggagtrgaaaagcctattgtaaactaccttgaaacaactgtgattgagggttactaagaatttatttctattgatattatgctatcattctatcaactacccaaga

SEQ ID NO: 499163 - DNA, 201 bp, Homo sapiens
gtaacatgtaccattaaaaattaaaaattcagaatggccgggcgcggtggctcatgctggtaatcccagcacttaatcccagcctgggcaacaagagcaaractccttctcaaaaaaaaaaaaaaaaaaaaattcagaatggaggctgggtgtggtggctcaagcctgtaatgccagcactttgggaggccgaggtgggcg

SEQ ID NO: 499164 - DNA, 201 bp, Homo sapiens
accaacctgggaaacatggcaaaatgccagtctctacaaaaaaatacaaaaaatttagccaggcaggtaaaggctgcagtgagcagtgattgtgccactgyaccacagcctgggtgacagagcgacaccttctctcaaaaaaaaagggaaaaaagagaaattttatatgtcaagtttcatttacagtacatttcaaaacca

SEQ ID NO: 499165 - DNA, 201 bp, Homo sapiens
agtgcagtggcgcaatctcacctcactgcagccttcacctccccaggctcaggtgatcctctcacctcagcctcctgtgtagctgggaccaaagtcatgcrccaccacacctggctatttctgtatttctttttgtagagacaggatttcgccatgttgcccaaactagtcttaaactcctgggcttaagtgatcctctca

SEQ ID NO: 499166 - DNA, 201 bp, Homo sapiens
gctagacccttcctttaattataattaattattaaaaagggagaagaggccgggtacggtggctcacgcctgtaaacccagcactttcggaggccgaggcrggcagatcacaaggtcagaagatcgagaccatcctggctaccatggtgaaaccccgtctctactcaaaaatagaaaaaattagccaagcgtggtggcggg

SEQ ID NO: 499167 - DNA, 201 bp, Homo sapiens
tctaaaattaaaacatgaacagaaaaatatgagtattaaacattcttgtttttcaaggaatactgtccccatatactcctttaccttatcttttgacttcmtatataaataatgccaaatctcaaaaggtgaaaatatcttgagattttcccagaccagaccaaatgataaactcacagttgtccgcagcatttcagaatt

SEQ ID NO: 499168 - DNA, 201 bp, Homo sapiens
gtggctcacacctgtaatcccagcactttgggaggccaaggcgggcagatcacttgaggtcaggagtttaagaccagcctggccaacatggtgaaacctcrtctccactaaaaatacaaaaaaattagccaggtgtggtggcacacgcctgtaatcccagctgctcaggaggctaaggcaggaaaatcgcttgaacctggg

SEQ ID NO: 499169 - DNA, 201 bp, Homo sapiens
agacagaggttgcagtgagccgaaatcacgccactgcatcccagcctgggtgacagaacgagactccgtctcaaaaaaaaaataaataaataaaaggcagkttagcacagaagctaagtagaagctcttaaactaatcctgggttcaaatccgtaattttcagcaaattagagtcagctctcattatctgcagtacttgtg

SEQ ID NO: 499170 - DNA, 201 bp, Homo sapiens
atatcttaatattaatggaaatctgaagttatctatagtaaaacaattccagtgagccctcttatggaattatcaactatgacaattactacaaatgttcwatcaaaaggcagatgatcatttctaaggaatatctatctacctgtatacactgtgaggtaacgtgtaagtgacaaattctataaatattcattgtcttga

SEQ ID NO: 499171 - DNA, 201 bp, Homo sapiens
tctacaaaattaatctactaaaaaatcgaaaatagggctgagcacagtggctcacacctataagcccaacacttgaagaggctaaggcaggaggatcactwgagtccaggtgttcgagaacaacctgggtaaaaaagttaaatggtctcttaaaaaaaaattatgctttttccccaatgcaagttccaattacaatctaaa

SEQ ID NO: 499172 - DNA, 201 bp, Homo sapiens
gaaaatagatcatagatctaaatgtaagagcaaaaactataaaactattaaaagaaaatatcaacaccttgaattaggcaaagagtagttacagatgacayaaaaatcatgagtgaacagaaaaaaatttgttaaaattgaaattcattaaaatttaaaacttttgctcttcagaagatactaagtaagtaagtgaagaga

SEQ ID NO: 499173 - DNA, 201 bp, Homo sapiens
gaaaaaacaaactattcaccaattaaaagaaaaaaattctactaaaaacaacacagatgactctgtgttgaaaaaatatattcaacaaaatagctaaacaraaaaaagactcatcagtgtgacaaaaatcagaatactggatgcttcctagtgatggtaaggggagcataggaattactggaaagggtgaacaaagaaaat

SEQ ID NO: 499174 - DNA, 201 bp, Homo sapiens
gaaatgtatggcttatggagtatgtcccctctccagggtacattcaggatttctcttcctcattgtctgatatcctttcacacagggtctaaattgtgccycttttggcctttatgctgttctattacagattgtgcattacttacatattcctaaggcctattctcttatatttggttctagttaacccactactataaa

SEQ ID NO: 499175 - DNA, 201 bp, Homo sapiens
tcgctaacattctttcttttatgtctatggtgaccaacttagtttaggctcccaaattccccactgcttatttaaatcctgtcatatcaggctgttaatatttttttttttgagacagagtcttgttctgttacccaggctagagtgcagtggcacgatctcggctcactgcaacctcctcctcccgggttcaagcgattc

SEQ ID NO: 499176 - DNA, 201 bp, Homo sapiens
ctactaaaaaatagaaaaaattagccaggcgtagtggcaggcgcctgtagtcccagctactcgggaggctgaggcaggagaatagcgtgaacccgggaggygcagcttgcagtgagccgagattgcaccacggcactccagcctgggcaatagagcaagattctgtctcaaaaaaataaaaataaataaataaaattaaaa

SEQ ID NO: 499177 - DNA, 201 bp, Homo sapiens
cgagatcgtgccactgcactccagcctgggtgacagagtgagactgtctcaaaaaaaaaaaaaaaaaaatgtgtgtgtgtgtgtgtgtgtgtatatatatatatatatatatatatatatatatatatatatatatacttttataatgggtatgtgagagaaaagaaaacaaggaaataaatgatgaggaatctgaaagcc

SEQ ID NO: 499178 - DNA, 201 bp, Homo sapiens
cgtgattaccacaggatgaatctgcaaagtccctttccgtttgtaaatatttcttaccaatttttgacgttcctcctgggttccatgatataacattgtagggatctgaaaaattttatattgatttttatcagacttaagaacaaaatgtaaatattgactatttagaaaatataaatcattctgagggaaaaaatataa

SEQ ID NO: 499179 - DNA, 201 bp, Homo sapiens
ccgggcatggtggctcacgcctgtaatcccagcattttgggaggccaaggcaggcagatcatgaggtcaagtgatcaaaaccatcctggccaaaatggtgacacactgtctctactaaaaatacaaaaattagctgaacatggtggcatgagcctgttgtcccagctacttgggaggctgaggcaggagaatcgcttgaac

SEQ ID NO: 499180 - DNA, 201 bp, Homo sapiens
acatgtataaactttaatatcagaaaaaacgataaagactttgaataaaattgctaaaccacaactgagaagcttttcaggcccatatgactagattaccyttgaaagataatgtttctctaaattaaagataggtaggatggggtaggaattacaggaagcaataaaaatagattagacagcagccatgcaaggatgtaa

SEQ ID NO: 499181 - DNA, 201 bp, Homo sapiens
gctgaggcaggagaatcacttgaacccgggaggcggaggttgcagtgagtcaagatcgcagcactgcattccagcctggcgacagagcgagactctctctmcaaaaaaaaaaaaaacaaaaaaccagggtttcattctcttgcccatgctgcagtgcagtggcgcaatctcacctcactgcagccttcacctccccaggct

SEQ ID NO: 499182 - DNA, 201 bp, Homo sapiens
catgttcaaaaaactcagattctcaactcctaccttgacactgtaactcagtatgtctgcacaggacctggaattcttgtctttcaataaaagcgcccagmgtcacaataaggtagcctgccttgagccaccattcggtaaccagatttgaaataaattcccaaaatttaaaattatttttccacacccaattagcttact

SEQ ID NO: 499183 - DNA, 201 bp, Homo sapiens
ccttgacactgtaactcagtatgtctgcacaggacctggaattcttgtctttcaataaaagcgcccagagtcacaataaggtagcctgccttgagccaccmttcggtaaccagatttgaaataaattcccaaaatttaaaattatttttccacacccaattagcttacttccttcactgatgccaaaacaagtataaatta

SEQ ID NO: 499184 - DNA, 201 bp, Homo sapiens
aagtcacaaactgcaaacaacccaaatgcccatcaataaggggatggatgagaaaattgtaacattcattcaacagaatactagtcaataagaagaaaccrgttactaatatgctcaacaacataaatgagtatcacagacatgttgagtggaaaggaaataataagccatcctataaaaggtgtaaaaagtggcctcctc

SEQ ID NO: 499185 - DNA, 201 bp, Homo sapiens
tgggaagatggcttgagcccagaaattcaagaatgtagtgagctatagttgcaccactgctctccaacctggacaacagcaagaccatgtctcattcaaamaaaaaaattctaggcagagaagggaccacacattcaaaagacaaaaccctccaagaaatcattctaaaaaatccccatgaattaaaagacagattttcag

SEQ ID NO: 499186 - DNA, 201 bp, Homo sapiens
taatcccagctactccggtggctcaggcacaagaattgcttcatcatgggaggcagagattgcagtgaaccaagactgcatcactgccctccagcctgggyaacagagactccatttcaaaaaaaaaaaaaaaaaaaaaaattgcagaaggtaacaagtacagaaaaaacagaaaactctcttcttagccttttggcaaag

SEQ ID NO: 499187 - DNA, 201 bp, Homo sapiens
atggcttgagcccagaaattcaagaatgtagtgagctatagttgcaccactgctctccaacctggacaacagcaagaccatgtctcattcaaacaaaaaarttctaggcagagaagggaccacacattcaaaagacaaaaccctccaagaaatcattctaaaaaatccccatgaattaaaagacagattttcagactgagc

SEQ ID NO: 499188 - DNA, 201 bp, Homo sapiens
atttccaaaacctatactatataaatttaaattagggtattgtgcagattgagtaagtcaaatcagacaaaatatttatacagaaaccaatataattatargagttctacaatttaattcctactacaacaaagcataagaaaacatgtaaaattataattttaacataaggaagcatgtcttacatctggtgtaaatctt

SEQ ID NO: 499189 - DNA, 201 bp, Homo sapiens
gactgagctgattcaagagtaaaacaaaacaaaaataagatacacaacataaagatgggcatggtgtcacatgagtgtagtccacattacttgagtgacayagggggaaagataacttgaaaccaggaattcacaagtctgtgcaacatagcaggagtctctttaaaaatgaaaaaaaaaaagaaaaaaaaaaaagaccca

SEQ ID NO: 499190 - DNA, 201 bp, Homo sapiens
aaacaccagagtagcagcaaatgaaatgactcacagaaatcgataaaaatctagatatataaggaaattcagataacctcctaaattgttttagatgacayagtagatactggttctgatattaacaccaaaaaaagagaaaacaaaagagcaagattcggaagagaggaaaagataaattgtttgctttgtgctaggtat

SEQ ID NO: 499191 - DNA, 201 bp, Homo sapiens
tggtggcacgtgcctgtagtcccaggcgctggactactcagggagctgaggtgaaagaattgcttgaactgggagacggaggttgcagtgagccgagatcrccactgcactccagcctgggccacacagtgaaactctgtcttaaaaaaaaaaaaagaaaagaaaaagaaagaaagaaaaactactatgcccacagatctc

SEQ ID NO: 499192 - DNA, 201 bp, Homo sapiens
ggcaaaggtgtagttttaaatacagatactacaaccttgtttatattgttgaaaattttgaaaagaggaagagatagatattattaattatagtagaacargacaatgggataataagcagctattaaaaactgatttaaatctacatgtagtaaaaggaaaataattttctgataactgtttaaaagactatcttaagga

SEQ ID NO: 499193 - DNA, 201 bp, Homo sapiens
tgaatgaatgcaaaagaggatgggtggatgagaaagtcctcagaactagtgataatgatataaaagaagaataatgtgaacttaggttggcaggcaactayggaaaaccatgtttatttttaataaaggatgacatttccaatcagtaaaatatcataaaagtataaaaatgtactaagtacaatcattagcattatgtta

SEQ ID NO: 499194 - DNA, 201 bp, Homo sapiens
gaactagtgataatgatataaaagaagaataatgtgaacttaggttggcaggcaactatggaaaaccatgtttatttttaataaaggatgacatttccaawcagtaaaatatcataaaagtataaaaatgtactaagtacaatcattagcattatgttataggggaatagtggttataacttttccctgtaagatggcaca

SEQ ID NO: 499195 - DNA, 201 bp, Homo sapiens
actatggaaaaccatgtttatttttaataaaggatgacatttccaatcagtaaaatatcataaaagtataaaaatgtactaagtacaatcattagcattaygttataggggaatagtggttataacttttccctgtaagatggcacattggatggtcacagttggcttgatttacagaggggcaagagtaggtgaccagtt

SEQ ID NO: 499196 - DNA, 201 bp, Homo sapiens
cctggcttctttggacagcctattaaaattctactgttcattcctttaacactgttttgagctttttttatatagttgacatttataaactctagggatargaagtctatataatccttcttttccctgtgaagtgacacttgctctgactctaactgatgcaggccagtgtcttccagaggctggaagggggtttcagcc

SEQ ID NO: 499197 - DNA, 201 bp, Homo sapiens
ccaatcagtaaaatatcataaaagtataaaaatgtactaagtacaatcattagcattatgttataggggaatagtggttataacttttccctgtaagatgrcacattggatggtcacagttggcttgatttacagaggggcaagagtaggtgaccagttgtaccagttgctccagtttcctaggatttgggactctgtaaa

SEQ ID NO: 499198 - DNA, 201 bp, Homo sapiens
tgaccctaaaacactcagaagagtctgtgacactgagttcaaatccacttttctttctggcttttagtagtagctttttagatgtggcttttctttggctyacaggcaaaaagcagaaccaactcgctgtgcctggaagggatgttaaccccgattcagccattactgcaatacacttgagatgaagcccttatgtgcaca

SEQ ID NO: 499199 - DNA, 201 bp, Homo sapiens; identical to SEQ ID NO: 386110

SEQ ID NO: 499200 - DNA, 201 bp, Homo sapiens
tcccctagtgcacaggtgcctcccccagttcctcatgggctgtgtattatggggtcacaatcttcccggacattgcctattggtcgttgggtaggggcttygggtgttttctttagggttgtcctgctgcgttttgttgcagcccacaatgcattgcaatcctagttagctcaggggctcttcaggtatttgacttatgac

SEQ ID NO: 499201 - DNA, 201 bp, Homo sapiens
tgcttggattacaggcatgagccacctgttcggccatcattgtttaaacaaaaaagtttagaggactcccaactaggaactattgcaataatctgggccasatattattctagctgggttgaaacaatgaccaaaataaaaaggaggaagatggggaaaggctgggaggtgtacaaccgacaggacttgcaagtaagcaga

SEQ ID NO: 499202 - DNA, 201 bp, Homo sapiens
tggattacaggcatgagccacctgttcggccatcattgtttaaacaaaaaagtttagaggactcccaactaggaactattgcaataatctgggccagataytattctagctgggttgaaacaatgaccaaaataaaaaggaggaagatggggaaaggctgggaggtgtacaaccgacaggacttgcaagtaagcagatctg

SEQ ID NO: 499203 - DNA, 201 bp, Homo sapiens
aaaggtcagagaaaaccaaagaagactcccaggtctccaggtgatgaggctagacatggtacatggtagtgctggcagacagagtgggagtgcataccacyacacagttggcccacacactctggctgcaaagggccagggaccgtgtggtctccagcttgctgcctgaatttggacaacccactcactctcactgcctgt

SEQ ID NO: 499204 - DNA, 201 bp, Homo sapiens; identical to SEQ ID NO: 498925

SEQ ID NO: 499205 - DNA, 201 bp, Homo sapiens; identical to SEQ ID NO: 498927

SEQ ID NO: 499206 - DNA, 201 bp, Homo sapiens; identical to SEQ ID NO: 498926

SEQ ID NO: 499207 - DNA, 201 bp, Homo sapiens; identical to SEQ ID NO: 498917

SEQ ID NO: 499208 - DNA, 201 bp, Homo sapiens; identical to SEQ ID NO: 498918

SEQ ID NO: 499209 - DNA, 201 bp, Homo sapiens; identical to SEQ ID NO: 498919

SEQ ID NO: 499210 - DNA, 201 bp, Homo sapiens; identical to SEQ ID NO: 498920

SEQ ID NO: 499211 - DNA, 201 bp, Homo sapiens; identical to SEQ ID NO: 498922

SEQ ID NO: 499212 - DNA, 201 bp, Homo sapiens
agaccttcagacataggtatacgtaggtgtccaggtcactaagtaaatagaatgtggcctaagccagtgcttctcacactttgaagttcatactaaccatstgaagactctgttaagttgcagatcctgatctgattaagtctggtgtgggcccagaggttttgtgttgctaaccattccctgatgatgctgatgctagtg

SEQ ID NO: 499213 - DNA, 201 bp, Homo sapiens
atcaatctctacagaggttaaagggcactgaataccatgggaaaactaatgagtgcgtgattctggaagctgagctaaaacaagggctgtcaactttgtcygcatgttagaatcactcagggagcttttaagactcctgaccccacatcacaccccagatcaattagatcagtatctgtattttttgaagctcccaggtga

SEQ ID NO: 499214 - DNA, 201 bp, Homo sapiens
gtgttgctctaatattccagtgtcaccgtcttggttttgagatattcatttagagcttcctcacctagggaagagaaaagcagttgacagaccacattcaraggcagacatgtgatgtcttcagaccttcagacataggtatacgtaggtgtccaggtcactaagtaaatagaatgtggcctaagccagtgcttctcacac

SEQ ID NO: 499215 - DNA, 201 bp, Homo sapiens
agaggttgcaatgagccaagattgcaccactgtactccagtctagaaaacagaatgagactatctcaaaaaataaataaaaagtggttacaaaacaattgsgactagtaagtgagcagtaaccacataaatatgccaaaataaatagctatcttctcctcaagttaaaagctgccatggtgtgaattcatttccacttttt

SEQ ID NO: 499216 - DNA, 201 bp, Homo sapiens
taatgagggaagtgcttgctcttactaggaagtatgagccagttctgtaagctcttgagtgtccagaggtatctacagagccaaaatcctcaggggcaccsattccatgtttcaaagcttcaggctggtttccccaaccagggccctgactacatactggatctccctaggctgagcattcaaatatctttagagctctgt

SEQ ID NO: 499217 - DNA, 201 bp, Homo sapiens
ccaggctggagtgcagtggcaggatcatagttcactgtagcctcaaactcctgggctgaagtgatcctcctgcctcagcctgctgaggtgctgggactgcmagcatgcaccagcatgccagcaaattttttgctgttgttgttcttttagagactgggtctcactatgttgcccaggctaaaaagagacttttttttttaa

SEQ ID NO: 499218 - DNA, 201 bp, Homo sapiens
aaaccactatttattttttagacagggtcttactgtcactcaggctggagtgcagtgacataatcatagcttactgcaaccttgaactcctaggctcaagygatcctcctgcctcagcctcccaagtagctggtactacaggtatggactaccatgcctggttaattttttttttttttttaatttttagtagaggtgagg

SEQ ID NO: 499219 - DNA, 201 bp, Homo sapiens
tctttctgtaatgagggaagtgcttgctcttactaggaagtatgagccagttctgtaagctcttgagtgtccagaggtatctacagagccaaaatcctcaggggcacccattccatgtttcaaagcttcaggctggtttccccaaccagggccctgactacatactggatctccctaggctgagcattcaaatatctttag

SEQ ID NO: 499220 - DNA, 201 bp, Homo sapiens
gttctgtaagctcttgagtgtccagaggtatctacagagccaaaatcctcaggggcacccattccatgtttcaaagcttcaggctggtttccccaaccagsgccctgactacatactggatctccctaggctgagcattcaaatatctttagagctctgtgaccatccaatcccatttctgctcttccactgcaggaaata

SEQ ID NO: 499221 - DNA, 201 bp, Homo sapiens
ttccccaaccagggccctgactacatactggatctccctaggctgagcattcaaatatctttagagctctgtgaccatccaatcccatttctgctcttccrctgcaggaaataaaagtttgttaagctccagagaagcccccggctcccacacttagcctttaactgtttaagtgctctcggtttctcattatccatctgc

SEQ ID NO: 499222 - DNA, 201 bp, Homo sapiens
caacagcctttcaatttataacccagtttcacatagtcttactccttaatcttgtgcttgttcttcaccgaaattagaaagcaaagtagcaaagtttattaacgaatatgaaacaagggatggccaatacaatatgatattttttttttttttctttttttgagacggagtctcactgtgtcgcccaggctgtagcacagt

SEQ ID NO: 499223 - DNA, 201 bp, Homo sapiens
agattgtgtgggagtttagaatatgagatttagtactctgactttatcctgcatgggatgggaagcattgaaaaatacccagtgtttcatgaaaaccaaamttgagttgttgactataaatagtttttttaatactatggttataaaatttaatgcaattgcctaggactcataacctagaagagatgattaaaaaaaagc

SEQ ID NO: 499224 - DNA, 201 bp, Homo sapiens; identical to SEQ ID NO: 130941

SEQ ID NO: 499225 - DNA, 201 bp, Homo sapiens
gtttaagtgctctcggtttctcattatccatctgcaaggcattacttgtcttagtaacagttggccagctctgctttctttgtaggcatcgtattccccayatcttttaaatgcctaaattgcacgagcaagaggatttcccttctctgggatgttttcctaggtcactgctggctaaatcaggactcagatggctgcttt

SEQ ID NO: 499226 - DNA, 201 bp, Homo sapiens
caggaattttggatgaaaaggtaaaaatgttttgtcagcatcagtgaatcgtgataaaaatgagtgatgtttttaatgaaaaacacttgatgaacacttaycaggcaagcatgaaaggagaaattgaacctcaggaaacagaaaaatgaacccccactcaccaaaccatttttgttattaacactttctggggcctctaaa

SEQ ID NO: 499227 - DNA, 201 bp, Homo sapiens
cattgttgtcattgtgtttatgctatttttcccccaaccctatctcatttcactcattcatgttactttcatggcccatgtaggtatgtgggtgagaggargaggttgttggaagaatgattggagtctggtgtcaggaatcccttgcccttcaaagagacagtgtgctgctatctggctgcttccatgagctgcaaagtg

SEQ ID NO: 499228 - DNA, 201 bp, Homo sapiens
ccccatcccaccgtagaaatgcctcagctccctgattcacttgtcctgtgaaacctagtgagggatgtcacttgggagcaatgttgggtaatgcagatatrttatagcccacagtttaccaatgaactcatcttgctgtaggcagttcgtgcaatttctctgggctccacttttctcaatcacaaaatgaggagtattgaa

SEQ ID NO: 499229 - DNA, 201 bp, Homo sapiens
gatgaatgcagagttttagtaaagaagtcagaaatgtattgaatgaaagaaagatccaaatagaaagtctcttggagaccattgatttagttcttcacttktcagaagaagacatgaaagtccagagaggtttgctccaatgccccaaatcacataggcagagttaggagcacagagaaaaccagaattccggtttcagac

SEQ ID NO: 499230 - DNA, 201 bp, Homo sapiens
agaaaaggaattagggcaatttacaacaatgacaacaacatatatatatatacatatatgcacaaagtcatatatgtatgcacaaaatcatatatatatawaaatatgatttttccttcttgttagaatttggtatattctgttacagaggtggctgcatattattgatgggtgaaaagaggtttttattcgttgttcttt

SEQ ID NO: 499231 - DNA, 201 bp, Homo sapiens
tgcacaaagtcatatatgtatgcacaaaatcatatatatataaaaatatgatttttccttcttgttagaatttggtatattctgttacagaggtggctgcrtattattgatgggtgaaaagaggtttttattcgttgttctttcattaccaaatgtatcaactacctcaggaattttggatgaaaaggtaaaaatgttttg

SEQ ID NO: 499232 - DNA, 201 bp, Homo sapiens
atggtttctagttaatctaacatatatattatataacacatatgtcatatatctatatatactagatgaattagagaacatacacatatgtataaatactkataatttccacagttatttcataatatttccttttagttttgtgggttttctaatgtctaaaaatatttttaaaataatatagtaaatgccattacctag

SEQ ID NO: 499233 - DNA, 201 bp, Homo sapiens
atcaatttatatatattcatattcatacatataactattaatatgttatttcacacatatcgtataaatgatagattaattaggaacatgccctctaacartcacatgtccctgtatccacttgcttggttatatgaatttccagctccttccaacaagaggtggtgtctttttccccaccccttgagtctgacctgtcct

SEQ ID NO: 499234 - DNA, 201 bp, Homo sapiens
atctaacatatatattatataacacatatgtcatatatctatatatactagatgaattagagaacatacacatatgtataaatactgataatttccacagktatttcataatatttccttttagttttgtgggttttctaatgtctaaaaatatttttaaaataatatagtaaatgccattacctagattcatcaattgtt

SEQ ID NO: 499235 - DNA, 201 bp, Homo sapiens
aagacacaacactcaccaaccacaagaaagaggcatgaaaaattagtctacatgaaggatagaaacttttgtttgtgaaaacataaccacagagaatatgrcaacacaggtaaaatttgggagatgttatttcaagaatacatttaagtctctaaagaattaatatccagaataaatacatatatatgtatggtttctagt

SEQ ID NO: 499236 - DNA, 201 bp, Homo sapiens
ttatttcacacatatcgtataaatgatagattaattaggaacatgccctctaacaatcacatgtccctgtatccacttgcttggttatatgaatttccagytccttccaacaagaggtggtgtctttttccccaccccttgagtctgacctgtcctgtaacttgcattaggtgatagaatttcccagaagcaatggttggc

SEQ ID NO: 499237 - DNA, 201 bp, Homo sapiens
tatatgtatggtttctagttaatctaacatatatattatataacacatatgtcatatatctatatatactagatgaattagagaacatacacatatgtatwaatactgataatttccacagttatttcataatatttccttttagttttgtgggttttctaatgtctaaaaatatttttaaaataatatagtaaatgccat

SEQ ID NO: 499238 - DNA, 201 bp, Homo sapiens
gtccactcactgccttggggtcatgccctgtgctgaggtgaaccctgggctggatggctggaggataaagaactgcatgggagaggggggcgctcacacaratgccccagggacatcctgaagcagagctgcctcactgccctgaacacacatgagagcccagccaggaacagaaggaatggactgagtttaggctgagcc

SEQ ID NO: 499239 - DNA, 201 bp, Homo sapiens
agaaaacatatatatgcatgtattctggatattaattctttagagacttggatgtattcttaagaatatatgaaatagtatatcaatttatatatattcayattcatacatataactattaatatgttatttcacacatatcgtataaatgatagattaattaggaacatgccctctaacaatcacatgtccctgtatcca

SEQ ID NO: 499240 - DNA, 201 bp, Homo sapiens
taaatgggctttgcttatcaacatcacaatggcaaagaagaaatatactgtacaaaactgcaggaagataaaacatgaaaactttctatgaaaaaaaaaaacacccttgagtttcctgtcgtcttcttttgaaactgtagtgcatatgttaaaacatgtatatcatttacagtattgagtcgtgtgccactgctgtacctg

SEQ ID NO: 499241 - DNA, 201 bp, Homo sapiens
gctaacactagatttcgaggttactaaagaattccagttttccagtctcccacttcaattaccaggtaactataaggcaaaaatatcccaatgctgtgaacttaaggcaatattcatttcctttctacactacttggcatggtaaccatgacaaacttttattttctctttctgatttcctaatgaaatctcattatttgc

SEQ ID NO: 499242 - DNA, 201 bp, Homo sapiens
gtgaagagtcaattttttttagtcaaatattttctcttctcaatgaagagaagactaggacagtgacattttgaagcataccttttatactccttgtggtycttatgacagtctgtgatggtagtaggtaaagtagctaaatccttgattcagagaggggaaaacatgtggaaagaaactgaacgacttatccaagttcac

SEQ ID NO: 499243 - DNA, 201 bp, Homo sapiens
taggatttttcctccacattatattgcactgctctgaggcttgcttatatttttcatacctggatttccagggtggtgacgtgggggagggaagtattcarttcagaaccaccgtgaaccaagatctctggaaacaaactctgtactatttctccttcatctcctattttcataactagtgccaagctcaggactaactgc

SEQ ID NO: 499244 - DNA, 201 bp, Homo sapiens
tgcctgcccacacagaaagtaagctagaacaccactactaatctatatgatatacaccaacatggcttaagacgatttattgcaactgtaaaaaaatgcgcccccccccttttttttccagaaaggaagcgtggattgcattaatcaagctaaagacttttatacttctttacagtctgacacaaaaacagacagtcataa

SEQ ID NO: 499245 - DNA, 201 bp, Homo sapiens
ttttgttgttgtatctctgccaggttttggtttcaggatgatgctggcctcatagaatgagttagggaggagtccctccttctcaattttttgaaatagtwtcagtaggaatgctaccagttcctctttgtacatctggtagaattcagctgtgaatccatctggtcctgggatttttttggttggtaggctatttattac

SEQ ID NO: 499246 - DNA, 201 bp, Homo sapiens
tgtgtaatgcatgtatgtatattcatataaatatatatatatatattcctgggaagccactttcctccctctctccctccttctcctgcttctcctccttrgtcttctcttcttctcctccttagtcttctcttcttctcattctgctttttaccattatttatgtattattttttaatttatttagtaggatcggggaag

SEQ ID NO: 499247 - DNA, 201 bp, Homo sapiens
tacaaacttattttatactctcggttggctctattatctaaagtttttggtagtgtaatcctgctcatcattgtgtttgctgatactcaatcacaggcggkttttttttttcctcaggtgttttataattttgtttgtgagtttagggatttgttcaaacggcttcatctgtgtgacttcaatgaggtttgactgggggtg

SEQ ID NO: 499248 - DNA, 201 bp, Homo sapiens
ctccaatttcaccgcaaacaatgcaaggaccttgtcttacaagtcagtgctgtccagtatttagttataatttggtcagtcatattgtttttatgcagtcttttttttttttttttggactcatggccatggttactagtttctttgttcaccattcctctgttgcatcttgctttgttcttttcgttcaatttcctttta

SEQ ID NO: 499249 - DNA, 201 bp, Homo sapiens
caacagagataaaagaaaacacgccaaccagcagctctgggaaggggctgaccagcctggtaagaataggctgacggtgcctgtggaaggtcacaaaacaytgaccaagaaagcagtgattaactgcccacctgagactgaacacgttttagaagaatgttttgatcattatttcctctgctttcccttaaaaaaccctaa

SEQ ID NO: 499250 - DNA, 201 bp, Homo sapiens
tggtgagaagtctgctgtcagtttattatccctttgatagcactgtgtcttttctttctggttgattttaagatctttccccttttctttgttgacctgcrccggttcccctgtgattcagttttattgattcttgctgtggctcatgcttttagaatacgaggaactatgtctgttttcaaatctgaaaatttccagcca

SEQ ID NO: 499251 - DNA, 201 bp, Homo sapiens
caagaactaaagaatgatatggtgcaaagaaatggatgaaagggatcttacgagctacttagtgcaatcccttcatttttttttttttcagttgccgtagygttgggattgcttgaggctcccggatgttcacaggatgtcatttttggcaaccacagaccactagttacccagcttttttaggtgttgtgtagcaaggag

SEQ ID NO: 499252 - DNA, 201 bp, Homo sapiens
tgcttccacccctggttggtgtgggctctccaaagcctggaggccggaacagctaagtcgcccaaacagcaaagatggtggcccctccctccctccgggarctctgtcccagggagaattcaaatctctgtcagccagagaacaccagtaggggttgctggaggccttggttgaaaagtcccacccagtgaggaggaacag

SEQ ID NO: 499253 - DNA, 201 bp, Homo sapiens
cctccgctttgtctattctgctattagtacttgtgattgcattatgaaattcttgtagtgtgttttttcagttccgtcaggttggttacattcttctctayatgggctattttgtctgtcagctcctgcaatgttttatcatgatttttagcttgcttgcattgggttacaatgtactcttttaactcagtgaagttcatt

SEQ ID NO: 499254 - DNA, 201 bp, Homo sapiens
ctgtaagtctgacaaaaaagaactaccaccaaactctgccagggtctttggttctgatgagctgcaggcttaaggaggtgaggatgcagacatgttctggyctcgtaactaagagttgagctaatccacagctgagctaagtgagtggatttccaatatgcccaagagcaccctggggccagtgatatggatatgttctat

SEQ ID NO: 499255 - DNA, 201 bp, Homo sapiens
aaaatctctggttttgaagggttatttttttattcctgggatatattccggctgacttggagttagttttagataaatgtaagctttctaatggatctgartccacactaacggatatgaaattatcaaggtctttttatttttaatcgcaaacacttcattttatcaaatcttaatcgtctccaatttcaccgcaaacaa

SEQ ID NO: 499256 - DNA, 201 bp, Homo sapiens
ggctcaagagatcctcccacctcagcttcccgagtagctgggactgcaggcactcatgactccacccaactaacttttcttttaattctatttttttgtaraaacggggtcttgctttgctgctcaggctggtttcaaactcctgacctcaagcgatcctcctgccttggcctccaaaagtgctgggattacaggcgtgag

SEQ ID NO: 499257 - DNA, 201 bp, Homo sapiens
atttctcatagatgatatcctgaaatgcgttttccaaattggttccgttttccccatctctttcagggacaccaatcagtcttagattcgctctctttacrtgatcccatatttctcggaggttttgttcattgcttttcattcttttttctctattcttgtctgccagtcttatttcagaaagccagtcttcaagctctg

SEQ ID NO: 499258 - DNA, 201 bp, Homo sapiens
atatatgtatctatcgttatataaatatatatgtatctatcgttatacaaatatatatgtatctatcgttatataaatatatatgtatctatcgttatatmaatatatatgtatctatagttatataaacatatatgtatctatagttatataaatatatatgtatttatagttatataaatatatatgtgtttatagtta

SEQ ID NO: 499259 - DNA, 201 bp, Homo sapiens
aaatgttccagtgaatgagtgaatacaagaactaaagaatgatatggtgcaaagaaatggatgaaagggatcttacgagctacttagtgcaatcccttcatttttttttttttcagttgccgtagtgttgggattgcttgaggctcccggatgttcacaggatgtcatttttggcaaccacagaccactagttacccagct

SEQ ID NO: 499260 - DNA, 201 bp, Homo sapiens
atataaatatatatgtatctatcgttatacaaatatatatgtatctatcgttatataaatatatatgtatctatcgttatatcaatatatatgtatctatmgttatataaacatatatgtatctatagttatataaatatatatgtatttatagttatataaatatatatgtgtttatagttatataaacacatgtatatt

SEQ ID NO: 499261 - DNA, 201 bp, Homo sapiens
tccaaaagtgctgggattacaggcgtgagccacggcacctggctagattttgcttttaagtttgaaatgctttatttagagtttattagccactaactcctttttttttttttttttaaacttttaagttcaggggtacaagtgcaggtttgttacataggtaaacttgtgtcataggggatttgttgcatagattatttc

SEQ ID NO: 499262 - DNA, 201 bp, Homo sapiens
tatgtatctatcgttatacaaatatatatgtatctatcgttatataaatatatatgtatctatcgttatatcaatatatatgtatctatagttatataaayatatatgtatctatagttatataaatatatatgtatttatagttatataaatatatatgtgtttatagttatataaacacatgtatatttttgtatttat

SEQ ID NO: 499263 - DNA, 201 bp, Homo sapiens
tctttgcccatgcctatgccctgaatggcattgcctaagttgtctttcagagttttcatagttgggggttttacatgtcagtctttaatccatcttgagtyaatctttgtatatagtgtaagcaagggagccggttttcatcttctgcacatggctagccagttatcccagcaccatttattgaaccgggaatcctttccc

SEQ ID NO: 499264 - DNA, 201 bp, Homo sapiens
aggctgggcaacataatgagactttgtctctacaaaataataaataaataaataaatagccgggagtggtggtgctcacctgtagtcccagctactggggaaaaaaaaaaattagccaggcatggaggtgcacacctgtagtcctagctactagggaggctgaggcaggaggatcccttgagcccatgagatcgaggctgc

SEQ ID NO: 499265 - DNA, 201 bp, Homo sapiens
ttgctttgggcagtatgcccattttaatactgattcttcctatccatgagcttggaatgtttttccatttttttgtgtgtcatctccgatttctttgagcrgtggtttgtagttctccttgtagagatctttcacctccctagttagctgtattcctaggtattttattctttttgtagcaattgtgaatgggagttcatt

SEQ ID NO: 499266 - DNA, 201 bp, Homo sapiens
ttgagcctatgtgtgtcattgcatgtgagatggttctcttgaagacagcataccattggatcttagttccttatccagcttgctactctgtgtcttttaaytggggcatttagcccatttacaatttaaggttagtattggtatgtttggatttgatcctttcatcatgatgctagctggttattttgcagacttgcttac

SEQ ID NO: 499267 - DNA, 201 bp, Homo sapiens
tatatttatatataaatatgtatatataaatataaatgtatttatacttatataaatacatatatatgtatttataggtatataactacatatatatgtakttatagttatataactacatatatatgtatttttagttatataactacacatatatgtatttatagttacatatatatgtatttatagttatataactac

SEQ ID NO: 499268 - DNA, 201 bp, Homo sapiens
atttagtgcttccttcaggagctcttgtagggcaggtctggtggtaacaaattcccttaacatttgcttgtctgaaaataatcttatttcttcttcgcttrtgaagcttactttggccagatatgaaattctgggttggagtttctttaagaatgttgagtattgacccccaatctcttctggcttgtaggttttccactg

SEQ ID NO: 499269 - DNA, 201 bp, Homo sapiens
gctgtactttgctgggcttcttctccagttcctagtctccttggattttccagtacctggagctatcaccagtgaaggctgtgaaacagcaaagatgtcakcctgcctcttcctctgggagctccggcccagcgaggtacagacctgttgccagcccaaatgcgcctgcaggacaaggctggagaccctggttgggaggtc

SEQ ID NO: 499270 - DNA, 201 bp, Homo sapiens
atgaatatatatgtatttatagttatataaatatatatgaatatatatgtatttatagttatataaatatgtatatgtatttatagttatataaatcaatrtatatgtattgatagttatatcaatatatatgtatttatagttatataaatatatataaatatgtatgtatttatggttatataaatatatgtaaatatg

SEQ ID NO: 499271 - DNA, 201 bp, Homo sapiens
ttgggttacaatgtactcttttaactcagtgaagttcatttctatccatattctgaattctacttatgtcatttcagccatctcagcctcagcccaattcygaacccttgctagagaggtgatgcagtcatttggaggaaagagggcactctggcttcttgagttttcagcattcttgcactgattctttctcatctttgt

SEQ ID NO: 499272 - DNA, 201 bp, Homo sapiens
tatatatgtatctatcattatataaatatatatgtatctatcgttatataaatatatatgtatctatcgttatataaatatatatgtatctatcgttatayaaatatatatgtatctatcgttatataaatatatatgtatctatcgttatatcaatatatatgtatctatagttatataaacatatatgtatctatagtt

SEQ ID NO: 499273 - DNA, 201 bp, Homo sapiens
ttgacccccaatctcttctggcttgtaggttttccactgagacatccactgttagtctgaagggcttccctttgtaggtgacctggcctttctctctagcygcctttaacattttttctttcgtttcaaccttggagaatctgatgattatgtgtgttggggatgttcctttcgtggagtatcttcctggagttctctgga

SEQ ID NO: 499274 - DNA, 201 bp, Homo sapiens
atgggctattttgtctgtcagctcctgcaatgttttatcatgatttttagcttgcttgcattgggttacaatgtactcttttaactcagtgaagttcattyctatccatattctgaattctacttatgtcatttcagccatctcagcctcagcccaattccgaacccttgctagagaggtgatgcagtcatttggaggaaa

SEQ ID NO: 499275 - DNA, 201 bp, Homo sapiens
tttacccacctcagcctcccaaagtgttggaattacaggcatgagccactgctcccggcccactcttattttatagatgaaaaaattgaggcccagaaagrttacgtgatcacaaagccataaacaggacagcaaggggtcaatcctggaagtttgattccagggcccagctataatacatggcattggctctccagccct

SEQ ID NO: 499276 - DNA, 201 bp, Homo sapiens
tccagatgctttattcagattgatataagcatattaaaactgtctcccagattgaggatccccatccttttcagtcaatttaccctcagactatgactttyagcttgctcctttattacacaagcaaacaaagatgaacctttagttccccaaaccattcagtgccccaaaccaggtggaattgttggtattctgaaatgc

SEQ ID NO: 499277 - DNA, 201 bp, Homo sapiens
gatttttcacccttactacagttctattggctattcaaggatatctaggtttaaatcttataagtagttggattttgcttaagaacacccatttgagggcygacactgacaagtgacattttagttaaagcgtatcacccatctggcccaaatcttccatgtaagaagggaaactctcccatctgtagacacatctccgtt

SEQ ID NO: 499278 - DNA, 201 bp, Homo sapiens
gtatcacccatctggcccaaatcttccatgtaagaagggaaactctcccatctgtagacacatctccgtttcatagagctccactttaatctacacggtcmgttttggcaaggctcaaagataatttctgtttctctttaagtactgagtatggtgggaggactagaagtccagcaaaatttacctatttatttagcaaac

SEQ ID NO: 499279 - DNA, 201 bp, Homo sapiens
ttctgtttctctttaagtactgagtatggtgggaggactagaagtccagcaaaatttacctatttatttagcaaacacttccccatggggtttactagatrtcttacgatattaattccacagtaactgtcattctccctattttacagatggagaaaccaaggcacagagcccaactgggacgcagtgaaatcgagattt

SEQ ID NO: 499280 - DNA, 201 bp, Homo sapiens
tcccaggggccccagatgccctgtcaaggacacgtcccagtactctcgtcaagctgtggcaaggacagagccaagatttcaaagtagggctgtctctctcygaagctcaacgtccttccaggacagggcactgtccatcccaagcacctacccacaagtgagggcacagggcctttcccagtgcagtgtcccagggcctct

SEQ ID NO: 499281 - DNA, 201 bp, Homo sapiens
gagacggaaaagccacgttgatactcaccagggaagaacatggagatgctccaggaggagagggagcaaatgtgtgaggccacgatgggcagagaagccamggtgcctggggctgcagaactgcagaactgcaagagggattcagcaggactgaagcagagaggggcagggagggtgggacagcagagagagggctagaga

SEQ ID NO: 499282 - DNA, 201 bp, Homo sapiens
tgagcactctccaccctccaggtgacaggaggctccatcccaggcacattcccggtgaaagggcattttatccagggtgaagaacacgtgctactgtctayagagtgcgtccatgtacatcacctcttctcatcgccacagcatccctttgaggcagccacgtaaggccaaagttcttgtccccaggtgagaggtgaggtg

SEQ ID NO: 499283 - DNA, 201 bp, Homo sapiens
ccctccaggtgacaggaggctccatcccaggcacattcccggtgaaagggcattttatccagggtgaagaacacgtgctactgtctacagagtgcgtccaygtacatcacctcttctcatcgccacagcatccctttgaggcagccacgtaaggccaaagttcttgtccccaggtgagaggtgaggtgagagggctgcaga

SEQ ID NO: 499284 - DNA, 201 bp, Homo sapiens
caggtgacaggaggctccatcccaggcacattcccggtgaaagggcattttatccagggtgaagaacacgtgctactgtctacagagtgcgtccatgtacrtcacctcttctcatcgccacagcatccctttgaggcagccacgtaaggccaaagttcttgtccccaggtgagaggtgaggtgagagggctgcagagctgt

SEQ ID NO: 499285 - DNA, 201 bp, Homo sapiens
ccagatgccctgtcaaggacacgtcccagtactctcgtcaagctgtggcaaggacagagccaagatttcaaagtagggctgtctctctccgaagctcaacrtccttccaggacagggcactgtccatcccaagcacctacccacaagtgagggcacagggcctttcccagtgcagtgtcccagggcctctcaaccagcaga

SEQ ID NO: 499286 - DNA, 201 bp, Homo sapiens
cttgttattattattttttagacagggtctcattcatcccccaggctggaatgcagtcgtggaatcatgactcgctgcaacatcagccttctgggctcaggtgatcctcccatctcaatccccagggtagctggggctacaggcacgtggcaccatgcccagctaatttttgtatttttgtagagatagggttttgccatg

SEQ ID NO: 499287 - DNA, 201 bp, Homo sapiens
ccccagatgccctgtcaaggacacgtcccagtactctcgtcaagctgtggcaaggacagagccaagatttcaaagtagggctgtctctctccgaagctcarcgtccttccaggacagggcactgtccatcccaagcacctacccacaagtgagggcacagggcctttcccagtgcagtgtcccagggcctctcaaccagca

SEQ ID NO: 499288 - DNA, 201 bp, Homo sapiens
tctcctgcctcagcctcctgagtagctggaattcagtgctctctacccattgccgtgtggacgagccatcaggtctcacttaagcccacaatgcagaggasgctcggttaaaattactccagatgctttattcagattgatataagcatattaaaactgtctcccagattgaggatccccatccttttcagtcaatttacc

SEQ ID NO: 499289 - DNA, 201 bp, Homo sapiens
ctttcaataagttgaggttatgacagaaagaatgtcaactcagcaacagtttccttttgatcttctgtatctgccacagcaccaggaacagttgttagaakggaaaagtgaaacatatgttgggacaaaaagcacctattttcaatccaaacaagtcatgtggggtatgtgtaaccagggacacacgtcccaggcactaag

SEQ ID NO: 499290 - DNA, 201 bp, Homo sapiens
gtgtgtttccaccacgtgttgggaggagtgttctcagaaccatgactcagcccagcagccataaaccagtctcccacactaccccagagacttcctggggyacttgcttaaggtggctataaaagtgcttccaactttctcgcctcccacagggagagggaggtcagctccaggcattgaaaaaggctgactgtccttcca

SEQ ID NO: 499291 - DNA, 201 bp, Homo sapiens
tcgtttttttcattttgttttatttttgtttccatgctggtatgggaagatttttagaaattgttccagggtctcagtagtaacccttgcaggcaccgctrgcccaggatctggacaattctagaggcaggaagcacagagacgaagaaggggactcactgcctgaccgcagagaaacgagctgtgccttttgaccaggtg

SEQ ID NO: 499292 - DNA, 201 bp, Homo sapiens
gcaggtgccaccaggcccgactaatttttttttttttttatttttagtagagatggggtttcgccatgttggccaggctgttcttgaactccagacctcargtgatccacacgcctcggcctcccaaagtgctgggattacaggcgtgagccacctcacccagccataaatgtccattttggtttaactgagttgttctag

SEQ ID NO: 499293 - DNA, 201 bp, Homo sapiens
tgcagcctccacctcccaggttcaagccatcctcctgcctcagccttctgagtagctagtattacaggcaggtgccaccaggcccgactaatttttttttwtttttatttttagtagagatggggtttcgccatgttggccaggctgttcttgaactccagacctcaggtgatccacacgcctcggcctcccaaagtgctg

SEQ ID NO: 499294 - DNA, 201 bp, Homo sapiens
ccgcagagggtgactcgggtgagaaaggagctgtgacgtttgtaaaactctaaaatgctcaggaatcagaggtctggggcaagacatagagccaaaaacargagattggttaaaaagctatataaaaaagcttggccaggcacggtggctcacccctgtaatcccagcattttgggaggccaaggcaggtggatcatttga

SEQ ID NO: 499295 - DNA, 201 bp, Homo sapiens
gacttctggttaaacacggcattaacctacaaggacaaaaagaaaggaaacagtgactgataagagatcttaacataattctggaagacaggaagctcacrgaagtaattgcttagtagaggaaacactgaaacctgagtgcccgcagagggtgactcgggtgagaaaggagctgtgacgtttgtaaaactctaaaatgct

SEQ ID NO: 499296 - DNA, 201 bp, Homo sapiens
gatgggatcaaaattgctcatcagctgaccttgaagttgggagattatcctggattatctaagcatgactaacgtgatcacaggatctttaaatgttgaarggaggcagaaggtcaggtcagagagggacctgaagaggctacactgctggctttgagaacagaaaggggcatgcctcaaggatgcaggtggcctctcgaa

SEQ ID NO: 499297 - DNA, 201 bp, Homo sapiens
cgtctcgctctgtcacccaggctggagtgcagtggcgcaatctcggctcactgcaacctctgccttgcaggttcaagtgattctcctgcctcagcctcccragtagctgggattacaggtgcatgccatcacacctggctaattgttgtatttttagtagaggtggagtttcaccatgttggccaggctggtctcgagcat

SEQ ID NO: 499298 - DNA, 201 bp, Homo sapiens
tttctttctttcttttttgatggcgtctcgctctgtcacccaggctggagtgcagtggcgcaatctcggctcactgcaacctctgccttgcaggttcaagygattctcctgcctcagcctcccgagtagctgggattacaggtgcatgccatcacacctggctaattgttgtatttttagtagaggtggagtttcaccatg

SEQ ID NO: 499299 - DNA, 201 bp, Homo sapiens
tgagtgttgaagggtgagcaggagtcaggctgccaggctgccgggagcgggggtcccagggagaggaaccacgggcaaaggaatgagaaagcatccgctargagtgagtgtgcttttgccaaaggagggcagctgtcacagaaatgaggttggaaggtggctctcaggttaaatttggaaggatttggaaaagctatccac

SEQ ID NO: 499300 - DNA, 201 bp, Homo sapiens
caccctcatgcttcccatgccccttccatgactggcagagaaggctccagtattaacacagcacttttaaggcacttgatcctgtcagaacagaccactgmagccccctgaccaaaaggctgggtggtaactaaggctcaaacaggtgactccctcgcagataggtcctgatgggagtaggcaaactcaggacttctctgg

SEQ ID NO: 499301 - DNA, 201 bp, Homo sapiens
cgcccagccttctgctccaacagttcttaaaacttctttgaaaatgattctcctcgcctttgtggcctttccgagcaaacatcccttacagcaaacacaaycctcttcaagctttccaaacaccctcctcacccgcttccgcatccaatacctgccaggaagttccgagtgaagtgtaaggttcaggacagtaatgcaatg

SEQ ID NO: 499302 - DNA, 201 bp, Homo sapiens
agctgagtgttgaagggtgagcaggagtcaggctgccaggctgccgggagcgggggtcccagggagaggaaccacgggcaaaggaatgagaaagcatccgmtaagagtgagtgtgcttttgccaaaggagggcagctgtcacagaaatgaggttggaaggtggctctcaggttaaatttggaaggatttggaaaagctatc

SEQ ID NO: 499303 - DNA, 201 bp, Homo sapiens
ggaggggacacagagctgagtgttgaagggtgagcaggagtcaggctgccaggctgccgggagcgggggtcccagggagaggaaccacgggcaaaggaatragaaagcatccgctaagagtgagtgtgcttttgccaaaggagggcagctgtcacagaaatgaggttggaaggtggctctcaggttaaatttggaaggatt

SEQ ID NO: 499304 - DNA, 201 bp, Homo sapiens
ctggggaaactcggataaaggtatgagggggaagacaggatgtgcggcgaggagcagccagcctcctgcagccgatgatcctatgggcagagggaaaacaytcctggaggggagaggagacagggactaaacaatggcccttgaggtgccaaggatgctgatttttttaggccagagccactccaaaaggagacattggaa

SEQ ID NO: 499305 - DNA, 201 bp, Homo sapiens
ttggaacacaacccagcccagcccaagacagatgccattaattgaaaggtgggggctgggcacagtggctcatgcctgtaatcccagcattttgggaggcygagacgggcagatcacctgaggtcagcagttcaagaacagcctggccaacttggtgatgttgctgctgttgctggtctgtagaccatagttagagtagca

SEQ ID NO: 499306 - DNA, 201 bp, Homo sapiens
acccagctcagtctcgtgacaacgaacagacccaagacactgaaatggtaccatggctccggggactcgggggccagagaaagaccagaaaatcatcagasagccattagcaaaaaaggacaattgagctttcagcatatttgagaaacaggatggaaccaggtcaggcttcattaagggcttcctgttcccccaaggctg

SEQ ID NO: 499307 - DNA, 201 bp, Homo sapiens
aacacaacccagcccagcccaagacagatgccattaattgaaaggtgggggctgggcacagtggctcatgcctgtaatcccagcattttgggaggccgagrcgggcagatcacctgaggtcagcagttcaagaacagcctggccaacttggtgatgttgctgctgttgctggtctgtagaccatagttagagtagcaaagg

SEQ ID NO: 499308 - DNA, 201 bp, Homo sapiens
agccagggaccctggcagcggacaactgcactcaccggaaccatcgggaatggccctgacgaaggtgggcaacatcttcactgcagccgtggggttggtgycctttgccaggcccttctccatctcagcccggaaccgcctcatgatgtccaaaagggtgtcatcggagagccgcatgtgatacaggaacctgtccacctg

SEQ ID NO: 499309 - DNA, 201 bp, Homo sapiens
cctcgcagataggtcctgatgggagtaggcaaactcaggacttctctggaagctgcatacatttctgaaacggacaccataaggaattaggagagttttgyttgttttttgtcggtaatcatgaaattataccaccagctcacaagagctaggaggacttgggacaagattttagagatgttaaagcacgccatccacatg

SEQ ID NO: 499310 - DNA, 201 bp, Homo sapiens
tggaaattctattcctgttactaaagaaaacagctcttgaattctgccctgtattctttttaatggtaagtccaaagttaaatcgtcataacataaatcartgtgacctgctggtattccacttgctgcaaaagaatcagaaactgtgtgggagagcaaacttccataataagaaaaccaatgtagagacttccaaacgct

SEQ ID NO: 499311 - DNA, 201 bp, Homo sapiens
ggaacagttgggaattttatggaaattctattcctgttactaaagaaaacagctcttgaattctgccctgtattctttttaatggtaagtccaaagttaartcgtcataacataaatcaatgtgacctgctggtattccacttgctgcaaaagaatcagaaactgtgtgggagagcaaacttccataataagaaaaccaat

SEQ ID NO: 499312 - DNA, 201 bp, Homo sapiens
cccccaccccacccctttggtccctccctctggcacacacttgattgtctaataggaggctctggatggtagctgaggtttagtggagggggaagcagggwattgatgggttgcttgactacttgagaattgggtgccaccaaatctcattgctaagcaaccctctcaagccggggctctgccaagcccactcagccgagg

SEQ ID NO: 499313 - DNA, 201 bp, Homo sapiens
tttatatgctttcaaatacatgaacaaacagatctgccccaacagttctttttttttagatgaagtctcactcttgtcccctaggctggagtgcaatggcrcgatctcggctcactgcaacctccaccacctgggttcaagcgattctcctgcctcagcctcccgagtagatgggattacaggtgcccgccaccacaccca

SEQ ID NO: 499314 - DNA, 201 bp, Homo sapiens
atcctcattccatcctaaatacttggtgaccttggctaagtcctcctgctaggaggacttctgtcatctgcactttgagagatgctttttgcccagggccrtgacagccagccggtgtggccagagtagcagactgggctcattttagctgcctggaaagaaccctggttccctcctgttgacccttggcaacctttaacc

SEQ ID NO: 499315 - DNA, 201 bp, Homo sapiens
gtgctgggattataggtatgagccaccatccttggcctttttttttcttttctttcctttttttttcagacagggtctcactctgtcacccaggctggagygcagtagcgcagtctcccgggctcaagccatcctgccaccgcagcctcccgagtagttgggactgtaggcacacaccaccatgaccggctaatttttaca

SEQ ID NO: 499316 - DNA, 201 bp, Homo sapiens
ttcaagggattctcctgcctcagccttctgagtagttgggattacaggcgcactccaccacgcccagctaatttttaaatttttagtagagacggggtttyaccatgttggccagggtggtctcaacctcctgacctcaggtgatccacccaccttggcctcccaaagtgctgggattataggtatgagccaccatccttg

SEQ ID NO: 499317 - DNA, 201 bp, Homo sapiens
aagttgggcactaaacaaagccaactttcaaccggtggagctgctctgcaaatttccagtcccaggcttttctctttagttttttatgccagtggcataaytctgtgaccccctgctcctcagaagcactgaactaactaaaactaaacattgtcctggtcaatgggatttcaagaatgttggggcagattcttccatttg

SEQ ID NO: 499318 - DNA, 201 bp, Homo sapiens
gccactgatttacccatacaggcttttctgttttcccagttaatggaatgggttttggaggctctacagtggccactcctaaaaaggataccctatttcttttttttttttttttttggatttttttagcctcaattgggactttaatgccttctccatttttccctagtcctttaccagagagatatcccattttagtca

SEQ ID NO: 499319 - DNA, 201 bp, Homo sapiens
cgcctcccaccatagggcggtttttctctcatctcagaactgaacaaatgtacaatcgggatttataccgagacttttagttcccaggagcaggcaggagrcagtggccttcctctatctcaactgcaagaggccttccttttttactaacccaccgcagcacagaccctttatgggtgtcgggctgggggacagtcaggt

SEQ ID NO: 499320 - DNA, 201 bp, Homo sapiens
ggccactgatttacccatacaggcttttctgttttcccagttaatggaatgggttttggaggctctacagtggccactcctaaaaaggataccctatttcttttttttttttttttttggatttttttagcctcaattgggactttaatgccttctccatttttccctagtcctttaccagagagatatcccattttagtc

SEQ ID NO: 499321 - DNA, 201 bp, Homo sapiens; identical to SEQ ID NO: 250971

SEQ ID NO: 499322 - DNA, 201 bp, Homo sapiens
ccgcccgggctttactgaagcggagtctagcatgtgcggctgctccacagcggtgtgggtggcggcggctcctctgcagcagcctcggcagtaggggtcasggtggccaagcccaccgtggagctcatctgagagttgtaaggtacgggactgcctcggtctttgggacgccccgtctggtagcatcccagatccagcacg

SEQ ID NO: 499323 - DNA, 201 bp, Homo sapiens
ctaataattcagttcaagggaaggtactatgactggacatgcacgtaagccagatttatgtttctctccacccaaacatctcggtggagtaaagaataacraggcagcattgctgcaaacatgtctcgcctcccaccatagggcggtttttctctcatctcagaactgaacaaatgtacaatcgggatttataccgagact

SEQ ID NO: 499324 - DNA, 201 bp, Homo sapiens
agcagtggttctcccagcacggagttcgtgctccgataacggacagactgcctccccaagtgggtccctgacccccatgtagcttgactgaaaaacaccgmccagtaggggcggagagacacctcatacaggtgggtgcccctgtggaacaaagcttccagaagaaggatcaggcagcaatatttgctgttctgcagcctc

SEQ ID NO: 499325 - DNA, 201 bp, Homo sapiens; identical to SEQ ID NO: 250981

SEQ ID NO: 499326 - DNA, 201 bp, Homo sapiens
gggaagctctaactgggcggaacccaccgcagctcagcaaggcctactgcctctccagattccacctcaggggccagggcatatctgagcaaaaggcagcrgacagcttctgcagacttcagtgtccttgcctgacatctctaaagacagcagtggttctcccagcacggagttcgtgctccgataacggacagactgcct

SEQ ID NO: 499327 - DNA, 201 bp, Homo sapiens
ttgattattatcgtcattatttcagtaaaaaggaatgtagtaggagggcagggtgataataaggagaaggtcagcaacaaacgtgagcaatagaatctaahaattcagttcaagggaaggtactatgactggacatgcacgtaagccagatttatgtttctctccacccaaacatctcggtggagtaaagaataacgaggc

SEQ ID NO: 499328 - DNA, 201 bp, Homo sapiens
aacaaagctgcagggaagctctaactgggcggaacccaccgcagctcagcaaggcctactgcctctccagattccacctcaggggccagggcatatctgarcaaaaggcagcagacagcttctgcagacttcagtgtccttgcctgacatctctaaagacagcagtggttctcccagcacggagttcgtgctccgataacg

SEQ ID NO: 499329 - DNA, 201 bp, Homo sapiens
caggtgggacgagagactgagaaagagaaataagacacagagacaaagtatagagaaacaacagtgagcccaggggaccggcgctcagcataccaaggacytgcaccagcaccggtctctgagttccctcagtttttattgattattatcgtcattatttcagtaaaaaggaatgtagtaggagggcagggtgataataag

SEQ ID NO: 499330 - DNA, 201 bp, Homo sapiens
gcagcccctgcatctcagtcctgacatcgctgtccctggagcatcctccgctggagctggagcttgacaggtagggtggagagggccgtggggggggtgcsgaaactgcatcaattaacggggccgtgggggagggaagtcctccattgctaaggcttcagtaggcgttctatgatcacagtgtaaacaaagctgcaggga

SEQ ID NO: 499331 - DNA, 201 bp, Homo sapiens
gtcttttaaatctaaagttccctgttctggaaaccatgggcagaattgttctattgtttgaaatagcataattagattctctgtagaagcttaaactcccygtcttaagagaattttaatgaagctgagataagaggcatatttacttccagtttgccccattgttaccctggattcctccaagtgcacaagcttaccgca

SEQ ID NO: 499332 - DNA, 201 bp, Homo sapiens
agtgctccaatttggacctgtttctggcaattggtctgcatctatattaacaacaggattagtagcctgatttttccatacctgttcttgtactccgtcartccaccaggttttaaattgtagatactgagagggtgaaagagaagatttagccaaaatttcccaatcataaggaataagtctattcccattagcaatgga

SEQ ID NO: 499333 - DNA, 201 bp, Homo sapiens
catgtctggagttgttcgttcctcccatccggagttgttcattcctcccactgggttcgtggcctcactggcctcaggagtgaagctgcagaccttcacgrtgagtgttacagctcataaaggccgtgtggacccaaagagtgaggggcagcaagatttattgcaaagagcgaaagaacaaagcttccacagtgtggaagg

SEQ ID NO: 499334 - DNA, 201 bp, Homo sapiens
aaaaagaaattaaaaagagttggagcatagaagaaagaaaagaaatgcaatttgaagggcagtatgtgcagtgtaatctcatttgtggaaacaatttttamaagaaaaatgcatgtaaatgtataggaaacttctggaaagatacacaaagccaagagctgtatgggaagaaggtaaaagaaccatagggaagagttacct

SEQ ID NO: 499335 - DNA, 201 bp, Homo sapiens
atgggtgcggtaaaccaccatggcacgtttatacctatataacaaacctgcaagttctgcacatgtatctcagaacttaaagtataataatttaaaaaaakaaaaaatgtaaaaaaaagaaattaaaaagagttggagcatagaagaaagaaaagaaatgcaatttgaagggcagtatgtgcagtgtaatctcatttgtgg

SEQ ID NO: 499336 - DNA, 201 bp, Homo sapiens
acaaatccattcactgttttcttttctgggttcttttttaagtaaataattggcttacatttaaaatttaaatatttcctattgccatctggatttctagmttctgtttaaataccccaagggctggcagtgctgagccagcattctcaatgacaaacatgagtggaactgggtgtgcctcagatctgcaagttgcagttc

SEQ ID NO: 499337 - DNA, 201 bp, Homo sapiens
cctaaaaccataaaaaccctagaagaaaacctaggccataccattcaggacacgggtatgggcaaagacttcataactaaaacaccaaaagcaatggcaaygaagtccaaatagacaaattggacctgattaaactaaagagcttcagcacagcagaagagactatcgtcagagtgaacaggcaacccacagaatggaaga

SEQ ID NO: 499338 - DNA, 201 bp, Homo sapiens
gcagccataaaaaaggatgagttcgtgtcctttgcagggacatggatgaagctggaaatcatcactttcagcaaaatatcacaaggacagaaaaccaaacrctgcatcttctcactcataagtggaagtggaacaaggagaacacatggaaacagagaggggatcatcacacaccagggtctgttgggggctggggggctg

SEQ ID NO: 499339 - DNA, 201 bp, Homo sapiens
tcatgggtgtcgggctgggggacggtcagggctctcccatcccacgtggccatatttcagactatcacatggggagaaaccttggacagtaaccagcgttscagggcagaggtccctgcggctttccgcagtgcattgtgcccctgatttattgagactgaagaatggtgatgacttttaccaagcatactgcctgtaaac

SEQ ID NO: 499340 - DNA, 201 bp, Homo sapiens
acagacccttcatgggtgtcgggctgggggacggtcagggctctcccatcccacgtggccatatttcagactatcacatggggagaaaccttggacagtamccagcgttgcagggcagaggtccctgcggctttccgcagtgcattgtgcccctgatttattgagactgaagaatggtgatgacttttaccaagcatactg

SEQ ID NO: 499341 - DNA, 201 bp, Homo sapiens
gtgttttataccaagacactcagttcccaggggcaggcaggagacagtggccttcctctatctcaactgcaagaggccttcctcttttattaatcctcctcagcacagacccttcatgggtgtcgggctgggggacggtcagggctctcccatcccacgtggccatatttcagactatcacatggggagaaaccttggaca

SEQ ID NO: 499342 - DNA, 201 bp, Homo sapiens
caggaaacaacagatgctggagaggatgtggagaaataggaacacttttacactgttggtggtagtgtaaattagttcaaccgttgtggaagacagtgtgrccattcctcaaagacctataacctgaaacaccatttgacccagcaatcccattactgggtatatatccaaaggattataaatcattctactataaagaca

SEQ ID NO: 499343 - DNA, 201 bp, Homo sapiens
cgtgttttataccaagacactcagttcccaggggcaggcaggagacagtggccttcctctatctcaactgcaagaggccttcctcttttattaatcctcctcagcacagacccttcatgggtgtcgggctgggggacggtcagggctctcccatcccacgtggccatatttcagactatcacatggggagaaaccttggac

SEQ ID NO: 499344 - DNA, 201 bp, Homo sapiens
ctataaagacacatacacacatatgtttattgcagcactgttcacaatagcaaaaacttggaaccaacccaaatgcccatcaatgatagactggataaagraaatgtggcacatgtataccatggaatactatgcagccataaaaaaggatgagttcgtgtcctttgcagggacatggatgaagctggaaatcatcacttt

SEQ ID NO: 499345 - DNA, 201 bp, Homo sapiens
tgtaggccagatttatgcttctctccacccaaacatctcagtggagtaaagaataacaaggcagcattgctgcaaacttgtctcacctcctgccacagggyggttgttctcctaactcagaattgaacaaatgtacaatcgtgttttataccaagacactcagttcccaggggcaggcaggagacagtggccttcctctat

SEQ ID NO: 499346 - DNA, 201 bp, Homo sapiens; identical to SEQ ID NO: 250994

SEQ ID NO: 499347 - DNA, 201 bp, Homo sapiens
ggccggagaaagcagcccaagttggagagtccccatgggttgaattactgcattgatggctctcaaatcagttaggatgcaccatctgcctgattttttcygaattacaaacgcaggagaatgccaaggtgaaaatgaaggctcaatgtttcccttttctaattgttcctttgccactaagtgtaaggcctccagtttttg

SEQ ID NO: 499348 - DNA, 201 bp, Homo sapiens
atgggataaatgccccaattaaaagacactgactggcaaattggataaagaatcaagacccatatggtgtgctgtattcaggagacccaatctcacgtgcraagacacacataggctcaaaatgaaggtgtgtctggaattggtgggttcttggtctcactgacttcaagaatgaagccacggaccctcgcagtgagtgtt

SEQ ID NO: 499349 - DNA, 201 bp, Homo sapiens
tgtaaatgggataaatgccccaattaaaagacactgactggcaaattggataaagaatcaagacccatatggtgtgctgtattcaggagacccaatctcaygtgcaaagacacacataggctcaaaatgaaggtgtgtctggaattggtgggttcttggtctcactgacttcaagaatgaagccacggaccctcgcagtga

SEQ ID NO: 499350 - DNA, 201 bp, Homo sapiens
aatttttaaaagaaaaatgcatgtaaatgtataggaaacttctggaaagatacacaaagccaagagctgtatgggaagaaggtaaaagaaccatagggaasagttaccttttacttttcacataactttctttccctttttaaaataataagcatgttttatttttataatttaatgaacagatgtgttgatttgaaaaac

SEQ ID NO: 499351 - DNA, 201 bp, Homo sapiens
accctttatgggtgtcaggctgggggacggtcaggtctttctcatcccatgaggccatatttcagactatcacatggggagaaaccttggacaataccccrctttcaagggcagaggtccctgtagctttccacagtacactgtgccactgagcccacacccacccagaactagcgctggcctgcaagcactgtgcacagc

SEQ ID NO: 499352 - DNA, 201 bp, Homo sapiens
cttcaatgtaaatgggataaatgccccaattaaaagacactgactggcaaattggataaagaatcaagacccatatggtgtgctgtattcaggagacccaatctcacgtgcaaagacacacataggctcaaaatgaaggtgtgtctggaattggtgggttcttggtctcactgacttcaagaatgaagccacggaccctcg

SEQ ID NO: 499353 - DNA, 201 bp, Homo sapiens
caactgcaagatgctttcctcttttactaatccacctcagcacagaccctttatgggtgtcaggctgggggacggtcaggtctttctcatcccatgaggccatatttcagactatcacatggggagaaaccttggacaataccccgctttcaagggcagaggtccctgtagctttccacagtacactgtgccactgagccc

SEQ ID NO: 499354 - DNA, 201 bp, Homo sapiens
gggacagtcaggtctttctcatcccaggaggccatatttcagactatcacatggggagaaaccttggacaataccctgctttcaagggcagaggtccctgyggctttctgcagtgcactgtgcccctggtttattgagactagagaatggcgatgacttttaccaagtatactgcttgtaaacattttgttaacaaggcac

SEQ ID NO: 499355 - DNA, 201 bp, Homo sapiens; identical to SEQ ID NO: 250998

SEQ ID NO: 499356 - DNA, 201 bp, Homo sapiens
gtaaaaaggaatgtagtaggagggcagggtgattataaggagaaggtcagcaacaatcatgtgaggaatagaatctacgtcataattaagttcaagggaakgtactatgactggacgtgcatgtaagccagatttatgtttctctccacccaaacatctcagtggagtaaagaataacaaggcagcattgctgcaaacatg

SEQ ID NO: 499357 - DNA, 201 bp, Homo sapiens; identical to SEQ ID NO: 251000

SEQ ID NO: 499358 - DNA, 201 bp, Homo sapiens
tattgtcattatttcagtaaaaaggaatgtagtaggagggcagggtgattataaggagaaggtcagcaacaatcatgtgaggaatagaatctacgtcatamttaagttcaagggaaggtactatgactggacgtgcatgtaagccagatttatgtttctctccacccaaacatctcagtggagtaaagaataacaaggcag

SEQ ID NO: 499359 - DNA, 201 bp, Homo sapiens; identical to SEQ ID NO: 251005

SEQ ID NO: 499360 - DNA, 201 bp, Homo sapiens
aggggaacatcacacaccagggcctgttgggtttatagggggctggggaagggatagcattaggagaaatacttaatatagatgacgtgttgatgggtgcrgtaaaccaccatggcacgtttatacctatataacaaacctgcaagttctgcacatgtatctcagaacttaaagtataataatttaaaaaaagaaaaaatg

SEQ ID NO: 499361 - DNA, 201 bp, Homo sapiens
acatggacacagggaggggaacatcacacaccagggcctgttgggtttatagggggctggggaagggatagcattaggagaaatacttaatatagatgacrtgttgatgggtgcggtaaaccaccatggcacgtttatacctatataacaaacctgcaagttctgcacatgtatctcagaacttaaagtataataatttaa

SEQ ID NO: 499362 - DNA, 201 bp, Homo sapiens
actatcacatggggagaaaccttggacagtaaccagcgttgcagggcagaggtccctgcggctttccgcagtgcattgtgcccctgatttattgagactgragaatggtgatgacttttaccaagcatactgcctgtaaacattttgttaacaaggcacatcctgcacagccctagatcccttaaaccttggttccataaa

SEQ ID NO: 499363 - DNA, 201 bp, Homo sapiens
tcgtgttttataccaagacactcagttcccaggggcaggcaggagacagtggccttcctctatctcaactgcaagaggccttcctcttttattaatcctcctcagcacagacccttcatgggtgtcgggctgggggacggtcagggctctcccatcccacgtggccatatttcagactatcacatggggagaaaccttgga

SEQ ID NO: 499364 - DNA, 201 bp, Homo sapiens
aaggaaaaacacaaacaaccccatcaaaaagtgggctaaggatgtgaacagacacttctcaaaagaaaacatttatgcagccaacaaacatgaaaaaaagytcatcatcactgctcattagagacatgcaaatcaaaaccacaatgagataccatcccacaccagttagaatggcaatcattaaaatgtcaggaaacaaca

SEQ ID NO: 499365 - DNA, 201 bp, Homo sapiens
aaggtactatgcctggatgtgcatgtaggccagatttatgcttctctccacccaaacatctcagtggagtaaagaataacaaggcagcattgctgcaaacwtgtctcacctcctgccacagggtggttgttctcctaactcagaattgaacaaatgtacaatcgtgttttataccaagacactcagttcccaggggcaggc

SEQ ID NO: 499366 - DNA, 201 bp, Homo sapiens
gaacaggcaacccacagaatggaagaaaattcttgcaatctatccatctgacaaggggctaatatccaaaatctacaaagaacttaaacaaatttacaagraaaaacacaaacaaccccatcaaaaagtgggctaaggatgtgaacagacacttctcaaaagaaaacatttatgcagccaacaaacatgaaaaaaagttca

SEQ ID NO: 499367 - DNA, 201 bp, Homo sapiens
caaagaaaagcagggattgcaatcctggtctctgataaaacagacattaaaccaacaaagataaaaggagacaaagaaggccatcacataatggtaaaggratcagttcaacaggaagagctaactatcctaaatatatatgcacccaatacaggagaacccagattcataaagcaagttcttagagacctacaaagaggc

SEQ ID NO: 499368 - DNA, 201 bp, Homo sapiens
gtagagcatacttgtcacatttgaaggcattcagaaaaataataaccttaaaacattctaaacatgttgcaatcaaagagaataccccttgaccactgcaygaattggagttcaaagatcatctctcttttgcctaggctgtagactagttatttaacctctctcagacttggtttcctcttctggaacagggtatatcaa

SEQ ID NO: 499369 - DNA, 201 bp, Homo sapiens
gtctgacacaatggggatcagtagagcatacttgtcacatttgaaggcattcagaaaaataataaccttaaaacattctaaacatgttgcaatcaaagagrataccccttgaccactgcatgaattggagttcaaagatcatctctcttttgcctaggctgtagactagttatttaacctctctcagacttggtttcctct

SEQ ID NO: 499370 - DNA, 201 bp, Homo sapiens
ataatgacatcaatgggcaagccctgcccacaaagagccaacataataataagaggcatagacaaataagtcagcagatagaaaggaaattgcatactgtkatccatgctgtgaagaaaataaataaggaaacagatccgggagacgacttgaaacaggtgttcagtgcagacctctctaagaaggcagcatttgatctaa

SEQ ID NO: 499371 - DNA, 201 bp, Homo sapiens
tccctgacacctaatgagtgctcaatatggttagttaatcaccaaattagatcctttgcctttagaaaagctgccatggtcaaatgtgtgttgatcttatwtttcgtaaatatttaagaaatttgttcagtaactagcttaacttttaatatttatcttgagtctcttctaaatatgtttttactgtataataaaagcaat

SEQ ID NO: 499372 - DNA, 201 bp, Homo sapiens
ctctctccacgtgaggaaaacttctatcctgccttctcctaatacactttcctgttttttttttcctgcacatttcttaaaaatcccacataaggcaaaakccaagacaatatccatcaacacctccacccccaccgcatgtccatggagagcttcaagtcatcctgccgctggtacaaacacggcagaggcctctttgta

SEQ ID NO: 499373 - DNA, 201 bp, Homo sapiens
cagaggcctctttgtaaagaagtggtaggtagaattcaggttagcaccagaatctgaaaactccagctcctttgactggggccaggctggtaatataaatkttagatcaggctgggtctgacacaatggggatcagtagagcatacttgtcacatttgaaggcattcagaaaaataataaccttaaaacattctaaacatg

SEQ ID NO: 499374 - DNA, 201 bp, Homo sapiens
tgccgctggtacaaacacggcagaggcctctttgtaaagaagtggtaggtagaattcaggttagcaccagaatctgaaaactccagctcctttgactgggrccaggctggtaatataaattttagatcaggctgggtctgacacaatggggatcagtagagcatacttgtcacatttgaaggcattcagaaaaataataac

SEQ ID NO: 499375 - DNA, 201 bp, Homo sapiens
gctcacacctgtaatcccagcactttggaaggccaaagcgagtggatcacttgaggccaggagttcaagaccagcctggccaacatggggaaaccccgtckctactgaaaatacaaaattagccacacctggtggcacacgcctgtaatcccagctacttgggaagctgaggcaggagaatcgcaggcaggagaatcactg

SEQ ID NO: 499376 - DNA, 201 bp, Homo sapiens
ttttttcctgcacatttcttaaaaatcccacataaggcaaaagccaagacaatatccatcaacacctccacccccaccgcatgtccatggagagcttcaastcatcctgccgctggtacaaacacggcagaggcctctttgtaaagaagtggtaggtagaattcaggttagcaccagaatctgaaaactccagctcctttg

SEQ ID NO: 499377 - DNA, 201 bp, Homo sapiens; identical to SEQ ID NO: 225355

SEQ ID NO: 499378 - DNA, 201 bp, Homo sapiens
ccatgacgtaaacggcggcactggagcaagctggggcggggggtgggtaaaccctcactgccagcaggccccaagtggcttgtaaatcattctcctgtgaygtctgtgggcctgcgtggggacaacaggggcacatgacatctacctgggccctgaccaataaaccctcagacccaggacccaggaccctgctgtagttgg

SEQ ID NO: 499379 - DNA, 201 bp, Homo sapiens
tcctgatacccaactgctcgagttcctggatgtgcagaagtaagccttcccttcccccgtgccgtgttagccaggactcaaactcgactcagactgtcttyagccaaaaggtggggctggggttgataggttcatgtacccaccaagttctaagcttatgcattcaggtgtggctggatctaggtgttcaactgaatgaca

SEQ ID NO: 499380 - DNA, 201 bp, Homo sapiens
ccacgacctggctcatacaagcccctgggccgcccttacctccctggagcttctggagctctgccttctccaggaatccttccatcctccccatgacctargctgatctccttccccttttcaggacccagatctgccgggggaaacagtggcatagggaatttgccctctgacctcagactctgccccttgtcgaggcag

SEQ ID NO: 499381 - DNA, 201 bp, Homo sapiens
tgggtaaaccctcactgccagcaggccccaagtggcttgtaaatcattctcctgtgacgtctgtgggcctgcgtggggacaacaggggcacatgacatctrcctgggccctgaccaataaaccctcagacccaggacccaggaccctgctgtagttggggagcaggagtacctttgggaggggaggactttatttaaacag

SEQ ID NO: 499382 - DNA, 201 bp, Homo sapiens
gaggctcgtgcaccgtgcctcagctgcctcatcagtaaaagggagccaacactagaacaacctcaaaattcttattttatttatttatttatttacttttygagaaaaagtctcactttatcgcccgggttagagtgcagtggtgcgatctcagctcactgcaacctccgcctcccgggttcaagtgactaacctgcctca

SEQ ID NO: 499383 - DNA, 201 bp, Homo sapiens
ctggggccatgattgctccatgctgcattcccaagcacagtgggagaggaagggccccattttcctcgcagactgtggctgagggctgagttggagacacscctcctctgggttgggaggtgggtgcacacagctattgagccctagatcctgtgcatgtggttgggatcaggcaggtcaactggcctcagccttgcctct

SEQ ID NO: 499384 - DNA, 201 bp, Homo sapiens
ccaagccaggggcccccagaggtcctgcaggctttgaggagccctttgcctcatgattgctgggcggaggctgcagaggagctggggaggggcagggtggsttgggaggagacactgtcattctgacctcccagtgtggtggaggtaagctgttggcctgtaaccaccaggctcaaacacaggttcttacctggctgtgtg

SEQ ID NO: 499385 - DNA, 201 bp, Homo sapiens
ctcctgtctcactttttcaatttcaggcacttgtggcccctcaaggacctcacgctgacgagcaatcaggtgagagggaggccagagccccaagccagggrcccccagaggtcctgcaggctttgaggagccctttgcctcatgattgctgggcggaggctgcagaggagctggggaggggcagggtggcttgggaggaga

SEQ ID NO: 499386 - DNA, 201 bp, Homo sapiens
cctcatcagtaaaagggagccaacactagaacaacctcaaaattcttattttatttatttatttatttactttttgagaaaaagtctcactttatcgcccrggttagagtgcagtggtgcgatctcagctcactgcaacctccgcctcccgggttcaagtgactaacctgcctcagcctcccgagtagctgggattacagg

SEQ ID NO: 499387 - DNA, 201 bp, Homo sapiens; identical to SEQ ID NO: 225354

SEQ ID NO: 499388 - DNA, 201 bp, Homo sapiens
gaggtagagtgaggaccacaccccaggtgtccagccatccaggccagcgctccttccccagctgcctgtccgcgacaggcctcttctccttgtctccctcrctctcttggtggggcggtgttctccagaattcagcacctgggagccgagatccacctgatccgtgacatgatggaccccaaccacacaggaggcctgtat

SEQ ID NO: 499389 - DNA, 201 bp, Homo sapiens
actgcagacaaggacagggagagataggatgatgggatgacgtcaaacagaccaacagacctctattttggaaggaactgttagttctttgtcctagaccraatcgttcatggatagctgagatacccttttgcatgttttctaaagagattccatttgtcagccaaaccacagaggacattttcgggtctagagaacaca

SEQ ID NO: 499390 - DNA, 201 bp, Homo sapiens
aaagaaaatctgactccagaggggactattaatttaattccaggtgaaattaaaaaaaaaaaacaaaacagcttcccagaaaccttcatgcttgattagtyagcagctcagttaagacaataccttccctttattccccacaagtgggaaccaagatgacaggtttttagttctccccatacataccccaagtcacccttc

SEQ ID NO: 499391 - DNA, 201 bp, Homo sapiens
aacatacacaaaggcaaacattgagtaaaatgctagggaaagacggcactttgggggcctactgcagttttccttattgcacataaaggttgtggataackccaagtctttaatttttcacagttatactttaatgtcattttatataacgtttatttatataacatactataatgttaattttataaaaccaccagtttg

SEQ ID NO: 499392 - DNA, 201 bp, Homo sapiens
tttgaagtggaataagaagtcatatacttgtgagatcagcaggctgactttctagcagccctcattgcagataatctttcacaacagatggtaaaatcagytttctgatacactcttagaactcacaacgggtgcacagtaggtttccaagtgggtgattttcacctctgatgagatgctctaacaccctgccactgtttt

SEQ ID NO: 499393 - DNA, 201 bp, Homo sapiens
ttaagatagtgttgttcttcatctgacactgtacaagcaacaaaaacttcttcactcccagttatttccaatggaaagatcattaagtatttcatcccaartccaggtatggacatacacaagttacaatattatataaggcttaagaataacaacattatctttgaattatgtaatttttgtaactaatttttaccatgg

SEQ ID NO: 499394 - DNA, 201 bp, Homo sapiens
atggataatttcatggataatttcatgaatactagagcctagtctaaaaatcataggatgttgtgaaaaagacacatattatgtttatctacaatcattasaaagttaaaaggcatcttctttcattagcagtgttaacagtagtttttttttcccatgggtaatgctaaaagttgctattctaagtcttctatccaccac

SEQ ID NO: 499395 - DNA, 201 bp, Homo sapiens
aaaaatacaaaaattagccaggtgtggtggcgtgtgcctgtagtcccagccacttgggagactgaagtgggaggatggcttgagcccaggagatggaggtwgcagtgtgctgagatcatgccatgcattgcactccagtctgggtaacagagccagaatcttattagggaattctgacatcttcatctttttataaaagat

SEQ ID NO: 499396 - DNA, 201 bp, Homo sapiens
gctgaatttcaggctttgtaatgtcacagaaccaggcatcagaagagctgatccaaacccaagatctgcccctaacttgcctcttattctttctggcctcyatttccacaattataaaatgcaggtataatactaaaatttttttttgtatagtcctttacagatccaaaattatgattttaagaaggaaattaataagtt

SEQ ID NO: 499397 - DNA, 201 bp, Homo sapiens
tggcgtgtgcctgtagtcccagccacttgggagactgaagtgggaggatggcttgagcccaggagatggaggttgcagtgtgctgagatcatgccatgcaytgcactccagtctgggtaacagagccagaatcttattagggaattctgacatcttcatctttttataaaagatggccaggctgggtgcgctggctcacat

SEQ ID NO: 499398 - DNA, 201 bp, Homo sapiens
agactgaagtgggaggatggcttgagcccaggagatggaggttgcagtgtgctgagatcatgccatgcattgcactccagtctgggtaacagagccagaawcttattagggaattctgacatcttcatctttttataaaagatggccaggctgggtgcgctggctcacatctggaatcccagcactttgggaggctgaggc

SEQ ID NO: 499399 - DNA, 201 bp, Homo sapiens
gctgaggcgggtgaatcacctgaggtcaggggttcaagaccagcctgaccaatatggtgaaacctcatctctactaaaaatacaaaaattgactgggcacrgatagctcacgcctgtaatcccagcactctgggaggttgaggcgggtggatcacctgaggtcaggagtttgagaccatcctgcccaacatggtgaaaccc

SEQ ID NO: 499400 - DNA, 201 bp, Homo sapiens
gagtgtcacagaaagcccccagccaggcagcctggggaggctggagttgcggcaggatcatttctgagcttccgcaagcacagacaagttcagcgttgacwccttctgcagagcccttacctcaccattcagcaggccaaatggaatcaatccatgcagacagctgaaatgcacacggtgttttccccacactcaggctgt

SEQ ID NO: 499401 - DNA, 201 bp, Homo sapiens
gtcacagaaagcccccagccaggcagcctggggaggctggagttgcggcaggatcatttctgagcttccgcaagcacagacaagttcagcgttgacaccttctgcagagcccttacctcaccattcagcaggccaaatggaatcaatccatgcagacagctgaaatgcacacggtgttttccccacactcaggctgtcagt

SEQ ID NO: 499402 - DNA, 201 bp, Homo sapiens
gcagtctccacctcctgggatccagcaatcctcctacctcagcctcctgagtagctggactataggtgtgcgccactgtgcccagctaattaaaaaaaaawatattttttttttagagacagggtctcactatgttgcccaggctaatttttttctttttcttattctttttcttttctttttttttttttgagacagagt

SEQ ID NO: 499403 - DNA, 201 bp, Homo sapiens
cgtgccaggccacaaagattctttgcttggccaaactttagcaccccacctggctttttggctataaattcccacttgccatgccgttgtaaaccaaatartgtctgagacaggtctcagacaagtttattttgccaaggttgaggatgtgtctgggaaagacacaagctacagtggtatctgtggcctgcgctctttccc

SEQ ID NO: 499404 - DNA, 201 bp, Homo sapiens
tgcttccactcatggcaaatggtgaaatggagccagtgtgtgcagagatctcgcagcaagagagagagagacaggggaggcgccaggctatttttagcaaycagctcttgtgggagggaaaagagtgagaactcactgaccccttccccgcaacaaggcattggttattcatgagggatctacccgcatgacccacaccct

SEQ ID NO: 499405 - DNA, 201 bp, Homo sapiens
tcagcgttgacaccttctgcagagcccttacctcaccattcagcaggccaaatggaatcaatccatgcagacagctgaaatgcacacggtgttttccccayactcaggctgtcagttttgttgactgagatactcatcaccccagagctgcttttcacagttctagaagatctgttcaatcattcattcactcacaaaaca

SEQ ID NO: 499406 - DNA, 201 bp, Homo sapiens
gttgagagtccagtcgctctcctcaactacaagattccattgcagtggtcactatacctatctcaagggtcctgaatatttttccttaccatgctttaacmaggatcattagatacttttatcttttttttttttttgtcagggtctcgatttgttgttcaggctgcagtgcagtggtgcaaacacagctcactgcagtct

SEQ ID NO: 499407 - DNA, 201 bp, Homo sapiens
tcatgagctgtgacactcaccgtgaagttttgcagcttcgctcctaaagccagcgagaccacgaacccactgggagggacagcaactctggacgcgccacytttacgaactgtagcactcaccgcaaaggtctgcagcttcactcctgaggccagcgagaccacgaacccaccgtgaaggaacgaacaactccagacgcgc

SEQ ID NO: 499408 - DNA, 201 bp, Homo sapiens
aagcacagacaagttcagcgttgacaccttctgcagagcccttacctcaccattcagcaggccaaatggaatcaatccatgcagacagctgaaatgcacayggtgttttccccacactcaggctgtcagttttgttgactgagatactcatcaccccagagctgcttttcacagttctagaagatctgttcaatcattcat

SEQ ID NO: 499409 - DNA, 201 bp, Homo sapiens
aagctccttgaaccccattctatcaagatttgatgaaggtttcattacataagcatgagtaacgaaatgattgatcattgagcttttttttttttttttttagagacccagtctctaaaaaaaaaagaagagaacaaatactttatcaaaccatttatgttatactataggaaatgtatcatacatgctttatttgtatga

SEQ ID NO: 499410 - DNA, 201 bp, Homo sapiens
ttctgagcttccgcaagcacagacaagttcagcgttgacaccttctgcagagcccttacctcaccattcagcaggccaaatggaatcaatccatgcagacrgctgaaatgcacacggtgttttccccacactcaggctgtcagttttgttgactgagatactcatcaccccagagctgcttttcacagttctagaagatct

SEQ ID NO: 499411 - DNA, 201 bp, Homo sapiens
agcacagacaagttcagcgttgacaccttctgcagagcccttacctcaccattcagcaggccaaatggaatcaatccatgcagacagctgaaatgcacacrgtgttttccccacactcaggctgtcagttttgttgactgagatactcatcaccccagagctgcttttcacagttctagaagatctgttcaatcattcatt

SEQ ID NO: 499412 - DNA, 201 bp, Homo sapiens
atagtttactagatgggtacttctcaaccttcttcctgtcatggcatacatagaaaatgatacaatttatatctctcactgaagttaactggggggagttyggatccctatcagatttggtgaaaaaaattgatgttttctacatattgtataattatgatttggaaaaaaatcaaattattagggaaagcattaaatatt

SEQ ID NO: 499413 - DNA, 201 bp, Homo sapiens
gttatagatcaaaaagagcatgtccatcctgatctgaatgagctaaagtaacagaaaatcatctttatcagtgttcttgagccaggataaatggattaaartatctccatatcatatatagttactcaaatattctgcttatttgtgcagccgaaaccagttttcaactgtgtttgttaacaaagagtattaaaaattatc

SEQ ID NO: 499414 - DNA, 201 bp, Homo sapiens
tataaaaatcacatactggaggacatgactggaaaccagtttaggagcagccagtgggtaccaatttaggagattatacttaccccacttattagtttaaraaaaaattctatcaatgaatttgagaccagtgatattgaaggatggcatttcaacttccaaatccagtaattaaaattgaagatactttaattcagcaaa

SEQ ID NO: 499415 - DNA, 201 bp, Homo sapiens
aagaacatctttatttgaactttaatatacaatattacctttaatttataaaaatcacatactggaggacatgactggaaaccagtttaggagcagccagkgggtaccaatttaggagattatacttaccccacttattagtttaagaaaaaattctatcaatgaatttgagaccagtgatattgaaggatggcatttcaa

SEQ ID NO: 499416 - DNA, 201 bp, Homo sapiens
gccagtgggtaccaatttaggagattatacttaccccacttattagtttaagaaaaaattctatcaatgaatttgagaccagtgatattgaaggatggcayttcaacttccaaatccagtaattaaaattgaagatactttaattcagcaaaaacttctaaattttctttaaaaatattttttcccaatgaagaactgagc

SEQ ID NO: 499417 - DNA, 201 bp, Homo sapiens
tcctggaacatagctacgcccattctttacatagtatctctatctgttttcgatacttcaacagcagaaatgagtaataagagagactgtatagctctcayagcctaaaatattatctggaagctggctgaacagttatagatcaaaaagagcatgtccatcctgatctgaatgagctaaagtaacagaaaatcatcttta

SEQ ID NO: 499418 - DNA, 201 bp, Homo sapiens
aagatacttatacaattttaagtgtctttaaaatttgtgtcccataatgggacatcacctgttgtatatatgccatgtattctattttagaatcctgtatmttatgaccataaagtcatagtcaaggaccagcagtgttggtgtactgtcaacggaagtgcacagtctcactctaggatcccactccagacttcctgaatc

SEQ ID NO: 499419 - DNA, 201 bp, Homo sapiens
tctcggctcactgcagcctccgcctcccaggttcaagcgattctcctgcctcatcctccggagtagctgggattacaggcgcctgccaccacacctggctmatttttgtatttttagtagagatggggtttcgccatgtttgtcaggctggtctcaaaactcctgacctcaggtgatggcgcccaccttggcctcccaaag

SEQ ID NO: 499420 - DNA, 201 bp, Homo sapiens
ggccacctgacccgttgcacgttgtaaccgaggaactcggaagctacagccgaaggaaggtgggagctgcagcctcgcgggggctgatgtcaagactactstctctcagatcccaggattggcatgtgatgagagagatgagccgaaggcaggagggaacgccctgggaggtgttgatgctgagttggggaggctcctaga

SEQ ID NO: 499421 - DNA, 201 bp, Homo sapiens
tgtaaccctattttggcattttcctgtccttacatctcagcttaaatgctccctcttttgggaggcctttttctgccttcaacatagtagagccttttccyccacccctctgtaacataatgccctgttttatttttactgcttttattttcatgctttgtgggtgtccccactggagtgtaagccctatgggagcaaggg

SEQ ID NO: 499422 - DNA, 201 bp, Homo sapiens
ggtggggtcaaatggtatttctagttctagatccttgaggaatcaccacactgtctttcacaatggttgaactaatttacactcccaacaatgtaaaagcrttcctatttctccacatcctctttggcatctgttgtttcctgactttttaatgattgccattctaactggtgtgagatggtatctcattgtggttttgat

SEQ ID NO: 499423 - DNA, 201 bp, Homo sapiens
ttgggaggtgattccaccctcatgaatggggttagtgcccttataagaagagacacaaggtgatcattcagtcagtcatgtgaagatacagagggaaggcrtctgtctacaggccaggaagttggccttcaccagccaccagttcttttggccccttggtcttgtactctccagcctccataatggtgagaaataaatgtc

SEQ ID NO: 499424 - DNA, 201 bp, Homo sapiens
cacatctttccaactaccattgggagagtcaagagggatatttacatgctctctgaattgagggttgagagctctaggccaaatactacctctagtgtackagaagtagtaataccacttctaggccaaatttgggcttccattggtgggccttgagaaattgtaatatcctgaagtaattgggattttgtaatttgacta

SEQ ID NO: 499425 - DNA, 201 bp, Homo sapiens
tatctttggcccacttttttttttttgtggggactaaatgttttaatatatggacaataagcgggttatcacatttataaacaaaacaatttaagagcataagaagtactctaaaggaaacaaacagaaagctggagcaaagagcaatgagtgagacgtctttttgatagaattttccggtaagagctctcaaaagaaatt

SEQ ID NO: 499426 - DNA, 201 bp, Homo sapiens
tgaatgggagttcactcataatttggctctctggctattattggtatataggaatgcttgtgagttttgcacattgattttgtatccagaaactttgctgmagttgctaatcagcttaaggaaattttgggctgagatgatggggttttctaaatttacaatcatatcctctgaaaacagagacaatttgacttcctctct

SEQ ID NO: 499427 - DNA, 201 bp, Homo sapiens
tatgtaactcatttggaacttagcatgcacatcctgttttgttctctgttttatatgcagagactgctttctaggttagatttgagtcaagaaatgcagadgtcaaaattgaagagtgaagctttcttctttttttttcttctctttctcttctctcccaagtagctgggattacaggggcatgccaccatgcctggctaa

SEQ ID NO: 499428 - DNA, 201 bp, Homo sapiens
atctttggcccacttttttttttttgtggggactaaatgttttaatatatggacaataagcgggttatcacatttataaacaaaacaatttaagagcataagaagtactctaaaggaaacaaacagaaagctggagcaaagagcaatgagtgagacgtctttttgatagaattttccggtaagagctctcaaaagaaatta

SEQ ID NO: 499429 - DNA, 201 bp, Homo sapiens
tctttggcccacttttttttttttgtggggactaaatgttttaatatatggacaataagcgggttatcacatttataaacaaaacaatttaagagcataagaagtactctaaaggaaacaaacagaaagctggagcaaagagcaatgagtgagacgtctttttgatagaattttccggtaagagctctcaaaagaaattat

SEQ ID NO: 499430 - DNA, 201 bp, Homo sapiens
cacaacgtgcaggtttgatatataggtatacatgtgtcatgttggtttgctgcactcatcaactcatcatttacattacgtatttctcctaatgctatccytcccccagcccccacctcatgccaggccctggtgtgtgatgtacacccccctgtgtccaagtgatctcattgttcaattcccacctatgagtgagagcat

SEQ ID NO: 499431 - DNA, 201 bp, Homo sapiens
atagtattccatggtgtgtatgtgccatattttcttaatctagtctatcgttaatggacatttgggttggttccaagtctttcctgttgtgaatagtgccrcaataaacatacatgtgcatgtgtctttatagtggcatgatttataatcctttgggtatatacccagtaatgggatggtggggtcaaatggtatttctag

SEQ ID NO: 499432 - DNA, 201 bp, Homo sapiens
ttttgaaccagccttgcatccaagggatgaagctgacttgattatgctggataaacttttcagtgtgctgctggattcagtttgccagtattttattgagrattttcacatcaatgttcatcggggatattggcctgatcttttctttttttgttgtgtctctgccaggttttggtatcaggatgatgctggcctcataaa

SEQ ID NO: 499433 - DNA, 201 bp, Homo sapiens
catgtctctatctccttcatttctgctctgatcttagttatttcttgtcttctgctcgtgtgtgaatgtgtttgctcttgcttctctagtcctttttttcttttttttttttttgagatggggtcgcagtttgtcacccaggctggagtgcattggcatgatcttggctcactgcaacctctgcctcccaggttcaagcaa

SEQ ID NO: 499434 - DNA, 201 bp, Homo sapiens
gatccatttggctattgatacttgtgtatgcttcacaaagttctcatgctgtgtttttcagctccatcagtcatttacgttcttctctaaactggttattstagttagaaattcctctaaccttttttcaaggttcttaacttccttgcattgggttagaacatgctcctttagcttacttgttattacccaccttctgaa

SEQ ID NO: 499435 - DNA, 201 bp, Homo sapiens
agagaatcgacacccaatcaatcacagcaaaggtgctcactgtgcctgacatttctattctacctaaaattaatcagcattgactgagcatctccctaggycaggtactaagctgggtccagtggagtggcagttataagatatgacctctacccatgccagaagcagtatggggctgtggtgatggcatgacttttggga

SEQ ID NO: 499436 - DNA, 201 bp, Homo sapiens
gcttagtttggctggatatgaaattctgggttgaaaattcttttctttaagaacgttgaatattggcccccactctcttctggcttgtagagtttctgccragagatcagctgttagtctgatgggcttccctttgtgggtaacctgaccgttctctctggctgcacttaacattttttccttcatttcaactttggtgaa

SEQ ID NO: 499437 - DNA, 201 bp, Homo sapiens
ccaccctgctccatgggctgcacccactgtctgacaagccccagtgagatgaacccggtacctcagttggaaatgcagaaatcacccattttctgcgtcastcacgctgcgagctgtagattggagctgttcctatttggccatcttggaacctcctccagaagttttttaaagtaattaaaatctcaattatagtacctt

SEQ ID NO: 499438 - DNA, 201 bp, Homo sapiens
taggtaagcttttttaccaaaataagtcaacataatatgtgttatttcttacttaaataaaaatattaagccattctttaactctgtattactttatctgktacacttatggagaatattattccacatgaaactcttgcatgtacttttcctgctgcacatatgtgatttagttcctctctgcattccaggagatttcaa

SEQ ID NO: 499439 - DNA, 201 bp, Homo sapiens
aggcaggtctgatggtgaccaaatccctcagcatttgcttgttgggaaaggattttatttctccttcacttatgaagcttatttggttagatatgaaattktgggttgaaaattcttttctttaagaatgttgaatattgtcccccactctcttctggcttatagggtttcagccaaaagatccactgttgtctgatgggc

SEQ ID NO: 499440 - DNA, 201 bp, Homo sapiens
agtgtacctcagttgaaaatgcagaaatcacccgccttctgcgttgatctccctgggagtagcagaccagagctgttcctattcagccatcttgccagccrctgtcgatttgtcatctttttaacatattcatctctctcttattaaaaaggaaaacatagaaaccaacaacaaactccccattgccccacatctttccaa

SEQ ID NO: 499441 - DNA, 201 bp, Homo sapiens
gatttgtcatctttttaacatattcatctctctcttattaaaaaggaaaacatagaaaccaacaacaaactccccattgccccacatctttccaactaccrttgggagagtcaagagggatatttacatgctctctgaattgagggttgagagctctaggccaaatactacctctagtgtactagaagtagtaataccact

SEQ ID NO: 499442 - DNA, 201 bp, Homo sapiens
cagaatctgtgtttatcattccctgtatcttcccatttccttgattctcttctctctcctgacttagtgggagtgcttcttctccactctttatgtgtctrctccactgtcctttagctctctctccacattactaatgtggtgcttcttgtttatgtaactcatttggaacttagcatgcacatcctgttttgttctctg

SEQ ID NO: 499443 - DNA, 201 bp, Homo sapiens
acctcatttggaattcactagtcaactataaatgctaatcagcaatgaatacttaaatagagttggaataaaacaattgaaaactggtcacttgttagctrtttctaactaccttgctgtgcctttgtgtctgcttaaaaactataggaactctttgacttgaattgttattgctatgtgatcaactttcaatacaacaaa

SEQ ID NO: 499444 - DNA, 201 bp, Homo sapiens
cttttttcaaggtttttagcttctttgtgatgggttcaaacatcctcctttagcttggagaaatttgttgttacagatcatctgaaaccttcttctctcawcttgtcaaagtcattctccatccagctttgttccattgcgggtgaggagctctgttcctttggaggagaagaggcactctgatttttagaattttcagct

SEQ ID NO: 499445 - DNA, 201 bp, Homo sapiens
tttttcttttttttttttttgagatggggtcgcagtttgtcacccaggctggagtgcattggcatgatcttggctcactgcaacctctgcctcccaggttsaagcaattctccttcctcatcctcccggataactgggagtatgggtgcatgccaccatgcccagaaaattctttgtatttttttttttttagtagaaaca

SEQ ID NO: 499446 - DNA, 201 bp, Homo sapiens
tcatctgaaaccttcttctctcaacttgtcaaagtcattctccatccagctttgttccattgcgggtgaggagctctgttcctttggaggagaagaggcaytctgatttttagaattttcagcttttctgctctggtttctccccatctttgtggttttatctacctttggtcttttgtcatggtgacatacagatggggt

SEQ ID NO: 499447 - DNA, 201 bp, Homo sapiens
tggggtcgcagtttgtcacccaggctggagtgcattggcatgatcttggctcactgcaacctctgcctcccaggttcaagcaattctccttcctcatcctsccggataactgggagtatgggtgcatgccaccatgcccagaaaattctttgtatttttttttttttagtagaaacagggtttcaccgtgttggccagtat

SEQ ID NO: 499448 - DNA, 201 bp, Homo sapiens
ttttttttctttctatttgcttggtaagtatttctccatcactttattttgagcctatgtgtgactttgtacatgaaatctgtctcctcaaaacagcaaascaatgggtcttgactctgtatccaatttgccagtctgttcttttaattggggcatttagatcatttacatttaaggttaatattgttatgtgtgaatttg

SEQ ID NO: 499449 - DNA, 201 bp, Homo sapiens
aaatattttttccttatctatatttttagtttatgtgtttataccaaaatttgaaaattttctccaagctcagaatttcattttaaatactttcatgataytattgaagtcaatcccctactttatttatttatttatttatttttatttttttgagatggagtctcactctctcaccgaggctggagtgcagtggaatga

SEQ ID NO: 499450 - DNA, 201 bp, Homo sapiens
tggtgacatacagatggggttttggtgtggatgtcctttctgtctgttagttttccttctaacagtaaggaccctcagctgcaggtctgttggactttgcyggaggtccactccagaccctgtttgcttgggtatcaccagtggaggctgcagaacagcgaatattgcagaacaggaaagttgctgcctgattcttcctct

SEQ ID NO: 499451 - DNA, 201 bp, Homo sapiens
gcccccactctcttctggcttgtagagtttctgccgagagatcagctgttagtctgatgggcttccctttgtgggtaacctgaccgttctctctggctgcrcttaacattttttccttcatttcaactttggtgaatctgacaattatgtgtcttggagttgctcttctcgaggagtatctttgtagcattctctgtattt

SEQ ID NO: 499452 - DNA, 201 bp, Homo sapiens
gcaggtctgttggactttgccggaggtccactccagaccctgtttgcttgggtatcaccagtggaggctgcagaacagcgaatattgcagaacaggaaagktgctgcctgattcttcctctggaagcttcatctcagaggggcacatggctgtatgaggtgtcagtcggctcctactgggaggtgtctcccagataggcta

SEQ ID NO: 499453 - DNA, 201 bp, Homo sapiens
ttcattaaacttgtcttctcacttcatttcattcatttgatcttccatcactgataccctttcttccagttgatcaaattggctactgaagcttgtgcatscgtcatgtagttctcatgccatgggtttcagctccatcaggtcatttaaggccttctctatagtctttattctagttagccattcatctaatcttttttc

SEQ ID NO: 499454 - DNA, 201 bp, Homo sapiens
cattaaacttgtcttctcacttcatttcattcatttgatcttccatcactgataccctttcttccagttgatcaaattggctactgaagcttgtgcatgcrtcatgtagttctcatgccatgggtttcagctccatcaggtcatttaaggccttctctatagtctttattctagttagccattcatctaatcttttttcaa

SEQ ID NO: 499455 - DNA, 201 bp, Homo sapiens
tatagtctttattctagttagccattcatctaatcttttttcaaggtttttagcttctttgtgatgggttcaaacatcctcctttagcttggagaaatttsttgttacagatcatctgaaaccttcttctctcaacttgtcaaagtcattctccatccagctttgttccattgcgggtgaggagctctgttcctttggagg

SEQ ID NO: 499456 - DNA, 201 bp, Homo sapiens
attcatctaatcttttttcaaggtttttagcttctttgtgatgggttcaaacatcctcctttagcttggagaaatttgttgttacagatcatctgaaaccktcttctctcaacttgtcaaagtcattctccatccagctttgttccattgcgggtgaggagctctgttcctttggaggagaagaggcactctgatttttag

SEQ ID NO: 499457 - DNA, 201 bp, Homo sapiens
cagacaccaaaatctgcagatgcgcaagtccctgatataaattgcatagtatttgcatataatctatgcacaccctcctgtatattttaaataatctctarattacttataatacctagtaaaatataaatgctatgtaaatagttgttacactgtattttaaaatttgtattttttaaatgttgtattttttaaattttt

SEQ ID NO: 499458 - DNA, 201 bp, Homo sapiens
tagcttctttgtgatgggttcaaacatcctcctttagcttggagaaatttgttgttacagatcatctgaaaccttcttctctcaacttgtcaaagtcattmtccatccagctttgttccattgcgggtgaggagctctgttcctttggaggagaagaggcactctgatttttagaattttcagcttttctgctctggtttc

SEQ ID NO: 499459 - DNA, 201 bp, Homo sapiens
tgtgtctttatagtagaatgatttataatcctttgggtatatacctagtaatgggattgctgggtcaaatggtatttctggttctagatccttgaggaatygccacactgtcttccgcaatgtttgaactaatttacactcccaccaacagtataaaagccttcctatttctccacatcctttccagcgtctgctgtttcc

SEQ ID NO: 499460 - DNA, 201 bp, Homo sapiens
tctggaagcttcatctcagaggggcacatggctgtatgaggtgtcagtcggctcctactgggaggtgtctcccagataggctactcaggggtcaggtaccyacttgaggaggcagtctctctgttctcagatctcaaactccatgctgggagaaccactactctcttcaaagctatcagacagggacgtttaagtctgcag

SEQ ID NO: 499461 - DNA, 201 bp, Homo sapiens
cactgttgtctgatgggcttccctttgtgggtaatccgacctttctctctggctgcccttaacattttttccttcatttcaaccttggtgaatacgatgaytgtctatcttggtgtttctcttctcgaggagtatcttagtggtgttctctgtatttcctggatttgaatgttggcctgtcttgctaggttggagaggttc

SEQ ID NO: 499462 - DNA, 201 bp, Homo sapiens
ctgccttggctttccaaagtgttgggataatgggcatgagccaccacgcctggccccctgtttttttttttttaataagatccacttaccattcaaaatakggagttatcattccttattctgtcaatcaaacagatagtttaaaaatttttgtttcttctacaagtaaggctgcggtaagtagccttgtttctgtatcct

SEQ ID NO: 499463 - DNA, 201 bp, Homo sapiens
tttcattgtttttttttttttccttagtttcttcatctgtaagatgaagaggaataacagcaccattttaaaggactgtttagtgaataaatgaaataatycatttagagtactgatcacagagtttagcaggtagaagcaccctcctaaatgttagctacaattattattcacaaaaggaagctcactgtctctgaagaa

SEQ ID NO: 499464 - DNA, 201 bp, Homo sapiens
attttaatttgtttcattttgtctttcacaaaattggatcatataatacacattattctttaccttgctgtttatactttctaatgtatcatattaatttytctaggttttaagatataatttgtttttgcttttgtttttgacatgaggacttgctttgttgcccaagctggagtgcagtggtgccatcatggttcactg

SEQ ID NO: 499465 - DNA, 201 bp, Homo sapiens
acacattattctttaccttgctgtttatactttctaatgtatcatattaatttctctaggttttaagatataatttgtttttgcttttgtttttgacatgrggacttgctttgttgcccaagctggagtgcagtggtgccatcatggttcactgcaacctgtgccttctggatgccagcaatcctcccgcttcagcctccc

SEQ ID NO: 499466 - DNA, 201 bp, Homo sapiens
gaatgatttataatcctttgggtatatacctagtaatgggattgctgggtcaaatggtatttctggttctagatccttgaggaatcgccacactgtcttcygcaatgtttgaactaatttacactcccaccaacagtataaaagccttcctatttctccacatcctttccagcgtctgctgtttcctttttttttcttaac

SEQ ID NO: 499467 - DNA, 201 bp, Homo sapiens
tgtgttagacttgaggggtttgtgagtcaatatgttgggagcatgagagggtgtgctgagggagccatgctgagattgttcccaggttgacggtcagcaaraaaccagaagcctcagtcccacagctactgggaactgaattctggcaacagcaatgtgagccagaaagagggccccaagctccagaaaggaacacaggcc

SEQ ID NO: 499468 - DNA, 201 bp, Homo sapiens
tccttgaggaatcgccacactgtcttccgcaatgtttgaactaatttacactcccaccaacagtataaaagccttcctatttctccacatcctttccagcrtctgctgtttcctttttttttcttaacacattaagttctgcagtacatgtgcagaacatgcaggtttgttacacaggtatacacgtgccatggtgatttg

SEQ ID NO: 499469 - DNA, 201 bp, Homo sapiens
ggcaacagcaatgtgagccagaaagagggccccaagctccagaaaggaacacaggccagctaatactgttgacactccagttggagcaactagttcagctstttccagatttttgacctgtagaaactgtgagagaataaatggtgttcattcaagccaataattgtgtggtagtttgttactcagaaatagaaagctaac

SEQ ID NO: 499470 - DNA, 201 bp, Homo sapiens
tgaatttctatgagagtagggaccttaggtctcttatttttctctaccttaagtgcttgatacatagtagaaagtcagtaagtattgaataaataaattamaatagaaggtagacagaaactccctcagcttcctattacttcagcacccacactcattctactctccttctccatcatctacatctcttaaggaaactca

SEQ ID NO: 499471 - DNA, 201 bp, Homo sapiens
caagccaataattgtgtggtagtttgttactcagaaatagaaagctaacatacgtgtgaagaaatgttttatacaattaactcccttcaactgtgtttatwttttcaagtacatttcacaaatttggagtaaacttttatgtgtactcaagggagatgtttagaaagggttatcttcgaagagacgcttcagaaaggagag

SEQ ID NO: 499472 - DNA, 201 bp, Homo sapiens
atagtagaaagtcagtaagtattgaataaataaattacaatagaaggtagacagaaactccctcagcttcctattacttcagcacccacactcattctacyctccttctccatcatctacatctcttaaggaaactcactgttatttatttttgcttcttcacaatatgatttgtgagctttcttttttaaattatacttt

SEQ ID NO: 499473 - DNA, 201 bp, Homo sapiens
ctgatgagcattcgggttggttccaagtctttgctattgtgaataaagccgcaataaacatacatgtgcatgtgtctttatatagaatgatttgtaatccrttaggtgtatatccattaatgggattgctggcttaaatggtatttctggttctagatccttgatgaatctccacactgtctttcacaatgtttgaattaa

SEQ ID NO: 499474 - DNA, 201 bp, Homo sapiens
atctcaaactccatgctgggagaaccactactctcttcaaagctatcagacagggacgtttaagtctgcagaagtttctgctgccttttgttcagctatgyccagcccccagaggtggagtctacagagtcaggcagggctccttgagctgcgttgggctccacccagttcaagctccctggccactttgtttacctactc

SEQ ID NO: 499475 - DNA, 201 bp, Homo sapiens
tgcgataggaggatcccttgagccccggagttcaaggtggcagtgagccatgatggcgctactgcactacagcctgggtaacaaagcaagactctgtcttaaaaaaaaaaattatgactcactaaagactcagatgatttttagcatttttaaagcaataaagtacattttaattaaggtacatacactggttttttagat

SEQ ID NO: 499476 - DNA, 201 bp, Homo sapiens
ttcgtttttgtttttgtttttttttgagatggagttttgctcttgttgcccaggctagagtgcaatggcacaatctcagctcactgcaatctccacctccygggttcaagcaattctcctgcctcagcctcccaagtagctgagatcataggcgtgcaccaccatgcccagctaattttgtatttttagtagagatggggt

SEQ ID NO: 499477 - DNA, 201 bp, Homo sapiens
atacaaaaagaaaaaaaatgagccaggcatgatggcacacgcctgttatcccagctacttgggaggctgaggcacgagaattgcttgaacccaggaggcaraggttgcagtgagctgagattgcaccactgcactccagcctgggtgacagaatgagactgtgtctcaaaattactaactaaataaaataaaataaaagca

SEQ ID NO: 499478 - DNA, 201 bp, Homo sapiens
ttttttgagatggagttttgctcttgttgcccaggctagagtgcaatggcacaatctcagctcactgcaatctccacctcccgggttcaagcaattctccygcctcagcctcccaagtagctgagatcataggcgtgcaccaccatgcccagctaattttgtatttttagtagagatggggtttctccatgttggtcaggc

SEQ ID NO: 499479 - DNA, 201 bp, Homo sapiens
aaaatgagccaggcatgatggcacacgcctgttatcccagctacttgggaggctgaggcacgagaattgcttgaacccaggaggcagaggttgcagtgagytgagattgcaccactgcactccagcctgggtgacagaatgagactgtgtctcaaaattactaactaaataaaataaaataaaagcaacaggaagccaatg

SEQ ID NO: 499480 - DNA, 201 bp, Homo sapiens
tttgtgttgttttgttttttgagacaggatcttgctgtgtcacccaggctggagtgcagtggcaccatcatggctcactgcagcctcaacctcctgggctsaagcaatcctcccacctcagcctcctaagtacctgggactacagacatgcaccaccacgtccagctaattgttaaattttggatttttttgagacagggt

SEQ ID NO: 499481 - DNA, 201 bp, Homo sapiens
tgggaggccaaggtgggtgcatcacttgaggtcaggagttcaagaccagcctagccgacatggtgaaaccccatctctactaaaaatacaaaaattagccrggtgtggtggcacacacctgtaatcccagctactcgggaggctgaggcaggagaatcacttgaactcaggaggtggaggttgcagtgagctgagatcgtg

SEQ ID NO: 499482 - DNA, 201 bp, Homo sapiens
tgggaggctgcgataggaggatcccttgagccccggagttcaaggtggcagtgagccatgatggcgctactgcactacagcctgggtaacaaagcaagacyctgtcttaaaaaaaaaaattatgactcactaaagactcagatgatttttagcatttttaaagcaataaagtacattttaattaaggtacatacactggtt

SEQ ID NO: 499483 - DNA, 201 bp, Homo sapiens
ggtggctcacacctgtaatctcagcactctgggaggccgaggcgggtggatcacctgaggtcaggagttcaagaccagcctggccaacatggtgaaacccygtctctactaaaaatacaaaaatcagccgggtgtggtagcacacacctgtaatcccagcctctcagaaggctgaggcgagagaaacgacttgaacccagg

SEQ ID NO: 499484 - DNA, 201 bp, Homo sapiens
tcttatcactacaaaaaaattaaaaaatagccaggcatggtagcaaacacgtgtagtcccagctacttgggaggctgcgataggaggatcccttgagcccyggagttcaaggtggcagtgagccatgatggcgctactgcactacagcctgggtaacaaagcaagactctgtcttaaaaaaaaaaattatgactcactaaa

SEQ ID NO: 499485 - DNA, 201 bp, Homo sapiens
tcctttgctgtgctgcccacacgcttctagactagcccccaagagaactatcaactctcaaggtaaaaaggtgggaaacctggctgggcgccgtggctcaygcctgtaatcccagcactttgggaggccaaggcgggcggatcacctgaggtcaggaattcgagaccagcctggccaacatggcaaaaccccatctctact

SEQ ID NO: 499486 - DNA, 201 bp, Homo sapiens
cctggaagggagggaagtggaggcagataggaagacgaaaaggcaggatgtaaggagacccccagggaggccaccctgggtaggcttggggatggcaaatmagagaagctcagagacacacacagaaaggctctgatgtagaagacaggtcacaactgcattcttcttttttagtttgttgttgttgttgttgttgttttg

SEQ ID NO: 499487 - DNA, 201 bp, Homo sapiens
cagtccaatctcctgcagtttcaacagcgtctctgagtcccagatgtgaaccacaggctgcaggggctggtggaggaagagtcacaagtgtgaagcaaaaytggagtgcaattccagcatgtctgcctgctccctgactttggccttacctttccatccttatccactccagctgtctgtcccgaggctacccgaacacca

SEQ ID NO: 499488 - DNA, 201 bp, Homo sapiens
ctcatgaggtcagaacccatgtcacaaatgaagaaactaagggtcagagaagctaggagatttgccccatgtgacccagccaaaaaggaaggaaatgtatrggtgagtctggagctccctgcactccaccactcccacccccaacctcagagcccctccaagccacatggactcctcaccttgatctcagccagcttcatt

SEQ ID NO: 499489 - DNA, 201 bp, Homo sapiens
acacatggccctttctcaagagaaccagctgggtggggttcaggaaggccagaacttccaaggcttcctggtgacatgcaagagtggggttcctaggcaaraatgggggtctagaggcttcagggccagctcaccgcagctgaaaaggccagggccccaacaccccgctcgaaggcccccagtccaatctcctgcagtttc

SEQ ID NO: 499490 - DNA, 201 bp, Homo sapiens
tggagattaaccatttaggtgctggatcaagaggaagtctgaggggttctgggggcggcagggagtgcccaggtggtactagaagcatcagcttttaccartcagtacagaaaaattaatatttgagtagccagtgcagccataccagtacaaactggccacctctgggaggcagaaggcaaggtgctggggaaggcgtgg

SEQ ID NO: 499491 - DNA, 201 bp, Homo sapiens
cttttttagtttgttgttgttgttgttgttgttttgagacagagtctcactctgtcacccaggctggagtgcagtggcaagatctcaacgcaacctccacytcctgggttcaagtgattctcatgcctcagcctcctgagtagctagaattacaggtgcgtaccaccatgcccgtctaatttttgtatttttagtggagac

SEQ ID NO: 499492 - DNA, 201 bp, Homo sapiens
ggcgcctgggccggagggaagagttgcggtggcggctgagccctcgggcccaccggtcccaccccggcgatccccgcggcctcaccttggcacgagcgcaygggtactggaagagatgcactttgcagaagtcgtcggccaccgccaccacgcgctcgttgtgggagcggcacagggagttgatgtcggtcccatcggagc

SEQ ID NO: 499493 - DNA, 201 bp, Homo sapiens
tgaggaaggaggatcacttgaacctgggaggcagaggttgcagtgaaccaagatcgcgccactgcaatccagcctgggcaacagagtaagacctcatctcaaaaaaaaaaaaaaaaaagatgggaatgggaaaccctctcctctgttcccacagaacctctggagtactacacttcccagatgcccctcccagccacatac

SEQ ID NO: 499494 - DNA, 201 bp, Homo sapiens
accagcctggccaatatggtgaaatcccgcactgcactccagcctgggtgatagagcaaggcactgtctcaaaaacaaaaaaaacaaaaaaaaaacgggcrtgatggccaacatgatgaaaccgtatctctattaaaaatacaaaaatcagccggcgcgcatctgtaatcccagctactccgggaggctgaggcaggagaa

SEQ ID NO: 499495 - DNA, 201 bp, Homo sapiens
gaaactagttgtttccaaatcacgaaatttctcctacatataattccaactccactttaaccccatctccacttccttatctaacaacacctctaacagcyccccctacacaaaacccactccaattaccctctccccatgtcctgctccactgccactcacagtaaagaatctcatagtccccagaattggacatgatga

SEQ ID NO: 499496 - DNA, 201 bp, Homo sapiens
gtcaggaagagttaggttcaaatcctgactctagctgtgtgaccccaggcaaatgacttaccctctctgagcctgcttcctcacctgtgcaatgagcagcrtgagaccacctaacccccaaggatgttgtggggactgactgagatggaggaggtcgagggtttagcacagtgcccggtacacagcaggcgccccagaagt

SEQ ID NO: 499497 - DNA, 201 bp, Homo sapiens
aaaccacagtcacttctgcaagcctgtagtttgcttcgtgagtatcagggccctagtagatggagacttctagttccatttaagagataagaagattgagrctgaaggggctgagcgcacagcacaaggccacaaagcttggaagaggcagtgcagggtgccagagccctttctctcctccagaccaccaggcctcagtct

SEQ ID NO: 499498 - DNA, 201 bp, Homo sapiens
agcatgagaccacctaacccccaaggatgttgtggggactgactgagatggaggaggtcgagggtttagcacagtgcccggtacacagcaggcgccccagragtgtttgtttctttattcctgttgggcaatcaggtccccccaccccaaccagggatgtgaggtgagggatatggaaagtcgagagcctgcgcctggggc

SEQ ID NO: 499499 - DNA, 201 bp, Homo sapiens
tgtcagcacgctgtgggggctgcaagggcctgaggatccccggggggccaggggagccagcaccactgctgctgctgccccctccttcagattgggtcccrctaggctcttcgctggccccctgaggggctgggggtccattgctcaggccagggggtccaggggatgacttgagctccacctctgtctccgtctgggtgc

SEQ ID NO: 499500 - DNA, 201 bp, Homo sapiens
gtgtgtgcaggggcgccgttcgcgccctccaggaaaatgcgcgatcgggaatgtctcgaagtcagtccaggaaagagtcggcccctagtcgtgggggattrggccagggaagggcagggcggggcggggccacgccgccgggccagtcggtcccgccaggcagcgatcaaacgtcgagggaggaggcgggggacagggagg

SEQ ID NO: 499501 - DNA, 201 bp, Homo sapiens
tgctcaggccagggggtccaggggatgacttgagctccacctctgtctccgtctgggtgcctcggctcaccaaggaaggggtgcacgtgggtggcagtccygggggggctgcaagactgctggagagatgttgaattaacctgaagccccagaggccccaaggaggaggaaaaatggggtgtgatgacatgcatacctgtc

SEQ ID NO: 499502 - DNA, 201 bp, Homo sapiens
tgtgcaggggcgccgttcgcgccctccaggaaaatgcgcgatcgggaatgtctcgaagtcagtccaggaaagagtcggcccctagtcgtgggggattgggscagggaagggcagggcggggcggggccacgccgccgggccagtcggtcccgccaggcagcgatcaaacgtcgagggaggaggcgggggacagggaggggg

SEQ ID NO: 499503 - DNA, 201 bp, Homo sapiens
ttacatgtgtccggtaggactgcccctttcaggcagccccaggcttgaatgctcgtccagaggggaggagacggtggtaaaggatcaagggcctccttctggcagggcaggcgagaaacctggcaaagctcccttcctgctgccgtctcagcctccgcaaagactgggagtaccatggagtaccgggggggaaatatggag

SEQ ID NO: 499504 - DNA, 201 bp, Homo sapiens
gtccttgccgcccagcgagacgaggtgcgagtcgtcgtgcgtgaatcggacgctggtcacgtggctgccgtggcccccgtacatgcggctcggcgcctggrccggagggaagagttgcggtggcggctgagccctcgggcccaccggtcccaccccggcgatccccgcggcctcaccttggcacgagcgcacgggtactgg

SEQ ID NO: 499505 - DNA, 201 bp, Homo sapiens
cggcccctagtcgtgggggattgggccagggaagggcagggcggggcggggccacgccgccgggccagtcggtcccgccaggcagcgatcaaacgtcgagkgaggaggcgggggacagggagggggttcgagagggcgtggcgggcgccggccccgcgcccccagcgcccagcactcgccactggaagatgctggcgtcct

SEQ ID NO: 499506 - DNA, 201 bp, Homo sapiens
agcggccaaagcggctggatttggcaccatcactggaaacactatagatgtagatcacgttgtcatgggaaccaatggccaggtacaacccatctgcaaayacagtcactcagagagggaagggccagggacgcatgtgagtccagggttggggtggctcccacctgggctgtaccggaccactgagagctgctcattgcc

SEQ ID NO: 499507 - DNA, 201 bp, Homo sapiens
tcattggaatcatccaccacacaaagaaaggcaccctgatcctgaagaagggtgacacataggaggtgcagagtgaaccctggaggtccaggggttcatgrtcattaggttaagaggtaccatcacagatggagagggcagaaaaagttgacacacatggccctttctcaagagaaccagctgggtggggttcaggaaggc

SEQ ID NO: 499508 - DNA, 201 bp, Homo sapiens
gatggtaggagaggatctagaaggctccttgtccccacagacccaggaggaaactgtaaaggtaagaggggtcccaaggtgagaaaggtggttctcatggractggaaggggcaggatacacccagtcaaggctgagggtctctggcggtgggccactcggcagctcctcaaggctgcggatgccagacgggatgtacatg

SEQ ID NO: 499509 - DNA, 201 bp, Homo sapiens
cctggtgggtgtggcatgggggatccaggggcacagggctctaccttgaggtcgatgctccaggccagtgcatggctctccccatcccacaggcagagctkccggtcgtggccgcaggtgaggaagcggttctgggaggggtgtgtgcagagcccccagagctcatcagtgtggccctgcagcacagcatgactgtcactc

SEQ ID NO: 499510 - DNA, 201 bp, Homo sapiens
ccggtaatgtctctggccgccacctccaggaccccctgggcctcctccaggccggtacagcaccaccacacaggcgataaagtagaccacctccccagagygcaacacaaacagattagagcgggagtcacgacccctgtacccataactggggtggagatcacggtcaaggaaagggttagatcaagggcaggaggagga

SEQ ID NO: 499511 - DNA, 201 bp, Homo sapiens
atttcaggcgctccggcagccgcggccacccactgccgcgttccaggcaagccttcccggtcccgaggggcctcctgggctggatcttcaggtttctggaytctcacccaacgacacacgcccagcgttccaagcccaaactgggctccaccttgtcccccacccttccagcaggtttccacgcccctgctcaccgtagac

SEQ ID NO: 499512 - DNA, 201 bp, Homo sapiens
cagctcagagccaagcccttcagcaatggctcgcacggccccgaagtgctcgggaatctgcagagtggtagcagaatgtcaagagcccactgactattgcycttctccctcactcccttgaccccagcccagccctcacctcagcctcctggagggccaccaacccgggcccccactgtaccagccggcggtcccgcccgc

SEQ ID NO: 499513 - DNA, 201 bp, Homo sapiens
ctccaggccagttcctatggtcccatcctccagcagacccagggtccaggcccatcacagttgactccagtattgggcaggtgcctacagacccagtatckagtactgcctctgtggacttaggttccagtccagttcctacagccctaggacccaagccaccctttgtggccctagtgtccatgcccacttctgaatatg

SEQ ID NO: 499514 - DNA, 201 bp, Homo sapiens
tcaacagtttgtagcaaaatttattgaaaggattgtctatacatgctatctccaatccccctcctaacctcatctaattgggtttttgctgctaccattckactgaaacactttttaaaaccatcagggatctctgtgttattaaatccagtggtcaattattgcttctcatcttaatagatcatcctttaatggacttgg

SEQ ID NO: 499515 - DNA, 201 bp, Homo sapiens
tcaattttgtctgatgattaagctacgttacagtttacccacaaggactcaaatgaagaagtacagagtccttctcaggctgtaattagtttgtttcaacrgtttgtagcaaaatttattgaaaggattgtctatacatgctatctccaatccccctcctaacctcatctaattgggtttttgctgctaccattctactga

SEQ ID NO: 499516 - DNA, 201 bp, Homo sapiens
gcagataatatggtctcaaatagctgatggcaattagaaaaggaatctttgtttgtatatctcacgtgagagctcttggcacaagttctgtggccttaaasctgagtcggctattttcatcttgtgtaattttgagcaatctatttgtgctatctctatgtcaatttcctgctctataaaatgtggataatagtaatgatt

SEQ ID NO: 499517 - DNA, 201 bp, Homo sapiens
gtaacactcatgatgtaggtactgttagtatcgtcttcattttgaatacgccaaagcttagagagactaaataaatttctcaagttcttacagggataaaygacagagtcctatccaaaacccatgcatttcctctctggtggaatgaattaaaagtgaatattaagagttctgtgagcctcccacatgcctgtagcagaa

SEQ ID NO: 499518 - DNA, 201 bp, Homo sapiens
ggattcattcagtgtccacaacaactttaataggtggctactaatattattcccattttattaatgaaaagaccaaagataaaggcatagaaagctaaagrcacaggcacaatgatatctgactaaaaaatggcagccttgcaatgcatatttattgaatctggccccaaaccgatgttcgtagccaccattcttcaccac

SEQ ID NO: 499519 - DNA, 201 bp, Homo sapiens
tcaggagacagcactgggaccaagttggtgatagtgtgatgagcagcatctccaggaccatactgatggacgtgaagtcaccagcaaacaggcagaactcmcagggaggtgtccttgtgataccacagagctactgtgcagtagctgggcacttgacaatgcacttagcacttatattgtatggattcattcagtgtccac

SEQ ID NO: 499520 - DNA, 201 bp, Homo sapiens
gtatgtgaagaggaagagaaaaatggaagtcaggagacagcactgggaccaagttggtgatagtgtgatgagcagcatctccaggaccatactgatggacrtgaagtcaccagcaaacaggcagaactcccagggaggtgtccttgtgataccacagagctactgtgcagtagctgggcacttgacaatgcacttagcact

SEQ ID NO: 499521 - DNA, 201 bp, Homo sapiens
aatattcattgcaaaaaaacctactataaagcattttcttctgctttgaaagtttctgttagcagccacgtgttttctcagaaacttggctatgccaggarcaaagagacttaatgctcagtctttgaggaaaagcattctaaaaaccacatttctaaccttcactgactctatttgttcattcactgaacaaaagcttat

SEQ ID NO: 499522 - DNA, 201 bp, Homo sapiens
gatgaaagggaataggagaggttgagatccccagagatgggggtctgtatgtgaagaggaagagaaaaatggaagtcaggagacagcactgggaccaagtyggtgatagtgtgatgagcagcatctccaggaccatactgatggacgtgaagtcaccagcaaacaggcagaactcccagggaggtgtccttgtgataccac

SEQ ID NO: 499523 - DNA, 201 bp, Homo sapiens
gaatctttgtttgtatatctcacgtgagagctcttggcacaagttctgtggccttaaacctgagtcggctattttcatcttgtgtaattttgagcaatctrtttgtgctatctctatgtcaatttcctgctctataaaatgtggataatagtaatgattaccgcatagaattgttgtgaggaccaaatgtaacagtatact

SEQ ID NO: 499524 - DNA, 201 bp, Homo sapiens
cctggtagctcagagcacaaggcaggaacccaccctggactggaaacccttccatcctggggacacacgtgcacacacacacatacacactctctctctcwcacacacacaaacacactcatcctgtgaaaatttagacatgtcaatatactaatgtacacatttttgagatgtgagaggaaatgggattatccagagaaa

SEQ ID NO: 499525 - DNA, 201 bp, Homo sapiens
gaattggacagttcctcaggccctttggacctgcctggctccaccagtccctgtctgtgtgcctacctgtttttgaggtcggataataaccatctgatacycgggccaggagtccaccaacacctccatgttgaaggggttcccgtgattgatgtgaaacagagagccatacacctgaaggagggatgaaagggaatagga

SEQ ID NO: 499526 - DNA, 201 bp, Homo sapiens
acataacaacaatgagttcagtgcctcataattgctgtgttcttccttcccccccgtgcccagagatagactgtgcaccacatgactgctactgaggttgrgagggaggggggttggtgattcaggactgtttttttccatctcttcagtgcctcttttagggatatgaagtccaaaccgggtactatgagtgctcacttg

SEQ ID NO: 499527 - DNA, 201 bp, Homo sapiens
gatatctcagacacacaactttccctgtaaattggcctccattcagcccctgcaggtgacccctgccacctcaaagggcccttaatctgtgagtgtcagcyttgtccttttcctccccttcccccttgaacccctttcccaaattagtcttatgcttacgggaagagtgttaacatgtggcattcatgcaagctgctcatt

SEQ ID NO: 499528 - DNA, 201 bp, Homo sapiens
tgattcctctcaggttaggactggcttaaatgctccctctgcctccaggggcaggtgtcagctgagtttgatctagttttcctttgtgtctaacataacarcaatgagttcagtgcctcataattgctgtgttcttccttcccccccgtgcccagagatagactgtgcaccacatgactgctactgaggttgggagggagg

SEQ ID NO: 499529 - DNA, 201 bp, Homo sapiens
tcttccagatagcagattctgtcaaccacatttcataaagagttctgattctaagaggtaagaactgagcctggctttctagttacatgtttactactaamcccgtccttccctactacacttatgcatatttaaagactatactctcccctgcctccagcctggattgtaagttccacaagagcatggctgtgtcttcta

SEQ ID NO: 499530 - DNA, 201 bp, Homo sapiens
gcctatgtttgctcaaggccctggagatctgcaatcagcaggcagcaaagccggccaggcctgtgtccttcccatcagggcagtgagatcccccaggccckgggtggatacagaggtgctgtccagaagtcagggactagagtcaaaaacattagacgagtacctggtgttctattatattgcagtcgagctgacgttcaa

SEQ ID NO: 499531 - DNA, 201 bp, Homo sapiens
gcctcaagcgatcctcctgccttggcctcccaaaatgctgggattacaggtaaaagacaccatgcctggccatgagaggtaattttgctggtagactactsccttggtttttgtttctaaatcactgttctgatatctcagacacacaactttccctgtaaattggcctccattcagcccctgcaggtgacccctgccacc

SEQ ID NO: 499532 - DNA, 201 bp, Homo sapiens
cctcaatggccttggacatgattcaggagaattctctggattgccaggcagagactgctctgttttcttcccttaatttcttgaaaaaaaaaaaaaaatttctctctcttgtctgtgccacctaaaactgggggtggagtgacataagcacttctgtggccaccaccattatgactgcactacatcaggcctgaggcccac

SEQ ID NO: 499533 - DNA, 201 bp, Homo sapiens
caggaaaccttgagatcaaaagaacatccctgggaaggtgttaggctcagcttattattatgtgggggctcagcgtctatacccacctgaagctgggctgkccatgaggcttcagttcactaaccagatgtgcatgaaacagatacaaaaaggggaagcctttagggccaaaaaatagacctaggtttgtattactatttc

SEQ ID NO: 499534 - DNA, 201 bp, Homo sapiens
ctgcctcaatggccttggacatgattcaggagaattctctggattgccaggcagagactgctctgttttcttcccttaatttcttgaaaaaaaaaaaaaaatttctctctcttgtctgtgccacctaaaactgggggtggagtgacataagcacttctgtggccaccaccattatgactgcactacatcaggcctgaggcc

SEQ ID NO: 499535 - DNA, 201 bp, Homo sapiens
aagctcatgacctcaggtgatccaccaacctcagtctcctaaaatgctgggattgcaggcatgagccaccgtgcctggcccattttcataacataaaagtrcaaaagggaagcagcaagtgctgatgtagaaacggtagcaggttatccagaatatctagctaagataattgatggaggtggctacaccaaacaacaaatt

SEQ ID NO: 499536 - DNA, 201 bp, Homo sapiens
tattatctttctgattaaaaaccaagaaagaaaaaattaatttttttctagagaaattctcctgcatctcaccttaaaaaggtcttcttcaaaattgcatygattttcaatactgaaagaaacgtggtatactatggaatcagactaggtgaatgtatttccaagtaaattgcagcatatttcattctttccatttttttg

SEQ ID NO: 499537 - DNA, 201 bp, Homo sapiens
ggattagaatcccaaaggttagtaccaaaaatttagtattctttttcctatattgcagcttcttaaactgcgtttctgggtatgtgatgacaggctttggracacatgaagatgtaagatcagcattgttctcatcttcctgtaaaatatgtttgattggaatatctgttcaacgaattactatcttgtatatttagatat

SEQ ID NO: 499538 - DNA, 201 bp, Homo sapiens
actgcctcaatggccttggacatgattcaggagaattctctggattgccaggcagagactgctctgttttcttcccttaatttcttgaaaaaaaaaaaaawatttctctctcttgtctgtgccacctaaaactgggggtggagtgacataagcacttctgtggccaccaccattatgactgcactacatcaggcctgaggc

SEQ ID NO: 499539 - DNA, 201 bp, Homo sapiens
aaagatcacaactgttggggagaatgtgaggaaatgggaacccttgtgtactgttggtgggaacgtaagctattgcagccttatgcaaaacagtacagagrttccttaaaaagctaaaaatagagctaacatatgatccagcaatccctactgcatatatgtttaaaggaaatgaaatcagtacaggcacacctcatttta

SEQ ID NO: 499540 - DNA, 201 bp, Homo sapiens
aaatggggattaaattatatttagtagtataactctggaagtctggcatgaagtacctgccctaaggtgattcctctaagcctacgcatggatatctttatatcttgccattctaggtttggctatccacaggagaggggtgcaggaaagcgtacttgagatctttcaggaagcaagcccaggatcaggttaggcatggaa

SEQ ID NO: 499541 - DNA, 201 bp, Homo sapiens
tggtttttgaagactcataaaagtactgcctcaatggccttggacatgattcaggagaattctctggattgccaggcagagactgctctgttttcttcccytaatttcttgaaaaaaaaaaaaaaatttctctctcttgtctgtgccacctaaaactgggggtggagtgacataagcacttctgtggccaccaccattatg

SEQ ID NO: 499542 - DNA, 201 bp, Homo sapiens
tggatagaacaatgtatatagtatgctaccatttgtgaaaataaacaaatgtatgtacatatctaaaattgcatagatttatgggaaacttgtacaaaatrtattggtattagtggttgcttctagagaaagtaattgggtaataggagatcagagaaagaagagagatttgctttcctctagtaatccatttatgcttaa

SEQ ID NO: 499543 - DNA, 201 bp, Homo sapiens
taaataaattttctacccctgtctctttccctaccttctctttaaggccaacaattcttagatttgccctttcaaggctattttctatattcggtagatgygctttgttgtttttattatttttcttttgtatcttttgacagtgtctttttaaatagcctgtcttcaggctgactaattcttttttctgcttggtcaatt

SEQ ID NO: 499544 - DNA, 201 bp, Homo sapiens
aactcttaccacatcttcaccaaagctcctgacaacttagaggaggtcacgctccgaggttatcaactgggagcaaactttccagatccaatctaactagwctgagttaaaagaaaagatgcgtggtttattcctagctgatatggaaggtataaagcagtacctgtctttctcctctctccaggttgacaggagggcttg

SEQ ID NO: 499545 - DNA, 201 bp, Homo sapiens
aagacactatcttcagtgtataaatagtgagttattcttggagcgactgcaaggccattttctacacctatcttagaaaaacagaatgtttcaaacaagtkaatctctagtattctaggcctatgcaagagtattttgtaattgtagggctatgtatgatatttgttgtatctggagataaaaaatgactgggatcattac

SEQ ID NO: 499546 - DNA, 201 bp, Homo sapiens
atcacaattactcattccctctctccctagcccctggctaggggtatatatatatatatacccctatatataatatatatattttatatatgtatataaartaacttttactttatttctctaggaatttgcctattctgggtacttcatatatcatggaatccgatgatattggtccatttgggtctggcttatttcact

SEQ ID NO: 499547 - DNA, 201 bp, Homo sapiens
ggctattttcatcttgtgtaattttgagcaatctatttgtgctatctctatgtcaatttcctgctctataaaatgtggataatagtaatgattaccgcatmgaattgttgtgaggaccaaatgtaacagtatacttagaagttagaaggtacctggcgtattgttaatctctcaataagtgtaggtcattgttattcaaaa

SEQ ID NO: 499548 - DNA, 201 bp, Homo sapiens
gcatagaattgttgtgaggaccaaatgtaacagtatacttagaagttagaaggtacctggcgtattgttaatctctcaataagtgtaggtcattgttattmaaaacctatagtcaggcaacttgaagacatcattgaatttcttagttacattctcagtgtcctttagctgaatgtccatagcagctttaaaagacttccc

SEQ ID NO: 499549 - DNA, 201 bp, Homo sapiens
tgagaggttattaacttcttaaaatcatattggatttttccacttgtataatcagcatatattatctttctgattaaaaaccaagaaagaaaaaattaatwtttttctagagaaattctcctgcatctcaccttaaaaaggtcttcttcaaaattgcatcgattttcaatactgaaagaaacgtggtatactatggaatca

SEQ ID NO: 499550 - DNA, 201 bp, Homo sapiens
ggaggagaggagggcaaaggaggtgagaggttattaacttcttaaaatcatattggatttttccacttgtataatcagcatatattatctttctgattaaraaccaagaaagaaaaaattaatttttttctagagaaattctcctgcatctcaccttaaaaaggtcttcttcaaaattgcatcgattttcaatactgaaag

SEQ ID NO: 499551 - DNA, 201 bp, Homo sapiens
ggattgatattctttttaaaatatttggtagaattcagcagtgaagctatcaggtcctgagcttttctttactgagagattttggtatagcttcgatctcrttacttgctcttggtcggttagggttttagatttcttcctggttcaatcctagtaggttatatgtgtctaggaatttgtccatttgttttagattttcca

SEQ ID NO: 499552 - DNA, 201 bp, Homo sapiens
caaggacactgattaccccaaagggtaggaatggaggagaggagggcaaaggaggtgagaggttattaacttcttaaaatcatattggatttttccacttstataatcagcatatattatctttctgattaaaaaccaagaaagaaaaaattaatttttttctagagaaattctcctgcatctcaccttaaaaaggtcttc

SEQ ID NO: 499553 - DNA, 201 bp, Homo sapiens
gtgttaatatgggcaaggacactgattaccccaaagggtaggaatggaggagaggagggcaaaggaggtgagaggttattaacttcttaaaatcatattgratttttccacttgtataatcagcatatattatctttctgattaaaaaccaagaaagaaaaaattaatttttttctagagaaattctcctgcatctcacct

SEQ ID NO: 499554 - DNA, 201 bp, Homo sapiens
ttgtgtgttaatatgggcaaggacactgattaccccaaagggtaggaatggaggagaggagggcaaaggaggtgagaggttattaacttcttaaaatcatrttggatttttccacttgtataatcagcatatattatctttctgattaaaaaccaagaaagaaaaaattaatttttttctagagaaattctcctgcatctc

SEQ ID NO: 499555 - DNA, 201 bp, Homo sapiens
aagggcagctcactttagtgccctaaaagaaagacactatcttcagtgtataaatagtgagttattcttggagcgactgcaaggccattttctacacctawcttagaaaaacagaatgtttcaaacaagttaatctctagtattctaggcctatgcaagagtattttgtaattgtagggctatgtatgatatttgttgtat

SEQ ID NO: 499556 - DNA, 201 bp, Homo sapiens
aaaacgttagtgctgtattgattcactcaaagcaatgtccatatgtcaaaggcaaattaaaaagtgatgacagtttgtgtgttaatatgggcaaggacacygattaccccaaagggtaggaatggaggagaggagggcaaaggaggtgagaggttattaacttcttaaaatcatattggatttttccacttgtataatcag

SEQ ID NO: 499557 - DNA, 201 bp, Homo sapiens
ctgcgaggactctcaagtggaagtgtcatcagcagagggtaggcagacatgtagagccagaccaagctgtctattctaggtactatctggctctggaatgwtagttctttccaaaagtttatctattcacatgtactccaagagccaatcactgagccagcctcagagtccttcctgggttaggattagctcaggtgtcac

SEQ ID NO: 499558 - DNA, 201 bp, Homo sapiens
caattcttccacaaattgctaatggaaataatactgtggaatcctttgggaaggtagtctggcagtgcctacttaggataagagaagctcttacttggacktatcccttttggaaaccaattgcattgagaaaagtttccaggatgtaaagacatgtatacaaggatgtttactgaagcattgtttgtaatggcaaagaag

SEQ ID NO: 499559 - DNA, 201 bp, Homo sapiens
tttgccataatgcattaggacatagaactctgggattaactcctacctcctgagtgtgcaggtttaggacttgacatgggtccagtgttgtacaatatttyttggctgtttttatggatatcaattttactttttaatcctgttgcatttacatgagtcaaggcatgaagttcttatgcttctatgaatgcagatgatact

SEQ ID NO: 499560 - DNA, 201 bp, Homo sapiens
atatcactagtcagggaaatgcaaattaaatctacaataagatgccacttttcacccaccagtttggcagaaattagaagaaggataacattcagtgctgrtgagaatgtgggaaacaattcttccacaaattgctaatggaaataatactgtggaatcctttgggaaggtagtctggcagtgcctacttaggataagaga

SEQ ID NO: 499561 - DNA, 201 bp, Homo sapiens
tatgaaaatatatgttgaatatcactagtcagggaaatgcaaattaaatctacaataagatgccacttttcacccaccagtttggcagaaattagaagaaggataacattcagtgctggtgagaatgtgggaaacaattcttccacaaattgctaatggaaataatactgtggaatcctttgggaaggtagtctggcagtg

SEQ ID NO: 499562 - DNA, 201 bp, Homo sapiens
ccttttaaaacaaaagccacattttgttattcgttgtgcaagtcctgctgtcactcccaatctcattcagagaaagatatataaaagtcttataacagccstctaagttctccatgacttagaatccagtcacctccctgacatccctccagtcatgtccctgacttcaatctctttgccttctctgcttcaggcactttg

SEQ ID NO: 499563 - DNA, 201 bp, Homo sapiens
atatgaaaatatatgttgaatatcactagtcagggaaatgcaaattaaatctacaataagatgccacttttcacccaccagtttggcagaaattagaagaaggataacattcagtgctggtgagaatgtgggaaacaattcttccacaaattgctaatggaaataatactgtggaatcctttgggaaggtagtctggcagt

SEQ ID NO: 499564 - DNA, 201 bp, Homo sapiens
gggacagaggccttcctcttatctcaactgcaagaggccttcctctatgaatccttcttctgcacagactcttcacgtatgtcgggctgggggatggtccrgtctttcccattccacgaggccatatctcaggctatcacgtggggagaaccttggacaatacccggctttcctgggcagaggtccctgcggctttcagca

SEQ ID NO: 499565 - DNA, 201 bp, Homo sapiens
ttttcttgaggagggggaagagtagggaatacggcagcaggtatgtcaggagagaggcaacagtgagaaagggatcttggttatggggaatggtcactatrcttatctagatttggaaaggcaagtctggagtcaggatgtcaatacaaaaacagatttcagtgcaatgaaaaaattttgaaggaaattaaaagtactagt

SEQ ID NO: 499566 - DNA, 201 bp, Homo sapiens
tcctggctaaagagcagtgaatagtaaacaaaactcaacatcttaagaaccatcagctcacattcccgagagacaagtggaaggggaagggcttatttgakccaataattttttttaaagcccaattctgcatctttaagagaagaagggtgtaaaaattcataacaaagcataatctaagtgtaaagttacagaaaatat

SEQ ID NO: 499567 - DNA, 201 bp, Homo sapiens
accgagacattcagttcccaggggcaggcaggggacagaggccttcctcttatctcaactgcaagaggccttcctctatgaatccttcttctgcacagacycttcacgtatgtcgggctgggggatggtccagtctttcccattccacgaggccatatctcaggctatcacgtggggagaaccttggacaatacccggctt

SEQ ID NO: 499568 - DNA, 201 bp, Homo sapiens
cacctgtgggtatttctcatcaggtaggataagagactgagaaaagaaataagacacagagacaaagtacagagaaagaaaagtgggcccggggggccggygctcagcatactgaggacccgaaccagcaccggtctctgagttccctcagtatttattgattactattttcactatctcagcaaggggaatgtggcagga

SEQ ID NO: 499569 - DNA, 201 bp, Homo sapiens
gatattactatccccattttatagataatgcaactgaggcagagaggctcaaataatttgacctacctaaggtgacccagatagccagaagaggagccagrggtggaattttggtttgtttgattccaaagcccatgttgttaaccactttgcttccatttgtattgattttggctatatacttatgaaggaggccagccc

SEQ ID NO: 499570 - DNA, 201 bp, Homo sapiens
cacccatgatcttagacagtgacagaaacagatgagcttgttctagatctgtggtttgcctcaaaatgtctattttgtgccaataggtttattcaagcaasttacatatagtccatctttgaagctgcagttttcttcatttatgtttctgtccagtggaatggtcaccttcactggatttaaaggtttttaaaatttcct

SEQ ID NO: 499571 - DNA, 201 bp, Homo sapiens
catatgaaaatatatgttgaatatcactagtcagggaaatgcaaattaaatctacaataagatgccacttttcacccaccagtttggcagaaattagaagaaggataacattcagtgctggtgagaatgtgggaaacaattcttccacaaattgctaatggaaataatactgtggaatcctttgggaaggtagtctggcag

SEQ ID NO: 499572 - DNA, 201 bp, Homo sapiens
tgataatcatatgaaaatatatgttgaatatcactagtcagggaaatgcaaattaaatctacaataagatgccacttttcacccaccagtttggcagaaaktagaagaaggataacattcagtgctggtgagaatgtgggaaacaattcttccacaaattgctaatggaaataatactgtggaatcctttgggaaggtagt

SEQ ID NO: 499573 - DNA, 201 bp, Homo sapiens
aagcctcaggaatcatagtgaaaaagataatatatttgattacatgaaaattaaaaattgcttcatgtgaaaatctatcaataaaatagaaaataattctmaattgggcaacaaatttgtagcatacaccttgtgttagtatccctcatatccaaaacacatagagaattttaagaatgacacaaaatcccagtgtaaaaa

SEQ ID NO: 499574 - DNA, 201 bp, Homo sapiens
agcagagtgacttatttaataaatagcactaatgtaattagccagccataaggtgaataaatataaaagaatgttaatgcatgctattcaaaaatatattscaaatagaatgaagtttgaaatgtcaaaagtaaaaactcactgtaagacaaaatgaaaaaaacaacttgtatgatcttggattaggaaaaatcttcctaa

SEQ ID NO: 499575 - DNA, 201 bp, Homo sapiens
actaaaaagtagccaaaattagattattttacatttcaattctacataagacaaaaccaaacacataattttaattgtattgtttggtaaaagatgaaaakatcctaatgccaaatctggtaaagaaataacaaaaagagagttactgaccatattggcttatgaatacagatgcaaaaattctgaataaaatattcagta

SEQ ID NO: 499576 - DNA, 201 bp, Homo sapiens
gaagggctagataagggaagctggcttgtgttcagggaagcggcagaggagggaagctggcagctgggctgtgctaagatgaccttagccccagaccctgratgaacatcctcttctggatacaggacctgcccgaggcaccattttgaataggcaaatcttattttctttgtgttctttcatcatctgtattagcttttg

SEQ ID NO: 499577 - DNA, 201 bp, Homo sapiens
gaaattacaaactaaaaagtagccaaaattagattattttacatttcaattctacataagacaaaaccaaacacataattttaattgtattgtttggtaamagatgaaaagatcctaatgccaaatctggtaaagaaataacaaaaagagagttactgaccatattggcttatgaatacagatgcaaaaattctgaataaa

SEQ ID NO: 499578 - DNA, 201 bp, Homo sapiens
tttcttctcctgtccatgtctcttacaaagtcggtaatcaactcctaacttcaaaatgcactgccgcctttagtactcatctcttttagcttctcagcaamctttgactgctttggtcactctttccttgaaggtttctcttattttgacttccaaggtcattctcttatttttcacattcttttttttttttttttgcca

SEQ ID NO: 499579 - DNA, 201 bp, Homo sapiens
caaatatgcacatgtaccccctttatctaaaaggaaagttgaaattacaaactaaaaagtagccaaaattagattattttacatttcaattctacataagrcaaaaccaaacacataattttaattgtattgtttggtaaaagatgaaaagatcctaatgccaaatctggtaaagaaataacaaaaagagagttactgacc

SEQ ID NO: 499580 - DNA, 201 bp, Homo sapiens
aaaggggctgggttagaaaactacctatcgggtactatgctcactaccagggtgatgggatctgtccgtactccaagactcagcatcatgcaatatttgcrtgtaacaaatatgcacatgtaccccctttatctaaaaggaaagttgaaattacaaactaaaaagtagccaaaattagattattttacatttcaattctac

SEQ ID NO: 499581 - DNA, 201 bp, Homo sapiens
acactggagtattgttacaggtgcacactactaaattaggttttcaattttgtctgatgattaagctacgttacagtttacccacaaggactcaaatgaaraagtacagagtccttctcaggctgtaattagtttgtttcaacagtttgtagcaaaatttattgaaaggattgtctatacatgctatctccaatccccctc

SEQ ID NO: 499582 - DNA, 201 bp, Homo sapiens
gcaagatactttagtgaatagaaacattaaggagacattgccttttcccaaggctacaggatatcagcctctttgaagagtgacatggcctttacagccaraagcccacaaaatagaatgaagtaactgaattttcggtagcactctgcacaatttatgtggtgttggactcatgggttttaaagaaagagacttgtgatc

SEQ ID NO: 499583 - DNA, 201 bp, Homo sapiens
aacatcaccaaacttataaagaactgaagcacttctaatataaaacaatgcaataaatgtaagctgtatatacatttaagaaatattgatacaaacaagtragataattatttacctgatttttgttgcgttgatgtgtgatggtgatcacagtggtggtgagttaaattgagaaataaatgtttgcaaagcaaaaggtgt

SEQ ID NO: 499584 - DNA, 201 bp, Homo sapiens
taccctcccctgcctccagcttggattgtaagctcctcaagagcatggctgtgtcctttaacatcaggtctccatgtgagaaggagttcctgccatatcayaaatgcccaatcaacatttgtaagtgaagaaagctattctgtggtgtctgctttaatattaagagatggcttgcccaagattgctaagcagcttcattgt

SEQ ID NO: 499585 - DNA, 201 bp, Homo sapiens
taccataagctaattaatataaagaagagttaagttcctacagcatatttctggtgacaaaaacatcaccaaacttataaagaactgaagcacttctaatrtaaaacaatgcaataaatgtaagctgtatatacatttaagaaatattgatacaaacaagtaagataattatttacctgatttttgttgcgttgatgtgtg

SEQ ID NO: 499586 - DNA, 201 bp, Homo sapiens
ctctttacatgatcctaagcatgcttgccagtccttgctaattctagtccactgtttctcccattaacatcaaaagccatttataccctaaccatttcccstaacatcctacttctttttctgaacactttcttggcatactccctcacccactcacttctaaaaagtgattttgggaataggaagaaattttacctcttc

SEQ ID NO: 499587 - DNA, 201 bp, Homo sapiens
tgctgagcttaatatactgttgagtaacacttccagtgatggtgtccctctttacatgatcctaagcatgcttgccagtccttgctaattctagtccactstttctcccattaacatcaaaagccatttataccctaaccatttcccctaacatcctacttctttttctgaacactttcttggcatactccctcacccact

SEQ ID NO: 499588 - DNA, 201 bp, Homo sapiens
atccagccctgaaaaagccaatcttggtttgttttaatttgtcttctgtgcttctacttttagggtgctgagcttaatatactgttgagtaacacttccartgatggtgtccctctttacatgatcctaagcatgcttgccagtccttgctaattctagtccactgtttctcccattaacatcaaaagccatttataccct

SEQ ID NO: 499589 - DNA, 201 bp, Homo sapiens
ttgtcccttatcttttttgttatccagccctgaaaaagccaatcttggtttgttttaatttgtcttctgtgcttctacttttagggtgctgagcttaatawactgttgagtaacacttccagtgatggtgtccctctttacatgatcctaagcatgcttgccagtccttgctaattctagtccactgtttctcccattaac

SEQ ID NO: 499590 - DNA, 201 bp, Homo sapiens
attccagcagctgcagcagtagctgtgactgcaatgggacccacaatcactgcaatcaaagtaaaaatgaatcctttggatctagttagaaatcgttttamtacttctgctaaaagatggacagatggggaagcctcctgcagtcagtccatggacacagggatctacacgccctctcttgccctcaccagcagaatactg

SEQ ID NO: 499591 - DNA, 201 bp, Homo sapiens
attctttgattatgtgaacaacttttggttcaaaaagtagagtaactaaaagtataaaattcaatgccttacacagcaagcatgtgcagatagtagaaaawcctaattgataatttttaatatgtcgtctggagtagatgatttaggtttgtaagaagttataaactgcctaagggtagggaatcactgtctatggaatca

SEQ ID NO: 499592 - DNA, 201 bp, Homo sapiens
aggcaacaccttgtcctgtgccatgcttcactaatgatgaggaagtgagaaagagtaggggaaaggaggcacaacaaatgtcatttccatagcagaggcckcaagaccagcccacttgattctctggagatccttttctgcataacaatgatgaaaggtagcctaggaaagccatttgtctgaggcttcacctttgatacc

SEQ ID NO: 499593 - DNA, 201 bp, Homo sapiens
agagcagagccaaatgaggccacgtttttttcatgaagagtatttttctttttttttttttgagatcagggattcagattgtaatataagtgttcaattayaaagttattatgatagtgcatggcacgtgccctttccatcatctggatttttccacttttactgtatggctcactcttactcactctccagtcttcacct

SEQ ID NO: 499594 - DNA, 201 bp, Homo sapiens
gcagtgcttgcacctcataggtgatgatcatgagggggacaaggagcctctagacttaagagacaagttgccagcattctccagatggagtgtttccctcygcagcaccccctgctggtcagtttgacaagcaggtgaacagaagttctcaaatacacagtaagcagataaccccaacatcaccagaaatatcaagttgtg

SEQ ID NO: 499595 - DNA, 201 bp, Homo sapiens
gtggtagctgatgcctgtaatcctagcacattcggaggccaaggacgatggatcacgagaggtcaggagttcaagaccagcctggccaagatgctgaaacmccgcctctactaaaaaaaaaaaaacacgaaaaaaaaattagccatgcgtggtggtgggcacctgtaatctcagctactcaggaggctgagggagataatt

SEQ ID NO: 499596 - DNA, 201 bp, Homo sapiens
ttataggtttttaaaatatttttgttatccataggggtgaccctggagatcattaccaaaatttaaaaatttcaccactgggcacacatgttacccttctygtgatggcatggcaaagcttgatttgcaagagtttcttttggattgtccccagtgattccctttaaaaataggagctccttcaaggtaagaaaggaagga

SEQ ID NO: 499597 - DNA, 201 bp, Homo sapiens
cataataatgccttttcaatatattttcccagcaactaagaagttcagtgtttataattgtaataagaagcgtgctgatctggcctgaaatatagttttaytttagatatatgtctcataaatagaatttaagaagtcagggaatatgcttagaaagggattaccaaggccctataacacatgagtttgggggcacagggt

SEQ ID NO: 499598 - DNA, 201 bp, Homo sapiens
ctcagcaggtaagtattcctggagctgacagcggggagttgccgggcgggagtaggggtgaagagagaatagggagagagataacaggtgtgaagcgtccstcaatgccaggcatcctgctttggcaccttccagaaatttgtctcaatcatctttctattgaattcattttctgtttcacagattaggaaacctcaacta

SEQ ID NO: 499599 - DNA, 201 bp, Homo sapiens
ttgcttctcctccccattataaactatttaaaaaatatttaatagcttaagaaattacttaagtaatactcagtatagaaataaaatatgtggtctctcarctatccacagtgtgctgtcaattatggaataaaaaatacgtattgagtagtttaaatggaccatttttttaaaaggatgattagtttactgtaaactcta

SEQ ID NO: 499600 - DNA, 201 bp, Homo sapiens
catttgctttgcttctcctccccattataaactatttaaaaaatatttaatagcttaagaaattacttaagtaatactcagtatagaaataaaatatgtgktctctcagctatccacagtgtgctgtcaattatggaataaaaaatacgtattgagtagtttaaatggaccatttttttaaaaggatgattagtttactgt

SEQ ID NO: 499601 - DNA, 201 bp, Homo sapiens
ctgtcccaggattgcaaagatttcggagcccggcctcaggtggtaatggtggaggtgttagaaatggctggattccacatatattttgaaaggccagcacrtggaatttgcttatggatgttccataaataagagaaaaagagggctcagtgatgattcctgggcttttgacttaagcaactagaaggataaagtctccat

SEQ ID NO: 499602 - DNA, 201 bp, Homo sapiens
tgactgcactacatcaggcctgaggcccacagagcactgcatcttgcccaatgcctgctgtaatcacttcttggctactgcctatgtttgctcaaggccckggagatctgcaatcagcaggcagcaaagccggccaggcctgtgtccttcccatcagggcagtgagatcccccaggccctgggtggatacagaggtgctgt

SEQ ID NO: 499603 - DNA, 201 bp, Homo sapiens
ttttattattatactttaagttttagggtacatgtgcacaatgtgcaggttagttacatatgtatacatgtaccatgctgttgtgctgcacccattaactygtcatttagcattaagtatatctcctaatgctatccctccccccaaccccaccccacaacagtccccagagtgtgatgttccccttccagtgtccatgtg

SEQ ID NO: 499604 - DNA, 201 bp, Homo sapiens
gtttttctcatgaaatgtatttttcttttttttattattatactttaagttttagggtacatgtgcacaatgtgcaggttagttacatatgtatacatgtrccatgctgttgtgctgcacccattaactcgtcatttagcattaagtatatctcctaatgctatccctccccccaaccccaccccacaacagtccccagag

SEQ ID NO: 499605 - DNA, 201 bp, Homo sapiens
tttaattcaagatctaccatgctatatcactccccgcaaaaaaacttgtgttccatttgccctgggaacattatatcctgggctgatacatgagaacaatmcccacacctatcagctgccaatctttgtccaaaatacccctcctgtgcattccctactccatccccttgcaatgacctttgttgagggcctctcctcata

SEQ ID NO: 499606 - DNA, 201 bp, Homo sapiens
atatcactccccgcaaaaaaacttgtgttccatttgccctgggaacattatatcctgggctgatacatgagaacaatacccacacctatcagctgccaatmtttgtccaaaatacccctcctgtgcattccctactccatccccttgcaatgacctttgttgagggcctctcctcatacttaatattgctcttgtgacccc

SEQ ID NO: 499607 - DNA, 201 bp, Homo sapiens
aaaggaggaaaaaattacatgagtatataaatttccataaaaagacaaaaatgaaataacataaaatttaccgttcattctaaatataatttctatgaaartgggaaaacaggaaagtgctctaagcctgtaaagacagaattaaatgtaattttaaaggtaagtgtttatagctatttcattagaatcaggaatgagaca

SEQ ID NO: 499608 - DNA, 201 bp, Homo sapiens
tcagactgctgtgctagcaatcagtgagtctccatgggtgtaggaccctctgagccacgtgcgggatataatctcctggtgcaccgttttttaagcctgtyggaaaagtgccgtattagggtgggagtcacccaattttccaggtgccatctgtcacccctttctttgactgggaaagggaactccctgaccccttgctct

SEQ ID NO: 499609 - DNA, 201 bp, Homo sapiens
tctttttttttgtttcaccaagtgttatactcttactgtctttttcctttttttgtttcaccaattgagctttgagtgttctattagttctttcaactagkgtctgtccttgggaattataagggattcctgttgtatgtgtaatttttcactgatttaagaatttttgaaatgttttactacagtatcctggcccattat

SEQ ID NO: 499610 - DNA, 201 bp, Homo sapiens
gctaaaaatgattaagcatagtgaggaaggcaggtcaaaatctcagacagtccaataactagatcttttgcaccaaacagttagccaagttgtgagtgcamggaaaaatctttgaaggaaattaatagtgctaaaccagtgtacacataaatgataagaaagcaaaatagccttattgctgttttggagccagttttagtg

SEQ ID NO: 499611 - DNA, 201 bp, Homo sapiens
ctattgcctcctctaggctgtaggatccttaaggaaaggaatggtgttattggaatttcagtgtttgataatattggctgaataaaggtaattttttttttcttcatagggaaggaaacttttcaaacatgttcttaggtgtttcacatgcaggtcttgtaaatgaacactgggcctttgggaaaaatgagaggagcttta

SEQ ID NO: 499612 - DNA, 201 bp, Homo sapiens
agggcttctctggtctatatcctcactcttttaaagacgtgttcattttcttccttaggatacttaacgggacattttgagatgtcctataacatatcatrttatctgtctgctattaaatacaccataaaacacggtgttcccccaccaattatttggaaacattttgaagcaggaatagaaaaggtagttgtaatacag

SEQ ID NO: 499613 - DNA, 201 bp, Homo sapiens
cccactgtcctgcacccactgtctgacaagccccagtgagatgaagccctcagttagtacctcagttagaaaattcagaaatcacccatcttctgcgtcaytcacgctgtgagctatagaatggagcagttcctattcgcccatcttggaactgccccccaacatttcttttctgaatcaattagctggtaaaatcctggg

SEQ ID NO: 499614 - DNA, 201 bp, Homo sapiens
gctgcttgcccatttcttcagactcgttaccttggatttggagtctctgtttccagtttacgatctcacaatttttcaaaacttcttctgatttttgaggstctttggagaacatacgatatacgtttgtgtatgaatccatgtcatcagtcatctcctgtattggatgatataagatcaggtcattcccttgaacttttt

SEQ ID NO: 499615 - DNA, 201 bp, Homo sapiens
atttgtatagggccagcagcttatgggagttattcagtaggatcattctgtgggatgcttcagaccttgagaccttgaagaagaaactctgaaaagataakaaatgaagggaaaatgttaaggaaacaaatgaatttaaaatgcactttatacatctccattcaagtaacactcgtgatgtaggtactgttagtatcatat

SEQ ID NO: 499616 - DNA, 201 bp, Homo sapiens
taagcagttttcctccctgggtgggccaggtgttccttgccctcattccagtaaacccacaaccctcagcgtggacttcatggccatcacgaacatgtcayggtgctgcagagattttgtttatggccagttttggggccagattatggccagatttgggggcctgtccctaaaaagaaatgtaattaaagtacagagaaa

SEQ ID NO: 499617 - DNA, 201 bp, Homo sapiens
atgtccctgaccccttatgatagcagtagtgcaaacaccaaaggctgaacttacaaccagactcgcaggcaacaccttgccttgtgccatgcttcaatcaygaagaggatgtgagaaagagtaggagaaaggagacacaaaaaatggcatttccatagcagagacccccaaggccagtccatttgattctctggatttctt

SEQ ID NO: 499618 - DNA, 201 bp, Homo sapiens
ccagtccatttgattctctggatttcttttctgtacaacagtgatggaaggtagcctgggaaagccattcgtctcaggcttcaccttggatacctttctaytcactgaactgattccattctttagtgtaccattgcctcataaatccagaaatagcagggacattcatttttgataaagtatccatacagattaggttta

SEQ ID NO: 499619 - DNA, 201 bp, Homo sapiens
ttacacgaagggtgggaacacgtggcactcatgcaaggtgcccagtactgaaggagtgttttaaaatactcacgtttcctttcaccctataaaagcagccmtggtgtctgaactggtcagttcctcaggccctgtggacctgcctggctccaccagtccctgtctgtgtgcctacctgcttttgaggccggataataacca

SEQ ID NO: 499620 - DNA, 201 bp, Homo sapiens
tgcccaacccttattaatttctagtatgtttccattgtgatcagagaagattctcaatattatttcaatttcttgaatatcttaagacttgttctgtgacmtaacatatggtctatcattgagaatgatccatgttctgatgatacaactgtgtattctgaagctcttgggtaaaatgttctgtagatatctattagattt

SEQ ID NO: 499621 - DNA, 201 bp, Homo sapiens
tagaatgcaaactgaaaaaaagtgagaaaaagaccatatttcttgatgaaaaaatttagtgtcacaaaaatattaattcttccaaaattgtcgaaaaatgstcctccaataccaatcacaactcgaatagttatttgggatagttggtggggaactggaagaattagttatgttcatatagctattaagtttataagaaat

SEQ ID NO: 499622 - DNA, 201 bp, Homo sapiens
agaaaaagaccatatttcttgatgaaaaaatttagtgtcacaaaaatattaattcttccaaaattgtcgaaaaatggtcctccaataccaatcacaactcsaatagttatttgggatagttggtggggaactggaagaattagttatgttcatatagctattaagtttataagaaataggaaagtaaaaaaagattggtga

SEQ ID NO: 499623 - DNA, 201 bp, Homo sapiens
caactctgctctttgagctgagtaatattgagtttcaatgactcgttcttttggcctgatgtaagctgcttttccatggctggaaccatcagtaaacaccrtcagagcattctgtaaatgtttatgtctggtaattttaggtaaaatccaagtagccaattttaaaaactggaagatttttgtttttgggtaatgattgtc

SEQ ID NO: 499624 - DNA, 201 bp, Homo sapiens
gcctgaccaattaatgtagctatttgatcccagtacaatgtaaaagtattaattgtactgtgaggaaggaaggaccactccacaagacctgcgttttgaaygataacggctgttggagaatgcacagtagcaaaaatcaagctggagttgggccaagggatgtattctatttacttgtgctcactgaattttttcttcaac

SEQ ID NO: 499625 - DNA, 201 bp, Homo sapiens
ttgatcccagtacaatgtaaaagtattaattgtactgtgaggaaggaaggaccactccacaagacctgcgttttgaacgataacggctgttggagaatgcrcagtagcaaaaatcaagctggagttgggccaagggatgtattctatttacttgtgctcactgaattttttcttcaactaatccaatttctttagttgtct

SEQ ID NO: 499626 - DNA, 201 bp, Homo sapiens
cacacgattagaataagtaacatgatgtcatttttggtagcaatcttccatttcttccttatgtataaaattgaacctcacagagaaactaactgcctagwgctatgggtccagagtagagctctagctttgcgtttctctttgcagctgtgctctgagagatttgatgcaatcccactgcaatttgacatcagcgacagc

SEQ ID NO: 499627 - DNA, 201 bp, Homo sapiens
aaatttgttaagcctaaaatgtggggtcatagggcatcaatcccctgagggtaaaagaaaaatatttgtggatatataagacttcagaagttatattcttrtgaggatcaaagaaaggtatttgtgaatttgagagtcttcagctatcatataagtagcataattacacacagaaaatattggagaaagaattttaacaaa

SEQ ID NO: 499628 - DNA, 201 bp, Homo sapiens
aagtagcataattacacacagaaaatattggagaaagaattttaacaaatcaaatgggaacagagatctcaaataggagcagataaaaaggagaagaaacmgtggtgagccaaaaaaaatctgacaaattttatgtagacagttaactctgaatggacaatgatagactctacaggaatgtgtataaaagttttaaagaag

SEQ ID NO: 499629 - DNA, 201 bp, Homo sapiens
taactctgctgttcttgcagttgtcaaaaaaaactggtcttttttttccccccacctccaagatatgtcttttctgtttatcacctgtcaactaaaattgyccataccctgtgttttactattgtattctcctttaaagttttagtaaagattttagaagtctcaattcaagatctaccatgctgtatcacttcctgcaga

SEQ ID NO: 499630 - DNA, 201 bp, Homo sapiens
aactcaaagtgttttctcacagctttggagccagaaattagaatgcatgttttccagaggaattagattacacaatgcaatatatataaaaatgcatagcrttatacctggcattatgtaagaacaatatttaacatgttagtttttttaattgactttatattaatcaacatgtcatatagagatttagcaattatatcc

SEQ ID NO: 499631 - DNA, 201 bp, Homo sapiens
ctcttgcaaggtgcgaagtacttaaggagtcttttaaaatactcacattttctttcactctataaaagcagccctggtgtctcaactggtcagttccttakgccctttggaccaacctggctccacccgtccctatctgtgtgcctacctgcttttgaggctggataataaccatctgatactcaggccaggagtccacta

SEQ ID NO: 499632 - DNA, 201 bp, Homo sapiens
accatgccctgctaattttgtttattttttatttatttttgtgtgtgtgtggagatgaggtctcactatgttgcagaggtgggtctcaaattcctgggctsaagtgatcctcctgccttggcctcctgaagtgctgggattacaggaagaagacatcatgcctggccctgagaggaaatttttactggtagacttctgctt

SEQ ID NO: 499633 - DNA, 201 bp, Homo sapiens
aatattaagctttggaaacagaagaaaagttcctaatgccaaatctgttaaaaaaataacaaaaagagacttattgaccatattctcttatgaatacatayataaaaattctgcataaaatattcagtagtatatcagaagaacatgagcacttccaagatggccaaataggaacacctccagtctgcagctctcagaaag

SEQ ID NO: 499634 - DNA, 201 bp, Homo sapiens
ccaatcaacatttgtaagtgaagaaagctattctgtggtgtctgctttaatattaagagatggcttgcccaagattgctaagcagcttcattgtctacaayggaacaagattctgtgggtagcaggtccattggtgccactgacaggaggcctcaaggaaacctagtgccttattcattctgatggcgccttgattttctt

SEQ ID NO: 499635 - DNA, 201 bp, Homo sapiens
gcaatcaaagtaaaaatgaatcctttggatctagttagaaatcgttttaatacttctgctaaaagatggacagatggggaagcctcctgcagtcagtccawggacacagggatctacacgccctctcttgccctcaccagcagaatactgtgctgccaatcaaaagtcgaatcaatgcaagtaagcaatctacagttttta

SEQ ID NO: 499636 - DNA, 201 bp, Homo sapiens
gaatggtgatgacttttacccagcatactgcctgtaaacatattgttaacaaggcacatcttgtacagccctggatcccttaaaccttgattccatacaayacatgtttctgtgagctcaaggttggggctaaagttacagactaacagcatctcaaggcaaaacaattgttcacggtacaggtcaaaatggagtttctta

SEQ ID NO: 499637 - DNA, 201 bp, Homo sapiens
ctctccaggccagttcctatggtcccatcctccagcagacccagggtccaggcccatcacagttgactccagtattgggcaggtgcctacagacccagtayctagtactgcctctgtggacttaggttccagtccagttcctacagccctaggacccaagccaccctttgtggccctagtgtccatgcccacttctgaata

SEQ ID NO: 499638 - DNA, 201 bp, Homo sapiens
tatctggcaagcatctgcagacccaggctccaggcctcccgaggcctaagccagtttctgccaccccactctccaggccagttcctatggtcccatcctcyagcagacccagggtccaggcccatcacagttgactccagtattgggcaggtgcctacagacccagtatctagtactgcctctgtggacttaggttccagt

SEQ ID NO: 499639 - DNA, 201 bp, Homo sapiens
agtaaaatccagtaatgggtatgcgactattgcccgaaactccaggctagtacctgcacactaagccagaccagatcacacagcccaggctccaggcttgyctggtggacttggtttctgggtatatcctcatgccaggtctaccccagtgccttggatgtcagacagtctttgggaccaggccagccccagtgactccag

SEQ ID NO: 499640 - DNA, 201 bp, Homo sapiens
cagtaaccaccagaaacctgaaatagaagtcatacttcatggagaaagaggccaaaagtatttttcctctatggtgtttatttatttttttgtagaactamtttatggaggtataattgacatacaaaaagctgtatgtgtttaatatataaaccttgatgaatatagaggtgaatacatacatactcatgaaactatcac

SEQ ID NO: 499641 - DNA, 201 bp, Homo sapiens
cctctaagagtctaaggaagagaaaaacaaaactttggctatactacaaatcaataggggactctttgttgctccttaatattttctttctgattctttcrtctcctgttccccatttttctaccccaaattcagctttcattatttgcttagtccctgctaatgcattctctaaagccatgtcccaaaactgtggttaag

SEQ ID NO: 499642 - DNA, 201 bp, Homo sapiens
tcagcaagtggtatttggttttagctagatcagggaactgagaaggtgtcggatccacaggacatgctttcttggctttggcatcctagaacattttaaarctctctgatgtcttctagtcctctaagagtctaaggaagagaaaaacaaaactttggctatactacaaatcaataggggactctttgttgctccttaata

SEQ ID NO: 499643 - DNA, 201 bp, Homo sapiens
ttcctcctgaaggtccaaaggagcatcctaactcttaattcaggagctttggtgattgagcagattcttcatatctggacactcagggaggggttgttaawgcagtcagaggaccttgcactgctggtggctttagatgtggctgcacctctctgtagcaaaagaaagctgttttaactgactggtggctggtggcaagac

SEQ ID NO: 499644 - DNA, 201 bp, Homo sapiens
ccatgagactctcatgctctcaaatcttggggaatttttttctctccagaagtctttctagggaagaaggtttctttactggcttctgagatgacaggagracactgggacctgtggttccccagcaatgcttgctctatctcagaattcctaatgaagttcctcctgaaggtccaaaggagcatcctaactcttaattca

SEQ ID NO: 499645 - DNA, 201 bp, Homo sapiens
ctagctccagtcggcctcaagtctgcctatgattctggcaaactgaatcaggaccttggccaggagaatagcttcctctcccatctctgggctcctcaccyatctgtagggctgctgagcttgccagtttcttataacacttcagttccagagcagactcctttgcatcagcctttcagaccagctctggagtctctctag

SEQ ID NO: 499646 - DNA, 201 bp, Homo sapiens
tgcaagctcggtctcaaatccatcttgctgatcaactaaaattatgagttttcatagcagtgaagaaatgtaacaatgtgtagaaaaacaggaactcaggmgacctaaggaagcaatcataatttatgaggggtctggtgtcccattgtctggatgggatcatctggtgagtttcaattctttgatactttttgagggacg

SEQ ID NO: 499647 - DNA, 201 bp, Homo sapiens
cagctcaccacacagaaagccaatcaatataaccaattgccaaggaagaaggctgagttggatgctgtagcagaggagatgcaagctcggtctcaaatccrtcttgctgatcaactaaaattatgagttttcatagcagtgaagaaatgtaacaatgtgtagaaaaacaggaactcaggcgacctaaggaagcaatcataa

SEQ ID NO: 499648 - DNA, 201 bp, Homo sapiens
taggttggagtgcagtggctgaatcaagactcactgaagccttgatcattcaggctcaagcaatcctccaatctcagtctcctgagtagctggaactacargcatgaatcactgtgcttggctaattgtttaatttttattttatagagatgggggagggggtctctgtttcccaggcttatctccaactcctggtgacaa

SEQ ID NO: 499649 - DNA, 201 bp, Homo sapiens
ttctgtgccccattgtcattctctgcctctatttgtctttttgacagggtctcgctctttcacctaggttggagtgcagtggctgaatcaagactcactgmagccttgatcattcaggctcaagcaatcctccaatctcagtctcctgagtagctggaactacaagcatgaatcactgtgcttggctaattgtttaatttt

SEQ ID NO: 499650 - DNA, 201 bp, Homo sapiens
cctgttgaatgagtcataaaactctgtctttgacccagaaagcttgtgttatctgtcagcattcatgaaacattgccccaagtagggtaaacttttatatrcttcacagttcttagcagtcttttctggatggagaatgcctttagtcttccgtcaataacaaatgaggatgctccttttaaaacaaaagccagattttgt

SEQ ID NO: 499651 - DNA, 201 bp, Homo sapiens
cttctcatcttaatagatcatcctttaatggacttggtttccaagacaacacactctcttgttttttctttaactttactgactactttttctcagtctcmtctgtggacccttctttcctccccagtttcttaattttggatcacttcagagttcccggtgatcccatctggtcccatagctttaaaatcaatctacctg

SEQ ID NO: 499652 - DNA, 201 bp, Homo sapiens
attttgtctgatgattaagctacgttacagtttacccacaaggactcaaatgaagaagtacagagtccttctcaggctgtaattagtttgtttcaacagtktgtagcaaaatttattgaaaggattgtctatacatgctatctccaatccccctcctaacctcatctaattgggtttttgctgctaccattctactgaaac

SEQ ID NO: 499653 - DNA, 201 bp, Homo sapiens
caaaatctggccagcccctgcagacacaggctcaatgcacgcctcagagccatgttagcccctgtggacccatgctcagtccagcacctactgttaacagsctctgtacctgcccttatagaaattggctttacgttcatccccacatacccaatgaaaagatccaccccagttgatccaggcttcaggcccaactctaca

SEQ ID NO: 499654 - DNA, 201 bp, Homo sapiens
cacttctaatataaaacaatgcaataaatgtaagctgtatatacatttaagaaatattgatacaaacaagtaagataattatttacctgatttttgttgcrttgatgtgtgatggtgatcacagtggtggtgagttaaattgagaaataaatgtttgcaaagcaaaaggtgtaagaagcaactcttgtatctatgaattta

SEQ ID NO: 499655 - DNA, 201 bp, Homo sapiens
gaagaatatttttgccagatataatattctactgtaaaaggtttttctccttcagtactttaaatatgtcatgccactgtctgcgaggttttcactgaaaraatctgctgtcagatgtattggatcttcattgtatgttatttatttcttttctcttgctgcttttacatttctttctccttgacctttggtagtttgatt

SEQ ID NO: 499656 - DNA, 201 bp, Homo sapiens
ttcttccttcatgtttgaagaatatttttgccagatataatattctactgtaaaaggtttttctccttcagtactttaaatatgtcatgccactgtctgckaggttttcactgaaagaatctgctgtcagatgtattggatcttcattgtatgttatttatttcttttctcttgctgcttttacatttctttctccttgac

SEQ ID NO: 499657 - DNA, 201 bp, Homo sapiens
agcgagcctgggcaatggtgggtgcccctcccccagccttgctgccgccttgcagtttgatctcagactgctgtgctagcaatcagtgagtctccatgggygtaggaccctctgagccacgtgcgggatataatctcctggtgcaccgttttttaagcctgttggaaaagtgccgtattagggtgggagtcacccaatttt

SEQ ID NO: 499658 - DNA, 201 bp, Homo sapiens
aatatcaaaatatataacttttacatatgtacccaaattatgtttgcatgtggacaaggacttgaagggaataaataaacatgaaaattgtttttgggtgrtgaaagtatgtgtgatttatttcttatttgagaattttagtttgtaccattgagatgtttttatttttatgcaagattgaaaaaaacatggaaggcaatg

SEQ ID NO: 499659 - DNA, 201 bp, Homo sapiens
aggttactgctgtctttttgtttgtctgtgccctgcccccagaggtggagcctacagaggcaggcaagcctccttgagctgtggtgggctccacccagttygagattcacagctgctttgtttacctaagcgagcctgggcaatggtgggtgcccctcccccagccttgctgccgccttgcagtttgatctcagactgctg

SEQ ID NO: 499660 - DNA, 201 bp, Homo sapiens
tgagggcctctcctcatacttaatattgctcttgtgaccccaccctggcctcagcttctaacatctacccaaataaaagtgttctctacctgtattcctamcatcaacatttcttttctaaatcaggaagctgctaaaaacctggggagacccctccccaccttctttaaaaaaatcgttgtaaaggacacataacacaaa

SEQ ID NO: 499661 - DNA, 201 bp, Homo sapiens
caggaccctcagctgcaggtctgttggagtttgctagaggtccactccagaccctgtttgcctgggtatcagcagcggtggctgcagaacagtggattttygtgaaccgtgaatgctgctgtctgatcgttcctctggaagttttgtctcagaggagtacccagccgtgtgagatgtcagtctgcccctactggggggtgc

SEQ ID NO: 499662 - DNA, 201 bp, Homo sapiens
ccccccatctccaagtgctttctttgctctgtttctcacctgatttaactaaaattgcccatacccatgtgtttcactattgtcttctcctttgagctttkggtcaagattttaaaagttttaattcaagatctaccatgctatatcactccccgcaaaaaaacttgtgttccatttgccctgggaacattatatcctggg

SEQ ID NO: 499663 - DNA, 201 bp, Homo sapiens
tttttttaaaaggatgattagtttactgtaaactctataaactttcatatagatttaacaaattaatcatttacaattataaatatgtaaaaattctttgdttatgtgaacaacttttggttcaaaaagtagagtaactaaaagtataaaattcaatgccttacacagcaagcatgtgcagatagtagaaaatcctaattg

SEQ ID NO: 499664 - DNA, 201 bp, Homo sapiens
cattcatttcatcttccatcactgataccctttcttccagttgatcacatcagctcctgagtcttctgcattcttcatgtagttctcaagccttggctttyagctccatcagctcctttaagcacttctctgtattggttattctagttatacattcgtctaaatttttttcaaagtttttaacttctttgcctttggttt

SEQ ID NO: 499665 - DNA, 201 bp, Homo sapiens
aaaaaaatggtctttttcttccccccatctccaagtgctttctttgctctgtttctcacctgatttaactaaaattgcccatacccatgtgtttcactatkgtcttctcctttgagcttttggtcaagattttaaaagttttaattcaagatctaccatgctatatcactccccgcaaaaaaacttgtgttccatttgccc

SEQ ID NO: 499666 - DNA, 201 bp, Homo sapiens
tttattcttttttctctaaacttcccttctcacttcatttcattcatttcatcttccatcactgataccctttcttccagttgatcacatcagctcctgartcttctgcattcttcatgtagttctcaagccttggcttttagctccatcagctcctttaagcacttctctgtattggttattctagttatacattcgtct

SEQ ID NO: 499667 - DNA, 201 bp, Homo sapiens
gtttttttaattgacttcatattaatcaacatgtcatatagagatttagcaattatattcaatgatgtaaaaataattaaaaatgtgaagaacttacaacmaaattaatgtaagagaaggaacccacgaatcagatatttgaaacaatcatttgcaaatcagttaacacagatttttgaaattttttatccatgaagttaa

SEQ ID NO: 499668 - DNA, 201 bp, Homo sapiens
agtgtgctgtcaattatggaataaaaaatacgtattgagtagtttaaatggaccatttttttaaaaggatgattagtttactgtaaactctataaactttsatatagatttaacaaattaatcatttacaattataaatatgtaaaaattctttgattatgtgaacaacttttggttcaaaaagtagagtaactaaaagta

SEQ ID NO: 499669 - DNA, 201 bp, Homo sapiens
ggtactggttgttgctttccatgtttagtgcttccttcagaagcttttttagggcaggcctggtggtaacaaaatctctcagcatttgcttgtctgtaaartattttatttctccttcacttatgaagcttagttcggctggatatgaaattctgggttgaaaattcttttctttaacaatgttgaatattgacccccact

SEQ ID NO: 499670 - DNA, 201 bp, Homo sapiens
gaaggctgaatcagatgctgtaggagaggagatggtagttcagtgtcaaatccatctccctgaccagctaaaattatgagtttacatagcagggaggaaawgtaaccatgtgtagaaaaacaggaactcaggagacctaaggaagcaatcataatgtatgaggggtctggtgtgccatcatctggatggaatcatctggtg

SEQ ID NO: 499671 - DNA, 201 bp, Homo sapiens
ttagtttttttaattgacttcatattaatcaacatgtcatatagagatttagcaattatattcaatgatgtaaaaataattaaaaatgtgaagaacttacmacaaaattaatgtaagagaaggaacccacgaatcagatatttgaaacaatcatttgcaaatcagttaacacagatttttgaaattttttatccatgaagt

SEQ ID NO: 499672 - DNA, 201 bp, Homo sapiens
caggtggtgaatgctctgaggaatgaattctttccttcaatgcagaggtttcccttctggcccagcctatgtctagaaatgttgtctaggagcagtggccyggaacgggggcctcacaactctgtttggtgccttatcctcttgtggctcagctgatatgcaaagacaaagtcttccttactgtttctttccattcctcca

SEQ ID NO: 499673 - DNA, 201 bp, Homo sapiens
gtctttacaattttgtatgattctgcagtgactggtactggttgttgctttccatgtttagtgcttccttcagaagcttttttagggcaggcctggtggtracaaaatctctcagcatttgcttgtctgtaaagtattttatttctccttcacttatgaagcttagttcggctggatatgaaattctgggttgaaaattct

SEQ ID NO: 499674 - DNA, 201 bp, Homo sapiens
ttttagatatctattttttaacaaattgagcatcaactctatatattctactgtaattaatgtactaaataattaaatattacacacacttaatttcttaytttttagatgaagatgaatctaagtggtggttcaagtatgtcctttgtccatcctagtggaccattttgggtgcttcagactgcaactctaccctcctgt

SEQ ID NO: 499675 - DNA, 201 bp, Homo sapiens
cttcccaaatgcctgtaacagaacactccaccactaccatcataagttttttcctgtattttggtcattatatgcctgagaattcttctttcatctgcaayagaaaatatcagccctctaagaacaggtatgactaaaaaacttggagcaggagtaggcatagattttctttagtttctcagggccaaatatttcaaacct

SEQ ID NO: 499676 - DNA, 201 bp, Homo sapiens
aatacagcacactgatgggtcttgactctttatccaatttgccagtctgtgtcttttaattggagcatttagtccatttacatttaaagttaatattgttatgtgtgaatttgattctgtcattatgatgttagctggttattttactcgttagttgatgcagtttcttcctagcctcaatggtctttacaattttgtatg

SEQ ID NO: 499677 - DNA, 201 bp, Homo sapiens
cttgtgataccaaagagctactgtgtactagctgggcacttggcaatgctcttagcatttatattgtatagatttattcagtgtccatagcaactttaagmggtaggtgctaacgttattcccatctcattgatggaaaaaccaaacgtaaagtcagagaaagggaaagaaacatccacaaagccatctgactagaaaatg

SEQ ID NO: 499678 - DNA, 201 bp, Homo sapiens
ccagatgctcagaatcccaagccattgttctttgtattgtaagatgctggtttccactttgtgatgaattttgcacattgtgactccagatatctcatcaygaatctcttcctcttgagactttagttgaattagtttacacaaatatttgatctggaaactttctctcactctagcctggtactggcttgaatatgttga

SEQ ID NO: 499679 - DNA, 201 bp, Homo sapiens
tggctgagtgtctgtgggaggttgatggagccccaccctctgtgtactctcacaatgtgtcaagggtctctgggatgcttctttcatatcaatgtccttcwttaacccttagcaatgtgaaactgggatgcagcagccatcgttggaagacatctgatagctgttggcacctattcataaaatctgaaaacttcctaggga

SEQ ID NO: 499680 - DNA, 201 bp, Homo sapiens
actccagcaggggattctccaagtccacttctctgatgtatctactctgtggatcaaaactcaaaggtttagccttatgtgtcacaacctcagggctctcygggcctagcttagttctgatatcagtcccattgtactcagtattagtcataagtgacttcatgaaacactcgtggcagcttggattctgacatgaacatg

SEQ ID NO: 499681 - DNA, 201 bp, Homo sapiens
caagagcccacttgctgctctaccatgctgtggctgtgctggcacctaaggtgcaaaacaaagtctctttactctccttccatttttctgaagaagaaagmatcttgcctcatagctgcctcagctgaaatgtgctgagtctcacctgaaacctgctagtctcagatgctcatccaaagccctcagtgtattaatagtacc

SEQ ID NO: 499682 - DNA, 201 bp, Homo sapiens
tagggatatatacacaaaataacttttattttactttatgtctttaggagtttgccaatactaggtacttcatataaatggaattctatgatatttgtccmtttaggcctggcttatttcacttagcataatgtttttgaggtttgcctatgttgtatcatgtgtcagaattacatttcataactaaaataattttccatt

SEQ ID NO: 499683 - DNA, 201 bp, Homo sapiens
gagactaggattgcaaaccctgcctttttttgttttccgtttacttggtagattttcctccatccttttattttgagcctatgtgtgtctctgcacgtgakatgggtttcctgaatacagcacactgatgggtcttgactctttatccaatttgccagtctgtgtcttttaattggagcatttagtccatttacatttaaa

SEQ ID NO: 499684 - DNA, 201 bp, Homo sapiens
ctgtctgacaagccccagtgagatgaagccctcagttagtacctcagttagaaaattcagaaatcacccatcttctgcgtcactcacgctgtgagctataraatggagcagttcctattcgcccatcttggaactgccccccaacatttcttttctgaatcaattagctggtaaaatcctgggtagacccctccccatact

SEQ ID NO: 499685 - DNA, 201 bp, Homo sapiens
tgattaaaaaccaacaaaaaaaatatttttttctagataaattctgtttctcaccctaaaaagttattattcaagatcaaattgactttcaacactgcacraaacatggtatactatggaatcagacaaggtgaatgtaattcaaagtaaattgcagcatatttcaatctttcctttttttttggtcatatatgtgtcctg

SEQ ID NO: 499686 - DNA, 201 bp, Homo sapiens
tctggatgtctattaggtccacttggtgcagagctgagttcaattcctgggtatcgttgttaactttctgtctcactgatctgtctaatgttgacagtggrgtgttaaagtctcccattattattgtgtgggagtctaagtctctttgtaggtcactcaggacttgctttatgaatctgggtgctcctgcattgggtgcat

SEQ ID NO: 499687 - DNA, 201 bp, Homo sapiens
ggtgaggtgatatctcgccctgctttggctcatgctcggtgggctgcacccactgtcctgcacccactgtctgacaagccccagtgagatgaagccctcarttagtacctcagttagaaaattcagaaatcacccatcttctgcgtcactcacgctgtgagctatagaatggagcagttcctattcgcccatcttggaact

SEQ ID NO: 499688 - DNA, 201 bp, Homo sapiens
aatgccttgagatactctttgggttaaatctgcttggtgttctacaactttcctgtactcagatactgacatcattctctggtatggggaagttctctctyactattcctttaaataaattttctacccctgtctctttccctaccttctctttaaggccaacaattcttagatttgccctttcaaggctattttctatat

SEQ ID NO: 499689 - DNA, 201 bp, Homo sapiens
gaatgagtttcttaatcctgagttctagtttgactgcactgtggtctgagagacagtttgttataatttctgttcttttacatttgctgaggagagctttrcttccaagtatgtggtcagttttggaataggtgtagtgtggtgctgaaaaaaatgtatagtctgttgatttggggtggagagttctctggatgtctatta

SEQ ID NO: 499690 - DNA, 201 bp, Homo sapiens
gcccctgcaggtgacccctgccacctcatagggcccttaatctgtgagtgtcagccttgtccttttcctccctttcctcctccaccccctttcccagaagrgtcctatgctttacacgaagggtgggaacacgtggcactcatgcaaggtgcccagtactgaaggagtgttttaaaatactcacgtttcctttcaccctat

SEQ ID NO: 499691 - DNA, 201 bp, Homo sapiens
ctgcttttacatttctttctccttgacctttggtagtttgattttaaatgccttgagatactctttgggttaaatctgcttggtgttctacaactttcctrtactcagatactgacatcattctctggtatggggaagttctctcttactattcctttaaataaattttctacccctgtctctttccctaccttctcttta

SEQ ID NO: 499692 - DNA, 201 bp, Homo sapiens
atatggtggattacatttattgatttgcttatattgaaccagccttgcatcccagggatgaagcccacttgatcatggtggataagctttttgatgtgctrctggatttggtttgccagtattttattgaggatttttgcatcaatgttcatcaaggatattggtctaaaattctgtttttttgttgtgtctctgccaggc

SEQ ID NO: 499693 - DNA, 201 bp, Homo sapiens
ctttgaagaaattggaccatggatcaaataaactaagcattaatcttccatctgaaattgtcaggaaaccttgagatcaaaagaacatccctgggaaggtrttaggctcagcttattattatgtgggggctcagcgtctatacccacctgaagctgggctgtccatgaggcttcagttcactaaccagatgtgcatgaaac

SEQ ID NO: 499694 - DNA, 201 bp, Homo sapiens
aaaatgctgggattacaggtagaagacaccatgcctggccctgagaggtaattttactggtagacttatgccttggtttctgtttctaagccactgttctratatctcagacacccaactttccctgtaaattggcctcctttcagcccctgcaggtgacccctgccacctcatagggcccttaatctgtgagtgtcagcc

SEQ ID NO: 499695 - DNA, 201 bp, Homo sapiens
cacccctttctttgactgggaaagggaactccctgaccccttgctcttcctgagtgaggcaatgcctcgccctgcttcggctcgtgcatggtgcgctgcawccactgtcctgcacccactgtctggcactccccagtgagatgaacactgtacctcagatggaaatgcagaaatcacctgtcttctgcatcgctcacactg

SEQ ID NO: 499696 - DNA, 201 bp, Homo sapiens
aacctaatttatcgagagtttttagcatgcagggttgttgaattttgtcaaaggccttttctgcatgtgttgagataatcatgtggtttttgtctttgattctgtttatatggtggattacatttattgatttgcttatattgaaccagccttgcatcccagggatgaagcccacttgatcatggtggataagctttttga

SEQ ID NO: 499697 - DNA, 201 bp, Homo sapiens
gacctcatacagttatttagcatatcacactttgaagaaattggaccatggatcaaataaactaagcattaatcttccatctgaaattgtcaggaaacctkgagatcaaaagaacatccctgggaaggtgttaggctcagcttattattatgtgggggctcagcgtctatacccacctgaagctgggctgtccatgaggct

SEQ ID NO: 499698 - DNA, 201 bp, Homo sapiens
tttcaatactgaaagaaacatggtatgctatggaatcagactaggtgaatgcacttccaagtaaattgcagcgtatttcattctttcctttttgttttttktttggtcttatatgtgtggtgtgggacttttatattttcatatttttgtttattgactcactgtaaaaactaactttgttcaaagcaatgcatacatgaa

SEQ ID NO: 499699 - DNA, 201 bp, Homo sapiens
tgtctgttattggtgtataagaatgcttgtgatttttgtacatagattttgtatcctgagactttgcagaagttgcttatcagcttaaggagattttgggytgagacaatggggttttctagatatacaatcatgtcatctgcaaacagggacaatttgacttctttttttcctaattgaatacccttctcctgcctaatt

SEQ ID NO: 499700 - DNA, 201 bp, Homo sapiens
acattgctaataaaaataaaattgtggaatcctttgggaaggtaatttggcattgcctgcttagaataagataaactgtaacttgcagatattccttttgraaatcagttgtactgagaaaaatttccaggatataaagatatgtatatgaagatgtttattgaagcttgtttgtagtggcaaagaagtatgaacagtttg

SEQ ID NO: 499701 - DNA, 201 bp, Homo sapiens
gctctacaaattttcggtttggtttggtcttccttttctaattctttatgatgcactgttagattgtttatttgaagtttttcttctttcttgatgtaggmacttatagctataaactttcctcttagtactacttttgctgtgtctcataggttttcatatgttgtatttcaattatcatttgtttcaagaaaaatttca

SEQ ID NO: 499702 - DNA, 201 bp, Homo sapiens
ctttattagatattaaaatttaccacagaaacaatgaaatagcatgagaaaagactagaaaaaatacagaaacagatacaaaaatatataacatgttataygacaaaatagacatttatatttcagtagggaatgacttatttaagaaatggtactaacataattagccagccataaggaagattaatataaaagaatgtt

SEQ ID NO: 499703 - DNA, 201 bp, Homo sapiens
gtctcaaaaaaaaaatccactttattggtatataattgctcatggtagccactaatgatcctttgaatttctgcagtatcagttgtaatgtctccttttttatttctaattttatttttttggatcttctctctttttcttagtctggctcaaagtttgtcagttttatttaatttttcaaaggaccctgtttttatttca

SEQ ID NO: 499704 - DNA, 201 bp, Homo sapiens
taaaaacccatacaaatactggcaaagcagcagcaaattactttgtttgtagattacagtattacacatttagaaaatccaagagacttcgacaaaaaaamaaaacaaataatgccccacacaaacaggattttaaacaacagtgggacatatttggaaatcaagactacaaacacaaagcaataacaaaataataatgct

SEQ ID NO: 499705 - DNA, 201 bp, Homo sapiens
gggagtcacccaattttccaggtgccatctgtcacccctttctttgactgggaaagggaactccctgaccccttgctcttcctgagtgaggcaatgcctcrccctgcttcggctcgtgcatggtgcgctgcatccactgtcctgcacccactgtctggcactccccagtgagatgaacactgtacctcagatggaaatgca

SEQ ID NO: 499706 - DNA, 201 bp, Homo sapiens
gaggttagttcatgaggtttaaggaaagaagccattttctctttcttttctttctttctttctttctttctttctttctttctttctttctttctttctttcttttcttttagacagagtttcactctgttgctcaggctggaatgcagtggtgaggcgatcagggctcactgcaacctctgctcctgggctcaagtgatt

SEQ ID NO: 499707 - DNA, 201 bp, Homo sapiens
caacattcccttatgcatgcagatacaaaaattatgaataaaatattcagtagcatatacaaaaaatgtgaatatgaacagttggttttagaaaggccagratggctttgattggaaggtcttttagtgtaataaattagaggagaaaaaaattacatgagtgtataaattgccaaatagaaaagacaaaaattaaataac

SEQ ID NO: 499708 - DNA, 201 bp, Homo sapiens
agaggttagttcatgaggtttaaggaaagaagccattttctctttcttttctttctttctttctttctttctttctttctttctttctttctttctttctttcttttcttttagacagagtttcactctgttgctcaggctggaatgcagtggtgaggcgatcagggctcactgcaacctctgctcctgggctcaagtgat

SEQ ID NO: 499709 - DNA, 201 bp, Homo sapiens
atcgcaccatcactcgtgccatgttgcctgtccttcggtatttttccatgctgtaggccattcctacttcacaagaagggtccatggttacccatgagacygggactccctctgggccgagcatacaggctgctggcaggtcttctatgcagcgcttgatgtaatgcaggctcctctcattcttccctcgcttccagttgt

SEQ ID NO: 499710 - DNA, 201 bp, Homo sapiens
tttaataaaaaaattaccccattcatctgtattgtgtttactgataattttggacttatttttgccatatttaagaaatcctccttcctctttcccatgcyttcttgtgtttttttaatccaagtggatgataaggtttgggaatcactatcgtaacaggaccatgaagggctagataagggaagctggcttgcattcagg

SEQ ID NO: 499711 - DNA, 201 bp, Homo sapiens
gttggggccagctgtggtggccccagagggtacttatctctccagccaaaattgggtaagcagctgcttagtagttctgtgagactcctggcccatggcarctgagccaaagtgttcctggtcgggaaaccaaaagctgttactgaaacaccaggggtgtggtctaggtcctgcagctcaccacacagaaagccaatcaat

SEQ ID NO: 499712 - DNA, 201 bp, Homo sapiens
cctatcccctgtttaactctgctgttcttgcagttgtcaaaaaaaactggtcttttttttccccccacctccaagatatgtcttttctgtttatcacctgycaactaaaattgtccataccctgtgttttactattgtattctcctttaaagttttagtaaagattttagaagtctcaattcaagatctaccatgctgtat

SEQ ID NO: 499713 - DNA, 201 bp, Homo sapiens
gattgttctaatgataagtcactaacaagacaattgcttccaaatagttgacacacagtaattatgattcccttctctggttcctgcaaagtaacctcctrgttcttgtttttttgtttgtttgtttaagacagagtctcactctgttgcccaggctggagtacagcggtgtgatgttggctcactgcagccttgactttc

SEQ ID NO: 499714 - DNA, 201 bp, Homo sapiens
taccctaaaacttaaagtataataaataaataaataaataaagtgacgacaggagagatcatcagtgtatgttaatatgcacaaggacattgattaccccmaagggtaggaaatgaggagaggaggggaggggaagtgagaggttattaacttcttaaaatcatgttaaatttttcccttgtataatcagcatatattatc

SEQ ID NO: 499715 - DNA, 201 bp, Homo sapiens
gcagaggttagttcatgaggtttaaggaaagaagccattttctctttcttttctttctttctttctttctttctttctttctttctttctttctttctttctttcttttcttttagacagagtttcactctgttgctcaggctggaatgcagtggtgaggcgatcagggctcactgcaacctctgctcctgggctcaagtg

SEQ ID NO: 499716 - DNA, 201 bp, Homo sapiens
agggagtgtgaataggaggctgtcgcttggttccttattgctggatgggtgttggctagcagaggagagagggactcaaactaaactaggaaatagggaayatctcacaccaaaggcaatgacagtagggggccagggggattaagtacattttctacacagactacaggggtgagtgagagcttcagagacttgcaccct

SEQ ID NO: 499717 - DNA, 201 bp, Homo sapiens
cagtattagtcataagtgacttcccgaaacactcattgcagcttggattctggcacaaacatgggatctctgaatggaagcaatgaattctggttttactkgtgctgaggttatgctaatcagttttggggttttcagtctgtgtgagagatctctgattctaggtctctccaactgcttagccctgaatcttcttccaac

SEQ ID NO: 499718 - DNA, 201 bp, Homo sapiens
cctaaagcacagataatgaagggcaaaatagacaaatgggattacatcaaactaaaacagtcttatacagcaaagaaacaatcaacaggatgaagaggcarcctatggaatggaagaaaatatttgcaaaccatacatctgataaggggttaatttttaaaataataataaacttaatagcaagaaaacaaataatccaaa

SEQ ID NO: 499719 - DNA, 201 bp, Homo sapiens
gcagattttcgtcttaagttctgttttgcttagtattgatgttattactttgctttttcagtttcaaaatcatttagtatatctttttcctttcttttagsctttgtgtttttatttcagatgtgctttcttatgtactgactgtgatccccaaattcatatgttgaagtcccaactccaaatgtatttggaggtgggcct

SEQ ID NO: 499720 - DNA, 201 bp, Homo sapiens
acagaatagaacgtccagaaataaatccatgcatttaagatgattgattttgacaaagttgtcaagaacacgtgaatggggaatagacagtctctttaatraatgctgttgaaaaaaactgcatatccacatgcagaaaattgaaattagactttatctcacaccacatacaaaactcaaccccagatggtttaaagacct

SEQ ID NO: 499721 - DNA, 201 bp, Homo sapiens
aggggtaaagaaataaaagcattttgtatcacttagcacactcatctggatgggaggagggagcaaaacagggaaatgaatctattggaagatgtcatctyattgaggtatgggagaaaaagtggaatagctggcactttattttatataatagtaaagaaatttgtgctcaattatgagcaatagaagcatatactagtg

SEQ ID NO: 499722 - DNA, 201 bp, Homo sapiens
atatatgaaaaaagtgaagaaaacacaaataaatagaaagctatttattatttatagattgcaaaaattaatactgtcaaaatgacaacaatgccccaagygatttacagattcaatgcaattcctatgtaaataccaatgacattcttcaaagaaatataacacaccaaaaaatgtatatgttatcacaaaagatcctta

SEQ ID NO: 499723 - DNA, 201 bp, Homo sapiens
cccttcctgtttcctctcccttttatcttctcctatctggaggctcttttcctatttatttgttgttctttctccctccatcatcttctcttcctgaatcmtgtgttgttttttcatatactacatctcagtatgtaggaaatatgtttactgggttttttttttcaaattttttttcagtttctctctccctgctccaga

SEQ ID NO: 499724 - DNA, 201 bp, Homo sapiens
atacttaagagtaaatgtaaataacgtggtaaaagacttatatagtgaaaattatgaaacatatatgaaaaaagtgaagaaaacacaaataaatagaaagstatttattatttatagattgcaaaaattaatactgtcaaaatgacaacaatgccccaagtgatttacagattcaatgcaattcctatgtaaataccaatg

SEQ ID NO: 499725 - DNA, 201 bp, Homo sapiens
ggattctgaagatacagagatgggtgagatgtatccttgcctatcaggagctccttgccataggcaagagtaatctatgagctttaattttacatacctawtttttaacgatttgagcatcaactatatatatatatatagttttgaaattaacatattaaataaatatcaggcacatttaatttcttattttttagatga

SEQ ID NO: 499726 - DNA, 201 bp, Homo sapiens
ccaaagatagggacacttcaacaaatgaaaatattaggcaatagcactaatgaacataggtgcatcaataaatattaatactaacaaactaatcccaacarcatgtcaaaaagttcattcatcatgatacagtgggctttaacgtagggttgcaaagataattcaacatacagatctataaatgtgaaataccacatcaac

SEQ ID NO: 499727 - DNA, 201 bp, Homo sapiens
ttctctttgcagctgtgctctgagagatttgatgcaatcccactgcaatttgacatcagcgacagcgtaggggtgctcagggaatcttttgagccaccaasgaagcctcacttccagctaatacttatatggggctgtggaagttgtctcacattcctggggacagtgtttgccctgaaaaggaacgttcacttgccacaa

SEQ ID NO: 499728 - DNA, 201 bp, Homo sapiens
cttcactgctgaatttcaccaaatatttaaagaagaactcatgtcaatccaatctaaaagccttccaaaaaattgaagaagagggaatacttccaaagttrttttacaaggcaagcataatcctgataccaaagatagggacacttcaacaaatgaaaatattaggcaatagcactaatgaacataggtgcatcaataaat

SEQ ID NO: 499729 - DNA, 201 bp, Homo sapiens
gacttcaggtgctctgcccgcctcagcctcccaaagtgctgggattacagatgtgagccaccatgccaggcctgagaaattgccaagaccagctcagtcgyggataccctaacccagtcgcactagaggaattaaagacacacacacagaaatacagtgtgtggagtgggaatcaggggtctcacagccttcagagctgag

SEQ ID NO: 499730 - DNA, 201 bp, Homo sapiens
gaaagattaaaatctttgccagaaaaacaaaaattaagggagtttattaccatcagagctgtcttacaggaaatgctagagaacaaatattaggacacaargcatgtcataataaatttaagaagactgaaatcataccatttatcattccagatcacaatgacatgaaactagaaattaataacaggaaaattttttaga

SEQ ID NO: 499731 - DNA, 201 bp, Homo sapiens
gtggcatgatctcagttcactgcaacctccacctcctgggttcaagcgattctcatgcctcagcctcctgagcagctggtattacaggtgcttgccaccaygcctggctaatttttgtgtttttggtagggatgggatttcaccatgttggccaggctagggtcaaactcctgacttcaggtgctctgcccgcctcagcct

SEQ ID NO: 499732 - DNA, 201 bp, Homo sapiens
ggctgagagcatggaatgatatattcaatgttctatagaaaaaaaaagtgtcaaccaaaaatacgattctcgggaaaatctgttttttgcaagtaatggaragattaaaatctttgccagaaaaacaaaaattaagggagtttattaccatcagagctgtcttacaggaaatgctagagaacaaatattaggacacaaggc

SEQ ID NO: 499733 - DNA, 201 bp, Homo sapiens
tttgtgaatccggcagccttcagaatcacagcagattcacagagcctcccggggtgcctcatggtcaaaacgaatttatagaccaaaaaaggtaaagtgaygtacagaaacaggaagtgaggtacagacacagtgagattggtaacaactgggcatttgctttatttgaacacagtttgaacattcagtagtctatgagtg

SEQ ID NO: 499734 - DNA, 201 bp, Homo sapiens
cctctaaatactggctttactctcaggctctcttgattaacttagccaatgatttttttcctccctaggtgcacacacacacacacacacacacacacacaaaacaaagggggtagaatacaaaaatcccagcgaattgtcaaaagttaaattttataactcctgtaaattgctgcttactaccagtttctttctgactga

SEQ ID NO: 499735 - DNA, 201 bp, Homo sapiens
acctctaaatactggctttactctcaggctctcttgattaacttagccaatgatttttttcctccctaggtgcacacacacacacacacacacacacacacaaaacaaagggggtagaatacaaaaatcccagcgaattgtcaaaagttaaattttataactcctgtaaattgctgcttactaccagtttctttctgactg

SEQ ID NO: 499736 - DNA, 201 bp, Homo sapiens
aaatatgagattccagctgtatcaccaatgatatcacccattgaaactcaggcagaatgaagagaacacattcaccatcagttacatgctggcagaagtcraccctgaatcaatgctttataattcctgtactgatcttgtgagtagaacaacagtattgcatggcatttttgtggttgtaagcatacatttataaaatac

SEQ ID NO: 499737 - DNA, 201 bp, Homo sapiens
aacttataggctgagagcatggaatgatatattcaatgttctatagaaaaaaaaagtgtcaaccaaaaatacgattctcgggaaaatctgttttttgcaartaatggaaagattaaaatctttgccagaaaaacaaaaattaagggagtttattaccatcagagctgtcttacaggaaatgctagagaacaaatattagga

SEQ ID NO: 499738 - DNA, 201 bp, Homo sapiens
aaagaatcagagaaataatacatgaacaaaatagaaagttcaacaaacagaaagaaatcattaaaaaagagacattctggacataaaggacacaacggttsaactgaaaatttcatagacttctttgaaagcagatttgatcaagtagaataaagaatcaataaactcaaagacacatcatttgaatttactgtcagagac

SEQ ID NO: 499739 - DNA, 201 bp, Homo sapiens
actaaaaagaatcagagaaataatacatgaacaaaatagaaagttcaacaaacagaaagaaatcattaaaaaagagacattctggacataaaggacacaayggttgaactgaaaatttcatagacttctttgaaagcagatttgatcaagtagaataaagaatcaataaactcaaagacacatcatttgaatttactgtca

SEQ ID NO: 499740 - DNA, 201 bp, Homo sapiens
tgatttttagaattttcagcttttctgctctgatttttccccatctttgtggttttatctacctttggtctttgataatggtgacgtacagatagggtttyggtgtggatgttctttctgtttgttagttttctttctaacagtcaagactctcagctgcaggtctgttggagtttgctggaggtccactccagaccctgt

SEQ ID NO: 499741 - DNA, 201 bp, Homo sapiens
tgactaaaaagaatcagagaaataatacatgaacaaaatagaaagttcaacaaacagaaagaaatcattaaaaaagagacattctggacataaaggacacracggttgaactgaaaatttcatagacttctttgaaagcagatttgatcaagtagaataaagaatcaataaactcaaagacacatcatttgaatttactgt

SEQ ID NO: 499742 - DNA, 201 bp, Homo sapiens
cagtatgatattggctgtgggtttgtcataaatagctcttattattttgagatacttcccatcaatacctaatttattgagagtttttagcttgaagggcrttgaattttgttgaaggacttttgtccatctattgagataatcatgtggtttttgtctttgtttctgtttatatgctggattacgtttattgatttgtgt

SEQ ID NO: 499743 - DNA, 201 bp, Homo sapiens
ttcaaatgtgcagacaccaatgcacagcctaaaaatcaagaaatataagagaaaaatgataccaccagaggaaaaaaaagaatacccaatagctgaccccmaaaaataaagatttatgaactttctgacagtgaatttaaaataatggtctttaaaatgctcagtgagcttcaagagaacacagatagatgactaaaaaga

SEQ ID NO: 499744 - DNA, 201 bp, Homo sapiens
taacatttaagtgtttgatccatcttgaattaatttttgtataaggtgtaaggaagggatccagtttcagctttctacatatgattagccagttttcccagcatcatttattaaaaagggaatcctttccccatttcttgtttttgtcaggtttgtcaaagatccaatggttgtagaagtgtggtattatctctgagggct

SEQ ID NO: 499745 - DNA, 201 bp, Homo sapiens
acaacagacaccctaccaagaattgctggatgactggggaaaggtttttccagacaaagccagtatgcaaagactggaataactttcttgtttttcaaatrtgcagacaccaatgcacagcctaaaaatcaagaaatataagagaaaaatgataccaccagaggaaaaaaaagaatacccaatagctgacccccaaaaata

SEQ ID NO: 499746 - DNA, 201 bp, Homo sapiens
tttcttaatccagtctatcattgatggacatttgggttggttccaagtctttgctattgtgaatagtgcctcaataaacatacgtgtgcatgtgtctttayagcagcatgatttataatcctttgggtatatacccagtaatgggatggctggatcaaatggtatttctagttctagatccttaaggaatcgccacactgt

SEQ ID NO: 499747 - DNA, 201 bp, Homo sapiens
ccccactttcaaaaagggtcccaaatatgagattccagctgtatcaccaatgatatcacccattgaaactcaggcagaatgaagagaacacattcaccatyagttacatgctggcagaagtcaaccctgaatcaatgctttataattcctgtactgatcttgtgagtagaacaacagtattgcatggcatttttgtggttg

SEQ ID NO: 499748 - DNA, 201 bp, Homo sapiens
ctcagtattagtcataagtgacttcccgaaacactcattgcagcttggattctggcacaaacatgggatctctgaatggaagcaatgaattctggttttamtggtgctgaggttatgctaatcagttttggggttttcagtctgtgtgagagatctctgattctaggtctctccaactgcttagccctgaatcttcttcca

SEQ ID NO: 499749 - DNA, 201 bp, Homo sapiens
gtgcaggtttgttacatatgtatacatgtgccatgttggtgtgctgcacctattaacttgtcatttacattaggtatatctcctaatgctatccctctccyctacccccaccccacgacaggccccggtgagtgatgttccccttcctgtgtccaagtgttctcattgttcaatttccacctatgagtgagaacatgtggt

SEQ ID NO: 499750 - DNA, 201 bp, Homo sapiens
ttctgtgtcactgcttctgggccctctgggcctagctcagctctgatatcagtcccatcatactcagtattagtcataagtgacttcccgaaacactcatkgcagcttggattctggcacaaacatgggatctctgaatggaagcaatgaattctggttttactggtgctgaggttatgctaatcagttttggggttttca

SEQ ID NO: 499751 - DNA, 201 bp, Homo sapiens
tggatcagatatttgaaacaatcattagcaaattagttaatacagatgtttgaaattttttatccatgaaggttaaatagttaacaaatatgtgttaagcmataggcaaggtgaaagatgttttgtcttgtctggggtcaaaggcctcaaagttcaactatgttctgtagctagatgaaggaaagtttaaacaaaggcatc

SEQ ID NO: 499752 - DNA, 201 bp, Homo sapiens
ctgctgagatagccaagttcttagaatacctcagttccagagcagactcctttgtatcagcctttcagaccagctctggactctctctagatctcagcccrtgcttatggtgtgcaggggtataaggcggaactagacccctatgacttcctcccagaaacacatgctatctgacagagtggttactctgcaagactccag

SEQ ID NO: 499753 - DNA, 201 bp, Homo sapiens
accagcagcttctgggagttattcagtagaatcattttgtgggatgcttcagtccttgagccattcaagaagaaactctgaaaagataacaagggaagggrcaatgttaagggaccaaatgaatttaaaatgcactttatatttcttcattcaagtaacaatcatgatgtagaatctgttagtatcatcctcattctaaac

SEQ ID NO: 499754 - DNA, 201 bp, Homo sapiens
attcccttctctggttcctgcaaagtaacctcctggttcttgtttttttgtttgtttgtttaagacagagtctcactctgttgcccaggctggagtacagyggtgtgatgttggctcactgcagccttgactttctggggctcaagtcatcctcccacctcagcctcctgagcagctaggagaataaacatgcactaccat

SEQ ID NO: 499755 - DNA, 201 bp, Homo sapiens
aatagtttattccaattaccataatggctaattatggtaaatactatttaaaatcatgtgctatgtactaagtctttgatgtacaatatctcatttaaacstcttgtaatcctctgaagaaggtcctgttatttttcccattttaacacatgatgaaactcagagaagggcctatggttaccgtcagtcctttgaacttta

SEQ ID NO: 499756 - DNA, 201 bp, Homo sapiens
ctccctgaccagctaaaattatgagtttacatagcagggaggaaatgtaaccatgtgtagaaaaacaggaactcaggagacctaaggaagcaatcataatrtatgaggggtctggtgtgccatcatctggatggaatcatctggtgaatttcagttcttttatactttttgagggacctaggggtcctttaccaaggatga

SEQ ID NO: 499757 - DNA, 201 bp, Homo sapiens
gttccaatggcagggtggcagagtggaaccaaaagaggccaagttttgttggtgaagtataattattttttaagatcagggattcagaattgtagtatcartgttcagttaggaagttcttatgatagtgcatggcacatgtcctttccatcatctgcattttctgctttttttgtctggctcacttctactcactctcta

SEQ ID NO: 499758 - DNA, 201 bp, Homo sapiens
atttctcagatggagaggagcagatcccactgtctggttcccacaaatgacactcacttgcctggatacacacacaatgacaaacaagctcctaagagtgkccgtactgaaatagtcagggtacttccctctcttcatcaattgggcttgttcaacctgcaagtggaaattcctttaaaaatttcccaaactgtgaggagg

SEQ ID NO: 499759 - DNA, 201 bp, Homo sapiens
tctacaatgtgaaagagttgtggtgcttcctctctccattggttgggctcaatcgacctgaaataaaaattccttcagaatttctcagatggagaggagcwgatcccactgtctggttcccacaaatgacactcacttgcctggatacacacacaatgacaaacaagctcctaagagtgtccgtactgaaatagtcagggt

SEQ ID NO: 499760 - DNA, 201 bp, Homo sapiens
attcgggtggcttattactatttggaggctcagcgcctatactcgcatgaagttgggctggcaatgaggcttcagttcactaaccagatgtgcataaaatrcatacaaaaaggggaagtctttagggcaaaaaaatagacccaggtttgtattactatttcagcttaatagtttattccttatttcagcttaatagtttat

SEQ ID NO: 499761 - DNA, 201 bp, Homo sapiens
aaactccctatactcccaaaacactggggtcaaaaacggcaccgcatgagatcatcacatattaacctggcccgaccctgcttaaaacagcagcacaaaakcccactttcccattcaacagcaaactccagattccaaactatactggagccaaacagtgtcacaaaagagtaccagtttatcaaattcgaatttcccatg

SEQ ID NO: 499762 - DNA, 201 bp, Homo sapiens
gaacacatggacacaggaaggggaacatcacacactggggcctgttgtggggtgggggtgggggtagggatagcattaggagatatacctaatgttaaatragaagttaatgagtgcagcacaccagcatggcacatgtatacctatgtaactaacctgcacattgtgcacatgtaccctaaaacttaaagtataataaat

SEQ ID NO: 499763 - DNA, 201 bp, Homo sapiens
tctgtggcagtttgatttttaaaggccaaaactccctatactcccaaaacactggggtcaaaaacggcaccgcatgagatcatcacatattaacctggccygaccctgcttaaaacagcagcacaaaatcccactttcccattcaacagcaaactccagattccaaactatactggagccaaacagtgtcacaaaagagta

SEQ ID NO: 499764 - DNA, 201 bp, Homo sapiens
tagcatacgccttgtgttagtatccctagtatcaaaaacacttacagaattttaagaatgacataaaaccccagtgtaaacatggtgaaacaatacaaacmgttcagaagtaaaccccaaattactgataaacatatgaaaatacaatatgttgactatcactagtcatggaaatgcaaattaaatctacaataagatgcc

SEQ ID NO: 499765 - DNA, 201 bp, Homo sapiens
tgagtttctgtggcagtttgatttttaaaggccaaaactccctatactcccaaaacactggggtcaaaaacggcaccgcatgagatcatcacatattaacytggcccgaccctgcttaaaacagcagcacaaaatcccactttcccattcaacagcaaactccagattccaaactatactggagccaaacagtgtcacaaa

SEQ ID NO: 499766 - DNA, 201 bp, Homo sapiens
caagagactttgacaaaaaacaaaaccaaataataccctacacaaacaggattttaaagaatagtgtgacatatttggaaatcaaaaatacaaatgaaaarcaataacaaaataataattctcagaaatagaaaaggaaaaataatttaataatcttaacaaataatataaaataccgaaaagtaaacttaatggaaaatc

SEQ ID NO: 499767 - DNA, 201 bp, Homo sapiens
agtctcaactgtctgcaaacatgtccacatggctgaactttgttagccttgataggtaatccagggaaggctgtgaaacaaattttaaataaaatgagttwctgtggcagtttgatttttaaaggccaaaactccctatactcccaaaacactggggtcaaaaacggcaccgcatgagatcatcacatattaacctggccc

SEQ ID NO: 499768 - DNA, 201 bp, Homo sapiens
ttttacactgtgggtgggagtgtaaattagttcaaccattatgaaagacagtttggtgatttctcaaagatcgagaactagaaataccatttgacccagcratgccataactgggtatatactcaaaggattataaatcatgctactataaagacacatgcacatgtatgtttattgcggcaatattcacaatggcaaaga

SEQ ID NO: 499769 - DNA, 201 bp, Homo sapiens
taatacagtctcaactgtctgcaaacatgtccacatggctgaactttgttagccttgataggtaatccagggaaggctgtgaaacaaattttaaataaaakgagtttctgtggcagtttgatttttaaaggccaaaactccctatactcccaaaacactggggtcaaaaacggcaccgcatgagatcatcacatattaacc

SEQ ID NO: 499770 - DNA, 201 bp, Homo sapiens
ctctagccatgagatagtaatacagtctcaactgtctgcaaacatgtccacatggctgaactttgttagccttgataggtaatccagggaaggctgtgaamcaaattttaaataaaatgagtttctgtggcagtttgatttttaaaggccaaaactccctatactcccaaaacactggggtcaaaaacggcaccgcatgag

SEQ ID NO: 499771 - DNA, 201 bp, Homo sapiens
gaatgtatctctaaataataagagctatttatgacaaacccagagccaatatcatactgaacgggcaaaaattggaagcattccatttggaaaccaacacagacaagggtgctctttctcaccactcctatttaacatagtgttggaagttctggccagggcaatcaggcaagagaaagaaatgaaaggtattcgattagg

SEQ ID NO: 499772 - DNA, 201 bp, Homo sapiens
ttatgttatagagatggtggggcgggggggggtcttcatttttcagactggtctcaaactactggttatagttttataactttctgtgccacactctgatrccccaaaatatctagcagagacaaacataaaaccccgaaaaaatgtatgctgacaattctgaagacatttctatttttatcttacaataattttaatgct

SEQ ID NO: 499773 - DNA, 201 bp, Homo sapiens
aaattaatgctgtaacagaaaaccaaataccacatgttctcactcataactgacagctaagcattgatcatacatggacataaatgtgggaacaatagatrctgtggactactagagggtagagacagaggggctggttagaaaactattgggtacgatgctcactaccaggcagatgggatcggtccgtactccaaaatt

SEQ ID NO: 499774 - DNA, 201 bp, Homo sapiens
ctcttgattgctctaccttcagtgactttgaaaatgcagccactcttatcccctcacctaaactttcttgaagacctgggaagaaagccaagaaagcaatmttgtcagacatggagttctctacttacactgctcccacctgattaatacatcaatgcttagtcgttatcaaacttgagtttacaccacaatctgctggag

SEQ ID NO: 499775 - DNA, 201 bp, Homo sapiens
gttctgattctaagaggtaagaactgagcctggctttctagttacatgtttactactaaacccgtccttccctactacacttatgcatatttaaagactakactctcccctgcctccagcctggattgtaagttccacaagagcatggctgtgtcttctaacatcaagtctctatgttagaaaagctcctggcatatcata

SEQ ID NO: 499776 - DNA, 201 bp, Homo sapiens
caattcatatatatcagggttatttatttccaataaagtatccatatagattaggtatattctaatgacaattttattaaagtccttcatttatcttccakatagcagattctgtcaaccacatttcataaagagttctgattctaagaggtaagaactgagcctggctttctagttacatgtttactactaaacccgtcc

SEQ ID NO: 499777 - DNA, 201 bp, Homo sapiens
tgcaaacagtcaggaaggactagaatcacaagcctgctattttctcatcctcaacacccctactcccataccctgacctcccactgttccctgaccttcarggactcagggatgctcctggccaaggatttgtatagggccagcagcttatgggagttattcagtaggatcattctgtgggatgcttcagaccttgagacc

SEQ ID NO: 499778 - DNA, 201 bp, Homo sapiens
ctcacctcagtctcctgactagctgcaggcatgaatcaatgtgcctggctaattgtcttatttttatgttatagagatggtggggcgggggggggtcttcrtttttcagactggtctcaaactactggttatagttttataactttctgtgccacactctgatgccccaaaatatctagcagagacaaacataaaaccccg

SEQ ID NO: 499779 - DNA, 201 bp, Homo sapiens
catcctctcacctcagtctcctgactagctgcaggcatgaatcaatgtgcctggctaattgtcttatttttatgttatagagatggtggggcgggggggggtcttcatttttcagactggtctcaaactactggttatagttttataactttctgtgccacactctgatgccccaaaatatctagcagagacaaacataaa

SEQ ID NO: 499780 - DNA, 201 bp, Homo sapiens
cttgcattctgttttctcattatacctatagaaaaccttattaccctctttaaatcttcaccttaaagccacttgctcaatgaggcctcctctgaccatcstattaacaattacaactgttcccctagtttctctgcaatgctcctgtgccccattgtcattctctgcctcttatctttttcttttttgacagggtctcac

SEQ ID NO: 499781 - DNA, 201 bp, Homo sapiens
atattcattctgaatacaccaaatctcagagggactaagtaaatttctcaagttcttagagataaatgccagagtcagattttgaaaccatatatgactgkctccaaaacccatgcccttcctcccttgtggaaagaattaaaagtgaatattaagagttctgtgagcttcccaaatgcctgtaacagaacactccaccac

SEQ ID NO: 499782 - DNA, 201 bp, Homo sapiens
gtttccctccgcagcaccccctgctggtcagtttgacaagcaggtgaacagaagttctcaaatacacagtaagcagataaccccaacatcaccagaaatakcaagttgtgatggcattttggcaaattgtctttattttttgtctgcatcatctgttgctttctgagggaagttttttgagttctcccactgagactgtgg

SEQ ID NO: 499783 - DNA, 201 bp, Homo sapiens
tgctcctatcctttcaaggatgtttgtaaagagtacagcttggaagctggagatactgctttcttctgaagcagaaggcagttttgctgcaacacacatcyattgaatttgtgacattaatctgccttcctgtatttcctctgtaggacttgtggagcaaagatgactgacacaaacatataaatcattctgcctgttgaa

SEQ ID NO: 499784 - DNA, 201 bp, Homo sapiens
ggtagcctaggaaagccatttgtctgagactttactttgataccttgctagtcactaaacaaagagactgattccattctttagtgtagccattgcctcaattcatatatatcagggttatttatttccaataaagtatccatatagattaggtatattctaatgacaattttattaaagtccttcatttatcttccagat

SEQ ID NO: 499785 - DNA, 201 bp, Homo sapiens
gggaaaaaaagttaaagtgacatccaggaaccggaaatgagttacagaaacagtgagatttctgtcacctgggcgtttgccttatttaaacacagtttgarcattcagcagtctatgagtggtgatgtaaggctgctgggactggccagcattcaaatattgttacaggtgcagactcctaaattaggttttcaattttgt

SEQ ID NO: 499786 - DNA, 201 bp, Homo sapiens
gcacctccatgttgaaggggttcccgtgattgatgtgatacacagagccatacacctgaaggagggatgaaagggaccaggagaggttgagatccccagaratgaggatctggttgtgaagaggaagagaaaaatggagattaagagaaggtactgagaccaagtcagtgatggtgagatgagcagtatggtcctggagag

SEQ ID NO: 499787 - DNA, 201 bp, Homo sapiens
tttatctctctgctttcatcatcatcgcatcacattcttctcttctgcactcacatttccttctgccttccaatttttttctttctttctttctttctttyttttttttttttttttttgagacagagtctcactctgtagcccagggtggactacagtgatgtgaacttggctcactacaacctctgcttcccaggtccc

SEQ ID NO: 499788 - DNA, 201 bp, Homo sapiens
aaagaactcagtttttcagaaattaaggattccagttttacataaaatactgactttactctcaggttcttttgattaacttaaccaatgaattttcctayctaggtacacaagaaaaatgaaacaaatgggtagaacacaaaaatccctgtgaatttcccaaagccgaattttatgactgctgcgacattactgcttact

SEQ ID NO: 499789 - DNA, 201 bp, Homo sapiens
tgattggaatatctgttcaacgaattactatcttgtatatttagatattttgtggagtagaactcaaaatgcacatgatttcatacacgcatctttcaagwaaattcagccacgtggagggcttctctggtctatatcctcactcttttaaagacgtgttcattttcttccttaggatacttaacgggacattttgagatg

SEQ ID NO: 499790 - DNA, 201 bp, Homo sapiens
gccagaaagaactcagtttttcagaaattaaggattccagttttacataaaatactgactttactctcaggttcttttgattaacttaaccaatgaatttycctatctaggtacacaagaaaaatgaaacaaatgggtagaacacaaaaatccctgtgaatttcccaaagccgaattttatgactgctgcgacattactgc

SEQ ID NO: 499791 - DNA, 201 bp, Homo sapiens
gagggcaatggacatcatggtggcatcaaaaaatgtttactgaaactatttatatcttacaaaatgctacatgcttatagaaagtatataagcatacaaartgaaaaataaaatctgtcctcttgggttcccctgctaggtgtaaataattttgacactgatatgtatgcttttagtactccatatgagttatgtatttat

SEQ ID NO: 499792 - DNA, 201 bp, Homo sapiens
cctaatgtataagccagaaagaactcagtttttcagaaattaaggattccagttttacataaaatactgactttactctcaggttcttttgattaacttarccaatgaattttcctatctaggtacacaagaaaaatgaaacaaatgggtagaacacaaaaatccctgtgaatttcccaaagccgaattttatgactgctg

SEQ ID NO: 499793 - DNA, 201 bp, Homo sapiens
ccaattaatgtagctatttgatcccagtacaatgtaaaagtattaattgtactgtgaggaaggaaggaccactccacaagacctgcgttttgaacgataayggctgttggagaatgcacagtagcaaaaatcaagctggagttgggccaagggatgtattctatttacttgtgctcactgaattttttcttcaactaatcc

SEQ ID NO: 499794 - DNA, 201 bp, Homo sapiens
atctttagtaagattttgccatttgtgtaagacttctctgccttccagtcctaatgtataagccagaaagaactcagtttttcagaaattaaggattccakttttacataaaatactgactttactctcaggttcttttgattaacttaaccaatgaattttcctatctaggtacacaagaaaaatgaaacaaatgggtag

SEQ ID NO: 499795 - DNA, 201 bp, Homo sapiens
tttgtttcaccaattgagctttgagtgttctattagttctttcaactagtgtctgtccttgggaattataagggattcctgttgtatgtgtaatttttcamtgatttaagaatttttgaaatgttttactacagtatcctggcccattatctgttttaatttttcctggaactcccatgacagcaaaacaagataataaac

SEQ ID NO: 499796 - DNA, 201 bp, Homo sapiens
tcaagttcttacagggataaatgacagagtcctatccaaaacccatgcatttcctctctggtggaatgaattaaaagtgaatattaagagttctgtgagcytcccacatgcctgtagcagaacactccaccaccaccatcataatgtttcttttattttggtcatcagatgcctgaagagtcttctttcttctggaatagg

SEQ ID NO: 499797 - DNA, 201 bp, Homo sapiens
tactgtctttttcctttttttgtttcaccaattgagctttgagtgttctattagttctttcaactagtgtctgtccttgggaattataagggattcctgtwgtatgtgtaatttttcactgatttaagaatttttgaaatgttttactacagtatcctggcccattatctgttttaatttttcctggaactcccatgacag

SEQ ID NO: 499798 - DNA, 201 bp, Homo sapiens
ttaaaaaaattaaagtatagagtgctagattaagttgcatctggggagtgttatactcttactgtctttttctttttttttgtttcaccaagtgttatacycttactgtctttttcctttttttgtttcaccaattgagctttgagtgttctattagttctttcaactagtgtctgtccttgggaattataagggattcct

SEQ ID NO: 499799 - DNA, 201 bp, Homo sapiens
cagattaatgggccagatggatggggcttgtgaacatgagtgagtctggcccatacaattataatataattggcctcgagggtcccagtctgtaatagttmcaaattcattgttttgtaatatcaccgcagtatcagccacatattctttccaaactaagacttttaggtcttttgattctttgggaatttttggggggca

SEQ ID NO: 499800 - DNA, 201 bp, Homo sapiens
caaggttggggctaaagttacagactaacagcatctcaaggcaaaacaattgttcacggtacaggtcaaaatggagtttcttatgtcttccttttctacawagatacagtaacagtctgatatctctttcttttccctacatatcccccttttctttttgacaaaactgccatcgtcattatggcccgttctcgctggttg

SEQ ID NO: 499801 - DNA, 201 bp, Homo sapiens
tgaacccgggaggctgaggttgcggtgagtcgagattgccactgcactccagcttaggcgacagagtgagacttcatctcaaaaaaaaaaaaaaaaaagakatatatatatatatatacacacacacatctaagttataattttggtaagtggttctcctttgcccacaccttaccaggacaaaaggagcttactctaccc

SEQ ID NO: 499802 - DNA, 201 bp, Homo sapiens
atacaaaaattagttgggagtggtggcgcatgcctgtagtcccagctactcagaaggctgaggcagaagaatcacttgaacccgggaggctgaggttgcgstgagtcgagattgccactgcactccagcttaggcgacagagtgagacttcatctcaaaaaaaaaaaaaaaaaagatatatatatatatatatacacacac

SEQ ID NO: 499803 - DNA, 201 bp, Homo sapiens
tgaggcaggagaatggtgtgaacccaggaggcggagattgcagtgagccgagatcacgccactgcactccagcctgggggacagagcgagactccgcctcaaaaaaaaaaaaaaaaaggctttcactatttcttctaccgctatctactacgaacttcaaagaggaaccaggagtacgggaggaaaatgcaagaggacaag

SEQ ID NO: 499804 - DNA, 201 bp, Homo sapiens
cctgactcctccaagaaaaggagattccctttcgtggtctgctgagtaacgggtgccttcccagacactggcgttcccgcttgaccaaggagccctcaagmggcccttatgccggtgtgacagaaggctcacctcttgccttctaggtcacttctcacaatgtcccttcagtacctgaccctatacccaccggttgtttcc

SEQ ID NO: 499805 - DNA, 201 bp, Homo sapiens
cagaccaaagctccctcctccctcagacccaggagcccaagttccccagcccctcctccctcagatccaggagtacaggcccagaccctcctccctcagayccaggagtccaggccccccacccctcctccctcagacccaggagtccagagccccagccctcctccctcagacacagaaggcctacccttgcacccttag

SEQ ID NO: 499806 - DNA, 201 bp, Homo sapiens
ccctctgccgcgtcctcctgggggatggagaacctgtttgccaggctgccgccggagcgcgcgagggcctccagcctgcaggtgctcccgcgcccaccagsgtctccgatctcccacaccccccgcctcaccgtccacactcaaattccagaatcccagcccctagtcactccttttggggaattctagggtcccgtgcca

SEQ ID NO: 499807 - DNA, 201 bp, Homo sapiens
gctccctcctccctcagacccaggagcccaagttccccagcccctcctccctcagatccaggagtacaggcccagaccctcctccctcagacccaggagtmcaggccccccacccctcctccctcagacccaggagtccagagccccagccctcctccctcagacacagaaggcctacccttgcacccttaggggctccag

SEQ ID NO: 499808 - DNA, 201 bp, Homo sapiens
gcttcgagcctggccacgccccagcggctgggcagggcccccgcacctggtcccggcgagtggagcgatcgtccgccctctgccgcgtcctcctgggggayggagaacctgtttgccaggctgccgccggagcgcgcgagggcctccagcctgcaggtgctcccgcgcccaccagggtctccgatctcccacaccccccgc

SEQ ID NO: 499809 - DNA, 201 bp, Homo sapiens
ctcagacccaggagtccagaccaaagctccctcctccctcagacccaggagcccaagttccccagcccctcctccctcagatccaggagtacaggcccagmccctcctccctcagacccaggagtccaggccccccacccctcctccctcagacccaggagtccagagccccagccctcctccctcagacacagaaggcct

SEQ ID NO: 499810 - DNA, 201 bp, Homo sapiens
tatcccagaacttaaaattcaattaaaaaaaaaaaaacacacaaggcatgagataattgagggggaggaggtggctggtgcccatgtggatgggcggcggsggggcttcactattggcttctgctcataggatccagaggtgcagcttgagaggaactggcttatccttagcaagccaggcgtctggcccatggttagggc

SEQ ID NO: 499811 - DNA, 201 bp, Homo sapiens
gtgattggttgataggtgcagcaaaccaccatggcacacgtttacttatgaaacaaacttgcacgtcctgcacatgtatcccagaacttaaaattcaattaaaaaaaaaaaaacacacaaggcatgagataattgagggggaggaggtggctggtgcccatgtggatgggcggcggcggggcttcactattggcttctgct

SEQ ID NO: 499812 - DNA, 201 bp, Homo sapiens; identical to SEQ ID NO: 372927

SEQ ID NO: 499813 - DNA, 201 bp, Homo sapiens
tgattggttgataggtgcagcaaaccaccatggcacacgtttacttatgaaacaaacttgcacgtcctgcacatgtatcccagaacttaaaattcaattaaaaaaaaaaaaacacacaaggcatgagataattgagggggaggaggtggctggtgcccatgtggatgggcggcggcggggcttcactattggcttctgctc

SEQ ID NO: 499814 - DNA, 201 bp, Homo sapiens
ataggtgcagcaaaccaccatggcacacgtttacttatgaaacaaacttgcacgtcctgcacatgtatcccagaacttaaaattcaattaaaaaaaaaaamacacacaaggcatgagataattgagggggaggaggtggctggtgcccatgtggatgggcggcggcggggcttcactattggcttctgctcataggatcca

SEQ ID NO: 499815 - DNA, 201 bp, Homo sapiens; identical to SEQ ID NO: 372901

SEQ ID NO: 499816 - DNA, 201 bp, Homo sapiens
gtatttttagtagagacggggtttcaccatattggccaggctggtcttgaactcctgacctcgtgatccacctgcctcggcctcccaaagtgctgggattmcaggcgtgacccactgcgcctggcctcacttatttattttttaattaacaaataaaaattgtatatatatttaaggtgtacaacatggtgtcttcaagaa

SEQ ID NO: 499817 - DNA, 201 bp, Homo sapiens
ctgtctcagactcctgcatagctgggattacaggcacctgccaacacgcccagctaatctttgtatttttttagtaggatggggtttcaccatgttggtcrggctggtctcgaactgctgacctcagataatccacctgtctcggcctcccaaagtgctgggattacaggcataagccgccacacctggccaatcaactcc

SEQ ID NO: 499818 - DNA, 201 bp, Homo sapiens
gttctgttgcccagagctggggtgcaatggcgcgatctcggctcactgcaacctccgcctcccgggttcaagcagttctcctgcctcagcctcctgactakctgggattacaggcgctgccaccatgctcggctaatttttttatttttagtagagacggggtttcaccatgttggccaggctggtctcgaactcctgacc

SEQ ID NO: 499819 - DNA, 201 bp, Homo sapiens
gcatcaacatgataggattgaaggatgcaaattactgttcctggtgtgtctgtgagggtgttgccaaaggagattaacatttgagtcagtggactgggacrggcagatccaccctcaatctgggtgggcaccatctaatcacctgccagcccagctagaatagagcaggcaagagaagatggaagagcagacttgctgagt

SEQ ID NO: 499820 - DNA, 201 bp, Homo sapiens
ttgtctagggtttggtgaaagcaatggtattgaaagtggttttctcatcaaattagttcctgagtcatgtgtcggacactgtttctatcttgagcagcttytctagcctttctaaatcctgtgacctgcctgtgatccttttaagatttctttctgtttaatcagccacaaacagcttctgttgcttgcaacccaggctcc

SEQ ID NO: 499821 - DNA, 201 bp, Homo sapiens
gtcaactggaccatcacccttaggttgtagggaagaaaactgagacctagaaaggtgaagcggttgtcccaaaggcttccagctgctcccagtactcaagracttggagcacacttggggaaatgctcactgttgtattcccgttcctcactatccaggaggcctgaactctcaaactccgaatctgatttccactctccc

SEQ ID NO: 499822 - DNA, 201 bp, Homo sapiens
caaagaggtctttttaataagccaacagtaaagacaaagtggaataccaaaaaaaaaaaaaaaatcaaaaaggaagtcaggagggtgccaagatcattcartggtcttaggaaaacagtagtctcttcaataaatggtgatgagacaaactagatatccacaagcaaaagaatgagtctggatctttccctctcaacatat

SEQ ID NO: 499823 - DNA, 201 bp, Homo sapiens
gtactcaaggacttggagcacacttggggaaatgctcactgttgtattcccgttcctcactatccaggaggcctgaactctcaaactccgaatctgatttycactctcccaggaaggcttcggaaatcactgtaagttccttgcagattctcattgagcctctccccaggacccaccctttggccctgcgtgtctgcgact

SEQ ID NO: 499824 - DNA, 201 bp, Homo sapiens
atgccagattttattcctgggctggggacaaagagctggaaagccacagtcacttctagctaaaccattcaaggaacttattagcaaacaggaaagcactytatagtgtgagcagtgctgtgctagagaatagagaataggcttctggaggtgcagaggaggcaattagtacataggtccaggtgtgttgaggaaggattt

SEQ ID NO: 499825 - DNA, 201 bp, Homo sapiens
cgactaggtatgcgcattgctagctgctttagatgcaatgaatctggaagatattttgtatggactgaataacaggttgaggaaggcagaaaagtgccttmaggtcagttcctggttcaagaccggcctctgctacttgctcttagagagaaagagagcagggcctgccccattcttggcttgcaggaccatttgttcagg

SEQ ID NO: 499826 - DNA, 201 bp, Homo sapiens
gcttcagcaatgagggaagtgtatggacttctgttatggaaaaatccagaagcagtccaagcttcaggcatgaattgatcagaactctttttttttttttytgcacatctctcagtttttcttcttctctatgagtcaactttctactcagcataccttctttcctggaagcaaaatggttgcaccaagtccaggcatcac

SEQ ID NO: 499827 - DNA, 201 bp, Homo sapiens
atgagctgagatggtgccactgcactccaggctgggcgccagagcaagacactgtctcaaaaaaaaaaaaaagaagtttaggagagaggcaaatgttaagrggagaggaagatgagatggctccaaatctaatctgtgatttgttccaaatttcaggtggattgtcaatacaggagtccatactgactgaatccctaattt

SEQ ID NO: 499828 - DNA, 201 bp, Homo sapiens
taacagcaaaacaggctcctggaatccctgtgaatctgttgctgaatactaagctgcacatgcataaggtgaaacttcacagtgcgatgcaaagaactacygcggagctgtgagctgattggttcccagggctcactgggcaatgtttgagtttcaactcgccaatgtgaagaaaccttgctgactgtccagggaattcag

SEQ ID NO: 499829 - DNA, 201 bp, Homo sapiens
aatacaaaataaagttcccgaggcagaaaaaacatggtaccacatgaaaccactgacctacacaaagaaatgaagagcaccagaaatggtaaatatatggrtaaatatgagacatttctttctctgttacaaaattcctttaaaacataattgaccttggccgggtatggtggctcacacctgtaatcccagaacttttgg

SEQ ID NO: 499830 - DNA, 201 bp, Homo sapiens
ccttgtaaactttgtagagagtatctattggtttgtctatccagaacagcaccatttgcttctgctaaatgtttttataatgtaatctctgtaatcggttaaatggaagctgccgtcttcttatacatcctgcccctggtacctgttgatccctaggtggacacctgattcaagatgggacaattagaactctttcctgaa

SEQ ID NO: 499831 - DNA, 201 bp, Homo sapiens
cttgtaaactttgtagagagtatctattggtttgtctatccagaacagcaccatttgcttctgctaaatgtttttataatgtaatctctgtaatcggttaaatggaagctgccgtcttcttatacatcctgcccctggtacctgttgatccctaggtggacacctgattcaagatgggacaattagaactctttcctgaat

SEQ ID NO: 499832 - DNA, 201 bp, Homo sapiens
agtcatgtgtcggacactgtttctatcttgagcagcttctctagcctttctaaatcctgtgacctgcctgtgatccttttaagatttctttctgtttaatyagccacaaacagcttctgttgcttgcaacccaggctcctgagaagagactggagaagcagatcactttattaatgtgcttcatgtagagggagtagagat

SEQ ID NO: 499833 - DNA, 201 bp, Homo sapiens
cacagcaatttcttaaaggtcactggttcctaatgatcacgctgataaataaatccagtaggattggtttgcctggttttcattcccagttagaatgtacwtagatctctttttctagttgattacataccagaaactcagaagaatggcccagcctctgagaacttcggctcaagcgctcttaatgttttgccattttca

SEQ ID NO: 499834 - DNA, 201 bp, Homo sapiens
ttgtaaactttgtagagagtatctattggtttgtctatccagaacagcaccatttgcttctgctaaatgtttttataatgtaatctctgtaatcggttaaatggaagctgccgtcttcttatacatcctgcccctggtacctgttgatccctaggtggacacctgattcaagatgggacaattagaactctttcctgaatt

SEQ ID NO: 499835 - DNA, 201 bp, Homo sapiens
ggcatgtgccatcatgcctagctaatttttgtatttttttgcagagcggggtttcgccacgttgcccaggctagtctcgaactcctgagttcaaagtgatscgcctgcctcagcctcccaaagttctgggcttacaggtcactgcatctggctgagaacagtgaaattcctaatcagccttctcttactctttttcctgta

SEQ ID NO: 499836 - DNA, 201 bp, Homo sapiens
gcactccagtctgagtgatagagccagaccatgtctcaaaaaaacaaaacaaaacaaaaaaaccccaaaccatctatctatctatctatctatctatctatcttctatctatctatctacacatacatgcacacactatatatgatataacattatatataatgttagatatataatatgttaggtatataatataacgtt

SEQ ID NO: 499837 - DNA, 201 bp, Homo sapiens
tcttcccaccacaatgcccagaatcctcacactgcagcctcttcactccccagggtgcctgttggccttccctgcagcatcctgccacatgccctacctayccctatccctatttttctccctgccactaaaacctcccattggcaccctcttctctttgcactccagtgtaggtacactgcaatgagttaaacaccacag

SEQ ID NO: 499838 - DNA, 201 bp, Homo sapiens
cactccagtctgagtgatagagccagaccatgtctcaaaaaaacaaaacaaaacaaaaaaaccccaaaccatctatctatctatctatctatctatctatcttctatctatctatctacacatacatgcacacactatatatgatataacattatatataatgttagatatataatatgttaggtatataatataacgtta

SEQ ID NO: 499839 - DNA, 201 bp, Homo sapiens
actccagtctgagtgatagagccagaccatgtctcaaaaaaacaaaacaaaacaaaaaaaccccaaaccatctatctatctatctatctatctatctatcttctatctatctatctacacatacatgcacacactatatatgatataacattatatataatgttagatatataatatgttaggtatataatataacgttag

SEQ ID NO: 499840 - DNA, 201 bp, Homo sapiens
tcaaaccctgtgcccataggggtgcatccactcagaggggaaccttggtctatgtagcaaaagatgaaggcactgtctaggcaagcagtggttctgggagygaggatgtaatgaagggaataaacacaaatttctagagcatctgctgtatactgtatccagttatggtcccgggtatttggtgctcattgatataggaca

SEQ ID NO: 499841 - DNA, 201 bp, Homo sapiens
ctagagcaatcactataaataaataaatacatacataaatacataaataaagcaaagaggtctttttaataagccaacagtaaagacaaagtggaataccaaaaaaaaaaaaaaaatcaaaaaggaagtcaggagggtgccaagatcattcaatggtcttaggaaaacagtagtctcttcaataaatggtgatgagacaaa

SEQ ID NO: 499842 - DNA, 201 bp, Homo sapiens
gtgataaaagtgttttgaagctagatagaggcaatggttgtacaaccttgtgaatgtaataaatgctactgaaatattactttaaattcacctcaatttcaaaaaaacgtattcaccaaccaagagaaaaaaagtcaggtaatatggtttggctgtgtcctcacccaaatctcatcttgaattgtagctcccataattccc

SEQ ID NO: 499843 - DNA, 201 bp, Homo sapiens
cttcggctcaagcgctcttaatgttttgccattttcatttctaactgttttctgctgcaacctaaggtcaggagactagtcattgtgactgatggcatcascacccattgctgaactataggaaaggacatttccttagaggttgctggtatggaatactcatatgatttaggagtggtctcctctcataggctccaaagg

SEQ ID NO: 499844 - DNA, 201 bp, Homo sapiens
agcacacttggggaaatgctcactgttgtattcccgttcctcactatccaggaggcctgaactctcaaactccgaatctgatttccactctcccaggaagkcttcggaaatcactgtaagttccttgcagattctcattgagcctctccccaggacccaccctttggccctgcgtgtctgcgactaggtatgcgcattgct

SEQ ID NO: 499845 - DNA, 201 bp, Homo sapiens
aaagtaaaaccaaaactggacttcataaaaattacaaaacttttctgcttcaaaggacattatcaagaaagtgaaaagacagcatacagaatgagagaaartacttacaaattaaatagctcataagactctagcatccagaatgtataaagttctcttatcattcaacaataaaatgacaaatagtttatttttttaaag

SEQ ID NO: 499846 - DNA, 201 bp, Homo sapiens
caactcgaagaaggttgcaaattcctaagattgttgagagtctattggggaaactacttcctcaccacccaaatcattcatccatgggttcaataaattgttattattattattattattatcatcatcatcatcattaaagacagatgtcactctgttacccaggctggagtgcagtggcacaatcacggctcactgcag

SEQ ID NO: 499847 - DNA, 201 bp, Homo sapiens
aactcgaagaaggttgcaaattcctaagattgttgagagtctattggggaaactacttcctcaccacccaaatcattcatccatgggttcaataaattgttattattattattattattatcatcatcatcatcattaaagacagatgtcactctgttacccaggctggagtgcagtggcacaatcacggctcactgcagc

SEQ ID NO: 499848 - DNA, 201 bp, Homo sapiens
actcgaagaaggttgcaaattcctaagattgttgagagtctattggggaaactacttcctcaccacccaaatcattcatccatgggttcaataaattgttattattattattattattatcatcatcatcatcattaaagacagatgtcactctgttacccaggctggagtgcagtggcacaatcacggctcactgcagcc

SEQ ID NO: 499849 - DNA, 201 bp, Homo sapiens
aattcctaagattgttgagagtctattggggaaactacttcctcaccacccaaatcattcatccatgggttcaataaattgttattattattattattatyatcatcatcatcatcattaaagacagatgtcactctgttacccaggctggagtgcagtggcacaatcacggctcactgcagcctcaaatgcctgggctct

SEQ ID NO: 499850 - DNA, 201 bp, Homo sapiens
gtcactggttcctaatgatcacgctgataaataaatccagtaggattggtttgcctggttttcattcccagttagaatgtacatagatctctttttctagytgattacataccagaaactcagaagaatggcccagcctctgagaacttcggctcaagcgctcttaatgttttgccattttcatttctaactgttttctgc

SEQ ID NO: 499851 - DNA, 201 bp, Homo sapiens
cagattttctttgagtatcttgttttattctgttttcttccagcataaagtgatgcatgaaaagcctgatgaatcttgttttcttcccctgacagtcataygctgtttttccttagatgcccaaaggattttttcctttttctgtcaagtcggccgttttattcgaatgtgtcatgtgttggtattggttgtcctggtcca

SEQ ID NO: 499852 - DNA, 201 bp, Homo sapiens
atttggcttcctgtccttagaaatgaagctgctggctctccatgctctttcctcagggtggattatggacatggcagtgacccagcttcaaccatgaggakgagaataatatcctaaggatactgggtctctggacagcacagactgttacgggagacataaatgaacatccagcttctttaagaaacaaaagttcaacac

SEQ ID NO: 499853 - DNA, 201 bp, Homo sapiens
aaacttccagagggggtctgttgcagcccttgcctcctgcaggtctcctgggtcccttccgcacatctccttccttcccacaaacatcctgggtatgtggygcacagacaggcttccctcctggagccactacatgttaactgctttatctggactctgaggccctctgtaatgtggctctacttcgcctttcctcctttt

SEQ ID NO: 499854 - DNA, 201 bp, Homo sapiens
gttggccaggctggtctcgaactcctgacctcaggtgatccgtccgccttggcctcccaaagtgctgggattataggcattagccactgtgcccggcctatttttttttttttttgagacagggtctcactctttgacccaggctggagtgcagtggcatgatcacagctcactgtagcctccacctcatgggctcaggtg

SEQ ID NO: 499855 - DNA, 201 bp, Homo sapiens
tactagtttctgttgggttcacctctcttgtaaacatgcaagccccgagtagaaagtaaaagaggagtgaagagggaggcatgaagggatgagggacacawctacaggctgagcgagacacggagcaaacagctgaggtcattcctacctggagacaatggttttgcacccaggtgatgcctatccactggccaaatcagc

SEQ ID NO: 499856 - DNA, 201 bp, Homo sapiens
agctgggactacaggcgtgtgcctccatgcccagatgatttttgttattttttgtagagacaggatcttgtcatgttgcccaggttggtctcgaatcctgkgctcaagtgatccacccgccttggcctcccaaagtgtgggattacaggtgtgagccactgcacctggcctgctctttatttttaatgagagagacttgag

SEQ ID NO: 499857 - DNA, 201 bp, Homo sapiens
tgtgcccccaacaaaagatcacacttccccagcactccctgtagttaggcatagctatgaccaggtgaaaacctacttgtgaagctgatgagtggaatgcrgggtggattatgagtggaagtgaaaagtgcagatttggcttcctgtccttagaaatgaagctgctggctctccatgctctttcctcagggtggattatgg

SEQ ID NO: 499858 - DNA, 201 bp, Homo sapiens
aaaaacagattcaccatttattatttaaaaactcaaaaataaaatctagcatgtttatatttatgttccagtcctgggggaaaaatacaattaattacaayagttaccattttttttatacacagttacgttctttatggctagaacaaattatctttatttctatttcaactgtagttacctcttaaacaataaaagttc

SEQ ID NO: 499859 - DNA, 201 bp, Homo sapiens
gaaatgcatgtatcttcactatacattttttgagtttcaacaaatgcttacacctctataaacccaaacccataagacattattatgaccacacaaatgtyccttcatgcctctttgcagtccaactcagcccttgcttcccagaggagattgttttagaatatcttatatatgaaattatgcattcagtatgtactcttt

SEQ ID NO: 499860 - DNA, 201 bp, Homo sapiens
ttaaacaaagaaactctaagtagtcacatggaatcattgaattgaaataacattcttcatccttcatctttttctataaaattttgaatatgctccttaargactgaaatatgcaagcaccacagaagttgaagacaaaaatgaaataattgtgaatttagtcatgaaaataacatatgaagctgagtctatcgatgtcaa

SEQ ID NO: 499861 - DNA, 201 bp, Homo sapiens
agcccttttttggtgttggctggcctgccaaatgtgctacagatagggagaaaattggccgtgtgtttaaggtggtgacctgagttggaggacagtcagakaattcagaccaaatttccttatattaactcatggctgaatgcagccctgtttagcagcttattgaagaatgctcacagctcaagccaagagaaatcaatt

SEQ ID NO: 499862 - DNA, 201 bp, Homo sapiens
ataattcagaccaaatttccttatattaactcatggctgaatgcagccctgtttagcagcttattgaagaatgctcacagctcaagccaagagaaatcaaytgtgctgccagctacaaagacaaagtgaaagcttcgcctgtaaacagagttaaagggaaagtcacaggagcttgtagcgtgagcaaacagagacaaaaag

SEQ ID NO: 499863 - DNA, 201 bp, Homo sapiens
ttgggaacaggccccaaaatctggccataaactagtcctaaaactggccagaaacagtctctgcagcactgtgacatgctcttgatggccatgacactcaygctgggaggtttgcggtttaccggagtgagggcaaggaacacctggcccacccagcgcagaaaaccgcttaaggcattcttaaaccacacacaatagcat

SEQ ID NO: 499864 - DNA, 201 bp, Homo sapiens
ctctttgcagtccaactcagcccttgcttcccagaggagattgttttagaatatcttatatatgaaattatgcattcagtatgtactcttttgtggctagwttccactcagcctaacatgttttggattcatctgtattgttgcgtgtcacagatgtatatgagtatactgcatattctgcacctcgtttgtttattcatt

SEQ ID NO: 499865 - DNA, 201 bp, Homo sapiens
agaataattctaccaagtatcctaaaaatcattacattactactcacaataatcaaataagtaaggtaccattcttattcattcaatttaacaataaaaaraaaactaggaacagatacattaaaaaaaaaagatcagtagatatcaggtcatgattcaaactaaggccatttacttttatatttttaatcactaattcac

SEQ ID NO: 499866 - DNA, 201 bp, Homo sapiens
attcaaatcttctttctgcaagctaataacagctattatcagtaattatcatgagtgtactactagtcattctttttcttgttctccttctccacctactmtctttgccttcctaatggcactatcattttccttaatgagaatgggaaaacctttcaagaatagggttagataggggccaggcatcgtggctcatgcctg

SEQ ID NO: 499867 - DNA, 201 bp, Homo sapiens
tccaatgtttatattatgaatatcctccataaatattgaatatatacatcttgatttattgttttctctgcatgcttttatataacatattatgactccartgcatttttaaaacacttggtactttttgccaaatatcttattcttttaaaatatacagaaattttaaaagaaactcatattcaattgaaaagcaagcaa

SEQ ID NO: 499868 - DNA, 201 bp, Homo sapiens
gttatagttacagtgtcagctaggtaacagtacttttcatggctgggccaaagttctccagaatgctgtatgtgctatgaattggcagaatcaaatagacrcaataaaaaatgatatgggggatatcaccactgatcccacagaaatacaaactgccatcagagaatactataaacacctgtacgcaaataaactagaaaa

SEQ ID NO: 499869 - DNA, 201 bp, Homo sapiens
aggccgaggtgggtggatcacctgaggtcaggatttcaagaccagcctagccaatatggtgaaaacccatctctactaacaatacaaaaaaaaaaaaaaaatagccacgtgtggtggtgagttcctgtaatcccagatactcgggaggctaagacaggagaatctgttgaacgtgggaggtggaagttgcagtgagccaag

SEQ ID NO: 499870 - DNA, 201 bp, Homo sapiens
tttgtactatagtgaaatggcctttagaagttatagttacagtgtcagctaggtaacagtacttttcatggctgggccaaagttctccagaatgctgtatrtgctatgaattggcagaatcaaatagacgcaataaaaaatgatatgggggatatcaccactgatcccacagaaatacaaactgccatcagagaatactat

SEQ ID NO: 499871 - DNA, 201 bp, Homo sapiens
taccgtcacttaaaccatggtttacaaggacttaaaactttcacttaaacattttttaaaaatttgaatgattactactaattttcacaatatactaaatktgatggtgtcaacttgaccggattgagggatgcctggatggctgatgaagcattgtttctgagtgtgtctgtgaagatatttgcagaggagattgacatg

SEQ ID NO: 499872 - DNA, 201 bp, Homo sapiens
agaaagaggggagtttatttatgcaattggttacagggagaaggttgcagtaactcaccagatcaattcaaagttacaagtgtttttctagtgcttagatacactttaagctgcatgcctatgtgtgggagtgcacctacaagaaggagtgatttattcaatctccatctaatcttatgaggtgtatgtgtaaaaatgcta

SEQ ID NO: 499873 - DNA, 201 bp, Homo sapiens
aaagattcccaaacctcaagttttgacttctatgcacctgcaggctcagcaccacatggaagctgccaaagctcgaggcttgcacactctgaagccatggmctgagctttaatttagtctcttttagctatggctggaacagctgaattacagggcaccaagttgctaggctgcacacagcagggtgtctcttggcccagc

SEQ ID NO: 499874 - DNA, 201 bp, Homo sapiens
ttgcatatggtgagcatcttactgtctaaagctgtctcaaccagtccctctatacactttcctgaacaccttctgcacctgatgccaacatatgtattcaraatatattcccataatcagtgtgattcttttaaagtacactatgaaacatatattagtttaattcacatactgagtaaatttcttcttaatttttagata

SEQ ID NO: 499875 - DNA, 201 bp, Homo sapiens
atttttgaggcatcattaaagtgactcaagcagaaaaggtgtaatctggactgtcctaaaaatctggggcctattaaaacactcttcatatttatttaacrtgtatggatatttttcacgaaatgtatattttttcatgagagaaatttctaaatttctttaaattatgtagcccagtagagtcttaaattgaaaggcagt

SEQ ID NO: 499876 - DNA, 201 bp, Homo sapiens
caaaaaaaaagcccaggccaagaaggctttgttttagaattctacaaatcattcaaggaagaaaacataacaattcttcaaaaaacaatcctcctaataayagaagaggagaaaacactaccaacatatttcattgaccccttctactaaaaccacaaaaaacacatcacaaaaaatgaaaactacagatcaacagctctt

SEQ ID NO: 499877 - DNA, 201 bp, Homo sapiens
ttttaactatttaaaagtgaacaattcagtggcattcacagtattgtgtaactaccattgcaatctagctccaaaactgtcaccaacctaaaaggatgtgyatacacattagacagtcacttgccattcaagcagcccatagcctggtaacctcgaactgtctgttaaaatcatcctgtagtatattaggagattttttta

SEQ ID NO: 499878 - DNA, 201 bp, Homo sapiens
ataaaaagttccatggaggaaatttcaagggaaacaggaataactggtgaaaattgttttttaaaacaaccatttggtgtccctggcaataatcctaaagrcatataataaagtaacattcactgaagaaaatccagtaatttgtagtgaaaacagcaagtgtctttggcatttaagccacaacatgctcatttgcccccc

SEQ ID NO: 499879 - DNA, 201 bp, Homo sapiens
ttgactgtgcagaccacaaattgctgagtattttttaaaatatgatttttaatcttaagacctcaatgtcaacacgagagtcattgtagtactattccagrtaatacatggtatattcaggtattgcatgtgattgcagtaacttgtagccacatttaatgtaacttgtattcagtgttttgtctcactggcctgatgccc

SEQ ID NO: 499880 - DNA, 201 bp, Homo sapiens
aaatttctcatttgttatcattctaaaagttgttgttcctttggacactgaatcttggtaaaattcggatgagtaggagacatggctttcttttgaaaatracatttttgaaagtgggggcatgtagaggttctgagaaagatgagcttagagttgtcccactgggtttaccaccccactggtggtcacttccctaatgtc

SEQ ID NO: 499881 - DNA, 201 bp, Homo sapiens
atatgttcattatggtttttattttatttatataatataatgtacatatgtgacatttattaagaaaattttaatattattgcatgtaccttttcatcttwaaataagttgacattttgctatatttgtcatttagatcctcagtttccagctaaacttgtattatgggtgccagtgtaattaaataacaatatttgtttg

SEQ ID NO: 499882 - DNA, 201 bp, Homo sapiens
tcacataaaaactaaattttaaaaatttgtaaattatgcactagtttatgatgatttcctggtaattccaaaatcagtacctcattatggtactaggcatktaccaaatggcttagctatagacaaccatattaaacactgctgtcaatgctttggagtatgtcatcgaagatttaacagtctttgaataaaatttagcat

SEQ ID NO: 499883 - DNA, 201 bp, Homo sapiens
cttatcttaaattgttatatgcatagctaatgtagtctttgttttagttactgacctataccaattagctatacaatacatgaacattgttaaaaatgctyttttgcaatttagaggcttttgctgtgctgcaagactttatgaagtcttttagtaatttaatctaatgtggcttaaaaaaattgtttcaaatatgtatct

SEQ ID NO: 499884 - DNA, 201 bp, Homo sapiens
tcattcaatttaacagtaaaatctaggaagagatgtgctttttttactcatagtcagcatatatatatataattgactacagtatatttttcagtatttcrttataaaatttgcatacaacgaaatgcatgtatcttcactatacattttttgagtttcaacaaatgcttacacctctataaacccaaacccataagacat

SEQ ID NO: 499885 - DNA, 201 bp, Homo sapiens
ccacgagcaaaagggaatggccataggagttctaactaaatccataggatcatggcactgcccagcgacgtacttatccaggcaattagattctgtggcayttggatggcctcctagttttaaggcattagctgccactgctctgctgggacagaaagctaataaactgactttaggacagcaaatgacgatccaggtacc

SEQ ID NO: 499886 - DNA, 201 bp, Homo sapiens
tttccaatatttaggcttctatataagctaagggaaaagatggcttggttgtgaatggaagcaggtggtttgtgcacttcctactccaaccacctggtgamaaataagagagttcctaggggtagcagggctctgccacatctggatcccaaatttctcactcatggctaagctattatatgaaaccacaaagtgggggaa

SEQ ID NO: 499887 - DNA, 201 bp, Homo sapiens
catcattaaattgaagcaattcagtcatatcttcaggttctacttctaattacattttacttacaatattcaccacatttgtagttacttcctccattgargtcttgaccctgtcaatattattcgtgatggttgaaatcaacatcctaaaaactcctggtgatgtcgatattttgacctcttcccatgactctcaaatgt

SEQ ID NO: 499888 - DNA, 201 bp, Homo sapiens
gatggccttcttctcacagctacactactcagtgcctcagtggggaaactgtgtggggactccaccccacatttccctttgtatttccctagtagaggttytccatgagggttctgcccctgcagcagacttctgcctggacatccaggcatttccatacataccctgaaatctgggcagaagttcccaaatctcaacttc

SEQ ID NO: 499889 - DNA, 201 bp, Homo sapiens
tcttggtaactacaggtctcaaaggtaactttgttgccctggcttaagatgtgtgtgtgtgtgtgtgtgtgtgtgtgtgtgtgtgtgtgtgtgtgtgtgtkcctgtgtgtgtgtctagctttgaagctagtggcctgagctgagagtccacatgtaaatttggtcaagccttaaggcaaaactccgcactcttttactttc

SEQ ID NO: 499890 - DNA, 201 bp, Homo sapiens
agcatgattctgattttctcagaactaaaactagggggagacattgataacattaataatttgacaaaagagaatgtgggtgccagaggagaaaaaaaaaactattccattagggtgccaaacaaaaacatgaagaaaaatgataacctggtattctttaggagattattgcagccaagaaatgagtcatgattcaacctg

SEQ ID NO: 499891 - DNA, 201 bp, Homo sapiens
actaacttatcttaaattgttatatgcatagctaatgtagtctttgttttagttactgacctataccaattagctatacaatacatgaacattgttaaaaatgcttttttgcaatttagaggcttttgctgtgctgcaagactttatgaagtcttttagtaatttaatctaatgtggcttaaaaaaattgtttcaaatatg

SEQ ID NO: 499892 - DNA, 201 bp, Homo sapiens
aatcacttcaaggccttaaattattttcaatgacttctcttgttcatataatgttttaatttttttattgtgccttgtcattttgaccaatgctatgcagrattatataaactagctttataatgcagtaatattgataagtgaagatattaagtttcaaaaggatcttttattttgaaaaataaaactgaattttatagg

SEQ ID NO: 499893 - DNA, 201 bp, Homo sapiens
atgttgttcagagggctattcagagaatggaaacccaaggctcacctttcttgagtctaagtacccactcagccaagtatatttagcaaaatagaaaaacyaaactgctttggtgactggactttgccaatgtctgaaagaaagaagtaacagaaaggagagtctaaagttgatcctgtacagtataaaacatttccccaa

SEQ ID NO: 499894 - DNA, 201 bp, Homo sapiens
agaaaagcaagactatgtcttttgcaggaggaatatgatggaagatggagcacattatcctttgcaaattaatgaactaatgcaggaaaagaaaaccaaayactgcatgtcctcacttgtaagttggagctaaatgattaggacatatgaacacatagaggaaaacaacagacactagagactttcagatggtggaaggtt

SEQ ID NO: 499895 - DNA, 201 bp, Homo sapiens
gtagtcccaactactcagtaagctcagttgtcaggattgcttatgcccacaagatcagggctactgtgagccctgataaagggaacaactccagcctgagyaagagagcacaaccgtctctcaaaaactatgtgtatcaaaatgatcattctcagattgcatttctattatcttacttatagcacttagagtggctcatca

SEQ ID NO: 499896 - DNA, 201 bp, Homo sapiens
atggaaatcttaatcagtggagtgtcataatctgacattaatttcaaaaaaaaacattattctggcttctggaaggaaaatatagcagaagacagaagagwagagtagaagcagagagattagttagagggcatttcaaccactgaacacaattatttcttaaaatatcaaaatagtccaaacacggtggttcatgcctgc

SEQ ID NO: 499897 - DNA, 201 bp, Homo sapiens
atacaaagaatgataactaaaaaattctctaaactttggaaattaaaaatacatttttaaaaaattcagtcaacaaaatattgtaattatacatgcacatktatctcagcaactcttctcccaattatatatctaacagaaattaatatgtaaaactaatgacatacatatagataaatatatttataccagaataactaa

SEQ ID NO: 499898 - DNA, 201 bp, Homo sapiens
gccctgacctttctctgtgatcactactcactggaatgattttcaaatattctatactttcaaatattttcaaatattctatattctatgtgtagacatayacatatagtgtgtgtgtgcatgtgtgtatactggaaataaacattttttaaaagtataggaaatagtgacctgaactgatcatatgctgggcaaaaactc

SEQ ID NO: 499899 - DNA, 201 bp, Homo sapiens
cagctttgaaggctgtaagacccttgacttcccactccacacgctatatttctgtgtttgtatctttaattcctctagcaccactgggttagtgtctccaygactgagctggtttcagcaggcagattgaaaaatgtttttcatttgcctgttttcaaaaactgtctcctttgctttagactaataataaaaagaaatgtt

SEQ ID NO: 499900 - DNA, 201 bp, Homo sapiens
gtacaagaaaaaaagtgtaatgtattagtgctttttatagtaatgtcttctttataaaagagggaaaaccttatagataaatattagtatgcagaaataaygaagctcaacctgtactacacaagttaaattttagtctatttatattttcttaatgaaacaacttctgaaagtgtaccaaggaccttgccaaaatagatc

SEQ ID NO: 499901 - DNA, 201 bp, Homo sapiens
gcttttcctgtacttctgggctgagctgagagtcaacggacaggaaagccattcagctccagggtcctgaaaaaagttggttgaccctgcagctataagcrtaactctcaaagttatgtctcccaagcaagactcgcccatctatcctatctatcctgacccttgcctcctgggtcctaatgcctgtcaaacaaacttctt

SEQ ID NO: 499902 - DNA, 201 bp, Homo sapiens
gatgcgcatgtttgttacataggtaaagaaccctcttctatataaacaaatacattcatatggaatatatgtgtccctgtcagaaaaaagaaaaagaaaamgaaaaagaaaaacagagcaagatccttgttaaaaattgcaagacaaattttattttgacaactgaagaaggggatagagactacagtatgaactgagctt

SEQ ID NO: 499903 - DNA, 201 bp, Homo sapiens
ttcgggtccgacagtactcgctactccctgaggacatacggggtgtccacaaacatttagagtggcttcataagcatggaatcatagccaaatgccagtcwccatggaacaacattctcttgccagtgcggaagccgtctggggaatataggccagtacaggatttgcattcagaaaaccaggccacagtgaccatccacc

SEQ ID NO: 499904 - DNA, 201 bp, Homo sapiens
gtttgcatatgaagcatatcaggtgcttcatctggggaactccacctggaattttacagggtgagttgggcagtccatttctcagggtaatcaaaccttayggtggcaattattcagtccactgggctgcttgtgaagctgggtcacatatactcctcagtgattgcttaatcgtgagctgtgggacctgcataaacccct

SEQ ID NO: 499905 - DNA, 201 bp, Homo sapiens
ttgttttacagaaggccatttgcagtaaaaaacaaatcaatcccaataggatttcaaatgaaggagattaacaggctttgtcaaatcatctctagtcttcrgaatagcatgattctgattttctcagaactaaaactagggggagacattgataacattaataatttgacaaaagagaatgtgggtgccagaggagaaaaa

SEQ ID NO: 499906 - DNA, 201 bp, Homo sapiens
aaaggcatataataaagtaacattcactgaagaaaatccagtaatttgtagtgaaaacagcaagtgtctttggcatttaagccacaacatgctcatttgcmccccctcctagttcagtgacagaaactccctctcttccagggaggtgctgatgctaccacagggctctcactcttcaaagctcccagttgagtgtcaggg

SEQ ID NO: 499907 - DNA, 201 bp, Homo sapiens
ttgctgctgctcactctttgggtccgtgccacctttaagagctgtaacactccctgtgaaggtccacagcttcatgcttgaagtcattgaaaccacgaacmcaccagcaggaagaaactccagaaacatcttgggggctcatccaggatgttgccacacactgagtgccatcagaccccttttgcttggtattctgtccta

SEQ ID NO: 499908 - DNA, 201 bp, Homo sapiens
caagtgtctttggcatttaagccacaacatgctcatttgccccccctcctagttcagtgacagaaactccctctcttccagggaggtgctgatgctaccayagggctctcactcttcaaagctcccagttgagtgtcagggtatgcagttgagaaaaggtgtctctctgatttttttatatatatagactcaggcatatgc

SEQ ID NO: 499909 - DNA, 201 bp, Homo sapiens
caatatgacttgacagaagtattgtcaaagtatttgaattatatctcaaaatcaccatatataaaacctgttgaagtacgcagcagcagtcactaagttaytgtaatatttattgtatattgacatagaaatcagaaaaattactaaaattttgtgaatttagatttctataactgctaatattttttaaaacttttaaat

SEQ ID NO: 499910 - DNA, 201 bp, Homo sapiens
gtcagaaaaaagaaaaagaaaaagaaaaagaaaaacagagcaagatccttgttaaaaattgcaagacaaattttattttgacaactgaagaaggggatagwgactacagtatgaactgagcttaactccaactaagacaaaggtaactgagacttttaaagaaaatctgtttatgaataaaaagggaatatgaggaaatca

SEQ ID NO: 499911 - DNA, 201 bp, Homo sapiens
tcccactccccaaagcttccagttgagggccagagtatgctgttgaggagagatgtctctctgaatttcttatctacacacactaaggcatatgctgcaaragctaaattcctccagacaagtgtggctaagaagggtctcccatctttcatctaaccacagtcataactcagaggtttaactcaagaatggcacagagaa

SEQ ID NO: 499912 - DNA, 201 bp, Homo sapiens
aatacattcatatggaatatatgtgtccctgtcagaaaaaagaaaaagaaaaagaaaaagaaaaacagagcaagatccttgttaaaaattgcaagacaaaytttattttgacaactgaagaaggggatagagactacagtatgaactgagcttaactccaactaagacaaaggtaactgagacttttaaagaaaatctgtt

SEQ ID NO: 499913 - DNA, 201 bp, Homo sapiens
tataggaaaaatctcagaggggcatcagggtgcagatgaaagccccagccatttttataaaagacttggtgaggccagtgcatgatgaacatggcatttgyagagcaggcccagggggatatccagtgaaaattgcagaaaatggaaggttttaaagggatgaatgctactcagcttattgaagtggccacgaaggtgtac

SEQ ID NO: 499914 - DNA, 201 bp, Homo sapiens
aaatttaagggaaggcgggagacaggcaatcaatataggaaaaatctcagaggggcatcagggtgcagatgaaagccccagccatttttataaaagacttrgtgaggccagtgcatgatgaacatggcatttgtagagcaggcccagggggatatccagtgaaaattgcagaaaatggaaggttttaaagggatgaatgct

SEQ ID NO: 499915 - DNA, 201 bp, Homo sapiens
aatttatttttatttttatttttttgaaacggaggtttgctcttgttgcccaggcaggagtgtgatggcatgatcttggctcactgcatcctctgcctccsaggttcaagcgatggctcacgcctgtaatcccagcactttgggatgccaaggtgggtggatgatctgaggtcaggaattcgagaccagtctgaccaacac

SEQ ID NO: 499916 - DNA, 201 bp, Homo sapiens
acagtttagcagttcttcataaacatgcagttcccacataagccagcaataccacttatagtatcaacccaaaagaaagaaaagcatgtttatgcaaaaayatgtgcagcaatgttcctaatagccacaattggaaacaatcaaaaggccaacgaactgataagtgaacaaataaaatatgacatatccatactgtaaaat

SEQ ID NO: 499917 - DNA, 201 bp, Homo sapiens
ccacataagccagcaataccacttatagtatcaacccaaaagaaagaaaagcatgtttatgcaaaaacatgtgcagcaatgttcctaatagccacaattgraaacaatcaaaaggccaacgaactgataagtgaacaaataaaatatgacatatccatactgtaaaatattatagtgctgtaagaataaatgaggtattaa

SEQ ID NO: 499918 - DNA, 201 bp, Homo sapiens
tctccacagaacctgttacagtaaagaaaatgtcttattccatgagtagaactccaaagttatagaatgttagaactctaaagagattaagaatgagagcrggggatgttaggtaataaaactactcaaagactgatgtaaacagaatgctaacattttattttcttaacttttataattagttaagtatataaggaaatc

SEQ ID NO: 499919 - DNA, 201 bp, Homo sapiens
tgttctctttatatctgaaggataaatgtagagataccaaaattgaaagtaagttaatttgcttgagcatatcaagtccatataaggtttttattttgcttatttatttatttatttatttatttacttatttattgagatggagtcttactctgtcgcccgggctggagtgtagtggcgcaatctcggctcactgcaacc

SEQ ID NO: 499920 - DNA, 201 bp, Homo sapiens
gttatagaatgttagaactctaaagagattaagaatgagagcgggggatgttaggtaataaaactactcaaagactgatgtaaacagaatgctaacatttyattttcttaacttttataattagttaagtatataaggaaatcaagattttccaaataatagcttagaaaaatgagattatcaatgaaaagttgaagtatt

SEQ ID NO: 499921 - DNA, 201 bp, Homo sapiens
gttctctttatatctgaaggataaatgtagagataccaaaattgaaagtaagttaatttgcttgagcatatcaagtccatataaggtttttattttgcttatttatttatttatttatttatttacttatttattgagatggagtcttactctgtcgcccgggctggagtgtagtggcgcaatctcggctcactgcaacct

SEQ ID NO: 499922 - DNA, 201 bp, Homo sapiens
ttctctttatatctgaaggataaatgtagagataccaaaattgaaagtaagttaatttgcttgagcatatcaagtccatataaggtttttattttgcttatttatttatttatttatttatttacttatttattgagatggagtcttactctgtcgcccgggctggagtgtagtggcgcaatctcggctcactgcaacctc

SEQ ID NO: 499923 - DNA, 201 bp, Homo sapiens
aataactattaataattcaacatgctctaagaaaatgtgtcttccagttgacatatatagtacatatgtgtgtgtgcatatatatatatgtatatatatgygtgtgtgtatcatgttacattataagtttccatttgttaactgtgttcttctaacgttttatgtccttattcattatttgcttctctttttaaagtctgt

SEQ ID NO: 499924 - DNA, 201 bp, Homo sapiens
caagggaaaatttttgagacaaattcagactattatcagtattgctaattttggttgttttttcagcactgaaataaggaatcttattcataaataaagawatagctgttgaataaattcaaaattgtatttttctgaatttggtcaaatgattgttaacacttagacaatgtgctacaaagctttgacaatagtgattaa

SEQ ID NO: 499925 - DNA, 201 bp, Homo sapiens
taaacattgttgtatatgaaatgcaagagttctgcgcctcccctcacaagatgtgcgacagctgtgtggctcatctgttcagcccccattcatgttcaagyccgttatgggagggggagcatgcagacaggcaggtgcgggagcctgggcaagcgcccctggactgtgttcccacggcagcatccaggggtggttgtctgc

SEQ ID NO: 499926 - DNA, 201 bp, Homo sapiens
attagtctgacttcaaatataatacattagttttctttatttatgtaattgaattatataacatacattcattagagtctattttttaaaattttgtatarcagttgttatttaattccattgctgtgtagtattttgttgattgctaaaccacagattatgtcatcattttatgaccaatagacataggggttgctaacg

SEQ ID NO: 499927 - DNA, 201 bp, Homo sapiens
ttgaatattaaaaccaaaagataaatatacacacactaagtgaataggtcacaagtattagatcatcttgaacattatcttgaagagaagataccaatttmcctactgttcagatcatgatatatgataccacaacctgtctagaataactctcttttcctgaaccatttagtcactacttttatccttcagttaaatatt

SEQ ID NO: 499928 - DNA, 201 bp, Homo sapiens
gataaatatacacacactaagtgaataggtcacaagtattagatcatcttgaacattatcttgaagagaagataccaatttccctactgttcagatcatgrtatatgataccacaacctgtctagaataactctcttttcctgaaccatttagtcactacttttatccttcagttaaatattagtctgacttcaaatataa

SEQ ID NO: 499929 - DNA, 201 bp, Homo sapiens
aaaattttgtatagcagttgttatttaattccattgctgtgtagtattttgttgattgctaaaccacagattatgtcatcattttatgaccaatagacatwggggttgctaacgatttttgaacaatattaataattctgttataaacattgttgtatatgaaatgcaagagttctgcgcctcccctcacaagatgtgcga

SEQ ID NO: 499930 - DNA, 201 bp, Homo sapiens
ctcctctcttttccaactgtctccagctgaactactcttggcattcagaaactccttctcttctctctgatgcaccattctgccattcttctgctcttctsttcatgctgggtgtttggggtttatatgggtacagaataggggggcattgtggaccaaaaggcaacttttgggggctcaaaaacagaatgtctgttctca

SEQ ID NO: 499931 - DNA, 201 bp, Homo sapiens
cttctcttctctctgatgcaccattctgccattcttctgctcttctcttcatgctgggtgtttggggtttatatgggtacagaataggggggcattgtggrccaaaaggcaacttttgggggctcaaaaacagaatgtctgttctcatttatggccatgagttttcaggcttgagggtgggacctctgctggggaactgac

SEQ ID NO: 499932 - DNA, 201 bp, Homo sapiens
taggtgacatctttcttacataaaaatattattgacagcagttataaatgctgaatggatggtagctggactgggtaggcattttgcacattgcatcctayggagtataaataaatcaattactaaaaatttaacttattaaaattaaaatttttgttcttcaaaaaccatcaacaaaaaagtaaaatgttagcacaccca

SEQ ID NO: 499933 - DNA, 201 bp, Homo sapiens
aaatttaacttattaaaattaaaatttttgttcttcaaaaaccatcaacaaaaaagtaaaatgttagcacacccagaatgaaacgaaatatttgaaaattrtatatctgatataagattatatccaaatataaaatagttcttaatactcaataataagatgagtagcaaaatttaaaaatgttccaaggattggaatagg

SEQ ID NO: 499934 - DNA, 201 bp, Homo sapiens
ccaagtgagaaaactaatttctttcaggcaaagcaaatatgagccatttcattattatttgttagtttgttaattttcagtttttttgggtacttagtagktgtatatatttatgggttgagtgagatgttttgatacaggctgcaatgtaaaataatcacaccatggagaataaggtattgttccttaagcatttatcct

SEQ ID NO: 499935 - DNA, 201 bp, Homo sapiens
agcgcaatctaaataaaatgtgcaaaaaaaaaaaaaaaaagagcagcaaagaaaagagatggacatgtaagaatgtgttctcctaagtgcagtcatagaaygtgatatgtgagatgtgcaaggcagcaggcagtggggtggtggtggtgctaggattgaggaaggacaggtcacacttcatcacaaaatgtgtcatcactt

SEQ ID NO: 499936 - DNA, 201 bp, Homo sapiens
ttccctgttagccaggctagtctcaaactcctgacctcaggtgacccatccatctcggcctcccgaagtgctgggattacaggcgtgagccactgcatccrgcccatgaaaggtttttaaagtgtcaaatgattcaaagtaaatgtcatagaattgacatagaatttgagtaatttaatttgaatcatcatagaaactttg

SEQ ID NO: 499937 - DNA, 201 bp, Homo sapiens
atccagcatccaatctcctctcttttccaactgtctccagctgaactactcttggcattcagaaactccttctcttctctctgatgcaccattctgccatycttctgctcttctcttcatgctgggtgtttggggtttatatgggtacagaataggggggcattgtggaccaaaaggcaacttttgggggctcaaaaacag

SEQ ID NO: 499938 - DNA, 201 bp, Homo sapiens
ttttcctgcctcagcctcccgagtagctgggattacaggcatacaccaacacacctggctaatttttacatttttagtagagacggggtttttccctgttrgccaggctagtctcaaactcctgacctcaggtgacccatccatctcggcctcccgaagtgctgggattacaggcgtgagccactgcatccagcccatgaa

SEQ ID NO: 499939 - DNA, 201 bp, Homo sapiens
aaccctcaagcttcctatcctagcctgaccctatggtgtgggaggagggaaaggtaagggcagtggaaggccagagagaaacagaatttcttcccttagayggctcccctccaggccctgtcctacctcccagagccccttcccttctctcctctgagtaccagatcctccctgatacccccgaccccatgggcatcctct

SEQ ID NO: 499940 - DNA, 201 bp, Homo sapiens; identical to SEQ ID NO: 155168

SEQ ID NO: 499941 - DNA, 201 bp, Homo sapiens
attaatatacaccagtggttcctcctccctgttaaagactaatgctcagatgctgtttacggatatttatattctagtctcactctcttgtcccacccttyttctcttccccattcccaactccagctaaaatatgggaagggagaacccccaataaaactgccatggactggactctattcattcattcattcatttatc

SEQ ID NO: 499942 - DNA, 201 bp, Homo sapiens
tgggagggcctgcctctcaggtgctgatctgcatacacctcagaggcctccctcccaccttacctagccaagccacaagtaaaatattcagcaggtgacasggaagaatcaagcatagagtgataaagaatatgtgagagacttggatgtagtatgtcgggtgtatatgtgtgcttgtagccatgtgggcaaacaggtatc

SEQ ID NO: 499943 - DNA, 201 bp, Homo sapiens
acccctataatgatcctgtgtcctaaattaatatacaccagtggttcctcctccctgttaaagactaatgctcagatgctgtttacggatatttatattcyagtctcactctcttgtcccacccttcttctcttccccattcccaactccagctaaaatatgggaagggagaacccccaataaaactgccatggactggac

SEQ ID NO: 499944 - DNA, 201 bp, Homo sapiens
attttacatatatatctctatctatctatctatatacacacacacacacatacacacacacacacacacacacacacacacacacatatatatatatatakagagagagagagagagagagagataaccctttaggaaggtaggactctgttcttgtgcttgggagtaaggcaaggatatagccaagacaaacagacggga

SEQ ID NO: 499945 - DNA, 201 bp, Homo sapiens; identical to SEQ ID NO: 155171

SEQ ID NO: 499946 - DNA, 201 bp, Homo sapiens
tatacaccagtggttcctcctccctgttaaagactaatgctcagatgctgtttacggatatttatattctagtctcactctcttgtcccacccttcttctyttccccattcccaactccagctaaaatatgggaagggagaacccccaataaaactgccatggactggactctattcattcattcattcatttatcataga

SEQ ID NO: 499947 - DNA, 201 bp, Homo sapiens
tggcatcacatatgcctgcatgccattaacaccagctggccctacccctataatgatcctgtgtcctaaattaatatacaccagtggttcctcctccctgktaaagactaatgctcagatgctgtttacggatatttatattctagtctcactctcttgtcccacccttcttctcttccccattcccaactccagctaaaa

SEQ ID NO: 499948 - DNA, 201 bp, Homo sapiens
ggttttcactcatttgtcaccttggggttttgctctgtgtgtttcatatccaacggcaatacttgcagggggacagagtcctctaaatactccaatcctgyggtttttacaaacataaagggggagaccccaagtggaggaccctgggcctggagctccctcccaaactttgtccagcatccagcctgttccctgggctca

SEQ ID NO: 499949 - DNA, 201 bp, Homo sapiens
acttcctctctgggagacatggggcgtatctggtactatagatgcccataaggaccggggcatgagaaagagagcaaatgaggctaaatggcccctgggtragaagggccagttaagtgtgagcagagcacaagtaggccttcacttggtactgggcttctcccacactgcctgcctgggctgcagccagagggctgccag

SEQ ID NO: 499950 - DNA, 201 bp, Homo sapiens
cgctgggctccgcgtcctaggaccgccggcgcctccccacggacgccaggcaggccaggccgctctccggggccgcagcaccaaagacgcccgcctccccmccgcgcgcagacatgcgccacccctcccaggggtgagggggcgttggcctcagcgtttgtcttccggctcctcccagctggccttgtcccaggggcgacg

SEQ ID NO: 499951 - DNA, 201 bp, Homo sapiens
cgcacctggtgctgcctgccgggcccgagcggcgccgcgccagcctcctggccttcgcggaggacgcaccaccgtcccgcgcgcgccgccgctcggccgaragcctgctgtcgctgcggccctcggccctggatagcggcccgcggggagcccgcgactcgccccccggcagcccgcgccgccgccccgggcccggccccc

SEQ ID NO: 499952 - DNA, 201 bp, Homo sapiens
tttctttgccttccatcctgggcagaccccttacaggcctgggcattgccatgggccctgggtcttcccaggctaaggagaaccaggaacagctataaccytgagctagtgaaatagggtagatgagaaggctgtctcctccagacccctacccctacacagtggccccacaatatgaagacctggggtaattccaaggtg

SEQ ID NO: 499953 - DNA, 201 bp, Homo sapiens
cagcagggcctggccttccgtgtccctgcgtcatccccagcctcactccccacccgtgcaggcctggccaggaagggatcctggcaggggcttccaggttstcagctcaaggcctggtcccgggcaggcgtccaacccctgggagcaatgtatttctttgccttccatcctgggcagaccccttacaggcctgggcattgc

SEQ ID NO: 499954 - DNA, 201 bp, Homo sapiens
cagggctgtttgaagtctcttggttgtaggccctcgccactgagtggcccaggtgtgagaggtagtctagagccctctgcggcctttgtggaggtccgttytcagcatgtggcctggtgtggctccctaggcctgaggcctcccactctcagtgccccctgcccccttgggaacccacactccaccccagctaagcacaac

SEQ ID NO: 499955 - DNA, 201 bp, Homo sapiens
ctgccgcttcatcgtggctgagatcggcctgggctttggcgtctgcttcctgctgctggtgggcggcagcgtggccatgggcgtgatctgcacagccatcrccctcttccagacgctggccgtgcaggtggggcgccaggccgaccgccgcgccttcaccgtgcccaccatcgtggtggaggacgcgcagggcaagcggcg

SEQ ID NO: 499956 - DNA, 201 bp, Homo sapiens
ggcttcatgaaacagcagagacccacaaggcacctcgggagcagagtgggggccgtggtggggagaggcggggctgggagggagtcagaaccacccctgcrtctcttacggacggggaagagggtacagcttgtggggccactccatgctgctgttataaagcgtccggagtcttcaccctctagagcatggcctgttctt

SEQ ID NO: 499957 - DNA, 201 bp, Homo sapiens
acagccctgcggctcgaagagactgcaccaaacctcacagctcccagccagactgccccagcgcgcagcctggtccctgacccacggaaggcctttccccrgggtggagaagggtttgtccccgtttcccaggagggcagctcggggtaaaagccagccgcgtcctgacaggtcccgcccacgcggcgcttctcccacgac

SEQ ID NO: 499958 - DNA, 201 bp, Homo sapiens
tttcctggtgggtccaggtcccaggatggacagagggagctttggtgccgtaggtaggtaggtaggggcgcaggatcaggagacagagcaaggccagggcrggcctcaaatgtctgttggggagttgcacttgatactaacggctggggaaggccaaggtgagggctgctgtgagaaaggccttgccgacaaaggtctgag

SEQ ID NO: 499959 - DNA, 201 bp, Homo sapiens
agcccaggagttccatgccacagtgagctatgatctcaccactgcactccagcctgggtgatagatcaagaccccatttctaaaaaaatagtgttatcttrtaatcccagcactttgggaggccgaggcgggcagattacgaggtcaggagatcgagaccagcctggccaacatggtgaaaccccgtctctactaaaaata

SEQ ID NO: 499960 - DNA, 201 bp, Homo sapiens
atggcttgaacccgggaggtggaggttgcaggagctgaggtggtgccactgcactccagcctgggcgacagagcaagactctgtctaaaaaaaaaaaaaaagaaaagaaagatttaaaaaatacacacatatataaattttttttttcaaaaaagaaaagctgagaaatccaaaatcaaggtgctggcaggtttggtgtct

SEQ ID NO: 499961 - DNA, 201 bp, Homo sapiens
ggaggccactggccgggaagggggtggtagaatcttgaacaggcttgagacctggttctctaagcctcagtttcctcatctcaaaaaggggatggcagccrggcacagtgattcatacccgtaatcccagcactttgggaggccgaggcaggaggatctcttaagcccaggagatggaggctgcagtgagccatgattgag

SEQ ID NO: 499962 - DNA, 201 bp, Homo sapiens
gggtgtggtcttccgggacatgtccttacgtggcctgatgaagtaaaataaattaaggcaagtacgtcagagatgtccactgtggggggctctggcatgggctgtgtgaggattctggaacatttgatggcaagaggacttgttctgggatggtgccaggtcatgcacggggcaagagtgcccatctgggcccaccttgga

SEQ ID NO: 499963 - DNA, 201 bp, Homo sapiens
aggtctgaggctccccggcacctccaagctcagtgtcttggcccataagagacagcacaaggctgggcgcggtggctcatgcctgtaatcccagcacttcrggaggccgaagcgggtggatcacctgaggtcaggagttcgagaccagcctggccaacatgatgaaacctcgtctctactaaaaatacaaaaaaatagctg

SEQ ID NO: 499964 - DNA, 201 bp, Homo sapiens
gatattgagctttgaccaggagtggacggaagtgagggaatacgcacttattgggcaccccgtatacagcccctgggtgtcagggacatgggcaggagggwcctcccggggcgtggagaggagagtgcagcctgatgtaagccagggccagataggtcatggtgcgccagggccttccccgccttagggcatttgtgctgt

SEQ ID NO: 499965 - DNA, 201 bp, Homo sapiens
gtacagtgggggctggcagcccggtccctgtgcagatggagggcaggggcttcatgaaacagcagagacccacaaggcacctcgggagcagagtgggggcmgtggtggggagaggcggggctgggagggagtcagaaccacccctgcatctcttacggacggggaagagggtacagcttgtggggccactccatgctgctg

SEQ ID NO: 499966 - DNA, 201 bp, Homo sapiens
aagcccttggagttcctgctgtgtacgctcgcggccacccacatgctaaatgtggccgtgcccatcgccacctactccgtggtgcagctgcggcggcagcrccccgacttcgagtggaatgagggtctctgcaaggtcttcgtgtccaccttctacaccctcaccctggccacctgtttctctgtcacctccctctcctac

SEQ ID NO: 499967 - DNA, 201 bp, Homo sapiens
cccaaacccagccctgacactattctctccgtgttgccctgagcttctgcctgaagtgttcccatctgcagtgtggggacggtgagacctgccctgcagayctgaggctcagaaagacctcagctctagggacaaaaaaaaaaaaaatgcccttttccccaacattttagggtttgagaggccaggactttggtgtcaggc

SEQ ID NO: 499968 - DNA, 201 bp, Homo sapiens
ttcctgctgctggtgggcggcagcgtggccatgggcgtgatctgcacagccatcgccctcttccagacgctggccgtgcaggtggggcgccaggccgaccrccgcgccttcaccgtgcccaccatcgtggtggaggacgcgcagggcaagcggcgctcctccatcgatggctcggagcccgccaaaacctctctgcagacc

SEQ ID NO: 499969 - DNA, 201 bp, Homo sapiens
tggtatgtgggggcctctccctgctggccaatgcctggggcatcctcagcgttggcgccaagcagaagaagtggaagcccttggagttcctgctgtgtacrctcgcggccacccacatgctaaatgtggccgtgcccatcgccacctactccgtggtgcagctgcggcggcagcgccccgacttcgagtggaatgagggtc

SEQ ID NO: 499970 - DNA, 201 bp, Homo sapiens
atctggcctcaagggccgtttgatgcagaggtaggatagcatacccatgggtttcctggtgggtccaggtcccaggatggacagagggagctttggtgccrtaggtaggtaggtaggggcgcaggatcaggagacagagcaaggccagggcgggcctcaaatgtctgttggggagttgcacttgatactaacggctgggga

SEQ ID NO: 499971 - DNA, 201 bp, Homo sapiens
gaggacttgttctgggatggtgccaggtcatgcacggggcaagagtgcccatctgggcccaccttggatggttccctgaggatgcaggtaacctggaaggragcccagatattgagctttgaccaggagtggacggaagtgagggaatacgcacttattgggcaccccgtatacagcccctgggtgtcagggacatgggca

SEQ ID NO: 499972 - DNA, 201 bp, Homo sapiens
tttggtgccgtaggtaggtaggtaggggcgcaggatcaggagacagagcaaggccagggcgggcctcaaatgtctgttggggagttgcacttgatactaayggctggggaaggccaaggtgagggctgctgtgagaaaggccttgccgacaaaggtctgaggtccagaggggctgcctggggtcctcttggtgaagctggg

SEQ ID NO: 499973 - DNA, 201 bp, Homo sapiens
cctgcatcggggcctagcagcgccgccccctgggcttctcaggggacgggggcggggcgcggtctggggatcctgagcccgcccctgctcggcgcaacccrgaggggtccgggggccgcagtcccgccaggtttcccagcctgtcgctcggacgcgccctcggggtggggcaggactcggggcacccactggggaccagca

SEQ ID NO: 499974 - DNA, 201 bp, Homo sapiens
cctgatgtaagccagggccagataggtcatggtgcgccagggccttccccgccttagggcatttgtgctgttgtaacacagtacttaagacgcagtaactsatgaagaacagatttatgtctcgccgggtgtgggagcacttgccctgtaatcccagctactcaggaggtttagatgggaggatcacttgagctcaggagt

SEQ ID NO: 499975 - DNA, 201 bp, Homo sapiens
gatcggacaaagccccgctttggagaggctgagctggagccattggcctccccaggggctttccacccacactgcaccataaccgccacacccttcggggkgggggagggtacagagggtctctaagcacaggggtgttcagagcccgaacaagctttgatcaggtttccctgcttccgacctgtcctgcctcagtttccc

SEQ ID NO: 499976 - DNA, 201 bp, Homo sapiens
acagcgcttactcacactctgtctgctctgaacccccaaaaggctgccaggcaccccaaaggctggaggtggcccagtgctcccctcactcctgaggctastctgccccaggtcctggtcccagtgaatatgtatctgcccacaggtctgaggctccccggcacctccaagctcagtgtcttggcccataagagacagcac

SEQ ID NO: 499977 - DNA, 201 bp, Homo sapiens
ctcgctgggctccgcgtcctaggaccgccggcgcctccccacggacgccaggcaggccaggccgctctccggggccgcagcaccaaagacgcccgcctccsccccgcgcgcagacatgcgccacccctcccaggggtgagggggcgttggcctcagcgtttgtcttccggctcctcccagctggccttgtcccaggggcga

SEQ ID NO: 499978 - DNA, 201 bp, Homo sapiens
ctgtgtgggggctttaacctcagcgcggggtcctggctctggaagaccagctgggggctgacatagcagactgcctgccccctctcagggtggtcaggaargtggtgaccatctccgttccccaacaggtcacttggggaacaggagagggaaatggaggttcagggggtgtggtcttccgggacatgtccttacgtggcc

SEQ ID NO: 499979 - DNA, 201 bp, Homo sapiens
ctcccagtctcacagccgaggctgccttgggcaggtagaaatagatgctgacctgctaggtgcatgctgagtccactttcctatttgagagcgtaaagacyactggtgtctgcagccctcttgctcacagcgcttactcacactctgtctgctctgaacccccaaaaggctgccaggcaccccaaaggctggaggtggccc

SEQ ID NO: 499980 - DNA, 201 bp, Homo sapiens
aatctcaacacgttttaattaaatttcaacatgagttttgcaggggacattcaaagtgtagcgctcgccatctcccatcccaagtacctaagggctacaaygctgtcgccagagaggaagtcactgagtgcccactgccacccccccacagatgctcgtggtccccagcatccttgagccaccaggagtgagggctgctgc

SEQ ID NO: 499981 - DNA, 201 bp, Homo sapiens; identical to SEQ ID NO: 297554

SEQ ID NO: 499982 - DNA, 201 bp, Homo sapiens
gctttatacatttgaaaattatatcaggtgcatcaaatttataattactgtgtgttcctgatagaccaacccttatatttattatggccctttttatctcrgaaaatgcttcctgccttaacatctactttgtatattagtttagatataccagctttctttagggtagtgttttcattgtattctcttccagcgtttcaa

SEQ ID NO: 499983 - DNA, 201 bp, Homo sapiens
gccatgcacttaaaatgttaagagggtggatctcatgttatatgttctttccacaaaaaagaacatggatccctgacttattagtgtaacacgcattatcrcatcctggataatgccaaaacctgagaacactaactcctttaccttctgtgccaccaatattcgtgttgatttaccaacccattgatagttcccactgct

SEQ ID NO: 499984 - DNA, 201 bp, Homo sapiens
tgtggttttgttttttagtgacaatctttaatttttgagtggaatatttatctcatttatttacaatgaaattactaatatattgggatttatatcgactrtcttaccttgtttttttatttgtctcatctgttttatttttccttttatcctttattgctttcttctggatggagtatttttattattattttgattccc

SEQ ID NO: 499985 - DNA, 201 bp, Homo sapiens
gagcagcagacgcatcatcagtggacactggcaagaccatgtcagtgctcagaagcctccgggtcagccctcagaccaccccatgtgagaaggtaaacccyggcgcccaggtgagccctcggaccaccgcatgtgagaagccaggacactcagcatgagcaggtaaacccgggcgcccaggtgagccttcggaccacccca

SEQ ID NO: 499986 - DNA, 201 bp, Homo sapiens
atttttttttccatttgtttttagcttaatttctttggccaaagaaatactccgaatgatttcaatctttagcaatatgttaagatttgtttatctgatcraaacatttccgtctaatagatggtcattttcaatatgtatgctgtgtgcactggaaaagaacacaggttctattttgatagttgcagtgtgtccattaga

SEQ ID NO: 499987 - DNA, 201 bp, Homo sapiens
tctcgagttctgtctgtcttttcctaagagtcatctgttgatggagtctctcgagttctgtctgtcttttcctaagagtcatctgttgatggagtctctcragttctgtctgtcttttcctaagagtcatctgttgatggagtctctcgagttctgtctgtcttttcctaagagtcatctgttgatggagtctctcaagtt

SEQ ID NO: 499988 - DNA, 201 bp, Homo sapiens
tggctccagcaagagcggaatgttcacaggcctgtccaccgtcacctcctaacaggtcctggagaggccaggccacgccagtgccatcacagactgtgctygggaagctgaggtgagccccagccggccgtgagccccagcgcccaggcgcctcctcccctgttgcagccccactgggtccccaagtccccacccacggcc

SEQ ID NO: 499989 - DNA, 201 bp, Homo sapiens
tgaaggtggtggtgatgatgacagtggtggtgacagtggtggtggtgatgttagtgatagtggtgatggtgatgggggtggtagtggtgatggtggtagtagtagtggtggtggtgatggcagtgacgggggtggtggtgggggcagtggtattggtggtggtggtgaaggtggtggtggtgacggtgatgatgatggtag

SEQ ID NO: 499990 - DNA, 201 bp, Homo sapiens
aggtggccacaggtcactgggcgagcgggtctttgtgggcagaggcaggagcggaggctgcggaggacgctccaagcccatcttccgtggctcagcccagsggctcccgcggctccagggcagcgccaggcatggcttctccccgaaggcacagaaggctccgaagttgccacctcttgcctgagttgccggaaatccaag

SEQ ID NO: 499991 - DNA, 201 bp, Homo sapiens
aaggtggtggtgatgatgacagtggtggtgacagtggtggtggtgatgttagtgatagtggtgatggtgatgggggtggtagtggtgatggtggtagtagtagtggtggtggtgatggcagtgacgggggtggtggtgggggcagtggtattggtggtggtggtgaaggtggtggtggtgacggtgatgatgatggtagtg

SEQ ID NO: 499992 - DNA, 201 bp, Homo sapiens
aggtggtggtgatgatgacagtggtggtgacagtggtggtggtgatgttagtgatagtggtgatggtgatgggggtggtagtggtgatggtggtagtagtagtggtggtggtgatggcagtgacgggggtggtggtgggggcagtggtattggtggtggtggtgaaggtggtggtggtgacggtgatgatgatggtagtga

SEQ ID NO: 499993 - DNA, 201 bp, Homo sapiens
atgaccatctctaattcttttaaatatcaagtcatgatgtgtattaatataaagattgcatattaaatgcatcttccatagacatagaaagtaaagatatraaaatcagtttgtactgattgtaagacaagtctctgaacgaccaacaagatggcccagtctgtggagctccaggcttatttacggggtgcacctcgtagt

SEQ ID NO: 499994 - DNA, 201 bp, Homo sapiens
agccccagccggccgtgagccccagcgcccaggcgcctcctcccctgttgcagccccactgggtccccaagtccccacccacggccagtgtttgtttctcyctgaaaacctgatttgacttcactcaaaatctccacacctgctgcaaacgtcagtttgataaacctgacgctgccctcccggctgggggcaggaatctct

SEQ ID NO: 499995 - DNA, 201 bp, Homo sapiens
ggctgaacgcagacagccgcctgctgctcatcaagggaacagcttcctgccgcatcttggggtctatgctgcctggtggggccaggagaccctgagagggygctctgccccaagtcagcctgtccctcctttgccccagatggctcctgctcccacctcctcctgtccccgtgagccacagagcagcagacgcatcatcag

SEQ ID NO: 499996 - DNA, 201 bp, Homo sapiens
ggctccagcaagagcggaatgttcacaggcctgtccaccgtcacctcctaacaggtcctggagaggccaggccacgccagtgccatcacagactgtgctcrggaagctgaggtgagccccagccggccgtgagccccagcgcccaggcgcctcctcccctgttgcagccccactgggtccccaagtccccacccacggcca

SEQ ID NO: 499997 - DNA, 201 bp, Homo sapiens
gcctcaaacattgcttctaagctgttttccttctcctcttctgggactccacctacacatatagacctttccaacagatctcctctgcctcatacactccrtcctgtactttctctcagttttgatctgttactctgcctcattatttcccagggaccttcttccagctcactcatctgctcttccttcatactcaatgtt

SEQ ID NO: 499998 - DNA, 201 bp, Homo sapiens
catcctggataatgccaaaacctgagaacactaactcctttaccttctgtgccaccaatattcgtgttgatttaccaacccattgatagttcccactgctrtccctgcctgccttgtttcctggtttccatgtgggtttactttcctcctgccagaagcccctgcagtcttttcccaagagtcatctgttgatggagtctc

SEQ ID NO: 499999 - DNA, 201 bp, Homo sapiens
atttctcacaagaagaaatacaaatggactgcaggtatacaacaaaaatgctcgacatcactaatcgccagcaaaatctaaatcagcactacaatgagctrtcatatcaaacttgttaggatacctattatcagaaaaaaaaaagatgagtattggtgaagactgtatactgttgtgggaatgcaaaaggtccttatggaa

SEQ ID NO: 500000 - DNA, 201 bp, Homo sapiens
acatattgattgacgtctcatgtctccctaaaatgtataaaagcaaactgtgcccccgaccacctcgggcacatgcctcaggcccccgtccacctcctgcrcatgcctcagcccccgaccacctcaggcacaagtctcaggacttcctgaggctgtatcatggatgcatccttcaccttgccaaaatactttctaaattga

SEQ ID NO: 500001 - DNA, 201 bp, Homo sapiens
gaatatttatctcatttatttacaatgaaattactaatatattgggatttatatcgactatcttaccttgtttttttatttgtctcatctgttttattttyccttttatcctttattgctttcttctggatggagtatttttattattattttgattccctttcttagcttgttagctattctttttgtggctattctaga

SEQ ID NO: 500002 - DNA, 201 bp, Homo sapiens
tcttccagcgtttcaaacttttatatctcaacattgaaggtggtcccttgcaagcagtgtggttttgttttttagtgacaatctttaatttttgagtggartatttatctcatttatttacaatgaaattactaatatattgggatttatatcgactatcttaccttgtttttttatttgtctcatctgttttatttttcc

SEQ ID NO: 500003 - DNA, 201 bp, Homo sapiens
ggtgtgacgggcggccaggttactactgctcttcccttgagcagaatcaatccggtctcctgccctgggctcttctgcccctcacccgatgcccttgctcyccctcttcccaccccaccttttgcctttctacttcctggacccctgacccggctcacttcccctatcccagagctcagagtggaccctggcccgctgtga

SEQ ID NO: 500004 - DNA, 201 bp, Homo sapiens
tgatcagcagcccacttgttccagggttcaccggggcccccaaccgtttctactgcagccaaaccagataggctactggtggggcaagtccaaggtctccraccatgccacctgccctgggggctcccctggaaccccggcccctggattcagctctgcagcctcctccgcactcaggatcagccctcctgtcctgccact

SEQ ID NO: 500005 - DNA, 201 bp, Homo sapiens
aattacaggtcagggactcacccatcccaaggacctcagtggcaggtgtgacgggcggccaggttactactgctcttcccttgagcagaatcaatccggtytcctgccctgggctcttctgcccctcacccgatgcccttgctccccctcttcccaccccaccttttgcctttctacttcctggacccctgacccggctca

SEQ ID NO: 500006 - DNA, 201 bp, Homo sapiens; identical to SEQ ID NO: 350644

SEQ ID NO: 500007 - DNA, 201 bp, Homo sapiens
agtggcaggtgtgacgggcggccaggttactactgctcttcccttgagcagaatcaatccggtctcctgccctgggctcttctgcccctcacccgatgccyttgctccccctcttcccaccccaccttttgcctttctacttcctggacccctgacccggctcacttcccctatcccagagctcagagtggaccctggccc

SEQ ID NO: 500008 - DNA, 201 bp, Homo sapiens
ttgtccccaggttcagcgatacccaggccacgtgcccaacttcctgagccagacccagggctacctgcggagtccacaggaccccctgcgccgggcagccrccgtgcttataggtgaggccgcccggggtcacactgcccctggcaccggggctttgggagctgggccagcctccccctggggggctgtggggcctgcact

SEQ ID NO: 500009 - DNA, 201 bp, Homo sapiens
tgaacccaggaggcggaggttgcagtgagctgagattgcgccattgcactccagcctgggcaaaaagagtgaaactctgtctcaaaaaaaaaaaaaaaagaaaaaaaaagagtgttatttgccaagtagatgagggctacttctttccagtagaaagaagtgtatgcagaggcgtaaaaagcctgtgctttgcaggggact

SEQ ID NO: 500010 - DNA, 201 bp, Homo sapiens
gtttgagaccagcctggtcaacatggcgaaaactcgtctctactaaaaatacaaaaattagctgggtgtggtggcatgcacctgtaatcccagctactcargaggctgaggcaggagaatcacttgaacccaggaggcagaggttgcagtaaggtgagattgcaccactgtcctccagcctgggtgacagagtgagactcc

SEQ ID NO: 500011 - DNA, 201 bp, Homo sapiens
taatcccagcactttgggaggctgaggtgggaggatcacgaggtcaggagatcgagaccatcctgcctaacacggtgaaactctgtctccactaaaaaataaaaaaaaaaaattagccgggcgtggtggcaggcgcctgtagtcccagctactcgggaggctgaggcaggagaatggcgtgaacctgggaggcagagcttg

SEQ ID NO: 500012 - DNA, 201 bp, Homo sapiens
tgtagactgtgtgtatacttctgttatggcacctttcacactgcattggatttgtttggttacctcactgacttccctctctagactgtggccccttgagrgtaggactaagtattaatcaataaagagtccctatcacctagtgcaatgcctggcacatggcaaatactgaatagatatattggttaaataataaggaag

SEQ ID NO: 500013 - DNA, 201 bp, Homo sapiens
gagtggaagccttttcagatattctgaggtaacttaagttaaaacaaaaacagctattgagcactgaaatatgtcttaggcattgtgctagttgctttcgsctatcttatttcatcactcctcaaatcttgatacatagatattattactagtctattttatatagctaacaggctcaaattttcttatctgtcccaaagt

SEQ ID NO: 500014 - DNA, 201 bp, Homo sapiens
gcctccatcacctccaccgtagttgagccagcgatagtactgagagtagggaaagagcctccggtaataaagtttaagcagctcgggcagctcggtggggkcaaacgtctccattgagcgcggaactcgccacggtaaggattaccacaggaattggcgggaacagcacggccggcggccccgcgactgcgcaggcgctta

SEQ ID NO: 500015 - DNA, 201 bp, Homo sapiens
ttttttttttttttttttttttacagcgtggccgcaggctggcttattatatcctctctcggcccatttacacctatgaagtggtggggcgggctcgagaragcaaatgaaggcgcgcggcacaaagcctggtgcacagaaggcgcttcatattgtcattctaaggacaccccgcctccaacctcctcacactccgctccc

SEQ ID NO: 500016 - DNA, 201 bp, Homo sapiens
cttcaagcaatgatgaagcccaagatggggatcagacctgaaataaacagtggaagttcttaacctatgcatgtgtgattatgaaggtgttttctaggctygacctcaaaactcattaaataaaattaaccagatagcatagtgtagatgagaaaggaagagactgacaatatgatgtaagaaagctgaattcttatttac

SEQ ID NO: 500017 - DNA, 201 bp, Homo sapiens
atctctactaaaaatacaaaaaaattactagccgggcgtggtggcatgtgcctgtagtcccagctactcgggaggctgaggcaggagaatcgcttgaaccrgggagtcggaggttgcagtgagctgagatggcgccactgtactgcagactggcgacagagtgagactccatttcaaaaaaaaaaaaaaaaaaaaaagtgc

SEQ ID NO: 500018 - DNA, 201 bp, Homo sapiens
ctgaggcaggagaatcgcttgaaccggggagtcggaggttgcagtgagctgagatggcgccactgtactgcagactggcgacagagtgagactccatttcaaaaaaaaaaaaaaaaaaaaaagtgctctggcatagaggcctttatctcaaatgccactgggaggcagtatcaccattcagtttgtttccctttgtgattt

SEQ ID NO: 500019 - DNA, 201 bp, Homo sapiens
actaaaacccattgaatcgtacacttcaaaagagtgaatggtatgatatgtgaattatgcctcaataaagctgttacttaaaaaaaaaaatatatatatayatatacacacacacacacacacacacacacacacacacacaaccctaggtccagggctcaagctatgaaacagctgcagttctttcagaaaggtgactga

SEQ ID NO: 500020 - DNA, 201 bp, Homo sapiens
ctggcttattatatcctctctcggcccatttacacctatgaagtggtggggcgggctcgagagagcaaatgaaggcgcgcggcacaaagcctggtgcacaraaggcgcttcatattgtcattctaaggacaccccgcctccaacctcctcacactccgctcccgaacccattcctcgcctccatcacctccaccgtagttg

SEQ ID NO: 500021 - DNA, 201 bp, Homo sapiens
gttcagccaacatgtatagattactaaaaaatggtggactttgctccagaatttcatatagaaacataggcatctgtgaacactcatttcaacaatgcttytgattggtctaggtttacaaattgctttggctgcaataactcacccaaactattggatctcctaatggatctcactgccttcaccacacctgtttcatct

SEQ ID NO: 500022 - DNA, 201 bp, Homo sapiens
taaaacccattgaatcgtacacttcaaaagagtgaatggtatgatatgtgaattatgcctcaataaagctgttacttaaaaaaaaaaatatatatatatayatacacacacacacacacacacacacacacacacacacaaccctaggtccagggctcaagctatgaaacagctgcagttctttcagaaaggtgactgagc

SEQ ID NO: 500023 - DNA, 201 bp, Homo sapiens
cgtgagccatcgcgcccggctggaataatgttatatgtagtcttttagactggcttctttcacttagcagtatgcatttaagattccttcatgtcttgccttttttttttttttttttgagacaggatcttgctctgttgcccaggcctgagtgcagtggaatgatcatggcccactgcagcctcactctccttggttcaa

SEQ ID NO: 500024 - DNA, 201 bp, Homo sapiens
tgttatggcacctttcacactgcattggatttgtttggttacctcactgacttccctctctagactgtggccccttgagggtaggactaagtattaatcartaaagagtccctatcacctagtgcaatgcctggcacatggcaaatactgaatagatatattggttaaataataaggaaggaataaaatgttttctttcta

SEQ ID NO: 500025 - DNA, 201 bp, Homo sapiens
aaaacccattgaatcgtacacttcaaaagagtgaatggtatgatatgtgaattatgcctcaataaagctgttacttaaaaaaaaaaatatatatatatatatacacacacacacacacacacacacacacacacacacaaccctaggtccagggctcaagctatgaaacagctgcagttctttcagaaaggtgactgagcc

SEQ ID NO: 500026 - DNA, 201 bp, Homo sapiens
ttttaatccttatactttcaacttttctgtgtctctgtattttatgtgagcctcttgtaagtagcatatagctgatataaaaactaatccaatctgacaattttttttttagtagaacatttctttcatctatactactttattattattattttatttttttttagaggcaaagtctcactctgtcatccaggttggagt

SEQ ID NO: 500027 - DNA, 201 bp, Homo sapiens
cataggatatatccctggcatgtgcagttcacaatagggttagtgctcctgtgagaatctactgctgccactgacctgacaggaggcggagctcaggcagyaatgcctgtgatggggagtggctgtaaatacagatgaagctttgcttgcttgtctgctgctcacctcctgctgtgtggcctggtttctaacaggccatgg

SEQ ID NO: 500028 - DNA, 201 bp, Homo sapiens
gtggcatgatcatagctcactgcagccttgatctcctgggctcaagcaatcttcctgcctcaccctttcaattagctgggattagaagcggttgccaccaygcctggctaatttttttttatttttatttttagcagaaacacggtcttggtatattgcccaggctaagatgttcttaagaatctgattatcttggctgct

SEQ ID NO: 500029 - DNA, 201 bp, Homo sapiens
tcatccttcctgacatacatgctcttgctgctgtgtatttcagttctgttttttggctctccaatatgcaatgtttgtttagatttatcctctttttacctttttttttttttttgctcattattccttcttgaattttccatctaaaattgctttcttcgttaccgaatatatgcctaagaattatagaagatgctgggg

SEQ ID NO: 500030 - DNA, 201 bp, Homo sapiens
ggcagagcaggaagaaagaagtagaggggagtggggggaggggaagagccccaaagataggatggggctgtgcagagagggcagtttcagcttttcaaggtttttttttttttttttgaggcagagtctcactctgtcacttaagctggagtgcagtggcgtgatcttggcttactgcaacctctgcctcccaggtttaag

SEQ ID NO: 500031 - DNA, 201 bp, Homo sapiens
aagtcaaggcaggtggatcacttgaggccaggagctcgagaccagcctggccaacttggtaaaaccccatctctactaaaaatacaaaaatttttacaggygcctgtaaccccagctactccagaggctgaggcaggagaattgcttgaacccgggaggtggaggttgcagtgagccgagatcatgccactgcactccagc

SEQ ID NO: 500032 - DNA, 201 bp, Homo sapiens
gcgcgatcttggctcactgcaacctccacctcccgggttcaagcgattctcctgcctcagcctcctcagtagctgggattacaggcgcgtaccaccacgcscggctaattatttccctttcctaaatcatgtcgacttcctcttcctagtagctagatactcaattttttttgtcctagtaaaaatgcaaccaattcactc

SEQ ID NO: 500033 - DNA, 201 bp, Homo sapiens
gctagttgctttcgcctatcttatttcatcactcctcaaatcttgatacatagatattattactagtctattttatatagctaacaggctcaaattttctyatctgtcccaaagttcacctaccatagccagaatttggccgaactgtgttttgacccaggtctttgtcttctaccactatgtcacacttcaattctcaat

SEQ ID NO: 500034 - DNA, 201 bp, Homo sapiens
taaccccagctactccagaggctgaggcaggagaattgcttgaacccgggaggtggaggttgcagtgagccgagatcatgccactgcactccagcctgggygacagagcgagactctgtctcaaaaaaaaaaaaaaaaaattagaggatgggggctgaggagcatacaagactctctggtcagggcagctcttttctttct

SEQ ID NO: 500035 - DNA, 201 bp, Homo sapiens
gcgcctatatcaatcttgtatggattcattttctgcatctccttttccagatcactctggttgttgaaggattggtagcgaatgtaaatatcatctttcartgtgaatgaaaattcacggtgttgaaagtaattctttatcactgcaaaataaatgtacattttaaagttaatttgctactttatttggctcagggcatta

SEQ ID NO: 500036 - DNA, 201 bp, Homo sapiens
tcgcctatcttatttcatcactcctcaaatcttgatacatagatattattactagtctattttatatagctaacaggctcaaattttcttatctgtcccaragttcacctaccatagccagaatttggccgaactgtgttttgacccaggtctttgtcttctaccactatgtcacacttcaattctcaatatttatttttt

SEQ ID NO: 500037 - DNA, 201 bp, Homo sapiens
acgccacttcgggtatttggacatttgaaatattcgaggcacattcaggtttggcctagggtttgggattccgccaggtgtatctcttctgcaggtcttctttgctgctaggcatgcgatggctgaatagtaatgcccggggaaactgtgagggccaagcttctctctaatgggggaaatacgttttcatctttgactggc

SEQ ID NO: 500038 - DNA, 201 bp, Homo sapiens
cttagaggcatggacccttgagagggtgtgccccttggtagcattgcagggctggtgtgagatgtctgctcaactaaagtgcagtcttcatcattgtttaccttttgataacaaagggcttgtccacaaactatgtgtcttaatgtgacaggagaaagcatgtaggtgggaagaggtaagtcagtgaggataagtctttgc

SEQ ID NO: 500039 - DNA, 201 bp, Homo sapiens
ctggcggatcactggcggttaggagctggagaccggcccggccaacacagtgaaaccccgtctccaccaaaaaaatacgaaaaccagtcaggcatggtggygcatgcctgcaatcgcaggcacttggcaggctgaggcaggagaatcaggcagggaggttgcagtgagccgagatggcagcagtacagtccagcttccgct

SEQ ID NO: 500040 - DNA, 201 bp, Homo sapiens
cttttaactgtgattagttaatgttacaaaccatattattccttgtaaaaatcaagttaatattggtatttcacaaatttcaatagaaaatggctatgctmaaaaaatattaagtattttgtttttcttttgtttcagttgggaagacgacttgtctttcattcaaaacctccatctggtaacaaacagcagctaccttta

SEQ ID NO: 500041 - DNA, 201 bp, Homo sapiens
agaaatcaatcaatatattcttgtttgggcctggcagtgttaggctccataacagattgtgagcataagaaaaggagaatgttacaccataaatataaaakgtaatgagtttataaactacctgcagagaagattctgttctactttttaattcaaaaaaaaaatcttcaaatcagagggtgcattaaattgtcatattta

SEQ ID NO: 500042 - DNA, 201 bp, Homo sapiens
tccagaactgtgagagactacatttctgttgttttaagccaccctgtttgtggtaatctgctacagcagccctagtcctatgtgactaggaaagaaatacrgggagaagtgttgcctagggactagttcatgtggtgagtttataatataggaaatttggtgtagcgggttgaatagtggccctccacaaatggttggcct

SEQ ID NO: 500043 - DNA, 201 bp, Homo sapiens
cttctattttaggagcctaaagctgaagctgctccaagatggagaatttccttctctctttcacccccgatgcaattagaagtttctatccatttatagawtatttctagagctagagtagcagcctctatttttgtgcaaagtattgcatttatgcacaatagccgccgagttgagccctccaaatggtcttgctgaaga

SEQ ID NO: 500044 - DNA, 201 bp, Homo sapiens
ttttttcccccacattttaacatctctgaaattgggactcattctacgatcatcttacagtcatcatgggcagtattttttatatttacgcttacatagtrgaaactagtattgctattaaaaactaagatctgctgggcacactgcttgcctctcagctcctttggaagctgaggcgggaggatcgcttgagcccaggag

SEQ ID NO: 500045 - DNA, 201 bp, Homo sapiens
agcacaggaaacaataaacaaactccaaatgacagcagagctgaagaaagcaagcatggaggtacaagcagtgaaaaggtgagggtgggcacaatcttctygtggccaaatttccacgacccattaaaacctattcatgccaggtaagacctaataatcctgatcatccttatcagttgatgatgtcataagtatgaacga

SEQ ID NO: 500046 - DNA, 201 bp, Homo sapiens
aagaagtgacaggataagaaaactcatagttaaatggcaacagtcttgttacaggacagttatctcccaggtgtatgtcaccagttttaatttctgagttsttatcaaagggccttattttcattctaacaaccaatcatcagaacacattgaaactattgcaagtcagacagtgacctaagccatcagcagtcaactcag

SEQ ID NO: 500047 - DNA, 201 bp, Homo sapiens
tctcttcttatccaactacaaagtattaagtaggtcagaccacattccttctctgttcaaagccctccaatacttctctggtttactgagggtcattgccmaagtcttcaagactgcctacaagatactaagtaattatccttgctactacagtcccccgaccccatttatttcactccagctacactagcctttcttgaa

SEQ ID NO: 500048 - DNA, 201 bp, Homo sapiens
tttccctagcaaaggcctaaatgataaaacctatatgttctactgtttgttttaaaggtttttgggggacaattttatccttatttcatctgtagttaatktttgtatggagtgtgaggtaaagatccaatttccttttattccatgagaataaccattttctccgactcattttttgaacagtctctcctttccccatgt

SEQ ID NO: 500049 - DNA, 201 bp, Homo sapiens
tcatccatttttttccccttctttcctttactcaccgtgtatttattggagacataaatgtttcaggtgctcttcaagaccccacgtacacaaagacaaayagtacatagttctgcatcccagaactacacactacaatggggcgaatgatatatagttatagacagtgagggctctggagggaaaagccaaaagtgtgat

SEQ ID NO: 500050 - DNA, 201 bp, Homo sapiens
ttaatgttagaatcatatccacttacctattgctcttatgaactttgctgggctgagacatggagtcaactagacgcagatggtgtgtgccccacaccatgatggggagacagtgtgaacacaaacgacagaaaaacatccagctgacagtaggcagcacaaagatcgccacctaacggaggaagagagatataccactgc

SEQ ID NO: 500051 - DNA, 201 bp, Homo sapiens
aaaatagtgaacatggtacccaataggaagtttttcaacccttgctcctctccctccctccctgctttaggaggcctcagtgtctattattcccatctttmtgtccatgtgtactcaatgtttagctcccacttataagtgagaacatgcagtatttgcttttctgtttctgtgttaattcacttaggagaatgacttcca

SEQ ID NO: 500052 - DNA, 201 bp, Homo sapiens
ccaggaggaggaagttgcagtgagccatgatcatgccactgcgctccagcctgggcaacagaacgagaccctgtctccaaaaaaaaaaaaaaaaaaaaaargattgtaataagtgaaagcggggtcacaaatcaaaggggatgatttgcactttcaactaacattggggtaaccaggaccagacttagcctcttgcctgaa

SEQ ID NO: 500053 - DNA, 201 bp, Homo sapiens
ctgctgaggaggttgaggtaggaggatcgcttgagcccagcaaatcgaggccatggtgagcagtgatggtgctgcaccactgcactccagcccgggtaacrgagtgagaccctatgtcaaataaataaataaataaataaataaagtaaaataagcatatgtcatgaaaaaaatctgtatttctatcttctcttgaaaacc

SEQ ID NO: 500054 - DNA, 201 bp, Homo sapiens
ccatctttctctgtctctctcctcttcatttgccatttctagaattatcattacattcaagtaacaaggaaggcatccttgaggagtccgggaggacagcygtcctttcagaagatgcttctcagggaagagacagccaaggtaaaggtagatttgggactcatgaaagtaaaacctgcgaatgtgtccatctcaaagtgg

SEQ ID NO: 500055 - DNA, 201 bp, Homo sapiens
cctactttctatctccatgaatatgcctattctggatattttatataaatggaatcatataatgtgtggtcctttgttactggcttcttttacttaacatrtttccaatgttcatccatgttgtagcatatattgtacttcattcctttctctgggcaaataagagttccttgtatggatatactgcattttgtttatcgt

SEQ ID NO: 500056 - DNA, 201 bp, Homo sapiens
cccggctaattttgtattcttcgtagagatggggtttctccacgttggtcacgctggtctcgaactcccgacctcaggttatccacccacctcagcctccsaaagtgctgggattatacacgtgaccactgcgcccggccctcttttgcttttttaatggccagccttcattttttatttagtgtagaacaattatgtgca

SEQ ID NO: 500057 - DNA, 201 bp, Homo sapiens
caccacacccggctaattttgtattcttcgtagagatggggtttctccacgttggtcacgctggtctcgaactcccgacctcaggttatccacccacctcrgcctcccaaagtgctgggattatacacgtgaccactgcgcccggccctcttttgcttttttaatggccagccttcattttttatttagtgtagaacaatt

SEQ ID NO: 500058 - DNA, 201 bp, Homo sapiens
aacgagaccctgtctccaaaaaaaaaaaaaaaaaaaaaaagattgtaataagtgaaagcggggtcacaaatcaaaggggatgatttgcactttcaactaayattggggtaaccaggaccagacttagcctcttgcctgaaaaactggataaatacatgaaacaggaattttcagacattggacatcaaacagtaaagcaga

SEQ ID NO: 500059 - DNA, 201 bp, Homo sapiens
tgccattgcactccagcctgggcgacgagagtgaaactccatctcaaaaaaaaaaaaaaaaaaaaaagctgagacaataataataataagatggtgatggracccatctgattggttcttcttcatccatttttttccccttctttcctttactcaccgtgtatttattggagacataaatgtttcaggtgctcttcaaga

SEQ ID NO: 500060 - DNA, 201 bp, Homo sapiens
tttgaaattttgaatatagaagtttctcagtttaaataacacctcttaacaatactttttagtagtacatgttagggtaccagcttaaaagctgagacagrccgggtgcgggggctcacgcctgtaatcctagcactttgggaggctgaggtgggtggatctcctgaggtcaggagttcgacatcagcctggccaccatgg

SEQ ID NO: 500061 - DNA, 201 bp, Homo sapiens
ggggtctgatctctccagttgctttgttcttactgggtccactccactcctttacctgcccttccctgtatccatctgagtttgcagcccccaattcaggytgactcctggggactccttttctcctgtatcctgctatcaaccttgggatgtatttagtattgggataaaggtcaggaatacaagttgcctgcccagaaa

SEQ ID NO: 500062 - DNA, 201 bp, Homo sapiens
attttgcaagactacctgtccaatcagaagtttgggattaggtagtcaggtacatgtggtccatcaattctacacagggtaaggagtttgtttctatatgmcactctttccctcctctgggatagcatctgaaatatgttccagaaagacaatttcatggttatctgcaaagctattgcggatgctgattcttaccacagt

SEQ ID NO: 500063 - DNA, 201 bp, Homo sapiens
ttaaaaatcagcacatgtaggccaggcatggtggctcacacctttaatcccagcactttgggaggctgaggcaggtggatcacttgagcccaggaattcamgacaagcctgggcagcatggaaaaaacccatatctgccaaaaatacaaaaattagctgggcatggtggtatacgcctatagtcccagctgctgaggaggt

SEQ ID NO: 500064 - DNA, 201 bp, Homo sapiens
atagtatttgttgtcgagatttacctgaatattcaaaagccacggttatgagtaaagatgaagtgtcattttcatttacctttaaaggaggtcttctagtyacatggctcattaacaaatagtaatgtacttttcttactcaatgtgatttatagttacaagaatgtttctcccttcttgtgacaggtttcgtgatgagaa

SEQ ID NO: 500065 - DNA, 201 bp, Homo sapiens
ccaagtcatctttttaaaaaattgtgacaaataaacatgtaaaaaatttaccattttagccattttaagtgtgcattacagtagtgtcaactgtaagcaayagatctctagaactttctgattttgcaaaatagaaactctatactcattaaacaactcctcttttctccctcccatagcccctggcaactgccattctac

SEQ ID NO: 500066 - DNA, 201 bp, Homo sapiens
ttttaatccacactatccctactcttttgaaatgttttgttttttaaccaataccatggagagaggtaaatagtgactacagcatcattttaagggccaaytggaatttattttatggatataccatagttatttggtcaactctgtatttatgaaatgacattgaacaaacattattgcacatgcttttttggctgcttg

SEQ ID NO: 500067 - DNA, 201 bp, Homo sapiens
aaatagtatttgttgtcgagatttacctgaatattcaaaagccacggttatgagtaaagatgaagtgtcattttcatttacctttaaaggaggtcttctaktcacatggctcattaacaaatagtaatgtacttttcttactcaatgtgatttatagttacaagaatgtttctcccttcttgtgacaggtttcgtgatgag

SEQ ID NO: 500068 - DNA, 201 bp, Homo sapiens
agagatgctgagtaattaagatgtaggctccatgaagacaatagtttttgttcttttttgtctttttaaaaattgccctgtcccccacacgtagaacagtrcctgacacatagtaggtactcaataaatgttttttgaatgatacatgaacttgctcacacataagtaaataccaaaccaagattcaaaaatcaggcttgt

SEQ ID NO: 500069 - DNA, 201 bp, Homo sapiens
agatggtgggaatccaagcactctggaaattcagacaattctagaatccctccagcttccttgatacctattcatgtcagaacagtgtgccaggtcccttrtggagtcttttataaaaaataatagaggctttttttcctgccatcaaaaactttagctagatgccaggcatataactgaaaacatgattatttgctatgt

SEQ ID NO: 500070 - DNA, 201 bp, Homo sapiens
ctctatcaagttaagaaagttcttctctgttccagttttcctgagagtttttatcaaaatgagtgttgaatcctgccaaatgccttttctgcatctagatrctcacagtaacatgcagacaccacattcgctccctcagaaagctcaccactctcctagtctcatccattcattcaacaaatacttattgagtgccccaac

SEQ ID NO: 500071 - DNA, 201 bp, Homo sapiens
gttattttactaagcataattctctggagattcacttaagttgtttggtctatcagtagttggatcctttttattgatgagtagtatactatggtatggaygtgctacagtttaactatttgctcattgaaggccatctggattatttttagtttggggatatagtgaataaagttgctacaaatatctttgttcaacctt

SEQ ID NO: 500072 - DNA, 201 bp, Homo sapiens
cacttaagttgtttggtctatcagtagttggatcctttttattgatgagtagtatactatggtatggacgtgctacagtttaactatttgctcattgaagrccatctggattatttttagtttggggatatagtgaataaagttgctacaaatatctttgttcaaccttttgtgtgaacataattttcacttctctggaat

SEQ ID NO: 500073 - DNA, 201 bp, Homo sapiens
tctttatgccttttatctctttttcttgctttattgcaatgggtagaacttttgatgttgaataagagtagagggagcagatatctttgtcttgttcccartcttgaaaggattcagtttttcaccattaaatataacgttagctggaggatttttgtagatgtgcatactctatcaagttaagaaagttcttctctgttc

SEQ ID NO: 500074 - DNA, 201 bp, Homo sapiens
actacattgacttaatccatttatccattgatggacattcttgcttccatgtcttggctatcgtgaataatgaggaacatgggtgtgcaaatgcccaagtmattttttaaaaaaatgtttaaggtaacacatactttatcttaaaaatgtaggaaatataaaataattaaaatgtggggagaaaatgactttcactcagcc

SEQ ID NO: 500075 - DNA, 201 bp, Homo sapiens
agtgtcattttcatttacctttaaaggaggtcttctagtcacatggctcattaacaaatagtaatgtacttttcttactcaatgtgatttatagttacaaraatgtttctcccttcttgtgacaggtttcgtgatgagaaaatgaaagaaaaacaaagacaccaacaggaaaggctaaaagctgctctggaaaaagcagta

SEQ ID NO: 500076 - DNA, 201 bp, Homo sapiens
tcgagaaaatgaccagagatctgtagacgctctgaaaatgtttgtttcatcactctggccaaatccttcccacctcttttgtttgtttgtttgtttgtttktttctaagaagcaaattaacagatcttcattgcttttcagggcagcacaggaaacaataaacaaactccaaatgacagcagagctgaagaaagcaagcat

SEQ ID NO: 500077 - DNA, 201 bp, Homo sapiens
gagagaggtgattggatcatgggggcgttttcccccatgctcttgtgatagtgagtgagatctcacaagatctgatggttttatacacgtttggaagttcytccttcatgcttctctctcctgccaccttgtgaagaaggtgcttgcttccccttagccttctaccatgattgtaagtttcccgaggtcttcccagctatg

SEQ ID NO: 500078 - DNA, 201 bp, Homo sapiens
ccatgtgttgagggagagaggtgattggatcatgggggcgttttcccccatgctcttgtgatagtgagtgagatctcacaagatctgatggttttatacaygtttggaagttcttccttcatgcttctctctcctgccaccttgtgaagaaggtgcttgcttccccttagccttctaccatgattgtaagtttcccgaggt

SEQ ID NO: 500079 - DNA, 201 bp, Homo sapiens
cagggtgaataggagatgatcagagtactctgtgttgaacccaagacttccactctgcaattttctttctctctaactcatgacttacagaaaaatgtgtytggagtttctataatcccagccactcccactttctacactgaatctttgggcaaatggctgcttctcaggtagactttaagctccagtccattaattcct

SEQ ID NO: 500080 - DNA, 201 bp, Homo sapiens
gatatttttttaagcaggatctaaactaagattttcactatctctgttattgtatatcattaatttggaaacttgagctaatttcagatataaagtgtctytgcctatttatgttgctgtagaggaatacttaaggctgggcaatttataaagaaaagaggtttatttggctcacagttctgctggctgcacaagaagtgt

SEQ ID NO: 500081 - DNA, 201 bp, Homo sapiens
ggaaaaaaggctgttagtggtgaggagataaaaggaggtgggtcttcaagaatcagatatggataagacaatgtatatgtgtgtgctggggaaggaagaarggatgaaagtagaggagggggtgttgttttcaaattttgtggtatgaagctagatcaatgataaggctgattttcccactgtgccttgcagagttaatct

SEQ ID NO: 500082 - DNA, 201 bp, Homo sapiens
ctgattttgcaaaatagaaactctatactcattaaacaactcctcttttctccctcccatagcccctggcaactgccattctacattctgtttctaaaagktttactattttagatacctcatgtaagtggaatcactcagtatttgtctttttgtgcctggcttatttcacttagcatactgtatccaaggttcatctat

SEQ ID NO: 500083 - DNA, 201 bp, Homo sapiens
tagcatttcttgctcacaatttgaggatattattcaaaaagattaactggaaggtacacttttgtggcagctcactaagctatgcatttatttgtgtactyttctgtatgtatgtgacatttcaattaaaagttttaaaaagaggaacaagtagctgaaagttaattcaagtagctattatacaaactatctgtaaagtgc

SEQ ID NO: 500084 - DNA, 201 bp, Homo sapiens
gatatacctaatcatatctttgtttcttttgagtagtgaaatagcaaaaacagaattcctcctcagggagtatatgaaatatggtttttttctgctgcaartgtctccaaaacattggcaaatccagcaagcactaaaaagagcacaggcatcaaaaagtaaagcaaatatcatccttccaaaaatattagcaagtaagtt

SEQ ID NO: 500085 - DNA, 201 bp, Homo sapiens
acccttgcaatgacacttgtcaagagacctgactcagagaccacatataattgtacagctattaaaggaacacaacaattaattaaatcaaccagcatggkgttcacttgaaagaacagtatacattacacccatgtccctttagatatctaatatatatctcaaatttcacatgttccaaaatgagcctctgatcttccc

SEQ ID NO: 500086 - DNA, 201 bp, Homo sapiens
ttatgggtgaaatgatacaaaggcttgaatttgttttgaaatactccagtgacggagacattaaggagggtggcaataaatgagacaagattggtaaaatrttgataatgttgaagtaggtgacaggtacacagggaacattatatggctctttacttttatgaatgtcagtgattcccataatataaagtatttctgttt

SEQ ID NO: 500087 - DNA, 201 bp, Homo sapiens
acatacatatatatttattttaatcttttaaaaacaattgtttttatagacaaggtcttgccatgttgcccaggctggtcttgaattctcgggttcaagcratccacttcagtgtcccaaactattgggattacaggagtgagccaccatgcccagccaacattatattttaagattcattcatactgttgtatggtttag

SEQ ID NO: 500088 - DNA, 201 bp, Homo sapiens
cctttatccccaaaatgaatatatctttattatttttctcattgtaagagttacaccagctcactgagaaatttgaatgatactcaaagtatagaaatcaraacaaggattagggtaaggccagtgaagctctagcttcatgcataaaatttaaggggaaagcaaaaactcagtaatcaaaataagcaatattttaattca

SEQ ID NO: 500089 - DNA, 201 bp, Homo sapiens
actaattttaagataacatactttggtatattaaaaattcttttcaacttttccacttgggcaggaaaaatttatgaaccgtaacatgaaagtctaccagraaactactttttcatccagaatgaagagtcattcatacctgagccaactagctttctaccctaaaaggagtggtaggtcatttgaaaagtttgggccagg

SEQ ID NO: 500090 - DNA, 201 bp, Homo sapiens
tagaattgacgtaaaattcctttttaaatggctatccatgaaattttgatcacaagtgtaaatttggcattcatgtattgcactctgcggaaatgggactrataatccatagtgtcttctagagatgtgaaatgtggggtggggaaggggaggtgaagcaggaaaattgggagggaaacgtattcttaggattttttcctt

SEQ ID NO: 500091 - DNA, 201 bp, Homo sapiens
ttcttaggattttttccttctctacctccattttttcagctctcagaatatacaaaacataatcctttgagtaaatttagctgcagctcattttttaaaarattcttttccagcgttattgaggtataattgacatatttgattgtgatattcataaattatgttactctggagctatcagtatgaaatgaattttagtct

SEQ ID NO: 500092 - DNA, 201 bp, Homo sapiens
acaactgggaagatttgaatgcagactgtgtgtaaaacgacactaaggaatagttcattttgttaggggtgatggtggttttatggttatgatttaaaacwttttatctgctagagtttcatattaaagtatttatgggtgaaatgatacaaaggcttgaatttgttttgaaatactccagtgacggagacattaaggagg

SEQ ID NO: 500093 - DNA, 201 bp, Homo sapiens
gctgccttgacatatttcagcctcacagggccccaaaagcctaaccataaatcctcttgctcttgccaaatatgacgtccacctagcaggaaactctccckgcctggctagttcctctatcaattggaccagctgcattccacctggtcttcaacctaatgggtttcactgcactgtcagccatgaaattattcaaacaag

SEQ ID NO: 500094 - DNA, 201 bp, Homo sapiens
tttttaaggcctaaaattttatgtgctgccttgacatatttcagcctcacagggccccaaaagcctaaccataaatcctcttgctcttgccaaatatgacrtccacctagcaggaaactctcccggcctggctagttcctctatcaattggaccagctgcattccacctggtcttcaacctaatgggtttcactgcactgt

SEQ ID NO: 500095 - DNA, 201 bp, Homo sapiens
aagatgagatgagatgtcccagttcaagcagtgaggcagaaaagaaggggttacttcctaattcctcagccttttctactcagaccctcaagagattggaygagactcacccacatggatgagggcagtctactttactgagcccaccaattcaaatgctaatctcacctggaaataccctcacagacacaaccagaaata

SEQ ID NO: 500096 - DNA, 201 bp, Homo sapiens
aattaacagatcttcattgcttttcagggcagcacaggaaacaataaacaaactccaaatgacagcagagctgaagaaagcaagcatggaggtacaagcastgaaaaggtgagggtgggcacaatcttctcgtggccaaatttccacgacccattaaaacctattcatgccaggtaagacctaataatcctgatcatcctt

SEQ ID NO: 500097 - DNA, 201 bp, Homo sapiens
gaacccaggaggtagaggttgcagtgagccaagatcatgccactgcactccagcctaggcaacagactgagactctgtctctgaggaaaaaaaaaaaaaaatagaccaagatctgggtatattttatattttccaaaatgatgaaatttcttcccatttcaaaatagtatttgttgtcgagatttacctgaatattcaaaa

SEQ ID NO: 500098 - DNA, 201 bp, Homo sapiens
tgaacccaggaggtagaggttgcagtgagccaagatcatgccactgcactccagcctaggcaacagactgagactctgtctctgaggaaaaaaaaaaaaaaatagaccaagatctgggtatattttatattttccaaaatgatgaaatttcttcccatttcaaaatagtatttgttgtcgagatttacctgaatattcaaa

SEQ ID NO: 500099 - DNA, 201 bp, Homo sapiens
aatattagccagtagtgttagatattttgttattgcctactactttatggatgtagggtggatatgcttacccacagtaaaaatgatgtccagactatatyatggtgatcctgatgggatcttattgaacataaagcaagctttaaaaaaaactataaatgaaaagttactccttccctaagatgacctcattatgactac

SEQ ID NO: 500100 - DNA, 201 bp, Homo sapiens
gttgtccattgtttctgctgcgggcacatttttaaatataaactcctgggtgtcctttatccccaaaatgaatatatctttattatttttctcattgtaasagttacaccagctcactgagaaatttgaatgatactcaaagtatagaaatcagaacaaggattagggtaaggccagtgaagctctagcttcatgcataaa

SEQ ID NO: 500101 - DNA, 201 bp, Homo sapiens
gacacatagtaggtactcaataaatgttttttgaatgatacatgaacttgctcacacataagtaaataccaaaccaagattcaaaaatcaggcttgtccaragtctgtgttcttaatcatctgctgctctgcttccgggatatttagctcttatatatggctctttgagattcctgaggcacatatttaaatgagtagccc

SEQ ID NO: 500102 - DNA, 201 bp, Homo sapiens
gtttaggaggtcaaggtgggcagatcacgaggtcaggagttcgagaccggcctgggaaacatggtgacaccccgtctctactaaaaatacaaaaattagcygggtgtggtggcatgcacctgtaatcccagctacttgggaggctgaggcaggagaactgcttgaacccaggaggtagaggttgcagtgagccaagatcat

SEQ ID NO: 500103 - DNA, 201 bp, Homo sapiens
tgagtgaaaaagtccttgaacccatggataaagatgctcattgcaaaaagactttaaggataaagggaatgagagtgggaaggagagtgaatttagatagmtagaaggaccaaaggagtgaaaatgtgacaagaaagaggtgatcagaatcctaagagtggagatgagtacagagtgtaaaattgagaaaatctacaaatc

SEQ ID NO: 500104 - DNA, 201 bp, Homo sapiens
ggcactttgcatatattatctgtgtttgaaaattgcaccaggcctgtaaggaaggtgttattattcatacttgatagaagattctacagtgcattaagcayaattctctagacccaagagaaagagtggataagagtcagaggcaggagttaaacctacctgcccccaaaggccaggggtctttccatagtgccattccta

SEQ ID NO: 500105 - DNA, 201 bp, Homo sapiens
tgttttaatcctgctatttgtcttcctggccaattaagttaaagattagatttcagccaatagtatagttcctctcctgacttcacagaccatgtacttaragcttgcaagttctgggtgagtctaaaagaaattatatttctttttcataggtatttatgtttgtgggtgaactgtgcatctgattcacagtccagacag

SEQ ID NO: 500106 - DNA, 201 bp, Homo sapiens
gtggcaatgtcccatcaaatctcatagaattatggtagtttccccacttatacatttaatgtatacaaattcagctataaaagcaaaacaaaataaaaagyggaggagggaatcccaaaagtaaagagaaaaataagtagtaatatatttgagtatatatgacccagagagaatgaataggtatgaactcggggtttccca

SEQ ID NO: 500107 - DNA, 201 bp, Homo sapiens
aaacagctgtgatatgtgctagtacacttatttattgacaagttcatctctcagctagatgcaaacccccttgagtgcagggattgacttattattcttcrttcagttgagggtccctttaaagttggtgctcaataaatgtttgttgaatgaatgatgaggttagcttttagacccacaaccagctccatctaacattga

SEQ ID NO: 500108 - DNA, 201 bp, Homo sapiens
tggtgggcttttgttacattccagcctttgtataagggcactggcttttaatatttaacttaaccactcagtcagtactgaaaacagttgttaaggaggcytgcgttagtgagacctggcctgccacaacatcacatttatggatatgaacttgattttcaaacagaagtagaactgggagaactgcatcagaagaagact

SEQ ID NO: 500109 - DNA, 201 bp, Homo sapiens
acagttgttaaggaggcttgcgttagtgagacctggcctgccacaacatcacatttatggatatgaacttgattttcaaacagaagtagaactgggagaamtgcatcagaagaagactgtcctcccctacccacaggtgaacagggttacaaaaagcacaagctggttatggctcctccagacacacacacatttcctagg

SEQ ID NO: 500110 - DNA, 201 bp, Homo sapiens
gcctgggtccaactcactcacatgtggctcttcctcgtggtctctgtgaatgtaggctggggtttttaatagtttacattgtggagtgcaaaacgtagacktcgtatttacacagaatagactggctttaattttgtccctacttcctttcacttgtcaacgtattttcctactagtaataataaaagatactttgaaaaa

SEQ ID NO: 500111 - DNA, 201 bp, Homo sapiens
ttcttcttttgtaatagaaatagcaacatagagtttcttttggagcaagaaaaaatgcttaaagctaactgtgtgagagaagaagagaaagcagcagaatygcaattaaagtccaagctctttagctttggagaatttaattcagatgctcaggtaaatcactctttgcctatggtgatttcattttggctcatgattata

SEQ ID NO: 500112 - DNA, 201 bp, Homo sapiens
aggagaaggccatgtgaagttggaggcagaggttggaattatccagccaatgaatgtctagagccatcagaagctagaactgtggaaggattctcccctasaggcttcaccaagagagcatggctctgccatcaccttgatttcagatatctgacctccagaatggagagaatacatttctgttgttttaaactaccaatt

SEQ ID NO: 500113 - DNA, 201 bp, Homo sapiens
actccatctcaaaaaaaaaaaaaaaaaaaaaagctgagacaataataataataagatggtgatgggacccatctgattggttcttcttcatccatttttttccccttctttcctttactcaccgtgtatttattggagacataaatgtttcaggtgctcttcaagaccccacgtacacaaagacaaacagtacatagttct

SEQ ID NO: 500114 - DNA, 201 bp, Homo sapiens
cctgggagacagaggttgcaatgagccgagatcatgccattgcactccagcctgggcgacgagagtgaaactccatctcaaaaaaaaaaaaaaaaaaaaaagctgagacaataataataataagatggtgatgggacccatctgattggttcttcttcatccatttttttccccttctttcctttactcaccgtgtattta

SEQ ID NO: 500115 - DNA, 201 bp, Homo sapiens
gcttaaagtggctaatgaggtttctggaatatgatagacataaaataaattgtaattactattactaaattagtttgagtggctaggaaaaggtttatttsaagatatagtatttttaaaagatcagatacatactgtagaataatttaattatatggcttttattttatacagcatttttaaggatgatgaactaaactt

SEQ ID NO: 500116 - DNA, 201 bp, Homo sapiens
agaaaatgaccagagatctgtagacgctctgaaaatgtttgtttcatcactctggccaaatccttcccacctcttttgtttgtttgtttgtttgtttgttkctaagaagcaaattaacagatcttcattgcttttcagggcagcacaggaaacaataaacaaactccaaatgacagcagagctgaagaaagcaagcatgga

SEQ ID NO: 500117 - DNA, 201 bp, Homo sapiens
agctgcagtgagccaagatcaccccactgcactccagcctgggtgacagagcaagaccttgtctcaaaaacaaaacaaaacaaaaatcaccacatggactyttatattctgtactaaaaaaatagaaggaactagaaggcagatgtcaaagttgtgtttggggatctaaacaggcctctttgattacagttagatgtggta

SEQ ID NO: 500118 - DNA, 201 bp, Homo sapiens
ttttaaaaagtaaacattaggccaggcacagtggctgatgcctgtggccgaggcagctcgatcacctgaggtccggaattcaagaccagcctggccaacayggtgaagccccagctccactaaaaatacaaaaattagctgcgcgtggtggcgcatgcctgtagtcccagctacttgggtggctgaggcacaagaatcgct

SEQ ID NO: 500119 - DNA, 201 bp, Homo sapiens
ccatttatggcaactccatcctttctgcaatcagttctttatctcatactccacatccaaaccatcagccaatcctgtagactctactgtcaaaacacatstagaatcggaccacctctcaccacttccactgctatcccaaggaagggatagcattatctcttgcctcccagtggctgtagtctcctagtagatctccct

SEQ ID NO: 500120 - DNA, 201 bp, Homo sapiens
ccccacttcccctggagctcagaatgttaagactctacatgaagctgattcaggtcccccagatttgcactgatattgctggtagactcctctccaatgaycaggtttcaagaactttgattgggagtttcttacaaaaagtagttgtcagttatgctcccatttcaaatggcggcagttgacagagtgggccagaaagag

SEQ ID NO: 500121 - DNA, 201 bp, Homo sapiens
aaggataaggcagagaactattacataggatgattatagtttcgcaattataacagagtaatacatgcaaaaaaggaggggggctgggttacatattgtgycaaaaggaaatgcatccgagtggcaaaaaaacgatttaaaatgtttgttgcctgtatttgaattcttagggagtcagatatacaaaaacattcaagcaaa

SEQ ID NO: 500122 - DNA, 201 bp, Homo sapiens
aattgtcctacaatgtcaatagtgccttttgaacacagtggcaatgtcccatcaaatctcatagaattatggtagtttccccacttatacatttaatgtayacaaattcagctataaaagcaaaacaaaataaaaagcggaggagggaatcccaaaagtaaagagaaaaataagtagtaatatatttgagtatatatgacc

SEQ ID NO: 500123 - DNA, 201 bp, Homo sapiens
ctactttatgggcttgtctgagttttaaataaaataaaacataaatcacttagcccagtgcccagctctaaacaagtaataggtattattactattattcrtgtgttttaatcctgctatttgtcttcctggccaattaagttaaagattagatttcagccaatagtatagttcctctcctgacttcacagaccatgtact

SEQ ID NO: 500124 - DNA, 201 bp, Homo sapiens
ttctgttgggaacacctccagaagccaaccagtattcaagatggtacatggttttctggactttttatttaacaagatttctaaatgctagtcaggtgctsaacaggagaaagccatctcttccaaccatggacgaaaaactggctatggcacttactgagaaataaaatggtggccttcaacatggtgcttttctaggct

SEQ ID NO: 500125 - DNA, 201 bp, Homo sapiens
acagaacgtcagcgcagggttcttcatgttgccctttcagagccacacccacttccctctcccacctccccttaaaccctggcaaccgccaatgcgttctscatttctatgattgtgttattccaagaatgttctataagtggaatcctacagtatgtaatcttttgggattgggttattttactaagcataattctctgg

SEQ ID NO: 500126 - DNA, 201 bp, Homo sapiens
taaagtcatggaatagattccccctcagagcctccagaaggaaccaacactgctaacatcttgattttgaacttgtggcctccagaactgtgagagactayatttctgttgttttaagccaccctgtttgtggtaatctgctacagcagccctagtcctatgtgactaggaaagaaatacagggagaagtgttgcctaggg

SEQ ID NO: 500127 - DNA, 201 bp, Homo sapiens
cagggttcttcatgttgccctttcagagccacacccacttccctctcccacctccccttaaaccctggcaaccgccaatgcgttctgcatttctatgattstgttattccaagaatgttctataagtggaatcctacagtatgtaatcttttgggattgggttattttactaagcataattctctggagattcacttaagt

SEQ ID NO: 500128 - DNA, 201 bp, Homo sapiens
ttaatcatcaacaaaacattgttaaatatttttgcctcctcgttgtgtctgatgaacgtggctcacggagtctgtcacttattcgaagttctcggtgggtrcagaattcaagccaaggcctgtctgattccaaagcttgctttcttttacctcccaattaacatttattaatgattataataatcattgttgccattatta

SEQ ID NO: 500129 - DNA, 201 bp, Homo sapiens
acttggagggtctaattattggttgttatctctttaaaatcatctcatttccatattttcaattcatttatattatgtatgtggccttatttatgatttawttttttcctgcatggtattaaaaacccaaataggtctgggtgtggtggctcacgcctgtaatcccagcactttgggaggccaaggcaggtggattgcttg

SEQ ID NO: 500130 - DNA, 201 bp, Homo sapiens
cccctctgcgagaaacacccaagaatgatcaataaaaaacaaacaaataaataaataaataaataaataaaaagaaatcttgattggaaaaaaaaaaaaaagaattttgacagctctacacttcaggacctcatagacaggatggggatagtagtaagtaccttattcaggttgttgttaggattaaatgatgtgcttaaa

SEQ ID NO: 500131 - DNA, 201 bp, Homo sapiens
tgagaagcgcctcttcccggccgccatcccatctaggaagtgaggagcgtctctgcccggccacccatcgtctgagatgtggggagcgcctctgccctgtygccccgtccgggatgtgaggagcgtctctgcctggccacctcgtctgagaagtgaggagaccctctgcctggcaaccgccctgtctgagaagtgaggagc

SEQ ID NO: 500132 - DNA, 201 bp, Homo sapiens
agccagtaacaattattaagaagttactatgtgtttttgtaatatattgcatcattttcctctcacaacaccattacaaagtaaagtagtgtatctacccrggcttacttatgctttggtaataaatcactcctaaatttcagtggcttccaataacagaggtttaattatccttcactttccaatgtgggtgcttttctc

SEQ ID NO: 500133 - DNA, 201 bp, Homo sapiens
agatctcatgagacttattcactatcacgagaacagcacaagaaagaacccctcaacacgattcaattactttccattgagtccctcccatgacacatgggaattataggagctacaattcaagatgagatttggatgaggacacagccaaaccatatcagatatctaggttgtctctattttttggctattaaaaataat

SEQ ID NO: 500134 - DNA, 201 bp, Homo sapiens
agaagacatttatgcagccaaaaaacacatgaaaaaatgctcaccatcactggccatcagggaaatgcaaatcaaaaccacaatgagataccatctcacamcagttagaatggcaatcattaaaaagtcaggaaacaacaggtgctggagaggatgtggagaaataggaacacttttacactgttggtgggactgtaaact

SEQ ID NO: 500135 - DNA, 201 bp, Homo sapiens
cgaattctaccagaggtacaaggaggaactggtaccattccttctgaaactattccaatcaatagaaaaagagggaatcctccctaactcattttatgagkccagcatcatcctgataccaaagccgggcagagacacaaccaaaaaagagaattttagaccaatatccttgatgaacattgatgcaaaaatcctcaataa

SEQ ID NO: 500136 - DNA, 201 bp, Homo sapiens
gctcttcttaattgcaaacaccgggttcacaatggagacagaggatgacaattttcttacggtcctgagacaagttacctaccacctcaagaatctccacsaacagttaaacggcacagtgtcgaggtacagggatcagcaaggtttggcctaagcttttgtttagactagaatactgcaatggcttcccaacgaaaacag

SEQ ID NO: 500137 - DNA, 201 bp, Homo sapiens
caggagctgaaattgtggcaataatcaatagcttaccaaccaaaaagagtccaggaccagatggattcacagccgaattctaccagaggtacaaggaggarctggtaccattccttctgaaactattccaatcaatagaaaaagagggaatcctccctaactcattttatgagtccagcatcatcctgataccaaagccgg

SEQ ID NO: 500138 - DNA, 201 bp, Homo sapiens
caatgcatgatattgaccatagtttcccctcgaaatacatttcttcagagcctagacatatgtagtagttcactgtgtgttatcattttggtggtaattcmaggagtaattaacagaggaagccatgaatcaacacaattaacagtgactcagcactgactagaaaattttcccaacactgagcctgtactagatttttgc

SEQ ID NO: 500139 - DNA, 201 bp, Homo sapiens
cattagacagatcaatgagacagaaagtcaacaagcatacccaggaattgaactcagctctgcaccaagcagacctaatagacatctacagaactctccaycccaaatcaacagaatatacatttttttcagtaccacaccatacctgttccaaaattgaccacatacttggaagtaaagctctcctcagcaaatgtaaaa

SEQ ID NO: 500140 - DNA, 201 bp, Homo sapiens
atgtggtttgcaaagaatttctctgagtgtatagattgtcttttttatcctcttaatagggtcttttgcagagtgaaagttttaattttgatgaatttcgrgttatgaattttttcttttatagttcatgcttttggtgtcaattctaaaacgttttccctagccttagactcaaagatttttttccatattttttcttag

SEQ ID NO: 500141 - DNA, 201 bp, Homo sapiens
aatggtaaagggatcaattcaacaagaagagctaactatcctaaatatatatgcacccaatacaggagcacccagattcataaagcaagtcctgagcgacstagaaagagacttagactcccacacattaataatgggagactttaacaccccactgtcaacattagacagatcaatgagacagaaagtcaacaagcatac

SEQ ID NO: 500142 - DNA, 201 bp, Homo sapiens
actgttgcattttgaaaattctgtatatattagatactagtcctttggggatatgtggtttgcaaagaatttctctgagtgtatagattgtcttttttatmctcttaatagggtcttttgcagagtgaaagttttaattttgatgaatttcgggttatgaattttttcttttatagttcatgcttttggtgtcaattctaa

SEQ ID NO: 500143 - DNA, 201 bp, Homo sapiens
tagacatatgtagtagttcactgtgtgttatcattttggtggtaattccaggagtaattaacagaggaagccatgaatcaacacaattaacagtgactcarcactgactagaaaattttcccaacactgagcctgtactagatttttgcctcttcaggcctgcatagactcattatcaaaacagctgtgatatgtgctagt

SEQ ID NO: 500144 - DNA, 201 bp, Homo sapiens
aaaatgccttctgatggaagttaaaaacagcatttgtgcatgtatttttctcattttaacttgaaaagttgcatgtactttggcaatgtcttcaaatacaracttgtatttggctcactacatggattttgacacatgatctagagtgttaaagctcctgactgatggttatttcactaaccacaaatttcagatgagggt

SEQ ID NO: 500145 - DNA, 201 bp, Homo sapiens
tttcacttgtcaacgtattttcctactagtaataataaaagatactttgaaaaatgactaaaaagaattaaaatggtacctactgccttaacttttgtccrgtatagttttcgccctatcacttggctagctgtcatttactttaccaaatcatgctgtggatgataatgctaacaaatgtattttcattggctgtgactc

SEQ ID NO: 500146 - DNA, 201 bp, Homo sapiens
gctgggattacaggcaccgaccaccatgactggctaatttttgtatttctagtagagtcggggtttcaccctcttgctcaggctggtcttgaactcctgayctcatgatccacccacctcggcctcccaaagtgctgggattacaggtgtgagccaccgcacccggtcaatttctttccttttgaagctgaataatattcc

SEQ ID NO: 500147 - DNA, 201 bp, Homo sapiens
gattcacattgcccagcagtttgttgagctcttcttaattgcaaacaccgggttcacaatggagacagaggatgacaattttcttacggtcctgagacaasttacctaccacctcaagaatctccaccaacagttaaacggcacagtgtcgaggtacagggatcagcaaggtttggcctaagcttttgtttagactagaat

SEQ ID NO: 500148 - DNA, 201 bp, Homo sapiens
ccagatttgcactgatattgctggtagactcctctccaatgaccaggtttcaagaactttgattgggagtttcttacaaaaagtagttgtcagttatgctyccatttcaaatggcggcagttgacagagtgggccagaaagaggaaggatctggacaatatctagtttgaaaaaagtataagggatcacttcttcacaagc

SEQ ID NO: 500149 - DNA, 201 bp, Homo sapiens
tgagcctagcgtccagtttgctaaagagctggtagaatgagactctgtgttgaggcagaagacatgattaatggtggaatttgatgtacattgcaggtatrgagtgctgtaaggggttgaatttagactccaaaagatatttccaccaagaacctgaaaatgtgaccttgtttggaaagggggatctttgcaaaagtaatt

SEQ ID NO: 500150 - DNA, 201 bp, Homo sapiens
gatttcatatgtattttatttaatcatcaacaaaacattgttaaatatttttgcctcctcgttgtgtctgatgaacgtggctcacggagtctgtcacttaytcgaagttctcggtgggtgcagaattcaagccaaggcctgtctgattccaaagcttgctttcttttacctcccaattaacatttattaatgattataata

SEQ ID NO: 500151 - DNA, 201 bp, Homo sapiens
tctaagcagaccccttattgctaaaatggagtattggagagaggttgagcctagcgtccagtttgctaaagagctggtagaatgagactctgtgttgaggyagaagacatgattaatggtggaatttgatgtacattgcaggtatggagtgctgtaaggggttgaatttagactccaaaagatatttccaccaagaacctg

SEQ ID NO: 500152 - DNA, 201 bp, Homo sapiens
ttgtatgtaaaagcagcaaatgataggcagcaaggtgatgccagggactgtaccacaagttctagggcatatctacgttcaatcacatgcctcatagttcrcctccgtagagtggtaaaccttaggtcatcaagagcatttacaattacatgtgatatgttttagaaagagttctacaccaagtggctggtttaaaatacc

SEQ ID NO: 500153 - DNA, 201 bp, Homo sapiens
cacaacgccttcccgaacgataggttggaaaggctcctggatccaaactcgctgaggtaaaataggtttcagctcagtgtccgcccctccgcatgcccccycccacccctcagctgtgtctggtgggcctacaagcaacttgcgaccaaaattggagacagaatcaagtttatggaagatggtctgtgattctcagcctcg

SEQ ID NO: 500154 - DNA, 201 bp, Homo sapiens
ggtgttcatctttgttgatgagaagatggaaaaaaggctgttagtggtgaggagataaaaggaggtgggtcttcaagaatcagatatggataagacaatgyatatgtgtgtgctggggaaggaagaagggatgaaagtagaggagggggtgttgttttcaaattttgtggtatgaagctagatcaatgataaggctgattt

SEQ ID NO: 500155 - DNA, 201 bp, Homo sapiens
aattagtctcccctctaattatccctgaaaataaaactccttcaagaaataaagtccattgctccaagatttaggcgtactattatttctaatacaaatgytcacttgctgtgtataagactgttgaaattactaaaaatgtggaatcatgtttttacacctctgtcttcaatgcccctagtatgctttgtcaaccaaaag

SEQ ID NO: 500156 - DNA, 201 bp, Homo sapiens
tcaaagaccaaaagtagatacaaccacaaagatggggaaaaaacagaacagaaaaactggaaactctaaaaagcagagcgcctctcctcctccaaaggaaygcagttcctcaccagcaacggaacaaagctggacggataatgactttgacgagctgagagaagaaggcttcagatgatcaaattactccgagctacggga

SEQ ID NO: 500157 - DNA, 201 bp, Homo sapiens
agcctaactgggagtcaccccccagcaggggcacactgacacctcacacggccgggtactccaacagacctgcagctgagggtcctgtctgttagaaggaraactaacaaacagaaaagacatccacagcaaaaacccatctgtacatcaccatcatcaaagaccaaaagtagatacaaccacaaagatggggaaaaaaca

SEQ ID NO: 500158 - DNA, 201 bp, Homo sapiens
aaggggtgacagatggcacctcgaaaatcgggtcactcccacccgaatactgcgcttttccgatgggcttaaaaaacagcgcaccaggagattatatcccscacctggctcagagggtcctacgcccacagagtctcgctgattgctagcacggcagtctgagatcaaactgcaaggtggcagtgaggctggggtaggggt

SEQ ID NO: 500159 - DNA, 201 bp, Homo sapiens
gaagaatggaggaagagattggagtgatggatctacaatccaaggaatcccaggaatttcactaccagaagctaggttaaagtcatggaatagattccccctcagagcctccagaaggaaccaacactgctaacatcttgattttgaacttgtggcctccagaactgtgagagactacatttctgttgttttaagccaccc

SEQ ID NO: 500160 - DNA, 201 bp, Homo sapiens
gaaaacatacttttccaagatgactgttactcattttcataaccgtcctcccaggaggacagttactgccaaaagaatgtagtattaaagtttgcaaaagyggataaaatgtaaaggtaatagctctggccattcatactcagttctagatgtcaaacttagaagtttctaaagataaaaaagccttgatatccaagccaa

SEQ ID NO: 500161 - DNA, 201 bp, Homo sapiens
atttgcattgttttaaaccactaggtttgtggtaatttgttacagcggcaataggaaactaatacagtgaggcagagaagagaaagccttctctcaaggtdattagtaatgtcagggatttgcaaggcagcttagagaagaatataatagtaacaaaaggaagagatctagagtttagagtttagagtagccaggattcag

SEQ ID NO: 500162 - DNA, 201 bp, Homo sapiens
aagtagaatctcgcctggtagaactgtgtgacctcatcgaatccattcccaaagaaaatgtggaggcaattgagaggatgaaacagaaagaatggcggcaraagtacagtcaataaggataagaatgacttaatgagtagctggttttgctcagattccacaaacacattagcaagtctcttgtgtaatgtcatattatag

SEQ ID NO: 500163 - DNA, 201 bp, Homo sapiens
gaattgccttttattaaaactgttgcattttgaaaattctgtatatattagatactagtcctttggggatatgtggtttgcaaagaatttctctgagtgtrtagattgtcttttttatcctcttaatagggtcttttgcagagtgaaagttttaattttgatgaatttcgggttatgaattttttcttttatagttcatgc

SEQ ID NO: 500164 - DNA, 201 bp, Homo sapiens
tccactcctttacctgcccttccctgtatccatctgagtttgcagcccccaattcaggctgactcctggggactccttttctcctgtatcctgctatcaamcttgggatgtatttagtattgggataaaggtcaggaatacaagttgcctgcccagaaatgaccctggtataagcctgaagccttgtgcatctggccagct

SEQ ID NO: 500165 - DNA, 201 bp, Homo sapiens
cttcatctcatttcatattcactgaagcccatatttttatggccatatttatcctttttgataattaaattattaattcagtacataagagaaacaatttyataaaaatttttttctaatgaatgtgctttcacactgatatacctaatcatatctttgtttcttttgagtagtgaaatagcaaaaacagaattcctcctc

SEQ ID NO: 500166 - DNA, 201 bp, Homo sapiens
ctatccctgcttctttaatattgcaatcagtttccactgatctttcttacaggatttttccagagccactttccaagccacatgattatgctttaaggagrtatctcactgtccatcaccccaaccaacattttgtcagcctgattggaagatattttgagaagtaaaatctgctcttaaagagagaagcattgccttact

SEQ ID NO: 500167 - DNA, 201 bp, Homo sapiens
gggcaagggcaggatcagtgaatgtgcttcagaacaggatgcctctaagctgagtctataagaggaggaagagttagtgaggacaagctctggaagagggrgtgctttctggtacagagatgacagagcttggctctgttcagaatggcaggtttatcattctgggtaaaagggggagaggctcaaggagtacatgggcac

SEQ ID NO: 500168 - DNA, 201 bp, Homo sapiens
tccacgcttggctcattttttgtatttttggtagaaatggggtttcaccacgttagccaagctagtctcaaactcctgacctcagacaatccacccacctyagcctcccaaagtgctgggattacaggcgtgagtcaccgcgcccggcctaactaattttaagtagctaaagaagcttccttctgtcatcatttttggaca

SEQ ID NO: 500169 - DNA, 201 bp, Homo sapiens
tctctttttcttgctttattgcaatgggtagaacttttgatgttgaataagagtagagggagcagatatctttgtcttgttcccagtcttgaaaggattcrgtttttcaccattaaatataacgttagctggaggatttttgtagatgtgcatactctatcaagttaagaaagttcttctctgttccagttttcctgagag

SEQ ID NO: 500170 - DNA, 201 bp, Homo sapiens
attgaacatgaaatggaacataaactgctccactgttcaatgtgaggaatgtgtttatctctggttttattgttttctttgcacaaggagaagatcagctrcaattgagagaactgtgtacagtcaacacacagcagaatgtcacatggattagaatgacagaacccttgagtttgaaaagactttcaatgacatctagat

SEQ ID NO: 500171 - DNA, 201 bp, Homo sapiens
attgctaatatagagaaatacaattgattgtataccctgaccgtactgaactcacttattagttcaagaattttgttttgtttttaaagattcctgtggaytttctaagtagaccattatgtcatttgcacatagcgacagctttatttcttcctttctgatctttatgccttttatctctttttcttgctttattgcaat

SEQ ID NO: 500172 - DNA, 201 bp, Homo sapiens
ccaatccataaacacagtctgactctccatttgtttagatcttctttgatttcttcagccttctgtagttttcagcttacaaatcctatacatgttttgtyagatttatagcaaaatatttttgtcttttctttttgaacaattgtaaatggtattgtactttgtattttggtgtccatgcagtcattgctaatatagaga

SEQ ID NO: 500173 - DNA, 201 bp, Homo sapiens
tggcagcaaaggaaacggtaaagtttaattaaaatcacaaccccaattaatgttagaatcatatccacttacctattgctcttatgaactttgctgggctragacatggagtcaactagacgcagatggtgtgtgccccacaccatgatggggagacagtgtgaacacaaacgacagaaaaacatccagctgacagtaggc

SEQ ID NO: 500174 - DNA, 201 bp, Homo sapiens
aatattggtatttcacaaatttcaatagaaaatggctatgctcaaaaaatattaagtattttgtttttcttttgtttcagttgggaagacgacttgtcttycattcaaaacctccatctggtaacaaacagcagctacctttagtcaatgaaacaaaaacaaaatcacaagaggaagaatatttttttacttgaataaaag

SEQ ID NO: 500175 - DNA, 201 bp, Homo sapiens
caaagtctttaatcttaatatagctgaatttatcaatattttcttgtatagttactactttttgtgtttttaagaaatctttccctagcaaaggcctaaawgataaaacctatatgttctactgtttgttttaaaggtttttgggggacaattttatccttatttcatctgtagttaatgtttgtatggagtgtgaggtaa

SEQ ID NO: 500176 - DNA, 201 bp, Homo sapiens
agcctgattcattcacttaatgaatcagatagtcagtcatttaatatctactatgcctggaactgtgctaggtgatgcaaagatgaataaaacacacttcttttttttttttttttgagggagctcacgttcaagtgtggaaagagtcaagtaaaccgaaaattaaaatgctccatggcaaatactataatagagtgtaca

SEQ ID NO: 500177 - DNA, 201 bp, Homo sapiens
tatttacttttgctattttcagaatctccctcttgttcttgatatttaacagtttgattataatatgtcttggtgtagtcttgtttgaattcatctgattrgaggcatttggccttcctgtacctggatatttatatatttgcccaaatttggattgttttctgttcttctttatgtaagttttctactcttttgtctttc

SEQ ID NO: 500178 - DNA, 201 bp, Homo sapiens
tatcatcctgattctgattcctttaccaatgcactgctgctactttgtgcctcatttgaatttctgagagttatttttatttcaaaagaattaaaaccttggttaaaggaataatgaaacagcagacagacatgggtagaagaggctgtcagaagaaagtgatatctacctttctcgtgtcactaaaataaaatgatgtca

SEQ ID NO: 500179 - DNA, 201 bp, Homo sapiens
tagaaattaggaatgggacagaatgggtcattctaaagaaaattcagatataaaaatggaaaatagtaaaaaaaaattcctttaagttctgaccaaatggrttggtttggagcctttcgtatttccagatcatttcagtaaagctcttcatcactatccctatctgtgcctattaatagtagggtagtgctggggagactg

SEQ ID NO: 500180 - DNA, 201 bp, Homo sapiens
cagaatgggtcattctaaagaaaattcagatataaaaatggaaaatagtaaaaaaaaattcctttaagttctgaccaaatggattggtttggagcctttcrtatttccagatcatttcagtaaagctcttcatcactatccctatctgtgcctattaatagtagggtagtgctggggagactgatccagttgtagcgaggt

SEQ ID NO: 500181 - DNA, 201 bp, Homo sapiens
ccaaggaggatttgctttattaagatatggcaagaagtgccatatggaaaatcagctgatggcagttcttagagggtcaggtattttggtttctgaaatastgtattggtatagcagttttttttttttttctctcatggaggttagagatctggaaattgaactgggtgggaagttgtgactagtgcagtttttgctaga

SEQ ID NO: 500182 - DNA, 201 bp, Homo sapiens
aaatagtttatctggcataacttcccaaaacaaattaatggtaattggacttttatggaatatgactgcctgtatgatttacattaaaaaattctaacttytcatttttaaataatttcacattcttaagagtcacaaaaatagtacaaacatttccattaggacatgatctaaaccaggagattaacactgatgcaatac

SEQ ID NO: 500183 - DNA, 201 bp, Homo sapiens
taatataacacagtcctgctaaaagaagacatagcactgcaggtactgttccagcatcttatttttgcatttggtatattgttggagatgataggtagatratatgttcatctttatagatgtttgcaatgagggagaaggaattagccccctgaaattttcaggaaagtccaaggaggatttgctttattaagatatggc

SEQ ID NO: 500184 - DNA, 201 bp, Homo sapiens
ttaatccataaatatctttggttgtattggtaagatagggaaaatataatatgtagcttatactagttcaaatgtattttttggaaaaatgtctgcatatkacatcccatggataaattagtaagtgctggagtcactgatatcactggaatttagtctttggtatcttagtattaaggcttatactacccttcactcctt

SEQ ID NO: 500185 - DNA, 201 bp, Homo sapiens
ccttatgactttttgaagtagctcattctataattttcgacagctatagaactagaacattattccacatatttggtggaaatttcctggaaccatatttracatttggactcttcctcccattaatagccttccagaaatgtcaagataactcacatgttctctttccttcccactaaatgaatcttctctctagactca

SEQ ID NO: 500186 - DNA, 201 bp, Homo sapiens
ttgagagtttttagcatgaaggggtgcttaattttattgaaggctttttctgcatctattgagataatcatgtggtttttgtcattggttctgtttatgtratgataagctttttgatgtgtggctggattcaatttgccagtattttattgagattttcacatcaatgttcataagaaatattggccccaaattttcttt

SEQ ID NO: 500187 - DNA, 201 bp, Homo sapiens
agtcatgcacaacatctggacacagctttctccagcaggagtttattgtttggggcttgatgtggcatcctactgaagcctttcatgttctctctgtcagsgttttcttccacagtgttgacaattctttccatagagtaccatgtgtaatgggcctttaaaggctcttatgaccccctaatgtagaggctgatatcatat

SEQ ID NO: 500188 - DNA, 201 bp, Homo sapiens
tacatatttataattgttatatcctcttactggatcagcccctttattattacttggtgaccttctttgtctctacagtctttgatgagatttccttaaarccactattttggattctttatctgagagctcacacattgctgtcttattaaggtcagttactagttctttactctgtccatctgaggaggtcatggttcc

SEQ ID NO: 500189 - DNA, 201 bp, Homo sapiens
aatctagaaatgagagacatctgaatgggacagatacttatttctctctggaagacttattccagttgctttcatcacagcctgaaaattcacggagggcwtctcattgggagatattcctcttccaggcagtatcagtgatggcatgaattcttcagcacattatcacgtaaacttcagccaggctataagtcatgatgt

SEQ ID NO: 500190 - DNA, 201 bp, Homo sapiens
gaaacctttcacccttcaccattttttttctcgccatttccacaatctctttcatgatctccttgtttagctctgttataaatcctgtgcagtcatgcacracatctggacacagctttctccagcaggagtttattgtttggggcttgatgtggcatcctactgaagcctttcatgttctctctgtcagggttttcttcc

SEQ ID NO: 500191 - DNA, 201 bp, Homo sapiens
accaaaacaaaaataaatagatgggacttaattaaactaaaaagtttctgcaaagcaaaagaaataatcagcaaacagacaacccacagaatgagagaaartattcacaaactctacatctgacaaagggctaatatcaagaatctacaaagaactcaaacaagtcagcaagaaaaaaacaaaaccatcaaaaagtgggca

SEQ ID NO: 500192 - DNA, 201 bp, Homo sapiens
tcttagaaaacaattatgcttataggttattcatcagtttaatcattttaaggtaacataactttaagttaaataatgaaagacaattttgatttaaagcktattagtaatgcttcacaatgatttcagggccacatgtgaagtaatatgtggctcaagggataaaggttgactacctatatgtttctacttgaaaggcac

SEQ ID NO: 500193 - DNA, 201 bp, Homo sapiens
tcatagagtctaagataagaaacttttttatttcctctaggcaaaatttattcatagttgagattatattgctgctgcgtgacagtctcatagagttgttktgaggatcaaatattataacatttgaaatactttaaaatgtgttattaaaatgtaagataagattctgaaacatcagataaattttgtaaatgaagtctc

SEQ ID NO: 500194 - DNA, 201 bp, Homo sapiens
taaataatatcccattctctacatttagcacagtttatttattaattactgaaggacatcttgattgctttcaagttttggcaattatgagtacagctgcwataaacatccaattgtaggtttttatgtggaaataaagtttcaacttgttagagtaaatactaacaagtgcaatagttggattgtatggtaaaagtatgt

SEQ ID NO: 500195 - DNA, 201 bp, Homo sapiens
acagtctcatagagttgttttgaggatcaaatattataacatttgaaatactttaaaatgtgttattaaaatgtaagataagattctgaaacatcagatamattttgtaaatgaagtctcagtttggggcattgtgttaataattttctaaagatgttgttttatatatgaagttattttttcctccacaaataccaagaa

SEQ ID NO: 500196 - DNA, 201 bp, Homo sapiens
tttattcaaaataattattgcaagagaaaaaagggactattgaaattggaagaggaggaggactattgcaatggaaagaatgctgtgaccgtaagatctgyaggtgtctcaagggttgggcagaagttttcttttatagagagacgctggaaagaaccaggtatggggaaattggatgaaatagtagaatgattagataag

SEQ ID NO: 500197 - DNA, 201 bp, Homo sapiens
tggaattcttcaatttaaacaaaacacttcggtatttttatttcttggactcattaattttacacacacacatacacatacaaacacacacacacacactyaggctggaatgcagtggtgcgatctcagtgcactgcgacctctgcctcccgggttcaagtgatccttctgcctcagcctcttgagtagctgggactacac

SEQ ID NO: 500198 - DNA, 201 bp, Homo sapiens
gagagtataaccaaaaaataatgtagaggacatcaaatttctttagccctcttatctgtacttcagagttttatgcccttctgtctttttagatgcctccrcctttttttgctagtattgtgtcaaataagacaagttttttcaaataaaaacaaatctggacttagtaagcagagactttattcaaaataattattgcaa

SEQ ID NO: 500199 - DNA, 201 bp, Homo sapiens
atctcttgacctcatgatccgcccacctcggcctcccatagtgctgggattacagacgtgaaccactgcgcccggcctacaccatcttttgtttgcagtarcattgttttgaaaggcaatgttctatgggactgaagaccacaggcttggagttaaattgtctgaattcaaattctgtctctactatttgctggctgtgtg

SEQ ID NO: 500200 - DNA, 201 bp, Homo sapiens
ctgctaacatcttgtcacatgtcgataatggcaagattggtatacctgatttggagcatgccttgaaatgtttgaatgttaatttaactgaggaggacttyaatgaagcccttaactgttgtaacgtcagtggtgagcatttttttggcctgagattcttttcattttttttctacttatgaaaaatagtcttagagtgta

SEQ ID NO: 500201 - DNA, 201 bp, Homo sapiens
ggtggttcctcagaaatggtggttgttgtagaaggctggcggtcccgggggtggtgtcacttccctgctccttcagcgggaggcggagacctctattagcrcactcatttccatcttgcgggtcgttcactcgctagcttacaggtcctctttcttcctgtagaagtcgttggcttcgtaagagcagggtctatgggaagc

SEQ ID NO: 500202 - DNA, 201 bp, Homo sapiens
tataagcatgggtggaaaaataccataaattgtataataaaaacatgacaacagcagcttattttgatatgcaatctttttcagaggagatctgctttcattttttttttacagtacttgctccattttgatttttaaccaaataaaatgtgggagggctcactacatttaaaaataagttatttagttttagtgattgtt

SEQ ID NO: 500203 - DNA, 201 bp, Homo sapiens
ctgagtgggacaaaggggcagattgaagggtgactgagactgatcaggtggttcctcagaaatggtggttgttgtagaaggctggcggtcccgggggtggkgtcacttccctgctccttcagcgggaggcggagacctctattagcacactcatttccatcttgcgggtcgttcactcgctagcttacaggtcctctttct

SEQ ID NO: 500204 - DNA, 201 bp, Homo sapiens
ctgccattttgtttaaactcaaagtctccttaatataattatagccctagattgtctgctgtgtcacattattgcaccttacttcacttgtgactgtgtakgtgtgtgtgtgcacgtgcgtgtgtgtgtgtgtacatgtacatgtgcatgtatgtgtgtattctaataacattgtctcctctggccttagactgcatcaat

SEQ ID NO: 500205 - DNA, 201 bp, Homo sapiens
catcagtttgatcatcacttgtttgtttagaaagccataatgatttccagtgactacttaaagtttatacctggtaatggctttaatgccctctgctgccyagcttcctactttacctatcctaatcaattagagaaaacctatttaatttgttctagagtttgtgtgtgtatatgtgtgtatgtgtatatattgtgtgtg

SEQ ID NO: 500206 - DNA, 201 bp, Homo sapiens
gggcttgatgtggcatcctactgaagcctttcatgttctctctgtcagggttttcttccacagtgttgacaattctttccatagagtaccatgtgtaatgrgcctttaaaggctcttatgaccccctaatgtagaggctgatatcatatttggagccaagtagaccacttcaatgcctttggtgttgaattcatagagttt

SEQ ID NO: 500207 - DNA, 201 bp, Homo sapiens
agtttcaactatataccatgccccttcttgccaaatagctgttgcatgtgttcatttctcttccttgaacctttttctccccttaggtaattcctacttayactttagatccaaactcaactgtcttttcctcagggatgttttcccagacctctctgagtaggtcagattctcatgttatacactcttatagcactattc

SEQ ID NO: 500208 - DNA, 201 bp, Homo sapiens
actacaggcgcccaccaccacgcctggccaattttttgtatttttttagtagagatggggtttcaccgtgttagccaggatggtctcgatctcctgacctygtgatccgcccgcctcgggctcccaaagtgctggaattacaggcgtgagccaccacgctcagccaacttttattcctccatttcaaccgtggagagtctg

SEQ ID NO: 500209 - DNA, 201 bp, Homo sapiens
aaaaagacaccttgtagagattgctattaaaatctttacagatggaaataatatactgtgatttatttcaaaaataataagggatgggaacagggatgggrtatagatggaataggattgaccactgttgaaactgggtgatgggattctgtatacttttgtatatgttagaaaatttccataattaaaagttgaaaagaa

SEQ ID NO: 500210 - DNA, 201 bp, Homo sapiens
cagtttcttcatagtgtgattggtctttatatacgactgttttttttttttgcagtggctggtattaagaaagtttttcttatattaagaaagtttttccyttcttaatatttagtgcttccttcaggagctcttgcaaggcaggcctggtgttgacaaaatccctcagcgtttgcttgtatgtaaggattttatttctcc

SEQ ID NO: 500211 - DNA, 201 bp, Homo sapiens
aagcaatctgcccaccttggcctcccaaagttctgggattacaggtgtgcacctccgtacccagcccaatctctacaaaaaaagacaccttgtagagattkctattaaaatctttacagatggaaataatatactgtgatttatttcaaaaataataagggatgggaacagggatgggatatagatggaataggattgacc

SEQ ID NO: 500212 - DNA, 201 bp, Homo sapiens
gatcatttcagtaaagctcttcatcactatccctatctgtgcctattaatagtagggtagtgctggggagactgatccagttgtagcgaggttcagatggyaagaccacaatatctaaggggtatggatatatctgcacaaatagcccaaggatccaaagattaataattggagattacaaaatacgggggaatttagagc

SEQ ID NO: 500213 - DNA, 201 bp, Homo sapiens
ctttagttccttagatactcccctttcctcccactacaagacttttgcatattctattccctggaatattcttccctgatcctctttgcctactgttgtartctgttttgtgttgctgtaacagaataccacagactggataatttgtataaaaaaaaaaaagagattcatttcttacaattctagaggctgggaaatcca

SEQ ID NO: 500214 - DNA, 201 bp, Homo sapiens
tcgtcgtaaagttactgtttttccttctttcaaagtttttgttagatgcaagtcataaagtttagccccatgctcaagaagaaaattaagctattcttctrgagggaggagtatcaaagaatttggggacgtgtgttaaaataaccacagtaattaataaatattttggaggagatactttgagactgtgcaagtattctg

SEQ ID NO: 500215 - DNA, 201 bp, Homo sapiens
tttcgtatttccagatcatttcagtaaagctcttcatcactatccctatctgtgcctattaatagtagggtagtgctggggagactgatccagttgtagcraggttcagatggcaagaccacaatatctaaggggtatggatatatctgcacaaatagcccaaggatccaaagattaataattggagattacaaaatacgg

SEQ ID NO: 500216 - DNA, 201 bp, Homo sapiens
cctattaatagtagggtagtgctggggagactgatccagttgtagcgaggttcagatggcaagaccacaatatctaaggggtatggatatatctgcacaamtagcccaaggatccaaagattaataattggagattacaaaatacgggggaatttagagccaggtatgcttagcagttaacatttagatgttgagtggcat

SEQ ID NO: 500217 - DNA, 201 bp, Homo sapiens
aggttcagatggcaagaccacaatatctaaggggtatggatatatctgcacaaatagcccaaggatccaaagattaataattggagattacaaaatacggsggaatttagagccaggtatgcttagcagttaacatttagatgttgagtggcatatcccagtcactagcctaagttaaaggcagagtttaagtttctagga

SEQ ID NO: 500218 - DNA, 201 bp, Homo sapiens
agacctacaagtctcacttatccgtgatatcagacgaagagggaaaaataaagttgctgcgcagaactatcgtaaacgcaaattggacataattttgaatytagaagatgatgtatgtaacttgcaagcaaagaaggaaactcttaagagagagcgagcacaatgtatcaaagctattaacataatgaaacaaactgcatg

SEQ ID NO: 500219 - DNA, 201 bp, Homo sapiens
tgagccctttttgctgcttatcaggattgacatgatcactctgagggtttatatctaaaaataggtaaaacattggaccacatggatactagggagatagrgatgggaatccttggttttatcagggctggttagtattgttaaggtgtcttaatggatagtatattgagtgggttttcaagatggtatgaaatagactcc

SEQ ID NO: 500220 - DNA, 201 bp, Homo sapiens
tcttgttgcattaatcccttctttgtcttttttgatctttgttggtttaagggctgttttatcacagactaggattgcaacccccagttttttttttttgtttttttttttttgctttccatttgcttggtgaatagttccccatccctttattttgagcctatgtgtgtctttgcatgtgagatgggtctcctgaataca

SEQ ID NO: 500221 - DNA, 201 bp, Homo sapiens
ggctgcagccactttgccacactgtgttgagctccacccagtccgaacttccaggcctttttagcgctgtcaggggaaaacaagcctcagtaatggcagaygcccttccccacaccaagcttgatcctcctagtttgacttcagactgctgtgctggtagcgagaattttaacccagtggttcttagcttgctgggctcca

SEQ ID NO: 500222 - DNA, 201 bp, Homo sapiens
agcttcatggggccaaacaaatggggaagtcagagctcatcttatccctgtgtgagtccactgacagtacctaggaggtgagattattttgtgaactgackgacatgcacagtggtcaatcagaatgccatccatagagtaaaacagggtcctggaggcccttttggtttttggaaggtaaattatgatgatatccaggga

SEQ ID NO: 500223 - DNA, 201 bp, Homo sapiens
tgagtcagtagtcatcccattacctccatgcctctttgcatgtgcaatctctcccttcccctttcttctggagttaacaattatctttttaaaaaacataygttttcctatagacctattactttttcccatgtttcagacaaaaaatttttgtacggtacttgcaacttttctgagagtttgagtttgtttagaaataaa

SEQ ID NO: 500224 - DNA, 201 bp, Homo sapiens
ctttagggaggagcttaacttttcctgagaaacttattcagtgattaattgcaatcattaatatttcctagaaagtagaaggcctggtttcttttggaaaygtttattttgtaatttattaaacatttaaacaagtaggaaatctgtgtgaaatttttgcttagagtgctgtaatttaaatatataatattcatagtactt

SEQ ID NO: 500225 - DNA, 201 bp, Homo sapiens
ttcccgaagtgccgtgattataggcaggagccaccatacctggccccattaattttattttaatcagaagcaagcagcattggctgggccactggaacagrctgttcccccaaacaagtagattataaatgtttatagaatgttaggacggttctgtgtttgagctgtaagagaaagattaaatataatgtaatataaaca

SEQ ID NO: 500226 - DNA, 201 bp, Homo sapiens
tccacctcccagccgcctgccttggcctcccaaagtgccgagattgcagcctctgcccggccgccaccccgtctgggaagtgaggagcgtctctgcctggccgcccatcgtctgggacgtgaggagcccctctgcctggctgctcagtctggaaagtgaggagcatctctgcccggccgccatcccatctaggaagtgagg

SEQ ID NO: 500227 - DNA, 201 bp, Homo sapiens
atctctgcccggccgccatcccatctaggaagtgaggagcgcctcttcccggccgccatcctatctaggaagtgaggagcgtctctgcccggccgcccatmgtctgagatgtggggagagcctctaccccgccgccccgcctgggatgtgaggagcgcctctacccggccgcgaccccatctgggaggtgaggagcgtctc

SEQ ID NO: 500228 - DNA, 201 bp, Homo sapiens
tttttccactgtagaaatgaagatttcagggggacttttcctcatggtacctggcagtttgggggaggggtgttgtggatatagaagtccttttttcttamcatctgcttggagattttcacttctctgtgcccccaggagtcatttcagcttcagatgtgagttctgggatattactggtgttaatcttggcactggata

SEQ ID NO: 500229 - DNA, 201 bp, Homo sapiens
ttggttttcagtaggggagaatgaagccagattgcttctgttctgccattttggtgacatcacacttctggtttctaaggttaatttatgtagtatgtatyggtagttcatccccttttaaggctaaataaatctatattatattgtatggatattctttactttgttggtggtccattggctcatggacatttgattatt

SEQ ID NO: 500230 - DNA, 201 bp, Homo sapiens
ttaggaaataagtgatacctatgaccatattgattgccttagtttcaaccaggaatcattctttaaggttttgctaagttagatagggaccaagatagtcmtttcagattctcgaacgcgtctttggccactagggactatttaagtaggtaatatttgtttgggagtttcataataggtgtttattattgcatagatgca

SEQ ID NO: 500231 - DNA, 201 bp, Homo sapiens
gaagcaggaagaacatttccaacctcattttatgaggcctatgtaatcttcatataaaaaccttacatgggcaccaaattataattcagtccccatcatgrccacaaatggggaaagctttaataaaataggatcaaatgaaatctagtgatatataaaaaggaaagatatatcacaagttgaattctttttaggagtgca

SEQ ID NO: 500232 - DNA, 201 bp, Homo sapiens
ttacagacgtgatctatttctctttatctccctatcttagtccaagttcacataacctttcctcaggaccattgcagttcatcctaacaagtatacccctrtccactcttatgttcctttatactgcagccataatgatcttcattcaaatacgggtctgatcatgttattctcctcatataaaatctaataatacctctt

SEQ ID NO: 500233 - DNA, 201 bp, Homo sapiens
agacagggtttcaccatgttggccaggatggtctcgatctcctgaccttctgatccacctgccttggcctcccaaagtgctgggattacagacgtgatctmtttctctttatctccctatcttagtccaagttcacataacctttcctcaggaccattgcagttcatcctaacaagtatacccctgtccactcttatgttc

SEQ ID NO: 500234 - DNA, 201 bp, Homo sapiens
ttaactccactctgtcgccagactgtagtgcagtggtgtgatctcggctcactgcaacctccgactccctggttcaagtggttctcctgcctcagcctccragtagctgggattacaggcacgtgccaccaagcccagctaatttttgtatttttagtagagacagggtttcaccatgttggccaggatggtctcgatctc

SEQ ID NO: 500235 - DNA, 201 bp, Homo sapiens
ttccttgaacattcttcttgcctcggggcttttgtacttacttttctttctggctgaaatgctcttccctaagatattaatcagctccctacttcagttcytgcaggtctgtactcaaaagtctccctctcagtaaggtcttccttggccacccattctgttccctgcatctcttcccctatactacatttcatattcccc

SEQ ID NO: 500236 - DNA, 201 bp, Homo sapiens
atgttttatttttctattttattatttcactccctgactagaacataagcttcatgagggcagattttatatatatataaacaaaatatatatatatatatatatatatatatatatatatatatatatatcatatatatattttgttcattggtatatccctagagcctaggagagaacctagtgcacactaagcatgca

SEQ ID NO: 500237 - DNA, 201 bp, Homo sapiens
tccctgactagaacataagcttcatgagggcagattttatatatatataaacaaaatatatatatatatatatatatatatatatatatatatatatatakcatatatatattttgttcattggtatatccctagagcctaggagagaacctagtgcacactaagcatgcagacatatacgttgaattcatggatagaaag

SEQ ID NO: 500238 - DNA, 201 bp, Homo sapiens
tataggagctatacatatgaaaaatacaaatacaaggcaaatgattaatgtcagttaaatagtgaagacaagaatagtgaaggcagtaagtgctatgcacdgtagtttagaggtaaatattgaactggttggagaagatctagaagagattacgtaggatgggttactggggagacctgcatagatttccagtattttctg

SEQ ID NO: 500239 - DNA, 201 bp, Homo sapiens
aaaaagactgatgattataactagcaatgtaatataatgtaatatagctagcactgtgataaatagctcataaaatgtaactcagatgtgagttgaaaatrtgaaaatttgaggaatttctaagtgttggttatcacatttgcataatgtgaaagtcttgagtttgaagtgaggctacaccatcttttctttctttatttt

SEQ ID NO: 500240 - DNA, 201 bp, Homo sapiens
cagctacttgggaggctgaggcacgagaatgcttgaacccagggggcagaggttacagtgagccaagatcacgtcattgcactccagtcggggcgacagarcaagactccatctcaagtaaataaataaatacaaaataaaaagtataatcaaatcccccattgccccccacctcacaccagagaatatttggcaatatct

SEQ ID NO: 500241 - DNA, 201 bp, Homo sapiens
tatggacatttaaacaatattaattttttgaatccatgaacttgggctattttctcatttatttgtgtcttcttcagtttcctttatcaaagttttatagttttttttttgttaaaatttcatcattctaacaggtatgtaatgatggtatttccttttaatttgcagttccctaatcccattataatgttgagcctcttt

SEQ ID NO: 500242 - DNA, 201 bp, Homo sapiens
tagttgcagctacttgggaggctgaggcacgagaatgcttgaacccagggggcagaggttacagtgagccaagatcacgtcattgcactccagtcggggcracagaacaagactccatctcaagtaaataaataaatacaaaataaaaagtataatcaaatcccccattgccccccacctcacaccagagaatatttggca

SEQ ID NO: 500243 - DNA, 201 bp, Homo sapiens
cttcagtggtcacactcctagtctgccttcatgttccatcctgtacacctggctctgccttttagatagcagtagcaaattagtgaaagtactaaaagcagaaataatggcgtaagctgtctgtctgtctgtctgtctctctctgccttggctgccaggcagggaagggccccctgtccagtggacacgtaacccatgtga

SEQ ID NO: 500244 - DNA, 201 bp, Homo sapiens
tgattactatttgcagctagtttctgttgactttaataataataataaaactaattttattctataaatatgacatttattgaggcattatatgtctaatrctatcttaagtactttttatacattgttatatttactctccacatcaaccttgtgaggcagatagtattatcccattttagacgagacattaagtagtaa

SEQ ID NO: 500245 - DNA, 201 bp, Homo sapiens
cttggaggagccaagagaataggcatagtatgaagttctatgccttctttcagtatctacacatgtaattttaagggaatatggtcagtgtctgaccttgmaatttaagattttagaggtggaatagacaattctaggtaatgataaggattaagggtagccattggtgtggatgactttggaaaggaaataaaggccttt

SEQ ID NO: 500246 - DNA, 201 bp, Homo sapiens
tttattgaaaggacttgcttttgtttttgtttttaatgctgtgtgttcacctaatttctggttaacatgttggcattgatatgtttatacgcagatgaaasttggttttgattaaacattggctggcatataggaacttggctttcagaatgtatccttcattactaactgataaagctggtttactctgtctagactatt

SEQ ID NO: 500247 - DNA, 201 bp, Homo sapiens
tctgtttctcctgactctgatatctgatgtgtttgaaattagcttaataactttgttttcttttcggcttggcagcaagactctgaacttatcttcatgaytttttatgcaatatccattgaagccagatctgaatctttgtttcaggctctaactttgcaacctggcatcagctgtgattaatcctgttttggtggttta

SEQ ID NO: 500248 - DNA, 201 bp, Homo sapiens
aattattttcaattgttaattctcatagagtctaagataagaaacttttttatttcctctaggcaaaatttattcatagttgagattatattgctgctgcrtgacagtctcatagagttgttttgaggatcaaatattataacatttgaaatactttaaaatgtgttattaaaatgtaagataagattctgaaacatcaga

SEQ ID NO: 500249 - DNA, 201 bp, Homo sapiens
aaagtactagctcttgggtttatctttagcgtttctatttatagtttaaaaattaatttctgattttacctttagtaagtcctttatattgttcccttatrctcatttaatagtttttctaatttcttgtttaaattatttatttactttattttttttcttactgggtaataaacatgtttaaggcagtcaattttcatt

SEQ ID NO: 500250 - DNA, 201 bp, Homo sapiens
gaacttttaacatttttttaaatcaagggaggtcagccatggtcttcttagtccaaatgtttgtgactgtgctaaacataagaggctgtgatgattctctaaaatgggtgaagttagctgacaggaacaagggatgcagggaaggaaagagaaaaattggcatttaggaggagttatgaggaatgaaggggactttactga

SEQ ID NO: 500251 - DNA, 201 bp, Homo sapiens
taattttattttaatcagaagcaagcagcattggctgggccactggaacaggctgttcccccaaacaagtagattataaatgtttatagaatgttaggacrgttctgtgtttgagctgtaagagaaagattaaatataatgtaatataaacagatatggagagaaaagcagtcttataaaatctataaggtaatataaaat

SEQ ID NO: 500252 - DNA, 201 bp, Homo sapiens
gaggcacgagaatgcttgaacccagggggcagaggttacagtgagccaagatcacgtcattgcactccagtcggggcgacagaacaagactccatctcaartaaataaataaatacaaaataaaaagtataatcaaatcccccattgccccccacctcacaccagagaatatttggcaatatctagagacagtgttggtta

SEQ ID NO: 500253 - DNA, 201 bp, Homo sapiens
cttaagtctttctatttctctctctttttttaactccactctgtcgccagactgtagtgcagtggtgtgatctcggctcactgcaacctccgactccctgrttcaagtggttctcctgcctcagcctccgagtagctgggattacaggcacgtgccaccaagcccagctaatttttgtatttttagtagagacagggtttc

SEQ ID NO: 500254 - DNA, 201 bp, Homo sapiens
gtcttagatacatctttttaaaaacttttctccttttttctatatataagatagatatctcttaagtctttctatttctctctctttttttaactccactstgtcgccagactgtagtgcagtggtgtgatctcggctcactgcaacctccgactccctggttcaagtggttctcctgcctcagcctccgagtagctggga

SEQ ID NO: 500255 - DNA, 201 bp, Homo sapiens
gctttttggcttatggagttctggcctgggtctccaggtctcctgctttatttggggaggtatattggacaaatgatactaattttatagaattgttatargaattaaatataaacatttatcacagtgcttggcacctagaacagacagaagggtgaggcagaaacctgagagtcatccttggcaactctacttctctat

SEQ ID NO: 500256 - DNA, 201 bp, Homo sapiens
tgaccttacctatcaatggagatggctcacactccttaccctgcccctttgttttgtatccaataaatatcagcgcaacctggcattcggggccactaccrgtctccgcatcttggtggtagtggtaccccgggcccagctgtcttttcttttatctctttgtcttgtgtctttatttctacactctctcgtctccgcaca

SEQ ID NO: 500257 - DNA, 201 bp, Homo sapiens
tttttgctgcttatcaggattgacatgatcactctgagggtttatatctaaaaataggtaaaacattggaccacatggatactagggagatagagatgggratccttggttttatcagggctggttagtattgttaaggtgtcttaatggatagtatattgagtgggttttcaagatggtatgaaatagactccttaactc

SEQ ID NO: 500258 - DNA, 201 bp, Homo sapiens
gagtctttccttcgtcttaactttggataacctgatgacaatgtgcctaggcgaagattgttttgctatgaatttcccaggtgttctttgtgcttcttgtktttggatatctaggtctctagcatcttggatatcaaggccagggaagttttcctcgattattcccccaaatatgttttccaggcttttagaattctcttc

SEQ ID NO: 500259 - DNA, 201 bp, Homo sapiens
atgttagccatgatggtctcgatctcctgacctcatgatccgcctgcttctgcctcccaaagtgctgggattataggcgtgagccaccgcacctggccaattttttttttttttttttttgtatttttagtagagacgggatttcaccatattggctaggctggtcttgaactcctgacctcatgatctgcccgcctgagc

SEQ ID NO: 500260 - DNA, 201 bp, Homo sapiens
ttcttacccattctgcagttctgtatcttttaagtggagcatttaggcctttgacattcagtgttagtattgaaatgtgaggtatggttacattcatcatrttctttgttgtctgagtactttggttttttgttttttgtttttgctttttaacttgtatttttgttttataggtcctgtgtaatttgtgcttaaaaatgt

SEQ ID NO: 500261 - DNA, 201 bp, Homo sapiens
ttttagaagaagtgacaaaacatacctatattgacagtgagttatttgcattgagatatatatgtccatatatatgtgcatatatttatacatttttttcyggatatcaattttgtgatctgtcctttgcttctccttttttctcttgattcttaccttttgccattgacactgtttactggtgtctatagtaagaaatag

SEQ ID NO: 500262 - DNA, 201 bp, Homo sapiens
tgttagccatgatggtctcgatctcctgacctcatgatccgcctgcttctgcctcccaaagtgctgggattataggcgtgagccaccgcacctggccaattttttttttttttttttttgtatttttagtagagacgggatttcaccatattggctaggctggtcttgaactcctgacctcatgatctgcccgcctgagcc

SEQ ID NO: 500263 - DNA, 201 bp, Homo sapiens
agttcaaaaattttagttgtttaaaaaactttagtaaacagtttttcattatgtatataatcttttgtttttttcccttaatattatatgactaagatttrttcatattgttgtatactgctttttttgtatgctcttgctcttgccacccttgaattgatcgcctttaaaaattatggttgttctaatagatatacggtt

SEQ ID NO: 500264 - DNA, 201 bp, Homo sapiens
tttctttctcttgccatattactctggctaggacttccagtactatgttgaagaggagtggtgagagtgggcatccttgtcttgttccagttctcagaggraatgctttcagctttttgccattcagtattatgtcggctgtgggtttgtcatagatggcttttattacattaaggtatgtcccttgtatgcctattttgc

SEQ ID NO: 500265 - DNA, 201 bp, Homo sapiens
cgcaatctcggctcactgcaagctccgcttcccgggttcacgccattctcctgcctcagcctcccgagtagctgggactacaggtgcccgccaccgcgccyggctaattttttgtatttttagtagagacggggtttcaccttgttagccaggatggtctcgatctcttgacctcatgatccacccgcctcggcctcccaa

SEQ ID NO: 500266 - DNA, 201 bp, Homo sapiens
ttaataaatattttggaggagatactttgagactgtgcaagtattctgtttctcctctaagtttctcccactaattttagcattcattggcagatgaattrctagcctgtagcaattattactgtgttgttctaatgttgattttctacttccctcattccttctacattttaaaattatttgaaattcttcggcagggac

SEQ ID NO: 500267 - DNA, 201 bp, Homo sapiens
ttagtagagacggggtttcaccttgttagccaggatggtctcgatctcttgacctcatgatccacccgcctcggcctcccaaagtgctgggattacaggtrtgagccaccgtgcccggcctgatgtttcttatttggtctctcagaatccaggtaaaaaagacttcttcaaaagtatagaagataatacttttgtaactga

SEQ ID NO: 500268 - DNA, 201 bp, Homo sapiens
gagattgcaccactgcactccagcgtgggcgactgagcaagaatccatctcaaaaataaataaataaataaataaataaataaataaataaataaataaattagctcggtgtgatagcgtgagcctgtagtctcaactacttggggggttgaggcaagaattgcttgagcccaggaggttgaggctgcagtgagctgtatt

SEQ ID NO: 500269 - DNA, 201 bp, Homo sapiens
atagttaatagtttcatccatgttgctgtaaaatatgttatttcattcttttctgtggctgactagtattccactgtgtgtgtgtgtgtgtgtgtgtgtgygcgcgcgcgcgccacgttttctttatccagtcatccattgatggacacttaggttgattttatgtctttgctattgtggattgtgctgtgataaacatat

SEQ ID NO: 500270 - DNA, 201 bp, Homo sapiens
aacaagtttgaaaggctgaaaacacagattggctccctttttagtgattattatttttttgagagtggggggaataaggataattattctttttgattaaytaactaaatgttttgttatgtgtgtgcagcacttcataaagcctgtaaaatttttagtaaaattcgaagtggtaagatttatgtgaatgatcttccagtg

SEQ ID NO: 500271 - DNA, 201 bp, Homo sapiens
tgagattgcaccactgcactccagcgtgggcgactgagcaagaatccatctcaaaaataaataaataaataaataaataaataaataaataaataaataaattagctcggtgtgatagcgtgagcctgtagtctcaactacttggggggttgaggcaagaattgcttgagcccaggaggttgaggctgcagtgagctgtat

SEQ ID NO: 500272 - DNA, 201 bp, Homo sapiens
aaagattgaagagggtggggtaaaaaagaaacaagtttgaaaggctgaaaacacagattggctccctttttagtgattattatttttttgagagtgggggraataaggataattattctttttgattaactaactaaatgttttgttatgtgtgtgcagcacttcataaagcctgtaaaatttttagtaaaattcgaagtg

SEQ ID NO: 500273 - DNA, 201 bp, Homo sapiens
ttcatcttgatttggatccattgctgctaagcttttgagtgtgatcttctggagatgtaaaagaacgttgttttgtcatattaccagaattgtttttctgrttccttctcatttgggtagactatatcagagggaagctctgggactcaagggctgctgttcagattcttttgttcctcagggtgctcccttgatttggtg

SEQ ID NO: 500274 - DNA, 201 bp, Homo sapiens
gtgagattgcaccactgcactccagcgtgggcgactgagcaagaatccatctcaaaaataaataaataaataaataaataaataaataaataaataaataaattagctcggtgtgatagcgtgagcctgtagtctcaactacttggggggttgaggcaagaattgcttgagcccaggaggttgaggctgcagtgagctgta

SEQ ID NO: 500275 - DNA, 201 bp, Homo sapiens
ccaactgtaaactttcctaagcaacctattattctgttttccccaacctgaggtaagaattaccttgaatcctatattcattattctcttatttttctgtktaaatagtattattgttatggataggtatttttgtaaaatagttcaaaaattttagttgtttaaaaaactttagtaaacagtttttcattatgtatataa

SEQ ID NO: 500276 - DNA, 201 bp, Homo sapiens
gctggtactggagagtgtctgcaaagagtcctgtgatgtattccatcttcaggtctctcagccgtgaataccagcacctgcaccaatggaggtagcagggragtgaagtggactctattagggtccttggttgtatttttgtttagtgtgctggttggcctccagccaggaggtggcactttcaagagcacatcagctgca

SEQ ID NO: 500277 - DNA, 201 bp, Homo sapiens
acaaaatgatataaaatccttttggtgtgataagtatgttcattattttattgtgattattgtttatttgtgtttacaaatgtcaaaactttgtcaaataycacagtttaaaagttgctgtctgttgtgatccagagcaatcagacaagagaaaaaaataaagggtatccaaatcagtaaagagaaaggcaaactgtcact

SEQ ID NO: 500278 - DNA, 201 bp, Homo sapiens
cgagtttcaactgatgacgtgtttgctgttttggatagcatgggtatccctataaaccgtgaaattttagaagaagtgacaaaacatacctatattgacagtgagttatttgcattgagatatatatgtccatatatatgtgcatatatttatacatttttttccggatatcaattttgtgatctgtcctttgcttctcct

SEQ ID NO: 500279 - DNA, 201 bp, Homo sapiens
atgtggcatcctactgaagcctttcatgttctctctgtcagggttttcttccacagtgttgacaattctttccatagagtaccatgtgtaatgggcctttmaaggctcttatgaccccctaatgtagaggctgatatcatatttggagccaagtagaccacttcaatgcctttggtgttgaattcatagagtttgggtggc

SEQ ID NO: 500280 - DNA, 201 bp, Homo sapiens
agaggagtggtgagagtgggcatccttgtcttgttccagttctcagagggaatgctttcagctttttgccattcagtattatgtcggctgtgggtttgtcrtagatggcttttattacattaaggtatgtcccttgtatgcctattttgctgagggttttaatcataaagagatgctggatttgtcaaatgctttttctgc

SEQ ID NO: 500281 - DNA, 201 bp, Homo sapiens
cccataaaattaatcctttggttattcaaaaatatgaaaaggaaatatgattcttaggagtgcatcaaatggtttacatttttataggttgctttattggmtctgacttttgcgtaatgaggttggtctattaaaagtgttttttctcacagaaggtgacaaagtacaatttgaagaatttgcaaaagtagtaaggaatat

SEQ ID NO: 500282 - DNA, 201 bp, Homo sapiens
aaataaataaaagttaaaaatattatgtatgcttgagagggactggaagaattttgacccgttttcttggtgtttttcagcgtttacttctctactgtaarttgatttgcttttcccctttatacccatatatttttattggttagtattacctgatggatataattatatatttctgaatatataacgtattttatataa

SEQ ID NO: 500283 - DNA, 201 bp, Homo sapiens
atgtggagtgaatgggtataatgtaatacccattcattaattacatttaattaagtaatgggtataatgttcttaggaaaaattctgggactagatagtakataggtaggtaagagatcaagaaggacaatttagactaataattaaggattttattgaatagaccggctggggattaacttctccccttagggagaaagg

SEQ ID NO: 500284 - DNA, 201 bp, Homo sapiens
tcaaaaatacattatattttaggctaaatattttattatgttttcatttttgaaagttggcaattcatttatgctatatttattattcttttaaaccataraaaccttaatttttgtctattccagatgacagtttactgtattaacttcttgcataagcattcgtaaaacttgtgttttatctaccctttagtattgcct

SEQ ID NO: 500285 - DNA, 201 bp, Homo sapiens
tatgctctcaataattgttcaaatgaactgacttaatctagaaagaattatgagacatgatatgaaggagaaataggatgatgaaatgaaggatcaagtamattttaaaaatagttgtgttaaaatgtaaatttgcctttatgcaaaaatacaccagaatgtataatctaaactctttttaaaaacagagaatggaatggt

SEQ ID NO: 500286 - DNA, 201 bp, Homo sapiens
ctaactcagtcctttgcatgtaatagatattgagaaagcaaggactgtgtctttcttatttttgtattctcggtgcctagcatggttcttggcactaataygctctcaataattgttcaaatgaactgacttaatctagaaagaattatgagacatgatatgaaggagaaataggatgatgaaatgaaggatcaagtaaat

SEQ ID NO: 500287 - DNA, 201 bp, Homo sapiens
ggtgagattgcaccactgcactccagcgtgggcgactgagcaagaatccatctcaaaaataaataaataaataaataaataaataaataaataaataaataaattagctcggtgtgatagcgtgagcctgtagtctcaactacttggggggttgaggcaagaattgcttgagcccaggaggttgaggctgcagtgagctgt

SEQ ID NO: 500288 - DNA, 201 bp, Homo sapiens
gggtttgagaattagatgacatttttacattatatcaatgtaataatttctgaatttttatgattgtattgttattatgtaagagaatgttctcattggaraaaaaacacaataatatagttaatggtgaggggacattttgttggctatttacattcagatatttcagataaaaaaattttgtttagaaacaaaatatgt

SEQ ID NO: 500289 - DNA, 201 bp, Homo sapiens
tcagcagttagtgcctcttcatctactcctaatggcttatggtatcaactgataatacatggtatggcaaatgctgcgggctgtgaggaagcaaaagtagrtagtttaatccataaatatctttggttgtattggtaagatagggaaaatataatatgtagcttatactagttcaaatgtattttttggaaaaatgtctgc

SEQ ID NO: 500290 - DNA, 201 bp, Homo sapiens
gagtttcaactgatgacgtgtttgctgttttggatagcatgggtatccctataaaccgtgaaattttagaagaagtgacaaaacatacctatattgacagtgagttatttgcattgagatatatatgtccatatatatgtgcatatatttatacatttttttccggatatcaattttgtgatctgtcctttgcttctcctt

SEQ ID NO: 500291 - DNA, 201 bp, Homo sapiens
tttggtatttttagtagagatggggtttttcaccatgtttgccaggctcgtcttgaacttctgacctcaagcaatctgcccaccttggcctcccaaagttmtgggattacaggtgtgcacctccgtacccagcccaatctctacaaaaaaagacaccttgtagagattgctattaaaatctttacagatggaaataatata

SEQ ID NO: 500292 - DNA, 201 bp, Homo sapiens
agtttcaactgatgacgtgtttgctgttttggatagcatgggtatccctataaaccgtgaaattttagaagaagtgacaaaacatacctatattgacagtgagttatttgcattgagatatatatgtccatatatatgtgcatatatttatacatttttttccggatatcaattttgtgatctgtcctttgcttctccttt

SEQ ID NO: 500293 - DNA, 201 bp, Homo sapiens
cagtagcaaattagtgaaagtactaaaagcagaaataatggcgtaagctgtctgtctgtctgtctgtctctctctgccttggctgccaggcagggaagggmcccctgtccagtggacacgtaacccatgtgaccttacctatcaatggagatggctcacactccttaccctgcccctttgttttgtatccaataaatatca

SEQ ID NO: 500294 - DNA, 201 bp, Homo sapiens
caggtggtaatgcttactcgccagccacttacctcctactgtgcagacgagttttggttcatgggccagagtttggggacccctggtttgtggaatgtttrtgttatgaaaggtcttgagatcgtaccactgtgcttttagcctgggcaacagagtgagactccatctcaaaaaaaaaaaaaaaaggtttttgacagtcca

SEQ ID NO: 500295 - DNA, 201 bp, Homo sapiens
gggccactaccagtctccgcatcttggtggtagtggtaccccgggcccagctgtcttttcttttatctctttgtcttgtgtctttatttctacactctctygtctccgcacacggggagaaaacccactgaccctgtggggctggaccctacaattattttattatttttagagacagtgtctcactctgttgcccaggct

SEQ ID NO: 500296 - DNA, 201 bp, Homo sapiens
agagtcttggatgtccccactggcctggctggaaaaaggtgtaaatacctccgtcatgctggaaaatctccgccaaagcttatcccttccctcgatgcttygggatgctgcaattggcactacccctttctctacttgctcggtggggacttggtttactccttcagcaccacaggaaaagagtacaaacacatcccagac

SEQ ID NO: 500297 - DNA, 201 bp, Homo sapiens
tgatcatacctggctaatttttttgtatcactgcactccaaactgggtgagagtgaaaccctttcccccacaaaaaaagaaatcttccctggtttaccttytttgaactgttcccaaatcaaatcatgtggacccggtgatcttttcttctgccatatttctcatgaacttactcttcttttgtatttgtattaattttcc

SEQ ID NO: 500298 - DNA, 201 bp, Homo sapiens
ttgagccctgttaaggcttggagtgtggcactagagcaaggaagtactcaggagcacttgctttggagcagaagtttggggagtttctagcctgctgacckcatggtgtcattaggatacttttgttctagatctccgggctcagttgcagattctggccaacatggacagccagctaaaagagctacagagtcagcatac

SEQ ID NO: 500299 - DNA, 201 bp, Homo sapiens; identical to SEQ ID NO: 350057

SEQ ID NO: 500300 - DNA, 201 bp, Homo sapiens
taggcaggagggaggtgatatcactaatgaacctggtacaaggcctggccccaggaggtactaatgagcacagatctggttcccagcctgtgctgagagcygggcctgaatcactattgcaggcttctctgtggtgtctgttttctcccctctaattcagcggctgcctcctggggctgggagccctgggccttaagtctg

SEQ ID NO: 500301 - DNA, 201 bp, Homo sapiens
tgacagttctttcatacatctctttatgtgtgtctattttgtatatatgcacacacacacacacacactcatctttatattgtctttttttttttttttttgagaaggagtcttgttgtatcgcccagattggagtgcagtgccgcgatcttggctcactgcaacctctgcttcccagattcaagcgattctcctgcctca

SEQ ID NO: 500302 - DNA, 201 bp, Homo sapiens
taaaaaataaataaaataggaaaggctcctataactcactgggtgggaggaagaatgaggtgctggtggtacatgttgcctactcaaaaggaacaacttgrctggtcatggtggctcacccctgtaatcccagcactttgggaggccgagtcggtggatcacttgaggccaggagttcaagaccagcctggccaacatggt

SEQ ID NO: 500303 - DNA, 201 bp, Homo sapiens
gctgctgtcgcgggggcaccggccgtgtctactgtcctggaaagttgggtcgagcccggggttgggggcttgtggagtctttgttcgccttgctgctcctrcgcgactagggtgcgagcgtactcttctaatcgcattttgggcttcttagggagggaggaggggcgggctggcagaacccaggcttcctcacactcgccc

SEQ ID NO: 500304 - DNA, 201 bp, Homo sapiens
tgggtggcctaagaactgcctgccctgggcagtaaagaactgatctattgaggtgtcatggttacatctttttgtgctggctcccctgttgcccactgtgkccttgcaaccacttccctcaataggcagagatagtgttggaggctttctgtgcacacgccagccagcgcatcagccagctggaacaggacctagcatcca

SEQ ID NO: 500305 - DNA, 201 bp, Homo sapiens
ctagaaacttgtcagcatgaatcagatgagcagcctctagatccaattccccaaattagctctactcctaaaacgtctgaggaagcagtagacccactggrcaattatatggttaaaaccatcgtccttgtaccatctccactggggcagcaacaagacatgatatttgaggcccgtttagataccatggcagagacaaac

SEQ ID NO: 500306 - DNA, 201 bp, Homo sapiens
taggaaagagggcccagcgggtcagctgtgttagtgtgtggagactagggctagtgacacctccgggtcagctctgtgcccaggaagcacttcaacctgtktggcaggagggatagcaataggaagcacttcaattccccacaactcagacacccagacgggagggcagaggaccaaggctgaaaggagtagagagcctga

SEQ ID NO: 500307 - DNA, 201 bp, Homo sapiens
caaatagctgggactacaggtgcccgccaccacagccagctaattttttgtatttttagtagagacggggtttcatcgtgttagccaggatggtctcgatytcctgacctcgtgatccgcccgcctcagcctcccaaagtgctgggattacaggcgtgagccactgcgcccggtctgtttgattatttttttaataaataa

SEQ ID NO: 500308 - DNA, 201 bp, Homo sapiens
cttaacccagaggatccagcagttaaggaaggacctgtgaatagagaagaaataaccagaaaggtgtggggcctgcctttaaaggagagagactcatgtcytggaagctaagaaaaggaagtttctaaaagaacaatgtggtcatcaatatcaaataggtcaggtaaaacaagagctgaaatatatgcattgcatttgaaa

SEQ ID NO: 500309 - DNA, 201 bp, Homo sapiens
gggtcagacatttcacatgtcagctatgggctgacctgtcttcccaggctgactcaggagagaagtcaggaactctagcagagctctcccaacactgaaaygtgccttgcctggcttggccctggggaaagaattggcgtgatatcaattggtcccatgtgggctaagcatgggtcaggcactctctcctacctcctggca

SEQ ID NO: 500310 - DNA, 201 bp, Homo sapiens
tgaaaagggtttttccccaataaaatagcaattatttttgttttgtaaaaatttttttttttttgagagtctcactctgttgcccaggctggagtgcagtrgcacaatcttggctcactgcaacctctgcctcccggattcaagcaattttcctgcctcaccctcccaagtagctgggattacggtgtgtgccaccacgcc

SEQ ID NO: 500311 - DNA, 201 bp, Homo sapiens; identical to SEQ ID NO: 350061

SEQ ID NO: 500312 - DNA, 201 bp, Homo sapiens
tggtagtgttcgtgtttgttatgtgtggcccaagaccattcttctttatccagtgtggcctagggaaaccaaaagattggacacttctgctatgaagagawgtgctgtcatccagactctgttgttccctttacagagaacaagtagaacagatttagcatcattcttaagggccctaggatttttggaatgggcaacgag

SEQ ID NO: 500313 - DNA, 201 bp, Homo sapiens
ctgaactcttgccaatatatctgctcgcttgcttagctttggactcagttttgggcatagtgattcaattttttttaaatcaacactcattttaccaaaaycaatcttagaattcttttattttaaacatttattaaggctactactcttgcttcctgaaaaaaataattcatcttcacaatgatgaatgatgagaattct

SEQ ID NO: 500314 - DNA, 201 bp, Homo sapiens
atatacatataacactcagcattaaaagaattcctttaagtgggctagattttccaataaagaatataaagccaataaatcaaacataaataagtccctgrtggaatactaggcttacaatatgcacttaataatttcttagtaccattaaaaacctttacattttatgaaagcacatactgaactctattaaactgaaaa

SEQ ID NO: 500315 - DNA, 201 bp, Homo sapiens
agcccatacattgactctggctgcactgcctatgagttagtcctgcaatgcaaggaacggtaccattcaattaaagactgctgtctaataccactggctckccctcatgccaagaaccctcctgggctaagccccaattttagggctcacctgtcctgtaacactaacactataacaaattaggaaatatagtaaaaaatc

SEQ ID NO: 500316 - DNA, 201 bp, Homo sapiens
agaaactcagataatacagaaaatataaagtgaaaagtaaaatagcattactttgtctagctaatcactgatcctaacttgagctgtaggttcaacataayctcaatcaaaagcaagttgttttgtagatattaacaaactgattctaaagtgtacctggagaaggaaaaaacctggaatagccactcaatattgaaggag

SEQ ID NO: 500317 - DNA, 201 bp, Homo sapiens
ccccagagaaagattcatcacctgtgccacctagccttagaatctcaccaccagagcaccttaggcaggaataagtatgtaaaacaggtagctaaatcacmtttagtgctcagagcaggaaaaaatgtttgcttcacctaacaatagtaagaacaaaataaaaactttgctgcaaaaggatcaaaagagattttgcccagg

SEQ ID NO: 500318 - DNA, 201 bp, Homo sapiens
aactactgtctagaactaaagtttcttcagtgttttccagatgtcctctttattcaacctttcatcaatatcacagttaagaaatattttgttatgtcacmttctcaaatattacatttgtgtatctctaacaacacagcacaaaaaatattgcatgtgaactattcaagcaatgtttgttaaattatgctgatttaaaaa

SEQ ID NO: 500319 - DNA, 201 bp, Homo sapiens
agacatgctccaagatagaggtaagacctgaattaattatcaagtttactgcctaatattgaggtgagattaacattaatgaaataatataaaaagcaacmcctatcagtgtaaaaaatattttatgccaacaatgtttaagcttttgagattcttaaaaggtattctatattttaaaataatctatattttaagatcctg

SEQ ID NO: 500320 - DNA, 201 bp, Homo sapiens
atgaattttacaacctaggaatttagggttatgacagggtaatccaatggcctttcaattcttactttctttgttctaaaatttctatcatagtcattatrccctacaatatgcctccagaaaggcttgtgaggaccatacttgttctcctaggttggggttgttactagaatgaagagaagatagagttttctagcacaa

SEQ ID NO: 500321 - DNA, 201 bp, Homo sapiens
acatacaatccactgcaatgtttgtgagatggaagaaacaattagagacagagaactccctacagctaggtagttaaaggctgcaaaattgatcacattcraattcctccaacatgcaaataccatctaggcatgtggtcaagaaattacaaggaaactgagcaaactaaaattaaacttcggcacccactgagacacaac

SEQ ID NO: 500322 - DNA, 201 bp, Homo sapiens
tgcccgcctcagcctcccaaagtgctgggattacatgcatgagccactgtgcccagccgtattagtctgtttttacactgccataaagatactactggagwctgggtaatttataaaataaaagaagtctaattgactcacagttctgcatggctggggaggcctcaagaaacttataatcctggtggaaggtgaaggaga

SEQ ID NO: 500323 - DNA, 201 bp, Homo sapiens
gggtgaagtctttaatgtactttctgtcatagggacttcactaaaggtcactagtaactcaaagcaatgtatctgttctcacttataactgggagctgaaygatgaaaacacatggacacatgggtggggggaacaacccacactggggcctatcagtggttccgggggagggagagcatcaggaagaacagctaatgggt

SEQ ID NO: 500324 - DNA, 201 bp, Homo sapiens
aggcctggcatatgcatcacatttaacacagccctagctcacagtactttatctacttggctagaaaacaaatggccacagaaattcatgctagtcaatcyattttttatatattttggagtaaaaaggatgtaaattcatctgagtagataactagcatacaaagaattcaggttgagtgtgctacaattaaaaatggtc

SEQ ID NO: 500325 - DNA, 201 bp, Homo sapiens
atgggttgatctgtgcaacaaaccaccatggcacacatctacctatgtaacaaacctgcacatcctgcacatgtactccagaacttaaaataaaagttgatttttttttttttttaaaaagcaacgcatcttttatgaagaagcaattcttctttagttttgggaatctattgaacattatgaggtaaaatcaaagaggtt

SEQ ID NO: 500326 - DNA, 201 bp, Homo sapiens
tttctcctctcattacttttccaccatggagattcagactccttaggctgagtcctctgcttcactctgggcctgaaagcacattagtggctctagccctycatagacagactgttttaattttagtggttgcgaggcaggagcgaccacttctggaatggtaaagtaaggacctccaaaaatctactcctccataaaagc

SEQ ID NO: 500327 - DNA, 201 bp, Homo sapiens
atactaaggatttggatcttcatctagcaagaagcagctttgtgaacatatgcacataagtcaaaagggaatatgtgtagttgcctctgtagagaggaacyatggctggaggacagaagcaggaaggagacttacttgtcactgtataggctgttgtgccttttcaattttatctttgtatgtctattacctatttaaatg

SEQ ID NO: 500328 - DNA, 201 bp, Homo sapiens
agggaggatttctctgagaagatattgtctaacctgggagagttgagctaaataggtgcaaagaaggaggaagaaccttcagggtagaaatgtgcatatgytgtgtagagtttgggaaaagcaaggtaggatctacaacaaaagaatatgtctaggtacagtgtggctggaggagaggaaactagagaatatgctgagaaa

SEQ ID NO: 500329 - DNA, 201 bp, Homo sapiens
ttcaaaaagaggtgacagataattatgatactgtataaatattaaatgcaattgtgatgttataactactaagaagtaatttaattttctgaatacatatytgaggaatcctacccccaacccccaacctctgcgccaggctaaataagcgaggtaaacactcatgacacaaggctatgcagcattcacacttgaggtcaa

SEQ ID NO: 500330 - DNA, 201 bp, Homo sapiens
ttcctgaacaggacaagcagatcactacaattaacacctatcgtgaatttacagggattcaggtagaaaataattcatgttaaacagaggttccaaacatyattaacagagactgagaaattgggccagtatgcatgagagcacatatcataaaggtcatgtgtgttaatgagaaaaagactatttattagcttgcaattt

SEQ ID NO: 500331 - DNA, 201 bp, Homo sapiens
tataattttatcacaattttttgttaaatcaacattaatatatacattattataaattattagacctgagccacatagtatgccagggttacatttctttyttttttttttgtataattttgtattccctacagataatcactgccttagctttatctttttttaggttgcttaattttctatctacctacaataatttat

SEQ ID NO: 500332 - DNA, 201 bp, Homo sapiens
tatgaaataatatgactttttaaattgaaaaatgaatggctagttggtgaaagagtcaggactagcactcagatcttccagctgcaatcgtctctaccctrtgcattagtgtctgtaggctctggggtgactggggatggagaaagcaaaagagaatcaataaaattaactcagattttttttttctggtgttaccaccaa

SEQ ID NO: 500333 - DNA, 201 bp, Homo sapiens
acttcatcatctgttcccttttactatccagtcccttccaagggtatcttctcttgcttatttagaaaatctgtgtgaaacactcaaaacaaatttcatgkttatatcttactaaaattagagaaataaaatcaatcactttgagtccttctatgctttaattaaatgtatcctcttagcaaatttgtttttaatccagtg

SEQ ID NO: 500334 - DNA, 201 bp, Homo sapiens
aggtaacaaactacaaaaaacaggtaacaagggccagagactggactaggttggtatttctttttgttcaacaagtatttactgccagagactggactagrttggtatttctttttgttcaacaagtatttactaagaaactaaaatgttagaagcttcaggggatacaaagataggcaacttccctgaaataattgagaa

SEQ ID NO: 500335 - DNA, 201 bp, Homo sapiens
tatacagcctaaatcttctggcccttgtttgcttattcttaaatttcatgattacattctccctgcttcaaaaaattctattaccgtatgaaaaactattmaccagccttctattgactctagtaaaacaattattgaaaaaaggaacagagtcccataaagcatgtgcatggaaacaaatataatcccttcttggcacag

SEQ ID NO: 500336 - DNA, 201 bp, Homo sapiens
gaaaattatgatgtattcaaagaccacaactataggagaaaatgccatactgctaaatgtttttcagttgacatgatcttttaaatcatctctattgatcyctttatttaagattcgatttggctattgtgagaataatgaacaaataaatgaatgtgatatccatttgatatctagtatttcaccaaaaaaaaggaataa

SEQ ID NO: 500337 - DNA, 201 bp, Homo sapiens
tcctggggtgtttcttatattatcagaaaaacacactagggctcataacagtcctgtaaatgaaaactaatcagtcacaggacatatctagaaaatgtagrtaaaatatgaggaaagaagcttaccatcattgtaacatttaagaaaatcacaagcaaatatctgtcgttcactgttctgttctaaaatttcaaactgttg

SEQ ID NO: 500338 - DNA, 201 bp, Homo sapiens
atataatcttcctcctggggtgtttcttatattatcagaaaaacacactagggctcataacagtcctgtaaatgaaaactaatcagtcacaggacatatcyagaaaatgtaggtaaaatatgaggaaagaagcttaccatcattgtaacatttaagaaaatcacaagcaaatatctgtcgttcactgttctgttctaaaat

SEQ ID NO: 500339 - DNA, 201 bp, Homo sapiens
tttctggagtaacagtgtcatttccaatccctagtaaaacagcagatataatcttcctcctggggtgtttcttatattatcagaaaaacacactagggctmataacagtcctgtaaatgaaaactaatcagtcacaggacatatctagaaaatgtaggtaaaatatgaggaaagaagcttaccatcattgtaacatttaag

SEQ ID NO: 500340 - DNA, 201 bp, Homo sapiens
ttaattttattgcagagatgtttgatctgatcaacaggctatatcatcatataattattacaagtaaaaacctttaataatggaaaatatggtaataaaayttcaagaaactatgatctataacactaattgttccacataatttgtcaatggcacattgatatgtatttttctctctctttcatatttctatatctagtt

SEQ ID NO: 500341 - DNA, 201 bp, Homo sapiens
tagaacattaaattaaaccctaagtggcttgtgtggattggtatcagttggaaacttagctggtggagtttcatgagctttagatgagggtaggaagggawaaggggcttgatagattttctataggttttgtgtgcagcgcagccagctagacttgagatgcagtggatgatgccccaacccagggactctccaagggaa

SEQ ID NO: 500342 - DNA, 201 bp, Homo sapiens
cctgagcaactgaactgctactcaatgtgatcagttgagggtagaggagggcttacgcagttgctttatgccaatttcttatctcaggagtctgtcaaatraggatccacttcagaaataatcaagttgccaaggacaatcttggtactagaaaatatataattctcccaaattattttcccattaagtcttctgctaatc

SEQ ID NO: 500343 - DNA, 201 bp, Homo sapiens
aagtatgtttgtattattataaataagttatccaaaaatattataacgctataataaaatgcttcagagaactgctatacataggaaaaaggataaatccsactaacaaacctttgagcagtgtttttgcttaggtttatacatattagagtagtctactgcaatttctatagatcacatatgcagtttacaagaagcctg

SEQ ID NO: 500344 - DNA, 201 bp, Homo sapiens
atatactatttagatcttctctgggtaggcattttccttcttggaataaataaattggaacattagaataggtgaactaagctctcttctaaccaatctcyaagccatttgaaatgccaatgtggtcaataaaaattttttcactagaaagccttgcatttatattcctctgtctctctgtctgtgtatatatataattgc

SEQ ID NO: 500345 - DNA, 201 bp, Homo sapiens
ttcaagattacctttctttgaagaaagaagcaactcatcaaatttttatttaaaacatccaaaaaacaactgctggctattcttataccccgtgaagtaayacactgacagttcaccaacaaatttggatatgtcagggagccaaaccttaacaaaattccattttactttttattttatttccagtactacttcgtttta

SEQ ID NO: 500346 - DNA, 201 bp, Homo sapiens
cagaatgataatggatttgataataaaatcaacaatttgttccaatggactgccaagtaagtaagaagatacaataggaacagcatgtaccctagatgagscattaggtgaactcttcccacttgctctcaagtgtcaactgagcatcgcgtcagggtgaatgctgagtctggtggttgcaaagacttaagtaatactaag

SEQ ID NO: 500347 - DNA, 201 bp, Homo sapiens
gcacactgaaataatattaggttaatgtttatttataaagatagtaattgatgaatgaaaatatatgttaatttatttttgttcctgagagagcttttgaraagtatcagctccattctccatatcccagattctgacaaagggagtaggatagagcctgctcgtctgtgtttttaaaaagctcccagctgagtcctctct

SEQ ID NO: 500348 - DNA, 201 bp, Homo sapiens
aattaactccaggggccataagatcaaagtaagaaggaagtagcttgtctttctctttagttgtggtagctactttgtattacataggcaatataattcaytgtttcttatataaccgcttatgctattttacattgtactaggcatctgcaaacaaacaaatgttatttcttgttccaagttaggtaaaacttgtaaata

SEQ ID NO: 500349 - DNA, 201 bp, Homo sapiens
agtaactagctaccctagtccctccacacagacctaacctcctgccagttctcaaggggctcatctgagtctgagcctagaaggcattttcacattttagsgtaaattatgcttacatctcccatgcggtttaggaaagacttaattgtcactgtcatcttataaatatatatcagtgatgatacatagatatgatcttaa

SEQ ID NO: 500350 - DNA, 201 bp, Homo sapiens
ggcaaacatggatagtttccattaaaactatggagattttataatttgactcattagcatgcttttctcaaaaagcctcttactactgatcacagtttacraaattgttgcgctacagggaatgtatagatccaggccaaacaactattttgcacagaaagaaactggggtttgtggacatttgatgagattctgaaggtc

SEQ ID NO: 500351 - DNA, 201 bp, Homo sapiens
actgatgcctataggtcttgtacacattgtctgctaaacatcaactgaaaatataagctacaaagtattcccgtgggagaaaaaaaaaatcttccaatttrgaataaggtagttggccaaaagcattttttggtactttgttgaagtgtctgagttttttttctaagaaacacacgtgcacacacatacctacatacacac

SEQ ID NO: 500352 - DNA, 201 bp, Homo sapiens
caggaggaaagagggagcttttttaaaatgggcatagagttttagatttgcaaaatgaaaaagttctgcagacctgttttaaaacaacgtgaatatacttracactactaaaaagtatacttgcaaatggttaagagggtaaattttgctgtgtttttcaccacaatagaaaaaagggccacttattgtttgagtctatct

SEQ ID NO: 500353 - DNA, 201 bp, Homo sapiens
aaaatacaaaacatgatgacattacaaacatttcccttctttaaaaaaaagtctttgctgtatacaattccgtaactagaacttgataatctgtttgcaaygtgtcccccagcgacaagcaagatgatttttcaaaagttgactgtaaatgctacatttttcaaaggaaagatatataaaagtgtgtgtgacaaagaccta

SEQ ID NO: 500354 - DNA, 201 bp, Homo sapiens
gatttatattttcaaatttgtagaggtctaaaggttttcaaggcagctgtaaacatatacaatttctcaagtggaggtttccaaagactgggaatgcaacygataagatataaaatcagaggagaaacagtggaaaagtaaacataatataagagaatcacaacatgtaatgcagtcattaatttcatgagtctccttgga

SEQ ID NO: 500355 - DNA, 201 bp, Homo sapiens
tctgcaatcctattcttaggaatatatccaaaggaactgaaatcagtatattgaagagatatttgcactcttatgtttatcacagcactattcacaatagscaaggtatggaattaatccaagtgtccatcaatggatgaatgaactttaagatgtgagatacatatatatatattatttcaccataaaaaaagaatgaaa

SEQ ID NO: 500356 - DNA, 201 bp, Homo sapiens
aggtgacagggtactggaaagagaccacaggaatggtaggacaactaaggttgtttttatagaaatcatgaaatgttgttaagctatagcaataaatgtakcataattgttgctaagttatttagtattattttctttttttaaaatacattcaagtgtaccatgaaaaatttcagtattcaaagctgtgtccaaaagaga

SEQ ID NO: 500357 - DNA, 201 bp, Homo sapiens
aggcatagtaaacttcacagaggtgccatcacccaagctgacccaaaaaataaccagttatttttgtcaaaactaagaagacattaaattattacatccaygtttatcagaaaatgtaccaacattctgtacaccagcattatataaatgggggtactctgttataagtcaaggataggaaatgacatcaagtggcaccaa

SEQ ID NO: 500358 - DNA, 201 bp, Homo sapiens
actgaacaataaggattgccagaaaactataaacagtgatgccatataataatatcctaaaagatgggtaagaggaacattgacattcctatttatgctgwtacaattctagctagaattgggaattgataggtttaagaatgtgaaatcaacttcactcttcaatcatttcagttgtgaaccctctgatactgaaaaagg

SEQ ID NO: 500359 - DNA, 201 bp, Homo sapiens
atgtattattagcgtcttctttgttatgggccataaaaaccattaactataataggttctttcagtcagtaagtatttattgaacatctgctctctttaargcacaactataagaaccacgagaatataacagagtcaaaaaacaaagtcctgaccctgaggaacctgtgcagaggatgaagcaagaagatacatacggaa

SEQ ID NO: 500360 - DNA, 201 bp, Homo sapiens
agagattataaacacaattactagaagtctgtccagatcagctccatagtggttttatggagaatgcctattgaaatagatgagtttgtgtcttagccttraaggatgtataggattaggataggtaaaaagagcagtaatggaggggcatattaggtagtgggaacaaaatggacataatctctgagataggaatgaata

SEQ ID NO: 500361 - DNA, 201 bp, Homo sapiens
tcagggctaccctgcagtctaagccagaatgttaggtaagagagaaacaaacctctaacatttttgtttcagcgctttacattagcttaaacatttatagmcagctaggttacaggaaaactcctgaaattaaataaggaaataaaatcaccagtgatgtccttcacgatactgaactgcctggaaaaaattgactttaat

SEQ ID NO: 500362 - DNA, 201 bp, Homo sapiens
gcactagcaaaactagggtgacagctcataaagaaaataaccaaaagctctcactttgtccaatgacgtggcagccctccagcactggcatttcctgcccyaaattaactccaggggccataagatcaaagtaagaaggaagtagcttgtctttctctttagttgtggtagctactttgtattacataggcaatataattc

SEQ ID NO: 500363 - DNA, 201 bp, Homo sapiens
tttagtagagacagggtttcaccatcttggccaggctagtcttgaacttctgacctcatgatccacccgccttggcctcccaaagtgttgggattgcaggygtgagccactgcgcccagccaccctattacattttttaaaagtcctaggagtaaatagatttttccatctcatggtagcctgagatatttgtttctttct

SEQ ID NO: 500364 - DNA, 201 bp, Homo sapiens
gacatgatagcttggttataagacaatgagagtaatcaaggatgggttccagatttttggcctgagcaaatggttaaacagtggtacagtggggccacttyggagtaggtttactttaaacaagggtcctattttaatatgatgaattcagagccggcaagcaagtcccagagcaatgttcaattgtactatggtttagtc

SEQ ID NO: 500365 - DNA, 201 bp, Homo sapiens
atcatcaaagacctcttatctcagaataaaagatggcttcagtgcccatcctgttatcctcctacagccctcaaacctcccaatgatgtgactgacagacrttaccattatatagtaaatagtaggtcagttgcttatatgtcaccctacaattttttttttttttgagacggagtcttgctctgttgcccaggctggagt

SEQ ID NO: 500366 - DNA, 201 bp, Homo sapiens
ttatagagagtaggaatcaatgggatcaatgtgtacacagggagaaggagaaaggagaatgaggctgagagggaagtcagttgacaccactaggaggtctrccactgaaaggggctggaagaatgtcttgggttggggtcttcctacctctgctgtggttagtcattggatggggggagctccagaaatgggagtgacctt

SEQ ID NO: 500367 - DNA, 201 bp, Homo sapiens
caaaatacaacctattaggaggcaggcatagtataggtcagtaacaacttgagcatgtaccttgtatgtttctttgaaacctatctgcctgaagaagtatyacaaacatatcatagcactgggaattcattttaatctacatatttcttttaaagtttgttaagaaatatgcattctgaatagacatctagtagtgagcat

SEQ ID NO: 500368 - DNA, 201 bp, Homo sapiens
tctaatgcacaccgagtcctgtggcacactactagctgtcccctcaatgcattctcctagtcttgctgggcacacagcagctcagctagggactacatttyccagacttccttgcagtgtgaggtggacacctaagtttgggtcaataggatgtgcgaaaagtgaggaatgcaatttctagttattttcaacttaaagaca

SEQ ID NO: 500369 - DNA, 201 bp, Homo sapiens
ttgactgtacacagtcagcaataactataaaatttattgaggcatgtgtttttcataaaaacagtgagtatgttgaggctataatttctccgaagatttayctttttctattattctttagtacacacatcctatagccactttttttctagttcataaaatcttattccaaataattaggtacccatttaaaatggaaac

SEQ ID NO: 500370 - DNA, 201 bp, Homo sapiens
ctgtcaaactgagttaatcaaggaatacaaatgagttgaaaacctttttgctgccatccttttacagcatatctatgcttcaaaaccatccctcctgagawtgataaaagcatttacttatggcaatcaatatagaatagtcttttttttttgtatacatgtctatcatgtcctcccatgtataaggccctagagagtagt

SEQ ID NO: 500371 - DNA, 201 bp, Homo sapiens
gcaatgaataaaaagattctgtgcatgtataacaagcattctgtattttactttatctgaatagaattttagaatctacatgctttaattggggcactagyaaagtaataatctcaaatatgaaatacaatagatgcgtttcatgctctgattaaatgtcaaggccacagatttgttatttcagatctagtgagtaataat

SEQ ID NO: 500372 - DNA, 201 bp, Homo sapiens
actaaatcttggctcctgacctattatcagtaaatatatatttctaataaaatgaatgtgtttaattctgtaattaaacggcccaaaggaacagtatctgygatagcaatgaagtctaatgacaattctgctgacattcttctatctaaaaatgaaatcatgtggaaaatgatttctacactagcagaataattaagacat

SEQ ID NO: 500373 - DNA, 201 bp, Homo sapiens
cagtccaattaaaaacaaacaaataaaatgaaaaacagatatgtcttctaccatcaccatttttgccatgtggaaacttctcatgaacttctcactgcccyaggcttgagtgaaaggcttgctattttgaggtggagactcaaatagggcaagagttggtgaagtatggctgctaagagatgtgagggacttataaataat

SEQ ID NO: 500374 - DNA, 201 bp, Homo sapiens
ctcaggacgctgaagcaggagaatcacttgaagccgggaggcagacagaggatgcagtgagcggagattgcgccactgcactgcagcctgggtgacaagascaaaactctgtctcaaaaaaaagggtctggtcactacactacataattatttccgtgattaaaaaattaaaccaaagtttccaaaaattatttatttgaa

SEQ ID NO: 500375 - DNA, 201 bp, Homo sapiens
gttatgtaggcaccaattacatcttacaagtaaaataaaggcttcaacctcactttaaaaaaaattctaagcacttatgaaattgctaaattaataacccstgcatatgtttcactaaatcttggctcctgacctattatcagtaaatatatatttctaataaaatgaatgtgtttaattctgtaattaaacggcccaaag

SEQ ID NO: 500376 - DNA, 201 bp, Homo sapiens
aaaaagtcacaaatactacttgaaaaaatataacggtttaaccagtaatgcccatctgggcaaaaaagctatttaagtaccatgcactttgatgaatgacstttaaaatagccttcctcattttatactattacttttcagtcagtgcaggataacacattaaatctaaaaacaatggcccagtgaaaccaagctagtaga

SEQ ID NO: 500377 - DNA, 201 bp, Homo sapiens
ggctcggttacaatccttctggaactgattcaaataccacctttgtaaagtctttgctgaccaccaccatcagtcaccatagttgcttctattctgttttyccactgaggtacatattgtaccttaatcatagtacttaacatactaacactggttattgttagatgctattttgggggaaggaggcctgtaataccacca

SEQ ID NO: 500378 - DNA, 201 bp, Homo sapiens
actggacttccacagagattaacataaaacattcctttcactgaagctcttctatttgctatcacatgaattcaggaaatctcttctatttgctatcgtaygtattcaaaaaaatcacattgtctagggactcgaagacggaactggatgtcagggaaggcttccaaaaagataatcaaaaacacattgtttacacagaag

SEQ ID NO: 500379 - DNA, 201 bp, Homo sapiens
cactcatatataaatacatgtggatttttatacttttataaaatcccccagtggggattcagaatgtctttagagaagacttttaaagtcaattttttttwatatattttatttatttttttttagaaatggggctgtgttttatacttttataaaatcctccagtggggatccagaatgtctttagaggagatttttaaa

SEQ ID NO: 500380 - DNA, 201 bp, Homo sapiens
gagattgtgagaggtcaggaagacaaaataggtaaggaagaagggaaagttaatcagtttccaaaatacttattacctgctatgctgagaaaggatatgayggcatttgcaaaaggataggctgttcccctaaattaccttgtatacaaaggaattttcttaggaatctttttttgttcttaattaataagactgattggt

SEQ ID NO: 500381 - DNA, 201 bp, Homo sapiens
attcggttatattattgggtaaatatgtctcaggcatcatgctgaagattcatcttagaacaaaatatacaaggtccctgctataatgcagaataaaactyggtgaacaggatggacattaagcagagataacacagataaatgtaaattacacattgtaataaacaccagaaaaaatataaagccatcaatgtgacatga

SEQ ID NO: 500382 - DNA, 201 bp, Homo sapiens
gtatatgttgatgtgattacattacttgactcttgactcaaagagattatattactcaacccaaaaagcagttgtggtaatcactaagtaatttttaaaawttatataataatatatggagtattctttatttaaagatggcaaattccatcatttatctgacaggaaaagtttatcctaaagacaagcttatcctaagaa

SEQ ID NO: 500383 - DNA, 201 bp, Homo sapiens
atacagccatgcaatgaaacactatgcgactattaaaaattatactttcaaccgctgggcatggtggctcacacttgtaattccagcactttgggaaaccraggcaagcggatcacaaggtctggagattgagaccattctggctaacacgctgaaaccccatctctactaaaaatacaaaaaattggctgggcagagtgg

SEQ ID NO: 500384 - DNA, 201 bp, Homo sapiens
ctagcaactctttatttctggtaacattctaaaatgttttatttggaaccacttattatggcagatgataaaaatctaggctcagttttatcacctccacytaactcctaaaatagatgacataaattcaataagaatctaaatctacttatcttcagggtacaatacaaaatccatctacttattcaaatttttgattaa

SEQ ID NO: 500385 - DNA, 201 bp, Homo sapiens
atcatgaaaattttataaataaagatatcccaatgatattcattattagaaacaggcaaaaatggttaaacaaattataatacagccatgcaatgaaacaytatgcgactattaaaaattatactttcaaccgctgggcatggtggctcacacttgtaattccagcactttgggaaaccaaggcaagcggatcacaaggtc

SEQ ID NO: 500386 - DNA, 201 bp, Homo sapiens
ttttctaaaaatgtgtttatagcaacatttctgaaaagcacaatggcaataacataaccaaaaggcttaaaaatgtttatatatcgtaagtaaacttcttmgacttctaagagcccagggaaagaaactatgatatcatgaaaattttataaataaagatatcccaatgatattcattattagaaacaggcaaaaatggtt

SEQ ID NO: 500387 - DNA, 201 bp, Homo sapiens
tgttgaggctataatttctccgaagatttacctttttctattattctttagtacacacatcctatagccactttttttctagttcataaaatcttattccraataattaggtacccatttaaaatggaaacagaccatgtgtgcccgcccacaagtgttgttccttgcaggaagctgctttgattctaggttgaaagacat

SEQ ID NO: 500388 - DNA, 201 bp, Homo sapiens
agaagtcacaccagttttaaaaggtagatgagtgactcaaaagtcctactgaataaataaacaaaggtgctcaagaagtgtttcatctattactgatatarcataaattaacatttaatagaaacttaaatttttaagaacaaactttaccagtctgaaaatggtaactattgttccacagtacaagtcagtgctagaagg

SEQ ID NO: 500389 - DNA, 201 bp, Homo sapiens
tctagttcataaaatcttattccaaataattaggtacccatttaaaatggaaacagaccatgtgtgcccgcccacaagtgttgttccttgcaggaagctgytttgattctaggttgaaagacattgattaatgtgagaaggcttgcctgcttttcagagcatcggtcccctaattctgtacacatacaaaatggactctaa

SEQ ID NO: 500390 - DNA, 201 bp, Homo sapiens
aatgtatgatctcagaatctgtgagagtaacacctaagaatccatacttattttctgcacaaagttacagaattattgggttaagattcaagtctttttcytttgtccactgtctaccatttttgttgtagatttagtaaaaaaaaaaattacttgagacaatcgttcgaattaatacagaatatacataggtacaacagg

SEQ ID NO: 500391 - DNA, 201 bp, Homo sapiens
agccaagatcaggagtatatatatataataatatgcttaaactttatatataataaaatatatgtaatgaaaatatatattaaaatatttataacatatayagatttaaaataaatacaataagtgcatcaaactttacagttttaccacatggtacaacctgattagtataatattatttaataaataatataatgataa

SEQ ID NO: 500392 - DNA, 201 bp, Homo sapiens
actagctgaactgactcacttaccaaacacatagtttatatttgttcctcttattgtcatttattactcacgtattttttacacaaacaccacagttgttkaaagagtttcataaggtgatgttcagctaactttttaaaatcagtgaggcattttccaaaccatttcctcaatcaattactttttaatgaggaagcaaaa

SEQ ID NO: 500393 - DNA, 201 bp, Homo sapiens
agtttttcttttctactgcatcatcaggctgcaaattctccaaactttctactctgttacctcttgaatgctttgctgcttagaaatttcttccggcagakatcctaaatcatctctctcacgtttaaagttccacagatctctagggcagggggaaaatgccaccagtctctttgttaaagcataacaaaagtcatcttt

SEQ ID NO: 500394 - DNA, 201 bp, Homo sapiens
atcacagctattgctatgcctgagttaaatttaaaaaaaaaaaaaacaaaacaaaacccacaaccaacatctattcttggagaaaaagactgtatgttgtyctacctactcatccatatgtttgtctgacagcattagcactttgataaacagacacttggcaaaggtctcaaaaactggaaaaaatgagatgagtaaatt

SEQ ID NO: 500395 - DNA, 201 bp, Homo sapiens
caacctatcctgtgggaagatagcaccattttatacctgattaaaccaaaatgtaaacaaattaaaccactcacctcaaattcaagcagttaattggtgasaggccaaatacgaaaacaggttctcaaatttcagcatgcatcagaatcacctggagtgcctgttaaaacctagatttctgggccccatctccaaagtttc

SEQ ID NO: 500396 - DNA, 201 bp, Homo sapiens
aaatccccccaaattcacagatatgtacaaaaaagagaaatatttattcagataatcaaatattctaaaaggaaaagccaatattcaataatagaagcaaygatttattaagtatataacacccaaatatttcaaacccataattcatcatttgaatatagtttaccatattctgtaaagtcataaaaattagagttttgc

SEQ ID NO: 500397 - DNA, 201 bp, Homo sapiens
taagttaaatgttattacttaattagcagcccctgaaaatgggcagaggtgaggtatctgttggtgaatctgaaggagatcattaaaagaaagctaatagyagactaaaaaatgagttcctacttctagcctcagtaaggatgctcctctaaaatgatttaaaataatgtggctccagccagtctgaagaaacactagaca

SEQ ID NO: 500398 - DNA, 201 bp, Homo sapiens
tcaatcccaatttgaatagaatatttttgaagttaatatatataaaatatacaaatatatgttagtgctcgacagatgttattttatccattttatatgcmttgtggagcttaaaaacttaacaagacatatactccctctaggagaatcttatatgctaaaaggggaaacaggtaaaattacagaaacaattataatacc

SEQ ID NO: 500399 - DNA, 201 bp, Homo sapiens
actgtgactcaacagtgtaatactgtcttagtctgcttgtgctgctataacagaatgccacagattgggtaatttataataaaaaatatattgactcacasctttagagactgggaagtccaatattaaggaaccagcaggtttgatgattctgatttcaagatggcaccttgaatactgcatcctctagaggagaatact

SEQ ID NO: 500400 - DNA, 201 bp, Homo sapiens
gtcttgtgcataaaactaattcctttttaaaaatagtattttatttttggcatcccttgttgctgactatattgcattggttggctcagccatccatcaarcattcatttattttacaagtgaatattgagtaccttgtgcagtagaaagagctttggctctgtaagcagacagaactgagttcaaattttagcctcatta

SEQ ID NO: 500401 - DNA, 201 bp, Homo sapiens
ctaaaggatgggaataatatatcaattttgggtagtctctatatacacaagtatatcctacttaaattctttccataatggggcatcctcttcataatccrtcttatgatcaaataccaaatttactttgatgtgacaaaaaaaaggtattgtgaataatgaacttcaaaagaaagagcagtgagatggttaggggtaatc

SEQ ID NO: 500402 - DNA, 201 bp, Homo sapiens
ttccatgctcatggataggaagaatcaataccaagaaaatggccatactccccaaagtaatttatagattcaatgttgttcccactaaacgaccattgacrtttttcacagaattagaagaaactattttaaaattcatatgaaacccaaaaggagcctgaatagccacaacaatcctaagcaaaaagaacaaagctggag

SEQ ID NO: 500403 - DNA, 201 bp, Homo sapiens
actataacaattttttatttgaaaaataatgtttaaatctaacattattttctacatataacactgataactgtggttcactgtgtaagataatacatgtyattttcttcttctaattcaatttggaaaccaactccaaatgaatagaatatgtcagtgaaatatctcattgaagaaggattaacacagtaaactgtactc

SEQ ID NO: 500404 - DNA, 201 bp, Homo sapiens
gattctaaaagagaaaaatccaacaaaggcttaacttggttggtagtgtttcacacagaactcataataattccaactgacagctgtcatactaaaagagycatcttaataaaaatgaataatatgaaatagtccatattacatattaataggggtgttattcaattactgtgttttaactgaaaattagtccaaaagcct

SEQ ID NO: 500405 - DNA, 201 bp, Homo sapiens
ctgggataggaggaaggggctgggtcctgcagactgttacagactgggtttcgtgctaagacttaggatctaagtgaagcctggagcctttggatggattygagcagaagagtgacatgacaggatttgcagttttaaaagatcactgccattgctgagccaacagtgtggtaaaagagaagcctctggattcccagtgtg

SEQ ID NO: 500406 - DNA, 201 bp, Homo sapiens
taacacaaaggttaataaagaaactcttgaaacatcaacaaaataatgataactaagagttgttccattatgcttcctgctaccacaaatctcaatgatgragatatttggagcaatacattaaaagattagttaacatgtcacccctcatgtgtgggtgatcacagagtacaatgtacatacttgagaagaaaaaaaggt

SEQ ID NO: 500407 - DNA, 201 bp, Homo sapiens
tttgccagttccactgaggagaagagaaatgcaaagatcaataagctcagagttttctttcaagaaatgtaacaaattattaaataaatatggtttatcasaggtaaatgtgtatttagaggcatgtacaaaatgctaaaggagactagaaggaaacttcataaaagagataaacatggaactagatcttgtaaggacata

SEQ ID NO: 500408 - DNA, 201 bp, Homo sapiens
accaccatcatacatgcagctcattgttaactgaaacatcattatgtggctcatgactgtatgtaaactgtaatttgaattctacaaaagtgggattaagstacattgtccccttggccagttcactacagagcagaatatggtacaaggtaattcatttttagacctaatcaagagagatgatgttaactaaaacaacaa

SEQ ID NO: 500409 - DNA, 201 bp, Homo sapiens
cagattctgacaaagggagtaggatagagcctgctcgtctgtgtttttaaaaagctcccagctgagtcctctctgcagccagattaagaactcctgccctrtaatctcctgactgttaatgacttaagggcccggggtaaaataaacttttatctttatcaaattgttatatttttatcagctatatttacactagtttct

SEQ ID NO: 500410 - DNA, 201 bp, Homo sapiens
acaggagacagcagataaattactctcccttccttccttgtcctgagacgttgtttatgttgcctttgaagatatgattctgaaagactgagcaatctatyatgcttgatactgagcagtggtcagctcagtacctcattctcatttttgctttcctgacatccttacctcattttccttttcctaaatgtgaggccattt

SEQ ID NO: 500411 - DNA, 201 bp, Homo sapiens
aaatagatagcatacattgtactcaatgtgaaaatatatgccgatttttgtttctatggtaaatgttattacgagtttaaatgacatccttgaaacataayatataccattatttccagtgaggaaatcaaaccctggtttagaggcccttcttgtaataacaagggattataactcagccccaccattcctataattacc

SEQ ID NO: 500412 - DNA, 201 bp, Homo sapiens
agtatttatccaagaggcagaaacaatctctgaaatacccgtagcaagatgtccctagctaatgattcctatagtaaacagaacgcaagatttatgaggtwtatctccctagataatattttcaacagatagaactgtctagagtattaaatggagatgtttcataatttaaatattcctgctatgtgaagtaatcccatg

SEQ ID NO: 500413 - DNA, 201 bp, Homo sapiens
gcttttgtaaaataatgtgtatacaccttaatctctagattgtgtgttcatgagcttttattcttccatcaactttctatagagagtaggcactgagcgcrtatgtcgtgatgtgaagtaattaggatagcaattaggatagcagtggaaatggtttcagacagtacaggctggtttcctttgaacagaaatgtgatgcca

SEQ ID NO: 500414 - DNA, 201 bp, Homo sapiens
ggggcggggggagggatagcattaggagatatacctaatgtaaatgacgacttaatatgtgcagcacaccaacatggcacatgtatacatatgtaacaaayctgcacattgtgcatatgtaccctaaaacttaaagtataataataacaaaataaaaaaaagaaaaaaaaatcagttctgactggagaagttagcaaagga

SEQ ID NO: 500415 - DNA, 201 bp, Homo sapiens
cctgtctaaacaacagatttgttataactagtcatggtatcctcaaagtctttactctgggaactacactgattatgccagagttcaccttatcactgacrccacaaaggcatttcagacacggatcacacttgcccatcttgattttacagacaggaaaccagaaacgacaatttgtatgaaaagtggaatccaggcttt

SEQ ID NO: 500416 - DNA, 201 bp, Homo sapiens
gttgaaatgaggagaaccatgggaaacagcttaaataggaatgaggaggagttcttctttggatatactgggtttcaaatctaagtaaatatcgaaatgcwgatgagaaggggaccattggatatatgagtctggatatataggaaagaagtctgggatagacagataaatttgggagtcatcagcatatcaatggtattt

SEQ ID NO: 500417 - DNA, 201 bp, Homo sapiens
cttacagtcaccaataaatagttccagattcttgaaactaattagtgttaattaggtaggtacacatatattttaaatataggcattctaatattctactygtatgtaatacaaccataagttttagaaagaaataacactgcctacttttccacttaacatatttatattttccatttaaatttttttctgacttgtttt

SEQ ID NO: 500418 - DNA, 201 bp, Homo sapiens
tcagctgccaacgtggctagaataaagcaggcagaagacaatggaaagagcagactcgctgagtctcccggccttcatcttcctcccgtggtggatgtttyctgccctcgaacatcagactccacattcttcagcttttggacccttggacttacaccagtggtttgccagggactctcaggctttcagccacagactgaa

SEQ ID NO: 500419 - DNA, 201 bp, Homo sapiens
aagaatcaagggaaaagaaaatatatggggaaaaatttatcttaaatgattgctaagctttctgaccaagaagaaattgctgctaacagaaaaaaacaatkaatggataatcaaagttatacaacctaaagtcctacatgttagagtcctacatgttagacacttctatcttttctgtatgactaaaatgttcaggatgaa

SEQ ID NO: 500420 - DNA, 201 bp, Homo sapiens
ctggcaagccaatttaaatacaatagtgaacttgttaagtataattttatttttcaaaaaaatcaatatttaatataattggtattattgcatttgtttaraaaatcttctctgaaaataatttactgggtgtttgcatcatcttcatttagtttgtaggtcttttgcatatgctagtatgatagttatatagggaaaaat

SEQ ID NO: 500421 - DNA, 201 bp, Homo sapiens
ctggggaacatctagcagctcacttatcctggcaggcatatctggagacctgcaaagggtcatcattaaggcttttgggatagctatttgtgtgccatagrtaatactttctctaaggattttcaaacacaaaactatgtctgatttgttctaacttgatgtttgaattcatcagtaatccaagtactggagcaaactcaa

SEQ ID NO: 500422 - DNA, 201 bp, Homo sapiens
gatacaaccaactaaacgaaagagacaggcttacaataaaatattatcctaatcccacaataagaagttattttggggcagagactgcttttttttttttytctcttttatcccctaaaaagctcaggaaaacgcctggcctaaagaagcttctcagtaagtgttggctgaatgaaggaatgaataaatatcacctccaag

SEQ ID NO: 500423 - DNA, 201 bp, Homo sapiens
gatcttgatatgtggtaaaagttgatgaatggaaaagatgaaggctcaagcacaatgaatttctttttttttttttttgagatagggtctctgtcactcargctggggtgtagtggcatgttcacagttcaccgcagcctcaaacttcagggctcaagagatcctcctccctcagcttcccaaacagctaggactataggc

SEQ ID NO: 500424 - DNA, 201 bp, Homo sapiens
ctgatacacatctcctactgcttcagggacaaactggtagaggcaggcaggcccactttcagccaatcaaagaagaaacccccaaactctgaagggatgtkgggaagagaagagaaaacagcttgcctaaaagaagaggttgggttgacaatgtatcttgatggtcagcgggaaatagaaggaaacctgaatttgtagtaa

SEQ ID NO: 500425 - DNA, 201 bp, Homo sapiens
ttctaattaaacacaaatataaattttaagacacccaccaggataatttcaaaaagtggcattatattaagactcccccagaaagaatgcctcatctttartatttccaaacctctagttaacttaaagaaggatataggtacctctctgctctgctggagaaagcagacctaacgaattaattgacagaagtaatggttt

SEQ ID NO: 500426 - DNA, 201 bp, Homo sapiens
gttaagagtgggaggagggggaggatcagaaaaaacaactaatggctactagggttaatatgtgagtgatgaaataacatgcacaaaaccccgccccatgmcccatgtttacctttgtaacaaacctgcacatatacccctgaacttaaaataaaagtatttaaaaaaaagacgtggactggtactgtggctcatgtctgt

SEQ ID NO: 500427 - DNA, 201 bp, Homo sapiens
tttattaatttctgcatttgtggattaactgtgttgatacatctctcgtttgctgaaaggattaaagtagctcaacacagaggtaagaatgacttcctccygtgactttctatatgggtgtagaggtggcaacctctgactaggtgtctgcatagcaaattgtatacttttaaaataacgtcattgaccatatcaaaaaca

SEQ ID NO: 500428 - DNA, 201 bp, Homo sapiens
attaaatgctagaaaactatttagtttatccttagtcaattctactgaatttggcacctcttaaatttggttgaggaagaaatctgcaaaagacaattacwtgaaatatatgtttattaaaaatgcgagactgccaatatatttaaggaaaaaagaaaatgtaaaaacaaacaaacaaaagactttcttctgacaatgctg

SEQ ID NO: 500429 - DNA, 201 bp, Homo sapiens
ctcttttggttactgtggacttacattactagtttgaagtcaggtaatgtgatgcgtctgactttgttcttacagcttgggattgttttggctattcgggytctttttctgtttccatacgaattttaaaatagatttttctgattctgtgaaaaatgatattggtagtttgataggaataatactgaatctgtaaattgc

SEQ ID NO: 500430 - DNA, 201 bp, Homo sapiens
aatttttatagaaacttaccaagctgtggggttgataatctttctttcttcttaatacaaatgcatcatcagaatacgcatggtctcaaacataccttttytgaggcattaaaaaaacatagtgatttaggggaattttaggtaatttgaatgggtaataaaaaacaattgtaaagtcctttgaaaatgtaaaattactaa

SEQ ID NO: 500431 - DNA, 201 bp, Homo sapiens
gagaatatgataaagcaactataataaaattttaatattgaaaatttgagtgaaaatcatatcagttctttgtactattcttgcaatgtttctacaagctkgaaatcattgtcaaatgattaaaaaacaaagacatgtttggccttaaatgcccatataactattaagaaaaaccttaactctctatgaagggccacaatc

SEQ ID NO: 500432 - DNA, 201 bp, Homo sapiens
atgatgacattaaaattctccaatgacttcttatatcttttagacaaagtctaaaatccttaatgtggcttcccataacctccaagataaagcccttactmtatctcttcaggattatcttgtgtaaactctcccacctaactatgctggccttcaaccacttctcattttatcctccctcagggcttttgctcatgctaa

SEQ ID NO: 500433 - DNA, 201 bp, Homo sapiens
gatcgggtttgaggataactgtaagataactgcagctgccacagagacgctgacgtttagaagatgaagaggggaagcatgcagcccagttaggaggcccytgatgacctgaatcagtgaggcagcagtagagatggaataaagcacgtgactctaggacgttggtggaagagtaaaaggccttaccaggcagttgagggc

SEQ ID NO: 500434 - DNA, 201 bp, Homo sapiens
gacatcatacataataataaactctaaaataaaggaagtggccggatatagaacaacagttatcctgccatgggtatggggtcatcatgaacaaagcatayaaacttctaccttgaggatgcagggaggtgcacgtgcaatattgtgagattcagagataggggacattcattccacctgatgaaggaacacttcccgagg

SEQ ID NO: 500435 - DNA, 201 bp, Homo sapiens
aggaagctttaagtttttctaacacaagaatatttttctctagagaatgctatcacttttaccagggtgctcatttttactatataaatagtttcttcagyttttacttggtcatacgcaacagaaactgtaattatttgttcccagagttcaggaaaatcaaccaggtagaatcaatttcaggtggggctattgaaactt

SEQ ID NO: 500436 - DNA, 201 bp, Homo sapiens
acacaaagaaaagagcaatggaaagtccacagtatgatttttcaacatttttgcttggtcatggcatactggcagacttacatggaaggtccctaacttayaatggtttgactcaggatttttccactttctgatggtgagaaagcaatatgcattcagtagaaactgtactttgaattttcatctttcccccggctagca

SEQ ID NO: 500437 - DNA, 201 bp, Homo sapiens
caaagaaaagagcaatggaaagtccacagtatgatttttcaacatttttgcttggtcatggcatactggcagacttacatggaaggtccctaacttacaawggtttgactcaggatttttccactttctgatggtgagaaagcaatatgcattcagtagaaactgtactttgaattttcatctttcccccggctagcaata

SEQ ID NO: 500438 - DNA, 201 bp, Homo sapiens
agtcatgaacaagactggattgccactcccaatgtcagggacaaaaatctaatcattaccaggcagcacaattctcatcaggtagccaagactgctgctcrtgcttaattttaaggtttgacccaccagagataagcatgaagttagttcagtattccagctggtgaatttctctgacagatgtggtgagttaatacgagg

SEQ ID NO: 500439 - DNA, 201 bp, Homo sapiens
cagctggagtgaactagcctgggggctccagccactctcaaactcttcatctcttctccactcccaacaattgtttttgtaaaatgacacacttttattgycaaaaaaacacagtcagatcagatagttttaaaaatgaatgtcaccatttagagataaccattgtcaatgcttcactaaaacatcattccagtttctctc

SEQ ID NO: 500440 - DNA, 201 bp, Homo sapiens
catgtttcaccatgtatataatagctattatactactaagtttgcataattgtcttaatagttctgcagattcctcttgggacttctaagaaggcaatatmatacttacaaaaaataacagtttggaatcttcatttcccattcctacatcttttatttctctttcttgacttaatctgcactggtaatgacctttagcat

SEQ ID NO: 500441 - DNA, 201 bp, Homo sapiens
ttatttggatcaccagatacgctctccacatttctcttgaactctttgtcccaggaggttatgtggattgtagtagtgggctcctttgccctctggcttcygatttggtacacataatgaggatccccagttgaagttcaaaggtcactgcttttctcaagggaggcctgtctacccatatctcatataccgggttctata

SEQ ID NO: 500442 - DNA, 201 bp, Homo sapiens
atcctgtattaaaaaattgtgaacctgacaagtcaacaaacattttgaaatatttgctcataaggtagcacctaattataataaaaatccaaatgtaggakaatgaatatgtcaatgaaagagaattatgacttcaaagtgggaaaaagaatatgtagctccttttttgttactaaattactcagggagaaaatgttagta

SEQ ID NO: 500443 - DNA, 201 bp, Homo sapiens
aagaattttaaatagctttgtgctcctgaattcacataaaagaaagacaagataatcttttaggtgatttaacagttaagtgaggtgtcagcctacaaggytgtatgtatctatgacttgcaaataattttggttttgacagtcaaaaatgagctctgtatggtactctaactacctgtctaaaagaaaaggcatttttag

SEQ ID NO: 500444 - DNA, 201 bp, Homo sapiens
ccgcctgaggatgatccatttccatatactgacttttgcatgactttcccttttcagtatatttactttcaaatgtaacttttatttcactactttaagtaaagtgttcaaaatgacaagctgaatcctggtaattaatttctgattgacttttcctaatatgactcaccaaattaagccataagagacagaaactggcag

SEQ ID NO: 500445 - DNA, 201 bp, Homo sapiens
tgctcctgaattcacataaaagaaagacaagataatcttttaggtgatttaacagttaagtgaggtgtcagcctacaaggctgtatgtatctatgacttgyaaataattttggttttgacagtcaaaaatgagctctgtatggtactctaactacctgtctaaaagaaaaggcatttttagtactacctttaccaagacaa

SEQ ID NO: 500446 - DNA, 201 bp, Homo sapiens
atacctcccaaaagccaggaaacactgagttctaagcacaagaaccaagacagcttcctgatggtccttgagaccagatggccaagaccagtacagacccmcaggtcccatctctcaagtgtgtgttagaagtgcaagaagactggggaactagtctgcagaagtatccattccgagaaactgaccatacataaagtttgg

SEQ ID NO: 500447 - DNA, 201 bp, Homo sapiens
ctacactggctcttcctgtcatataattcataaagaatcagaaggtactctccagctagaaaatcagctctttttcctgagtttgtttttttttttttttwaataaagaacttagcaaccaatctacacagtcattacaataaagtttgttatcctcttctaggtgggaagctcaggaaacctgcctttgtgctcctattt

SEQ ID NO: 500448 - DNA, 201 bp, Homo sapiens
agagcttgtaattttattttttaataatttctctgttaactcaactcattatttattgcctgcaatgattatgaaactatttgatcttcaaagtacagaaygatacagtatcttttgaatgacctttgcatttggctttttaacccttctttttatgttttaattatctactaataacatttctatatacaaatgcattac

SEQ ID NO: 500449 - DNA, 201 bp, Homo sapiens
cataggcccccagtggggatcccctgggatcctctggccatgctgtgagaactgctagcctagaatctgctctaaaactgactgaggttcatttcagtgakattagttaatatgtgtactatcattaatacaaatactttaggatcaagtttttttagaaaacagggtcagaaaacttcctcaatgtagtagtcaaagcat

SEQ ID NO: 500450 - DNA, 201 bp, Homo sapiens
tttctttttcactgaaaatgaatagttgatttgttgttttgattgatataaaatgtaaacttggaattctgtaggcccaagcaaacattttgtgataaaartgagagtgctcatcaaaattctgaggattccaatgtttttatgaagcttttgactcagagatctgtattattagataatttagagattttcagaagtatt

SEQ ID NO: 500451 - DNA, 201 bp, Homo sapiens
acatcaaaatatttcaattttaaaaatgcactcagtgatgtgagaggctaataccatgaggtgtgcaagaagccacttgagagtcatagtatggaatggakaccaaattgtccctactgtttataatgtcagatacctcctctcctctttttctttttattttctctctcttcctcccttgctctcttttccccaccagct

SEQ ID NO: 500452 - DNA, 201 bp, Homo sapiens
ctgcctccttctctgaaccactgctaacaggctctcaccttttgcgtctacttttctctctctttctaaaattccattataatcatgtaagcacttgaagrtcccccttcttttacctagccaagcaaaccactctaagaattccctttccatcactgacttcatcagtttctttccctctgctgaatcattcacatatat

SEQ ID NO: 500453 - DNA, 201 bp, Homo sapiens
tagagttgtaggcaagctcacttgaggtgttctttccttaccagtcaaatggccctaggtggtcatataccagttaaactccaacattttgcctcttaatrtacatgcttgagctcactcacccagctcctgagatcttatcagggagctgctgatcaccaatttcaggtgtttatagaaagactgcctttccctagtgtc

SEQ ID NO: 500454 - DNA, 201 bp, Homo sapiens
gaagccttaacatcctcttctccttcattactacattactacagccacccattgtggcagttagacaaacgaagccagcatttggagagagggagtaggastgagaaattggccaagaaaaaaaaaatgtatttagttcatggaaaggaaacttgaagggaaatccatgattcttagaagtggaagagtttagggaggaat

SEQ ID NO: 500455 - DNA, 201 bp, Homo sapiens
ctcagacaaatgttgtacagaggaataaacagagtgcttgaattagtcaagctggtctaggtgaagaatccatttaagacagcatttgtttagttccgtgygacagaataaaatgcaagataggcaaatgtaaccctagtgaatacgaggttggaaaagagaaccaaatgtgcactgtgtgccaggctacaaaattaggga

SEQ ID NO: 500456 - DNA, 201 bp, Homo sapiens
gccctgcagcagcattaggcaagggcagtgggggggatgggggttgggggtgcccacgacccctgaagccccagaaggagtgttacgtatagtaacacttyagttttgccatttgtggatggcttaagtgttaacagctcagtggagggtcagtgtgacagccttttgcgcccacacttacggcacccaagtttttgccca

SEQ ID NO: 500457 - DNA, 201 bp, Homo sapiens
ttacctaagctatcttgtatagtaagaagtttacatctgaaagacaaaagttacaaaaatgcatgcattcaaattcagctttaaaagtgaaattaaaaatrtattacaaaatgtaaatcaaaaggcattaatttatgctaaaattgcctttccctccaagggtttctaaatactcagcaaactttattttagcagtcatgc

SEQ ID NO: 500458 - DNA, 201 bp, Homo sapiens
gggtgggccaggtaggtttagatttcaactctgccatttactagtttcaggactgtggcaaatattgaacattttttggagaataataatgcctacttccyagggttatcatgaaaaatgaattgagttaataatggaaagaatatggcagagtgatacgtgctctgcataatactatatatattcattattttatcttct

SEQ ID NO: 500459 - DNA, 201 bp, Homo sapiens
tttcatgcctttcctgtcattcaaaggttaaaaataataacaataatcacacccactgaacactatctgcatgtcaaaatagtgatacgtttcttacagtyttcttattcaacctttttaaggactctgtgaagatgacattattattaactcatatttgttgatgaagaaacagaactaggattcaatgccaagtagatc

SEQ ID NO: 500460 - DNA, 201 bp, Homo sapiens
gtttacataatttaaacacgaatctatcagtgaaacaagaagaaaagattataaattttgagcaaccgtggcaacaaaaccatcaggaccttgtcaatgaytcacaatgatttcctagtattttccagtgttgataccaaaactggcaaggacagattcaaactaaattgctgatactgtgaaataatgctcaccagatgc

SEQ ID NO: 500461 - DNA, 201 bp, Homo sapiens
aatgaaaaaagctattactaacattaattccattactgctcaaaatctatatctatattttaatcattaggctgttgaatgcattactttgatctcagcakaagtgctcagagagttatacagatttacatcatgaaacttattaaacttctcttcgtcttaattttcttggccactttcctatctcctagaaaatgtgaa

SEQ ID NO: 500462 - DNA, 201 bp, Homo sapiens
gatactctcatagctgtaccaggacacacacttgtttttataacttaaaaataaattttttttaattatactttttagatcaatgctgcattcaatttgcwtgtagatctactgacattctgtctgagatgaaaagatacgagactacttgacaggcattcagaatttctttataatctcctgcttcattaggtaggaaaa

SEQ ID NO: 500463 - DNA, 201 bp, Homo sapiens
taaagttaaaaactgataatactagacacaaacagacatttcgccagagaggatataaaaatggcaaataagcacacacaaagatgttcaacatcactagrtaattaggaaatcgaaattaaaactaaaatgaggtatctttacacaactgttagaatagctttaaaaaatggtaatcccaatgctggtaaggatatgaag

SEQ ID NO: 500464 - DNA, 201 bp, Homo sapiens
ttctccctgtttctcatacccaccttaaatctgttagcaaaccctatgaagtccagctctttctttgaaatacatccaggatcctacgacttcataccatyatatcttttgtctggactattgcagtagcctcttagccttcatgtttttaccttccctcccttattgtctactctcaacacaatagaaagagtacttctc

SEQ ID NO: 500465 - DNA, 201 bp, Homo sapiens
agatttaaacatctgcaaaaaatatactaatgatgaaaagtcaattaatgcaaggatgggagccctagagtagcctctgtatattttctaagaggctatgrtactaaaacattaaaacaacaatttttttggtgattttcagtattcatattctacagtaaaaagatttaaattgtttaagtatataattgtactgatata

SEQ ID NO: 500466 - DNA, 201 bp, Homo sapiens
agtccagctctttctttgaaatacatccaggatcctacgacttcataccatcatatcttttgtctggactattgcagtagcctcttagccttcatgttttyaccttccctcccttattgtctactctcaacacaatagaaagagtacttctctaaaagtataaatcagttatgtcacttcaatgctcaaaactgtccaatg

SEQ ID NO: 500467 - DNA, 201 bp, Homo sapiens
taccatcatatcttttgtctggactattgcagtagcctcttagccttcatgtttttaccttccctcccttattgtctactctcaacacaatagaaagagtmcttctctaaaagtataaatcagttatgtcacttcaatgctcaaaactgtccaatggcttcctttatgatatagattaaaagcttaagtccttaatggcct

SEQ ID NO: 500468 - DNA, 201 bp, Homo sapiens
ctctccctcctgtccaacatgctttggagaccttacccaacatatataaggagttcaacttcaactacctgagccgtatagacatagagagagatgctctmggaatatcagattatttgttactcttgtgcgaaaggcataataatggctccccaaagctgtccatgacctgattcctagagccggtgaaaatgttacatt

SEQ ID NO: 500469 - DNA, 201 bp, Homo sapiens
cttacccaacatatataaggagttcaacttcaactacctgagccgtatagacatagagagagatgctctaggaatatcagattatttgttactcttgtgcraaaggcataataatggctccccaaagctgtccatgacctgattcctagagccggtgaaaatgttacattacatggcaaagggaaattagggttggagatg

SEQ ID NO: 500470 - DNA, 201 bp, Homo sapiens
tagagagagatgctctaggaatatcagattatttgttactcttgtgcgaaaggcataataatggctccccaaagctgtccatgacctgattcctagagccrgtgaaaatgttacattacatggcaaagggaaattagggttggagatggaattaagttcactaattagctgccctcaggattatccaggtggttccaagga

SEQ ID NO: 500471 - DNA, 201 bp, Homo sapiens
gcaacattatattttttaaatttatccttatgaaaattatctctcattattaaaagagcttctctgatgtttaaagaactggttaactatattctatatakatatatattacattctaattatattctatatatatttttctatctattttctttatatagtccttagtttatcatttctgtccattttctacacaaataa

SEQ ID NO: 500472 - DNA, 201 bp, Homo sapiens; identical to SEQ ID NO: 122774

SEQ ID NO: 500473 - DNA, 201 bp, Homo sapiens
gaaagcaggaggcagaagggtcagattcaaagagatttgaaaatgcagtgctgctggctttgaaggtgcagaaaaggaccatgagccaaggaatgcaggcrgcctctcgaagccagagaaaggaaggagatgaattatcctctagaactttcagaaggaatgcagccctgctgacatcttaactttagcccagtgagaccc

SEQ ID NO: 500474 - DNA, 201 bp, Homo sapiens
actagcttctttgttgggtcattcccctgttctttcctcccctaaaaggtttctgttttctcccacaaaaattcagcatcagataagcttagctatatctrtatcagagtgttagcggcagcgaatccatacaggtctacaggaacctcaattcttgccttctcagaagaatgaatttgactaagggccataacgcagaag

SEQ ID NO: 500475 - DNA, 201 bp, Homo sapiens
catatgagaggacacttcacatttttaaagagagactaacattttctctgatttaatttttgcaatacaattctaacatagggtctagtacaggacactckaagtatcataacgaacaatattcacacattacgtttccccaaaaaaggcagaaacagagttcaagttgctggcaatttggtgaatattattttgcatgag

SEQ ID NO: 500476 - DNA, 201 bp, Homo sapiens
aaaaaactggttggcaaaggcagatatgacatgaagtagcaatgacctggctaatatgaacctttggacaagatcatgtcttcctgagcccaggtgcatcratactggatattttctgcatgcccattcaatctacagggttctgaaacctaaataaaattcaatgtaatagctgggtgcctttcaaaacactatgcatca

SEQ ID NO: 500477 - DNA, 201 bp, Homo sapiens
aatgtgacaaattccataggactatatatacatgtacactgaaatgaatccatataaaactagtgaaatctgaataaggtctgtggattgtaccaacatcwcttccctgcttttgatacagttctaaaattacacaagatgttatcactggagaaaactgggtaaaagaaacacaggacctttcagcattatttttgcaac

SEQ ID NO: 500478 - DNA, 201 bp, Homo sapiens
tttgtcattttcagaagcaaatacaaaactattattagtggggttttcccagataattctttaaaggtagctgaagcagaaaaaaaaaaaaaaagaaatgygtgattatctacttaaaaaggacacaaagtggatcttttgaaaaataaaatattaaacttattaatgagataacagtttactgtagtttctgatcataag

SEQ ID NO: 500479 - DNA, 201 bp, Homo sapiens
tgataaaagacttctaatattttcttcttagtcggggcttaacctaattttagtaaaaacacttaggaaacaaaaatcaataatattttcaagtatgatcktgcatcttaaatttgtaaagctagtatggcaggcaaaataatggcccttcaaagatggccacatccaaatccccagaacctgtaaatacgtgagctttca

SEQ ID NO: 500480 - DNA, 201 bp, Homo sapiens
agcacatgccttttggagacattctcacttgagatttctgttattacactagattttaacattctaaacacactaataggaatataatctatccctcaccwactgctctataaacttgctgaatccttcctttttcaggtcttctaagcttcagaaaccaaatcccctgaaggcagctcagcccctccaggttcctgagca

SEQ ID NO: 500481 - DNA, 201 bp, Homo sapiens
tcgccctgacccctttgcgagccttgcaacaggggtgccttgcttactcagcccacagctctcaaccacttgcaggacagggagcacaggtgagcaggtayaggagctggggtgagtacttttgggtgccagcaggagcaaaactccatgagggccctgcagcagcattaggcaagggcagtgggggggatgggggttggg

SEQ ID NO: 500482 - DNA, 201 bp, Homo sapiens
actacttaatgatttaattaatttataatagtgaaaaaaaaaccataccaaaataaccagacttatctggttatttttagggatacatgagttaatattgyaaagtgcttaggacagtgcttggtcaaaataaacactcaattaatgtcagctttatgattatactaatatgatgactgatagtgaagccagatatcgccc

SEQ ID NO: 500483 - DNA, 201 bp, Homo sapiens
gagcagccaccatgcgctaacaatctcagtacatctgctgtcatccaacatttcaaatcttcagtctgcaattataataggagaagggaatcaagagtttmtttattttgggcagccctttatgaatgaatgcagtcactaaaaggctaattgtgtcttctgagctattaattgacttagctccaggagtactgtataaaa

SEQ ID NO: 500484 - DNA, 201 bp, Homo sapiens
tcaataactatcacacatctagaagcccctttactctttaataccaaccaaataactagaacatataatccataaacaactttagcaccatttacctgtgyagaaagaaaaatagcagagagaagatacccctgactttaacttgcatatttttacttgtctttcaaattttccttaatcatatcagacattttcagggtt

SEQ ID NO: 500485 - DNA, 201 bp, Homo sapiens
aaaggagattctctaaaaaaataaactatgttgaatttcaagatgggcctcattatttaagaagtcatttccctaacagtttctagatgatgctaacatamcaaacttttagttagtattccatggttttccttgcattctttcttttctcttaatatcacactatgttgctaaagaaaaggttatgtattttaaaagaat

SEQ ID NO: 500486 - DNA, 201 bp, Homo sapiens
attttcaaatttgtagaggtctaaaggttttcaaggcagctgtaaacatatacaatttctcaagtggaggtttccaaagactgggaatgcaaccgataagrtataaaatcagaggagaaacagtggaaaagtaaacataatataagagaatcacaacatgtaatgcagtcattaatttcatgagtctccttggataggttt

SEQ ID NO: 500487 - DNA, 201 bp, Homo sapiens
tgaggttgcaattttttgaatctttgccatcagaccttaagcagtaggatataaataactcccacatgcttagagttccgataatggaacactaggcatawatgggattaatgagcctcaaatatcctcagtggcagagtttgaagcttggggataaacagaccacagcctaattcagtttgaaagtgattaattataata

SEQ ID NO: 500488 - DNA, 201 bp, Homo sapiens
ttgaggatatgggggacagatgaaggctggggtgactgaaagattccccaggctctggcttctgataccagaccctatgtacttggatatttttgatttgyttgacatgtactcgagtaatgaaaccagtgaaatttattagttttttttattggtttgacagtcatttttcttaaggaaaaaaataaatattattgcttt

SEQ ID NO: 500489 - DNA, 201 bp, Homo sapiens
caaacccaaacccatcagaagaagaaacataacaaagatctgagcagaactaaatgaaattgaaacaaacaaaaaacaaacaaaacccacaaaagataaaygaaacaaaaagctggttctttgaaatgataaataaaattgatagaccattagcgagattaaccaagaagacagagatccaaataagcccaattagaaaca

SEQ ID NO: 500490 - DNA, 201 bp, Homo sapiens
aaatcctttacagacaagtaaatgctgagagattttgtcaccaccaggcctgccctacaggaactcctcaaggaagcactaaacatggaaaggaacaaccrgcaccagccactgcaaaaacatatcaaattgtaaagaccatcgacactatgaagaaactgcataaactaatgggcaaaataaccagctagcatcataatg

SEQ ID NO: 500491 - DNA, 201 bp, Homo sapiens
tctttaaatataagaaaaggtgaatatttaccaaagagaataaatgtaatcagagacataggctcaatcctaggtggcattggcaccctactagatgctgraaatatacagaaggtaatggacatgatccctgtcccttaggacctcatgatctggtgggaaagacagatgtttaaacaaagttttgaactacaacctggc

SEQ ID NO: 500492 - DNA, 201 bp, Homo sapiens
tagttttttgaaaagatcaacaaaattgatagaccactagcaagactaataaagaaacaagagagaagaatcaaatagatgcaataaaaaatgataaaggrgataccaccaattcccacagaaatataaactaccatcagagaatactataaacacctctacacaaataaatagaaaatctagaagaaataggtaaattcc

SEQ ID NO: 500493 - DNA, 201 bp, Homo sapiens
cattcacttggacaaccaacagtgtcactgcatatgtaataattacatacataatgcaatacttacattataaacattctctataggccaggagatttaaygctgctcaactagtttacattataattatgggtattatcacctacattaattttttaaacaagacaaaaaatggatacgtaaataacaaaatatgaaagg

SEQ ID NO: 500494 - DNA, 201 bp, Homo sapiens
gcaacaattaatagcctaccaaccaaaaaaagtccgagaactgatggattcatagccgaattctaccagaggtacaaagaggagctggtaccattcctccygaaactattccaaacaacagaaaaagagggaatccttcctaactcatttatgaggcaagcaccatcctgataccaaaacctggcagagacacaacaaaaa

SEQ ID NO: 500495 - DNA, 201 bp, Homo sapiens
ctggttcaacatatgcaaatcaataaacgtaatccatgacataaacagaaccaatgacaaaaaccacatgattatatcaatagatgcagaaaaagccttckaaaaaattcaacagcccttcatgctaaaaactctcgataaactaggcattgatggaacgtatttcaaaataataaacacgatttatgacaaactgacagc

SEQ ID NO: 500496 - DNA, 201 bp, Homo sapiens
aaggctgtaaggctagtaaatgatagaagcaagatttgaaataggcatggttcaaaattcatgctgctcccaccataaggtactgtttcttctgtgatgtyatgtaataatttatgtttccatctctatagcaagggtcagcaaacatttcctctaaaggatcagacagtaaatagtttaggcttacaggccatatgatct

SEQ ID NO: 500497 - DNA, 201 bp, Homo sapiens
ggttcaacatatgcaaatcaataaacgtaatccatgacataaacagaaccaatgacaaaaaccacatgattatatcaatagatgcagaaaaagccttcgamaaaattcaacagcccttcatgctaaaaactctcgataaactaggcattgatggaacgtatttcaaaataataaacacgatttatgacaaactgacagcca

SEQ ID NO: 500498 - DNA, 201 bp, Homo sapiens
aaatagcataacattgagatttcttgtggatgccagcgaaacagatgcatggtttaagtaaatcaaacagaattagaaataaaggcaggtaaaaccaaatrtcacatggaaaaatgagcaattgcactgttaaaaattatcaaaaagatattttttaaaaagattaaagcatataaatgatgctccctactttatttttaa

SEQ ID NO: 500499 - DNA, 201 bp, Homo sapiens
atactgccctaagtaatttatagatttaatgctatcctgatcaagctaccattgactttcttcacagaactagaaaaaaactactttaaatttcatatggwaccaaaaaacagcctgcatagccaagacaatgctaagcagaaagaaaaaacctggaggcatcacgctacctgacttcaaactacattacaaggctacagt

SEQ ID NO: 500500 - DNA, 201 bp, Homo sapiens
caatgggtgagctttctttgtgggaaatgagctactgagattgccccctctggtatcaccatcctgtgagaccctagcagtagtgatagttctggaagcaygctactctgcagaaagacccagcatcattttcttcatcctccctgaactcacaagagtaatggcccttgcacctaggaatatttcctgtagacaagaact

SEQ ID NO: 500501 - DNA, 201 bp, Homo sapiens
agatagtacatcatgtctgatttttcaaaagaaaagcagccaaagagaaatggccaaaaaggtaagaggctttcatttgaaagtgtgtgtgtgagtgtggkgtgtgtgtgtgtgtgtgtgtgtgtgtggttagtagaagacgaaaaaagacaaaatagggcgggaatatagacagcggaggaaaattgtgtctaaacacca

SEQ ID NO: 500502 - DNA, 201 bp, Homo sapiens
cctaagggcagatcttcacccatgatatcccttgccagatttttatctagaacattctcctaatctttcattaatttcaaaggtgagataatgtgataggktgatacaatgcaatattttgcaatttgaaagcaaagccctatggtttggaagagattcgaaatgagactctctctttcaaaggcctcattctaggacaag

SEQ ID NO: 500503 - DNA, 201 bp, Homo sapiens
gaaaaatttaagatgcttaaagaaagttctttaaacatattaataataagcttttcaaagtctgtgaatttaatatttcattatttccttgaacctgttaragttaagtgaaactttgaaaattccaggaaaggttcaataaaatttgttatagattctacatggtctcattttcctttacttaagaaaaaataccaaata

SEQ ID NO: 500504 - DNA, 201 bp, Homo sapiens
cacaattggcaacaccagtcttaataatggctgcctgtctgtccaagtgtctgtgaaaataaatgtcttcttctattgcctactcctccagcaaaatgatycagatattccttttctccactcccagcagctaggcggaagcacctgacctgggcccagccaatcagatgcccacacctaggaccatgaacatgaaaggag

SEQ ID NO: 500505 - DNA, 201 bp, Homo sapiens
atcagcagaaacgtgaaaaacggaaagaagaccctgcctttaaagagcctgggactggaatgaccttgatatgtttgaggaagggaaaagaaaagaaaggaaaaaaaaaaaaaaaaagaatgaccacagtaaaggatataaggctggagtgataagaagcggccagatgcacagggctctgcaggccactatgcaatttca

SEQ ID NO: 500506 - DNA, 201 bp, Homo sapiens
tgatcattgcttctcacccgcctggaaagatggtaatgccatgaacagtcacgggatcacagtacaaggagcagatatgggaaatgatgaattcagttttstattattgaatctgagagtcctattgaatgccacagaagataccttgcatgtggttgaaaattctgtgcaagagttcaggcaagggtgtgaagtagaact

SEQ ID NO: 500507 - DNA, 201 bp, Homo sapiens
gtgcctgtaagtcaatgagaccacattgcccactcataagaggtggagggacgctaatgagataagagacttggcccaaatgcttctctacaaataacagyaaagcactctcacacaaacatttctaccaacaaactcaaatatttccgaggagaattagcttgttaaaaagaaagtttatgttctgaattgaattcctaa

SEQ ID NO: 500508 - DNA, 201 bp, Homo sapiens
aaaataatccattaggctccaaaggacataatgggtagagggatgaggaaattcaggagaaggagcagaattacttgtaagcctataagcatcagcctaascagtaactatgcatatatctgaacatacattcttataatcatgggatccgatgtgctaaattctagtagctaatacgcaccatgccaataccagaaattt

SEQ ID NO: 500509 - DNA, 201 bp, Homo sapiens
agttccaaaaaccatgacctcagcaacatgtaattgttaggtactcactatgaatttcttaaaccacacagtatgaattcttttagcaaattaggccccartgattttactaagcaaaatgtcccactgtagaacatcatgtgaattttagagctagaggagctcagaatggggaaaatggataataatacgaattaaaag

SEQ ID NO: 500510 - DNA, 201 bp, Homo sapiens
attgacagagtaaaaatgacaaatttcttagcattctaataaaaatagttttgacctcaaataccccttgagattgttttggaaatacccaggggtttatwgactccacttagaaaactgcttccctatatcctctccatttcaaagctgaggaaattgaggttcagagataagcaacccacccaaagaccgttattaaac

SEQ ID NO: 500511 - DNA, 201 bp, Homo sapiens
attgctcctcataacatctgctctgcccactgtagcctgcttatcctctaatggtcatcagtatactgagtccaaagacagggaaggagtcaggtacaaaygagatggagaagacaggtagtggggctaaggaagcaaagaactgctaaagagggaagtcagcagataaatctgcaggagaaaatctgcagcaacaaggag

SEQ ID NO: 500512 - DNA, 201 bp, Homo sapiens
aatactatctttcaaaatgcttgtaaccaaacaaatattagaacataaataaaatattccaggcctaaatgatatttctgaatcctcaactataatgagtrtaagttctgtgccttctaagtcttcgtagcatcttgagtctgtaaagttattgctaataacaatgttagaagtaacatcatttccaatacttcatatatg

SEQ ID NO: 500513 - DNA, 201 bp, Homo sapiens
tcagcagaaacgtgaaaaacggaaagaagaccctgcctttaaagagcctgggactggaatgaccttgatatgtttgaggaagggaaaagaaaagaaaggaaaaaaaaaaaaaaaaagaatgaccacagtaaaggatataaggctggagtgataagaagcggccagatgcacagggctctgcaggccactatgcaatttcag

SEQ ID NO: 500514 - DNA, 201 bp, Homo sapiens
catacatacaacagtaacgattatgttactgattacaatggtttcctgatcccaaagggacttagagagttgaattctttcttaaaatctagaagataaamctaatagtgctataaaatctcaggcacttaaataaagcaatagcaaactattttctgtaaagaactcaggggatggaagtgctcatacttaattccctta

SEQ ID NO: 500515 - DNA, 201 bp, Homo sapiens
tatttggcactgctgtcctcgtgcatgttctgtgccctctcccggtgctaagaaactgtcaccaatccatttccctaccaaagtggaatggaacaagataygcgtgcagcaacaggagtagaacctgccctgcctatggatgaagtcttttcacaaacacttctggccacgctcaacctactgtatccagtgctacctggc

SEQ ID NO: 500516 - DNA, 201 bp, Homo sapiens
taagttaaaaaaaaactaggacaagtttgcaaaaatgtattctggcaatgtccattattagtttacataaattatgatgtattctaatactgaaattctaygtagccatgaaaaatgatgatgtagctatactgacaataaagatatatatagtatattaaatgtaaggagccaattacaaaactgtgaatagtgaaatct

SEQ ID NO: 500517 - DNA, 201 bp, Homo sapiens
ctgtatcctaattgttatgcttgtcttatctgctgcccctgttttatgatatatgttttcatcattttgtttgcagtgttttattttaaactgctcttcasagaattgttttatctgtagatgtctcaagagaggctgtggaagtatttcaacatagcagatttgtacttatttttgccaggtaacaggagtttctctggt

SEQ ID NO: 500518 - DNA, 201 bp, Homo sapiens
agaagtgacttataagggagaaaactgaagggaatgttttcatttgtcatagttaccatgataatgacactgtgaacttaaagagtgtcttttatttgagaatctgaaagtgcttcccaacccttaattcataatgttgcaatatacccccagtgaagtattaacatgctgtattgcacattttcctaataggtaagatga

SEQ ID NO: 500519 - DNA, 201 bp, Homo sapiens
aggcacgagaatggcttgaatctaggaggtgggggttacagtgagccgagtccacaccactgcactctagcctgggcaacagagcaagactctgtctcaamacaaacaaacaaacaaacaaacaaacaaaacaacttaaaagaagttatccatgtaaccaaacaccatctcatccccaaaaccctattgaaataaaaataa

SEQ ID NO: 500520 - DNA, 201 bp, Homo sapiens
taaatattattgctttttagcaattttctctatttttataacactgtaaaatattttcctcatacagtggagaagcacaaggcttaattgtttaaaaatcrccaattctagaatgaccttagtgactcataaagaagatatcacagaaaatcctaaaaatcaaatctatgaaggccttaatgccaagcattagcctggtga

SEQ ID NO: 500521 - DNA, 201 bp, Homo sapiens
actctagaaccagacagcctcagctgaaatcctggctccacacttatgagttacatacccttgggcaaattacttaatctttctgtgccaagagggatagsagtacttgccacacagggttcttgggaggatccgataaattaatgttgctaaaagcttaaaacagtgtctgggatttgaaaaatgctatgtaagtatttg

SEQ ID NO: 500522 - DNA, 201 bp, Homo sapiens
tggccagggcaattaggcaggagaaggaaataaagggtattcaattaggaaaagaggaagtctaattgtccctgtttgcagatgacatgattgcatatccmgaaaaccccattgtctcagcccaaaatctccttaagctgataagcaacttcagcaaagtctcaggatacaaaatcaatgtaccaaaatcacgagcattct

SEQ ID NO: 500523 - DNA, 201 bp, Homo sapiens
acatttcaccccatttgactcctcatcaaaattacacagtagaacatatgtgtagtagaggagctttaaggaagaaataatattggttttaagtgtctacstttattcaagaataaattattaatggaaaaaagttttaatttttaggttgaattaaagcatgctttcaatatcatcttcccttctccctgatgtaattaa

SEQ ID NO: 500524 - DNA, 201 bp, Homo sapiens
tgtagataacactattttttccttataacaaattttccttaagatgatgcttttacaaatatattatcacagcatttttattcattgtggcaaaggacatkcgcacattttcttgaaaacagtgacaggttagcatcatttgaccctatccaggttactattttaaggttcatatacctagatatataatagacaatcata

SEQ ID NO: 500525 - DNA, 201 bp, Homo sapiens
ttctttttatgaaaaatgaaaggatccccactaatttcacagtacaatgtttcatttattactcaatcttgtttcttagtttattaaaattaaagaagtayatgctctattataccacactattatatttaatagttagcttaaaatgttaaaaataaaattaaaactactttaaagtacctttaatagatatttctaaaa

SEQ ID NO: 500526 - DNA, 201 bp, Homo sapiens
gattacaaagaaagtggaagtggactcttagaaaaatgactgggatggaagtggcagtcagaatctgacactttatgttaactaattccagagacagtttrctcatatacaagtgtatgggtgtttgtgtgtgtgtatatgtatgtgtgtacatatagatccttttctcttaaccatcctagagaaattctaacttatgaa

SEQ ID NO: 500527 - DNA, 201 bp, Homo sapiens
agaatgtggctggagggatactccgaggccagattgtgaggggccgcatctgcagggctcctgtttatggaaggcataatgagattaacattttttaaaamgcaggaatgcataataagattaacatttttaaaaaagcattcttgtggaagtgtgaagaatggattggcatgggtaagaaagggaaatcagttaggatgc

SEQ ID NO: 500528 - DNA, 201 bp, Homo sapiens
tatgaatatagctcataaaatgtctgaggggtggtgttctataataaaacaaccccaaatgggaagaattctaaaaacgaaaaaatattcctttccatttsattggtttcagataaatgccttattcttagaaaaacaaaaaaacaaaaaaagagagaaaaaccccaagcatctgtgaataattcaaagtactaaatggca

SEQ ID NO: 500529 - DNA, 201 bp, Homo sapiens
ggattactcaagatagtctgtatagctttgtgctggtaattctaaaactcaatctttatgaggagtaacaacgacgacaaaaaagacaaagaagacagtgwacatgaacttttaatggtattgaatttattccaagccttatagtaaatgtttaagatgttttaataactgcccactgccaattatcttgaagaaatccaa

SEQ ID NO: 500530 - DNA, 201 bp, Homo sapiens
tgtataacttgattacatttgcatacacacacacacgcatatatctgagtacacacacacacacaaacacatttatacaggcatagaaataagacaaacamaaacatacacaaacgcacaaaaaatcatgatgttaggccaaaatggtttgttctggtgggacttgaaatttgtactttatacacatatgtattcattggt

SEQ ID NO: 500531 - DNA, 201 bp, Homo sapiens
gggggcattaaacaacagggaactaaaatttaacacaaaatcaggtgccatttaatactgtttaacatttgaaaattatttatttaataatacagatcgtyttaatgtgctgtaaatatttctcgcacagcatcatattgtcagaagtttttcccttttggaggcttcttttttccattcctttccagtaactggcctccc

SEQ ID NO: 500532 - DNA, 201 bp, Homo sapiens
tgacttaatgctttatgaacataaatagaagtagacgttttattatattgtatttatgcatcttcaatggtttgtcctttgcgtttcttgtgatgtgtgcrctcttctttggggtctacagttttataggttgctatggtttgaatgtgttccccgaatttcatgtgttagaaacttaatccagtatggcagtactgaaag

SEQ ID NO: 500533 - DNA, 201 bp, Homo sapiens
acattgtttacacagaagaagaagaagaaaaatcttttaacaacaacttgaaatacaaactaaatattcacgaagggtagcaagaagcccttgggctcaataaagggttcttttttttcttctacttgttattttgaaaatcagacctgtaaaaaatttgaaagtgtggtacaaaaaacagctccatcaaaagtaagcatt

SEQ ID NO: 500534 - DNA, 201 bp, Homo sapiens
ggatataattcttggttgcaccctgaaaaggaggatgccctcccttttcttccccattttataactgtaatactaacaatttggtggtaggagcaggggtrgccatctcaaactatgagataaaagcttcaagtaaagatgacaaagcaacaaaatggaacgatcctaggtccgcaacaccatggaggcaccatactgtcc

SEQ ID NO: 500535 - DNA, 201 bp, Homo sapiens
gcctttactagaatgccatatcaactcaagtcatacttacaacatggcttttcctttgatcagggttgggagtaaggagtaggaaggcttctcaaaagaaycaggccactagaccccaagggacaaaaatggaaagagaaagtcacaaaaaagtaggactgaaaaatacaatttaaccagcaaacttatagctagcccagg

SEQ ID NO: 500536 - DNA, 201 bp, Homo sapiens
tgggatagctatttgtgtgccataggtaatactttctctaaggattttcaaacacaaaactatgtctgatttgttctaacttgatgtttgaattcatcagyaatccaagtactggagcaaactcaaaattctttcttggggaatatctggtcttgatcaggtgaaacctatggggggctggccttttgtctagcctagcat

SEQ ID NO: 500537 - DNA, 201 bp, Homo sapiens
aatgagataagccttctctgtaagccagcaagaccactcttgattaatccccaacgtactggcctcaacagcatggcttctaaccaaccagaatcctcagycaaaaatactttaaacaaagataaaaattagctagaagatcatgttaccctaaaattaaattttatttgagagcaaatgtatagcctttatattttctga

SEQ ID NO: 500538 - DNA, 201 bp, Homo sapiens
tttctataatcttttatgcataataaaatatcaaaaatagactagacttgcaatagaacagtgtttattttcatggttgcattcctaaaacaaatgtataygcgtgaagtctggctatttaatcacctgagacggaggagtttcatgctggagatagaatatcagctagttttcaaaaccaagtaagatttcagtggtgta

SEQ ID NO: 500539 - DNA, 201 bp, Homo sapiens
atgttaaaagacaatcagcaggacataaaaaattataatatcagtatctctaaaattacacaattcttataaagtataagaaaaaagacaataattttgasagaaaggtatttcactgaaacaaaatatggacagtatataaagacataaaaagatgtacaaacacactaataataaaatcaatataaataaaaacaaagt

SEQ ID NO: 500540 - DNA, 201 bp, Homo sapiens
aaatcatgagtgaactcccattcacaattgcttcaaagagaataaaatacctaggaatccaacttacaagggatgtgaaggacctcttcaaggagaactamaaaccactgctcaatgaaataaaagaggatacaaacacatggaagaacattccatgctcacgggtaggaagaatcaatattgtgaaaatggccatactgc

SEQ ID NO: 500541 - DNA, 201 bp, Homo sapiens
ttgcactcttatgtttatcacagcactattcacaatagccaaggtatggaattaatccaagtgtccatcaatggatgaatgaactttaagatgtgagatayatatatatatattatttcaccataaaaaaagaatgaaatcctgccatctggtacaacatggaaaaacctggaggacattaagtaaaataacccaggcaca

SEQ ID NO: 500542 - DNA, 201 bp, Homo sapiens
ttaatgtgtgcagcacaccaacatggcacatgtatacatatgtaacaaacctgcacattgtgcacatgtaccctagaacttaaagtatattaaaaaaatamataaaaatacattccagagactaaaaaaaaaaagttaataattttactccttcatcaaaggcattcttaagtgaaactggtatgtattttttctcatgac

SEQ ID NO: 500543 - DNA, 201 bp, Homo sapiens
tgttggacttcacatgggggtttgtttctaaaaaaaaacagtctataagacaaaaatgacctgaaatcaaaatacccttgaagatctcttacagtttccttaaagtaaagtggacacagttttacatacacaaccctgtactgtaactattcataaatataatgttctcagtaggacacagtttataataaagaaggccat

SEQ ID NO: 500544 - DNA, 201 bp, Homo sapiens
gttggacttcacatgggggtttgtttctaaaaaaaaacagtctataagacaaaaatgacctgaaatcaaaatacccttgaagatctcttacagtttccttaaagtaaagtggacacagttttacatacacaaccctgtactgtaactattcataaatataatgttctcagtaggacacagtttataataaagaaggccatc

SEQ ID NO: 500545 - DNA, 201 bp, Homo sapiens
taatgtaacaagttcataggtcaagaaacttccattaacttctttaaattcatctatttaataacatgacaagcatttaattatggctaatttctccaccrcctttaagtataggataaagatgaacaagtctcctgaaagttctctcatcatagtttagctctctgaggtaaatgaacctcataatattccccgtatatt

SEQ ID NO: 500546 - DNA, 201 bp, Homo sapiens
ttggacttcacatgggggtttgtttctaaaaaaaaacagtctataagacaaaaatgacctgaaatcaaaatacccttgaagatctcttacagtttccttaaagtaaagtggacacagttttacatacacaaccctgtactgtaactattcataaatataatgttctcagtaggacacagtttataataaagaaggccatct

SEQ ID NO: 500547 - DNA, 201 bp, Homo sapiens
tggacttcacatgggggtttgtttctaaaaaaaaacagtctataagacaaaaatgacctgaaatcaaaatacccttgaagatctcttacagtttccttaaagtaaagtggacacagttttacatacacaaccctgtactgtaactattcataaatataatgttctcagtaggacacagtttataataaagaaggccatctt

SEQ ID NO: 500548 - DNA, 201 bp, Homo sapiens
ggacttcacatgggggtttgtttctaaaaaaaaacagtctataagacaaaaatgacctgaaatcaaaatacccttgaagatctcttacagtttccttaaagtaaagtggacacagttttacatacacaaccctgtactgtaactattcataaatataatgttctcagtaggacacagtttataataaagaaggccatcttg

SEQ ID NO: 500549 - DNA, 201 bp, Homo sapiens
atgagtttttctaattctgagaatgcatttaggtaaccaggccagtaggagaaaggattagggcaggtttccctgctccctccagtacagctcctgacatrttttcctctgggaactctactggtgatcagtaatgcctcactcccctctgccacattctacctcatacataagatgtaattaattgtcatattatggcct

SEQ ID NO: 500550 - DNA, 201 bp, Homo sapiens
gaggcaggagaatcgcttgaacctgggaggcagaggtcgcagtgagccaagattgtgccatttcactccagcctgggtgacaagagtgaaacttcgtctcaaaaaaaaaaaaaaaaaaaagagagagagctttaatcacaaaattagagtatttttaattatgtcttgccacctaggggcattcttagaccatctgggggg

SEQ ID NO: 500551 - DNA, 201 bp, Homo sapiens
taatctaaagagatagacaacatttctaaaatgttgcttattttagcagaaaacagtttaaggcagattccttcccacatggttcagctgacagccagctrcccacataaattcacgtgagtacattctctccaactgtctctgaacatagaataggctatattactaaaagcctttttctgttggaaatgtattctatta

SEQ ID NO: 500552 - DNA, 201 bp, Homo sapiens
atgtgtcactaatgaaaaggaaaaacatcaggctaaagactgtcatctagagagtattattcagaatctacttccacaaacttcccagggtgggccaggtrggtttagatttcaactctgccatttactagtttcaggactgtggcaaatattgaacattttttggagaataataatgcctacttcccagggttatcatga

SEQ ID NO: 500553 - DNA, 201 bp, Homo sapiens
aaacgctacgcagccgggtgtggtggctcaagcctgtaatcccagcactttgggaggccgaggtggacagatcacttgaggtcaggagttcgagaccagcstggccaacatggcaaaaccctgtctctactaaaaatacaaaaattagccagatgcagtggcgcctgcctgtaatcccagctactcgccaggctgaggcag

SEQ ID NO: 500554 - DNA, 201 bp, Homo sapiens
aacactgatacaatgatgaagctaagccctataaaattgcttctttcatggagataattgtgactttctgttggtaaactgataagcatctggatactaasagaagagaggttaaaactgatgtattcaatcttaagtcagcaatatgtaaaaacaaatgaatttgaaggtcatgctctagtacaactgatgtagagagaa

SEQ ID NO: 500555 - DNA, 201 bp, Homo sapiens
cacatgattttgaattacaattgttaaagataaatggtaaacataatttttatgtaggtttcttcacaaaatcaaagagagtttcaaggcaaaacagtcartaataactagttatgcaggttacctggaaaacctatagttcattggactatgtactttaatatgtgatagccaaagaaatgacagtttatataggacatg

SEQ ID NO: 500556 - DNA, 201 bp, Homo sapiens
ttttctgacttgttttatatatcagtggaaaacttacataaagaatacatttaaatattacatccactatgccttacttaatccctctggaatgaatcctrtggaatggtaatagtgaacagacactaaatcattttggaaaatccacaggagaaacatgtattctttttttattaatataaaattctggtcttttaaagt

SEQ ID NO: 500557 - DNA, 201 bp, Homo sapiens
ggtataatggatgctggagactcaggagggggaataaatgggaggagggtgatggataaaaaactgcatgttaggtacaatatatactacgcgggtgacaggtacactaaaatctcagacttcacaactacataattcattcatgtaatcaaaagccacttgtacccctaaagctattgaaataaaaaaaaaaaactttgc

SEQ ID NO: 500558 - DNA, 201 bp, Homo sapiens
caataatcaacctgtaatatcactccttacttcactactaaaatatattcaactaacataaaacaccttaccttacaaatttgagaattcttacacttatytgaaagcctattatctactataatagcagtcccaattactgatatatcctgttattttcatttttagtaataattataaacatggcttattgctaatatg

SEQ ID NO: 500559 - DNA, 201 bp, Homo sapiens
aggcaggagaatcgcttgaacctgggaggcagaggtcgcagtgagccaagattgtgccatttcactccagcctgggtgacaagagtgaaacttcgtctcaaaaaaaaaaaaaaaaaaaagagagagagctttaatcacaaaattagagtatttttaattatgtcttgccacctaggggcattcttagaccatctgggggga

SEQ ID NO: 500560 - DNA, 201 bp, Homo sapiens
gaacctgggaggcagaggtcgcagtgagccaagattgtgccatttcactccagcctgggtgacaagagtgaaacttcgtctcaaaaaaaaaaaaaaaaaaragagagagagctttaatcacaaaattagagtatttttaattatgtcttgccacctaggggcattcttagaccatctggggggatggctgatttttagaga

SEQ ID NO: 500561 - DNA, 201 bp, Homo sapiens
ttcttttctttctctgagacagggtttcactctgtcacccagtctggagtgctgtggtgcaatctcggctcactgcagccttgaccccccccccccacccmgccaggctcaggtgatcctcccacctcagcctcccaggcagctgggactacaggtgcaagctaccacgaccgtgatatggtttggctctgtgtccccacc

SEQ ID NO: 500562 - DNA, 201 bp, Homo sapiens
actatcactttcccataccagcacagcagtctgtcatgtaagaaatggtcactagacataaatcaggccttactggtcatattaacacaaagttaagagtgtgtgtgtgtgtgtgtgtgttatatgcaactttatatatatatatagtgtatatgtaacatatacacattagctcaactcaatactgaagaaagttgctaa

SEQ ID NO: 500563 - DNA, 201 bp, Homo sapiens
ctatcactttcccataccagcacagcagtctgtcatgtaagaaatggtcactagacataaatcaggccttactggtcatattaacacaaagttaagagtgtgtgtgtgtgtgtgtgtgttatatgcaactttatatatatatatagtgtatatgtaacatatacacattagctcaactcaatactgaagaaagttgctaaa

SEQ ID NO: 500564 - DNA, 201 bp, Homo sapiens
cacctgtgccacctagccttagaatctcaccaccagagcaccttaggcaggaataagtatgtaaaacaggtagctaaatcacctttagtgctcagagcagkaaaaaatgtttgcttcacctaacaatagtaagaacaaaataaaaactttgctgcaaaaggatcaaaagagattttgcccaggggcttatttctgggaaca

SEQ ID NO: 500565 - DNA, 201 bp, Homo sapiens
aaagaaacttcaacagaacctctttagaatccctaatatgtgtcccctgcattttgatgtgcgtatagactggtgtctgacccatgtatatgagaaacctraagtccaagtgactgtctagctctacttatgctggagcaaagagaaatttgctgagtggggaatcaccaatgcccaaattactctggggttcataatatg

SEQ ID NO: 500566 - DNA, 201 bp, Homo sapiens
aaaaattcctcaaaggtatttgttttatctcaaagccaagaggtaaaagaatgactaccaccagcagttttgtgtgtgtgtgtgtgtgtgtgtgtgtgtgwgagagagagagagagagagagagagagagacagagacagagagacagagacagagagacagatctactgtaagacagagagaagaaaaataagctaaatt

SEQ ID NO: 500567 - DNA, 201 bp, Homo sapiens
atatcagacaggaaatgctcaactgctatttctttaaggttctgcattttggctttaggtcttcaaccttgtagcattacacaaatgtagtaaaatatatsatcaaaatgctcgtgatggtaaaatattaaatcaaaatccataaagtagttcctatcttacaggacaaggtagccagctcttaagcctgtccacttctgg

SEQ ID NO: 500568 - DNA, 201 bp, Homo sapiens
acagacttgaaaatgaacttgtggaatacaatgggttcttaagtaaggcttttctttaagaatattttcttgcttccacaaaaaatacaaaagccaccaargatagaatgattttgccttgttaacttgtaagaacaatgacactagaagaaacctatgggaaatgtgcttatctgaccaggtgctcattttcggtgggct

SEQ ID NO: 500569 - DNA, 201 bp, Homo sapiens
attttgccttgttaacttgtaagaacaatgacactagaagaaacctatgggaaatgtgcttatctgaccaggtgctcattttcggtgggctgtcatttgamtaaaacatcatactaaaccctacagaccacagcttatgagagaaatgccacaaactatagcagtacagttaatatgcctataatctactgacaaaacata

SEQ ID NO: 500570 - DNA, 201 bp, Homo sapiens
ggtcttactctgtcacccaggctggactgtgcagcctccaactcctgggcttaagcctcccgagtagctaggactacaaccacatgccaccactcccagcwaattttttttttttaagaaacagggtctcgctctgttgtccaggctggtcttgaactcctggcctcagacaaacctcccaccacagcctcccaaagcagt

SEQ ID NO: 500571 - DNA, 201 bp, Homo sapiens
gcttgcctaaaagaagaggttgggttgacaatgtatcttgatggtcagcgggaaatagaaggaaacctgaatttgtagtaagacaaacatcacagattatygaatattacagctggaacagatttgagggaacaaataaataaggcctttcattttaccaatgaagaagtaaatacaagaagaggttaagtagattgctaa

SEQ ID NO: 500572 - DNA, 201 bp, Homo sapiens
ttgtaaaacttgattttaatatattgaatatgcttaaagttgaacatatctgtggaaatgaaggacgtgaatgctaacataaatttacatactgactactstttcaatacagattcccaagtgcagaccttcatatagaagcaccaccgctctgttcccaaagatggacatgcactcggaagcattctttccccttagtca

SEQ ID NO: 500573 - DNA, 201 bp, Homo sapiens
ttccatggttatgagttttaaaagataactctaatcgatcatcctttttttgtacttattttttgtatatttgtaaaatagtagttacatgaagcaaatartatcagtgtaaggcccattcacttttcaggctactcgacatgcagaaatggtggccattgatcaggtccttgattggtgtcatcgaagtggcaagggtct

SEQ ID NO: 500574 - DNA, 201 bp, Homo sapiens
caccaccacgcctggctaattttttgtatttttagtagagacggggtttcaccgtggtctcgatctcctgacctcgtgatccgcccgcctcggcctcccaragtgctgggattacaagcgtgagccactccgcccggcctatttgtgcttcatcttatcacctttctagaaatgtgagccagttgaggaaagacatgaaac

SEQ ID NO: 500575 - DNA, 201 bp, Homo sapiens
agagtggccaaacatatagcgcagcaggaagcagagggcagctgtgacgggactggccagcagtggttaggatggtgaaaacactaagaagccaaaggagkcaagagtagtcagacagagcaggtgtggccaattgcctcaatcatctttttctttcaaccaaaagtatcaagttatattttctattttttcttccacatc

SEQ ID NO: 500576 - DNA, 201 bp, Homo sapiens
gtaatttctgcatatgctcatcttaagaattcatgacttctcatccttctcttccctaaggtgagggttacgtggtgagggaagttcacacagcagccgcrtggtatcggtgagaggcattggacctgtagcactctgatttggcacctgtcaagtctctagtcacagcatttgtgtgatcgggttttcagtgaactatct

SEQ ID NO: 500577 - DNA, 201 bp, Homo sapiens
tatcagtcaacctagagactgagatcaaccacagaggcaatccatcatgtctatgattgtatatggagcctcagtacaaactgtgaaccccaagacctagrtaagctcccctgctcagcagtactctatccatattgtcatacatttattctaggaaaggaatgtgtcctgattccacagggaaagacaatggaaacttca

SEQ ID NO: 500578 - DNA, 201 bp, Homo sapiens
aaattttatttctcccaaaagttatataaaataacttcttagaggttttatctgggaaagagacttctggtaaatgtatcactttttttttttccccatcrgcaaggtgcttcagagtgctcaaaaatgtataaaatacttgaattataactacaaaattttaaatttctaaaattgtgggtccacaaaaactataaatcc

SEQ ID NO: 500579 - DNA, 201 bp, Homo sapiens
acctatacagttggaggaaacacctttctgagaagataccaaggtgtgtggtgctgttttaaaaataaacatttgagagaaagtagaacttagtggttaaractgagctttagaggcaaaatgaaggaatttgaattcacatctgaatttagatgaagtgctctaatcgaggcaatttacttcctactggttagtctgcct

SEQ ID NO: 500580 - DNA, 201 bp, Homo sapiens
taatgtatcctttcatactaacaacacctaagttgtttttaacatgtactaacatttcctactttttaaacatgtagtagtatatcctatcatttaaacaygtactagcatatcctatctttaggctcctttaatatagagtcaaggttctccttctccttgcttcccatgctaccagcactataaagtaagagaatcaac

SEQ ID NO: 500581 - DNA, 201 bp, Homo sapiens
tgacgacacactttccggcatatactgaatttgattcattcattcacttattcagcattcattgagtgcctactctgagcaagcaaagccctacggtgggyagtgtactagggtccaggttcattagtttttaataggataaatctttgtgaaagagtgttatatacacaacaaattaaatgtttccatctcaaatatctg

SEQ ID NO: 500582 - DNA, 201 bp, Homo sapiens
ccagcatgtaatttcagcccaggagagctgcaggagtaccactgcaatgccatgaaagctgctgtgtgggctgtgcccagcaaagctagggggcaggactrttctgagctttgcggacccaacttccaccccagtatatccagaaagcagacatagagtcaaagatcattctcaagcctcaagatttaatgttctttgcct

SEQ ID NO: 500583 - DNA, 201 bp, Homo sapiens
attttattggtagagacagggtttcgccatgttggccaggctggtctcaaactcctgacctcaggtgatccgcctgccttggcctcccaaaatgctggaaytacaggtgtgagccaccgtgcccagacgacaaaagaattattaatcccattttaaagatgagaaactagattaaagacactagataaatttttaaagatc

SEQ ID NO: 500584 - DNA, 201 bp, Homo sapiens
agctatgggggcttggctacctccacctagatttcagaggataaccccaaaagcctcagggtccaggcacaggcagggctatcacagaaagcccctagtarggtaacacccagcagatccatggggtcaggctcagggtcactgcagagtccccattggggcaatgctcaggggagctatagggttggggatgccgaaaag

SEQ ID NO: 500585 - DNA, 201 bp, Homo sapiens
ggtgcggtgctcctcagctgcaccagctgtggctcaagtaggcccaggtgcagcttgggccaccctgctggaacatagtgacaactctgcaggcatgcagmgtacaagagctatgggggcttggctacctccacctagatttcagaggataaccccaaaagcctcagggtccaggcacaggcagggctatcacagaaagcc

SEQ ID NO: 500586 - DNA, 201 bp, Homo sapiens
aaattcctcaaaggtatttgttttatctcaaagccaagaggtaaaagaatgactaccaccagcagttttgtgtgtgtgtgtgtgtgtgtgtgtgtgtgagwgagagagagagagagagagagagagagacagagacagagagacagagacagagagacagatctactgtaagacagagagaagaaaaataagctaaattaa

SEQ ID NO: 500587 - DNA, 201 bp, Homo sapiens
gtacaccagcattatataaatgggggtactctgttataagtcaaggataggaaatgacatcaagtggcaccaaaaacaaacaaatttgatttcatacagtraagagacagatcagtcagagcagtaaacagctcttctctaaaggtgacagggtactggaaagagaccacaggaatggtaggacaactaaggttgttttta

SEQ ID NO: 500588 - DNA, 201 bp, Homo sapiens
attcctcaaaggtatttgttttatctcaaagccaagaggtaaaagaatgactaccaccagcagttttgtgtgtgtgtgtgtgtgtgtgtgtgtgtgagagwgagagagagagagagagagagagagacagagacagagagacagagacagagagacagatctactgtaagacagagagaagaaaaataagctaaattaatt

SEQ ID NO: 500589 - DNA, 201 bp, Homo sapiens
aaagccaagaggtaaaagaatgactaccaccagcagttttgtgtgtgtgtgtgtgtgtgtgtgtgtgtgagagagagagagagagagagagagagagagasagagacagagagacagagacagagagacagatctactgtaagacagagagaagaaaaataagctaaattaatttttgctaatttaatttccattagaagg

SEQ ID NO: 500590 - DNA, 201 bp, Homo sapiens
tttttatttttttttagaaacagggtcatgctctgtcacccaggctggagtgtagtggcacaatcatagctcactgcagcctcaaactcctgggctcaagygatcctcccacatcagaccccgagcagctgtgtctatagatatgtgctcccaggcccggctaatttttttttttttaattttttgtagagacagggtttc

SEQ ID NO: 500591 - DNA, 201 bp, Homo sapiens
aaaaaaattaggctggcatggtggcgcatgcctgtagttcctagttccagctactcaggagtctgaggcacaaaaatcctttgaaccagaggaacaggttkcagtgagccaagaatgtgccacactgcactcaagcctgggagacagagcaagactctatctcaaaaaaaaaaaaaaaaaaaaaaaaaaaaagttaaaaga

SEQ ID NO: 500592 - DNA, 201 bp, Homo sapiens
aaaaaaaaaaaaaaaaaaaagttaaaagaaagcagcatttgttggctgggcatggtggctcacgcctttaatcccagcattttgggaggctgaggcgggtrgattacctgaggtcaggagttcgacacaagcctggccaacatggtgaaaccccgtctttactaaaattacaaaaaaaaaaaaaaattagccaggcatggt

SEQ ID NO: 500593 - DNA, 201 bp, Homo sapiens
catggtgaaaccccgtctttactaaaattacaaaaaaaaaaaaaaattagccaggcatggtggcacacacctgtaatcccagctactcaggaagctgaagmaggagaataccttgaacccaggaggcggaggttgcagtgagccaagatggtgccattgcaccccagcaatgggcaacaagagtgaaactctgtctcagga

SEQ ID NO: 500594 - DNA, 201 bp, Homo sapiens
accccgtctttactaaaattacaaaaaaaaaaaaaaattagccaggcatggtggcacacacctgtaatcccagctactcaggaagctgaagcaggagaatmccttgaacccaggaggcggaggttgcagtgagccaagatggtgccattgcaccccagcaatgggcaacaagagtgaaactctgtctcaggaaaaaaaaaa

SEQ ID NO: 500595 - DNA, 201 bp, Homo sapiens
caaaaaaaaaaaaaaattagccaggcatggtggcacacacctgtaatcccagctactcaggaagctgaagcaggagaataccttgaacccaggaggcggargttgcagtgagccaagatggtgccattgcaccccagcaatgggcaacaagagtgaaactctgtctcaggaaaaaaaaaaaaaaaagaaagcaacatttgc

SEQ ID NO: 500596 - DNA, 201 bp, Homo sapiens
aattagccaggcatggtggcacacacctgtaatcccagctactcaggaagctgaagcaggagaataccttgaacccaggaggcggaggttgcagtgagccragatggtgccattgcaccccagcaatgggcaacaagagtgaaactctgtctcaggaaaaaaaaaaaaaaaagaaagcaacatttgcaagaggtgatattc

SEQ ID NO: 500597 - DNA, 201 bp, Homo sapiens
atatgaactttgtaaaaattaaaaattatccttcaggtacagttttgacttgcatactggctgtattagttaggttctccagagaaactgaaccaacagtrtgtgtgtgtgtgtgtgtgtgtgtgtgtgtgtgtgtgtgtgtgtgtgtgtgtgtgtgtatatgtatatatatatatagagagagagagagagaaagagaga

SEQ ID NO: 500598 - DNA, 201 bp, Homo sapiens
taaaaattatccttcaggtacagttttgacttgcatactggctgtattagttaggttctccagagaaactgaaccaacagtatgtgtgtgtgtgtgtgtgygtgtgtgtgtgtgtgtgtgtgtgtgtgtgtgtgtgtgtatatgtatatatatatatagagagagagagagagaaagagagatttatctttaaggaattag

SEQ ID NO: 500599 - DNA, 201 bp, Homo sapiens
ctggctgtattagttaggttctccagagaaactgaaccaacagtatgtgtgtgtgtgtgtgtgtgtgtgtgtgtgtgtgtgtgtgtgtgtgtgtgtgtgtrtatatgtatatatatatatagagagagagagagagaaagagagatttatctttaaggaattagcacatgtgattatggaggcttggcaagtccaaaatct

SEQ ID NO: 500600 - DNA, 201 bp, Homo sapiens
atcttgcttgcactattaatttggttaatgggttagtaatcctttctttatagatagcaggacagtaaacttcagcccagctctttgctaaattattacaytctctgaacaaatggggtgcagattaatgacgttttactcaaaggctttaattcacagaagccttaaatgaagcgatacatccttgtttccatttaatga

SEQ ID NO: 500601 - DNA, 201 bp, Homo sapiens
gagttcttggtacataatgtctgtcagtaggcaatacaaaaatttcagaatcacttctggtgtctgaactccaaaatgcaacccaaaaaatgtgtctaaartagttccttaattcctacttcaccttgcatctgttacttatagcaacgtcagaaaaataaaaattacaccaggtgtagattgctagaactacagttctac

SEQ ID NO: 500602 - DNA, 201 bp, Homo sapiens
aaatttaacacgtcttttttaaagtaggctagtatttccattagatttttaaaaactgtttttgctagtgctgtagttacaaagctgtgtaagttttgagkggtgtgcctcatcctattttttaaaaatatacttgatttgcagtgtgtggttgtgcacattgtgggtgttttcaggaccacatatagcatgttacagcag

SEQ ID NO: 500603 - DNA, 201 bp, Homo sapiens
tagcttaccacctattaatttttataaataaagttttattggaacgcagccacacccattttcttaattattgtctacagctcctttcacaatacaaggtwaaaattgaatagctgcaacaaggactagatagtgcttctgatcctttacagaagaaaaattgccaatctctgtctaggtgatctcactaaggtgcatagc

SEQ ID NO: 500604 - DNA, 201 bp, Homo sapiens
acacataaatacaactttattctgcaacagtcacgcataaacacacacacaaactctaagtcacacaatctctataataaagatttttctagtgcatcatrtcacagaactgcaagcatatcattttgttcctgtaactgaaatgtacaatgggacaagatgagatgacagtgtgttttatctttttcatatgaaagttca

SEQ ID NO: 500605 - DNA, 201 bp, Homo sapiens
accctatacaaactttttttagaaaagaaaaaaagaagaaatacttcccagcttgtttatgaagccaccaagcctccaaatccagatagagattacaaaawaaaaataaaagacagaccaatgtatctcatacatatagacataaagaaagatctttaacaaaatattaccaaatcaaacccagcaatataaaaaaaaaat

SEQ ID NO: 500606 - DNA, 201 bp, Homo sapiens
tgagaaaggacaggcagaattaaatcagtcatttcacttgcaggttaatctgtccaggagggcaattaggcaagtgctcaatgcagttaatagtctattctttttttttttttttagtttctgtactactattctttaaactattttctgctggagctccaaatcatgacattgggtaaaataaaaaaaaaaaaatgttta

SEQ ID NO: 500607 - DNA, 201 bp, Homo sapiens
tgtccctgcaggtaccctagcaatgtgtccatgattatatattttagtaaaatttgtaaaagtaagatactttgccaatgaaatatctttctccacttccycttcttctccaccaatctcctgttgtcgggtggagggcgtcacagtgagcaacctggggatcatgcaaagggtgatatattcagtttgggtgatacattc

SEQ ID NO: 500608 - DNA, 201 bp, Homo sapiens
gcagttaatagtctattctttttttttttttttagtttctgtactactattctttaaactattttctgctggagctccaaatcatgacattgggtaaaataaaaaaaaaaaaatgtttataagtagccatttaaaaggaaggtagtattggaaacagacatattttctttctgtatctctagaaatcaaattactttcttt

SEQ ID NO: 500609 - DNA, 201 bp, Homo sapiens
gggcattttgtaagaaggagtcagaatggggtcacatctggtcatgtcaaagaagatcatctggaaagggtcaagatctcaacaaaaaacacaggagggaycattggctttattagcaagaatggaaatgcttccttaggcattaaataattgcagacggcagagtcaataaaagcattcagaagtcagtgagctttaaaa

SEQ ID NO: 500610 - DNA, 201 bp, Homo sapiens
atgctagcctgacaataccaattaatttaagaaaataaaaaatacacaaaaatttctgttatctaattatattgaagagattgctcctaaaacaaacattkgtaaaaccacctttttgtactatgaaaattatatttgtacacatacaaatataaaaatgcccaatagctaaatgccacttatgcaaatagtccctaagtt

SEQ ID NO: 500611 - DNA, 201 bp, Homo sapiens
atctggctaatttttaaaaatattctgtagagagggggtctcactatgattcccaggctgatctcaaactcctggcctcaagtgatatttagcctttgaamgtgctaagattacaggtgtgagccactgcacctggccttcaattgctttgataccttatcagttaagattggattagttgcaaaaaatagagaatcctaa

SEQ ID NO: 500612 - DNA, 201 bp, Homo sapiens
catttatataattgccttacttgctgctgcctcctacagctgtagaataatgttattccaatatatgaagaatatattggcagacaagactaaaaaatttygaattattaattaaaaatgggaagttttattaaatacattaaagaactgaatttagacttggaatacatatattcctgtagctctgtttctctgattagg

SEQ ID NO: 500613 - DNA, 201 bp, Homo sapiens
tggaaagtctcagcaatagtctcatccatcaaacaagcagaaagaaagaacttgagaactcaaaaacaagactttcgaatttacccaatatgtcaaatacraagaaaaaagaattttaaaaaatgaacaaagcatccaagaagttcgggactatgttaaacgtccaaacctaagaataattggtgtttccacagaagaaga

SEQ ID NO: 500614 - DNA, 201 bp, Homo sapiens
ggaccaccggagaccttgtcacaggcacgtgtcctcagccttggcaaaataaactttctaaattaactgagacctgtctcagattttcagggttcacagarcaaaatgataatttactgcccttactcaaaaaatattgtcctattcatagaaaaagaaaatgataaggtggtttccagacactggaagtagtggagaagt

SEQ ID NO: 500615 - DNA, 201 bp, Homo sapiens
tggtcacagggttccattacatgtacaccaaggacaacataaaagtcggtggagtcaaagtgcaattaagaggattgaaagggggggcccagaaaaagagkcccaggcacaaagtttcctacttcctcattttatctaggaaattggatggctcttttatttccaaactctcatcagctgggaaagatttaaaaagtagca

SEQ ID NO: 500616 - DNA, 201 bp, Homo sapiens
acaaacacttttcatgtgggcaaaataatttcactagtttgtttattggacatattggcctgtactttcacaaatgcagacccaaaaatcaaaatcagagmtggaaaagggcaaacagtattatatagcaagtatgcttggataagaatcaaagtagaaggcttagggtttggctctaaaattagccaactagacatgagt

SEQ ID NO: 500617 - DNA, 201 bp, Homo sapiens
gttttgttctcacctttgaaatccaattacatcaacaagaagataaaagatgacttaccggcccaaaagaattactgtcaaaactgtgtccatgatgatcrccttcaacccagatgtgaccacgggggactttgacataccggtttttgtgtcctatggttctggaaataaacagtgtaaccactgagatatgagtagaaa

SEQ ID NO: 500618 - DNA, 201 bp, Homo sapiens
ctaagccacaataattggagaacaaagttctcaacttccaagaaatatgctcaattataagcctgactttttctttatgaaagagaaaaatcagggaatgytccattcagataggaagagcaggaaatcatttttgataatgttttcaaactttaaatgtaaccccaaataataataaacagcataaaattgacttctatc

SEQ ID NO: 500619 - DNA, 201 bp, Homo sapiens
tccaccttggtttcccaaagtgctgggattacaggcatgagccactatgtccagcagtagttctaagttctttgagaaatatccaaactgctttccacagyagctgaactcatttacattaccaccaacagtgtataagcattgcctttactctgcagcctcaccagcatctgttgtttgacttcacaataataaccattt

SEQ ID NO: 500620 - DNA, 201 bp, Homo sapiens
cagtgagccaagatggtgccattgcaccccagcaatgggcaacaagagtgaaactctgtctcaggaaaaaaaaaaaaaaaagaaagcaacatttgcaagargtgatattcatctctctgtctctctttttctgtgaaaggttactagatttcctccttttggggagaagtagaaaaaataattttgagagcaggagagatc

SEQ ID NO: 500621 - DNA, 201 bp, Homo sapiens
agtgaaactctgtctcaggaaaaaaaaaaaaaaaagaaagcaacatttgcaagaggtgatattcatctctctgtctctctttttctgtgaaaggttactaratttcctccttttggggagaagtagaaaaaataattttgagagcaggagagatctcccctcttaaggaggggctactacttaagggggtaaaaaaatcag

SEQ ID NO: 500622 - DNA, 201 bp, Homo sapiens
tgaggtaggagaatcacttgaacccaggaggcggaggttgcagtgagctgagattgtgccactgtactccagcctgggtggaagagcgagaatctatctcaaaaaaaaaaaaggaagtattattttatattttatacataaaaagataaagcataatgtaatgaacatctgtatgctcccactctgcttcagatataagta

SEQ ID NO: 500623 - DNA, 201 bp, Homo sapiens
cttacccacattacagacagtaatctgctttactgaaagtcgatcaatttaaatgtaaatctcattcaaaagcacactcaaagaaacatccggaataatgytcgaccaaagatctgagcacactggcacagccaagctgacacataaaattcaccatcacacttgacatatacaatcctcctgctctttgcttactcagtg

SEQ ID NO: 500624 - DNA, 201 bp, Homo sapiens
agccaatatccaggtgggcaaatcacaggtgctcaaaaatgtgtcttgaaggcataaatgaaaagcttcgcatgatttaaaaacataaagtttactttttmtcctttacttttcactggtttttaaaaagtgaacatttttttgcgctttataaacttcaaaaagaattctatggaattttaatattcatgtttcatactt

SEQ ID NO: 500625 - DNA, 201 bp, Homo sapiens
acagtcacctgtagaagaatgaaactggatccctatctcttaccatacacaaaaataaactcaagatggactaaagacttagtctaagacctacaacaatwaaaattctagaagaaaacccaggaaaaactctctggacattggcctaggcaaagaatttatgactaagacacctaaaggagataaaacaaacataaataa

SEQ ID NO: 500626 - DNA, 201 bp, Homo sapiens
tacttagagtttctacctctatttgcccatctttaaagtgggacaagacataccctaactcagcagtccccagccttttaggcagtagggactgatttaayggaagacaattttttcatggaccagggtggatgggggaaggttttggcatgattcaagcacattacatttattgtgcgctttatttctattattattaca

SEQ ID NO: 500627 - DNA, 201 bp, Homo sapiens
gaccaaagatttcaatgacaataccaataatacagaccttcttttaagaaattagcacatgaatgactgttacagtatttcctattcttttttaataatattgttttcatagaaataaaatgttacagtagtttttcaatgacaaacaggaatcaaatactttcagaccatttccctaaagggatgacattacatatctta

SEQ ID NO: 500628 - DNA, 201 bp, Homo sapiens
ataaagtcgtaaaaaataaagcaatcttcctgtgaaatagacttgtgaaactctgggatacataaggattaagtctttttatttctttttccaattcaagtttttacctttgaacaaagaaaaaaaaataacatacaagtgaatagttggctaaaaaagaatagactagaatttattgttctgggtgatgacttatgatct

SEQ ID NO: 500629 - DNA, 201 bp, Homo sapiens
agaagaaaaatggactaccagcagggagagcacttagaaatagactcagtattccaggtaagagggaataagtatctgcactgagacattcctttttctcttttttttttttttttttttttgagacagagtcttgctctgttgcccaggctggaatgtaatggtacgatctcggcccaccgcaatctcggcctcccaggt

SEQ ID NO: 500630 - DNA, 201 bp, Homo sapiens
gaagaaaaatggactaccagcagggagagcacttagaaatagactcagtattccaggtaagagggaataagtatctgcactgagacattcctttttctcttttttttttttttttttttttgagacagagtcttgctctgttgcccaggctggaatgtaatggtacgatctcggcccaccgcaatctcggcctcccaggtt

SEQ ID NO: 500631 - DNA, 201 bp, Homo sapiens
aagaaaaatggactaccagcagggagagcacttagaaatagactcagtattccaggtaagagggaataagtatctgcactgagacattcctttttctcttttttttttttttttttttttgagacagagtcttgctctgttgcccaggctggaatgtaatggtacgatctcggcccaccgcaatctcggcctcccaggttc

SEQ ID NO: 500632 - DNA, 201 bp, Homo sapiens
aggctgaggcaggagaatcacttgaacccaggaggcgaaggttgcagtgagctgagattgcaccactgcacttcagtctgggtgactgagactctacctcaaaaaaaaaaaaaaaataaggtgaaagaatatccctctcatgattatattgttacattacgtgagtctgtcttagcagtctgagtgtgagggccttgaaga

SEQ ID NO: 500633 - DNA, 201 bp, Homo sapiens
acttatgaacaaaaagaaaaactaaatataaaatagacaatactttcagggcaatggctaacattaaccatgaatattaatattaagatcttagtgcctgsaattacactgaatttgtaaaccaaatcatggataactgacatcttaacaatatggagctttgctatccaagaacacggtatattttccaatttatttagg

SEQ ID NO: 500634 - DNA, 201 bp, Homo sapiens
tatcatcagtgaaaagagaagttcgacttcttcttttcctattttggatgacttttatttctttcttttgcctgatggctctggctaggaattccagtacmatgttgaacaggagtagtgagaatgggcatccttgtcttgttccatttctcaaggggaatgcctcctgtttttactcattcagtatgatgctgtctgtgg

SEQ ID NO: 500635 - DNA, 201 bp, Homo sapiens
atataaatggaatcatacatatgtggtcttctgtgactggctttcttcacctagggtaatgttttcaaggtttgctgacattctttgaatgggatttgcaycgtatctatatactgttttgcaaatactaaaaatgtattttggatatttgtgatatatatcaaatggctttctaaatgtactgctcttcccagtttctgc

SEQ ID NO: 500636 - DNA, 201 bp, Homo sapiens
ccagtaagactatcagttactaaacacagccctctcattctacacccctaacacaatctcttaaaaaagaaattacaacttccaatctccatttgtcaagkatcttgaatttaaatatacaggtcttcacaaatatgaactaaaattcaacaaagttttgtctactatgtgctggacactaataggataaaaatgactagg

SEQ ID NO: 500637 - DNA, 201 bp, Homo sapiens
aaaggggcctgctggtggcgtgcttcctagcttttctgtagctttacttggcctggtgaccattggtgaactcagaacgttgtgaagcccaagtctcgagytatgtacctacccagaactgaatttaagtcacatggatcaccacttaaccctggacaggcattttgcacatagtgataataataaaaagtttcttttgtt

SEQ ID NO: 500638 - DNA, 201 bp, Homo sapiens
tcaaatcctttcccatgggccttcttatcattggcacaccattcagggatgcatacttcttaagactgcattcttgtgcaactaccacaggagcccagctyggcaggtgtgcctgaaaatcacttggttgggccacatctggaaaacacaggcaataacttcataaatatgtgaacacaactcttctgagctatgacaacc

SEQ ID NO: 500639 - DNA, 201 bp, Homo sapiens
agtccatctggtacagagctttgtttgtttgtttgtttgcttgtttgtttaggcagagtcttgctctgtcacccaggctggagtgcagtggtgcgatctcsgctcactgtaacctccacctcccaggctcaagtgattctcctgcctcagtctcccacatagctgggattacaggtacctgccaccatgcccggctaattt

SEQ ID NO: 500640 - DNA, 201 bp, Homo sapiens
tgtgaattaccacaacctttctgaaaagtaatatggcaaggtccattactatttaaaggtgaagataccttttgaatcagtaatctcaagttcagggattyttcataaaaattaaaggcagaatacctaagtatttatgtacaaggttgtttattgctgttagtaatggcacaaaactaaaaacaacctgctcatcaatag

SEQ ID NO: 500641 - DNA, 201 bp, Homo sapiens
ttcaatgccacccccatcaagctaccaatgactttcttcacagaattggaaaaaactactttaaagttcatatggaaccaaaaaagagcccgcatcgccargtcaatcctaagccaaaagaacaaagctggaggcatcacactacatgacttcaaactatactacaaggctacagtaaccaaaacagcatggtactggtac

SEQ ID NO: 500642 - DNA, 201 bp, Homo sapiens
tgtttgcttgtttgtttaggcagagtcttgctctgtcacccaggctggagtgcagtggtgcgatctccgctcactgtaacctccacctcccaggctcaagygattctcctgcctcagtctcccacatagctgggattacaggtacctgccaccatgcccggctaatttttgtatttttagtagggacagggttttgccatg

SEQ ID NO: 500643 - DNA, 201 bp, Homo sapiens
tccttgattccgtgtgaacctttgtgactgtctcattccatagagaatagtggaagtaaagttatgtgatgtctaagactagatcatgaaaatgcaattcyaattggctctcttgggtcagtcagtcttggaacttagctgctgtgctgtgtggaagtccaaactcacttgcctggaaagacgacctggggaagctgtgtg

SEQ ID NO: 500644 - DNA, 201 bp, Homo sapiens
tgattggtttgtgagtatgcaaaaaatgttaaagcaaagacaccactcaaaggtgggcacgacagagtagaaaaccaattaggaaagggtaggtatatgtkaaataggtgaatggtggggatctatcagaggaaatcatgccaaataggcaagttctcaatccagtctgaggatgtaacttgtagcttggctttcaggctt

SEQ ID NO: 500645 - DNA, 201 bp, Homo sapiens
gcgatctccgctcactgtaacctccacctcccaggctcaagtgattctcctgcctcagtctcccacatagctgggattacaggtacctgccaccatgcccrgctaatttttgtatttttagtagggacagggttttgccatgttggtcaggcaggtctcgaactcgaccttaagtgatctgcctgcctcagcctcccaaag

SEQ ID NO: 500646 - DNA, 201 bp, Homo sapiens
acagaagcagagaatgtgtccagcagacaggagccagaaggatgatctgagcaccatcatttccttctctgaaactcaactatcagagaagtcactcctcytgccctggaaagggcaaatgatgaggtggagagaagcaggggcatgtcttcctcacatggttttccctcctggagagcagagtagaaatgatctccctct

SEQ ID NO: 500647 - DNA, 201 bp, Homo sapiens
gaggcaagacctcggcatttcaggtaaaagcagtaacatatatgaaggcctaggggcaaaataaaatgtagctgtttaagaaactaaaataagttcagttkggatagagtatatacagaatttattacgtgaatttttaattcagtaagcatttatttgctatcaagcagcaatgctaagtacagaggatataaagatggc

SEQ ID NO: 500648 - DNA, 201 bp, Homo sapiens
gatgggtctcttgaagagaggggatggatggtttttcttttctaattcaaccttgcaactctgtgccttttaagtggggtgcataaactgtttacattcarggttaatattgatatgtgaggttttgatcctataatgaagtttgttggttggttgctttgtagttgctattgtgtggttgctttataaggtctgagggct

SEQ ID NO: 500649 - DNA, 201 bp, Homo sapiens
tgtttacattcagggttaatattgatatgtgaggttttgatcctataatgaagtttgttggttggttgctttgtagttgctattgtgtggttgctttatarggtctgagggctatgtatgtaagtgtgtttttgtggtagcaggtatctttctttttgtttccaagtttagaacctgctgaagggtctcttgtaagacttg

SEQ ID NO: 500650 - DNA, 201 bp, Homo sapiens
tctagaccctcaccaatcagaattcatttctccctcctcaagacttccacagcatatgatagcacttaacacagtctttcttgtgtctctccaactgtaartcaatttcctgaggctagagaccacacttaattcatatttgtatacccaacagtatctagattcaataaatgcatatttatgtactgcaaaatattcaca

SEQ ID NO: 500651 - DNA, 201 bp, Homo sapiens
gaaaaggcttttaactttggctcatttcctctgaccaccatgtctccattctaaattacaacctctcaagctacagatcctttaaaactagcttttaaacyagctttctgtggtatcatcacaaaataagaacactttgttacttgaaaataaaagcacaaaattattggactcaataactgttctcattattgcaaacca

SEQ ID NO: 500652 - DNA, 201 bp, Homo sapiens
gtaaggggtaccagggtactccttcacatcttggggtgaagggaatattctatatattgattgtgatgttggttacaaaaatgtattcatttgtcaaaacycactatacatttaaaatgacattatcttattatatatattataacttaataaagttgaaaatgtggcatatgcttaaaacagaatatcaagtagcaatta

SEQ ID NO: 500653 - DNA, 201 bp, Homo sapiens
cttaatttgtaaggtaatcgttatcatgatgaactgaacctggacctgaaattataatgagcaaattatctcaagttattctttctgtcgcttcaaagggwtatataaatcaaaaggccaattctgaaaattttaggaaagagatccaagctattttgtagacccagaaataaactttatacctactgttctattttgttt

SEQ ID NO: 500654 - DNA, 201 bp, Homo sapiens
ttggttacaaaaatgtattcatttgtcaaaactcactatacatttaaaatgacattatcttattatatatattataacttaataaagttgaaaatgtggcrtatgcttaaaacagaatatcaagtagcaattaaagattatgaattttatgtacacatggcaacatggaaaaggaggaaagaaccaagcaggatttatagc

SEQ ID NO: 500655 - DNA, 201 bp, Homo sapiens
cttattgcctagactggagtgcagtggtgcgatctcagctcactgcaacctccatcttctgctttcaagggattctcctgcctcaccctcccaagtagctkggattacacgtgcacgccaccatgccaggctaatttttgtatttttagtagagagggggtttcaccatgttggccaggctggtctcgaaatcctgacctc

SEQ ID NO: 500656 - DNA, 201 bp, Homo sapiens
tgattgaaagtgagaaggaaaaataaagtcaaagcaattctcaggtttctaataaaaaatgatagtgttagtcactgaaactggaaacctaaaagaagaartaagcatttagaaatgtggaattacatttcatgatagatgtctggaatgaagaaatatctgaatgttataagaatatgaggaataagataattagaggat

SEQ ID NO: 500657 - DNA, 201 bp, Homo sapiens
ccaccacacctggcccagatgttcccttcttaaaaggaatcctgatgttaactattaaaataataaactatattacatatcatcaagcttgcatatatacatatatatatatatatatagttggacttatctttattttttaaatattagtgtatattattataaattgttaggctatgaactcattgaacagggccatct

SEQ ID NO: 500658 - DNA, 201 bp, Homo sapiens
cttttcccaaaaatcattcaggagcaaattgtttaatttccaggtaattttgtcattttgggagatcttcttggtactgatttctatttgtattccactayggtctgagagtatgttcatatgatttcagcttttttgaatttattaagacttttttgtggtctgtctttgagcatgttcggggtgtagatgaggagaatg

SEQ ID NO: 500659 - DNA, 201 bp, Homo sapiens
caccacacctggcccagatgttcccttcttaaaaggaatcctgatgttaactattaaaataataaactatattacatatcatcaagcttgcatatatacatatatatatatatatatagttggacttatctttattttttaaatattagtgtatattattataaattgttaggctatgaactcattgaacagggccatctt

SEQ ID NO: 500660 - DNA, 201 bp, Homo sapiens
tatgttcatatgatttcagcttttttgaatttattaagacttttttgtggtctgtctttgagcatgttcggggtgtagatgaggagaatgtgtaggctgcrattgatgggttgagcgctctgtagatgtttgttaggtccaattggtcaagtatccaacttaagtttaaagtttcttggttagttttctaacctaacctca

SEQ ID NO: 500661 - DNA, 201 bp, Homo sapiens
ctttgagcatgttcggggtgtagatgaggagaatgtgtaggctgcgattgatgggttgagcgctctgtagatgtttgttaggtccaattggtcaagtatcmaacttaagtttaaagtttcttggttagttttctaacctaacctcaatgatctgtctaatactgtcaatgggatgttaaagtctcccactattactgagta

SEQ ID NO: 500662 - DNA, 201 bp, Homo sapiens
cagctcacagcaacctccgtctcccaggttcaagagattctccagcctcagccccctgagtgattacaggcacatgccactatgcctggctaatttttgcatttttagtatagatggggtttcaccatgttggtcaggcttgtctcgaactcctgacctcgtgatctgcccgcctcagcctcccaaagtgctgggattaca

SEQ ID NO: 500663 - DNA, 201 bp, Homo sapiens
agctcacagcaacctccgtctcccaggttcaagagattctccagcctcagccccctgagtgattacaggcacatgccactatgcctggctaatttttgcatttttagtatagatggggtttcaccatgttggtcaggcttgtctcgaactcctgacctcgtgatctgcccgcctcagcctcccaaagtgctgggattacat

SEQ ID NO: 500664 - DNA, 201 bp, Homo sapiens
gctcacagcaacctccgtctcccaggttcaagagattctccagcctcagccccctgagtgattacaggcacatgccactatgcctggctaatttttgcatttttagtatagatggggtttcaccatgttggtcaggcttgtctcgaactcctgacctcgtgatctgcccgcctcagcctcccaaagtgctgggattacatg

SEQ ID NO: 500665 - DNA, 201 bp, Homo sapiens
ctcacagcaacctccgtctcccaggttcaagagattctccagcctcagccccctgagtgattacaggcacatgccactatgcctggctaatttttgcatttttagtatagatggggtttcaccatgttggtcaggcttgtctcgaactcctgacctcgtgatctgcccgcctcagcctcccaaagtgctgggattacatgc

SEQ ID NO: 500666 - DNA, 201 bp, Homo sapiens
caggagtaccactgcaatgccatgaaagctgctgtgtgggctgtgcccagcaaagctagggggcaggactattctgagctttgcggacccaacttccaccmcagtatatccagaaagcagacatagagtcaaagatcattctcaagcctcaagatttaatgttctttgccttggtgagatttgtacttacttgccacctgt

SEQ ID NO: 500667 - DNA, 201 bp, Homo sapiens
agggggagaacaccccatcaatgaagcaccctgtgggacaaaaaatctgcacagcagcccctgagtcccagatcttccctctgatgtagtctacccaaatragaagaaagcagaaaaacaattctgctaatatgataaaacaaggttctttaacatgcccaaaagatcacaccagctcaccagcaatggatacaaaccaag

SEQ ID NO: 500668 - DNA, 201 bp, Homo sapiens
ggtaaaagtgaagaaagtaagcataaggctagtcttgagcattttaccttcagcattttatggttaccatatgatattttttcagggtgaggaaagacacrgatgggaacggagacacttcagtggttgccagcattggggattgttagtaaaggaacctttacaactgagaatcagacaggccaacatgccatcccatgg

SEQ ID NO: 500669 - DNA, 201 bp, Homo sapiens
gatgtatatgtattccgttaatttttctcatctttaagtttttgcttatattctttttagtccatttgaaacctgtatacttggaataaaggcttttgcarcttgtagaatgatttttttcctgaaacatgctttggtgctagcacctagaaatgctataataaacatctctatgaattttatcattacaatttttttgta

SEQ ID NO: 500670 - DNA, 201 bp, Homo sapiens
gggcatgtcttcctcacatggttttccctcctggagagcagagtagaaatgatctccctctatgagaacatggagttgagaataaatattcttgcatcttrcccttcaaagttgggcaagggaactaattttatctacagtcagagaactggatttctacctatcatctatgtacacttcattttttcattattccttata

SEQ ID NO: 500671 - DNA, 201 bp, Homo sapiens
gtttttcatagaagttgatagtgtaatcttgaaattcatatataaggccaaagagccaagaataacaatgataactatgaaaagatagtacaaggtagaaraacgtctcctgccagatactgaaactatcattattagaatagcatagcattaggccaaagacacgcagctagactaaaacgacagaacaaagagcagaga

SEQ ID NO: 500672 - DNA, 201 bp, Homo sapiens
cccttcaaagttgggcaagggaactaattttatctacagtcagagaactggatttctacctatcatctatgtacacttcattttttcattattccttatawacatgaatgaggtagctggtggctattgggcacagagagaggcagacaggtttgacacgtgcaccctctacccttagcttgttgaatttagctaataatc

SEQ ID NO: 500673 - DNA, 201 bp, Homo sapiens
caacaacctgaagtaatttacctggctatcaggaaatacctgaggtgtcatgggaaagaaaaaccacaagattctgttttatttactagttggcttggggaaaaaaaatgaaagaacttgcaaagtctttatgattaatatgcttataagtggtggtttaatcacagccacattgcttgctgatagtgtgctgcatgaagg

SEQ ID NO: 500674 - DNA, 201 bp, Homo sapiens
cagttattaagtaacggtttgaaattcttataattatattaatgcatttaagcatatagtcaatgtttgctttatgcttcatagttctatttagagaatamtgcaggatatttattgtcgaatgagagacaaggggtttaaacttgtgagtaatataaataaatcacaatctggttttatttactgcattcattctcagca

SEQ ID NO: 500675 - DNA, 201 bp, Homo sapiens
atattgatatgtgaggttttgatcctataatgaagtttgttggttggttgctttgtagttgctattgtgtggttgctttataaggtctgagggctatgtaygtaagtgtgtttttgtggtagcaggtatctttctttttgtttccaagtttagaacctgctgaagggtctcttgtaagacttggtgtaatagtaactaatt

SEQ ID NO: 500676 - DNA, 201 bp, Homo sapiens
aataatgtatgcaaaagggccagacgtagtgagagcaagacagcagtgaactgtggggcaggaaagaatagagtagaaaggacatttaaaattcatatctracagttggggtcagatatgaattttgcaagccgggaaggagtaggcaaacaaagcgacaacctaatcttcattcacaaaaaaaaaaatatgacaagcaag

SEQ ID NO: 500677 - DNA, 201 bp, Homo sapiens
tgataagtatagaaaagttcagcatgtcttttcaaaggactgtaaaaaaaacttccaacactttacttatattcttgcccttgtgactaagttatggacawtgaaacaccttgagttatgatacaaatccttaaacctaaaatgccatatgttaaaactcaaattatgttaaagcccataactattttaaaaccctgtgta

SEQ ID NO: 500678 - DNA, 201 bp, Homo sapiens
ggctcttagttttaaaatcttactagaagataggttaaaacctaatatgctctaattttctacattccttgtatgtgcttactctggtttctcctctatgsgaagctttattcttcaagcctattcttctagtccctatggagtctaccccattttaaagctgatagagttagctcctttcggtcaaatacagtatgttca

SEQ ID NO: 500679 - DNA, 201 bp, Homo sapiens
gtattatccaaaataaattttggtttttggtatttcaaaataactgaaatcaggatctcaaagaagtatttgtattcccatgttcactgcagcactattcwcaatagccaagatatggaatcaacctaagtgtccatcaatagatgaaaggataaggaaaacgtagtacatttacatactctagaatattattcagcttct

SEQ ID NO: 500680 - DNA, 201 bp, Homo sapiens
ctttacatacactttggaaacagcagtagctttgcattatgaaaaacacgaaagacaaagcacaccaacgccaactctaagaggttggtggctggtgtaawggcttccttcctaaatgcctgccatctggagccggtgtcctcactattctgccttgccggcttccatctcgttcccaactctcagctggaaatgttttgc

SEQ ID NO: 500681 - DNA, 201 bp, Homo sapiens
gctattatcaaaaagacaaaagttaacaaatattgacaaggatgtggagaaaagggaatccttgtatactgttggtgcgaatatatattagtatatcgatyatgaaaaactgtatggaagttcctcaaaaaactaaaaatagaattagcatatgacccagcaatcccacttctgggtgtttacctaaaagatttgaaatca

SEQ ID NO: 500682 - DNA, 201 bp, Homo sapiens
acagatgaaggctggggtgactgaaagattccccaggctctggcttctgataccagaccctatgtacttggatatttttgatttgtttgacatgtactcgrgtaatgaaaccagtgaaatttattagttttttttattggtttgacagtcatttttcttaaggaaaaaaataaatattattgctttttagcaattttctct

SEQ ID NO: 500683 - DNA, 201 bp, Homo sapiens
gaaataaagggaaatccaaggatttgtatatagccaagctgccttcgagtatccaagctataaaaaaagtttttaacatgcaagaattcaaggaattctgkatccatgagttcttaaggaatctactagaagatgaccttaacccaacttgttattaactgggaaagttaagcaaaaaaactaatagtatacatatatata

SEQ ID NO: 500684 - DNA, 201 bp, Homo sapiens
gtgtgtctgtgagggtgctaccaaaggagattaacatttgagagacaaaggagagacagacccaccctcaatcttagtgggcaccatctaattaatcagckgacagtgtagccagaataaaagcaggcagaacatgaaaagactagactggcatagtctcccagcctacatctttctcccgtgctgggtccttcctgccct

SEQ ID NO: 500685 - DNA, 201 bp, Homo sapiens
agtatggcctgcaaaaccaagcctatatactgtctgtctttttaaagagaaagtatgctgatctctgctgcagagacaagaaaaatatattaaaaaaacartaagtgcaatttcttgccaacacgtcgcaatatgcaggaagaagcaggttaagattagaaagatacagtagatagcatttgagtacttccatggaaagtt

SEQ ID NO: 500686 - DNA, 201 bp, Homo sapiens; identical to SEQ ID NO: 122772

SEQ ID NO: 500687 - DNA, 201 bp, Homo sapiens
cgttaatgaaagcatcttttgccatcatgtattatatagaatcttcagtaagcagcaatgcataacaagacaaaagtgactgattctgacctacctaaggaaaaaaaatcacattatcttgtgattatcttggcttcttccctaacacaataatctttggttaccataatgcctaagctcaattagaagtcagaaacccca

SEQ ID NO: 500688 - DNA, 201 bp, Homo sapiens
aatttattaaaattagccgagagtggtggcacatgcctgtagtcctagctactcaggatgctgaggcaggggatctcttgaggccaggagttcaaggatgyagtgggctataatgacactactacactgcagcctgggaggcaaagtgaccctgtccctaaaaaataattttaaaacaataataataataataaattaagc

SEQ ID NO: 500689 - DNA, 201 bp, Homo sapiens
gctggagtgcagtggcataatctcagctcactgcaacttccacctcccaggttcaacagattctcctgcctcagcctcctgagtagctgggattataggcrcccgccaccactcctggctaatttttgtatttttagtagagacggggtttcaccatattggcccatctggtctggaactcctgaccccaagtaacccacc

SEQ ID NO: 500690 - DNA, 201 bp, Homo sapiens
gctgggattataggcgcccgccaccactcctggctaatttttgtatttttagtagagacggggtttcaccatattggcccatctggtctggaactcctgaycccaagtaacccacctgcctcagcctcccaaagtgctggaattacagacgtaagtcaccgtgcccggcctctccaggttcataaacaccacagaaattgc

SEQ ID NO: 500691 - DNA, 201 bp, Homo sapiens
tagaaattatgacaattaaaaggaagcttacattattaaaaatcctcttctgaattttcatgaaattagaggtcctgaggttaacctggtggtatggattrtatttcaaaaggaatttttcttttaaagacagtgtgtatgtgtgtatgtgtgtatgtgtgtgtgtgtgtgtgtgtgtgtgtgtgtgtgtgtgcctgtgtc

SEQ ID NO: 500692 - DNA, 201 bp, Homo sapiens
ggagacatctgtgctttgtcatcacaaaagaaaaccgttttatttttctaattattatctacttatcagccttgggttgagaattcacttgcttttgtgcyaccttgagaattcagtctcaattctccacgtccaggcctaagatagtatcattccctttctattagtgtttatctgcatctgccttagagaagttgttta

SEQ ID NO: 500693 - DNA, 201 bp, Homo sapiens
cctgcatcgatgctccttctactcttgccacacaggcgacccgatccaagaaagtcactgccacaggcaccgccacaaagaagcctttacaaaaggccttratgtatcttttcacccacccttgtgactgtgccatacctaaaaatacaaagaaaacaactatgaaattagtctcaagaaaggtgaaaaacaaagacataa

SEQ ID NO: 500694 - DNA, 201 bp, Homo sapiens
tcaatacaccttaataaactccgctttatatacacatctaacttattagttctctccctctagaaaaccctgatacactcttcaacctgtatatcttcttytagaaaaaaaccttttcttaaacaactcttaggtgaaggggtaaatacaagctaaaagtagaaaatatattttaaacaattataagcacactacatatca

SEQ ID NO: 500695 - DNA, 201 bp, Homo sapiens
gtctgggttttctttttttaaaaaaagcagagaattataaaaagtaatacactaaatagtttattttaacttagaaacacaaatagatattgatttgcctrtcttttaaagttatttgaagatataaaaattatttaagaatagccaataatagaaattatgccataatcaccccattaattactttttttctatcttcca

SEQ ID NO: 500696 - DNA, 201 bp, Homo sapiens
tgtacatcaatagatacttacttgatgtttaaattgttttgtcaaaaaaatggtttcaagtatacttaatttcatcttaagtttttgttgttgtttgagamgggatctcactgtgtcatccaggctggagggcagaggcacaatgttggctcactgcagcctcaaactcccaggaagaaatcctcctgcctcagcccccca

SEQ ID NO: 500697 - DNA, 201 bp, Homo sapiens
cctctgcctaccacactatatcctgtcctttctaacttccactcggccttcactattcagctgagacatgacattcacccagaatcctttcctggctccckgcgcacccagtgcttcactccttcagcaaccacatagtgtgtaatgtcccgtcttctccactatcagcaagagagggaccatttctctgtgtccctgctc

SEQ ID NO: 500698 - DNA, 201 bp, Homo sapiens
atatcctgtcctttctaacttccactcggccttcactattcagctgagacatgacattcacccagaatcctttcctggctcccggcgcacccagtgcttcrctccttcagcaaccacatagtgtgtaatgtcccgtcttctccactatcagcaagagagggaccatttctctgtgtccctgctctatatacaatggcactt

SEQ ID NO: 500699 - DNA, 201 bp, Homo sapiens
aaatattaaaaaggatattatactcaaagattgacatttaataaaagaggaagtcaaattgtccctgtttgcagatgacatgattgtatatctagaaaacsccatcatctcagcccaaaatctccttaagctgataagcaacttcagcaaagtctcaggatacaaaatcaatgtgcaaaaatcacaagcactcttatacac

SEQ ID NO: 500700 - DNA, 201 bp, Homo sapiens
ctcagcaaactatcgcaaggacagaaaaccaaacaccgcaggttctcactcataggtgggaactgaacaatgagaacacttcaacacaggaaggggaacaycacacactggggcctgtcatggggttgggggagtggggagggatagcattaggagatatacctaatgtaaatgacgacttaatgtgtgcagcacaccaac

SEQ ID NO: 500701 - DNA, 201 bp, Homo sapiens
aagacatgccctcagctgcataggtaagaaaggctatagagaagactgggctgtttgcaactatataaacaaaaatactccttggctctcttgtcagttargtagagtgttgtgactaaattttggctaataatatgtaagcagaactatgtacagacttgcagaggttcccttgacagggagagggcatgttttcctcaa

SEQ ID NO: 500702 - DNA, 201 bp, Homo sapiens
acacagtaggtgttcaacacactgtaatgttacaatattccttcctcagataggggggtctaggcatataataattatctgcattttatatgatcattctkcataaataatcatagccacaatagcagcttttatctgaagtcgtgtattgattcagagaaggtttcagcttgacctcaccatagaatatcaacttttcac

SEQ ID NO: 500703 - DNA, 201 bp, Homo sapiens
ataatatgtaagcagaactatgtacagacttgcagaggttcccttgacagggagagggcatgttttcctcaactcttcatccgtcttactgcataaattcyacatgtgataactgacacttacatagccagctcgggaataataaccatcatgcctgcaatggaaataaccgacatgcctgcaacagaaaattccatctcc

SEQ ID NO: 500704 - DNA, 201 bp, Homo sapiens
tgacatatgtaaatttcaaatgagtgctacagataaaaattgttaaataagtggctataatgtgattccaaaaacaaaaggcacccactcactgtactttrttatctaattacatgatcattctgttaaacttcaagcaatgtatttgaaataagaaagtgcagacatattgtccatctcaatttcataaatgttgtatca

SEQ ID NO: 500705 - DNA, 201 bp, Homo sapiens
tcactgctgcagcttcctcagcctcagcaactgccattaacgttagtgcttctctattgaaagagagtctggcatcaaacattaaagaggctgagcagcaytctgcaaaataactggacagtacccttcaaaagtgtcaatggcataaaagacaaagatcaaggaactggcatatactgaaggtgactaaagagacataaa

SEQ ID NO: 500706 - DNA, 201 bp, Homo sapiens
gagaccatcctggctaacacggtgaaaccccatctctactaaaaatacaaaaacaaaattagctaggcatcgtggcaggcgcctgtaatcccagctactcrggaggctgacgcaggagaatggtatgaaccagggaggcagagcttgcagtgagctgagatcgcgccactgcactccagcctgggcaacagagcgagactc

SEQ ID NO: 500707 - DNA, 201 bp, Homo sapiens
tatgacaaacccacagccaacataatactaaatggggaaaagttgaaagcattccttctgagtactggaacaagacaaggatgccccctcccaccacttcycttcagcatagtactggaagtcctagacagagcaaacagacaagagacagaaataaagggcatccaaatcggtaaagaggaattcaaactgtcactgttt

SEQ ID NO: 500708 - DNA, 201 bp, Homo sapiens
acattaaaggtcagaaatgaaatgcccataccaacaactagactgagaagtggtctattactcactgctttcagcttatataaaagagtttttgttgtccmcaactcccaggagggcaactgctgggaaggaatgaagttcctagaagataccaatccatattgaaagggagcaacgtgttggttacgttttccttccaac

SEQ ID NO: 500709 - DNA, 201 bp, Homo sapiens
atttcaaaatctctcatagcacttcaatacctggaatatctcaaaaggtttgctgactattgttaacagctctgactaaacacctatttcttactacaagygtagaacgccagataggatcatcacagtaggcacctcacaaaggtcatgcagaccttagaggaaattatggcccaacaagccacaggagccagagaagtc

SEQ ID NO: 500710 - DNA, 201 bp, Homo sapiens
tcctaatgtatttccaaattttatttctcccaaaagttatataaaataacttcttagaggttttatctgggaaagagacttctggtaaatgtatcactttytttttttccccatcggcaaggtgcttcagagtgctcaaaaatgtataaaatacttgaattataactacaaaattttaaatttctaaaattgtgggtccac

SEQ ID NO: 500711 - DNA, 201 bp, Homo sapiens
tctaaggaaatcttatctgctgaactgagttaatgtccacttgtattttggacacatgcccagaagctagtggatagcagggtcttttataagcaatacarttcccaaaaaccgaaagcaaaaaataaaagataatgttcggagagcaagagcaagggcaaccataaacatatactccaccctgcatttgtttttgaaagc

SEQ ID NO: 500712 - DNA, 201 bp, Homo sapiens
actgcgaatattttatatatggagcttagattgtctgtaggtatatgggtgcttctaaagtgcttaagggtgtttaatataatttgttcttccaatcttgyttgcactattaatttggttaatgggttagtaatcctttctttatagatagcaggacagtaaacttcagcccagctctttgctaaattattacactctctg

SEQ ID NO: 500713 - DNA, 201 bp, Homo sapiens
aaaactttggccctcatggacttcagatgtatttcccaagtaatgtaggtaacagaactctagatatttaaaacttgaactcagaaacaacagtaaatacytacctgacaatatctccttcaagagcaatcactctcttaatgatcttctgttctgggtttttaggagacctagaacaagaagataacattatacaatcag

SEQ ID NO: 500714 - DNA, 201 bp, Homo sapiens
acctcatgatgaatagctgctgtggagttttgttggtagaacccagattgagatggatagaggagcaaatggataatgaagcagtggagatgttgaaaacygctttcaccttcaaaaatactgtcaaagagcaggaattattaacagataaaactagaggaggaagtattattgagaacactttttgtaagttaggagaga

SEQ ID NO: 500715 - DNA, 201 bp, Homo sapiens
tggccaggaaatttactggtcacagggttccattacatgtacaccaaggacaacataaaagtcggtggagtcaaagtgcaattaagaggattgaaaggggrggcccagaaaaagaggcccaggcacaaagtttcctacttcctcattttatctaggaaattggatggctcttttatttccaaactctcatcagctgggaaa

SEQ ID NO: 500716 - DNA, 201 bp, Homo sapiens
ctcataggtgggaactgaacaatgagaacacttcaacacaggaaggggaacatcacacactggggcctgtcatggggttgggggagtggggagggatagcrttaggagatatacctaatgtaaatgacgacttaatgtgtgcagcacaccaacatggcacatgtatacatatgtaacaaacctgcacattgtgcacatgta

SEQ ID NO: 500717 - DNA, 201 bp, Homo sapiens
ctgttaagctctgaagaagccaaacggaaaattagtcaataataaattaaatgttcattgtgtgttaaagctcacaaagtattgctgcatgtatatatggkgtgtgtgtgtgtgtgtgtgtgtatgtgtgtgtgtgtatacatatatatatttaattttatttggtcttcaaaataatccagaaaatagagagatacaaat

SEQ ID NO: 500718 - DNA, 201 bp, Homo sapiens
atcatctcactctttggctaatttctttccaatctgttgttaaaagttaaaataaaaataaatttatgcactgatatcttcagagctttattttaaaaacycaaaacccttttctatttcatatagctcagctgcttgaaatacactatcttgtgtgtcaagattattaagccaactagaagtttcaggagcctacttaga

SEQ ID NO: 500719 - DNA, 201 bp, Homo sapiens
tgtgaatcagcaaccatttttccaggacccctctctgtagcagagagctattctctttctttcaccaattaaacttccactcttaacctcattctttgtgwgtccacatccttgatctctgtggccctgaaacaaccaacttcaggtgttaccccagacaatgaggccacttcaaaaggaagccagatgctattcatcaag

SEQ ID NO: 500720 - DNA, 201 bp, Homo sapiens
taaggctttaaaaaaaaaagaaagaaaatgtgttattttgaataatatgactacctagaaacacacagacaataaacttaaaaatataaataagaatattytgaaatatggttggaatcaagatcaacattaatggccttcttatacacagaaataagcaactggaagacttattggaaagaatattttttaacaataaca

SEQ ID NO: 500721 - DNA, 201 bp, Homo sapiens
aagttaaatccctaccctatcctggaccctaatctcaatagaataaacacagctatataggtactagaataaaatattagagaataaagagaaagtgaagratctgaaaaggatactactggggaaacgtactaatgaatttagtttttcccaaggtaatctttagcagcagcatccatgaataacttttatgaatgtcca

SEQ ID NO: 500722 - DNA, 201 bp, Homo sapiens
aatacccaccagttttaagagcaattttgaaaacttctactcaaaacagaaaaacaataaaaaaacagggaaaaaatagaatagaaaaaccttctggtcaytcataagatgtacagaaatgttgttcatgagtaatcttttaaatgttcacctctatatcaaatgtaatttattttctactctctgagcaatgatccaaac

SEQ ID NO: 500723 - DNA, 201 bp, Homo sapiens
gccttggtgagatttgtacttacttgccacctgtttccatttcttccttcctatttcccccttttgaaatgggaacatctattctatgcctgtcctaccgytgcattttggaagcaaaaacttgtttgatttcacagattcacaggtggaaagcaatttgtctcaggataaatcataccttgagtctcatccatatctgat

SEQ ID NO: 500724 - DNA, 201 bp, Homo sapiens
cccaataggtctttaattacatgtatctgaaaatacaaagtctaattctgttagaaaacttaatgattcttaaaatatttgctttcatgagtatatgattrtctgaaaaacaaactccaaagggcaataattaagcgacatggggttccacataggcagaatttagaaaattaaactaattttctattttatttaatttaa

SEQ ID NO: 500725 - DNA, 201 bp, Homo sapiens
attcccctgctaactccccgagagcaggtgctggtatccacagctgcaagacctgaagacagattacatcacaggagtctttgtagaccctcgctagtacyagcctggaacctggtagctctgctgcgtggctagacccagaagagcagaaatagtcactacagttcagctttcaggaatccccattcataggggaagggg

SEQ ID NO: 500726 - DNA, 201 bp, Homo sapiens
aaagacagaaagaaagaaagaaagaaagaaagaaagaaagaaagaaagaaagaaagaaagaaagagaaagaaagaaagaaagaaagaaagaagagagagaragaaagagagagagaaagaaagagaaggaaagaaagaaggaaggaaggaaggaaagaaagaaagacagaaagaaaggactgaaatttagaaacttgcaga

SEQ ID NO: 500727 - DNA, 201 bp, Homo sapiens
tccagaatctacaatgaactcaaacaaatttacaagaagaaaacaaaaaaccccatcaaaaagtgggcaaaggatatgaacagacacttctcaaaagaagwcatttatgcagccaaaaggcacatgaaaaaatgctcatcatcaccagccatcagagaaatgcaaatcaaaaccccaatgagataccatctcacaccagtt

SEQ ID NO: 500728 - DNA, 201 bp, Homo sapiens
acaaaaaataaaaaaattagtcaagcatggtggcacatatctatagtcccagatacttgggatgctgaggcaggagaatcacttgagcccaggaagtcaargctgcagtgagctatgattatgctgctgcactatagcctgggcgacagagcgataccttgtttcaaaaaaacaaagaacaaagcaaaagtaaaatagtgc

SEQ ID NO: 500729 - DNA, 201 bp, Homo sapiens
cattctagaacaagaaaaagtggagctcttagaagagttttaatcatgaggtcgggcacggtggctcatgcctgtaatcccagcactttgggaggctgagrcaggcagattatctgaggtcaggagtttgacactagcctggccaacatggtgaaatcctatctccactaaaaatacaaaaagtagcagggtgtggtggtg

SEQ ID NO: 500730 - DNA, 201 bp, Homo sapiens
gaggcacaatgttggctcactgcagcctcaaactcccaggaagaaatcctcctgcctcagccccccaactagctgagactacaggtgtgtgccgccaggcygcctattttttttttttttaagttttttgtagagacagggtcccactatgttgcccaggctggtcttgaactcctgagctcaagcaacccacccacctca

SEQ ID NO: 500731 - DNA, 201 bp, Homo sapiens
acaaatagcacaatgagtagaatagtacctcacatctcaatactaacatttaatgtaaatggcctaaatgttctacttaaaagatacagaatggcagaatrtataagaattcaccaaccaagtttctgctgtcttcaggagacttacctaacacacaaggattcacataaacttaaggtaaaggggcggaaaaagacattc

SEQ ID NO: 500732 - DNA, 201 bp, Homo sapiens
gcagggccctcctgggcgatggcccacaaacatctcacagagtccctaaggagttctaccaaactgaatgagtctcctaattacaacattaaaatacctaycatccagtcttacttttgacagatgtccttgtacttttacagagcttagagtgaaagcatctaaaaaaatgtttacctttaacctggtataaggagtaat

SEQ ID NO: 500733 - DNA, 201 bp, Homo sapiens
tgtttcaaaaaaacaaagaacaaagcaaaagtaaaatagtgccctcttctcactaaatatttttgttttgaaatatatagttatttttcataaaactgtcrtatttatgttgatacataataaatatttttatttttaaatgatgaatatatattttaaattttctcaatcttaatttccaatatgctaaatattgatgaa

SEQ ID NO: 500734 - DNA, 201 bp, Homo sapiens
ttctccaggatagaccatatcacaggccacagaacaagtctcattaaatttaagaaaatcaaaattatatcaagtactctctgagaccacagtggaataamattggaaatccactccaaaaggaaccctcaaaatcatgcaaacacaaagaaattaaataacctgctccagaatgattgttgggttaacaatgaaatcaag

SEQ ID NO: 500735 - DNA, 201 bp, Homo sapiens
caaaacacagaacaactatcatggcagtcattatgctaaattctagatggtaaagaggaagatgaattagtccttggtcttaagcactcaccgccatgaamtcaactcaatataatgtgatccatgctagaaaacaatggtatttagtataatctgttaaggaagcaattaattctgtttagggacagaggaaaacctata

SEQ ID NO: 500736 - DNA, 201 bp, Homo sapiens
tggttctttgaaatgataaataaaattgatagaccattagcgagattaaccaagaagacagagatccaaataagcccaattagaaacaaaatcagagataytacaactgatgctacagaaatacaaaagattattcaaggctactgtgaacacgtttatgtgcataaactagaaaacctagaggagacagataaattcctg

SEQ ID NO: 500737 - DNA, 201 bp, Homo sapiens
tttttcaattaaaactgaaggaccaaagaaacccaaggaattagattcatgatgctacttgttctgcttctatcaccatcaaacattaggtaaaataattmttctttgccttcaccttgtccattttctggaggaagggacataggtttgatacaacaaatcaaaaaaacaaaaaagatcctcggggtatttatgcagtat

SEQ ID NO: 500738 - DNA, 201 bp, Homo sapiens
ttagatgtcacttgtatagtatattcacttactcaacagacacatattgaatgtctgctatgtgctaggtatctttctagacactagggatacaacaattwaaaaaaaaaaaaaaggcctagcacggtggctcacacctgtaatcccagcactttgggaggctgaggcgggtggatcatctgaagtcaggagttcgagacc

SEQ ID NO: 500739 - DNA, 201 bp, Homo sapiens
acagtaacatctccatgtcaagccaaaatgccatctcttccatgaagcatttccggatcaccagaaggatactttctctacatagctcttagatgtcactygtatagtatattcacttactcaacagacacatattgaatgtctgctatgtgctaggtatctttctagacactagggatacaacaattaaaaaaaaaaaaa

SEQ ID NO: 500740 - DNA, 201 bp, Homo sapiens
accaaagatttcaatgacaataccaataatacagaccttcttttaagaaattagcacatgaatgactgttacagtatttcctattcttttttaataatattgttttcatagaaataaaatgttacagtagtttttcaatgacaaacaggaatcaaatactttcagaccatttccctaaagggatgacattacatatcttag

SEQ ID NO: 500741 - DNA, 201 bp, Homo sapiens
gttggaagagccagtataaatcagcagctaatgccagtgcctttggaaaggacccactaccaggggttctggaggctggcctggtgacactgtttattatmcccagaaaaaaaattcttggaagtaagggcataaattgaaaggcaactcaatgaccctccttccctctgctttccatattcatacctttccatttttctg

SEQ ID NO: 500742 - DNA, 201 bp, Homo sapiens
gctgtgcttgaacagagttcaggcagcagggcaaggggcagggagagcaaagtgggaagtcagaaatcagagcagccccgcagcagggaaactgcagtggytgagagtcacaaccccaccctcctgggagcactggcaggagtgaggtgcccaggaagcagacagagggggaggcagccagtaagggggcctccacctact

SEQ ID NO: 500743 - DNA, 201 bp, Homo sapiens
gaaactttgcctttgtggtgtcagaagcctgagaggcctgtgtatcaatgataactattaaaagacatcagtgctttcatgtcacccaccttttttaatgaaaaaaaaaaaaatactacaagggcctgccagaaaagaaattagcttgacattaatgaccagaagaacagcactaatacttaataaatagggcagttattt

SEQ ID NO: 500744 - DNA, 201 bp, Homo sapiens
tttggtagaattcagctgtgatcccatctgatcctgggcttttaccaatgtcatttttcacagaattagaaaaaaaaaatcctaatattcatgtggaaccraaaaaaaaaaaaaaagccaaagtaatcctaaggggaaaaaaagctagctgcatcacactacctgacttcaaattatattacaaggctatagcaaccaaca

SEQ ID NO: 500745 - DNA, 201 bp, Homo sapiens
aaataccaataataaacccttatgttaacaaaaagaatacgatttaaataaaaattatagtccttttccaaaagcaaacaataaatagtaaaaataatgattttttttttttacatttttgcaaatctttttagtttctggcttaatagaaaacagctggattctcatatctgctcctgcattcaatcaactccaatatta

SEQ ID NO: 500746 - DNA, 201 bp, Homo sapiens
tggggtatgccaccacatccaccgttttgttttgttttgtttttgatagagacagtatctctctgtgttgcccagactggtcttgaactacttggatcatrcaatcctcccacattagcctcccaaagtgctgggattataggcataaggggccacacccataaatttaatttttaaactaagattatttgggaccttagg

SEQ ID NO: 500747 - DNA, 201 bp, Homo sapiens
ggcacaatgttggctcactgcagcctcaaactcccaggaagaaatcctcctgcctcagccccccaactagctgagactacaggtgtgtgccgccaggccgsctattttttttttttttaagttttttgtagagacagggtcccactatgttgcccaggctggtcttgaactcctgagctcaagcaacccacccacctcagc

SEQ ID NO: 500748 - DNA, 201 bp, Homo sapiens
ttaaagctgagctggtcagcatcaaacacgcacttcaaagtagtgagtcttaagtttcataactggtattcttcaaactgtgaaactcagaatatattgasaaatggccacaattttgggtaagagaacaatcaccttgacaaacattttccaaagtttcagtattccaattttgtcaaggagaaacagccaggattacac

SEQ ID NO: 500749 - DNA, 201 bp, Homo sapiens
aggtaggctgacaaataaaagaatcaaccattcagcaagatgagccaagtctgacctcaaattagttaaacctagagtgtcttagttacccaaggtaaacmgagaaactaagtaccatacatgggcagatgtatggacagttgaatgggcaggtaggctgacaaataaatgaatcaaccattcagcaaggtgaaccaagtc

SEQ ID NO: 500750 - DNA, 201 bp, Homo sapiens
ccgggtcaagcaattctcctgcctcagcctcccgagtagctaggattacaggtgtgcgccaccatgcctgactagttttatatttctagtagagatggggwttcaccatgttggccaggctcatcttgaactcttcacctcaagtgattcatctgccttggcctcccaaagtgctaggcttacaggcatgagccaccaggc

SEQ ID NO: 500751 - DNA, 201 bp, Homo sapiens
ctttctctttctttagattctaagttcccaaaaataatgtaaacttcttcaatatttaccaaaaactaccaattgaattgaatgtttgagtggagaatatatgcattttcagagatatatacaaacaggtagagatctggaaaactgtttcagctcccaatgtcctccctcaatatggactaaattccactgaacttgata

SEQ ID NO: 500752 - DNA, 201 bp, Homo sapiens
tttgacttctttttgctcttccaccacaagatgaaacagcaagatggccctcaccagatgccagctgctcaatcttagacttcccagactctagaaccatragccaataaatttctattcattataaattacccagtctcaggtaggctgttatagcggcacaaaacaggccaagacaggtatttaagaaagaactttaag

SEQ ID NO: 500753 - DNA, 201 bp, Homo sapiens
acgagtggataaagaaaatgtttatatataccatggaatactactcagccttaataaggattgaaataatggcatttgcagcaacctggataaactttgaractattattctaagtaattcaggaatggaaaaccaaacattgtatgttctcactcatatatggacacgacctgttcccccaaaacccattgaaataaaaa

SEQ ID NO: 500754 - DNA, 201 bp, Homo sapiens
tatagtatccctctataatacagctctatgatactcttcatgcccagcacctgttcctgtggtaaactgcttttccctccattctatgtcattctagtacrgctgtcagtcacatgaaatccccaaatcccactcctgccacagaaactgcacaggaatttctgccaatgaactgtctcagctgtttatagttccatgctt

SEQ ID NO: 500755 - DNA, 201 bp, Homo sapiens
aacttccagaacttaaatttgtcaattgggagttttcaatatatactaaaatattatatttttataaaatcttttttgcatatatacaaaatacaaagaayaaaggttggctgggcacagtggctcacgcctgtaatcccagcaccttgggaggccgaggtgagcagatcaagaggtcaggagatcgagaccatcctggtc

SEQ ID NO: 500756 - DNA, 201 bp, Homo sapiens
gcattctcacatcagtattaacaaaaaagctgttagcaacaaatccattgtctgaatcagctcaaagacttattaaacttgagatcttcttgttacatgakaagttgcagtatcaatttcttcagctctatcatgaaggtgaattcagattaattcaagccacctagctgacttgcagtctttacaaacataaaaacaggt

SEQ ID NO: 500757 - DNA, 201 bp, Homo sapiens
tatactaaaatattatatttttataaaatcttttttgcatatatacaaaatacaaagaacaaaggttggctgggcacagtggctcacgcctgtaatcccarcaccttgggaggccgaggtgagcagatcaagaggtcaggagatcgagaccatcctggtcaacatggtgaaaccctgtctctactaaaaatacaaaaatta

SEQ ID NO: 500758 - DNA, 201 bp, Homo sapiens
ttatatgacattacccaagaagacatgctccaagatagaggtaagacctgaattaattatcaagtttactgcctaatattgaggtgagattaacattaatgaaataatataaaaagcaacacctatcagtgtaaaaaatattttatgccaacaatgtttaagcttttgagattcttaaaaggtattctatattttaaaata

SEQ ID NO: 500759 - DNA, 201 bp, Homo sapiens
ggccagattgttaataaacaagaacactactccaaggggcctgggctttactttgggtaacaagacatcattaaagttgtaaaaagagacatgattggccrggcgcggtggctcacgcctgtaatcccagcactttgggaggccgaggcgggcggatcacgaggtcaggagatcgagaccatcccggctaaaacggtgaaa

SEQ ID NO: 500760 - DNA, 201 bp, Homo sapiens
attaaaaggctaatgagaccattttgaaacacatttactgaaaggctaatccagtagtagaatacaatctgtttatcaactgaagaacacaatacgtgacwtttgtacactgtaagagaagaccagaattgccaataaaatatcattgaaaacttcaagtaacccttatggtaaaaaaaaaaaaaaaaaaagtcctattaa

SEQ ID NO: 500761 - DNA, 201 bp, Homo sapiens
acaaaggttggctgggcacagtggctcacgcctgtaatcccagcaccttgggaggccgaggtgagcagatcaagaggtcaggagatcgagaccatcctggycaacatggtgaaaccctgtctctactaaaaatacaaaaattagctgggcgtggtggcacgtgcctgtaatcccagctactcaggaggctgaggtaggaga

SEQ ID NO: 500762 - DNA, 201 bp, Homo sapiens
gaggcagaggaatcacttgaactgggaggcagaggttgcagtgcgccagagatcacaccactgcactccagcctgggcaacaagagctaaactccgtctcaaaaaaaaaaaaaaaaaaatttatactttcagagactatttgctgacatcataaaatgcccaacattaagtaggggatgcaatataacaaattaagtcaca

SEQ ID NO: 500763 - DNA, 201 bp, Homo sapiens
tatcatagagaccgttttgataaggacaaagtggcatagagtttgagattgtggtctccgagaaaaaacaggaatataaatattctctgttgtcaattaarggcatattgaacttagagaattagcagattaacaaccaggtttgcattacttcatgaaaacaaaacagcagcatgtggagagtaccccactcctaagcaa

SEQ ID NO: 500764 - DNA, 201 bp, Homo sapiens
ctggtttgagaaactgaggaaaggctgttatcacccattgaaatagcaaacaggaaagaggaacacttttattatcatcaaatgtatcaagtatgaagtgygtgtaggttatttaagtggaaatgtctgggaagcaattggatgtcatgatctgaagtgtaacagaaatgcctacgctgaagctagagaatatggaaatag

SEQ ID NO: 500765 - DNA, 201 bp, Homo sapiens
attttagaatatctaccttcctataatttgtgtatatgtaacatatttgaaagggcaattaaaaattacatgcccttgctcctaatgattgtatcacatayatactcattttatgaaaaacttttgtctcttttctatataatatttgtttttttaacttctatatacaaactctcaagtacaaaaatgttatttcataga

SEQ ID NO: 500766 - DNA, 201 bp, Homo sapiens
aagtgaggaaccttcaccaccccattttgtggtacaaccatcatttactgatcaaaacagaaaactgatcgtggtcattgtttcttctctctccctgaaaygctatttcccatacaacccaaaaagtctcggtatgaacctgcaaagggatattttgaatctgaccacttatctccattttttctatactcacagtaatcc

SEQ ID NO: 500767 - DNA, 201 bp, Homo sapiens
agaagcattgaaaagtatacacaatgccagaaaaaaaatcaaaaagtatttggcaagtcagagatcactgatgaccttcatgaaggcgatcccaatggtargaacaagcaggactgccaaagactccaaaaggcgaaagagcaaaggagaggcaagaaagaccaagtataaacaactgtttctaaaatcttaactataata

SEQ ID NO: 500768 - DNA, 201 bp, Homo sapiens
aaatttataaagtacactcaaagctttgaactgtacagcctcaagtgatacattagcagtacagacatacattaaagcacttagcatgaaaattgtccacygtaaaatggggcagaaacacattaaatattcttatcaatctcaagcccaaaaggattacaatttagaacatatgcagttcagttattcaaaatggactca

SEQ ID NO: 500769 - DNA, 201 bp, Homo sapiens
aaaacacagtagatgttcatgttttcttaaaaagactgagccagttttcggtccatctaactatactctaatacacttccttctccatttcagtatgttakaaaccaaatgatgcagtttttgagaataacaaataaagaaaacctgcaaaattgtcctaatagcaaacagttaacatgagtctgccctacgaataagatc

SEQ ID NO: 500770 - DNA, 201 bp, Homo sapiens
agataggaatagtatcaacatcaacaaaaaggatgtccactcagagaccccatctgaaggtcatcgacttcaaagaccaaaggtagataaatccatgaagrtggggagaaaccagtgcaaaaaggctgaaaattccaaaaaccagaatgcttcttctcctccaaaggatcacaactcctcgccagcaagggaacaaaactg

SEQ ID NO: 500771 - DNA, 201 bp, Homo sapiens
aataggtaaaaatcttttgactcttcagccaatcactgctccatttggcctctagctaaggaatctcttaagcagcaagcaaaaaatatgattcataaacragtgaaaatgagtcacgtagcagtaaacagaactggggccagaaaggcagctttggagttgtccccattcatttcaaaaagagcattttacatacttttt

SEQ ID NO: 500772 - DNA, 201 bp, Homo sapiens
taacaaataaagaaaacctgcaaaattgtcctaatagcaaacagttaacatgagtctgccctacgaataagatcattgcttccaaacgtttttaaaatacycccaatggtattattagtatcatttatagaactagacttgtgtgatagtctttagaaactgttaagatagcattaaaatatatctcataggtccctcgat

SEQ ID NO: 500773 - DNA, 201 bp, Homo sapiens
aatgaaataaagcaagcaaacaagattagagaaacaagattgaaaagaaatgaacaaagcctccaagaagtatgggactatgtgaaaagaccaaatctacrtttgattggtgtacctgaaagtgacggggagaatggaaccaagttggaaaacactcccaggatactatccaggagaacttccccaacctagcaaggcagg

SEQ ID NO: 500774 - DNA, 201 bp, Homo sapiens
agatgctgacattcaggaaagcagcaggggaagcagtatcctgttctctacattttgggcacattagaaaagtggttcagaaaatcctgtacaagacccawagcgctaccctaggccgaagtgagtccacaaccacacattcggatactccaaaaagatgccaagtggtccttttcattgacaggactagcagtatcactc

SEQ ID NO: 500775 - DNA, 201 bp, Homo sapiens
aaagcaagcaaacaagattagagaaacaagattgaaaagaaatgaacaaagcctccaagaagtatgggactatgtgaaaagaccaaatctacgtttgattrgtgtacctgaaagtgacggggagaatggaaccaagttggaaaacactcccaggatactatccaggagaacttccccaacctagcaaggcaggccaacatt

SEQ ID NO: 500776 - DNA, 201 bp, Homo sapiens
ctactaatcagaaataagatttggttcagtaaggcggggtgaaggaacaaactcaacctaccaattgctccacatgaatttttttttttaatagaggcagkgtcttactctgtcacccaggctggactgtgcagcctccaactcctgggcttaagcctcccgagtagctaggactacaaccacatgccaccactcccagct

SEQ ID NO: 500777 - DNA, 201 bp, Homo sapiens
ttttttcaattaaaactgaaggaccaaagaaacccaaggaattagattcatgatgctacttgttctgcttctatcaccatcaaacattaggtaaaataatwcttctttgccttcaccttgtccattttctggaggaagggacataggtttgatacaacaaatcaaaaaaacaaaaaagatcctcggggtatttatgcagta

SEQ ID NO: 500778 - DNA, 201 bp, Homo sapiens
atatgtcactaacaatatgtgaccttgggcaggtgacagtctctggagccttagtttcttcaagcagtctggcataaaaagccacacttttcactgacatkacatgagtatattgcttatctatataaaacaggattatcaatatgtatgtacgaaggtaggttggtaagcaggtatttgtgtataacatcatgtgatata

SEQ ID NO: 500779 - DNA, 201 bp, Homo sapiens
ggattacaggcgtgtaccaccacagttggctaatttttgtatttttagtagagacagggtttcaccatgttggccaggctggtcttgaactcctgacctcrtgatctgcccacctcgccctctcaaagtgctgagattaaaggcgtgagccactgcacctggccccagaaataggatttcattgttatattactcttcctt

SEQ ID NO: 500780 - DNA, 201 bp, Homo sapiens
agggccgcctgaggatgatccatttccatatactgacttttgcatgactttcccttttcagtatatttactttcaaatgtaacttttatttcactactttaagtaaagtgttcaaaatgacaagctgaatcctggtaattaatttctgattgacttttcctaatatgactcaccaaattaagccataagagacagaaactg

SEQ ID NO: 500781 - DNA, 201 bp, Homo sapiens
gggccgcctgaggatgatccatttccatatactgacttttgcatgactttcccttttcagtatatttactttcaaatgtaacttttatttcactactttaagtaaagtgttcaaaatgacaagctgaatcctggtaattaatttctgattgacttttcctaatatgactcaccaaattaagccataagagacagaaactgg

SEQ ID NO: 500782 - DNA, 201 bp, Homo sapiens
tgaggcatttccagccatgtagaactgtaagtcaattgaacctcttttctttataaattacccagtctcaggtagttctttatagcagtgtaaaaacagamtaatacagcccaggtatatatatatatatatatttttaaacagggtctcactttgtcacccaggttggtgcaatcacacctgcaatgttggtgcaatgta

SEQ ID NO: 500783 - DNA, 201 bp, Homo sapiens
tgtgtccatctggatgctttaagaaatattttgaattcttattttttaagtaaatgctaacgacatggtaatcgtttttatagatttccaatgaagggtgrggtgctttgacagctgtcagcggagtgtcaaacagactgtggcagtgaaagatgaggagatttaaaagcctttattcttagtggccttaatttcatctga

SEQ ID NO: 500784 - DNA, 201 bp, Homo sapiens
ggccgcctgaggatgatccatttccatatactgacttttgcatgactttcccttttcagtatatttactttcaaatgtaacttttatttcactactttaagtaaagtgttcaaaatgacaagctgaatcctggtaattaatttctgattgacttttcctaatatgactcaccaaattaagccataagagacagaaactggc

SEQ ID NO: 500785 - DNA, 201 bp, Homo sapiens
atgtaatttaccatattaacagattaaaaaacaaaactatatgacaatatcaatagttacagaaaagcatgtggcaataatccctcagtcctaatttaagaaaaaaaaaaaaatctcagcaaagttgaaacagaaagtgtgccagttatcaacctcttgcctgtcagctccaaatttacccttccctgtcctgctttgtga

SEQ ID NO: 500786 - DNA, 201 bp, Homo sapiens
aattaacctcaattcctttgtgatgaggtacctagactcacaatcagggaagcgttttgacatggcatatcttgatttcagctaaacatgtgacagtatcwcatgatatccttatgactaaaatggaagcatgctgggtacaaaaacagatatagatggattcagagttaattgactaatcatagctgaaacacattgatt

SEQ ID NO: 500787 - DNA, 201 bp, Homo sapiens
gccgcctgaggatgatccatttccatatactgacttttgcatgactttcccttttcagtatatttactttcaaatgtaacttttatttcactactttaagtaaagtgttcaaaatgacaagctgaatcctggtaattaatttctgattgacttttcctaatatgactcaccaaattaagccataagagacagaaactggca

SEQ ID NO: 500788 - DNA, 201 bp, Homo sapiens
cgtcagccccagcagaccaaggtgagtgacgacacagagaagtcagcacaggaggaaatgtgtgccagcttgtgcccagtatcttggaagtgcaaatttascaggtaacataaaactccataactctatcttaaatgctggtatataaatcacaatgtatctcttttcttaagagtctgtatccagcttctcagagttcaa

SEQ ID NO: 500789 - DNA, 201 bp, Homo sapiens
aagctgcacagtttatacagctcaattatcaataataaaaacaaaatcttcctaaccatagtacaggaaagtccaatttatctttctaaatctataaaaaattatattataaagtcattgtcatctgagaggggctcaaacattatgtatcctatagatgtggaaaaggtagtttaaaagtgtgatcagcagctatttttc

SEQ ID NO: 500790 - DNA, 201 bp, Homo sapiens
aatgccaccacccccagctaatttttaaattttttgtagagacagggtcttgccatgtttcccaggctagtctcggactcctgggctcaagcaatcctccyacctcagcctcccaaagtgctgggattacaggcatgtaatccactgtgcccagccagaaatgttcacttaaagtggataattttatgttatttgaatttc

SEQ ID NO: 500791 - DNA, 201 bp, Homo sapiens
gaaagacagtgatccgctcctccaccaagttattccaccaaggttatcctcttagttttgtcctgtggttttggacaatagtaaacctttcattaacatgttttttttttccctaacttgagcttctccaaggagcagacagccttgtacctgtaaactctcattgtttacaccactcataaaagcaaatgatagtgatat

SEQ ID NO: 500792 - DNA, 201 bp, Homo sapiens
agctgcacagtttatacagctcaattatcaataataaaaacaaaatcttcctaaccatagtacaggaaagtccaatttatctttctaaatctataaaaaattatattataaagtcattgtcatctgagaggggctcaaacattatgtatcctatagatgtggaaaaggtagtttaaaagtgtgatcagcagctatttttcc

SEQ ID NO: 500793 - DNA, 201 bp, Homo sapiens
acaatcttaaagagatgaggaagaaagtgtttggcatctgtgcccaccagatgaagatgttgtaaacctaaatgaaatcagatacaaaaaaagaacaatayacatgatacagaaaaagaactctaatagagtccagtaagtctcaggggaaaattaaggaaaagaaaaagtaatatttaggtccttaattgcctttgagac

SEQ ID NO: 500794 - DNA, 201 bp, Homo sapiens
gctgcacagtttatacagctcaattatcaataataaaaacaaaatcttcctaaccatagtacaggaaagtccaatttatctttctaaatctataaaaaattatattataaagtcattgtcatctgagaggggctcaaacattatgtatcctatagatgtggaaaaggtagtttaaaagtgtgatcagcagctatttttcca

SEQ ID NO: 500795 - DNA, 201 bp, Homo sapiens
tttttatttatttatttatttattttgagatggagtcttgcactgtcgctgcggctggagtgcagtggcgcaatctcggctcactgcaacttttgcctccygggttcaagtgattctcctgcctcagcctcccaagtagctgggattgcaggcaccggccaccacatccagctaattttttatattttcagtagagacagg

SEQ ID NO: 500796 - DNA, 201 bp, Homo sapiens
agtaggttgctgcctggttttttttcccctctcataccagttgtcaacttagtgtgtttatttgtttactctgtctttcacaatgtaaatcccatgagataaaatattcatgactattttatctaccaagagcaacacatatgttaggggcttagtaaatattttttgactgaaagtgaatgaataaatgatgactgagta

SEQ ID NO: 500797 - DNA, 201 bp, Homo sapiens
ggagcacctatgttgagcagctgctatgttaggcattgggatggtaaccaaaatgcatgaaacattgtttccactcccccaagaattttacaggcaagtgkgatgcaatatacctcactatggaaaaaaaagtgagacagcaaaaaatagttttaaatttttgagcaaagtttaaccaaatgcaacccagttaatttacat

SEQ ID NO: 500798 - DNA, 201 bp, Homo sapiens
aaggcaacacttatttaataatgtgatgagatcatctcactctttggctaatttctttccaatctgttgttaaaagttaaaataaaaataaatttatgcaytgatatcttcagagctttattttaaaaactcaaaacccttttctatttcatatagctcagctgcttgaaatacactatcttgtgtgtcaagattattaag

SEQ ID NO: 500799 - DNA, 201 bp, Homo sapiens
ggaagaagaatcacttgaacctgggaggtggagtttgcagtgagctgagatagtgccactgcactccagcctgggcaacagagccagactcctctgtcttaaaaaaaaaaaaaaacagatggatgattccctatggtaggccgaaaatatggaaattccaccaatattttgacattcttgtttgttttgcaaatgtaccag

SEQ ID NO: 500800 - DNA, 201 bp, Homo sapiens
ttctagcttcagaatgcatggaaacagaattagcggctggaacactggtgaacaaaggaatatgaggcaaagagcagaaactaatttcagaaaggccaggttttttttttaagccatgggccccttggtcaagagtaactagctaccctagtccctccacacagacctaacctcctgccagttctcaaggggctcatctga

SEQ ID NO: 500801 - DNA, 201 bp, Homo sapiens
ccctcaggcaacatttaacatctctcagccccaatttcaatggagagagtcagtgagtcattctctatgatccttaatttcccctccagtaataacatgamtctacaccttatagtaaattagagaaattcctattgatattgaatgtgttcatttagcaaatacctctagaatatccaactaagtactactgggcttagc

SEQ ID NO: 500802 - DNA, 201 bp, Homo sapiens
tctcagccccaatttcaatggagagagtcagtgagtcattctctatgatccttaatttcccctccagtaataacatgaatctacaccttatagtaaattaragaaattcctattgatattgaatgtgttcatttagcaaatacctctagaatatccaactaagtactactgggcttagcaagtggaatacatcattgaaca

SEQ ID NO: 500803 - DNA, 201 bp, Homo sapiens
ggaggatcacttgagcctgggtggcagaggttgtagtgagctgagattgtgccactgaaactggcctgggtacctgggtgacagagtgagaccctgtctcaaaaaaaaaaaaaaatacgttgtttaggagtatacagttgtgcaaataaaaatttaaaatctgtgtcttttgtcaggagtaaagtgtagtttttttagttc

SEQ ID NO: 500804 - DNA, 201 bp, Homo sapiens
tcatggtcacttcagattatataatgggagctgctctgaactatccaagcacaaagcaggtctccaaaaattgctcacatgctaaagcttgatattgtcakgtgtctataaatgcatactgaataatgtaaattggtaacctgctgacaatgcatttgcataaatcaagtcaatattcatgtaataaaatcaccactgagc

SEQ ID NO: 500805 - DNA, 201 bp, Homo sapiens
tatagtaccatttttaaagaactcaggctctggatttaaaatgacctggattcaaatcctacacaatttactagctctgtgaccttgaacaaataacttaycttctctcagtcccaatttcttacaacagttagctaacagagaaattatgtagagtaacactgtgttacataacgcacactcaaaattataaacaatgaa

SEQ ID NO: 500806 - DNA, 201 bp, Homo sapiens
tcttcattaccagcttgattgcatttatatccagcatacagcaatgtgcaaactatattttctctttggctattagcgacccaaggaggacctcagacaasaacatacttttagccccaaagtcacatgggcaatcacatttccaatcttttaagcacccttccaatggatatactgtctaaccaggaaaaagattaactg

SEQ ID NO: 500807 - DNA, 201 bp, Homo sapiens
attagcaccttaaggtcctgcttttctcgctaccttaaatacagaccctatgttctcacaggactacatctttcttctactcctttcttctagcctgggtsgacttccctgactacctgaaccctcatgcacacctaccccactgaaaccagtcaatggctagccccacacccccttctattttcttcagagtacttgcca

SEQ ID NO: 500808 - DNA, 201 bp, Homo sapiens
ttccctctaaacaccgcattagctgtgtccagagattctggtacgttgtttctttgttcttattggtttcaaagaacttatttatttctgccgtaatttcrttatttacccagtagtcattcaggagcaggttgttcagtttccatgtagttgggtggttttgagggggtttcttaatcctgagtcctaatttgattgtac

SEQ ID NO: 500809 - DNA, 201 bp, Homo sapiens
ctgcacagtttatacagctcaattatcaataataaaaacaaaatcttcctaaccatagtacaggaaagtccaatttatctttctaaatctataaaaaattatattataaagtcattgtcatctgagaggggctcaaacattatgtatcctatagatgtggaaaaggtagtttaaaagtgtgatcagcagctatttttccaa

SEQ ID NO: 500810 - DNA, 201 bp, Homo sapiens
cactttttagtaataatgtaatatggggggtaggagagatataaatacagtccattgtaggtttgttatgaagagaaatctatgtttatgcaaaaatacayattccattagaaataacaggattcacaagatcagaaattatttcaagaaatataaattttatctacaatgtggaggtttttttttaaatagtagaagaag

SEQ ID NO: 500811 - DNA, 201 bp, Homo sapiens
tgagcctatgtgtgtctttgcatgtaagatgggtctcctaaatatagcacactgataagtcttgactctttatccaatttgccagtctgtgtcttttaackggggcatttagcccatctacatttaaggttaatatttttatgtgtgaatttgatcctgtcattatgataatagctggttattttgcccattagttgatgc

SEQ ID NO: 500812 - DNA, 201 bp, Homo sapiens
tgcacagtttatacagctcaattatcaataataaaaacaaaatcttcctaaccatagtacaggaaagtccaatttatctttctaaatctataaaaaattatattataaagtcattgtcatctgagaggggctcaaacattatgtatcctatagatgtggaaaaggtagtttaaaagtgtgatcagcagctatttttccaaa

SEQ ID NO: 500813 - DNA, 201 bp, Homo sapiens
aaacaggaggtttggatgtgagccagtcttataagttgagagtaggtcagtgcattttaaaccagcacatcattaatgaagaaaggtgtcttgctgctaarccagtttatattttttgggggcaaatatacacatttattgacctatgctaaattgattttgcttttttacccctgcctttgaagcaccttccatattgct

SEQ ID NO: 500814 - DNA, 201 bp, Homo sapiens
gaatttgcagaattaacattgacattacttagataaaactctcaagtattaaatgaaagttaataaaaataagatgtgctattatttaaaatgtttttttwaaaaaaataatttccagttgctggcaagatggccaaatagcaacagctctggtcttagcaacagctctggtctgtagttcccagcgagatcgacacagaa

SEQ ID NO: 500815 - DNA, 201 bp, Homo sapiens
gggcatttagcccatctacatttaaggttaatatttttatgtgtgaatttgatcctgtcattatgataatagctggttattttgcccattagttgatgcarttccttcatagtgttgatggtctttacgatttgttatgttttttcagtggctggtactggttgttcctttacatgtttagtgcttccttcaggagctctt

SEQ ID NO: 500816 - DNA, 201 bp, Homo sapiens
ccattttttcatgtgtctgttggctgcatagatgtcttcttttgagaagtgtctgtttatatcctttgcccactttttgatggggttgtttgtttttttcytttttttttttttttttttgagacggagtctcgctctgtggcccaggtgggagtgcagtggcgcaatctcggctcactgcaagctccgcctcccgggttc

SEQ ID NO: 500817 - DNA, 201 bp, Homo sapiens
aataatttccagttgctggcaagatggccaaatagcaacagctctggtcttagcaacagctctggtctgtagttcccagcgagatcgacacagaaggcagrtgatttctgcatttccaactgaggtaccccgttcatctcaatgggactggttggtcagtgggtgcagcccaaggagggcgagctgaagcagggtggggca

SEQ ID NO: 500818 - DNA, 201 bp, Homo sapiens
tacaccaaaaaattgctatgcacatcaagctactactgttgactttcttcacagaattagaaaaaaatgactttaaatttcatatggaaccaaaaagggcrcatacagctaagacaatcctaagcaaaaagaacaaagctggaagcatcatgctacctgagttcaaactatactacaaggctacagtaaccaaaacagcat

SEQ ID NO: 500819 - DNA, 201 bp, Homo sapiens
actttttgatggggttgtttgtttttttcttttttttttttttttttttgagacggagtctcgctctgtggcccaggtgggagtgcagtggcgcaatctcsgctcactgcaagctccgcctcccgggttcacgccattctcctgcctcagcctcccgagtagctgggactacaggcgcccgccatcatgcccggctaattt

SEQ ID NO: 500820 - DNA, 201 bp, Homo sapiens
tcagaaataatgccacacatctacaaccatctgatctttgacaaacctgacaaaagcaagcaatggggaaaggattccctatttaataaatggtgatgggmaaactggctagccatatgcagaaaactgaaactggaccccttccttacaacttatacaaaaattaactcaagatggattaaagacttaaacgtaaaacct

SEQ ID NO: 500821 - DNA, 201 bp, Homo sapiens
cctgtttttttcttgtaaattggtttgagtactttgtagattctggatattagccctttgtcagacgggtagattgcaaaaattttctcccattctgtagrttgcctgttcactctgatggtagtttcttttgccatgcagaagctctttagtttaattagatcccatttgtctattttggcttttgttgccattgcttat

SEQ ID NO: 500822 - DNA, 201 bp, Homo sapiens
gcttccatgtttggccagatttttaaaaccattgatctaatgcaaaattgcaaaaaaaaaaaaaaaaatcagttgtttctaaaattgtaaagcgagtacayagggaataaaaaaaaaagtaataagattttttgtgctgtggcacgaagtctgttctacggccccaactacttcacaatttcctgggtcacctgtaaagtt

SEQ ID NO: 500823 - DNA, 201 bp, Homo sapiens
caaagagaataaaatacctaggaatacagctaacaagaaaagtgaaggacctcttcaaggagaactacaaaccactgctccaagaaatcaaaggacacaawtaaatggaaaaacattccatgctcatggataggaagaatcaataccaagaaaatggccatactccccaaagtaatttatagattcaatgttgttcccact

SEQ ID NO: 500824 - DNA, 201 bp, Homo sapiens
tgaggcaggagaattgcttgaacctgggagttggagcttgcagtgagccaagattgcaccactgcactccagcctgggcaacagagctagactccatctcaaaaaaaaaaaaaaagttaaaataaacatttatataacaacatagacaaataaaaacaattccaaatatgcatatttgatggttattcattagtaatcaaa

SEQ ID NO: 500825 - DNA, 201 bp, Homo sapiens
aaaagttctatcctatttaatacatagtgctgtgaaaactgaatagcctagccatatgcagaagaatgaaagtggacccatacctgtcacaaagtcttatrttctggtctttggattaggcaatgattttatgaccaagtcctcaaaagccaatgcaacaaaaacaaaaatagacaaatgaggattaaatacagtaaaaag

SEQ ID NO: 500826 - DNA, 201 bp, Homo sapiens
gaggcaggagaattgcttgaacctgggagttggagcttgcagtgagccaagattgcaccactgcactccagcctgggcaacagagctagactccatctcaaaaaaaaaaaaaaagttaaaataaacatttatataacaacatagacaaataaaaacaattccaaatatgcatatttgatggttattcattagtaatcaaaa

SEQ ID NO: 500827 - DNA, 201 bp, Homo sapiens
aatagacaaatgaggattaaatacagtaaaaagcttctgcacagcaaaagaatcacaatcagcagagtaaacagacaaactacagaatgttttccacaagaaaaaaaaaaaataaccccattaaaaagtgggcaaaggacatgaacagtcatttttctttttgtttttttgtcttgtttgttttttgtttttttgttttat

SEQ ID NO: 500828 - DNA, 201 bp, Homo sapiens
cactgaagtttatagatttccaataagcattggcacatcaagatagactaagggttaagggatctgagttttacttcattaggcagctatggaaacttgggaagtcacataatttttcaggccttaatctcctcatctataacgtgagtgcgaatgaactgaactcagctttgatgttctgtcatcaaggtatgcaaatgt

SEQ ID NO: 500829 - DNA, 201 bp, Homo sapiens
aaaaaaaagtacacactttatttttaaaatacttcattgctaaaaaaatgctaatgatcatctgagcctttggcaagttgtaatcttttagctgtggaagkgtcttgcctcaatgttgatggctgctgactgaccagggtggtggttgctgaagagtgaggtagttgtggcaatttcttaaaacaagacaatgaagcttgc

SEQ ID NO: 500830 - DNA, 201 bp, Homo sapiens
ggaaattttcaacttaatttgactagatccatcagaggaatcgttatctatggcagctatagcctaacaaatgtacttcttaagtaataagactagaaagycaaaattattccgtgatccttgagcaacaggatggatattgttagcaagcaggaaaacactgatcgccttgtacatctccatcagagctcttgggtgacc

SEQ ID NO: 500831 - DNA, 201 bp, Homo sapiens
agatggagatgtatatgtatatatgtacgtacatatatacatgtaatgtacatatgtattagtccgttttcatgctgctgataaagacatacccaaaactkggaacaaacagaggtttaattggacttacagttccacatggctgaggaggcctcagtatcatggcaggaagcgaaaagtacttcttacatggcagtggca

SEQ ID NO: 500832 - DNA, 201 bp, Homo sapiens
acacaattgtactaaacaatatgcatgctttctgtttttctatcaattaaatattcaggaattactgtcaaatgccatgtcatagcatgacagagatttascccagattttgaaatctggtttgaaccactagaattagcaaactaagcagcaacataaaatattaagcatgtcaaccaaataatccactttccctctgtc

SEQ ID NO: 500833 - DNA, 201 bp, Homo sapiens
cacatgggcaatcacatttccaatcttttaagcacccttccaatggatatactgtctaaccaggaaaaagattaactggaccagtcaagtctctttttccyattctagccacatataaatgatcaatgcccccacccactggaaatgtacagaagctacaataaaaagaatttcctgcccagggccaagaatttatagatt

SEQ ID NO: 500834 - DNA, 201 bp, Homo sapiens
gagaagtgtttttccttctaacaccaaccaattctgacacaaactcgaagtcccataattcaattaattctgataataacaaccaggagttagcatcagawtttttagtgctcagtcccacaaatcaaggtccctaggttacacacacttctgtccaacttggctataaagtctgaggtgggagggtcctcccctcacttc

SEQ ID NO: 500835 - DNA, 201 bp, Homo sapiens
aatgcaatgaaaattcattctcgtgtatcacaagattattctgtattgtacaggcagaatattttcaatgcagctgaaacccattaaccactctaggcataaatcacttcattcacaaaacatacagcatctagagtgctttatgtaatgcaggatttttaccaaatagttattttcactgatttcagaacactctgttct

SEQ ID NO: 500836 - DNA, 201 bp, Homo sapiens
cctttctgggcctactatgaaataattcatttatactttcttctaagtattttatgacttacatttaatattatttctatatttaacccatctgaaatgcmttttgtatacagaattggagagagctaatcatgtttttttcagacaaaagtattttaacacgtcaagtttaaaccataaacacttttcggattaattttt

SEQ ID NO: 500837 - DNA, 201 bp, Homo sapiens
tgaaatgttcaatatcatatgtcatttgataattgctaattaaaacaattagatactattacacattcaaccgtgactaaaacccaaaacactgactacascaaatgctgacaaagatgtggaacaataggaactctcactcattgctggtgggaatgcaaagtggcacagccactttgaaagagggtttggcagtttcta

SEQ ID NO: 500838 - DNA, 201 bp, Homo sapiens
cttagttattctacttgtagaaatccatttgaaaaataaaatcggaaatatagacaaatttattcattacaaggggtgttcaaacaaggctttttatagcaaaaaaaaaaaaataatttacctaaatattcaacaacacagaattggttcaataaattatgatacaaccaactaaacgaaagagacaggcttacaataaaa

SEQ ID NO: 500839 - DNA, 201 bp, Homo sapiens
actaaaaataatatttcggtggaactaatgggtctaagtattagtagaatcagcttatttttactgtttgatgttatagataagcatacccatttgggtcmacattatgaaaatgactgcattcctagctatgagatccagagaatcaagcaattgccttgtgattttaatcaatgctgacatcaaggtagaaatttcagg

SEQ ID NO: 500840 - DNA, 201 bp, Homo sapiens
tcttagagtgctgttagaaaaaaactgtgagactaaaaatcatacagccagatcaaatatttttcaaaaatgaacacaaaggcaaagatgtcattaccgayatacccaggacctagccaaagcccacaacacccctgaaattctcaagatcaagttcaaaaaaaggggtccccgtgaaagtgaccatcaagatggcaccac

SEQ ID NO: 500841 - DNA, 201 bp, Homo sapiens
caaaatgctgctgaaagaaatcacagatgacacaaacaaatagaaacacatcccatgctcatggatgggtagaatcaatattgtgaaaatgaccatactgmcaaaagcagtctacaaattcaaagcaatctccaccaaaataccaccattattcttcttcacagaattagaaaaaacaattctaaaattcatatggaacca

SEQ ID NO: 500842 - DNA, 201 bp, Homo sapiens
aactacaaaaagtattctggcgtggtggtggatgcctgtaatcccagctacacaggaggctaaggaagaagaatcacttgaacctgggaggtggagtttgyagtgagctgagatagtgccactgcactccagcctgggcaacagagccagactcctctgtcttaaaaaaaaaaaaaaacagatggatgattccctatggta

SEQ ID NO: 500843 - DNA, 201 bp, Homo sapiens
taggaactctcactcattgctggtgggaatgcaaagtggcacagccactttgaaagagggtttggcagtttctaacaaaactaaatagactctcatcatawgatccatcaattgtgctccttgttatttattcaaataagttaaaaatttatgtccatacaacagccctcacaggactgtttatagcagctttattcataa

SEQ ID NO: 500844 - DNA, 201 bp, Homo sapiens
catcatattgcccaggctgatctccaactcctggtctcaagttatccatcagcctcagcctcccaaagtgctgggattacaggcatgagcctctgcacccrgcctagatgtattattaatgcattattattaatgtatcctttcatactaacaacacctaagttgtttttaacatgtactaacatttcctactttttaaac

SEQ ID NO: 500845 - DNA, 201 bp, Homo sapiens
tactcagcaataaaaagaagtaagctattaagtcatgaaaaatcatggaagaaccattaatgtatattgcttagtgaaatatggcaatctgaggaagctayatactatgtaattccaactatatgacattctgatatttatgcatgagacatgaaaacatatcaatacaaaaacttgtagttaatattcatagcagtgtta

SEQ ID NO: 500846 - DNA, 201 bp, Homo sapiens
agcctcccaaagtgctgggattacaggcatgagcctctgcacccggcctagatgtattattaatgcattattattaatgtatcctttcatactaacaacamctaagttgtttttaacatgtactaacatttcctactttttaaacatgtagtagtatatcctatcatttaaacatgtactagcatatcctatctttaggct

SEQ ID NO: 500847 - DNA, 201 bp, Homo sapiens
ctgcacccggcctagatgtattattaatgcattattattaatgtatcctttcatactaacaacacctaagttgtttttaacatgtactaacatttcctacyttttaaacatgtagtagtatatcctatcatttaaacatgtactagcatatcctatctttaggctcctttaatatagagtcaaggttctccttctccttgc

SEQ ID NO: 500848 - DNA, 201 bp, Homo sapiens
tggctcatttcacttggcataatggcctgagggtccatctatacagtagcatatgtccgaactttcttcttttttaaagctgaatgacagtcaattgtacatatacaccacactttgcttattaattcatctgtcaatggatatttgggttgcttctgcattttggcgattctgaataacatgctataaatgtgagtatat

SEQ ID NO: 500849 - DNA, 201 bp, Homo sapiens
actgaagtttatagatttccaataagcattggcacatcaagatagactaagggttaagggatctgagttttacttcattaggcagctatggaaacttgggaagtcacataatttttcaggccttaatctcctcatctataacgtgagtgcgaatgaactgaactcagctttgatgttctgtcatcaaggtatgcaaatgta

SEQ ID NO: 500850 - DNA, 201 bp, Homo sapiens
ttgctaaaaaaatgctaacaatcatctgagcgttcggccagttgtaatcctttagctactagggggtcttgcctctatgttgatggctgctgactaatcasggtgatggatgctgaaggttggggtagctgtaacaattttcttaagaaaaccataaagtctgccctattaattaactcttcctttcatgaaagatttttt

SEQ ID NO: 500851 - DNA, 201 bp, Homo sapiens
ctgaagtttatagatttccaataagcattggcacatcaagatagactaagggttaagggatctgagttttacttcattaggcagctatggaaacttgggargtcacataatttttcaggccttaatctcctcatctataacgtgagtgcgaatgaactgaactcagctttgatgttctgtcatcaaggtatgcaaatgtat

SEQ ID NO: 500852 - DNA, 201 bp, Homo sapiens
gttccatttatagagcacagtcagagcatattcagcataatgcttaaggggcctaggattttcagagtggtcaaggaccattggcttcaacttaaagtgarcagctacattagcccctaacaacaaagtcagactgtccttcaaaactttgaagccatgcactgacctctcctctgtagctagagaactcctagatggtat

SEQ ID NO: 500853 - DNA, 201 bp, Homo sapiens
ttaaaataacatacattacagtgtttacttgattctattggaacaaggaaaatgatattaatttttataaccaccgaatattataccatatttctatactyttactataccattattactatgttattttaccattattacattattatcacaatacataggcctatttaaatataattaggagtctacattacctgatgt

SEQ ID NO: 500854 - DNA, 201 bp, Homo sapiens
gaagtttatagatttccaataagcattggcacatcaagatagactaagggttaagggatctgagttttacttcattaggcagctatggaaacttgggaagkcacataatttttcaggccttaatctcctcatctataacgtgagtgcgaatgaactgaactcagctttgatgttctgtcatcaaggtatgcaaatgtatgt

SEQ ID NO: 500855 - DNA, 201 bp, Homo sapiens
ttgatggggatggcactgaatctataaattaccttgggcagtatggccattttcatgatattgattcttcctacccatgagcatggaatgttcttccattygtttgtatcctcttttatttcattgagcagtggtttgtagttctccttgaacaggtccttcatgtcccttgtaagttggattcctaggtattttattctc

SEQ ID NO: 500856 - DNA, 201 bp, Homo sapiens
gcaacagaaacctgacttctgttgttacctacagcagaccccagacactgccactcagaggtaatgccaccattcagaactacccatagatgtttaaaaagtgtgtgtgtgtgtgtgtgcatttgtgtgttcagaaggcataaaatctgaatttaggagtattcaatgcatagaaaccactacgtcacccaacccaccctc

SEQ ID NO: 500857 - DNA, 201 bp, Homo sapiens
atagatttctcagatagtatggcctgcaaaaccaagcctatatactgtctgtctttttaaagagaaagtatgctgatctctgctgcagagacaagaaaaawatattaaaaaaacagtaagtgcaatttcttgccaacacgtcgcaatatgcaggaagaagcaggttaagattagaaagatacagtagatagcatttgagta

SEQ ID NO: 500858 - DNA, 201 bp, Homo sapiens
tcatgatttggctctctgtttgtctgttattgtgtatatctacaactatctgatctttgacaaacctgacaaaaacaagcaacggggaaaggattccttayttaataaatggtgctgggaaaactggctagccatatgtacaaagctgaaactggatccctgccttacatcttatacaaaaattaattcaacatggattaa

SEQ ID NO: 500859 - DNA, 201 bp, Homo sapiens
atccatacaggtctacaggaacctcaattcttgccttctcagaagaatgaatttgactaagggccataacgcagaagcagagaccaaggcaagttttagartatgaatgaaagtttattaaaaagctttagagcaggaacaaaaggaaggaaagtacacttggaagagggccaagcaagcagcttgaaagatatgtgcatg

SEQ ID NO: 500860 - DNA, 201 bp, Homo sapiens
caacagaaacctgacttctgttgttacctacagcagaccccagacactgccactcagaggtaatgccaccattcagaactacccatagatgtttaaaaagtgtgtgtgtgtgtgtgtgcatttgtgtgttcagaaggcataaaatctgaatttaggagtattcaatgcatagaaaccactacgtcacccaacccaccctca

SEQ ID NO: 500861 - DNA, 201 bp, Homo sapiens
tctgtgtcttttgtcaggagtaaagtgtagtttttttagttctaaacctagaataggaaaattgttcatgttattacagaccatccttcacaatcatactyataaaaaattatgaattgtacttttaaaacttgttctcatctactctggacttaaactgatgttatatttttaacctaaaacattaatatgaggaattca

SEQ ID NO: 500862 - DNA, 201 bp, Homo sapiens
gcagtcccagctctgttccttacaaagctgttgagttctatgagtttgatgtatttttaaccatttccgtagacagatgaatggatacacaaaatgtggcatatatatatatatatatatatatatatatatgtatatatatgcaccaagttcatgtatatatatgccaaatatatatatatatgaacttcaaatattttt

SEQ ID NO: 500863 - DNA, 201 bp, Homo sapiens
caaaaacaagcaacggggaaaggattccttatttaataaatggtgctgggaaaactggctagccatatgtacaaagctgaaactggatccctgccttacaycttatacaaaaattaattcaacatggattaaagacttaaacgtcagacctaaaaccataaaaaccctagaagaaaacctaggcaataccattcaggacat

SEQ ID NO: 500864 - DNA, 201 bp, Homo sapiens
aacagaaacctgacttctgttgttacctacagcagaccccagacactgccactcagaggtaatgccaccattcagaactacccatagatgtttaaaaagtgtgtgtgtgtgtgtgtgcatttgtgtgttcagaaggcataaaatctgaatttaggagtattcaatgcatagaaaccactacgtcacccaacccaccctcaa

SEQ ID NO: 500865 - DNA, 201 bp, Homo sapiens
cagtcccagctctgttccttacaaagctgttgagttctatgagtttgatgtatttttaaccatttccgtagacagatgaatggatacacaaaatgtggcatatatatatatatatatatatatatatatatgtatatatatgcaccaagttcatgtatatatatgccaaatatatatatatatgaacttcaaatatttttc

SEQ ID NO: 500866 - DNA, 201 bp, Homo sapiens
caacctacaaaatgggagaaaattttcgcaagctactcatctgacaaagggctaatatccagaatctacaatgaactcaaacaaatttacaagaaaaaaayaaacaaccccatcaaaaagtgggtgaaggacatgaacagacacttctcaaaagaagacattaatgcagtcaaaagacacatgaaaaaatgctcatcatca

SEQ ID NO: 500867 - DNA, 201 bp, Homo sapiens
acagaaacctgacttctgttgttacctacagcagaccccagacactgccactcagaggtaatgccaccattcagaactacccatagatgtttaaaaagtgtgtgtgtgtgtgtgtgcatttgtgtgttcagaaggcataaaatctgaatttaggagtattcaatgcatagaaaccactacgtcacccaacccaccctcaaa

SEQ ID NO: 500868 - DNA, 201 bp, Homo sapiens
tacacactctgatagtgtaccttatctatgatacttaaaaggaaattttcaaacataaactattccagtataaatttcatgatcagtcttggctgagttasctgaataacctatctgacatagttttgttctcacctttgaaatccaattacatcaacaagaagataaaagatgacttaccggcccaaaagaattactgtc

SEQ ID NO: 500869 - DNA, 201 bp, Homo sapiens
ttacaaagctgttgagttctatgagtttgatgtatttttaaccatttccgtagacagatgaatggatacacaaaatgtggcatatatatatatatatatakatatatatatatgtatatatatgcaccaagttcatgtatatatatgccaaatatatatatatatgaacttcaaatatttttcaagtattagtaaaaggga

SEQ ID NO: 500870 - DNA, 201 bp, Homo sapiens
ggacccaatgggaggtaatttaatcatggggacagttaccctcatgctgttcttatgatagtgagtgagttctcatgagatctaatggttttataaggggyttttcccccttttgcttggcacttctccttcctgttgccatatgaggaaggacgtgtttgcttccctttccatcatgattgtaagtttcctgaggcctcc

SEQ ID NO: 500871 - DNA, 201 bp, Homo sapiens
gcttttaagtcaatattcaactttttcaactgattcatgcacaactacagtcttcatttttttcggtcaaacttctcaaaccaatagacaacacttttcayaacctcttaatactctaaattttagcataagtaagaaataaaggaaagaacataatctgaataacttcttgttagatacaaactatcagtatcagttgaa

SEQ ID NO: 500872 - DNA, 201 bp, Homo sapiens
gacagatgaatggatacacaaaatgtggcatatatatatatatatatatatatatatatatgtatatatatgcaccaagttcatgtatatatatgccaaawatatatatatatgaacttcaaatatttttcaagtattagtaaaagggaatcctgtcacatgcaacaacatgaatgaacctcgacagtattatgctgagtt

SEQ ID NO: 500873 - DNA, 201 bp, Homo sapiens
atagctcactgcagccatgatctcccaggctcacattatccttcctcccatctcagcctctgtagtagctagactacaggcatgcaacaccatgcccagcttttgtttgtttgtttgtttgtttgtttgtttgtttttggttaagtagagaccagggaagtcttgctatgtcacccaggctggtctcaaactcctgagctc

SEQ ID NO: 500874 - DNA, 201 bp, Homo sapiens
accttattaagctgggtattctggataaatgctcagaaagaaaacaattaccaattttgtctcttcaaataaccattcaagaattacaaaggaaaaccagyataaaatcatttctgcagtgacacggtgagttttaaatcaagcatattccagaaaccagaagagtgatatgaaaccaagattgagttttaatgtcatata

SEQ ID NO: 500875 - DNA, 201 bp, Homo sapiens
ctggacatgagtttcttttcatatctccctcctttcaggacagaaaccatctctaattattaatctaccaaaaaatgacataaatgaatgcatgatcttcaagaagaagagagccatatggatacattggcttctattattcagagctactgcaccaatcattaaaaaaaaagaatttattaaacaagcatcatttgtagt

SEQ ID NO: 500876 - DNA, 201 bp, Homo sapiens
ctcactgcagccatgatctcccaggctcacattatccttcctcccatctcagcctctgtagtagctagactacaggcatgcaacaccatgcccagcttttgtttgtttgtttgtttgtttgtttgtttgtttttggttaagtagagaccagggaagtcttgctatgtcacccaggctggtctcaaactcctgagctcaagt

SEQ ID NO: 500877 - DNA, 201 bp, Homo sapiens
ctgtgactatagactatttttaatggtacaatcaatcttttttttcttttgctcctacgtccttctgggacactctaaaacttacatgtaaaaacactatytgtgttctgcatattcaaatatgcagagagtagtaagtgaaagtacactctatttgtgtttttacctactagtctcttgtatatttgaatattgctatgc

SEQ ID NO: 500878 - DNA, 201 bp, Homo sapiens
tggacatgagtttcttttcatatctccctcctttcaggacagaaaccatctctaattattaatctaccaaaaaatgacataaatgaatgcatgatcttcaagaagaagagagccatatggatacattggcttctattattcagagctactgcaccaatcattaaaaaaaaagaatttattaaacaagcatcatttgtagtt

SEQ ID NO: 500879 - DNA, 201 bp, Homo sapiens
caggttaacgaaaagtcaattccaaggtatagaaaattcaccttactcaccactatgagtttgtaaatcactaagagagtatgatgccacctacatatactatagtgaggacttgatgacagcaaatcatattttgtgcaaccaataatgttattaaataaatgtagctactgaataacatacttaaacaataactccact

SEQ ID NO: 500880 - DNA, 201 bp, Homo sapiens
caaatagaaaatctttccattttggctttccatcctactaaactccattccagtatgtattactcactcctcttcatgttacagtaaaagattaaatagtygtttactttttgatgtatgtaaaattgaaatctaggcttcagaagtattctttggaagtatcagtacacctagagctgaagcagcgtgggatgcagcaat

SEQ ID NO: 500881 - DNA, 201 bp, Homo sapiens
ttttgctcctacgtccttctgggacactctaaaacttacatgtaaaaacactatttgtgttctgcatattcaaatatgcagagagtagtaagtgaaagtayactctatttgtgtttttacctactagtctcttgtatatttgaatattgctatgctaatacagagtggtttcctagataccagacagatttgaaagaactc

SEQ ID NO: 500882 - DNA, 201 bp, Homo sapiens
gaatcagtattatacattcagcctttctctgagaagtgctactgcaaagttaaccctgatctttgtttataaataactaaataaataaaacaaagtaacayaaaacaatgaggagagcatacaactctggtatcagtacattttgtacaaagcttacaagcttttctctatttatgacttgtaatgataatgtctttctgc

SEQ ID NO: 500883 - DNA, 201 bp, Homo sapiens
ctaaaacttacatgtaaaaacactatttgtgttctgcatattcaaatatgcagagagtagtaagtgaaagtacactctatttgtgtttttacctactagtmtcttgtatatttgaatattgctatgctaatacagagtggtttcctagataccagacagatttgaaagaactcttcgagctatagaagaaccctggtaaaa

SEQ ID NO: 500884 - DNA, 201 bp, Homo sapiens
gttaaaatattgggctggtcccttttaggactgccaaagaaatataatactcctaatagaatttctctagagaaagaattttaaatagctttgtgctcctkaattcacataaaagaaagacaagataatcttttaggtgatttaacagttaagtgaggtgtcagcctacaaggctgtatgtatctatgacttgcaaataat

SEQ ID NO: 500885 - DNA, 201 bp, Homo sapiens
ttttaagggaggttctaaccttttattagtagaatatttcaaaagaattcactaagccttttatatttaagcattactttttcataaaataaaatctatcmaatatactttatacacaaatattttggtcacagctcattattacttaattaaaataaattgccaacacacttataatttgatctaaattatgactcaaaa

SEQ ID NO: 500886 - DNA, 201 bp, Homo sapiens
atgtaaagtgcttagggcaactgaaaagtcaacagaactcaataacaattattattatgcatcaatatggatacttgtttaaaaataagctgcttgggaamatggatactgtgtatattttcaaagcttgctttctctccctgttttgattcagatactgtcctaaaactttagctatttcacttacttagatgaatttca

SEQ ID NO: 500887 - DNA, 201 bp, Homo sapiens
atttttgcaacttttcttcaaaacaaataaaagtaaaattaagttaaaacacttttaaatgtgattatttaggactttattatgaaagaacctctgtcccratggacttgttaagtgatatattattgtgaaatagtgcaacttatgttaagccaggaaggccatcacacaggttaacgaaaagtcaattccaaggtatag

SEQ ID NO: 500888 - DNA, 201 bp, Homo sapiens
tttcagcaagtgatgtttcctaaccaatcataaggtatatttcatagttattttcctctatatttatctattcatccattgatctatccttccctccacctatctatccacccatctatgcctagggaaaggaagggctgtagagaaaattctatattgcggtatatagcaatatctagggattaagtttgtaccataaga

SEQ ID NO: 500889 - DNA, 201 bp, Homo sapiens
ggaagcagaatactgtgttcagaaaacaaaacattgatgtttgcaaataggtctctgtgtgatgaagaatactgcttatataatgactaggtttcaaaatmaaatgtgcaacatattcaaaatcttacggaattgtaatcatgtagaaaataatagttttctaattgctcttaagagaataattttttttttttttgagat

SEQ ID NO: 500890 - DNA, 201 bp, Homo sapiens
ttgagtgtgctacaattaaaaatggtcaccacaagaagctgaaatattaggagtgttcaggggcattactgagagtcttcaagcaaaaagggttttcccarctgtcactgtaattacaatgaaaaaattttacttcctaaggatttcatctagaacacattatacataacagaatatacatgcattcaaatgtaatagaca

SEQ ID NO: 500891 - DNA, 201 bp, Homo sapiens
taatgaaaaaataactttaaaatgaaaaagataaagcagagagaatataaagatagaaaagtaataaagagataataattaatatataaattccagtcaatatagccctgctaggcaaaactgctaaaagcactcacagattccactttcagctttcagacacaaagattacaacagctataaggtaaaacaaaatttgcg

SEQ ID NO: 500892 - DNA, 201 bp, Homo sapiens
agtttgaaaccagcctgggcaacatggcaaaaccctgtatctataaaatatataaaaattagctgggcatagtggtgtgtgcctgtaaacccagctactcsggaggctgaggcacgagaatcgcttgaacctgggaggcagaggttgcagtgagccattatcacatcactgtactccagcctgggcaacagagtgagactc

SEQ ID NO: 500893 - DNA, 201 bp, Homo sapiens
cagtaaactctacctgcagaccaaatgtagcttaccacctattaatttttataaataaagttttattggaacgcagccacacccattttcttaattattgkctacagctcctttcacaatacaaggtaaaaattgaatagctgcaacaaggactagatagtgcttctgatcctttacagaagaaaaattgccaatctctgt

SEQ ID NO: 500894 - DNA, 201 bp, Homo sapiens
gtgcctgtaaacccagctactcgggaggctgaggcacgagaatcgcttgaacctgggaggcagaggttgcagtgagccattatcacatcactgtactccascctgggcaacagagtgagactccgtctcaaaaaaataaataaaataaaataaaataacaatattaaaggccccttttgacccaccttacctgcaaagaat

SEQ ID NO: 500895 - DNA, 201 bp, Homo sapiens
ataagaaggtactgccttttcattcagggtatgaatatataaatatatctttgactttacagcatatggtaataacttaaaaattatatgcctaattgtgaaaaaaaaaaaagaaaaaaaaagaactcttcttgccagaatccaagtcccatgaaagtagccaatgctgtctcattagttagtaagctaatggaaatgttg

SEQ ID NO: 500896 - DNA, 201 bp, Homo sapiens
aaaaaaaaaaatctcagcaaagttgaaacagaaagtgtgccagttatcaacctcttgcctgtcagctccaaatttacccttccctgtcctgctttgtgatrtgggagctagaccctgtatcttttctttgccagctgctgtaacactaaattttgttagcagagggtgctggagagaacaatgcaagatgaaggagcttct

SEQ ID NO: 500897 - DNA, 201 bp, Homo sapiens
gggctcaaacattatgtatcctatagatgtggaaaaggtagtttaaaagtgtgatcagcagctatttttccaaatattattatgataatgtcactgaccaycttttacgaaattgtaatcagttgtgatttcttttctcattctaaatacatattgacttgtatataaatttgcatctgtaattttgtattttttttagga

SEQ ID NO: 500898 - DNA, 201 bp, Homo sapiens
ctgctaaagccaactaggttcaaagaccctgaactaggttagcaaactcactaaaatcaactatgatcctgaacggtatgcactgagcggtcacaataacytaggcaccagcatctaactaaaatgtaaagaggtgaagaggagttctggtttgttcagtaaaacagacccttgggcataaaactatacaacttctagcac

SEQ ID NO: 500899 - DNA, 201 bp, Homo sapiens
gcctcgcaaagtgctgtgattaaaggcatgaaacaacacacctagcctgtttaattctcataaagcacttaggtcattgactatcactgagtaataactgsataaatgtcagtcaatgattgctatggtccaaagtttccactctcacctcattgcaaaatagatcttctgatgagaaactcaacattatccctagaatta

SEQ ID NO: 500900 - DNA, 201 bp, Homo sapiens
actgatgggctgagtctacactggctcttcctgtcatataattcataaagaatcagaaggtactctccagctagaaaatcagctctttttcctgagtttgttttttttttttttttaataaagaacttagcaaccaatctacacagtcattacaataaagtttgttatcctcttctaggtgggaagctcaggaaacctgcc

SEQ ID NO: 500901 - DNA, 201 bp, Homo sapiens
tgaaatgtttccaccaccctgatcacaggttctccacacatgtgccagatactaagtcagtttccactgcatcctgactctggaaatcatcctgatgaacwgtcttaagcatttaagtcactcgaaagcaagatttcttttggaattaccacacttgtagtctgttttgttttaattggctcttgtgagtctggtggggat

SEQ ID NO: 500902 - DNA, 201 bp, Homo sapiens; identical to SEQ ID NO: 20724

SEQ ID NO: 500903 - DNA, 201 bp, Homo sapiens
tgaaggacatgccactccgaattcatgtgctacttggcctagctatcactacactagtacaagctgtagataaaaaagtggattgtccacggttatgtacrtgtgaaatcaggccttggtttacacccagatccatttatatggaagcatctacagtggattgtaatgatttaggtcttttaactttcccagccagattgc

SEQ ID NO: 500904 - DNA, 201 bp, Homo sapiens
aagatcaggagtatatatatataataatatgcttaaactttatatataataaaatatatgtaatgaaaatatatattaaaatatttataacatatatagayttaaaataaatacaataagtgcatcaaactttacagttttaccacatggtacaacctgattagtataatattatttaataaataatataatgataatgaa

SEQ ID NO: 500905 - DNA, 201 bp, Homo sapiens
caatggcacgatctcagctcactgcagcctccacctcctgggttcaagggttccagcgattctcctgcttcagcctcctgagtagctgggattacaggcamgtgccaccaagcctggctaatttttttgtatttttagtagaaacggggtttcaccttgttagccaggctggtctcaaactcctgacctcaggtgatccgc

SEQ ID NO: 500906 - DNA, 201 bp, Homo sapiens
cccattacatttctgaagaagaaagctaagatgaaggacatgccactccgaattcatgtgctacttggcctagctatcactacactagtacaagctgtagrtaaaaaagtggattgtccacggttatgtacgtgtgaaatcaggccttggtttacacccagatccatttatatggaagcatctacagtggattgtaatgat

SEQ ID NO: 500907 - DNA, 201 bp, Homo sapiens
tggaatctgaggccttaagtacgtcaaaatactgccaagttagagtaagatttacatccatattgatgctattgcttccaaaagggaaaatggattttttkttttttaaaggagggcatggggatagagaagtccaagttgatttgggatatgtcagagaaggagaagctttagtaggaagggttgggaacttcctggcag

SEQ ID NO: 500908 - DNA, 201 bp, Homo sapiens
cagttatatatacatacaaatacaaatacaaaatttactttttatgtgcttccatcttaaagcaagcagaaaatttgtcactatctgcaataatcagttawtttgtgtgctggtgaagaacatcatggctacaatagaaaatgtatttatctacacagaagtaggtgttgtaaaggaaaagacactaatttctttcacaga

SEQ ID NO: 500909 - DNA, 201 bp, Homo sapiens
ggacatgagtttcttttcatatctccctcctttcaggacagaaaccatctctaattattaatctaccaaaaaatgacataaatgaatgcatgatcttcaagaagaagagagccatatggatacattggcttctattattcagagctactgcaccaatcattaaaaaaaaagaatttattaaacaagcatcatttgtagttt

SEQ ID NO: 500910 - DNA, 201 bp, Homo sapiens
atcaccagccatcagagaaatgcaaatcaaaaccccaatgagataccatctcacaccagttagaatgacaatcattaaaaagtcaggaaacaaaagctgcyggagaagatatggagaaataggaacacttttacactgttggtaggactgtaaactagttcaaccattgtggaagtcagtgtggcgattcctcagggatct

SEQ ID NO: 500911 - DNA, 201 bp, Homo sapiens
aggctttagttaaaaaataaatctagcattaccaacatgctaaatgtatattacagagcttcttcctctattatcaaatatacttttagatttgtccgaagggaaaactatttttattttgcataaaatatatgtatatataaaacacaaaaaatacaaaattaagagaaatatttcactccgttatgcaccaatagaaca

SEQ ID NO: 500912 - DNA, 201 bp, Homo sapiens
aatggcaacaaaagccaaaactggcaaatgggatctgattaaactaaagagcttctgcacagaaaaagaatgaacaggcaacctacagaatgggagaaaawttttgcaatctatccatctgacaaagggctaatatccagaatctacaaagaacttaaacaaatttaccagaaaaaacaaccccatcaaaaagtgggcgaa

SEQ ID NO: 500913 - DNA, 201 bp, Homo sapiens
gagagcagatcacagttttattgaaatgtttttaaaggtaatgctgagcaaagtgactgctaattgtaatgccccattctgggatgtctcatcttatctgtcataccaacaagcccttaccaacaggttccttataagtacaaggtatgcagcagatgactggtctatctagccacagctgacaggaccagggaaggatgc

SEQ ID NO: 500914 - DNA, 201 bp, Homo sapiens
ctcaagatggattaaagacttaaatgtaaaacccaaaattataaaaaccctagaagaaaatctaggctattatcattcaggacataggcaaaggcaaagaktttatgacaaaaacaccaaaagccacagcaacaaaagcataaattgacaaatgggatctaatcatctacagaacttctgcatagcaaaagaaactattat

SEQ ID NO: 500915 - DNA, 201 bp, Homo sapiens
agagcagatcacagttttattgaaatgtttttaaaggtaatgctgagcaaagtgactgctaattgtaatgccccattctgggatgtctcatcttatctgtcataccaacaagcccttaccaacaggttccttataagtacaaggtatgcagcagatgactggtctatctagccacagctgacaggaccagggaaggatgcc

SEQ ID NO: 500916 - DNA, 201 bp, Homo sapiens
cacttccctgataattaaagatgttgaagattttttcatatgcttattggccatttgtgtatcttctcttgagaattgtctattcatgtcctcaatccactttttttttttttttttttttttttgagatggagtctcacaccgtcgcccaggctggagtgcagtggcatcatctccgctcactgcaatctccgcctcccg

SEQ ID NO: 500917 - DNA, 201 bp, Homo sapiens
cttccagagaaaaaacatggactaccttaaaaaaataataataaaattaaattgacaatagagttcccttattggggtataatttacatgaaatagaattyggcaatcttaactatacaactcaatgaatttaaaaatcaacagtcacataatcactatttacatcaagatatgaaacacttgagttacccaaaaacgttt

SEQ ID NO: 500918 - DNA, 201 bp, Homo sapiens
gagcagatcacagttttattgaaatgtttttaaaggtaatgctgagcaaagtgactgctaattgtaatgccccattctgggatgtctcatcttatctgtcataccaacaagcccttaccaacaggttccttataagtacaaggtatgcagcagatgactggtctatctagccacagctgacaggaccagggaaggatgcct

SEQ ID NO: 500919 - DNA, 201 bp, Homo sapiens
gaatggcgtgaacccaggaggcggggcttgcagtgagccgagaccacgccactgcactccagcctggggcgacagagcaagactccgtctctaaaaaaaawatagagcaagcaattttttcaaatcgatgaagttaaacacatcaagtagaaattaaaagtcataaataataatttgatatggccacagaatctgtatttt

SEQ ID NO: 500920 - DNA, 201 bp, Homo sapiens
ggagaaataggaacgcttttacactgttggtgggagtgtaaattagttcaactattgtggaacacagtgtggcgactcctcaaagatgtagaaccagaaayaccatttgacccagccatcccattactaggcatatacccaaaagattgtaaatcattctactagaaagacacaggcacacatatgtttattgcggcactg

SEQ ID NO: 500921 - DNA, 201 bp, Homo sapiens
aaaaggaaaaaatgattttttttctttttcttttcccccacctcctactcggttcttaatgaaggcaaatgtagcctttaccttctctccaccaggcatgrcaaacttatctatgagtttacttagaagtcccagagaccctaccttgaagcaaaccaggtgcctccagaactctcttccaccaggaggtagccccaattt

SEQ ID NO: 500922 - DNA, 201 bp, Homo sapiens
gcagatcacagttttattgaaatgtttttaaaggtaatgctgagcaaagtgactgctaattgtaatgccccattctgggatgtctcatcttatctgtcataccaacaagcccttaccaacaggttccttataagtacaaggtatgcagcagatgactggtctatctagccacagctgacaggaccagggaaggatgcctac

SEQ ID NO: 500923 - DNA, 201 bp, Homo sapiens
actttggaaggtggaggcgggcaaaccacttgaggtcaggagttcaagaccagcctggccaacatggtgaaaccccatctctactaaaatacaaaaattcrctgggcatggtggcgggcatctgtaatcccagctacttgggaggctgaggcaggggaatcgcttgtacccaggaggcggaggttgcagtgagccgagatc

SEQ ID NO: 500924 - DNA, 201 bp, Homo sapiens
tttttgcattggttttaatgaatttcatatttttcatgaatatgaatagaatgctagactgtgtaatcaaatttaatttttattgtttattttattttatttcatttcatttcatttcatttcatttcatttttgctctatcatttcatttcattttattttatttttgctctatcaccaaggcgggacttcaccaacaca

SEQ ID NO: 500925 - DNA, 201 bp, Homo sapiens
cccctacatgtcattcatgccaaaccccctttaaaagcccctgccttcttgtcctgaagactgaagtggtaccctcaaggcaggagcctataatacctccyctcagctacctcaggagtaaagttactttctatcagatctcactattgttaattagatactgcaaggggtgagggatgggacctgtgtttggttacagaa

SEQ ID NO: 500926 - DNA, 201 bp, Homo sapiens
cagatcacagttttattgaaatgtttttaaaggtaatgctgagcaaagtgactgctaattgtaatgccccattctgggatgtctcatcttatctgtcataccaacaagcccttaccaacaggttccttataagtacaaggtatgcagcagatgactggtctatctagccacagctgacaggaccagggaaggatgcctacc

SEQ ID NO: 500927 - DNA, 201 bp, Homo sapiens
tttttgtttgtttacatatactcacagtttggaagcaatcaatcttgattatttatttctgcaatgcttttacttacctctataagtgctttgggatttgwtttctatgatcatgactatgcaaagttagggcatcctatattttattttgtgggactcctttcatatttgtgaagaaataacttaaggttgattctccca

SEQ ID NO: 500928 - DNA, 201 bp, Homo sapiens
ataccaaagcctggcagagacacaacaaaaaaagagaattttagaccaatatccttgatgaacattgatgcaaaaatcctcaataaaatactggcaaaccraatccagcagcacatcaaaaagcttttccaccatgatcaagtgggcttcatccctgggatgaaaggctagttcaacatacacaaatcaataaatgtaatc

SEQ ID NO: 500929 - DNA, 201 bp, Homo sapiens
tttgcattggttttaatgaatttcatatttttcatgaatatgaatagaatgctagactgtgtaatcaaatttaatttttattgtttattttattttatttcatttcatttcatttcatttcatttcatttttgctctatcatttcatttcattttattttatttttgctctatcaccaaggcgggacttcaccaacacaat

SEQ ID NO: 500930 - DNA, 201 bp, Homo sapiens
ctattgttaattagatactgcaaggggtgagggatgggacctgtgtttggttacagaactgttttccaaagcagtgggactaccaatgtttaagagtttcygttgttccacatctcaccagcacttgatattatcattctttccattttagccattttaggggcatataatggttttaatttgcattttcctaatgactaa

SEQ ID NO: 500931 - DNA, 201 bp, Homo sapiens
agatcacagttttattgaaatgtttttaaaggtaatgctgagcaaagtgactgctaattgtaatgccccattctgggatgtctcatcttatctgtcataccaacaagcccttaccaacaggttccttataagtacaaggtatgcagcagatgactggtctatctagccacagctgacaggaccagggaaggatgcctaccc

SEQ ID NO: 500932 - DNA, 201 bp, Homo sapiens
atacctaggaatccaacttacaagggatgtgaaagacctcttcaaggagaactacaaaccactgctcaatgaaataaaagaggatataaacaaatggaagrgcattccatgctcatgggtaggaagaatcaatatcgtgaaaatggccatactgcccaaggtaatttatagattcaatgccatccccatcaagctaccaat

SEQ ID NO: 500933 - DNA, 201 bp, Homo sapiens
ttgcattggttttaatgaatttcatatttttcatgaatatgaatagaatgctagactgtgtaatcaaatttaatttttattgtttattttattttatttcatttcatttcatttcatttcatttcatttttgctctatcatttcatttcattttattttatttttgctctatcaccaaggcgggacttcaccaacacaatc

SEQ ID NO: 500934 - DNA, 201 bp, Homo sapiens
tctagaataccataaacaattaagggttgctatttccctcatttcggtaacagtttcatatactatcttaaattgaaaaggatttcagatatcttcaggtracacagtcattttatagataaaaaatttgaggcttggagaggttagtttgtcaacagtgctacacttactttgtgaaaattaagtctaaaaaccaaaccg

SEQ ID NO: 500935 - DNA, 201 bp, Homo sapiens
gatcacagttttattgaaatgtttttaaaggtaatgctgagcaaagtgactgctaattgtaatgccccattctgggatgtctcatcttatctgtcataccaacaagcccttaccaacaggttccttataagtacaaggtatgcagcagatgactggtctatctagccacagctgacaggaccagggaaggatgcctacccc

SEQ ID NO: 500936 - DNA, 201 bp, Homo sapiens
aatgccatccccatcaagctaccaatgactttcttcacagaattggaaaaaactactttaaagttcatatggaaccaaaaaagagcctgcatcaccaagtsaatcctaagccaaaagaacaaagctggaggcatcatgctacctgacttcaaactatactacaaggctacagtaaccaaaacagcatggtactggtaccaa

SEQ ID NO: 500937 - DNA, 201 bp, Homo sapiens
atcacagttttattgaaatgtttttaaaggtaatgctgagcaaagtgactgctaattgtaatgccccattctgggatgtctcatcttatctgtcataccaacaagcccttaccaacaggttccttataagtacaaggtatgcagcagatgactggtctatctagccacagctgacaggaccagggaaggatgcctacccca

SEQ ID NO: 500938 - DNA, 201 bp, Homo sapiens
cagccaaaaaacacatgaaaaaatgctcatcatcactggccatcagagaaatgcaaatcaaaaccacaatgagataccatctcacaccagttagaatggcratcattaaaaagtcaggaaacaacaggtgctggagaggatgtggagaaataggaacacttttacactgttggtgggactgtaaactagttcaaccattgt

SEQ ID NO: 500939 - DNA, 201 bp, Homo sapiens
ccagcgactgatgaaagccattcttcaataaattcaatacaattaggttcccccagagtggcacccttgcttgccacacacaccaggctaacactgattayggggcaatatttgagtatacgtggtatgtggctgtgtatttcttttgggtaaattttattgtggtaaaagcacttaccatgagatatactctctcaacag

SEQ ID NO: 500940 - DNA, 201 bp, Homo sapiens
cacagttttattgaaatgtttttaaaggtaatgctgagcaaagtgactgctaattgtaatgccccattctgggatgtctcatcttatctgtcataccaacaagcccttaccaacaggttccttataagtacaaggtatgcagcagatgactggtctatctagccacagctgacaggaccagggaaggatgcctaccccaaa

SEQ ID NO: 500941 - DNA, 201 bp, Homo sapiens
gcactattcacaatagcaaagacttggaaccaacccaaatgtccaacaatgatagactaggttaagaaaatgtggcacatatacaccatggaatactatgyagccataaaaaatgatgagttcatgtcctttgtagggacatggatgaaactggaaaccatcattctcagcaaactattgcaagaacaaaaaaccaaacac

SEQ ID NO: 500942 - DNA, 201 bp, Homo sapiens
ctcagatatgatttaatctcttactgtttaacggagaacatgtaaatgcagacacatgggttagtcatatatggtcccatatactctgacacaatgaaatytggtttagaaagaaacagagacaaaaatgggtcacgtcagatatcagattaattttaaatattcactgtttgcttaagctagttgagtggtatgttactt

SEQ ID NO: 500943 - DNA, 201 bp, Homo sapiens
caccgacagtgttcaagggttccaatttctccacgccttcaccaatattcattgcctttgtttttataatagtcatcctcacaagtgtgaggtggtatctygttgtggttttgatttgcatttctctgatttgtgacattaagcatttttttttcatgtaagcggtttgccatgtgtatgtctactttggagaaacatcta

SEQ ID NO: 500944 - DNA, 201 bp, Homo sapiens
tatttttgccctctggccatgcaaatgaaaaaaggaaaatggtacactatgtaaaaattatgtatcaattgcaaaaaaaaaaaaagataatgacacaaaaytatttattttacttactttttaaagtcttaaatcttagttttaaatgtggaaagcatataccttttatcaggaccagtgaccccactgcaggaattctca

SEQ ID NO: 500945 - DNA, 201 bp, Homo sapiens
aggctcagagttaaatgatttgcccaataccaaataggtagtaaaaggataaaccaaaatttggatgacatactttggctagagtccatacctctaaccamtggaaattgtgtgtctttttattattattattattattattattattattattattattattacaagcatcagtattttttatgaatactcatttcacaa

SEQ ID NO: 500946 - DNA, 201 bp, Homo sapiens
atagtttctagatttactgttccaaggcataatcatgagttcatatataaaaaatacttggaccagtacttgctatatagtaaaaattttatattcatttkttgctgttatcataagcaatttaaatgttttaaatgaaggagtactcagatttgcatttcagaagcaaccatgccaacagtgagtggggcaattggtggg

SEQ ID NO: 500947 - DNA, 201 bp, Homo sapiens
tcttttaaccactcaggggcacatgtaaagttaaactctttttgatattctgtctttccttggcttacgagatagcgttttcctgaatctgttcactctcrgtctacatttctgatgtgtgtttgtcaccagtcacttaagtgttactagatcccggggccctatccttgagaatctcctttccttttctatttgtactct

SEQ ID NO: 500948 - DNA, 201 bp, Homo sapiens
tcattaggctccctgtattgaaatgaaaaaggctttggggatgtttcagacttttctgtgtatactcttgcttggaagtgggtatataatgatactaaaartgtatttaaagttcccaaaccatgcagcgtgagaaagttaccatatctttaaagaactgtctctactgtacaaaagacaaaagacaaacatcaatttttg

SEQ ID NO: 500949 - DNA, 201 bp, Homo sapiens
gcaaataagtgttgaatttttttaaattattttttacttttcttcattctccttctcttcattttcctcatcgcttctactgctacatctttatcaagtayttaaccatcaaatccagccatacagacaaaatttatatacttcctacactcagaaaataaacaacaggacactgttaaccctgatgataatgaatatacc

SEQ ID NO: 500950 - DNA, 201 bp, Homo sapiens
ttctactttatttccctacatactcatctctcagagataattccttttactcagtttttcgaaacctcagtttgtagctcatttatattttaaaatagatraatatacaaaatcagtttgccttgtagaaataatgttgtagaagtatgagctatgaaaagcaatggggaacaaagaaattcacagtatcattggaagcag

SEQ ID NO: 500951 - DNA, 201 bp, Homo sapiens
taattacagtaggaaggtctgtcccttcctactgtccttcagcataatatctattggagacattacattattcagtgatacatgaaatactttagacttaygtttttcttgtaacagttatatattaatcaagatgcaggtttatagtctaatgttgagccttagaagatttttctaagaaacagctaggcatataaatat

SEQ ID NO: 500952 - DNA, 201 bp, Homo sapiens
tccttaatattttctacatgtacaatcatgtttttaaaacttttacttttcacttcctaatctgtattctctctcatttctttttcttgttgtactgtacrgtctaaaaccttcaatacaacactgaattaaagtaatgggatcagatagctttacctggttttctgtttcagaaagaaatcatttatgatgctttatagc

SEQ ID NO: 500953 - DNA, 201 bp, Homo sapiens
caccatgaaatactatgcagccataaaaaaggatgagttcgtgtcctttgcagggacatggatgacactggaaaccatcattctcagcaaactaacacaasaacagaaaaccaaacaccacatgttctcactcataagtgggagctgatcaatgagaacacatggacacaggaaggggaacatcacacatgggggcttgtc

SEQ ID NO: 500954 - DNA, 201 bp, Homo sapiens
cattttcaacttaggttaatacaaatgccattctttcttgacctaggtatagatatatcagaaatcatttttatgacaaaagaggtccttacaagagaatkttgagtatgtagtccttaacaactgcctcctcctacagctgtacctttaccccaagcactcagtatatatatatgaatattccagattattgatttgaga

SEQ ID NO: 500955 - DNA, 201 bp, Homo sapiens
aagatttcctggaaaattcatgtatgtatttcaagcatttgacgggacagtaaatatgtatcaaaataatttcctctacggaaattgcagtaaatgcattsagaattttctccttttaaaaggtagaaggagttcctagaggaagaaacttcctatagtacatgcaatgtttaaaaaaatattgatcaggcaactacattt

SEQ ID NO: 500956 - DNA, 201 bp, Homo sapiens
tggagattatgacaattaccaaaatctttattacctagaatcttttatttggtgacttatagtttaagttccaaagaaaaatattgccatataaggaaagrgtatgacatagaatacacctgaaagagagttttcttaatatgactcgtttgtgagataatttctggggctaccacatccctggttttacactagagtcca

SEQ ID NO: 500957 - DNA, 201 bp, Homo sapiens
tgtatgtttctgtgagcattaaaaattatagaaggagacacatttaaagttttttttttttacttcatgggggtaggataatggggcaattttacaaagaraagccctgatctttataaaattcagtatttgggtttttatttacaatgcccatgtgaaaacaagaaagcaaacacaaagtttgactaaatgccagtggct

SEQ ID NO: 500958 - DNA, 201 bp, Homo sapiens
tttttacttcatgggggtaggataatggggcaattttacaaagagaagccctgatctttataaaattcagtatttgggtttttatttacaatgcccatgtraaaacaagaaagcaaacacaaagtttgactaaatgccagtggctttgtgaaaagtagttgctacttgctcctaagttgataatcaaggtctacatctagc

SEQ ID NO: 500959 - DNA, 201 bp, Homo sapiens
tatttaaacttgccatcttaatgtaatatgctttgagtcggcctttatttctatgtatggagaacaaaaagtttctaggcagaaaaatattataaaattgrtagtacagacagtgaactactacaatttaaaaacatctgactctttctggccaatcttactttaatggtatcatcatacaaaagaaagaaaattacatgg

SEQ ID NO: 500960 - DNA, 201 bp, Homo sapiens
ggcaattttacaaagagaagccctgatctttataaaattcagtatttgggtttttatttacaatgcccatgtgaaaacaagaaagcaaacacaaagtttgwctaaatgccagtggctttgtgaaaagtagttgctacttgctcctaagttgataatcaaggtctacatctagcctgaaagtaaagtagcaacctctcttac

SEQ ID NO: 500961 - DNA, 201 bp, Homo sapiens
agtattataagtaaatgagctcaaaccagttaacgaaatggaagaaaacagagtgtgtgctcaaaataattttgctcccaaaggtccataaggaaccattwagtatatcagaagtattcatttactatgtggtatctccctggtaaaagaattgatactttttcacatagattcactcagtcttgtctttccactatgtta

SEQ ID NO: 500962 - DNA, 201 bp, Homo sapiens
ttccaggagcaaaaactccctcgtgtaagcatctaccaagcctctgtttgcgtatttgctgatattccaccagccaaaatgagtcataaggccaagtcaasaatcagcataggtgaggatgacatagagctcagtaccgaggagcatgactcatgggggatggggtagacagggaatatcaatgtaataatctaccaaaac

SEQ ID NO: 500963 - DNA, 201 bp, Homo sapiens
agccctgatctttataaaattcagtatttgggtttttatttacaatgcccatgtgaaaacaagaaagcaaacacaaagtttgactaaatgccagtggcttygtgaaaagtagttgctacttgctcctaagttgataatcaaggtctacatctagcctgaaagtaaagtagcaacctctcttactgctcaggaactgatgcc

SEQ ID NO: 500964 - DNA, 201 bp, Homo sapiens
ggggtttcaccgttttagccgggatggtctcgatctcctgacctcgtgatccacccacctcggcctcccaaagtgctgggattacaggcgtgagccaccgygcccggcctaatttttttctaaattcactaaatctaatactatacaaattggcatttacttatatttaagttcactatattttaatcattcttagaattt

SEQ ID NO: 500965 - DNA, 201 bp, Homo sapiens
tttcatttttgttaacttttaatatatacaagcctatctattcatagttacactgatctaatcacatgatcattatcctactgtagaattcttagttatargttaaaaacagatatataacatgagtttaaaaaataaaaggaaaagaaaggaaagtcaaaattataactctatagaaataagaagacaaaatgtatggta

SEQ ID NO: 500966 - DNA, 201 bp, Homo sapiens
attggttttaatgaatttcatatttttcatgaatatgaatagaatgctagactgtgtaatcaaatttaatttttattgtttattttattttatttcatttcatttcatttcatttcatttcatttttgctctatcatttcatttcattttattttatttttgctctatcaccaaggcgggacttcaccaacacaatcacgg

SEQ ID NO: 500967 - DNA, 201 bp, Homo sapiens
agcatcagaagatcataatcaagagtccacactacagagatggttgtgtcatgcacttcaaatatcaccattatttctgtacaacagggtgagttaattcrcgtaagtaatgttaaaaacaatctttgataaaaatgagtggtatttaagagaggcggtttcccagaaaaatgatacaggtatctctacgttccatgaacg

SEQ ID NO: 500968 - DNA, 201 bp, Homo sapiens
acacatatgtttattgcggcactgttgacaatagcaaagacttggaaccaacccaaatgcccatcaatgatagactggataaagaaaatgtggcacatatrcaccatgaaatactatgcagccataaaaaaggatgagttcgtgtcctttgcagggacatggatgacactggaaaccatcattctcagcaaactaacacaa

SEQ ID NO: 500969 - DNA, 201 bp, Homo sapiens
gcagtaacatgaatagaaagcgaagtcttgaggatttattacctttaattataagtaacgattttataaaatttgacttttaatcatggctacattttaayaatcaatcaaaaaactgaaaacttaataaccatctcccagaagtcaatacaaaccagtcccagcacaaactggccataagagtcattttattttgtccac

SEQ ID NO: 500970 - DNA, 201 bp, Homo sapiens
cagttttattgaaatgtttttaaaggtaatgctgagcaaagtgactgctaattgtaatgccccattctgggatgtctcatcttatctgtcataccaacaagcccttaccaacaggttccttataagtacaaggtatgcagcagatgactggtctatctagccacagctgacaggaccagggaaggatgcctaccccaaagg

SEQ ID NO: 500971 - DNA, 201 bp, Homo sapiens
acagttttttgagaattataatataactgctatggtctgaatgttggtgtccacccaaaattcctatgttgaaacctaatccccactgcaatagtattaaraggtggagcctctgggcacagtggctcacacctgtagtcccaacactttgggaggctgaggggggcagactgcttgagcctaggagttcaagatcagcct

SEQ ID NO: 500972 - DNA, 201 bp, Homo sapiens
agttttattgaaatgtttttaaaggtaatgctgagcaaagtgactgctaattgtaatgccccattctgggatgtctcatcttatctgtcataccaacaagcccttaccaacaggttccttataagtacaaggtatgcagcagatgactggtctatctagccacagctgacaggaccagggaaggatgcctaccccaaaggt

SEQ ID NO: 500973 - DNA, 201 bp, Homo sapiens
gggagggcactggttgagattccaaagcagaatttcagtaacaagtttggattagaaatcagagaaaagtcaactgacaaagtaggtagaaagtgatgatrtgattgtagcaaatattgatagctcttctgagaaacttaatgtgaggagaacagagaaggaaagatagatgagggttcaggattaaagggatgattgttg

SEQ ID NO: 500974 - DNA, 201 bp, Homo sapiens
ggaaggactgcttgagctaaggagtttgagactgcagtgagctatgactgtgccaccacactacagcctaggtgaccaaacaagaccctgtctccaaaaagggggggggggtagatttaatatctaaggttctttctaagccagaattctttatttctataactttttattgtcttttaactgtttcttaagaactttggc

SEQ ID NO: 500975 - DNA, 201 bp, Homo sapiens
gggacaacactgtgtcttcacatggcagaggtggaaagccaaaaacaaaacaaaacaggcctaagaccctcctttccacctcttttataaggtcactaatsccattcatgagagctctagccttatgacttaatcacttcctaaaggctccacctcttaatactatcacattggtgattaagtttcaacatatgaattctg

SEQ ID NO: 500976 - DNA, 201 bp, Homo sapiens
gttttattgaaatgtttttaaaggtaatgctgagcaaagtgactgctaattgtaatgccccattctgggatgtctcatcttatctgtcataccaacaagcccttaccaacaggttccttataagtacaaggtatgcagcagatgactggtctatctagccacagctgacaggaccagggaaggatgcctaccccaaaggta

SEQ ID NO: 500977 - DNA, 201 bp, Homo sapiens
tcgttcaataactcctcattttctataggataatatcaagctgcttagatttagcatataaggctaattatgattagattcctagtctcatcacttccacttttttttttttttttttttttttttgagacagggtctcactctgtcacccaggctggagtgccgtggtgcgacctcagctcactgcaacctctgcctccc

SEQ ID NO: 500978 - DNA, 201 bp, Homo sapiens
tctggaaaaaaaattgccagtgtaaattcttatcaaagacattcctcatcttctgatctctctctctctccctccgtctctctctctctctctctctctcwctctcacacacacacacacacacacacacacacacacaatatgcagtggagttaaaatgttcctggttaggaatatttttctctgttctgcaatctgtag

SEQ ID NO: 500979 - DNA, 201 bp, Homo sapiens
ttttattgaaatgtttttaaaggtaatgctgagcaaagtgactgctaattgtaatgccccattctgggatgtctcatcttatctgtcataccaacaagcccttaccaacaggttccttataagtacaaggtatgcagcagatgactggtctatctagccacagctgacaggaccagggaaggatgcctaccccaaaggtag

SEQ ID NO: 500980 - DNA, 201 bp, Homo sapiens
ggatcttagtccagtggtattatttaatcaattggttaggtgcctaaataaatagtttagtcaagatagttcaaacaattgcttattctgcgacaagagasatgagttcattttacacagaaattcagtgactgatggccctaaaataaataccttataagccagacaatgtagcatggcagggtgtaatgaagttacatg

SEQ ID NO: 500981 - DNA, 201 bp, Homo sapiens
cttacctgatagttttacttcacagctgaagatatttatgaagaaagtggtttttaaaagaaattatacttatgctgtaagtataaatatacacagaaagaaatatgtgggctggacacagtggttcatgcctgtaatcccagcactttggaggccaaggcaggaggatcacttgagctcaggagtttgaaaccaacctga

SEQ ID NO: 500982 - DNA, 201 bp, Homo sapiens
tggaaaaaaaattgccagtgtaaattcttatcaaagacattcctcatcttctgatctctctctctctccctccgtctctctctctctctctctctctctcwctcacacacacacacacacacacacacacacacacaatatgcagtggagttaaaatgttcctggttaggaatatttttctctgttctgcaatctgtagta

SEQ ID NO: 500983 - DNA, 201 bp, Homo sapiens
tttattgaaatgtttttaaaggtaatgctgagcaaagtgactgctaattgtaatgccccattctgggatgtctcatcttatctgtcataccaacaagcccttaccaacaggttccttataagtacaaggtatgcagcagatgactggtctatctagccacagctgacaggaccagggaaggatgcctaccccaaaggtagt

SEQ ID NO: 500984 - DNA, 201 bp, Homo sapiens
aacttcagttaagcctaaggttaggcttagggagggaggctagacatgataggccatttcagagtaagcaaaccaggcatgaaaacacagtatacaggaaygatgcatgctaggcttgggatgaagcgtgaaatactaagggaaattttaaagcagcataaatgcaacagagagcattcacagttagagcagtgataaaag

SEQ ID NO: 500985 - DNA, 201 bp, Homo sapiens
tcatgcctgtaatcccagcactttggaggccaaggcaggaggatcacttgagctcaggagtttgaaaccaacctgagcagcataggaagaccctgtctctaaaaaaaaaaaaaaaaaaaaaattaacatagccagtcatggtggcacatgcctgtgctcccagctactcaggaggctgaggtgggaggatcacttgagcca

SEQ ID NO: 500986 - DNA, 201 bp, Homo sapiens
ggatcactctagaagtctggtctgtcctgagcagcctaaggagagactcgtggtgaagaaggaaggtcggctaacagtcacattagtgagcttcaaagcamgtacttagtcaagtcttcagagactgtggctctggtcaacagtttgactgcaaattcgtgagagaccttgagtcagaaccacacagctaagatgcttctg

SEQ ID NO: 500987 - DNA, 201 bp, Homo sapiens
atcttgtagtgtttatgtactcattcaatgaatattgattcaattcctaccatgtggtcaaatgcagtgccagatgctaggattgtagacaaaaccaggawgggaaattttcattaatagaagcgttgaattttgatgtaggatggcaacagtgtgaaaagaaaggaagaatcagagagactttgactttgttatcatatt

SEQ ID NO: 500988 - DNA, 201 bp, Homo sapiens
agaaggatcaagtaactttcataatccacccaactataaggcattaagaatttttttcccaattaacagctgatttttaggaagtgtttagttagattttytttcaaagcaattatttttcagtctgtgcttcatggtctcctaatgattccctggagtctcaagggccagggggagcaggtgctaagtgaacagagttct

SEQ ID NO: 500989 - DNA, 201 bp, Homo sapiens
aggcacaagaactgtttgaacccaagaggcggaggttgcagtgagccgagattactccaccacactccagcctgagacagacagggaccttgtctcatttaaaaaaaaaaaaaaaaagtctgaaaacaacagatgttggcaaagatgcagcagaaaagggaacgcttgtaggaatttcagtacaacctttatggaaaacag

SEQ ID NO: 500990 - DNA, 201 bp, Homo sapiens
aaaatttattatattaaatgcaagaaaaataattgttaaattaaatattcatttgagataaaaagttttctgtattactcaggcttctccagagaaacatgatggatggatggatggatggatggatggatggatggatggatggatacagagggagagagagagaagacagacagagactgatagatatacacacacata

SEQ ID NO: 500991 - DNA, 201 bp, Homo sapiens
ctgtggctctggtcaacagtttgactgcaaattcgtgagagaccttgagtcagaaccacacagctaagatgcttctggtttcctcaccctcagaaaatatktgagataataaacgtttgttgttttaagatgctagacattggggtaatttgtcatgtagcaatgggtaactctatcttaatatggtcaatttcctgccaa

SEQ ID NO: 500992 - DNA, 201 bp, Homo sapiens
gctctgtaacaagttaagtgaatccaaaacctttacagctgaacacataaaattattcaaaagctctaacgaggtgagaagcaaccaaacttgattttcayctctgggaaaccctatattagcactgtaacccacaaggccctcttccacttccaaactcctctggcattcactagccacaccttcatttggcacccaaga

SEQ ID NO: 500993 - DNA, 201 bp, Homo sapiens
ccaaatgttcacaaatatgtaaataaattatgacatgcatacagtagagtaatctgcaatcattaaaaagaacaatatatcgttatattgcttgagattcycctccaaaaaagttggaaaattgcatttttaatatgaacccatttatgtgaaattttatacacacacagcatcatcctcatcgtcatccttatcatcatc

SEQ ID NO: 500994 - DNA, 201 bp, Homo sapiens
agctctttgtattactgcacctctagaggccccagaagacaactaaaaaccaggcaatatgctttattttgaaattcagctgtgtgggctgagatgtcacsttagcatgagggtcaaaggagtacagggagagagggtagccagagcctcagtcacaaattgtaactcacacttaaactcatttgaaatgcaataaacaaa

SEQ ID NO: 500995 - DNA, 201 bp, Homo sapiens
aaatttattatattaaatgcaagaaaaataattgttaaattaaatattcatttgagataaaaagttttctgtattactcaggcttctccagagaaacatgatggatggatggatggatggatggatggatggatggatggatggatacagagggagagagagagaagacagacagagactgatagatatacacacacatat

SEQ ID NO: 500996 - DNA, 201 bp, Homo sapiens
ctggcactcagatgtcttcctctaattctttacatccccatccaagaaatgttccaggtcttttcctattcttcctcccaaagattttcttcagcaccacsctctgtgtattttggacacttattttcagatattatttgtcaattagaaaatatgcaagtttgcttttggccctctattttaaacacaattatttactgc

SEQ ID NO: 500997 - DNA, 201 bp, Homo sapiens
tgaaatatgaattgggaagccagtgaaaaagaaggagaaatcttattatacggttattcataagaagtccaaataaagccaacaaaactctctggctgttytagcaggcgtataaatgtgtgcaaccattgtactaccattttacatacacaagtaaaatttatatatatataaaaccacctagagatacttttccacata

SEQ ID NO: 500998 - DNA, 201 bp, Homo sapiens
agcatcttttcatgcccttattggccatttgtatattttctttgcagaaatgtcaattcaaaccatttgcccatgttttaatcttgttgttttttcttgtwgagatgttcggagttttttgagacagaatcttgctctgtcacccagctggagtgcagcggcgcaatctcagctcaccgcaacctctgcctcccaggttca

SEQ ID NO: 500999 - DNA, 201 bp, Homo sapiens
ttaagtgcctactttgtgctagacactatgttaagacaccagattgaccaagccatacttcctccccagagggacctgtgacaaggtcacaagaaacaagkatatgaccataaataatccagctatcatcctccacggatctttctagcagcccctggtaccaataacctggctcggcaaacagagcctaagcatgtgaaa

SEQ ID NO: 501000 - DNA, 201 bp, Homo sapiens
tcagaaagttagaaagaaagaacaaaagagtcaggctattttattattgttttgtttatacttcataagcaaaggtattcgtgggagattttttaataaaygttttccttgtctttttttttaagtggttaaagaagaaaagttaactaggagaagataggaatgacagcagttatttgcaaatttttccacaaggaaaat

SEQ ID NO: 501001 - DNA, 201 bp, Homo sapiens
gtttgcttttggccctctattttaaacacaattatttactgctatcttgttttgtgttatacgtaggagaaaaattttgtaaacatctcatcttttacaaytataattccttaagtccttataattccagtctttaaaaatataaatgcaatgttcagaggagtcctatgataaatatgtagttaattcaaatgtttcctg

SEQ ID NO: 501002 - DNA, 201 bp, Homo sapiens
atatttcttctttgtttttattttttacctaatacaaaatttacaatactcaaaagaggaatacaatggaaaataacctccatccctgttcttcagctacsaagttccaatccccagagacatttttcatcttcttataattccctccagaaatattctatgcctatataagaaaatacatttcttaagtctcctccaaaa

SEQ ID NO: 501003 - DNA, 201 bp, Homo sapiens
attgggatattatgattgccacatgatcctctggaatatcatcagatccaaagtaaggagattttgtgttctggaaaagtccttcttagaatagtgatagytgtatagcaagacagcagtaacaaaattgggggaaaaaaaatcattcttaaactgattatttgttaccaaaagatacatgcttgtgaatggattcaaagg

SEQ ID NO: 501004 - DNA, 201 bp, Homo sapiens
ccgctcccataattctagctctcaccagaatgggtaattccattcccacctctttttccttctgccatcaggctatgatgacatcccactgttgctagtcyctgggcacttcactattgttcaatggttgcattctgcactaccacccatccctctataatgaagtccattcattaaactctcttcattgtccccattgaa

SEQ ID NO: 501005 - DNA, 201 bp, Homo sapiens
atacatatgtaaccaacctgcacgttgtgcacatgtaccctagaacttaaagtataatgaaagaaagggagacagaaaggcagggtttaaacttaaaaaamaaaacaaaaacaaaaccaaaaaaacctcaatagtaagaaaacaaaccaaccacttgaaaaatgggacaaatgccctaacagacacctcaaggtggaaagg

SEQ ID NO: 501006 - DNA, 201 bp, Homo sapiens
tgaattgcaaacattttttcctagtttttctttgctttttgatatactttgttttcttaattctcaaatttaggaacaaaagtacttccactatgtctttrttcaaactatattccttattttgaatgttcttcccttccttcaaaggtcaattcaagttgatgtctctgctctctccctaatcactcaagatcaccttga

SEQ ID NO: 501007 - DNA, 201 bp, Homo sapiens
ctcttaaagaatttaaagtatgatttactggcatctagtgaaactgtaaattaaattatctattatacctagagttggtctcaaattcatgaaatatagayccaattgtaaaaacatattttcctttcttcctagaattccattctactttgattctgaaaatagcatcctctttcctctaggaaatgtcacctgtactcc

SEQ ID NO: 501008 - DNA, 201 bp, Homo sapiens
acagttcttacctcacagtgctattggaaagattaaatgaggtaatatatgtaaagtatttagaacaattcctgacacatagtaagctcttaaaaactttyagttctaaaatttccaattctatatacagtccagaaatatattcagttctgtaaagatggtattcattttaaagggaatattttgttgcagtttttggct

SEQ ID NO: 501009 - DNA, 201 bp, Homo sapiens
aatacaaagattagccagacatggtaacacatgcctgtaatcccagctacttgggaggctgaggcacgaaaatcacttgaacttgggaggcagaagttgcrgtgagccgagatcacgtcatagcactccagcctggatgacagagcgagactccgtgtcaaaaaaaaaaaaaaaaacatagtgagactcataaaaagcaca

SEQ ID NO: 501010 - DNA, 201 bp, Homo sapiens
tacagagctcattttctcatgcaatatttttactgggatataatgttcatcaaactttatctttgggattctataaggcctggttgcaagctgcatgtgcscagggaatttggtgcctgaggctgctctaaacccaggccactgtaaattaatatctcagtttagggtttttcaggtgcagtgaatgtgaattcaaacctc

SEQ ID NO: 501011 - DNA, 201 bp, Homo sapiens
cactttctcagactatttagcacttcttaaaggtctccaagaagtagtacactccaattaatatttatcctcttcctcagagcatcgatgcttacactgcytaagggaaacctgttgtcagctaaggcaaatgaggttaataacaggatttggctaagaagaaaaatatgttgcactttagagaactaacatctcatctca

SEQ ID NO: 501012 - DNA, 201 bp, Homo sapiens
tcctgtcttaaaatgagttacccatttgtaaattgctgatttctttgggacatcgtccccataaacttttcaaaaagcaccaatgatttcatcattcttcyacccaagctttaccataaatgtgatgtttgttcctgcttcaattttagcaaaattcatgttgctcttttcaaagtgatgtcttattcttctcaatgcctc

SEQ ID NO: 501013 - DNA, 201 bp, Homo sapiens
taagccaacaagtttgtggtaatttgttacgacagcctcagaaaaccaatactacatttttttcttttcatgcctttcctgtcattcaaaggttaaaaatrataacaataatcacacccactgaacactatctgcatgtcaaaatagtgatacgtttcttacagtcttcttattcaacctttttaaggactctgtgaagat

SEQ ID NO: 501014 - DNA, 201 bp, Homo sapiens
gtaaacatcacttgaaactttaaaacttaattttatgagacatcttaataagctaataactgttgtagtcatggtagttatttcctttgtagaaatactgytccaaaaatagtgctatgctgagtgcagtggctcatgcctgtaatcccagcactttgggaggctgaggtgggtggatcacttgaggccaggatttcaaga

SEQ ID NO: 501015 - DNA, 201 bp, Homo sapiens
gatagtcatgacattgcataaacatctgtggtagattcaatatcaatattctagagaatatttgcaataagcagcatttaacagcatttgttcagccactrtggaaagaagtttggagatttcttaaagaacttaaaacagaactatcatttgacccaccaaacccattactgggcatatatcaaaaggaaaataaatcat

SEQ ID NO: 501016 - DNA, 201 bp, Homo sapiens
aaaacagagtgtgtgctcaaaataattttgctcccaaaggtccataaggaaccatttagtatatcagaagtattcatttactatgtggtatctccctggtmaaagaattgatactttttcacatagattcactcagtcttgtctttccactatgttagaggttttaaaccccaccgaaaagttcaatagatacaatatagg

SEQ ID NO: 501017 - DNA, 201 bp, Homo sapiens
atccctgaaataactaagaatttccctttccacaatgtacaatcatcctggtaaatgactgagatcacactggggacaacttgaagaaagatttttggtaygtatttgtagcaatactcatgctttatcttcagagggatacagttgccctcatttcatttaagggctgtggctctgtgaactggctccggtctagaaact

SEQ ID NO: 501018 - DNA, 201 bp, Homo sapiens
gggaaactgcagatgaagcatagaggaaactggagttcaaggctctgagatttaggtgagttcactcacataaatatattcatttcaattatcatgatccatgtctaccattcatgtcttatcttccatataagaaagctagtgaggctgtgaattcaacttgtactgtgattctataattctcagaactgaagtttggtt

SEQ ID NO: 501019 - DNA, 201 bp, Homo sapiens
tatttcttccattgattattagtaatagctagctgctttcaaagaagctttcagaatttaatcaaaacaggaagaatacaaagacctaaaacaagtctctrtaatctttttctaattacaaacaaagaggtctttggaactgcctctccctaatttggcatgtgaattatgatttgagagcttgaaatagatatggtactg

SEQ ID NO: 501020 - DNA, 201 bp, Homo sapiens
tcatttctgataagaaaggtgatacattaagtaactgagctgaccctgcatggaacggcaattttccactggcaatgatatactattgtgttcaattgcartatggtcagataaccaatctcaaattctcatctttgaaattctgtctcctaaaaccactcctggttattgttcactaaagaaagcagaaactactataga

SEQ ID NO: 501021 - DNA, 201 bp, Homo sapiens
tgtgtgtgtgtgtgtgtgtgtgtgtgtgtggtcacttgcttgctttggtcatcggtgaggaagccaggctaagcaactaacaaagagtccaaatatctgaktcatttatgagaggctaagggctccagtggcaaatcagggacctataagacaggctcaaagatggttctggcaggatccaccaccaccatcactaccacc

SEQ ID NO: 501022 - DNA, 201 bp, Homo sapiens
gcccaggatttcgaggttattgcagtgaactatgatcatgccattgcacgccagcctgggcaacagagcaaaaactgtctcaaaaataaagaaaaaaaaawtaaaattaaaacaaaacctataggtaaataagaacctctgtttttctccaattctactttccaaaactcctttgaaaaagaaaatgagaactctgaccca

SEQ ID NO: 501023 - DNA, 201 bp, Homo sapiens
caaacatttggaactcatgggaaaattaatactccctaagcaaaataactggtttttttaggaaaatgtcttcaatttttctgatagaaagttatttcctwggtgcagaacaagctactacatatgcttcgtaaatgatcttgatatgtggtaaaagttgatgaatggaaaagatgaaggctcaagcacaatgaatttctt

SEQ ID NO: 501024 - DNA, 201 bp, Homo sapiens
tcaagatgccaacactaatgcttctggaactcacagccaccagaggtcaccttcagtatcctcttctgcatgctgaagtacaccatccaataaaaggaaawaaatagctgcttcttctctcctaccttacaatctttcaagattgccttgctttggctgtacctaatagaaaacttgctagcaatggaatctggcatgtgt

SEQ ID NO: 501025 - DNA, 201 bp, Homo sapiens
taaacaagatacaagtcatagttatgctgtctggtgctagtacgacagctctacagggttgtcagggactggtctccttctatcttaactttctactatgwtggttattattcccaagctagctatgtaagtgtcagttatcacatgtagaatttatgcagtaagatggatgaagaattgaggaaagcatgccctctccct

SEQ ID NO: 501026 - DNA, 201 bp, Homo sapiens
ttacatttgtattaatcttttttggtaggttaaacaagaaaacaaactttcaaagttctcttggaaagaagcagagtatgaaaaaaaaatctcaaataacmattacagtggttttatcagttgatttaaagtcatcatccatatccatttgggcttgggcttgttctatttttcccccatacacttgcagaaatacagtag

SEQ ID NO: 501027 - DNA, 201 bp, Homo sapiens
acgtgcaaccacgcccaactaatttttgtatttttagtagagacggggtttcaccatgttggccagaatggtctcgatctcctgacctcgtgatccgcccrcctcagcctcccaaagtgctgggattgcaggcatgatttttggctcgtttgtacagacatgaaagtgtctcaacgtggttaagtgagtttggaagagcca

SEQ ID NO: 501028 - DNA, 201 bp, Homo sapiens
gctcgtttgtacagacatgaaagtgtctcaacgtggttaagtgagtttggaagagccagattattatccaggcctctgactttacatcctgtacccactcmggcctacctcatttcattcaagagataagtacaacacaaagttcaacaacatctgaagccattctgaactagaaataaatgaagattctaattgtcagta

SEQ ID NO: 501029 - DNA, 201 bp, Homo sapiens
cctttgtaccataccacactatatctggatagattcttgcaaattaaaatctttatttcttaatttaaatcacagctattgctatgcctgagttaaatttaaaaaaaaaaaaaacaaaacaaaacccacaaccaacatctattcttggagaaaaagactgtatgttgtcctacctactcatccatatgtttgtctgacagc

SEQ ID NO: 501030 - DNA, 201 bp, Homo sapiens
accaaacaccacatgttctcactcatagttgggaactgaacaatgagaacacatggacacaggaaggggaacatcacacaccggggcctgttgtggggtgsggggagggatagcattaggagatatacctaatgttaaatgacgagttaatgggtgcagcacaccaacatggcacatgtatacatatgtaacaaacctgca

SEQ ID NO: 501031 - DNA, 201 bp, Homo sapiens
atttttaaaagaccttcactgatatcatgtaggctactaatgagcactcaatcctgacatgaaaattgttgctacgaatttctacagcaataagttctcayattatttggtatcaggactccttcacattttacaaaataattgaggatctcaaaaaacttttatttatgtggccactatttaccagtaattatcacatta

SEQ ID NO: 501032 - DNA, 201 bp, Homo sapiens
aaaagaaaaaagtacatcactgaaagtaaaagcaactgttataggtttaccaacaaatatgtcctaaaaaccaccaaggaaacctactccaaaaatgaacaaaaaaaaaaaaagcgaaagactgcagttgtgctaaaaacaaaacaaaacaaacaaacaaacaaaaaagtaaaaaaagattactttcgagagagaagttta

SEQ ID NO: 501033 - DNA, 201 bp, Homo sapiens
tagatctgtatctcaaagggtgatactcagatttctctcaggtaattcagacatgaggcacatccaagaagtcagcagttggcagtggggcaaaagccaaycaaagcacagatcggcaaaagcaatgtgcaaaagagaatgcaagtgacagaaaatggaagtcctgcaacactgtcattcccattctgcagtaaagctagg

SEQ ID NO: 501034 - DNA, 201 bp, Homo sapiens
aatttattatattaaatgcaagaaaaataattgttaaattaaatattcatttgagataaaaagttttctgtattactcaggcttctccagagaaacatgatggatggatggatggatggatggatggatggatggatggatggatacagagggagagagagagaagacagacagagactgatagatatacacacacatata

SEQ ID NO: 501035 - DNA, 201 bp, Homo sapiens
tattcagtcagtagttatctgggcctttgatcctatattcctgaagaattttttagcatgcacaccacataaatacacatttatctataaataatatacaygttctactattaagcaatattttgacttaatgctttatgaacataaatagaagtagacgttttattatattgtatttatgcatcttcaatggtttgtcct

SEQ ID NO: 501036 - DNA, 201 bp, Homo sapiens
atttattatattaaatgcaagaaaaataattgttaaattaaatattcatttgagataaaaagttttctgtattactcaggcttctccagagaaacatgatggatggatggatggatggatggatggatggatggatggatggatacagagggagagagagagaagacagacagagactgatagatatacacacacatatat

SEQ ID NO: 501037 - DNA, 201 bp, Homo sapiens
gacaagagaatcgcttgaaccagggaggcataggttacagtgagccaagatcgtgccactgcactccagcagcctgggtgacagagcgagactctgcctcaaaaaaaaaaaaaaaagcagccgatctttttttcaaggatatacatatatctaaataaggtgatggagaggaaactgtaaggacatatattaaatacttta

SEQ ID NO: 501038 - DNA, 201 bp, Homo sapiens
acaagagaatcgcttgaaccagggaggcataggttacagtgagccaagatcgtgccactgcactccagcagcctgggtgacagagcgagactctgcctcaaaaaaaaaaaaaaaagcagccgatctttttttcaaggatatacatatatctaaataaggtgatggagaggaaactgtaaggacatatattaaatactttac

SEQ ID NO: 501039 - DNA, 201 bp, Homo sapiens
tacacagagcagatgcaactcatttctgagccatgaaccggacacaatacaaattcacctttgcagctctctaccaactgctcatgccctcagtagaaaaraagtcatacataatgtagcagtaaaactgttgacagcattccatggtcacagaagaccccgcgaatttgctgctgtggacatgaggatgtgatgtgcgaa

SEQ ID NO: 501040 - DNA, 201 bp, Homo sapiens
cagtcccagcactttgggaggccaaggtgggtggatcacctgagatcaggagttcaagaccagcctggccaaatcgtgaaaccctgtctactaaaaatacaaaaaaaaaaaaaaaaattagccaggtgtggtagcaggcaactgtaatcctagctgaggaggctgaagcaagagaatcacttgaacctgggaggcagaggt

SEQ ID NO: 501041 - DNA, 201 bp, Homo sapiens
atacagccatatcgctatatgtgtgtggtgggggagacagagagaggaggagagagagcaagaatgagagtgggtgtgagagacagagaaagtgcataaakgtaccaaaatgttataaattgctgaatatttgggggttcattgtgctattcttgcatattttttacaagtttaaattttttccaaaattgaaagttaaaa

SEQ ID NO: 501042 - DNA, 201 bp, Homo sapiens
gattctgaaagttatacctaacgtactatgtattaccaaaaacatacaatatgtttagtaacaaatagtatgttaggtatgttaggtatgactgttagagggtgtgtgtgtgtgtgtgtgtgtgtgtgtgtgtgtgtggtcacttgcttgctttggtcatcggtgaggaagccaggctaagcaactaacaaagagtccaaa

SEQ ID NO: 501043 - DNA, 201 bp, Homo sapiens
attctgaaagttatacctaacgtactatgtattaccaaaaacatacaatatgtttagtaacaaatagtatgttaggtatgttaggtatgactgttagaggktgtgtgtgtgtgtgtgtgtgtgtgtgtgtgtgtgtggtcacttgcttgctttggtcatcggtgaggaagccaggctaagcaactaacaaagagtccaaat

SEQ ID NO: 501044 - DNA, 201 bp, Homo sapiens
ttctgaaagttatacctaacgtactatgtattaccaaaaacatacaatatgtttagtaacaaatagtatgttaggtatgttaggtatgactgttagagggtgtgtgtgtgtgtgtgtgtgtgtgtgtgtgtgtgtggtcacttgcttgctttggtcatcggtgaggaagccaggctaagcaactaacaaagagtccaaata

SEQ ID NO: 501045 - DNA, 201 bp, Homo sapiens
agaatcagcaaattatactgagtctatgccaaccaagacctttctcatagagactctacttgttttcaggatcatttacatttaattctatggagcaatgmgggtatgctttcaagcaccctaaagttgacaagtgcttctgcaaaatattttcttccttgtttgttccttgtttgcataccggagaggagattgaaccag

SEQ ID NO: 501046 - DNA, 201 bp, Homo sapiens
ctaacttaagaggaaagcctgtggccacctgaaagtactgacagaattagaaaggcaaagaaagagagtaagaatttgatttaaatatataaatctaatatttaatattatataattatataaaatcttataaaccttataaaaccttataaaactatataaaatctaatattaaatctaatatttaatctaaaagatatt

SEQ ID NO: 501047 - DNA, 201 bp, Homo sapiens
aaggacatttaaaattcatatctaacagttggggtcagatatgaattttgcaagccgggaaggagtaggcaaacaaagcgacaacctaatcttcattcacaaaaaaaaaaatatgacaagcaaggaatcaggcaactgtattttcaacatctccctttctatggtgtttctaactcacagcatacagacatgttgtttctc

SEQ ID NO: 501048 - DNA, 201 bp, Homo sapiens
tttggacccaaacagaagcatccagtgctagtctttcaaacttcctttttcagttaaactcctgatgtacataaatgtcaatgattttcatgtcataattwtcaccttctaggaatactttttaatctatacaaaccaagaaaacattggggtaacaaaaaagttgcttaccaagatgcaaaatttcaaaatattccaaag

SEQ ID NO: 501049 - DNA, 201 bp, Homo sapiens
cataccggagaggagattgaaccagaaattctcttttaaaaagggttttgaaatgtgcgcattttcttcaatcaaattcacttatttcttgaaaaaaaaawattctaagagtaccattgtgagctaaggcattagggaagataaacataaactgtgatgattgcattaaccaagtgtcaacttgattggattgaaggatgc

SEQ ID NO: 501050 - DNA, 201 bp, Homo sapiens
tattaaatactatgttcaaaatatgagggaattagaactctataccagctaaactattagtcaagaatgagctacataaaagatgaatatcattcaaggtmtattttatcttaataatgaaattatgtccatatataccaaagacagggaacaagggatgaaatgataacaataatttacatttcgaggtgtttaccactt

SEQ ID NO: 501051 - DNA, 201 bp, Homo sapiens
gaggttcctaaagaaattaaaaatagaactaccattacttctattttgtaccaattagccatccctcttctgtgtgcatatatatatatatatatatatayatacccaaagaaaatgaaaccgcaaccttgtaaagatatcagtcggaatttttaaaagctctctaggggattctaatatgtgtgcatacagagatggaga

SEQ ID NO: 501052 - DNA, 201 bp, Homo sapiens
ccagctaaactattagtcaagaatgagctacataaaagatgaatatcattcaaggtatattttatcttaataatgaaattatgtccatatataccaaagamagggaacaagggatgaaatgataacaataatttacatttcgaggtgtttaccacttgccaagcctggtgttggggactctacattcactactttcattca

SEQ ID NO: 501053 - DNA, 201 bp, Homo sapiens
taatatgcctataatctactgacaaaacatactcctcagtaaagtgaaaccagatgtctggtgtgaaatcagatgtctgtgaacttgtctttctcagtttycagagcagtatcagatatactaaatacacagctaagctgtatattaaatccacaacttagcaaaatcatgacagtttggacatgaagcatcagcattttt

SEQ ID NO: 501054 - DNA, 201 bp, Homo sapiens
gaggcaggagaatggcgtgaacccaggaggcggggcttgcagtgagccgagaccacgccactgcactccagcctggggcgacagagcaagactccgtctcwaaaaaaaatatagagcaagcaattttttcaaatcgatgaagttaaacacatcaagtagaaattaaaagtcataaataataatttgatatggccacagaat

SEQ ID NO: 501055 - DNA, 201 bp, Homo sapiens
ccacttgacataatcatttcctcatgaacggattttaaaaattaagtgactcaaactccatgataaatgcttaaagccttaaaatattgtttttcttctcytcacttaatctactggttgggttaggctcaaggaaccacagagattagaaagattctgatccaatatcactgtcctcttttatacacatgaagctgaact

SEQ ID NO: 501056 - DNA, 201 bp, Homo sapiens
ccaccttggcctctcaaagtgctaggaatacaggcatgagccaccgtgcccagcccttcaaaatttattttaaagtttttttctttctcttggatttcaakatacaaccttgaagcaaactgtagaagcctttttccttagtcttaaaatagattctatgaccctccttttctcaccgtatgtactcccttcacactcatc

SEQ ID NO: 501057 - DNA, 201 bp, Homo sapiens
ttagaaaaaaacaagcattccagaagtaaattcttttctgttgctattatgatgaagttactccttatacccctgatatctgttctcttctacagtaatamaagtttcagtggaacatgtggctgcccaactaaagactgttttccagcctcccttgcagctaattgtgaccatgtcactggatttgatcaacagcatgag

SEQ ID NO: 501058 - DNA, 201 bp, Homo sapiens
cctataatctactgacaaaacatactcctcagtaaagtgaaaccagatgtctggtgtgaaatcagatgtctgtgaacttgtctttctcagttttcagagcrgtatcagatatactaaatacacagctaagctgtatattaaatccacaacttagcaaaatcatgacagtttggacatgaagcatcagcatttttattgtaa

SEQ ID NO: 501059 - DNA, 201 bp, Homo sapiens
taggctcaaggaaccacagagattagaaagattctgatccaatatcactgtcctcttttatacacatgaagctgaacttagaatcatgaaaaattctgcarccaccgattgtaagaatatgaggctgatgttgcttcaaatgtatatcatgagcaaactgtttctcgctaaagtctggatgtaatgtttttctcatcagat

SEQ ID NO: 501060 - DNA, 201 bp, Homo sapiens
tatggaatatatattagataatagcactgtactgatgttaaatatactgaatttgataattgtactgtggttatgtaagagaaaaacttctagaaaggatktcgggttaaagggtcattatatctgcaatgcactttcaaataagtcaacaaaaatgatggtcataaaaatgacaatgagtgtatatatacacataaacac

SEQ ID NO: 501061 - DNA, 201 bp, Homo sapiens
ggtgtgaaatcagatgtctgtgaacttgtctttctcagttttcagagcagtatcagatatactaaatacacagctaagctgtatattaaatccacaacttrgcaaaatcatgacagtttggacatgaagcatcagcatttttattgtaatccttataaaccaaagacatttccaaaatggaaatcctaagtttaagtactc

SEQ ID NO: 501062 - DNA, 201 bp, Homo sapiens
tcctacaaacaaatattattgtcaaggtatcctaaatcctcagcttgtgtctaacctcaaatcatatgacaggtttggaagaatttatctttcggtttacraaaataaaattctcctagagaattaagcacagtcacagtacacttcctgttttgtaagacttaactgaagccatcaatcaataaatgatattattctggc

SEQ ID NO: 501063 - DNA, 201 bp, Homo sapiens
ttttattcattcatttcacagtctgtgtcctatattgcttaattacaaagaaaagagtagactgctcatgtgtacactaactgctaaatgtgtaagcaaaygaatgaatgatcctgttctcaatccacgagaaaagaaaatattaatgaagagaatacaaagaaggcaaaaataggaggatataatcaacaaaattattta

SEQ ID NO: 501064 - DNA, 201 bp, Homo sapiens
aaaatacaaacataaccactgtacttgaaacaaaacaagggctgttagatttgactcaatcctttcaatgcaattttatccaatatatatatgtaaacatacacacacacacgtatatacttatatacacatgtatattcttatatacataaatatatgtatattcttatatacatgtgtgtattatatattatgtgtgta

SEQ ID NO: 501065 - DNA, 201 bp, Homo sapiens
ctaagctgtatattaaatccacaacttagcaaaatcatgacagtttggacatgaagcatcagcatttttattgtaatccttataaaccaaagacatttccraaatggaaatcctaagtttaagtactcagctaaatacagtaatatgtctttctcactttaagaatagtgtcagggctttttaaacacattatagaaattc

SEQ ID NO: 501066 - DNA, 201 bp, Homo sapiens
ctaacctcaaatcatatgacaggtttggaagaatttatctttcggtttacgaaaataaaattctcctagagaattaagcacagtcacagtacacttcctgytttgtaagacttaactgaagccatcaatcaataaatgatattattctggctttttactataaattttttattcattttttaattttaaagaatctacagc

SEQ ID NO: 501067 - DNA, 201 bp, Homo sapiens
tctgggtatatctgtgagggagtgttcccaggagagattggcctttgaagcactggattgagtaagaaagatccaccctcacccaacatgggcaggcaccrtgcaattagttgagggcttggatacaagaacaaggaagaggaaaggtaaatattttcatattctctctcgctctctctctcctgacgctgggacaacctt

SEQ ID NO: 501068 - DNA, 201 bp, Homo sapiens
gagatgctctaggaatatcagattatttgttactcttgtgcgaaaggcataataatggctccccaaagctgtccatgacctgattcctagagccggtgaawatgttacattacatggcaaagggaaattagggttggagatggaattaagttcactaattagctgccctcaggattatccaggtggttccaaggaaatcac

SEQ ID NO: 501069 - DNA, 201 bp, Homo sapiens
cggaagaaaaaagggaaaaaccttaaaagaataaagtaaagaaggaaattgtgcagaaaagaaagagagtaacttataatggtttagaaatgcaaacttcraagtcagaagctgggtttaaatctatgcaatcttcagtaagttatcccatctctctgattgtatttcttcatctgttaagtgggctaacatagtatcttc

SEQ ID NO: 501070 - DNA, 201 bp, Homo sapiens
tataagctctgccatggtctagaatttacatagtctgatcctagtgcattctctagcctcatctcccactacactccacttcatatccaccagaggacccytttttcccttactcagacagaccaatctcattagcaccttaaggtcctgcttttctcgctaccttaaatacagaccctatgttctcacaggactacatct

SEQ ID NO: 501071 - DNA, 201 bp, Homo sapiens
tagtatcttcatcatacagttgtgggtgatattaaataaactaatatatataaagtcaatactgtaatgacttgaacatagtgatcattcaataatttttmactattagtattatataataatatatttaaaataaataattctgaaaggtggtatcaattatttattttccacatttttctatgttttctaagttttttg

SEQ ID NO: 501072 - DNA, 201 bp, Homo sapiens
taaatgtggaaagcatataccttttatcaggaccagtgaccccactgcaggaattctcactcaaataaaatctaaaactttggcatgaggtcattaaactrttcctagggcacccttttacgctaaaagcctctgtaagcgattaaagttctaatttgaataattacattccacctacataaattccctctgtagtttcaa

SEQ ID NO: 501073 - DNA, 201 bp, Homo sapiens
agacagaaaaaaactagtaataaaatactcaaaggtctaaaaattaaaggcaaattttcttagcaaagagtacatggcattctatttaaaaatcaacaatytgtcttcattccccagatcataaacccaaggagaccattataaggctgctacaaacaatctgtcagtttgatttcacttggttagtgagggtgttgattt

SEQ ID NO: 501074 - DNA, 201 bp, Homo sapiens
ttttcttagcaaagagtacatggcattctatttaaaaatcaacaatttgtcttcattccccagatcataaacccaaggagaccattataaggctgctacaracaatctgtcagtttgatttcacttggttagtgagggtgttgattttgttgttgaactgcttaagaaaaatttaagatgcttaaagaaagttctttaaac

SEQ ID NO: 501075 - DNA, 201 bp, Homo sapiens
atcaaccaatcagatctatgaaagtacttacaaatgataaacaaacattcctttatatctttattatatcattatactatatttacttactccccctttargagtaaacatgtcactgctttgagcaatgaaatacaagcaaaagtggtatgtgatacttctagtcaaaagtttcaagtgccatttatcatgtcctttccc

SEQ ID NO: 501076 - DNA, 201 bp, Homo sapiens
gtaaaaaaagattactttcgagagagaagtttaagcttcaccaatgctgctcctgaccaatggaaatatgtacaacttcagcattttaagtaactggcttsaaggggtactgtggcaaccaaataaaataactccattttctaaaactttcatgtaacttttatgtctggactacagttcaagtggacaaaaacatttctg

SEQ ID NO: 501077 - DNA, 201 bp, Homo sapiens
ctgaaggaatgaatgaaaaaataaatgctggcaagggcatgatagaaatgagactcatacttgctgtgtgaacttggtatgcgctttcaggaaagcaatcygtataatatatcaggagtcttggaatgcctcaatcttttggtctagaatgtcacttaaagcaatccggtccactgattattgctactgcattatctgcat

SEQ ID NO: 501078 - DNA, 201 bp, Homo sapiens
tcattattcctctgcattatttcttatctaattagccaatagagacaagatgctttattcaaattaccctccctttgagggatatcactgtaaagtgcacrtaagaattctagtaaaccaggccaaggagagaaatgcctgagataacactcccctgcttgtttcttctgttctcctattcagactggaagcattggctgg

SEQ ID NO: 501079 - DNA, 201 bp, Homo sapiens
tttttttttttttttaaaaagcaacgcatcttttatgaagaagcaattcttctttagttttgggaatctattgaacattatgaggtaaaatcaaagaggtkggcttttaatttcaaaaagattaaacatgaaaacatgaaagattaaacatgaaagattttcatgttaagagtattgtgatggctaatatccagtgtcaac

SEQ ID NO: 501080 - DNA, 201 bp, Homo sapiens
atagcccctaaaatatgctgcatatttagccaaaagacacaagcagccaacttggtaaataagatctcatttgcaaaatgaaaaccgaaatggaaacttaycaaaagaggctgttatgagaggttacaaatatttcaataaagggttgcaatagcaagtataaaaataaccatgcactaaaagaagaatgctctggcctga

SEQ ID NO: 501081 - DNA, 201 bp, Homo sapiens
tttgagtcagtggactgggagaagaagacccaccctcaatctgggtgggcaccagctaatcagctgccaacgtggctagaataaagcaggcagaagacaayggaaagagcagactcgctgagtctcccggccttcatcttcctcccgtggtggatgtttcctgccctcgaacatcagactccacattcttcagcttttgga

SEQ ID NO: 501082 - DNA, 201 bp, Homo sapiens
tccaaagtcccttcacataagtatctgggtgagtgtttgattacacaatttgggaatgggaatcttgagaaaacttctttattctttctaccatatggtartaacaaattattggcctttcaaacgtatcttgttatagcccctaaaatatgctgcatatttagccaaaagacacaagcagccaacttggtaaataagatc

SEQ ID NO: 501083 - DNA, 201 bp, Homo sapiens
gctggcttcttgtacttccttgaactcacctatccattttaggtttgcatttgttattcctttggtttgaactctcctttcctcagagattagtatgactstttccctgtcttccttaattcatgagtctcttcaaacatctttttgttacagaagttttcagtgaacatcctacagccccagacccttaccatttctctc

SEQ ID NO: 501084 - DNA, 201 bp, Homo sapiens
agtgtgtatataaaacacatatatgggtgtatatacatatataatgtatgggtgtatatacatacataatgtatgggtgtttatacatacacatatataakgtgtgtgtgtgtgtgtgtgtgtgtgtgtgtgtgtgtgtgtgtgtgtggtgtatcctgtaaagaggaaattaaaccatctgaattatcagtgcccaaaatc

SEQ ID NO: 501085 - DNA, 201 bp, Homo sapiens
ttaagggtttgtgtgattacattaaatattgccccctcccctagaaacattcaggttccttatctaatttaaggtcagaattattaaacttaattctgtcyccaaagtcccttcacataagtatctgggtgagtgtttgattacacaatttgggaatgggaatcttgagaaaacttctttattctttctaccatatggtaa

SEQ ID NO: 501086 - DNA, 201 bp, Homo sapiens
ttttcacaaatggctcttatttggtgacaactaaacccttgtacagagcctaagacatttaattgtactgctcaatcccttgtctattaaacagcagcatyggtcagaccccaagcagtaaagacaggtgtacaatactattttaatttgggaaaattcagtgttcaaattaaaccaggctaaagggcttcaaagatttct

SEQ ID NO: 501087 - DNA, 201 bp, Homo sapiens
gttctgcttacattttattagccaaaatttagttgcaacactctacttcactgacaagagagccaaggagtgttttttttttttttagataggttgcaaaragcccagctaaaaatgtgtgtatttctaagaaaagaggaaggaagagaaagagagaaggacagattttagaagccaattcccaatctctgccataaacat

SEQ ID NO: 501088 - DNA, 201 bp, Homo sapiens
aaatacaaacataaccactgtacttgaaacaaaacaagggctgttagatttgactcaatcctttcaatgcaattttatccaatatatatatgtaaacatacacacacacacgtatatacttatatacacatgtatattcttatatacataaatatatgtatattcttatatacatgtgtgtattatatattatgtgtgtat

SEQ ID NO: 501089 - DNA, 201 bp, Homo sapiens
tatacacataaacacactcatatacagccatatcgctatatgtgtgtggtgggggagacagagagaggaggagagagagcaagaatgagagtgggtgtgasagacagagaaagtgcataaatgtaccaaaatgttataaattgctgaatatttgggggttcattgtgctattcttgcatattttttacaagtttaaatttt

SEQ ID NO: 501090 - DNA, 201 bp, Homo sapiens
cgtatatacttatatacacatgtatattcttatatacataaatatatgtatattcttatatacatgtgtgtattatatattatgtgtgtataatatataawgtgtgtataatatatattacatatgtgtgtatgtatacacacagaatatttcaaaaaagattataagtgattgaaaggacatggaaaaattagacttttt

SEQ ID NO: 501091 - DNA, 201 bp, Homo sapiens
gagtacttgccattaccatttatttatttatgtgtgtggtctgcctttatgtcctatttctggcctccacatccctacactactgttgcatacagactcaygagagtggggattcttatcgatgtccacgttgcctagaacaacaccagttacataataagagctgaataactatttctagatcgaatgaatcccaacaga

SEQ ID NO: 501092 - DNA, 201 bp, Homo sapiens
aatgttatatatacataatacaatattattcagccataagaagaagtactgattcatgctacaatgtggatgtatctcaaaaacattatactaagtgaaaraatccagacataatgggtcacatataattccaactatatgaaatttctagaataggtaaattcacagagacaaaaagcagatgggtagttgccaagagca

SEQ ID NO: 501093 - DNA, 201 bp, Homo sapiens
tagcttttcccaaagaagctaaaggatttcctgaccttctgtatctgactaccagaactcagggagaagttcaataccataattataataaataaagcaarctaattctaactccttaaagctgataactatgcccttaactagttctaactgaaacaaaaagaaaaaaaattaagctggttattctctgtataattttga

SEQ ID NO: 501094 - DNA, 201 bp, Homo sapiens
gtaaaagcagtaacatatatgaaggcctaggggcaaaataaaatgtagctgtttaagaaactaaaataagttcagtttggatagagtatatacagaatttattacgtgaatttttaattcagtaagcatttatttgctatcaagcagcaatgctaagtacagaggatataaagatggctaagcatacagtatagtaccatt

SEQ ID NO: 501095 - DNA, 201 bp, Homo sapiens
caacatattgaatgcaaaagcagatatgagaatccacctgtttgtattcggccagatattgaagagatttatgaaaatctaaaacaggcctggggcacagwggctcttgcctgtaatcccagcacttttggaagctgaggtagaaggattgcttgaacccaggagtttgagaccagcctgggcaacatagcaagacctcat

SEQ ID NO: 501096 - DNA, 201 bp, Homo sapiens
gaaaaaaatagaaatcatcctaactttctcttactttaaatcgttcaataactcctcattttctataggataatatcaagctgcttagatttagcatatamggctaattatgattagattcctagtctcatcacttccacttttttttttttttttttttttttttgagacagggtctcactctgtcacccaggctggagt

SEQ ID NO: 501097 - DNA, 201 bp, Homo sapiens
gcgatctcggctcactgcaacctctgcctcctgggttccggtgattctcctgtctcagcctcccgagtagctgggtttacaggcgcatgccaccacacccrgctaatttttgtatttttagtagagacggagtatttttagcagagactgggtttcgccatgttggctggtcttgaactcctgacctcaggtatatccgcc

SEQ ID NO: 501098 - DNA, 201 bp, Homo sapiens
tggtgaacacaatgaagactaataagcaaaaatgggcttcttccaacagaaacctcctgccaacctgtgcacaacattgtgcaattgcagaacggcacttsactggaagtcagggaaacacttgcaatcaagtccaggctctgtaacaagttaagtgaatccaaaacctttacagctgaacacataaaattattcaaaagc

SEQ ID NO: 501099 - DNA, 201 bp, Homo sapiens
atgaaaaactaaaaatatcataaaatctctgagtaaatcctatcggtatccatccaagtacattgtattaagtttgcacaaagaaatatattggctgggcrcagtgacccacacctgtaatcccagcactttgtgagttcaaggagggcagatcattaggtcaggagtttgagaccagcctggccaacatggtgaaacccc

SEQ ID NO: 501100 - DNA, 201 bp, Homo sapiens
cactggaagtcagggaaacacttgcaatcaagtccaggctctgtaacaagttaagtgaatccaaaacctttacagctgaacacataaaattattcaaaagmtctaacgaggtgagaagcaaccaaacttgattttcatctctgggaaaccctatattagcactgtaacccacaaggccctcttccacttccaaactcctct

SEQ ID NO: 501101 - DNA, 201 bp, Homo sapiens
aaggggaacttatttggaaaaagttattgataagctgtgatttttgctctgaagaataggagatctctttcctcacctcagcgtggggaaagaaacttcarcagaacctctttagaatccctaatatgtgtcccctgcattttgatgtgcgtatagactggtgtctgacccatgtatatgagaaacctaaagtccaagtga

SEQ ID NO: 501102 - DNA, 201 bp, Homo sapiens
ttattgtacagaaggtttaacaatatttaccattcatagaaagcagcttacatattaaatgcaactgaataaatgggaacctatgttaaaactgccagtgmaatcacacctatcagtgacactagtactctcaaatctaataaatatatcctttcatattatgaggaataggcctaacccttctgtcaaaattctaatcaa

SEQ ID NO: 501103 - DNA, 201 bp, Homo sapiens
tgttctaaatattttgctttttacttaaataaatcagtattttggtaaattttggcttttgttacaagctgtacaaaatgaaatatgttttcttggcctcmtatcctttggaaatagatgaaagattttattaataattaatttaaaattcttttaatttccatggtattttccttcgacatccaaatttttaaaagaata

SEQ ID NO: 501104 - DNA, 201 bp, Homo sapiens
tggggatgccaaattgtattatgattgggattttgaagtcttctccaatagggacagaagttatgcatgtgtgtaaacattcccctccaagcaaagatgaygactagaagtcactgccacaccagctaacagaataaactaccaccagtttgatgcaaaatcctgacccaagcttttgatcctccagttgagatgcagctg

SEQ ID NO: 501105 - DNA, 201 bp, Homo sapiens
gattgcctggaggccttgggtcatgctagagagtctaccaatatgaattacggtagggcctggtcacattagtaaaaccaataattcaatttaatgtaagsgttttgggttacatggtatcagtcaacctagagactgagatcaaccacagaggcaatccatcatgtctatgattgtatatggagcctcagtacaaactgt

SEQ ID NO: 501106 - DNA, 201 bp, Homo sapiens
agatattgcagtgcatttcataaaacacagacataccaaccataagatgaaaaacactcttgtgtaagtaataaagaataatgaaatggccatcaagctayagtctaaaactttggtcactggaccataaatggggatgccaaattgtattatgattgggattttgaagtcttctccaatagggacagaagttatgcatgt

SEQ ID NO: 501107 - DNA, 201 bp, Homo sapiens
cagtgaaatcccatctctactaaaaatacaaaaaatcagccgggcgaggtggtaggcatctgtagtctcagctactcgggaggctgaggcaggagaatagygtgaacccaggaggcggagcagcggagcttgcagcgagccaagattgcaccactgcattccagcctgggtgacagagcaagactgtctccaaaaaaaaaa

SEQ ID NO: 501108 - DNA, 201 bp, Homo sapiens
gcatctgtagtctcagctactcgggaggctgaggcaggagaatagtgtgaacccaggaggcggagcagcggagcttgcagcgagccaagattgcaccactrcattccagcctgggtgacagagcaagactgtctccaaaaaaaaaaaaaaaaaggagtctaaagagacatgacatctgacagtaatgcatgatcctggatt

SEQ ID NO: 501109 - DNA, 201 bp, Homo sapiens
ctgacctgactgtcatctttccacctacaatgatgactcatcgactgtcatttagctgattatcactttgtgtttgagagaatttatagaatactaatttrcttttcataaacaccacacttgcaataaacttttaaagcaagatttatttctagcaatgctgaaaaagccttctttcttaaggttcggagcaaaacccag

SEQ ID NO: 501110 - DNA, 201 bp, Homo sapiens
ctcaatagtgaatgaggtctctcctccaactagggaaaaattgcatgagctgagtctcaggctcaggtggaatcaggaaaatcttatctcaagatgaaagsctggcttgctgtatttggtgcagaaattcacaacctaaggcctttgtattagttgtttcttctgctggttgcatagttatatttttgcaaaacaaagctg

SEQ ID NO: 501111 - DNA, 201 bp, Homo sapiens
ctaaggcctttgtattagttgtttcttctgctggttgcatagttatatttttgcaaaacaaagctgcatcttatactgactacttcttggaatttcttgtwacaaatctgaatctcccttcagggaaataaatgactagggctgatgagggcaaagttttttgtttggttggtttttttgttttacatggttaagcaacag

SEQ ID NO: 501112 - DNA, 201 bp, Homo sapiens
agtggacacagttttacatacacaaccctgtactgtaactattcataaatataatgttctcagtaggacacagtttataataaagaaggccatcttgtacygcaaacaaaaaaaacatcaaaatatttcaattttaaaaatgcactcagtgatgtgagaggctaataccatgaggtgtgcaagaagccacttgagagtcat

SEQ ID NO: 501113 - DNA, 201 bp, Homo sapiens
caatgttggctcactgcagcctcaaactcccaggaagaaatcctcctgcctcagccccccaactagctgagactacaggtgtgtgccgccaggccgcctattttttttttttttaagttttttgtagagacagggtcccactatgttgcccaggctggtcttgaactcctgagctcaagcaacccacccacctcagcctcc

SEQ ID NO: 501114 - DNA, 201 bp, Homo sapiens
gtgagttcaaggagggcagatcattaggtcaggagtttgagaccagcctggccaacatggtgaaaccccatctgtactaaaaatacaaacattcgctgggygtggtggcaggtgcctgtaatcccagccacttgggaggctgaggcaggagaattgtttgaacccaggaggtggagggtgcagtgagtgagccgagatcgc

SEQ ID NO: 501115 - DNA, 201 bp, Homo sapiens
tcccaactctactaaaaatacaaaaactagctgggcatggtggtgtgtgcctgtaatcccagctactcgcggggctgaggcaggagaatcgcttgaacccrggaggtggaggttgcagtgagtcgagatcaccactgcactcaagcctgggcaacagagcgagactccatctcaaaaaaaaaaaaaatctaagacttttga

SEQ ID NO: 501116 - DNA, 201 bp, Homo sapiens
ctgggtgtggtggcaggtgcctgtaatcccagccacttgggaggctgaggcaggagaattgtttgaacccaggaggtggagggtgcagtgagtgagccgaratcgcaccactgccctctagcctgggcaacaggcgagactccatctcaaaaaaaaaaaaaaagaaagaaagaaaaaaaaagaaatacattgaaaccattt

SEQ ID NO: 501117 - DNA, 201 bp, Homo sapiens
gctgaggcaggagaatcgcttgaacccgggaggtggaggttgcagtgagtcgagatcaccactgcactcaagcctgggcaacagagcgagactccatctcaaaaaaaaaaaaaatctaagacttttgagttcacatgcttaatttttttttttttaattctgagactggatccacgaacttcgccagattggaaaaggggt

SEQ ID NO: 501118 - DNA, 201 bp, Homo sapiens
gaatggcaatcattaaaaagtcaggaaacaacagctgctagagaggatgtggagaaataggaacacttttacactgttggtggggctgtaaactagttcamccattgtagaagacagtgtggcgattcctcggggatctagaactagaaataccatttgacccagccaacccattactgggtatatacccaaaggactaaa

SEQ ID NO: 501119 - DNA, 201 bp, Homo sapiens
atgatcacaaggtagataaacaaactccctggaactacagtaagagtaattcaagttacaaagaaagaaaaaggaaaagaacatgagagaagggaaagaamgaaggaaggaaagaaggaaggaagaaaggcaggcaggcagggagggagggatcatttggtccccataaggtcacactttgacaagaacaatggtcaagca

SEQ ID NO: 501120 - DNA, 201 bp, Homo sapiens
ctatgcagccataaaaaatgatgagttcatgtcctttgtagggacatggatgaagctggaaatcatcattctcagcaaactatcgcaaggacaaaaaaacyaaacaccacatgttctcactcatagttgggaactgaacaatgagaacacatggacacaggaaggggaacatcacacaccggggcctgttgtggggtgggg

SEQ ID NO: 501121 - DNA, 201 bp, Homo sapiens
ttagtaatccttcaattaaaccagtgtgctaccaggatatttgaagtgtgaagcattaaatataaaaaagaaaaataaataaataaaatcataaaccattwtgcactgtagatcaattaacagtggtaaagaagagtatatgtatatgtgtatcagcaaatgtatacacactcacctacatacatacatacatcaagagac

SEQ ID NO: 501122 - DNA, 201 bp, Homo sapiens
aaccaaacaccacatgttctcactcatagttgggaactgaacaatgagaacacatggacacaggaaggggaacatcacacaccggggcctgttgtggggtggggggagggatagcattaggagatatacctaatgttaaatgacgagttaatgggtgcagcacaccaacatggcacatgtatacatatgtaacaaacctgc

SEQ ID NO: 501123 - DNA, 201 bp, Homo sapiens
ccgattttccaggtgcgtccatcacccctttctttgactcggaaagggaactccctgaccccttgcgcttcccaggtgaggcaatgcctcgccctgcttcrgctcgcgcacggtgcgcacacacactggcctgcgcccactgtctggcactccctagtgagatgaacccggtacctcagatggaaatgcagaaatcaccgt

SEQ ID NO: 501124 - DNA, 201 bp, Homo sapiens
gaggaaaacaaacttactgaactgcctgaaaaatgtctgtccgaactgagcaacttacaagaactctatattaatcacaacttgctttctacaatttcacstggagcctttattggcctacataatcttcttcgacttcatctcaattcaaatagattgcagatgatcaacagtaagtggtttgatgctcttccaaatcta

SEQ ID NO: 501125 - DNA, 201 bp, Homo sapiens
ttgagttataggttagctatttcctcatggcagacaaaacagtttccattatccagctcatctttccgccctttctccctcttctcactccttttctcttmtatttagcaaatatttattttctcataagcctcagaaaatcctatctgaaagcaggtataaattgaaagcaggtataaaacattctttgtaatttgattc

SEQ ID NO: 501126 - DNA, 201 bp, Homo sapiens
agctcttaccttcctatccctatttcctagtaaattaatcaatgaaacaaaattctagtacagaactttcatattaaatcacttattttttcaagattttwaaaaaaattacatataaaatgcatgaattcatataagtatatgatgctaacaagtcaattcaaacctttgagtgtaaaaaaatttcttctaaccacggat

SEQ ID NO: 501127 - DNA, 201 bp, Homo sapiens
aactcaaatgaccaataagaggaataaatgaaggttctcttgccctaaaatacaaaaacttgaactttccaattttggaagcagatactaagataaatgtscaggttttatataaacctaaacaaatgaccagcatcatttaatctagttttatgccacaaacaataacaaaaagttgaccgtaactattttcaacggcat

SEQ ID NO: 501128 - DNA, 201 bp, Homo sapiens
cgcatgcatagaaaataataaatatattattaacatattatgtttggataaacatgcatttatatttacttgagtagaaagattacaaattaagaaggaakgaaaaaggaaaggaagaaaagaaggaaacattcactaaattgtgaatatgtgccagattaacaatttgctgtgctcttaggaaatccacttcagatctaa

SEQ ID NO: 501129 - DNA, 201 bp, Homo sapiens
aagaggtaaaagaatgactaccaccagcagttttgtgtgtgtgtgtgtgtgtgtgtgtgtgtgagagagagagagagagagagagagagagagacagagasagagagacagagacagagagacagatctactgtaagacagagagaagaaaaataagctaaattaatttttgctaatttaatttccattagaaggagaaaa

SEQ ID NO: 501130 - DNA, 201 bp, Homo sapiens
tctattggaggagataaaaatataaacatgaataaagaaataaaacaagatagtcatagtagctagaagcaggtgtgtgtgagtgtgtgtgtgtgcacgcrcatgtgtgcgtgtgttccattttgttagatgcacagaaaaaactcttccctgaagtggggaaaataaagagccaaccacacaaagacctaaaggaagaga

SEQ ID NO: 501131 - DNA, 201 bp, Homo sapiens
tactgctgacctagacattttgccgctatattcttattcagcaatctgaaaagaaaagcttaattaacctgtagaatagatagcaaaatcaagataaaagrtatcttgtagatttgaagagtacacatctactatgtaaaagcaggtaggataagaggaacagttttcatttctcctcataaaatattctatgcctataat

SEQ ID NO: 501132 - DNA, 201 bp, Homo sapiens
tggatacagatattgcatataagtaatattatttaagaaggctatttgttgctatcctgattaagtgaagactattttgtcttgcatatttagtaggaaaktcaatcagtaacataacagattatttttttaaaaatgatggcttagattctgattacaaactaaaatatctcaaagaaattttagatatatctgaagtag

SEQ ID NO: 501133 - DNA, 201 bp, Homo sapiens
cctttcactgtagagctactgcagaaccacagcctgaaatctactggataacaccttctggtcaaaaactcttgcctaataccctgacagacaagttctaygtccattctgagggaacactagatataaatggcgtaactcccaaagaagggggtttatatacttgtatagcaactaacctagttggcgctgacttgaagt

SEQ ID NO: 501134 - DNA, 201 bp, Homo sapiens
taaataaaaatcctattaatagaatacgaaggggtgattttagcaatatgctacacttaaaagagttggggataaataatatgcctgagctgatttccatygatagtcttgctgtggataacctgccagatttaagaaaaatagaagctactaacaaccctagattgtcttacattcaccccaatgcatttttcagactcc

SEQ ID NO: 501135 - DNA, 201 bp, Homo sapiens
agaacagacttccccaaagcagtattcccctggtcaaatcctctagaccctcaccaatcagaattcatttctccctcctcaagacttccacagcatatgayagcacttaacacagtctttcttgtgtctctccaactgtaaatcaatttcctgaggctagagaccacacttaattcatatttgtatacccaacagtatcta

SEQ ID NO: 501136 - DNA, 201 bp, Homo sapiens
tgcttagaaatttcttccggcagatatcctaaatcatctctctcacgtttaaagttccacagatctctagggcagggggaaaatgccaccagtctctttgytaaagcataacaaaagtcatctttgctccagttcccaacaagttcctcatctccatctgagaccacctcagcctagattttattgtccatatcactaaca

SEQ ID NO: 501137 - DNA, 201 bp, Homo sapiens
aatcaaaaaaggccatttgtaaagaatctcacatatattatctctgtcaaatctcacaacaacccaatgagagagatattgttggctccttttttttttcttttttttttttttttttttttgagatggagtctcgctatgtcgccagactggagtgcagtggcgagatctcggctcactgcaagctccgcctcccgagtt

SEQ ID NO: 501138 - DNA, 201 bp, Homo sapiens
tgaacaaacaaaccaagatagtgatgttatgaaaaccaaatgcaaagggagtttcaagaagaaggaatcacttatagtggcattaagatgtccttggattrggcaattagaaagtcattaaaaacctcatgatgaatagctgctgtggagttttgttggtagaacccagattgagatggatagaggagcaaatggataatg

SEQ ID NO: 501139 - DNA, 201 bp, Homo sapiens
aagaatctacttaaggttagtaacactggcataatatgcaaataattatgcaaacatatcttttgatattgtttcagaggcatgaacttgattttcaagayccaaacattagaaaatgacattttctattgcatattctaaaaccttagagttttactcaacattacatttaaaagttacatggttccaaaactgacaatg

SEQ ID NO: 501140 - DNA, 201 bp, Homo sapiens
gatacctgcaggacagaaacggaatgcttccaaatatgatgccacagctatcttagttataaggtagtatgcatgattaaaatgtaaattaagggggaaayattaataaaagttgcattaaattcacatttcctgaattgtgagcctcctcttcttttccagtaatgctctcctacattacttctactccatgtagtcact

SEQ ID NO: 501141 - DNA, 201 bp, Homo sapiens
ctcattttatctaggaaattggatggctcttttatttccaaactctcatcagctgggaaagatttaaaaagtagcatgtgtcataactccaatatttcaayctaaaatccaaaaaagcagctgcttccttgcaagaacatgctcagagctttctctctcacctttcctttcccctttcaccttcattcactgtgttccatg

SEQ ID NO: 501142 - DNA, 201 bp, Homo sapiens
aattcattgtttcttatataaccgcttatgctattttacattgtactaggcatctgcaaacaaacaaatgttatttcttgttccaagttaggtaaaacttrtaaataaaaccctgcaaaatggctcacaataaatcaaaatagtcctacaagaaaacagaaagctagaaaaagattagagataaggtcctgccaatagata

SEQ ID NO: 501143 - DNA, 201 bp, Homo sapiens
gaccagccttgtgctacacctttgtataaacctactttaaaatacaaaaaggtactccattcattcttttcaaaagatttagtgaatgtgaataatgtcayattgcctagagtaatcttgatgtttttgttccactggaaaaaaacaaggtccctttagctaaagcttttcttctgctattgtcacttcagcactagcaaa

SEQ ID NO: 501144 - DNA, 201 bp, Homo sapiens
taggagaaataatgaaaaagaagtttccagaactgaataaagatatatagaaaagtatacactgaaagtcaagaaggaaaacaaaaaataaatccacctgyagaaacatgatagggagtctataataaatgaagataaaaagaaaagcttttctcattagcaacagattacagaagactattaaatactatgttcaaaata

SEQ ID NO: 501145 - DNA, 201 bp, Homo sapiens
gcaacctctgcttcccaggctcaagtgatcctccagcctcagcttcctgaggagctgggattactggcatgagccaccacacccagctaatttttgtgggkttttttttgtacaaatggggtttccccatgttgcgcaggctggtctcgagctcctgagctcaaagctatctgctcccctaggcctcccaaaaggctggga

SEQ ID NO: 501146 - DNA, 201 bp, Homo sapiens
ctctgtaaaagaacaactatttggcttgctagttagcctactcagccaaaacaacaaaagaaatccttgattttttccatttccctcacctgtcagactcwatccattagtaaattctatgggctttacttcctaaatatatcctcaaaatatgcccattcttcatttctaatgacacaaccctagtccaatatactaccc

SEQ ID NO: 501147 - DNA, 201 bp, Homo sapiens
aacaacagggaactaaaatttaacacaaaatcaggtgccatttaatactgtttaacatttgaaaattatttatttaataatacagatcgtcttaatgtgcygtaaatatttctcgcacagcatcatattgtcagaagtttttcccttttggaggcttcttttttccattcctttccagtaactggcctcccaatgccagca

SEQ ID NO: 501148 - DNA, 201 bp, Homo sapiens
atgctgcaaaaatatggtgggttagttcactttctagtggcaataaggtttggtggaaatgtggtaaatttcctccacctcagctatttgatagcatttayagtggtataacagaaataaagtacgctttatttacgagaagactcattctatattcaatttataataataagcatgctggaagagccatctggatacctt

SEQ ID NO: 501149 - DNA, 201 bp, Homo sapiens
gaggctaacgatatatagtcttcgtcatgttgaaatgctgcaaaaatatggtgggttagttcactttctagtggcaataaggtttggtggaaatgtggtamatttcctccacctcagctatttgatagcatttatagtggtataacagaaataaagtacgctttatttacgagaagactcattctatattcaatttataat

SEQ ID NO: 501150 - DNA, 201 bp, Homo sapiens
caataaagatttttactgtattgggaaaagctaaccctgtgatctttaaatactctggcttcagaaaataattttaatattaaacctcttccaaagttctkgacttgaaatcccaacattaccatcatgatgccacattattattttaaaatacaccatttcaaatatgaaataatttttacatgttaataacttagtata

SEQ ID NO: 501151 - DNA, 201 bp, Homo sapiens
gctgtgtctttcttagaagtgatgggccttatcaataaagatttttactgtattgggaaaagctaaccctgtgatctttaaatactctggcttcagaaaakaattttaatattaaacctcttccaaagttcttgacttgaaatcccaacattaccatcatgatgccacattattattttaaaatacaccatttcaaatatg

SEQ ID NO: 501152 - DNA, 201 bp, Homo sapiens
tactaaagtcactatgttgacctatgttctcatcccaaatgatatggccaagcttagttgttgttactgttgttattttaatgagtcatttgtgtgttagygctccttccaaggatcaggtctaatagtagcaaggtttctaagcagggaagcaaggagtggcccatgctttattcacacaccatttattgaagatctact

SEQ ID NO: 501153 - DNA, 201 bp, Homo sapiens
gctgtgctcttaggaaatccacttcagatctaaagaagaggtgtgggaaaatgaacatttgccatcttacaatatgacaggcatgctgatagacaggcctkcacatctctttctgtacatgtataatgtaatatatattacatataaatgtgtataatacattacataattacaacccaatttatgtgatcctcatgaaat

SEQ ID NO: 501154 - DNA, 201 bp, Homo sapiens
ccaaggcctgggcaggggactgaaatgttgacaggaaaagggggaagacaatgatggcaatgtcaagggaaaattaacctttggaaggttctgacgggaawtatccagagtctcttcaaagaaggggttgctgttttagtgactttgcagcagaattattagaagttgagggtgagactaggtcaggaaaaccactatgag

SEQ ID NO: 501155 - DNA, 201 bp, Homo sapiens
actacttaaatttacatgtatgtagttgagggtatgaaatgcatggagcatgatactctttacattgacaagcacgtagaaattgaaccctcaaacctatraatagatttcctttcataaaaatatgtaataaaatgtaattaattctttaaatacttacaaattcagttctatttaaataattttgatgtaattttatgt

SEQ ID NO: 501156 - DNA, 201 bp, Homo sapiens
aagaaaaatacaattacctatctatcatgctggccatgaagcttacatgagctagaatatgttcacacatagaatagtacctgatacatattaaatgttarctaaacatacgagggtagagttactcaaaggacttatcgaaaaacatcaacacaaaacccaacgaagactcctataacacagaatatatgccagctataa

SEQ ID NO: 501157 - DNA, 201 bp, Homo sapiens
acacacatgtaaaaaaaaacgcatgaaaaataacttattgaggaaggaacttataaacctcaaaatatagttaaaacatcatactcctgccaataataaayaatccgtaatttgaataaaataattcataataaacagtgactgtgtatgtgtgtaaattatctctaatgtacaccctatggatgtttaatgaacaccaaa

SEQ ID NO: 501158 - DNA, 201 bp, Homo sapiens
atttctagaggtaacatcagagggatactgatgatttttcacaaatggctcttatttggtgacaactaaacccttgtacagagcctaagacatttaattgwactgctcaatcccttgtctattaaacagcagcattggtcagaccccaagcagtaaagacaggtgtacaatactattttaatttgggaaaattcagtgttc

SEQ ID NO: 501159 - DNA, 201 bp, Homo sapiens
cgttccatgaacgagagtccagcagcccaatagtcaaatagcacactaggtctcgagtttgctttagctgtgtggcccccttaactgaggacaccatcacytgagcagagcagaaggctttctgatcctaccactataatactgttgcatcttctagggagtgaagttttccttaaagctaattgttggagtagcttttcc

SEQ ID NO: 501160 - DNA, 201 bp, Homo sapiens
gtaccaatatttcttttgaaagcctgacgactataaaactcagcccatgggtcaccttcttggtcaagctttctctttatgcctcaagttgaaaagactayttcttactttatacctcccactgtatctggtattgtgtttattctatcttattgcagagggttgatttttaaaaaaatgtttgtcttccccactgatttt

SEQ ID NO: 501161 - DNA, 201 bp, Homo sapiens
atactgctgaaaggctaagatggatatttggaagagatcacaggttttggcaacatgaacgtgatgctgacaaagaaccaaataaatgagtaatctttcaragcccaggtgtttagctgacctgcaaaagaaatattatggaaggtagaaaggtgaaaagaaaaaagaaggggatgcaaagaaaattctaccacagattca

SEQ ID NO: 501162 - DNA, 201 bp, Homo sapiens
atgatttgagcatcttttcatgttatctgtcatttgcacatcttctttggtgaattatctattcaacttttaaaaattaaatttagtgatttgtcttattrctgagttgtaagaattctttatataatctggatataaattttgtattagatatgttttgtaaatattttctcctaatctctgtgcttttaaatttttaac

SEQ ID NO: 501163 - DNA, 201 bp, Homo sapiens
cctataatacctcccctcagctacctcaggagtaaagttactttctatcagatctcactattgttaattagatactgcaaggggtgagggatgggacctgygtttggttacagaactgttttccaaagcagtgggactaccaatgtttaagagtttccgttgttccacatctcaccagcacttgatattatcattctttcc

SEQ ID NO: 501164 - DNA, 201 bp, Homo sapiens
cagtgagcggagattgcgccactgcactgcagcctgggtgacaagaccaaaactctgtctcaaaaaaaagggtctggtcactacactacataattatttcygtgattaaaaaattaaaccaaagtttccaaaaattatttatttgaaaagaattttaggttgctattaaataactaaattctttaaatagatatggagttg

SEQ ID NO: 501165 - DNA, 201 bp, Homo sapiens; identical to SEQ ID NO: 122775

SEQ ID NO: 501166 - DNA, 201 bp, Homo sapiens
gagacagaatcttgctctgtcacccagctggagtgcagcggcgcaatctcagctcaccgcaacctctgcctcccaggttcaagcaattctcctgcctcagyctcctgagtagctgggattacaggccaccattcccagctaactttttgtatttttagtagagacggggtttcaccatgttggccaggctagtcttgaact

SEQ ID NO: 501167 - DNA, 201 bp, Homo sapiens
gggaagtcagcagataaatctgcaggagaaaatctgcagcaacaaggagaaaagaatcctgagttgatacaaatttgtttattggtttacataatgggaamatcatatgaaatgaaattatcctaaaatacaaaacatgatgacattacaaacatttcccttctttaaaaaaaagtctttgctgtatacaattccgtaact

SEQ ID NO: 501168 - DNA, 201 bp, Homo sapiens
ttaaagtaccccatgttgctcttcaaaaagttgtaaatctcaaatttttggatctaaataaaaatcctattaatagaatacgaaggggtgattttagcaayatgctacacttaaaagagttggggataaataatatgcctgagctgatttccatcgatagtcttgctgtggataacctgccagatttaagaaaaatagaag

SEQ ID NO: 501169 - DNA, 201 bp, Homo sapiens
ttattaaagtaccccatgttgctcttcaaaaagttgtaaatctcaaatttttggatctaaataaaaatcctattaatagaatacgaaggggtgattttagyaatatgctacacttaaaagagttggggataaataatatgcctgagctgatttccatcgatagtcttgctgtggataacctgccagatttaagaaaaatag

SEQ ID NO: 501170 - DNA, 201 bp, Homo sapiens
ttctgatgattggggaaaatccaattatcagaatcaaagacatgaactttaagcctcttatcaatcttcgcagcctggttatagctggtataaacctcacrgaaataccagataacgccttggttggactggaaaacttagaaagcatctctttttacgataacaggcttattaaagtaccccatgttgctcttcaaaaag

SEQ ID NO: 501171 - DNA, 201 bp, Homo sapiens
tcttgggcttcatcacaatgctgattttctaggagatagggagtaattaatagtaactaaattgtggctatattttctttgatccaacctttttcctcaartttcccacgacattatagcaaataagtaaaaatttttgtgaagaatatagttgtcaccattatatttactatattatatgttatatatattattaccatt

SEQ ID NO: 501172 - DNA, 201 bp, Homo sapiens
cgagaccatcctggtcaacatggtgaaaccctgtctctactaaaaatacaaaaattagctgggcgtggtggcacgtgcctgtaatcccagctactcaggargctgaggtaggagaatcccttgaaccagggagttggaggttgcagtgagccgagatctcaacactgcactccagtctggcgacagagtgagactccatct

SEQ ID NO: 501173 - DNA, 201 bp, Homo sapiens
attgaagtgccaagtacattagtagtcatttaaaaatcttatatagggaatatacggatttcacttaaaaaaaaagagaattaagatttttgaggatttcmgtcatttttacaaacaaacccccacagtcctgcaaaaatagaagtatttttgtacaaagcaaacattctgagacaataaaataccacagtttttataggc

SEQ ID NO: 501174 - DNA, 201 bp, Homo sapiens
gtaagacacttttcttgggtgatgggactacctacatttttataaagcctcaaatatggatttcagaaagcatttaatcaatattaaatagcaatcataayttgtatttaaccctttaactattgacagaaactctaggaaattatgtattcacttaaggatttttttaacaagtagcttttggagtagattaaattatta

SEQ ID NO: 501175 - DNA, 201 bp, Homo sapiens
tcaatcttcgcagcctggttatagctggtataaacctcacagaaataccagataacgccttggttggactggaaaacttagaaagcatctctttttacgayaacaggcttattaaagtaccccatgttgctcttcaaaaagttgtaaatctcaaatttttggatctaaataaaaatcctattaatagaatacgaaggggtg

SEQ ID NO: 501176 - DNA, 201 bp, Homo sapiens
gtgatgtaataaaattgttttttcattgttagtaatggaaggtaagttattctcagggaaaaataaaacagccaaatgttaatcttgtgaactttagttamgaatgataacacacaggtacatctacagcaagttaaacttaatcttctctgaatactgcaaaactcaagtcactttatgcaaaggagactatggagagaa

SEQ ID NO: 501177 - DNA, 201 bp, Homo sapiens
cagaggggagattcttgaactgaggtttgaaaagacagtaaaacataatttaaaacaaagaaagaagtattccaggcagagtgatgcaaccatagctctaycaatagggagaaggttgcctgcaggaaaatggcagacggtgaggtaaacatagaaggatctccatatatcaaatttgcaacttggtgttggaaatgatta

SEQ ID NO: 501178 - DNA, 201 bp, Homo sapiens
atcagttcattcaaaacatttcttgagcacatactacattataatgataatgcccagaagataggatgcaaagccaggcaggcctcacgctctcaaggagkttagtgcctggtgaaggaaaggatcaaggaaatgcctgacagaaacaagtgctggagccatgggaccactgtgaaggggcagctaagtacatgtggaggg

SEQ ID NO: 501179 - DNA, 201 bp, Homo sapiens
ttctgttagtctaaaaagggaaacctaacattttctaactgatggacagcagtgaattcctttttactgaaacacccacacttaaaacttcttggcagttkttaaggtagtgctgggttaggaagaagatgagactatgtcaactttactaagatgaacatctggcttctagagccaccaaatgaaggcaaaaatatagga

SEQ ID NO: 501180 - DNA, 201 bp, Homo sapiens
tatcacaaaagaccacagaacattcatgttgctccttttggaggaacagaattaagcattctctcctttgtgcatccacagagcattgcacacatttttaytgtaaatcaaatctactgtgcatcattgtcctcagctatttactcctttgataactgaaaacttggtgagcagatattttatcttatttattgctgactt

SEQ ID NO: 501181 - DNA, 201 bp, Homo sapiens
agagagtctagaagctttaagatattttaaataattctatttaatacttctatctaataagaaaaacagactttaaattttgtgtttttacatatgtgacyaaatataaaacttaaagaaaagagtgtattaaacaaaatataggaaatagaatatatcaaacaattcagaattttgtcttcaacttaaggaacatgtatt

SEQ ID NO: 501182 - DNA, 201 bp, Homo sapiens
tcttttacaaggatgcatttagtataattcaacaatacctctgggatatggaaccttcaattagaactaaagaaagatcaagtcttacaacaagggaataygaagttagatagtgggagaatagaatttaagttctttatacaaatgaacttagccagcaatttgctatagaagaaaaggaaaaactgggttttaatgtac

SEQ ID NO: 501183 - DNA, 201 bp, Homo sapiens
gatcttactcagccatccatgtgccatgctgataacaattgttactattgtaatagtaaggaaaatacaggagtaaagttcctagggaactgcctaactakgaagttagtaaaggatctggactctgaatttgatttaaagaaagaggaaaacacacgttggctataaaagaaataaatgaaataaccattgctacaacct

SEQ ID NO: 501184 - DNA, 201 bp, Homo sapiens
ctgcatctacttgcagtatcctccatcacactgaacagcacctcctcccctccccttccacattcaatttgtaatcaagacctttcatcttccaaataacycttgattccatcttcatctaccatgaagccatcatccatgaactgggctactgcccaagccactaaaaggatctgccaacatttacatctatcatatttc

SEQ ID NO: 501185 - DNA, 201 bp, Homo sapiens
cagatgttctcaccctctaggatggtagagtcccaaggatctttttcagtattaggactatatacaatgagcttggagagcaaaaataaatcctaaggcastggacttcccatagattttcccattttgtcattagattagaaaatagtgacttcttgaaggtgacacatctaggaagaggtgaagcaaagatagaatcag

SEQ ID NO: 501186 - DNA, 201 bp, Homo sapiens
tgttctcaccctctaggatggtagagtcccaaggatctttttcagtattaggactatatacaatgagcttggagagcaaaaataaatcctaaggcactggrcttcccatagattttcccattttgtcattagattagaaaatagtgacttcttgaaggtgacacatctaggaagaggtgaagcaaagatagaatcagtctt

SEQ ID NO: 501187 - DNA, 201 bp, Homo sapiens
tagtttagaaattaaaatctgtattaaatcaaaccctgtaagttttttccagaccctgccacttggttgatctcttgatagtcactgagactaaacatccrgcttttctggcctttaaaaaaattttttaagtagactttattttttaagcagctttgggttctcagtagaattggacagaaaacacagagaattctcata

SEQ ID NO: 501188 - DNA, 201 bp, Homo sapiens
caccattatagtatcatacagaggagttttggtgccttaaagatcctctgtgctccacctagtcatctccccctcccccagcccctggcaaccatacaatkaaatcttattcagccttaaaaaagaatgtcctgccacttgcagcaacatggataaaactggggggcattgtgctatacgaaataagccagacacagaaag

SEQ ID NO: 501189 - DNA, 201 bp, Homo sapiens
caataggaagtttcattcattgctggtagaaatgcaaaatggcacggccactttggaagacaatttggcagtttctttcaaaactaaacatactcttgctrtatgatccagcaatggtgctccttggtatctaacgaaatgaactgaaaacttatgtccacaccaaaaccagcacatagatatttatagcagctttattta

SEQ ID NO: 501190 - DNA, 201 bp, Homo sapiens
gatggagccccaaatgaaatatgctttaagattatggctgagttcctgagttttctatttggaccccagccttgctttttttactggccactaccaaaccwagctagtaggttttcctagctgttgactcagtatttgtcacatgattacagattctcctacttagtgatgattaaaagtctaaagcaagattggtgtttt

SEQ ID NO: 501191 - DNA, 201 bp, Homo sapiens
ttttgtttttgatagagacagtatctctctgtgttgcccagactggtcttgaactacttggatcatgcaatcctcccacattagcctcccaaagtgctggsattataggcataaggggccacacccataaatttaatttttaaactaagattatttgggaccttaggaaaaatcatgaaaaataatctcttggaataatgt

SEQ ID NO: 501192 - DNA, 201 bp, Homo sapiens
tgctgggattataggcataaggggccacacccataaatttaatttttaaactaagattatttgggaccttaggaaaaatcatgaaaaataatctcttggartaatgtgaaagattatattgttccctaaaaggaacaaaatgctttacggtgctagccttttataccatgctggccatgccagctaaagttcagatcgggt

SEQ ID NO: 501193 - DNA, 201 bp, Homo sapiens
aatcctcatctctttcatgcctaagtctttttaaattttttattacaatatacaatattcatggaacatcaattaaaggatgtatatgtattccgttaatytttctcatctttaagtttttgcttatattctttttagtccatttgaaacctgtatacttggaataaaggcttttgcaacttgtagaatgatttttttcct

SEQ ID NO: 501194 - DNA, 201 bp, Homo sapiens
atttacatgctgttcattttgttttatttaattttccatatttaccttgtttttcatatctagagtatgacaatctagcaactctttatttctggtaacawtctaaaatgttttatttggaaccacttattatggcagatgataaaaatctaggctcagttttatcacctccacctaactcctaaaatagatgacataaat

SEQ ID NO: 501195 - DNA, 201 bp, Homo sapiens
cagatgctcaagttctttacataaaatgatgtagtatttgcatataactatgcacatccccaatatcctttaaattatctctaggttacttattcctaatrcaatataaatgctatgtaaatatttgttttactgcattgtttagggaataatgacaagaaaaaagtctgtgttttttttttttttcagtacagacacaac

SEQ ID NO: 501196 - DNA, 201 bp, Homo sapiens
caaggaatagataatatttgaagagatagtggtagaggattttccagaattgatgaatgaataaatgtgctgggcctcagaaattgatatcccaaaatacrgcactttgatgtgctaaactgaagaagcctcgaggtctctctgacctccttccacctcctgtttctcaacccattgtctctcctaaataaagctcatgat

SEQ ID NO: 501197 - DNA, 201 bp, Homo sapiens
catgtcagtgtgacaactgatcgggtgaacgatgcaccactaaccaccatggaaacaaggaaaaataaagccagctcacaggatctctcttcactggattkagagcctcagcctgccgactgagaaaaagagttccaggaaaaagaaggaatcccggctgcagcctcctgccttcctttatattttaaaatagagagataa

SEQ ID NO: 501198 - DNA, 201 bp, Homo sapiens
tgatcttctgttctgggtttttaggagacctagaacaagaagataacattatacaatcagttatgtctatgttgttttaggaagatgaaaagaaattctayaacaaaataggctatattaaagtctttacagattcctttgcaccccatgacatgacatcagtctcacttcggttccaagtgacatgaagtgactactgaa

SEQ ID NO: 501199 - DNA, 201 bp, Homo sapiens
tattaaggataatgaataaatgagtgtttttcccagagagacctacatttgggaccatataaatgctaaataacaaggtaaataaaagagaggttaaaaargcaaatcaggcaatcaaactccattggctctcaaacaatattgaataatgtactgttatgacatattgtaaattagaattccccagtatatggtgtgatg

SEQ ID NO: 501200 - DNA, 201 bp, Homo sapiens
tttttattttagaaatgaagtcactaaaggtcacgaggtctcctcctaactcccgggtctgcatacttacacaatagcctactgttaaagtgctggtaatwttacagacaggcatcacccaaatagagatctctagtttaattataacctgaagcaaattttccatcactatggaaaacaagatgattatacttcaatcta

SEQ ID NO: 501201 - DNA, 201 bp, Homo sapiens
ttacagcatatctatgcttcaaaaccatccctcctgagattgataaaagcatttacttatggcaatcaatatagaatagtcttttttttttgtatacatgyctatcatgtcctcccatgtataaggccctagagagtagtgcttgcaagatcagaaagcataaggcagcatacttgtgcctgttcataaaatcaactcaag

SEQ ID NO: 501202 - DNA, 201 bp, Homo sapiens
gtcttgaactcctgacctcaggtatatccgcctgacttcgcctcccaaagtgctgggattacaggcatgagccaccactcctggccctgaaaatgaaaaaytttaacctgcatatagtgcctttaatttccacacaggaactaaatgacaaagcttcactgacctagcatacatcaagaactttaactctgtctgtcactt

SEQ ID NO: 501203 - DNA, 201 bp, Homo sapiens
agattgagatggatagaggagcaaatggataatgaagcagtggagatgttgaaaactgctttcaccttcaaaaatactgtcaaagagcaggaattattaayagataaaactagaggaggaagtattattgagaacactttttgtaagttaggagagatgtaagcaggtttatatgtagggaaggaagccaaaggaaggaag

SEQ ID NO: 501204 - DNA, 201 bp, Homo sapiens
agtaataataaacattgtcataaaattgaagttacatcctctcttgagggcaagatactgtgctgacagtgctttttacttaacagccctaacaaccaacycaagcataagcatagcagccataaagaaacatctgctgaaccagaaatgtagagacaaatgaaatttgtgacaaaaagagaagatggcactggatgcaca

SEQ ID NO: 501205 - DNA, 201 bp, Homo sapiens
taatgccccttcaactttcaccacctcatgaaatctctctgagttatcacctgtaaagtgggtataactgcacatgctgacaggattattaggggaatcarataaggtcatatatgaaaattgaactgaatttgtacattgtagcacaatatgactgtgactactatcgctgttttcattgtttgttgctattgttatatg

SEQ ID NO: 501206 - DNA, 201 bp, Homo sapiens
tataatatataaaaatcaattgaaaactatatctcaagtaaaaaagatatacgaacaaaacatacatatctccattagtttcctcacaacagatttattcragatataatgagagtagacattggcttagaagaaatttatgattctttttaaacaatcacagatttaattatacccttctaaagtgggtattgttacact

SEQ ID NO: 501207 - DNA, 201 bp, Homo sapiens
tacaaatgtcacaaattttaagaaactaatctgtatatcttatacccccactacactgtgctattactagagatataatatataaaaatcaattgaaaacyatatctcaagtaaaaaagatatacgaacaaaacatacatatctccattagtttcctcacaacagatttattcgagatataatgagagtagacattggctt

SEQ ID NO: 501208 - DNA, 201 bp, Homo sapiens
aagttgaaattcctagttaaataatcattataaattatatctttcaagtaaaactacaactattgatttccatggtgtgtgtaaacaagacaatacaaacrtgttttataaactgactataccttttttcttaatttctctatatcttttaaacaatatttacatgctgttcattttgttttatttaattttccatattta

SEQ ID NO: 501209 - DNA, 201 bp, Homo sapiens
caaaaaaaaaaaaaaaataaggtgaaagaatatccctctcatgattatattgttacattacgtgagtctgtcttagcagtctgagtgtgagggccttgaaraagaaaaaaaccatgttataagcagcctacagaaagcatctcatggtaaagacctaaaggcagtctctaagtccccagactgtaaaaagccagggccctc

SEQ ID NO: 501210 - DNA, 201 bp, Homo sapiens
aaatcattctattataaagatacttgcgcacatatgttccatgcagcactattcacaacagcaaaaacatggcatcagcccaaatgcccatcaatgacagrctggataaagaaaatgtggtacatggaatactatgcagccataaaaaggaaaaacataatttcctttgcagggacatggatggagctggaagcagttatc

SEQ ID NO: 501211 - DNA, 201 bp, Homo sapiens
attaccaaggaatgtttctggaaacaacaaatgctttttaaaaaacttttcaaagatatttaatgagcagtttattccaaacaataaatcataattatctctcaaaaaattaaaatgaagcatagagatttatactatacattgtatattatttctttgggaagtatttttatttaaaacaaaagattagttgtttgattt

SEQ ID NO: 501212 - DNA, 201 bp, Homo sapiens
tttttctgtaccacaggataatcataagattgagtaccccaaagggaatcaaggtggctcttcaataatttaactctctgccctgaactgacacattaaawtatcatatactgtgaattcacaccctctgagaaaaaacattttcacaatacctgaattgtattgactctaaaagacaaaaaacgcaaaggcaagaagcag

SEQ ID NO: 501213 - DNA, 201 bp, Homo sapiens
aatgacactactacactgcagcctgggaggcaaagtgaccctgtccctaaaaaataattttaaaacaataataataataataaattaagcttaacttaccrcatatttttataacttttaaaatcttaaattttttgacttttgtaataacacagcttaaaacaagcacattatatagctgcagagaaatacttttcttta

SEQ ID NO: 501214 - DNA, 201 bp, Homo sapiens
actccatactcagcttcaaagtatgaggaaaaacacccaattacatttctaactaatgaagtgttaacacttaaaatgaaatttaaacacattaacacagraaatcagggggaaaagtctcacatcatacagtttactatttttaacctgtctcttcttaaaatgagatcatgaacatcacctgacaagggcacgggccca

SEQ ID NO: 501215 - DNA, 201 bp, Homo sapiens
ataactcctctacctattctttcttccctgcctcagatttcccaagcttctctcagttgtgttcagagttggccccagtttaagatatgatgctgccctakactatgtgacaacctcaactgaatctctaagtacctatcctttctaatatctcatttaatggtacccagaatattaagtcatattaggacaaagagccta

SEQ ID NO: 501216 - DNA, 201 bp, Homo sapiens
taaagggcctcctctgtttaagaggagagatccagatttaggtctataagcttgcccaacagtgtcaaatcctctgggtacagaagatatttccaaatcaracatttctgctggaaacagcagatgggaattttgttttattttatacatacccttttggcaaatatatctctgaaaaacttgccctgcagaaactaattg

SEQ ID NO: 501217 - DNA, 201 bp, Homo sapiens
taaaagcctttattcttagtggccttaatttcatctgatactaagtagctaaaacttggcatccactgaggaaaagtgttattcttccccataactcctcyacctattctttcttccctgcctcagatttcccaagcttctctcagttgtgttcagagttggccccagtttaagatatgatgctgccctagactatgtgac

SEQ ID NO: 501218 - DNA, 201 bp, Homo sapiens
caccttgcttttttagcaaactcctcatttcttggatctcagcttaaatggcatgtctaatacaaacctttcctgattccccaaaataaataaatcactaytatattctcaaaaggcactgtacactgctactttagtatgattaaacacactgaaaattacttggtcatactacaactatttacctcactagctaagctc

SEQ ID NO: 501219 - DNA, 201 bp, Homo sapiens
gtatcggaaagctcactggaagtagaagacaaagagaataagaatttgattggggggacggatgggtaattatgtcattagttaaaaaaagtagcacagaygagttccatttgacatatattgtgtttcaaatgggcaggaagatccaggtggagggctcaataaacagcaataaagcctgaggagagataagaagtgcag

SEQ ID NO: 501220 - DNA, 201 bp, Homo sapiens
gtgtaacattaaaatattttatatccattcatattaaatgtcataagatttaaaaaaacctaataatatttttaaacaaaatgaaagaatacatggattaygaccttatataatcacatgcatcccaaaacctttaacttccgagtggttctagaatttagaacccacaaaattctcatcccaattggcgggaaagattat

SEQ ID NO: 501221 - DNA, 201 bp, Homo sapiens
gcactttcaatcattaagaatacattttaacctaaattacatggttttctatgttctccaaatacaaatgtcacaaattttaagaaactaatctgtatatmttatacccccactacactgtgctattactagagatataatatataaaaatcaattgaaaactatatctcaagtaaaaaagatatacgaacaaaacataca

SEQ ID NO: 501222 - DNA, 201 bp, Homo sapiens
tctgcctccatcttcaacagcttctctctaacttttctgttttcctgctttgcttttaagggtttgtgtgattacattaaatattgccccctcccctagaracattcaggttccttatctaatttaaggtcagaattattaaacttaattctgtctccaaagtcccttcacataagtatctgggtgagtgtttgattacac

SEQ ID NO: 501223 - DNA, 201 bp, Homo sapiens
ctcctatcctaaattgaacaaatctcctgacaggtctattttcccatagctttaaaaatgggcttgctctctgttgtttgcatttgtattatgtgtactamcaatttatgcaaaaggtgaaaagaaaaaaaaatccataaaaatataaaagaaatagatagagatgcctatatctagtcacatgaatgtgatagggccatt

SEQ ID NO: 501224 - DNA, 201 bp, Homo sapiens
acatattcaaataaagataaaagctatctcaggacatggtaaggactgtaaaattcaacttaaatgcattctgttaaggataatttcatttttactttgtkccaataccctagcccacacctaggaatttggcttggtggtagtaggcagtataaagcagagcagccaccatgcgctaacaatctcagtacatctgctgtc

SEQ ID NO: 501225 - DNA, 201 bp, Homo sapiens
catctcattggaagcagggcaaaatctatttagaacgagagggtcatggcttctagaacagtggggaagacagaaaaagaaagcagagagaaggggacagyctctcacacaaaagaggaagaaaaacaaaaagaagagatggggagttccaaatataatggctgttacaagtgatttgagtctaaaatgtgaatctacttg

SEQ ID NO: 501226 - DNA, 201 bp, Homo sapiens
tcacataagaaacacctctggaaaatatgtactgatccttctgcaaggatatatgcaaatttattaaataaatcagcagttaatcatgagagagttagacragttcacctaacagccatgcagtttcttctaaataagaactagaaacaagtgtgcaaactaaaaagactgttctcaaagtgctcctatccagatttttta

SEQ ID NO: 501227 - DNA, 201 bp, Homo sapiens
tattagactttgtttcctgcaaaatgtaactatatctcaagaaataacaactgcattactccatcatctcaaaaaacctgtattagcatttctgcagattyatggttaataattgtacttctttatctctatctattccgttgccaacaagcatacacgtatacatttacactttcacacacagaccaatattggattttt

SEQ ID NO: 501228 - DNA, 201 bp, Homo sapiens
ctgatacaatgtaactgccacacagaattgtttgactcaagaaaacaaaatgcaacttgttatggcatttgtagttaagtaccaagggtctagccaaatgyatattgtgctgtaacttttatacataagtataaattgtatatatatattatataagtataaagtgtgtatatatattttatatatacacttttccaccaa

SEQ ID NO: 501229 - DNA, 201 bp, Homo sapiens
gacagagtaaaaatgacaaatttcttagcattctaataaaaatagttttgacctcaaataccccttgagattgttttggaaatacccaggggtttatagaytccacttagaaaactgcttccctatatcctctccatttcaaagctgaggaaattgaggttcagagataagcaacccacccaaagaccgttattaaacagg

SEQ ID NO: 501230 - DNA, 201 bp, Homo sapiens
aatgacctttactgaaatttcaatagttgcaggaaataatttcaatatatatctacacagattatattttgatttctacaaaggccaaggggttaatgacyttaaactgcaggtgcccaaggcattgagaacaaaaaagatagagcaagcgaaaagagaattgtgtctaggtcacaatgctgtagcattgaaaagaaagtg

SEQ ID NO: 501231 - DNA, 201 bp, Homo sapiens
ttagagatgtttacaacacagtcaatttttaaaggaagaacagaaactgcagtcaattattagatacatattcacacctgttgtctgtcatgtttcaaacyccttcggtgtgagatgtagtcaaggcaaataaaacgaagaagaaccagctgcaaaaactgattttgttctcatatggtaattaaaaggaaaaagtgtacc

SEQ ID NO: 501232 - DNA, 201 bp, Homo sapiens
cataaatatgtcactaaaataaaaacttttcaatagacaaacactgtaaggattacctggtttaagtttccaagtgtaaattcaatttgaaatgatatagytaaaaatctctgtggtcttaaggaatttttttaaacttctacaaagagaatgaacagttacagcttctactcactgatctgggtcttcagaaacacatca

SEQ ID NO: 501233 - DNA, 201 bp, Homo sapiens
tatttttcaaacatacaattcatgtttttatgtcattagactgtttactgtatcgctatatttatatgcctctgaaatatggagtgttaatggggtctaartttaattctatttttatcaaaactcagtcactcagaaataccaaacactgaacatgttctacaaaaagtattcaacatctgtagaatacatggaaccaca

SEQ ID NO: 501234 - DNA, 201 bp, Homo sapiens
acgaattaacaacaaaccattgttaattttcacaaactttcgataaaatttgaatttaatgctctcatacttaatgacaagacaaagataaaatgtgcacraattataaacacctccttggttcaatctatcatatttaccaaaatttggaaaacaaaaataacactctctaaaggcaagggttcttaatttaggtctagt

SEQ ID NO: 501235 - DNA, 201 bp, Homo sapiens
aacttctacaaagagaatgaacagttacagcttctactcactgatctgggtcttcagaaacacatcaatacacatagtacataagaaccagctgtaagagttttttttgtcaatacaaagcaaggtcactgcattatagaaagactcagcactctgtttatttcacttccataaagggattgttcaagggcagattctaaa

SEQ ID NO: 501236 - DNA, 201 bp, Homo sapiens
tattcatttttaacaatatgtccttgtttctctgcctctaatttcagtgaaagcaggctatgaatatgagtagaaccgtcctaatttagtgaaaaggggawaatgtgaaaacaaaaatagaagtaaaggttcaaaatatctacctagaaaatagtgtgctctggtaccataaatattactgatatatttctcatctttagt

SEQ ID NO: 501237 - DNA, 201 bp, Homo sapiens
cagaccatctttctcatatgtaaatctgaactaattccaggtctctgtcaatttgaataatgagttcaaatccacatcctgttcaacattagttaatttgytatccaaactatcgctatgagtaactactactttactttccctgaaatcacctctttctcttattttccttacacatatgtcacatataatattctttat

SEQ ID NO: 501238 - DNA, 201 bp, Homo sapiens
tgaggtgtttaatttgggcaccaaatttaaggaggcacatgcacacaaaaatccccttagtaatccaaacaaacaatattttaatgaaatatttttaaaawcaaaaagcagaaaatccatgatgaacaaaatattgaaattttaataaatgtctgtcagaaatcatataccaaatactacttggttcaagtggaaatgata

SEQ ID NO: 501239 - DNA, 201 bp, Homo sapiens
gcagtgagccgagatcgtgccactgcactccagcttgggcaacagagcaagactccatcttaaaaaaagaaaaaaaaaaaaaaacaacgaaacactagaayagctataattcaactggaataggtataatttatatatcaatcccaatttgaatagaatatttttgaagttaatatatataaaatatacaaatatatgtta

SEQ ID NO: 501240 - DNA, 201 bp, Homo sapiens
tattttaaaattgcaatagatgacacctaagaacagtggattcactctttaaccttagtaaagctcacatacatattttgtggattacagagatcagtaaygtgcccacttcagtctgagaaataccaacactccaggcccccggtgttgccactcagtgtgtgccagtgagtttggtgatttgatcagcacctacgaatg

SEQ ID NO: 501241 - DNA, 201 bp, Homo sapiens
aactgcctttcagaatgatactgaaaattaaatgataaagtatgtaatgttcttgccataattgcaataatagtagctttcactttcactatttcaccaakagtgaaaaccattcccaaagaaacaggaacctttccaatatctctgccccactctgaataggacattgtttttgttgtaacagaccatctttctcatatg

SEQ ID NO: 501242 - DNA, 201 bp, Homo sapiens
cagtagaatgtcttgtttcttttaatactttcagattttccttaacgaatactctcttgagaacataatgggaaaacaacatccagaatctttccacttcrtccctcactaagagacttaaaaaaaaaaaaaatcatgtgtaagacacagggatctttaggagacagtcattatggaaagacagtgcattagtatttacaa

SEQ ID NO: 501243 - DNA, 201 bp, Homo sapiens
aaccaaataccacatgttctcacttataagtgggggctaagtgatgaaaaatcaacagccactggtgcctcctggagggttaagagtgggaggagggggargatcagaaaaaacaactaatggctactagggttaatatgtgagtgatgaaataacatgcacaaaaccccgccccatgacccatgtttacctttgtaacaa

SEQ ID NO: 501244 - DNA, 201 bp, Homo sapiens
tgatgttctcctcattttgtgtcatggtttcctgtgtctttgcattaaaagtaatatttttactagcttccaaacatgattttcaccttttggggtgctamatattcttgtgtcctgaggaacatccttgagctttgtttgagaaaacagttaagttacttgggaacagcaaatcctatagaagttggcttttaaactttg

SEQ ID NO: 501245 - DNA, 201 bp, Homo sapiens
aaagccaacattcaagcaactctaagaggccttgaggaaataagatgaaacattcataaaaaacaaaaacaagagcactaaagagaaaaaaagaataaccytgataaccagccaatgttctaggaaattttctttggaacactgaaacaagatctagctgtaacataataaattgtaataaggtaaagaaggtagctgcct

SEQ ID NO: 501246 - DNA, 201 bp, Homo sapiens
tgggcaagcaaaggaatttgcttttataacaccaaaataacttggaatgcggcaaaaataaacgcaccttctgtctcatggaatgttattacagtacaacrctttgtgaatgcttgttggcattttcaagcattttttgttctcctcatttctttctcagctccataatgcaatcctcatggtttgagcactagacttcaa

SEQ ID NO: 501247 - DNA, 201 bp, Homo sapiens
tctttattcctttatatagtccaggtttctaactgataacatttttcttctgtctgaagaactttttttagcatatctttcagtacaggtctgccagtgaytaattttttcatctttacttcatctaaacaagtttttatttcatctttatttttgaaagatattttcactaggtataaaattccacattgatggccttgg

SEQ ID NO: 501248 - DNA, 201 bp, Homo sapiens
tttaggtatgtgtgaactcaggagtcataacctgcaatgaacccaactctgtaacacaacacagataccacagatggactgcaaaggccagtcctgaggtyagctagatctgacatggaaattttcaattttctgaaccaataaattcttttgttaacttcttttttgttagcccaagttacattagatttttgacccctg

SEQ ID NO: 501249 - DNA, 201 bp, Homo sapiens
tcctacccccaacccccaacctctgcgccaggctaaataagcgaggtaaacactcatgacacaaggctatgcagcattcacacttgaggtcaaaaattccmaaaataaatccataacaacaggtgttatcctaaaagcactgagatgttccccgtgaaagaccaacaattttggatttttaagaaaataaagtagaaatgc

SEQ ID NO: 501250 - DNA, 201 bp, Homo sapiens
caattacatcaacaagaagataaaagatgacttaccggcccaaaagaattactgtcaaaactgtgtccatgatgatcaccttcaacccagatgtgaccacrggggactttgacataccggtttttgtgtcctatggttctggaaataaacagtgtaaccactgagatatgagtagaaaagagatcaaactgctgggcatac

SEQ ID NO: 501251 - DNA, 201 bp, Homo sapiens
ccattattccctaactaaattttgtttcctctcaggtcagggggctgttgttgctgccgttgttgttgctgttgttgttgttgttttaaattcagtcctawacattcactgttttgaatcttcctcaaatatcttgtgattgatggttcacataaatcaataagaaattggtttaattaatataaaggtcttgcatgggac

SEQ ID NO: 501252 - DNA, 201 bp, Homo sapiens
tcaataaggaaagatggaagtagaatatattataggatatctccctgttttcttttaagcttcgactataaggattagttatttttacagcacccaagagraaacactagtcacaggaagcagttccatatgaaaccagatctatctaaaactgcctttgccagtcccaaaggacaatgttgaaaaggaatcccaagaaat

SEQ ID NO: 501253 - DNA, 201 bp, Homo sapiens
gatggattaaacacctaaatgtaagatctgaaactatgaaaatcctagaagaaaacttgggaaaaactcttccggacattggcctaggcaaatactttatraccaagttctcaaaagcaaaagcgacaaaactaaaaatagacaaataggatttaattaaactaaaaagcttctgcacaacaaaaggaacaatcaacagag

SEQ ID NO: 501254 - DNA, 201 bp, Homo sapiens
cactccagcctgagacagacagggaccttgtctcatttaaaaaaaaaaaaaaaaagtctgaaaacaacagatgttggcaaagatgcagcagaaaagggaaygcttgtaggaatttcagtacaacctttatggaaaacagaatggagattactcaaagaactaaaaatagaactactattccatccagcaatcccactactg

SEQ ID NO: 501255 - DNA, 201 bp, Homo sapiens
aaaagccacctgttgagtacaatactcaatatttgggtgatgggtacactgaaagcccagacttcaccactacacaacacatacatgtaaaaaacttgcayttgtatccccaaatatacaaacaaataatttctttgaaaagttttaacatacacatttacagtgcttctcaacaatttctgccctatggtatatagagaa

SEQ ID NO: 501256 - DNA, 201 bp, Homo sapiens
tttatctatcttttaaaaacaagtcaactcactcctcttaacaccatcaatgacttcacaggactcttgaaacaaaataaaactccttgccatactctagsaaggccctaaatgatctggctttcccttcgacatcgtctcattattctcatccatcattatgttttagctgtcacagcctcctttctgttttacaagcat

SEQ ID NO: 501257 - DNA, 201 bp, Homo sapiens
attttaccctgaaggttatggggatagactgaagaatataaagctggagagagagatatgaccagatttggcttttaaaaagatcatgttggaaacaatayaccagtagtctgttaggagatgacagtggaaatttaagtgagaaatgatgaggtcctcagccaaggtagtggtagtagggatgcaaaaacaagaattcaa

SEQ ID NO: 501258 - DNA, 201 bp, Homo sapiens
cttaacaccatcaatgacttcacaggactcttgaaacaaaataaaactccttgccatactctagcaaggccctaaatgatctggctttcccttcgacatcrtctcattattctcatccatcattatgttttagctgtcacagcctcctttctgttttacaagcatgccaagctcttccctattcccgggacgtcacatttg

SEQ ID NO: 501259 - DNA, 201 bp, Homo sapiens
tttgtaatctctttatctctgatgatcctttatgcaatccagaaaacttaatcttctcccacattttcaactgcctgtgttttactgccaactctgatcartttggcaaaaagatgagagcagcaatcactggaaaaaatgtagggggaaaaatgagccaaatcaactgattttgtttcaatagactatttaatctgccca

SEQ ID NO: 501260 - DNA, 201 bp, Homo sapiens
ttcccttcgacatcgtctcattattctcatccatcattatgttttagctgtcacagcctcctttctgttttacaagcatgccaagctcttccctattcccrggacgtcacatttgttgttccctctgcatgaagtccttttttcccagttcctgcatggctcattcacatccttcaggtctcagctcacataacatctcct

SEQ ID NO: 501261 - DNA, 201 bp, Homo sapiens
catactcaaagcacttagcacaatgcttacttacaggcatgctcattcaatgagaattccctcacaccaaccttctactatagaactgaacactggctcartacagtgaaatctgtgatccagattaagaggaaaggaagagaaaggaagccccccatcgtccttcctttctagctctctataaactgtggccatttctcc

SEQ ID NO: 501262 - DNA, 201 bp, Homo sapiens
tttaacatgtttttaattcagtatttaaaatttgtatatttaaagataaactttacctattttctgtattatttgtaaaagattatacgtgtcaggaagcrcatacatttgcacacacacacacactgtaactatgcttattcattcattgttgggtttaataagtattaattgaatgggtgaaaagatggattctgacaa

SEQ ID NO: 501263 - DNA, 201 bp, Homo sapiens
agactgctcccttactccccattcccagttcagaaataaagagggaacttttgtaatgataaaagagccaatcaatcaggaagttatagaaatgataaacrtatatgcagccaataatgatgcacttaaatatttgaaataaaaactgacagaaatgaagggagaaacagatgattcaacaataatagttggaaatttaaa

SEQ ID NO: 501264 - DNA, 201 bp, Homo sapiens
aatattatttaggatgttcaaatatttaactattcttacccacttttaacatgtttttaattcagtatttaaaatttgtatatttaaagataaactttacytattttctgtattatttgtaaaagattatacgtgtcaggaagcgcatacatttgcacacacacacacactgtaactatgcttattcattcattgttgggt

SEQ ID NO: 501265 - DNA, 201 bp, Homo sapiens
cagtaaggctggcaaggaggactctgtccagactggtacctgaatgccaggctaacaaatctggactgtatttatcagctaatagagaagcatggaggttwctaagtagtgagtgacatgagatttgctttgggaaaattattctggcaggtatgtgtaagaagaaaaatggactaccagcagggagagcacttagaaata

SEQ ID NO: 501266 - DNA, 201 bp, Homo sapiens
tacgcgtaatggagaaaaataaagtcagaaagaggcatagggagggaatccagtgttggaggcaaggggtgaaatcagggctggcttcacgggtgtgcaayctggggagtcactgagggaaccacatccagaagggcttcgtatttggtttaatactcaccatcaccatctagagcttaataatttttttaacaagctatt

SEQ ID NO: 501267 - DNA, 201 bp, Homo sapiens
agtgcttaacttaccattgggagaaacctcaacaatggataaaattagatttagtgaagaatttccaggacatttgactaaaagagaaaaggaattatcgyatatattaaaataattcatatcattagtacacaccacacttttccatttcagaggcaaatgtttgataaagttcaattagaatcattttttcacttagtt

SEQ ID NO: 501268 - DNA, 201 bp, Homo sapiens
atcacttggaggttcgataataaaaatgtggcatatcaacaaaaattaactctaaatggattttatacccaaatataaaacctaccactataaaactttcrgaacacatagaagaaaattttcatgaattctgagtaggaaaggatttattagaaagaatgttaaaaaaaaaaaagcactaaaaatgaaagaaacaaattg

SEQ ID NO: 501269 - DNA, 201 bp, Homo sapiens
tcttgcactgaaatcagttttgttttgttgttgttgttgttaataaaaggtcaagctagtctttctggggtacttgtggtagcaataatgcaagggaggcwatagagaccctcgcaagtgggaggccatgtgttggtgatggatgcttcccttcttggggaacagaggggaccttcatcttagaggttctatgtttcccac

SEQ ID NO: 501270 - DNA, 201 bp, Homo sapiens
aattacctgaactacgcttcagtaatttcctctccctacggttgcactgtgactatagactatttttaatggtacaatcaatcttttttttcttttgctcytacgtccttctgggacactctaaaacttacatgtaaaaacactatttgtgttctgcatattcaaatatgcagagagtagtaagtgaaagtacactctatt

SEQ ID NO: 501271 - DNA, 201 bp, Homo sapiens
gcactcattcaagtaaataaaagaaatggaatcaatttttattacagaaagcaacatctttttaaattattgaaattatccccacactgctcttaaacccrtcaagatttcttttggcatgctgttagtttcttttgcaggggaagaaaggattaagtagttgtatacagttgtagtgtaatgtgggggtagataatgctg

SEQ ID NO: 501272 - DNA, 201 bp, Homo sapiens
aataaaatgaatcttgtagtgtttatgtactcattcaatgaatattgattcaattcctaccatgtggtcaaatgcagtgccagatgctaggattgtagacwaaaccaggatgggaaattttcattaatagaagcgttgaattttgatgtaggatggcaacagtgtgaaaagaaaggaagaatcagagagactttgactttg

SEQ ID NO: 501273 - DNA, 201 bp, Homo sapiens
cattctacactcaattaagccaggctaaggatcatcttataaatgctgactttgttgtatttttctcatatcaaacaattcagttcaatctcctcttactraatgcttactatacgctaggcattgtgctgaggaccaggaatacaaagatgcagacatcctgttcactgccaaattttgacaagggaccaaatatatatc

SEQ ID NO: 501274 - DNA, 201 bp, Homo sapiens
aatgctcaactgctatttctttaaggttctgcattttggctttaggtcttcaaccttgtagcattacacaaatgtagtaaaatatatcatcaaaatgctcrtgatggtaaaatattaaatcaaaatccataaagtagttcctatcttacaggacaaggtagccagctcttaagcctgtccacttctggagaaggtcaagag

SEQ ID NO: 501275 - DNA, 201 bp, Homo sapiens
gatattaacttggattttgaattttggaaattcttgttagaattttttaagtgaacagatacacatctgcttaccgcttagtataaatctaattataatcmaactcataaaataatgttagaaaaactaatatacaaaagcaaattttcaaggtactgtaatatatttgccataagagccttttgctggtaattggaagat

SEQ ID NO: 501276 - DNA, 201 bp, Homo sapiens
taacttggattttgaattttggaaattcttgttagaattttttaagtgaacagatacacatctgcttaccgcttagtataaatctaattataatcaaactyataaaataatgttagaaaaactaatatacaaaagcaaattttcaaggtactgtaatatatttgccataagagccttttgctggtaattggaagattcagc

SEQ ID NO: 501277 - DNA, 201 bp, Homo sapiens
tagacttggaattaagttacatatcctggatcaggattgggagtttgggactgaagtctcaattgtctcacagaagatggaggctggggtaaatgaagacrgagaagaagggaaaacttgtttcaaaatcatgaacattaactcataatgagaactcataatgagatcttattgtttgcaaagttactaagaacaggacac

SEQ ID NO: 501278 - DNA, 201 bp, Homo sapiens
gatacacatctgcttaccgcttagtataaatctaattataatcaaactcataaaataatgttagaaaaactaatatacaaaagcaaattttcaaggtactrtaatatatttgccataagagccttttgctggtaattggaagattcagctttacttcactgtttaatcacccacaaaactgtttattgccctatatattcc

SEQ ID NO: 501279 - DNA, 201 bp, Homo sapiens
taaacctctgagagctagcaacaggtcattctactgcttgatcattgcgctctttgattttctgctaaatgatgatcaattcaactaccacagtaatgggrgagacaatgtaaaatttctctttatagcaacataattatagctaattgtgaagtgaaataagaaataaattttaactctggcaacaataacaacaaaaac

SEQ ID NO: 501280 - DNA, 201 bp, Homo sapiens
tttacaagtgatgatatttagtaggcagtggaatgtagcatatatattttgaagcccagatggaagatataggatggaaatagtgtttgtgcctcagctgyttaaaatgttattttgaacccatggctagagtatactgcagagtctgaatagtcaggaaagaagtaggccaagcaccgaaccctgagaatgactgattct

SEQ ID NO: 501281 - DNA, 201 bp, Homo sapiens
cggtagcttggactacagccatgtgccaccatgcccagctacattttattttactattttatttttttattttacagacaaggtctcactatgttgcccasgctggtcttgaacttctggctcaagcgatcctcctgcctcagcctcccaaagtaccaggattacagatgtgagccaccatgcctggctgtttctcacttt

SEQ ID NO: 501282 - DNA, 201 bp, Homo sapiens
gtaattttaaatacggtgggcgagggaggcctgtatgtgatgtcttttatttggatcaccagatacgctctccacatttctcttgaactctttgtcccagraggttatgtggattgtagtagtgggctcctttgccctctggcttctgatttggtacacataatgaggatccccagttgaagttcaaaggtcactgctttt

SEQ ID NO: 501283 - DNA, 201 bp, Homo sapiens
agggtcttgctctgttaccgaggctgaagtatggcacaatcacggctcactgcagtctcgacctcccagattcaaccaatcctcctttctcagcctcctcrgtagcttggactacagccatgtgccaccatgcccagctacattttattttactattttatttttttattttacagacaaggtctcactatgttgcccacg

SEQ ID NO: 501284 - DNA, 201 bp, Homo sapiens
ctaagaggtagttccccaggtaatgaattttgccaacataataaaagattatatgaaacgtcttgaaattaatccaaaggatgaagcaggtcaaaatattycatctcataagttttaacttttatgtcagtgcagtcatttttttaaataatttcaacttttattttagattcaggtggtacatataaatgcttcttacat

SEQ ID NO: 501285 - DNA, 201 bp, Homo sapiens
ggagtgagaaaatacaaaaagttcattgatatggcatcagattccacactgtaaatagtctataggaaagtactacttattgagttttggtataatatcartataatatcaaagaagaatgtcacaattatccatcaaaagtgctataaaatactcatcccttttccagtcaaaatggtgagatagagccaaaaaaaaaaa

SEQ ID NO: 501286 - DNA, 201 bp, Homo sapiens
caccttttcatcactttaaaaaaatattgatcataatttttttctgtttttggagagagggtcttactctgtcacccaggctggaatgcagtggttagacmatagctcactgcagccatgatctcccaggctcacattatccttcctcccatctcagcctctgtagtagctagactacaggcatgcaacaccatgcccagc

SEQ ID NO: 501287 - DNA, 201 bp, Homo sapiens
tagccacttttttccaccaaacactttttacttaaagggacaactgacagataagctattattatttagacttggatttttggcagacattttcacaaaartggacaaagttaatctgtcacttcaaggaaaacaactgacagtattcattaccaatgataacattaaagctttcaagcaaaaagtagaagtttgaaaaac

SEQ ID NO: 501288 - DNA, 201 bp, Homo sapiens
ctctcctgccaccacataagacatccactttgccttccaccatgattgtaagtttcctgaggcatttccagccatgtagaactgtaagtcaattgaacctyttttctttataaattacccagtctcaggtagttctttatagcagtgtaaaaacagactaatacagcccaggtatatatatatatatatatttttaaacag

SEQ ID NO: 501289 - DNA, 201 bp, Homo sapiens
ccctgcaaatctcacaggactggtgtgatggccaaaagagatgatgcatgaggaagtgctttgtgaactgaaatgcatttcagaaccacaagtgagaatgycattattctgaccctttcagaactaaagagtatactggtaaaatgaatatactaaaattctttgaaacaaatagattaaggaaaattaacttaatggcct

SEQ ID NO: 501290 - DNA, 201 bp, Homo sapiens
tcactctttccctatatatgaattgtttagcttagcatttatggtcttagtaaacaaatagcaaaatataaacaagtgtcccaagtatctgctctgttctraagttttcttatgcaagacatcaccagacctggtaaaccaaggttttacaagtcttaccaatttctgtgcacttccttttaaacttttcaattcttataa

SEQ ID NO: 501291 - DNA, 201 bp, Homo sapiens
tgaagatattctagcctatttgaatatagctacttttatattacaagatcaaatttactacacataacaggcaaaacatggaaggcacccatttagtctamtttcaaaaaagatatacattctctccttcctgaattttgtcttatttctttcaataataaaagaaaggttagatacaaaaagtatcagatcacccacaaa

SEQ ID NO: 501292 - DNA, 201 bp, Homo sapiens
tctgctcactacaacctccgcctcctgggttcaagtgattctcctgcctcggcctccctagtagctggaattacaggcacctgccaccaaatctgtttttkttttttttttttttttttaatgtagtagagacagggtttcaacacgttggccaggctggtctcaaacttctgacctcaggtgatccacctgcctcagcct

SEQ ID NO: 501293 - DNA, 201 bp, Homo sapiens
cctgtgccccactaaagcatatttatagttatttattgatcatatttgtgtttatatttaagagtagttgtaagaaaactgttttcctcagatgctaatcrgcaagaggctatcgaagtgatgagagacacagtagaattgttctgtttcttccaggagataagaagtacattatttttatggagtttggttcaatgacag

SEQ ID NO: 501294 - DNA, 201 bp, Homo sapiens
gaaagacactttgagtttaaagcatgccgcaattcaatgggaggagtaggaaataggctggaatccgaattgaaccaggtcaaaacattgttgaatatcaracccaatctatttaatctgtaagaaacaaggaccctgagaaagattctgaccaagggtatgtgatcggaaacttgacagataaatgtagtatacttgtaa

SEQ ID NO: 501295 - DNA, 201 bp, Homo sapiens
cagaaagcccctagtaaggtaacacccagcagatccatggggtcaggctcagggtcactgcagagtccccattggggcaatgctcaggggagctatagggytggggatgccgaaaagaacttccactagggcaaatatccagtaaagctgtgtgggcaggactacttccaagaccctggaccagcagagccaccagcatgt

SEQ ID NO: 501296 - DNA, 201 bp, Homo sapiens
caaaaatgcaactacaacgaaacaactgtgctaaaacttttaagccacttaacctgttgtttagaaacagagttagcaacttggccatccaaattgagttyttaggtgagaaaggacaggcagaattaaatcagtcatttcacttgcaggttaatctgtccaggagggcaattaggcaagtgctcaatgcagttaatagtc

SEQ ID NO: 501297 - DNA, 201 bp, Homo sapiens
ttgctgacccacagcaaccatgagataacaaacaatcattgttgttttcagccactaaggttttcatgttacaaaacaacagagaacccaattttacatakgaggctcagagaggttaatttaccaattatcatataggaatgagtagagaaaacagatctggaacccagtctttaggctttaggttcaatttgtcattaa

SEQ ID NO: 501298 - DNA, 201 bp, Homo sapiens
gatttcactgaaaataatcttttactaaagaaaataagtttcaaacttcgccgattatttacaatttgttatttatttatttttggtatagattatagctrtggggaaaaatagctctttctaggaggaattactattcagagcagtctgaaccagtgtgaaaactgctagaagcaggaaatcaaaatattgtttattctc

SEQ ID NO: 501299 - DNA, 201 bp, Homo sapiens
cagtcacacttcttcacctaagttcagacctttacatttcatgcactgtcttgtccctgtcaaaatccttttgatgtgtttcatggcagttgatgttcctraagttatttttatacatacaatacagcaaacgttcctattgagcagatctgcatcttcacaggaaggtatcgaagactgtactgtgttcttatttgggca

SEQ ID NO: 501300 - DNA, 201 bp, Homo sapiens
tttaaccaaattacaaaaatattttaaggataattcagaagatatgaaacttgtcaatctgtttaccaaatatgtgtctattataatatccaaatgcctawagcagattcagaaaatatgggaaaacatattaattccaatcaacactattatattacaagtataaattatgtccacatgacctgcatggtttatttataa

SEQ ID NO: 501301 - DNA, 201 bp, Homo sapiens
ttcccagtttgtagactgtctttttacttctgtctaatctgcctgtttaaactgtccattgagttttaatttcaaactgctatatttttcatttctaaaartcagcttttttctttttcaaatttactttattttcatagttacctctttttactgtagggtgtataccttctccttaataattgtaaaggcactttttaa

SEQ ID NO: 501302 - DNA, 201 bp, Homo sapiens
agagtcaaagatcattctcaagcctcaagatttaatgttctttgccttggtgagatttgtacttacttgccacctgtttccatttcttccttcctatttcycccttttgaaatgggaacatctattctatgcctgtcctaccgttgcattttggaagcaaaaacttgtttgatttcacagattcacaggtggaaagcaatt

SEQ ID NO: 501303 - DNA, 201 bp, Homo sapiens
atgattttgaattacaattgttaaagataaatggtaaacataatttttatgtaggtttcttcacaaaatcaaagagagtttcaaggcaaaacagtcaatamtaactagttatgcaggttacctggaaaacctatagttcattggactatgtactttaatatgtgatagccaaagaaatgacagtttatataggacatgata

SEQ ID NO: 501304 - DNA, 201 bp, Homo sapiens
actcttgatgctttatacacctagggatcatgttaaattgtcaagggttcagtctgaagagtgaggtgtgttagcccctgtgtaaatgaaatgctcactgycctgtggaaatttgggctgatgatgaaggtttcactttatttggcactgctgtcctcgtgcatgttctgtgccctctcccggtgctaagaaactgtcacc

SEQ ID NO: 501305 - DNA, 201 bp, Homo sapiens
ggtaaacaatgacacctaagcaaaaacaaggttttctctgattctactagtccttcaggctttagttaaaaaataaatctagcattaccaacatgctaaaygtatattacagagcttcttcctctattatcaaatatacttttagatttgtccgaagggaaaactatttttattttgcataaaatatatgtatatataaaa

SEQ ID NO: 501306 - DNA, 201 bp, Homo sapiens
ctctgctgggggtattatgttacatatggcatagacatagtttaaatatgctgtttatagatactgatatcacctttccaacagctaaaaagtctgaattstgtactataagtttcctagtttcagatgtgatattaacatctttaaatataagaaaaggtgaatatttaccaaagagaataaatgtaatcagagacatag

SEQ ID NO: 501307 - DNA, 201 bp, Homo sapiens
ctggcagtttaaggaagtaatttgttttgtcctgggaggagttaatttcttgtacttgctagtgagtgggtagctagtacaggtaaactgttaattggcayttgcacacaatggaaggggacccagagagtggccacttgaaaaacttggtattactgacactctccaaagtagtgtcattactcatattagcttattatt

SEQ ID NO: 501308 - DNA, 201 bp, Homo sapiens; identical to SEQ ID NO: 20726

SEQ ID NO: 501309 - DNA, 201 bp, Homo sapiens
gatacaggatgttcttagatggatggggatggagaaggatctgccacattcaggataaaacatgaacacaagaagataagcatgaaagtattttttaaatytggaatagtatagctcaagcacatagagtgtgtgtgtgtgcgcgcgcacgtgtgtgtgtgcgcgtgtgtgtgtaaaacagagagagacagagagagaatg

SEQ ID NO: 501310 - DNA, 201 bp, Homo sapiens
aaagctcaggaaaacgcctggcctaaagaagcttctcagtaagtgttggctgaatgaaggaatgaataaatatcacctccaaggctgcagagttcagaaaytgagcttggcatacatactgttctttgaggtggtgtccctttgagactatttttattagttagcaatttgtatgtgtgcagaataatgtattttaaaaaa

SEQ ID NO: 501311 - DNA, 201 bp, Homo sapiens
tagctcaagcacatagagtgtgtgtgtgtgcgcgcgcacgtgtgtgtgtgcgcgtgtgtgtgtaaaacagagagagacagagagagaatgagaatgtaggyagggtcctgaggattaaagagtatacactgaaaaatctccctcattctcctgaccctccagttccttctctaaaggcgaagttactcatttactactaac

SEQ ID NO: 501312 - DNA, 201 bp, Homo sapiens
caccacatctgcagttacttcttcccctgaagtcttaaaaccctcaaaggatcaacttcttccaaactgctgttcatgttggtattttgacctcctcccakgaatcatgaatcacaaatcccatgaatcagttcttaatggcatctagaatggtgaatccttttcaggaaattttcaacttaatttgactagatccatcag

SEQ ID NO: 501313 - DNA, 201 bp, Homo sapiens
taaaatcaatcactttgagtccttctatgctttaattaaatgtatcctcttagcaaatttgtttttaatccagtgaatgaatgacaaagtaatttttcttycttttttttttttttttttttttttttgagacagggtctctcactctgtcacccaggctggagtgcagtggcatgatctctgctcactacaacctccgcc

SEQ ID NO: 501314 - DNA, 201 bp, Homo sapiens
gagacgtggtccagccattctaggttggcactcaggagacacttacctccaaaacactattatatatgttgattagagtctacagtaccactaatatatartaagcacacaatgagtttaaaaagctttccttagtacctttaggaaagtaagtactagatttcctggggttctgatctggaaatctaaatgctatttatt

SEQ ID NO: 501315 - DNA, 201 bp, Homo sapiens
atataataagcacacaatgagtttaaaaagctttccttagtacctttaggaaagtaagtactagatttcctggggttctgatctggaaatctaaatgctayttattcctataagtacattgttaactttacaaacaacagacttgaaaatgaacttgtggaatacaatgggttcttaagtaaggcttttctttaagaatat

SEQ ID NO: 501316 - DNA, 201 bp, Homo sapiens
cgtgggtctcctcggagctgttctgttgctcaataaagttcctctttgccttgttcatgtgacagtcctacaaatgtaccccctgtatctaagataaaagstgatttaaaaaaataagacccaagtcacatgaatagtgaagagctataagtattcatacatttctaatgtaaaatatatgatggttaactttggtaaact

SEQ ID NO: 501317 - DNA, 201 bp, Homo sapiens
ctctccacagagctggcaggagctggaagcagccagaagccccgcccttccaggcacagctgcagccacccaagtggcggctccaaacccaggcatttctrcactcttggaggccaggaaaggccccctgtctctgcaggctcagaggtgcctgctgtcactgcctcgcctctccttgctccctgcacttgctccgatctt

SEQ ID NO: 501318 - DNA, 201 bp, Homo sapiens
cttttttaaagaagatcacacatccaacataattatgtggctatctttattcatcagcttaaagttttcaagctgggtttatttcacgtgtaaacttacarttgcaaaaactaacaaaattcctcaaaactactcttgctatttctaggtagaagtcttttcaactaggcagataggtgcctcattattcttagaaaactc

SEQ ID NO: 501319 - DNA, 201 bp, Homo sapiens
ttagaattccaaaatcaaagcaagcccttaattaatagaccctttaaattattttattttgtggctgaattaccacactgatacttactcatttaattatkccctggcccagagaactgacatttttactggcaggttatgaaatgtttgttaaagctatgaagtctaattataaaagccttctttcagaggttcacaaag

SEQ ID NO: 501320 - DNA, 201 bp, Homo sapiens
gcaaaatgttcattttgaccatatccaatatgttgctattttaacaacattctctcaggtgcataatcattcaaaaaagaacaacaaagtgaaaatttcawtgatacaattattttatttactatttgtaataggccaagaaaagggaacggtgaaagcaagaagatttttacccataacatacagagcttactgttgatt

SEQ ID NO: 501321 - DNA, 201 bp, Homo sapiens
aacaatccaattatactctttcagttattttaaatgtacagttgaattattattaactacagtcactctattgtgctatcaacaagtagatcttattcatkctttcttaagatttttaaagtgagaatatatacttagaagcttattttcatctcccaagcaagagaacaataaaaccaaacagaacaaaactaataacaa

SEQ ID NO: 501322 - DNA, 201 bp, Homo sapiens
cttgttctgcttctatcaccatcaaacattaggtaaaataattcttctttgccttcaccttgtccattttctggaggaagggacataggtttgatacaacraatcaaaaaaacaaaaaagatcctcggggtatttatgcagtataataaagagcaaagcaatgtaattccaaaaagatagctctcaaatatttgaaaaaaa

SEQ ID NO: 501323 - DNA, 201 bp, Homo sapiens
aaggtatagagttatttttattgtacatatgaaatgtgagtttacaaaattacagggaaaagtacagcatattaaaatttctttctattcttacttttctrtatcctttctgccacacaaaactaaccaaaggtgatataacatatttaggtattaataaagcaggattcatgatattgtcttttcttagaataaagcata

SEQ ID NO: 501324 - DNA, 201 bp, Homo sapiens
attagtagtaggcactttttttccataaatgaatacacctttacacagaggaaaagactgcaaacgtataaataaaatcaaagtaagtattaatgttgtcraggacaactgcaaacatacagtgtgtgttgcaaagcagtgtaagagaatgggagtaaggtggtggtgttctaatagtctgtgggcagcaagaaaattagg

SEQ ID NO: 501325 - DNA, 201 bp, Homo sapiens
ttttttaaaaaaaaaaagttttaatacctttttgtctccccagtacagtataaattagtctacttagttctgggaatagaattagtagtaggcactttttytccataaatgaatacacctttacacagaggaaaagactgcaaacgtataaataaaatcaaagtaagtattaatgttgtcgaggacaactgcaaacataca

SEQ ID NO: 501326 - DNA, 201 bp, Homo sapiens
tgaaaacacatgattttgaattacaattgttaaagataaatggtaaacataatttttatgtaggtttcttcacaaaatcaaagagagtttcaaggcaaaayagtcaataataactagttatgcaggttacctggaaaacctatagttcattggactatgtactttaatatgtgatagccaaagaaatgacagtttatatag

SEQ ID NO: 501327 - DNA, 201 bp, Homo sapiens
acatttgcatacacacacacacgcatatatctgagtacacacacacacacaaacacatttatacaggcatagaaataagacaaacacaaacatacacaaaygcacaaaaaatcatgatgttaggccaaaatggtttgttctggtgggacttgaaatttgtactttatacacatatgtattcattggtattgttctgtaaac

SEQ ID NO: 501328 - DNA, 201 bp, Homo sapiens
ttctaaagtttgtcatttcacgctttacttccaggaggtgaagcattccacagataatcagctactctattcagggaaggagtgtaaacatcaccactttytgcatgtttgcataaaaaaggcccactgaatcagttaaaggttagtatcaataggcaacattctctatttccaaaggcctgaagctcctgggatctaatt

SEQ ID NO: 501329 - DNA, 201 bp, Homo sapiens
cccagttgtgccagttgttaggtacatttgtaagaacttgggaagttatttaatttctcttggtctcattttctgcatttataaaatggaaataataacayctagtttgcactgtcgtcacaataatagggacaatataagttatccagctcatttatggaaatagaaagtatccataagtagtagttattatattttata

SEQ ID NO: 501330 - DNA, 201 bp, Homo sapiens
ctgagattttatctttcttccaagtgaacaatttagactgccacaggatggatgggtggatggaaggatggatggatggatggatggatggatggatggayggatggatgtatacacatatatagccataaacatccatattaaaattatgaatattgcttgattcacacacatacatatacatacacacaagaaacatga

SEQ ID NO: 501331 - DNA, 201 bp, Homo sapiens
cataatacagtgaagcacaataaaatgacataagcctacaataaaattgtgctgaaatgactgtactttctaattacttttcatgcattcacacgtatatrttgacaaagcctatttttaaaattcattttggctgtttatggaatatgtgtttcattttataaattgagaaaaaatttgacagactgtatattaggtttc

SEQ ID NO: 501332 - DNA, 201 bp, Homo sapiens
cctgggcctcttactgcaaggttgtcgcatcagaaaaccaattttcttctcactggtttagttatttctaagtctccgtaatgagattttgaaaacattaytattgggttaataaatgtttcttgcttaaaggaacaaagtttaataatataggaaccaaaacgtttgtgtggttaggtcagcaatgaccaatacaaagta

SEQ ID NO: 501333 - DNA, 201 bp, Homo sapiens
tgtgtggcccaagaccattcttctttatccagtgtggcctagggaaaccaaaagattggacacttctgctatgaagagaagtgctgtcatccagactctgytgttccctttacagagaacaagtagaacagatttagcatcattcttaagggccctaggatttttggaatgggcaacgagcattggcttcaacttaaagtc

SEQ ID NO: 501334 - DNA, 201 bp, Homo sapiens
ttggccccaggattacgtccttcttgcctgtaattctatctttatatttgtttttctgtgtctcccaaggtctcaagttgacatgatagtgtctctaggartggtcactcagtgggtttcttcatgttattagcattggctgggcacagtggctcacgcctgtattcccagcactttgggaggccaaggcaggaggattgc

SEQ ID NO: 501335 - DNA, 201 bp, Homo sapiens
aactacatcaagggctaagggtatcacagaggcgatgcgatgatggagagcgggtgggagttgaagtgcgctgccttcccacgcggtgtaagctctggcasagtgctgcttccctgggcctaggtttctgcatttacaaaatgagagcgaggaggtgggatgaagtaagtagttttgagatgctcttcagctctatttcac

SEQ ID NO: 501336 - DNA, 201 bp, Homo sapiens
aacccctcaatctgagatgggagggtgagttgcttatcatttttcctctgcagccaagaatgcatctaataagccacctattttggttttaggaagtgttraggaaggtccttggccccaggattacgtccttcttgcctgtaattctatctttatatttgtttttctgtgtctcccaaggtctcaagttgacatgatagt

SEQ ID NO: 501337 - DNA, 201 bp, Homo sapiens
cccacaattcagttaatcaatgaatataaaacatactgtttttagatttgctggctttaaagtggagaaaagctgtagagttgaggattgcttatgatttyttcctgtgttgagattctccccagctgctactttaagtgtctgttgtgtcctttcaggaatgattttgaaatgagtaagacctgaattttggatttcatg

SEQ ID NO: 501338 - DNA, 201 bp, Homo sapiens
ccagtaataggccttggcagagggtcagtagaatcgcggaggtttctcgggttggggtcttgaggctacctcagtcttctcgtacagtccaaagaggcttygctttcaaaacgtcctgtagacacctggaccgcgagggcgcggttccctgcttctctaggggcccagacacggcgacggatcttgacgctttttcctccc

SEQ ID NO: 501339 - DNA, 201 bp, Homo sapiens
aggtagcttgtgactagggctggaattgggttttggaggtggggtggaatggaagggtagctttttttttcttctttttactcatcaaaagatggctggartaagaagggtagtttctactgggctcttttttgatgcccctattagaactctccagttgtttcagcacaggccgtcttttacttcattatgtaatatttc

SEQ ID NO: 501340 - DNA, 201 bp, Homo sapiens
gtagctttttttttcttctttttactcatcaaaagatggctggagtaagaagggtagtttctactgggctcttttttgatgcccctattagaactctccarttgtttcagcacaggccgtcttttacttcattatgtaatatttctggaggccgtgaggtaagaggcctcattctggaggccatgaggctttcaacagcac

SEQ ID NO: 501341 - DNA, 201 bp, Homo sapiens
ttaggtttgcaacaaaattgagagggagttataaagatttcccatatacccactgtcccccacaacatgcatagcctcccccataatttttttttttttttaactgcaagaggaattaactaaatgtacctagtcctaaagagacccatgaaatcaggctgactgggtcaaaattctgtttcttccacttactggctgtga

SEQ ID NO: 501342 - DNA, 201 bp, Homo sapiens
agttctttgccccatagacctttcttttttctttttcttttttcttttctttttttttttttttctgagacagagtttcactcttcttgcccaggatgaartgcaatggtatgatctcggctcaccacagcctcgcctcctgggttcaagcgattctcctgcctcagcctcccaagtagctgggattacaggcatgcacca

SEQ ID NO: 501343 - DNA, 201 bp, Homo sapiens
taagttctttgccccatagacctttcttttttctttttcttttttcttttctttttttttttttttctgagacagagtttcactcttcttgcccaggatgraatgcaatggtatgatctcggctcaccacagcctcgcctcctgggttcaagcgattctcctgcctcagcctcccaagtagctgggattacaggcatgcac

SEQ ID NO: 501344 - DNA, 201 bp, Homo sapiens
ttgtgtctgatgagttttttaacattcaggtgtagattgtttcagcttctcatgtttcattttcctgaagatttatgtttttgtctaccttgtgagcaggyttttggaagaacctgtttgatgcaaaaaagaaaatgaaaaacaaaacaaaaaatccccaaaaccttattatgggagcccgtcggtcttagaagctgtttg

SEQ ID NO: 501345 - DNA, 201 bp, Homo sapiens
ttgttgcctttgtttaggattctcatgatctgaaggaaatggctctgaaactacttttttctcctagactctctgggccttatttttttttttgtaatttwaaaaaaaattttttttttttttggtcatacagatatttctcaacttctgatggggttacctactgataaacctatcatcaagttaaaaatatcataagtc

SEQ ID NO: 501346 - DNA, 201 bp, Homo sapiens
ttgtctaccttgtgagcaggcttttggaagaacctgtttgatgcaaaaaagaaaatgaaaaacaaaacaaaaaatccccaaaaccttattatgggagcccktcggtcttagaagctgtttgacatgtataataaatggcattgactgggcctgttttacatttggtgagaacattccataatcttccctgtgaatatttgt

SEQ ID NO: 501347 - DNA, 201 bp, Homo sapiens
cctcagagcatgtaacaggaaattaaatgggatgagtgtttggtgtggtttgtgtctgatgagttttttaacattcaggtgtagattgtttcagcttctcwtgtttcattttcctgaagatttatgtttttgtctaccttgtgagcaggcttttggaagaacctgtttgatgcaaaaaagaaaatgaaaaacaaaacaaaa

SEQ ID NO: 501348 - DNA, 201 bp, Homo sapiens
aattaaatgggatgagtgtttggtgtggtttgtgtctgatgagttttttaacattcaggtgtagattgtttcagcttctcatgtttcattttcctgaagawttatgtttttgtctaccttgtgagcaggcttttggaagaacctgtttgatgcaaaaaagaaaatgaaaaacaaaacaaaaaatccccaaaaccttattat

SEQ ID NO: 501349 - DNA, 201 bp, Homo sapiens
ctctggctttggttccaccaagaagagttactgaggctttctgtgcttggcctgactttggcctatgctggacctaactttgcgtgtgtgtgtgtgtagtrgggggtcatttctttttgggtaatgggaaagttcttaagagtgtcaatggggagggatagagggtgggggctcatggtttccctctactttgggagaggg

SEQ ID NO: 501350 - DNA, 201 bp, Homo sapiens
tgttgcctttgtttaggattctcatgatctgaaggaaatggctctgaaactacttttttctcctagactctctgggccttatttttttttttgtaattttwaaaaaaattttttttttttttggtcatacagatatttctcaacttctgatggggttacctactgataaacctatcatcaagttaaaaatatcataagtca

SEQ ID NO: 501351 - DNA, 201 bp, Homo sapiens
tggccctaggttttctttatagtttggtatcttattgccacaaagagtctgttctgtcagtcttatgatctgtattttaacattaatgctggtcagttatwgtgtctaaaccacaaaaggaaaggggtataatgaggtatgtctgacctcccatcccatcatggccaagaacttagtttttaaggtttctttggggtcccc

SEQ ID NO: 501352 - DNA, 201 bp, Homo sapiens
atatcttcatttgaaaattgtctattcatggcttttgcccactttttgatgggattgtttgtttttttcttgctaatttgtttgagttcctggtagattcyggatattagtcctttgttggaagcataatttgcaaatattttctcctactctgtgggttgtctgtttactgattgtttcttttgctgtttagaagctttt

SEQ ID NO: 501353 - DNA, 201 bp, Homo sapiens
gtgcagaatgtaggaaaacaataaaccctgtggggttggattggaactggaaatgtatgtgtgtatgtatgagtgtgtgtgtatacacatacatatatatrtatacatattttatatatatggatttatacacacacacacacacacacacacacacacatatatatgatccagaagcaatgatattccagtagcaatgag

SEQ ID NO: 501354 - DNA, 201 bp, Homo sapiens
accccatctctactactactactactactactactactactactactactactaataataataataataataatacaaaaattagccaggcatggtggcgygtgcctgtaatcccagctacttgggaggctgaggcaggagaatcgcttgaacctgggaggcagaggctgcagtcagctgagatcgcaccactgcactctg

SEQ ID NO: 501355 - DNA, 201 bp, Homo sapiens
cacgcctgtaatccctgcactttgggaggccgaggtaggtggatcaagaggtcaggagattgagaccatcctggccaacatggtgaaaccccgtctctacyaaaatgcaaaaaatcagctgggcgtggtggcacgtgcctgtaatcccagctacttgggaggctgagacaggggaatcgtttgaactcgagaggcggagat

SEQ ID NO: 501356 - DNA, 201 bp, Homo sapiens
gggggtaaggttatagatcaacagcatcccaaggcagaaggatttttcttagtatagaacaaaatggagtctcctatgtctacttctttctacacagacayattaacaatctgatctctctttcttttccccacatttcccccttttctattcgacaaaaccgccattgtcatcatggcccgttctcaatgaactgttggg

SEQ ID NO: 501357 - DNA, 201 bp, Homo sapiens
ggccataggacaatagtggagagaaggtcagcagataaacatgtgaacaaaggtctctggttttcctaggcagaggactctgcggccttctgcagtgtttrtgtccctgggtacttgagattagggagtggtgatgactcttaacgagtatgctgccttcaagcatctgtctaacaaagcacatcttgcaccgcccttaat

SEQ ID NO: 501358 - DNA, 201 bp, Homo sapiens
ccgccaccacgcctggctaattttttttgtatttttagtagagatggggtttcaccatgttagccaggatggtctcaatctcctgacctcatggtccactygcctcggcctcccaaagtgatgcgattacaggcgtgagccacagcgcccagccaattttcctattttactgatgtgaaaacagaatcagagaggatatgg

SEQ ID NO: 501359 - DNA, 201 bp, Homo sapiens
tttattttggtttttaataattaaaagaaaaaaactatcttcccttgtaagacttttaacacattatagtatctcagaagagcaggtaaaacatcaaatakaaaaaaaaaataaaatcttgatgaataattaatattatatatcttctacaatttgatacacaaaacaataaaaacttaattttaaccttaatactacctt

SEQ ID NO: 501360 - DNA, 201 bp, Homo sapiens
agaagatttgtttcttttcaatgtttattctcagttttgttatcccactgttaatgattttgtggactgtcactggtccacgggccacactttcaacagcwctaccctaaggaaatgagagctattttctacagggcatttcacaaccaggaagaaaattgccagcgacgtttctctcagttctgtaaggttttagaggga

SEQ ID NO: 501361 - DNA, 201 bp, Homo sapiens
agcgacgtttctctcagttctgtaaggttttagagggatcaaggagggtcaggaggtgggtgggaattaagtcatgttatttttttaatacaaaattttaytctactgtggtacacaaaagagaagtgctgctataaaaatatgggaaatattttgggaagtcgaggtgggcagatcgcttgagatcaggagttcgagacc

SEQ ID NO: 501362 - DNA, 201 bp, Homo sapiens
tttgtttttcacatcctggtataaaataaggataaaatataataaaatactcaaataattgcataagcagtgccatgcgaagttgatgcaataaccaaaaytgacctgtaccatatggtagcacaaagaatttatttatcaataatctgaagccagaattcagtgtttcaatggtggcttaaggttactaatataaaatgt

SEQ ID NO: 501363 - DNA, 201 bp, Homo sapiens
agtggcacaattatagctcactgcagcctcaaacccctgggctcaagtgatcctcttgcctcagcctcccaagtagctgggattacaagtgtgagccaccrtgtcctctgcataatgtagaacagggcactggagtatcatacatgtatcttgcttttctttatcaggaggtgaagctgtcatagctctaagtaaggacag

SEQ ID NO: 501364 - DNA, 201 bp, Homo sapiens
ttttctaattgtgtgccttctaacatagcacactatggttaaaactcagtaagcagtaattaaggggataatgtttctgactttttcaatttatgcacaasagactcccatggatttgtttgttgacaaatgaaatcaccaaaataatcttgtaaagcattccatacaagttttgagcatgggaaggacaggaaaaaattg

SEQ ID NO: 501365 - DNA, 201 bp, Homo sapiens
tgagatcgcaccactgcactctggcctgggtgacagagtgagactctgtctcaaaaaaaaaagtagagggtacccccacaagaaagtttacctgcatactyctcttttgtaattctgtctacctaaaatatcttcctaattacaagcccatattgatcattttctgtaaggcctttcctattatatcacttgaaagtgact

SEQ ID NO: 501366 - DNA, 201 bp, Homo sapiens
gctagagtccaaagtcagtgggtgagtgagtgggtgaatgaattattatttatttatttgtctgtttaagacagggtcttgctctgttacccaggttggayggcaatagtgcaatcatagctcactgtagcctataactcctgggttcaaagcaatcatcccacctcagcctcctgagtggctagggctacaggttctcag

SEQ ID NO: 501367 - DNA, 201 bp, Homo sapiens
tgggaggccaaggcaggaggatagcttgagcccaggagtttgagaccagtctgggcagcatagtgagaccctgtctttgtctttatctatatctatctatmtctatatctatctgtctgtctatctgtctgtctatctatctacacacagacacacacgcacacacacacacacacacaaagaaaatgttctatttgaaaa

SEQ ID NO: 501368 - DNA, 201 bp, Homo sapiens
ctattttcactatggctaatttctatctttgagcctattgtaattaatgagactaatgttgcattttactagattcagcactttttgtttttcacatcctkgtataaaataaggataaaatataataaaatactcaaataattgcataagcagtgccatgcgaagttgatgcaataaccaaaattgacctgtaccatatgg

SEQ ID NO: 501369 - DNA, 201 bp, Homo sapiens
agaacttgctcattttcttcctgctcagtatatcatttggcttcctcttccagttcaccaggaataaatacaaaataaatatattggttaaatgtaagtcragattaagaataaggggaatgtagaagcgatctttcctttactttaaaacttcaaatttaagcaagtgtcactttctaagaacctctatcgtgtggtgac

SEQ ID NO: 501370 - DNA, 201 bp, Homo sapiens
ggatgtttgtcaaggcttttaagcacaattaaagggattttggctggtacaatatagtggattatcagaactttatcaacattagtgtcacgaaagttggwataccacctcccactgctaaatttgactggcttattaaaaaaacaaacaaacaaagggatttcatcaaaggatgaaggaaatccacctatttttctaaaa

SEQ ID NO: 501371 - DNA, 201 bp, Homo sapiens
aatgcctttaataaaatgacatttacatctattcaaatactcttacccaggctttagaaattcaggacatctatagatggccaggcaagaaattataacakcaaaaaaaattttattttcaaaatttggtatgcatgctactggagatgagaaaatagaaataacataggaggacaatatctaagtaaatagcattgtttc

SEQ ID NO: 501372 - DNA, 201 bp, Homo sapiens
tgtttgactttaccatttgtaagatggaaaaaaatattacctcactggcgtggactcttacaggtgtagcccatacaagcaatcctgtcagtcaacaattkgttgtagatgaaaatgcctttccagtacttatccaactactaagaaatcacccttctcctaacattaaggtataaaggtttacattgttttctgatatgg

SEQ ID NO: 501373 - DNA, 201 bp, Homo sapiens
tctgtattattttataatgaccagatatattaagtgaagcaaacatgggattggacttgtcctatatgaatagatgtcccgaatctgtgtttgaatagatstaaacgtgtaatataaccttaatatccaaaacacaatttatttatttttcctaactgctaaactatgtagatacagttaaatttatttatattttatttt

SEQ ID NO: 501374 - DNA, 201 bp, Homo sapiens
atatgtgaagggaatggaattgcaccattggttcgcttactaagaattagtacgattgctgaaggcacacttctcagtgtcatcagagcagtgggatccayttgtattggtttgtatacttattctcaatttcttaaatatctgtaagaacaagaacagattgcgcagagaagtggaaattaatctctcttcctctctatc

SEQ ID NO: 501375 - DNA, 201 bp, Homo sapiens
atttggaaatgtctgctttgacatgactgatctaaaattgctctcttgagcacatctgtaatcccagcattttgggaggctgaggcaggcagattgcctgmgctcaggagttcaagaccaccctgggcaacatggtgaaaccccatctctactaaaaaaacaaaaaattagccagacgtggtggtgggctcctgtagtccc

SEQ ID NO: 501376 - DNA, 201 bp, Homo sapiens
tcccaaagtgctgggattacaggcatgagccactgcgcccagcccatttttgggactctacccaaataataaatatctatatacaatggaaaaaataaaaraaaaatgcccattggatttagtgacattgaggcctttgttaacatatatatatatatatatatatatatatatatatatatatatatatatatataattt

SEQ ID NO: 501377 - DNA, 201 bp, Homo sapiens
ttatcagtaacgtgttgaagtccagtaaaagaaaaatcacaatttttagcatgatgcaagggaggtttgatgtcaaaatgaaatctatttccttgtttggscaaatgttctatggctttcccaccactcatggtggagcactctggatgttttattaaagaaagtcttcttgccacctatcaaagaaacatattttttaga

SEQ ID NO: 501378 - DNA, 201 bp, Homo sapiens
gtaagtcaagtattttctaattgtgtgccttctaacatagcacactatggttaaaactcagtaagcagtaattaaggggataatgtttctgactttttcartttatgcacaacagactcccatggatttgtttgttgacaaatgaaatcaccaaaataatcttgtaaagcattccatacaagttttgagcatgggaaggac

SEQ ID NO: 501379 - DNA, 201 bp, Homo sapiens
ggcaagagcctgtctctacaaaaaatagaaataaagttggctgggcatggacatgcacacctgtagtcccggctattcaagaggctaaggcaggaggattkcttgagttcaggaagtcagggttgcagtgagttgtgatctggctactgtactccagctgaggtcagagagtgagaccctgtctcaaaaaaaaaaaaaaaa

SEQ ID NO: 501380 - DNA, 201 bp, Homo sapiens
agatcacttgaggtcaggagttcaacatcagcctagccaatatggtgaaaccccatctctactactactactactactactactactactactactactamtaataataataataataataatacaaaaattagccaggcatggtggcgtgtgcctgtaatcccagctacttgggaggctgaggcaggagaatcgcttgaa

SEQ ID NO: 501381 - DNA, 201 bp, Homo sapiens
aaacagaagctgagtaactctgaatacagactttttgctttcctaattactttttcaaacccttaacttttttttccaagatataaatgagaattcacctwtgacctacaaacagcaaaataaaaaaactgatttataatagtggtggcagatttacacagatgtacctctgtctggtttccttttgtccagttgtgcaca

SEQ ID NO: 501382 - DNA, 201 bp, Homo sapiens
caaatttcaagcatcatataattttatctataaatatttcagtatgtacatgcagcattttaatattatgattaacagtggcagaagaaaattcagggccrggtgtggtggttcatgtctgtaatcccagcactttgggaggccaaggcgagcagacaccttgagctcaggagttcaagaccagcctgggcaacatagcaa

SEQ ID NO: 501383 - DNA, 201 bp, Homo sapiens
acctgggaggtgaagattgcagtgagccgagattgcatcactgcactccagcctgggtgacagagctagactccatctcaaaaaagagaatatatatatayatatatttacagtagagtaaaaaaatatatatatataaaatatatatatatgtggaaactaatagggtgaggagactaaatgaatgtctgcctgactctc

SEQ ID NO: 501384 - DNA, 201 bp, Homo sapiens
actttaggaggacaaagcaggcggatcatgaggtcaggagttcgaggccaacctggccaacatggtgaagccctgtctctgctaaagatacaaaaaattakctgggcgtggtagtgcgcacctgtaatcccagctactcgggaggctggagcaggagaatcgcttgaacccaggaggtggaggttgcagtgagctaagatc

SEQ ID NO: 501385 - DNA, 201 bp, Homo sapiens
tgatttctgagattttggtgcacccatcacctgagcagtgtacactgtaccccatgtgtagtcttttatccctcattttcttcctacctttcctctagaayccccaaagtccattatatcattcttatgcctttgcgtcctcatagcttagctcccacttataagggagaacataaaatatttggcttgccattcctgagt

SEQ ID NO: 501386 - DNA, 201 bp, Homo sapiens
ctcataccataaatcctcaaaaggcttgagaactgacagtgcccgttaggagtgctctcctcaaagcctaactaggaaagacctaaagatgccaaggctasaattctccttaagaaatagaaaggagagggacccgggaaactgggagccttacccaagcgtaaagcatagggaatttcaaggaagacagcaaggggaagt

SEQ ID NO: 501387 - DNA, 201 bp, Homo sapiens
caactatatcaaatacatctataactatctaaatctatcttcataagaaatagtacatgagattatgccaaatgtttgattgtgtttaggtggtaaatctrgccagttttgtttatttctatttttctttattttctctaagctttttataaatttgattttataatatgggaaactaatgatatgctgcactttgatatt

SEQ ID NO: 501388 - DNA, 201 bp, Homo sapiens
atttataatagtggtggcagatttacacagatgtacctctgtctggtttccttttgtccagttgtgcacattttgctaacactgaaaagttctttacatcrctgtgcaacaaagcaaagcaagatggtcccatagcgttctcaacacatttattgctattgtataactgtgtctactgcagacctaacccaacagctcaca

SEQ ID NO: 501389 - DNA, 201 bp, Homo sapiens
catgagtatggcttttgtggctaacagtgttgctcattctccatatttatagtgtctttggtttgcaactggaaagggtaatagtctttgtggcttagaascatatgatgtctttgctcaaatagcaatgtatgcttctcctattttatagctgcagatagatatgatacaaacacctggcttcactgtgtactttatttt

SEQ ID NO: 501390 - DNA, 201 bp, Homo sapiens
gctaacagtgttgctcattctccatatttatagtgtctttggtttgcaactggaaagggtaatagtctttgtggcttagaaccatatgatgtctttgctcmaatagcaatgtatgcttctcctattttatagctgcagatagatatgatacaaacacctggcttcactgtgtactttattttacttacttacttatttatt

SEQ ID NO: 501391 - DNA, 201 bp, Homo sapiens
acaaggggttgggggatttccctttccttgccaagggaagctgtgacagactgtacctgaaaaaacggggcattcatgcccaaacactgtgcttttccaaygatcttagcaaatggcacaccaggagattatatctcgtgcctggctcggcaggtcccacactgatggagccttgctcactgctagcgcggcagtctgaga

SEQ ID NO: 501392 - DNA, 201 bp, Homo sapiens
taattttagccacataaaactattttcaaaaacagtttattgtaatctgaataataataaaataatacgcctgatacactgccacaagtttaaagaacgawcttatgtttatatctacatggaactccacagcaagtctacacgaaacaatgggtgtctactctgtaccccaaacagaagctgagtaactctgaatacaga

SEQ ID NO: 501393 - DNA, 201 bp, Homo sapiens
tggctcggcaggtcccacactgatggagccttgctcactgctagcgcggcagtctgagattgacctgcgaggcagcagcctggcagggggaggggcattcrccactgctgaggcttgagtaggtaaacaaagcggccgggaagcttgaactgggcagagcccactgcagctcaccaaggcctgctgtctctgtagacccca

SEQ ID NO: 501394 - DNA, 201 bp, Homo sapiens
tttgcttaagagcaggctatgcattaacactttttgccttcaataatcgctttcaacaatacttaatattggaaagtggaataatgaccatatctattttygaacgttttcttgaatcaacagttgaaactgagaaggcaatggcagcatttcaggtataaaattgagattaacacctcaaattaataaatatgtcatttt

SEQ ID NO: 501395 - DNA, 201 bp, Homo sapiens
aaaatagttcttttgaatctcaagaacgatatgtttttgaagacatagaagagtttctaatgctggagcacattcttgaatgtctctgtaatgatcatttrtttatataacatagaattcattgcaaaggaattgacattgtggggtacctgagaaaatgtggaactgtcagttgtgacccaccaaaagttaaaatttggg

SEQ ID NO: 501396 - DNA, 201 bp, Homo sapiens
ctcactgctagcgcggcagtctgagattgacctgcgaggcagcagcctggcagggggaggggcattcgccactgctgaggcttgagtaggtaaacaaagcrgccgggaagcttgaactgggcagagcccactgcagctcaccaaggcctgctgtctctgtagaccccacatctggggggcagggcatagctgaacaaaagg

SEQ ID NO: 501397 - DNA, 201 bp, Homo sapiens
ccacaagaaagtttacctgcatacttctcttttgtaattctgtctacctaaaatatcttcctaattacaagcccatattgatcattttctgtaaggccttycctattatatcacttgaaagtgactcctgtcttattttgcttttctcaaaccatgcatagaagtaagtcattatttaaacaacctgtaaatatgactttg

SEQ ID NO: 501398 - DNA, 201 bp, Homo sapiens
gtttatcagtcatgatctgatgaagttttcacaggtttgtagtaacataagaaaaaataagggcaaggtagcacgtttctgataaaattaatttcattcartatcaagtccatcattttgagataatgccttttacactttttttagtattaaaatattctttattttacataatgatatttaaagtagtattcattctct

SEQ ID NO: 501399 - DNA, 201 bp, Homo sapiens
cattcagtatcaagtccatcattttgagataatgccttttacactttttttagtattaaaatattctttattttacataatgatatttaaagtagtattcrttctcttattggtgctaacttgacataacaagctagcaaaccatatagtggtccccacaaatttttggcccctgacatctaaatgtctggaagtactgat

SEQ ID NO: 501400 - DNA, 201 bp, Homo sapiens
gcactccagtctggacaacagagcgagactctgtctaaaaaaaaaaaaaaaaaaaaaaaaagattatttttattactccacggttttttttttttaaacartgtgtgaaaagtcaggccctggaggctgaagttggaggattacatgagcctaggagttctactccagcctgggcaacatagcaagatgctgtctataaaa

SEQ ID NO: 501401 - DNA, 201 bp, Homo sapiens
aacttcagtgatttttaaacctcaataagcaatacattgattgattttaaagtattaataaggcttaactcaaagccatttcaaccgcaaaaaggacatawtaatttttttttttttgagacggagtttcgctcttgttgcccaggctgtagtgcaatggcacgatctctgctcactgcaacctctgcctcccaggtacaa

SEQ ID NO: 501402 - DNA, 201 bp, Homo sapiens
cctcctcccttggcctcccaaagcattaggatgagctaccatgcaaagtttgtgttcttaaccactaaaaaataagagacctctttaatcttcatatttamttctaaattatcttaatggtgctgagtcacaactttctggtggattgactgaaatataggaaatgcggagggaaatggtctattttatactagaaaggga

SEQ ID NO: 501403 - DNA, 201 bp, Homo sapiens
gctcattctccatatttatagtgtctttggtttgcaactggaaagggtaatagtctttgtggcttagaaccatatgatgtctttgctcaaatagcaatgtmtgcttctcctattttatagctgcagatagatatgatacaaacacctggcttcactgtgtactttattttacttacttacttatttatttatttattcgag

SEQ ID NO: 501404 - DNA, 201 bp, Homo sapiens
agacaataagccttgactattttgactgaaagcaatctcttttttaagtttaagagaaaaatagttcttttgaatctcaagaacgatatgtttttgaagayatagaagagtttctaatgctggagcacattcttgaatgtctctgtaatgatcatttatttatataacatagaattcattgcaaaggaattgacattgtgg

SEQ ID NO: 501405 - DNA, 201 bp, Homo sapiens
gatcaggagttcgagaccagccttgccaatatggtgaaaccccatctctactaaagagataaaaattggccgggcgtggtggcacatgcctgtagtcctakctacttgggaggctgaggcaggaaaatcacttgaacctgggaggtgaagattgcagtgagccgagattgcatcactgcactccagcctgggtgacagagc

SEQ ID NO: 501406 - DNA, 201 bp, Homo sapiens
tggtgtgcagtggcacaattatagctcactgcagcctcaaacccctgggctcaagtgatcctcttgcctcagcctcccaagtagctgggattacaagtgtsagccaccgtgtcctctgcataatgtagaacagggcactggagtatcatacatgtatcttgcttttctttatcaggaggtgaagctgtcatagctctaagt

SEQ ID NO: 501407 - DNA, 201 bp, Homo sapiens
ttagtggtatctggaaaagaaatacattaaaaagaataaaataactttgaaattaaaaaatcccaacaatcttttgtttcacattttagctgcggatcagyatttagggtaaaggtgtaacttctcctgaaggtacatccttggctagaaatctaaaggccaggtcattactttggatctctgaacctgatttaggcatag

SEQ ID NO: 501408 - DNA, 201 bp, Homo sapiens
gtgggaattaagtcatgttatttttttaatacaaaattttactctactgtggtacacaaaagagaagtgctgctataaaaatatgggaaatattttgggargtcgaggtgggcagatcgcttgagatcaggagttcgagaccagccttgccaatatggtgaaaccccatctctactaaagagataaaaattggccgggcgt

SEQ ID NO: 501409 - DNA, 201 bp, Homo sapiens
acatagtaagattatcttgttagcgtgtataatttaagaaaccaagaaattttaacttggtgatttactctattcatttttgtagaagtaaactttttatrgaaaacaacagaattatgaacttaagtacctcgcacataatatttcttcaataaatgatagctattagtattccttggtagtataatatttctaatttcc

SEQ ID NO: 501410 - DNA, 201 bp, Homo sapiens
tggtggtgcacacctgtagtcccagctactcaggaggctgaggtgggaggatggtggaggttgtagtgagctgagatcacacacaccactgcactccagcytgggtgatagagccaaaccttgtctcaaaaaaaaaaaaaaaaaaaaaaagggtggtggggagggaatgttttaattgtaagtaaaaatgcaggctgttgt

SEQ ID NO: 501411 - DNA, 201 bp, Homo sapiens
tgcattaaagccttacaactcaatggtcagtagttaacaagcagttcaaaatagctttttaatccatgtcaaaaaattaaaagaacttttttttaatatgkaagggatacaactatgtacttaggataatacctccttacatgctctgctcgcccttgttcctttctccagtgccctcaaatggagctctgtggttggtcc

SEQ ID NO: 501412 - DNA, 201 bp, Homo sapiens
tttgtagagacggggtttcaccatgtggccaggctggtcttgaattcctgacctcaagtgatcttcccacctcggcctcccaaagtgctgggattaaggtrtgagccactgcacccaggctgtttctttttttaatctgtatttatttatttaattttttttaaatattgagatggggtctctcactgtcagccaggctag

SEQ ID NO: 501413 - DNA, 201 bp, Homo sapiens
tatggcagaacaaattggatacagctttataataaatatgcttttgtcaccatcagctaaaatgcagtatgttggtaagttattttccttattttatttttattttttagagacaggatcttgctctgttgcccagcctggtgtgcagtggcacaattatagctcactgcagcctcaaacccctgggctcaagtgatcctc

SEQ ID NO: 501414 - DNA, 201 bp, Homo sapiens
atatggcagaacaaattggatacagctttataataaatatgcttttgtcaccatcagctaaaatgcagtatgttggtaagttattttccttattttatttttattttttagagacaggatcttgctctgttgcccagcctggtgtgcagtggcacaattatagctcactgcagcctcaaacccctgggctcaagtgatcct

SEQ ID NO: 501415 - DNA, 201 bp, Homo sapiens
tatatggcagaacaaattggatacagctttataataaatatgcttttgtcaccatcagctaaaatgcagtatgttggtaagttattttccttattttatttttattttttagagacaggatcttgctctgttgcccagcctggtgtgcagtggcacaattatagctcactgcagcctcaaacccctgggctcaagtgatcc

SEQ ID NO: 501416 - DNA, 201 bp, Homo sapiens
atatatggcagaacaaattggatacagctttataataaatatgcttttgtcaccatcagctaaaatgcagtatgttggtaagttattttccttattttatttttattttttagagacaggatcttgctctgttgcccagcctggtgtgcagtggcacaattatagctcactgcagcctcaaacccctgggctcaagtgatc

SEQ ID NO: 501417 - DNA, 201 bp, Homo sapiens
aatatatggcagaacaaattggatacagctttataataaatatgcttttgtcaccatcagctaaaatgcagtatgttggtaagttattttccttattttatttttattttttagagacaggatcttgctctgttgcccagcctggtgtgcagtggcacaattatagctcactgcagcctcaaacccctgggctcaagtgat

SEQ ID NO: 501418 - DNA, 201 bp, Homo sapiens
ggatcgcttgagcctgggaggcagaggttgcagtgagctgagttcatgtcattgcattccagcctgggtgacagagcgagaccttgtctcaaaaaagaaargaaaagaaaagaaaagtaaagggttgaataaaataggagcctgtgccctcatcctgataacaactggataaacaaggaaacaaataaatagagaataagg

SEQ ID NO: 501419 - DNA, 201 bp, Homo sapiens
tgtgtatgtatgagtgtgtgtgtatacacatacatatatatgtatacatattttatatatatggatttatacacacacacacacacacacacacacacacmtatatatgatccagaagcaatgatattccagtagcaatgagcataccgagcacccaaatcttggtttctaaatatcatccctcattaaaaggaaccagag

SEQ ID NO: 501420 - DNA, 201 bp, Homo sapiens
tccatcgcttactatgctctactttatcctttaagaatagcatcagaggccaggcgtggtggctcacacctataatcccagtattttgggaggctgaggcrgatcacctgaggtcaggagttcgagactgcctggccaacatggtgaaaccctatctctactaaaatacaaaaatcagctgggtgtggtggtgcacgcctg

SEQ ID NO: 501421 - DNA, 201 bp, Homo sapiens
aagagtagacacctcccctttctctctattgttccgtctcttaccatgtgacacactggctccccttccccttccgccatgattgtaagcttggtctcacmagaagctgagcagatgctggtgccatgcttgtacagcctgcagaattgtgagccaaataaacctcttttctttataaattatgcagtctcaggtattcct

SEQ ID NO: 501422 - DNA, 201 bp, Homo sapiens
ctgagtagaaaatgttcaaagactctctgcttcttttctgttttcagattgttgtactggctaaagtcattagagatatggaccatattactttgtctgcragaggtgttactattttagttgatagtctgtattcagttcagacttctactattgtcttgacaggtaagaaatgactagaagttaattttagccacataa

SEQ ID NO: 501423 - DNA, 201 bp, Homo sapiens
acatgtccagaaagccaacccagagcctgcagaaggctaataaaacattttagaatgaaaggattcctgagccatcttttaaaaatttttttatttttaayaatggtaatatgcaaataacataactgaataatctttttgaatggaagttcttgatctcgatactaagcagattttccttagcatgtctacaggaattta

SEQ ID NO: 501424 - DNA, 201 bp, Homo sapiens
cattttagaatgaaaggattcctgagccatcttttaaaaatttttttatttttaacaatggtaatatgcaaataacataactgaataatctttttgaatgraagttcttgatctcgatactaagcagattttccttagcatgtctacaggaatttagtgtcaggtcagagttatggtttcaaaaaattaggatttctgtaa

SEQ ID NO: 501425 - DNA, 201 bp, Homo sapiens
gtaatagttttctcaaggctggacattacaaagaattattgtgagttgttgaagagtcattcagtcttccatttacttctactaaaatgcctttaataaartgacatttacatctattcaaatactcttacccaggctttagaaattcaggacatctatagatggccaggcaagaaattataacagcaaaaaaaattttat

SEQ ID NO: 501426 - DNA, 201 bp, Homo sapiens
ttccacagtgataccgcaggagtgaaccctacatggaaaagaaatggaaatcagtcaagtcttagcatatttctctcacttcgctctatctgaccttgatrcacaaagcatgcccctttggttcatttcccattgccactctttcctacttggctctaggttctattttgctgtctgttaatccacgctttgactatgaat

SEQ ID NO: 501427 - DNA, 201 bp, Homo sapiens
ggaccctgcatttggcttataatagatttattcttgtgcatcagttctacaaatggtagggaatcttagagaactagaaggtttaaccaaaggatttatcyggccttggctgaaatttttaattctaacactcatcacaaggcaagttaaaagtcctccagggtttcttgtactatattttgcctcaaactacctgccctg

SEQ ID NO: 501428 - DNA, 201 bp, Homo sapiens
aatcctcaaaaggcttgagaactgacagtgcccgttaggagtgctctcctcaaagcctaactaggaaagacctaaagatgccaaggctacaattctccttmagaaatagaaaggagagggacccgggaaactgggagccttacccaagcgtaaagcatagggaatttcaaggaagacagcaaggggaagttccagaatgga

SEQ ID NO: 501429 - DNA, 201 bp, Homo sapiens
tatatatatacatatatttacagtagagtaaaaaaatatatatatataaaatatatatatatgtggaaactaatagggtgaggagactaaatgaatgtctrcctgactctctaagccaccttttgcccctctactctgttccttctagcttttactcccattaccttactcctcatgtgcacccttcttctcccttttgtt

SEQ ID NO: 501430 - DNA, 201 bp, Homo sapiens
tgcaaaacaagatgagacagcattttttctatcaaatttgagcaaagttgatgtatttatttttaatgataatacccatattgaaaaaaacacagtgtaastggttaaaagaatataggagaatgtttagaatcaccagtaccaaaaatacaaaacaaaatgagacagctatcaaattagcaaagtttacatatttatttt

SEQ ID NO: 501431 - DNA, 201 bp, Homo sapiens
ttttaacaatggtaatatgcaaataacataactgaataatctttttgaatggaagttcttgatctcgatactaagcagattttccttagcatgtctacagraatttagtgtcaggtcagagttatggtttcaaaaaattaggatttctgtaaacaaaggcctgcacttaaaccttaaaatttattgactgacatgagtggt

SEQ ID NO: 501432 - DNA, 201 bp, Homo sapiens
tactgcatagctgggattacaggcatgcaccactgcacccaagccataatgtcactttaaaaatattctggatggaggtgcatatcttgagtcatgaggamacagcaaacaaacccaaactgaggaaaattctctaaactaaatgacccatattcattaaaaatgtctatgtcataagagaccaaaaaacccctgagaaaa

SEQ ID NO: 501433 - DNA, 201 bp, Homo sapiens
aagataaataatgtaagtagtattttacacagtcactcccacagctagcccatgtgacgactttgtaggaattagaaaaatatacccctttctcagacctrtcttcttcaaaacccagctgaagtgtctcttctgtaacaccttccctcatcacttcaagcagatttaatgttccaaatgtttggagtaaataagtgagta

SEQ ID NO: 501434 - DNA, 201 bp, Homo sapiens
ctaaaaaaaaaaagaaaaaaagtaaagaaaaaactgtgctattcactggaactttgatttgggagaggaaataaggcttgcaggaaacagctatctttcgkccaattctcaactgcctgtgtaagagcataatcacaacccactctcacacctgaatgctttctgcatgttttccttaaatttcccagcatacttgctggt

SEQ ID NO: 501435 - DNA, 201 bp, Homo sapiens
atctatatctataggcatatctataggacacaaggacaacctgaaggggctcccactggccaaatcttagacaattttgggtaccaacataagtaagaaartacaccgggcacagtggctcatgcctataatcccagcactttgcggggccaagacgggcaaatagcttgagctcatgagttcaacaccagcctgggcaac

SEQ ID NO: 501436 - DNA, 201 bp, Homo sapiens
tgctggagtttttattttctttcttttttttttttttcaaatttgcattcagtctagccaaaataagggtaagggtcactaggccaattatatggacatgyctaattttactccctttcaaggccctcactaaaattacatggagattaaacattattaataccaccagcagaagacaagcattcaagggaaaacaagaaa

SEQ ID NO: 501437 - DNA, 201 bp, Homo sapiens
ggaggagaagagaatctctactatgggtatattttctcttctgtaaatgtagctgaattacaagtcttctctccaagtagtgatattcatacataggaaayagaactactcaagatacgttaactctatgataacggaagagaataggatccaatagtgcatccgaataggacccatgtacaaacatagattctacatcaa

SEQ ID NO: 501438 - DNA, 201 bp, Homo sapiens
aaaaaaaaaaaggaaagaggaaattttaagtgaaaaatattccctccaacttattccttgcctcctaattttagagacaaatttagcaaaatcttttgttrtattttgatgaatgttttgtgaagaattctgctggagtttttattttctttcttttttttttttttcaaatttgcattcagtctagccaaaataagggta

SEQ ID NO: 501439 - DNA, 201 bp, Homo sapiens
ctgcttttaatgcgttgtcaggtgcatatgacatgcctggatgacttgaccaaaagttattctcaacactgttcgatgtaatcttgccagatacatctacrtagtcattttgttcttattcatatgagtcttcttgaacaacttaggaaactgctgtatattaatgatcatacttctatgtgcattcccttttaaaacaga

SEQ ID NO: 501440 - DNA, 201 bp, Homo sapiens
tatctgtgaactattagaaatggaattatgacagggcatggctcttgggtggtggggagcatgtatagaagtaggagggacttgcttaaagagaacgttarctatatctgcaatatcttattacttaaactatgggaagcaaatatgactaacgttaatagttaattctaggtgttgagatcagggtgtatagtgtatatt

SEQ ID NO: 501441 - DNA, 201 bp, Homo sapiens
acggagtttcgctcttgttgcccaggctgtagtgcaatggcacgatctctgctcactgcaacctctgcctcccaggtacaagcgattctcctgcctcagcytcccgagtagctgggattacaggcatgtaccaccacgcccggctaatttttgtatttttagtagagatggggtttctccatgttggtcaggctggtcacg

SEQ ID NO: 501442 - DNA, 201 bp, Homo sapiens
caagacagagtctcagtctgtcgcccaggctggagtgcagtggtgtgatgtcagctcactgcaaactccgcctcccgggttcaagaaattcttctgtcttmgcctcctgagtagctgggattacaggcatgcaccaccacgtccggctaatttttgtatttttagtagagacagggtttcaccatgttggccaggctggtc

SEQ ID NO: 501443 - DNA, 201 bp, Homo sapiens
catagtgagaccctgtctttgtctttatctatatctatctatatctatatctatctgtctgtctatctgtctgtctatctatctacacacagacacacacrcacacacacacacacacacaaagaaaatgttctatttgaaaatgtccaatatggtagccactaccctaatgtggttattgaactcacgtgagatgctcca

SEQ ID NO: 501444 - DNA, 201 bp, Homo sapiens
ggaggccaaggcaggaggatagcttgagcccaggagtttgagaccagtctgggcagcatagtgagaccctgtctttgtctttatctatatctatctatatmtatatctatctgtctgtctatctgtctgtctatctatctacacacagacacacacgcacacacacacacacacacaaagaaaatgttctatttgaaaatg

SEQ ID NO: 501445 - DNA, 201 bp, Homo sapiens
aacattccatgctcatggataggaagaatcaatattgtgaaaatggccatactgcccaaggtaatttatagattcaatgccatccccatcaagctaccaaygactttcttcacagaattggtaaaaactactttaaagttcatatggaaccaaaaaagagcccacattgccaagacaatgcatcctaggcaaaaagaacaa

SEQ ID NO: 501446 - DNA, 201 bp, Homo sapiens
gaattttcaacccagaatttcatatccagccaaactaagcttcataagtgaaggagaaataaaatcctttacagacaagcaaatcctgagagattttgtcwccaccaggcctgccttacaagagctcctgaagaaagcactaaacatgcaaaggaacaaccagtaccagccactgcaaaaacatgctgaattgtaaagacc

SEQ ID NO: 501447 - DNA, 201 bp, Homo sapiens
atactcctcgagaagagcaaccccaagacacataattgtcagattcaccaaggttgaaatgaaagaaaaaatgttaagggcagccagagagaaaggtcagrttacccacaaagggaagcttatcagactaacagtggatctcttggtagaaaatctacaagccagaagagagtgggggccaatattcagcattcttaaaga

SEQ ID NO: 501448 - DNA, 201 bp, Homo sapiens
aaatatgggactatatgaaaagaccaaatctacgtctgattagtgtacctgaaagtgaaggggagaatggaaccaagttggaaaacattcttcaggatatyatccaggagaacttccccaacctagcaaggaaggccaacattcaattcaggaaatacagagaacaccacaaagatactcctcgagaagagcaaccccaag

SEQ ID NO: 501449 - DNA, 201 bp, Homo sapiens
tttccaacggaatttgaagtatgtgaccagccaatctaagtcattcagaccaaagattaaaaatttcagccaggcacagtggctcatgcctgtaatcctascactttgggaggccaaggcaagtggattgcttgaacccaagagtttgagaccagcctgggccacatggcaaaatgctgtctctgcaaaaaaaatacaaaa

SEQ ID NO: 501450 - DNA, 201 bp, Homo sapiens
gagatagagaccatcctggccaacatggtgaaaacctgtctctactaaaaatacaaaaatcagctgggcgtggtggcacgtgcctgtagtcctagctcctsgggaggctgaggcaggagaatcacttgaacctgggaggcaaagttgcagtgaaccgagatcgtgccactacagtccatcctgtgacagagcgagacttcg

SEQ ID NO: 501451 - DNA, 201 bp, Homo sapiens
ggcagaggctgcagtcagctgagatcgcaccactgcactctggcctgggtgacagagtgagactctgtctcaaaaaaaaaagtagagggtacccccacaaraaagtttacctgcatacttctcttttgtaattctgtctacctaaaatatcttcctaattacaagcccatattgatcattttctgtaaggcctttcctatt

SEQ ID NO: 501452 - DNA, 201 bp, Homo sapiens
atatattttttctgggtgcattatgtcttcatttattttaatgacaaaaatgttttccttttagtctggagaagaatggaggaccatccataattcctatytttaaaagaggtaattgatttttcttttatctatgaagtaccttctagcccagacactttataattctgtattccatctctaaaaattcaaaatgtaggc

SEQ ID NO: 501453 - DNA, 201 bp, Homo sapiens
tatgagtgaagcacgtatatcctgtggcttaccatgcaatcataatgccattatcagtgcatagtctgggaggaggacacaacaaagtgcactgtgttgcrtttgttaaaatttccagagctctgcggatatagaagttacttgcgacaccaccagatgcaacctgaaggaattgagaaaaccaaaataactatcatatat

SEQ ID NO: 501454 - DNA, 201 bp, Homo sapiens
agctaggctaagctatgctgtttggcagattaggtttacaaatgcattttcaatttacaatatttcaacttacaatgggtttatcaggaaataaccaaatygtaagttgagaagcatctgtctaggaaaaaaaatagtatatacagggttcagtactatcctccgtttcaggcatccactgggggttttggaatgtatcct

SEQ ID NO: 501455 - DNA, 201 bp, Homo sapiens
attttagttgattttcagtttcttttgctaagatcacttcatttacctgtcaaccatatattttattttccacatggaagctgcacaggatcaaaaaactktatcaattctatttgtctaaaagctcgaaaaattaaaaaataatgttaagtgttaatttaaatgttaaattactttaccacactacttttatacttactt

SEQ ID NO: 501456 - DNA, 201 bp, Homo sapiens
ccgagattgcatcactgcactccagcctgggtgacagagctagactccatctcaaaaaagagaatatatatatacatatatttacagtagagtaaaaaaawatatatatataaaatatatatatatgtggaaactaatagggtgaggagactaaatgaatgtctgcctgactctctaagccaccttttgcccctctactct

SEQ ID NO: 501457 - DNA, 201 bp, Homo sapiens
caaaaaaaaaaagaaaaagaaaaaaaaagaaaagaaaattcaccaagatgaatgagttctttctgtgtgtaatacattgttcaaataacatactaataatmcaatatattgaattatttttaatattaaaaataagatttagtaataagattttatcttttgaatctttctggaaggtctgccatacttatatatctctgg

SEQ ID NO: 501458 - DNA, 201 bp, Homo sapiens
ttcagcatctgttggtgaacgggccgtaattcttttaaaattgcttatcttgaggacagtgtttgtttaactgttagagaaaaaagaaaaaccttgtggcrgttagaacatagtttattctttaagtagaggggtttgtgacttcaccattgcctggcatggccctaggttttctttatagtttggtatcttattgccaca

SEQ ID NO: 501459 - DNA, 201 bp, Homo sapiens
cctggtaaggggatcagagacacataggaacattctaatcaagttgtaggtggaaacagagagcaccaaaggactaatgctgtctgctttctacacctacrttttcagggttgatactcaaaacacttaaccaccagcacagtattggcactgagcaatcagaatggacgtcagccataatgctggagcagggtctcagag

SEQ ID NO: 501460 - DNA, 201 bp, Homo sapiens
accataatctacattatctcctcactccaaggaagataacttaattttgaaataaattttaattattttttccttttaggtaagcctccctatataacttyagtgctttagcaaatagtcctcttggatgttagctgggttgttaaggtataggagatcacaaaggcatattattaattccagtgtcttctttaccatgtg

SEQ ID NO: 501461 - DNA, 201 bp, Homo sapiens
gagagacactgtctaaaaaaaaaaaaaagaaaagaaaactatagtatgaaatcaattattgaaataaaagtattttttcctacaccataatctacattatstcctcactccaaggaagataacttaattttgaaataaattttaattattttttccttttaggtaagcctccctatataactttagtgctttagcaaatag

SEQ ID NO: 501462 - DNA, 201 bp, Homo sapiens
gttgcagtgagccgagatcatgccactgcactccagcctggcaacagagagagacactgtctaaaaaaaaaaaaaagaaaagaaaactatagtatgaaatmaattattgaaataaaagtattttttcctacaccataatctacattatctcctcactccaaggaagataacttaattttgaaataaattttaattattttt

SEQ ID NO: 501463 - DNA, 201 bp, Homo sapiens
tgatttgaaatgaatgaaaatggaattcataggatagctttccttatgtgtcaagcagggttagatgtaagggtgtgtgaaagaggccgtgctggtcacascagtggcttgcctctgagtgttcccctactctcttccactaaggtctaaagcagtgttactccacctttagggtatatcagaatcacctggagggcctgt

SEQ ID NO: 501464 - DNA, 201 bp, Homo sapiens
agcatttaccacattaggaacaatccaacggctctgctatcatttgtactcgggaatagaagaggtaaaaacaagcaaaaactaattctaaaattaaataygctaaaaatataatttacctctccctctgtggactaatttttccactgattgactgtgttatagatataatataattcttattactaactcaaaattaca

SEQ ID NO: 501465 - DNA, 201 bp, Homo sapiens
tataaatgagaattcacctatgacctacaaacagcaaaataaaaaaactgatttataatagtggtggcagatttacacagatgtacctctgtctggtttcyttttgtccagttgtgcacattttgctaacactgaaaagttctttacatcactgtgcaacaaagcaaagcaagatggtcccatagcgttctcaacacattt

SEQ ID NO: 501466 - DNA, 201 bp, Homo sapiens
atcatagatagtcccctgatatgttcctgaaaacctgtacaaaaagctctgtatccaaaaggtgaacttaaagaagtcatgagggatgtttcatttcagayagctaaataaataaggtctttattatatctattatattttctgtcattttgtgcatgtcctataaggtgctttctatttatcattaaattgatgtaagta

SEQ ID NO: 501467 - DNA, 201 bp, Homo sapiens
tttaaaagctatttttgtgattattaaatatgcatggatattttataatcattgaaataaatttagctagaataaaaacagagttgaaaatgaaattggtrgccctccataactggaaaggaaaatatagataaattgtcaggggcaggtgtagtggctcactactgtcttgccaacactttgggaggctgaggctggagg

SEQ ID NO: 501468 - DNA, 201 bp, Homo sapiens
agaaataattttctattctttataagctacccagtctgtgcttttttcttacagtagctctaaatgattaagacaggatagatgagggaaaagtgtatccrctggctgctgtctctcattagccgaagtttgaatggagggttaactcgctcatgctttcagatttgttcctacaccagaatggctggatgggttccatca

SEQ ID NO: 501469 - DNA, 201 bp, Homo sapiens; identical to SEQ ID NO: 129713

SEQ ID NO: 501470 - DNA, 201 bp, Homo sapiens; identical to SEQ ID NO: 129696

SEQ ID NO: 501471 - DNA, 201 bp, Homo sapiens; identical to SEQ ID NO: 129714

SEQ ID NO: 501472 - DNA, 201 bp, Homo sapiens; identical to SEQ ID NO: 129716

SEQ ID NO: 501473 - DNA, 201 bp, Homo sapiens; identical to SEQ ID NO: 129675

SEQ ID NO: 501474 - DNA, 201 bp, Homo sapiens
aggacctgcagcagcacctgggggcggcccgctctcagtgctcccggagactgacgcctggccccgtggcaggcacccacctccaccctgcagggtgcatycctctgctacaaggccttcccaacagcggttgccagctgtccccgggagccacgctgtccccaacagggcacgctgagcagcgctgaaggccgagccctg

SEQ ID NO: 501475 - DNA, 201 bp, Homo sapiens; identical to SEQ ID NO: 129661

SEQ ID NO: 501476 - DNA, 201 bp, Homo sapiens; identical to SEQ ID NO: 129662

SEQ ID NO: 501477 - DNA, 201 bp, Homo sapiens; identical to SEQ ID NO: 129663

SEQ ID NO: 501478 - DNA, 201 bp, Homo sapiens; identical to SEQ ID NO: 129665

SEQ ID NO: 501479 - DNA, 201 bp, Homo sapiens
cccccagagcagggcgggggcctccaggggagacagctgagagcgagtccagtggagggcctgggccagggtgctgttggcgctgcgggtgcgaggtgggyttttctcctgtgggagggagggagggagggaggttggggaagtgcttactgggtttaccccgggaggctggggtcacccctgccacctcccccagcctgg

SEQ ID NO: 501480 - DNA, 201 bp, Homo sapiens
cccagccttacccctgctcctcagctcctcacgctccacatccccccctggtgcccggccttacccctgcaccccgggctccacaccccacccggtgcccrgccttacccctgcaccccgggctccacaccccccccagtgcccggccttacccctgcaccccaggctccacaccccaccccggtgcccggccttacccct

SEQ ID NO: 501481 - DNA, 201 bp, Homo sapiens; identical to SEQ ID NO: 129702

SEQ ID NO: 501482 - DNA, 201 bp, Homo sapiens
ggctggtgtgaagatgacgtggaagatgacagtgcttcccctcttcccctgggagtcagcctcttcccctctggcacggggcctagggttgggggctctaractcagacccccacagcccagggcaggggaagggtcttgagcttggtcgtgttttcctcctgggccaatcacagaggcaatagtgggagtcctggggagg

SEQ ID NO: 501483 - DNA, 201 bp, Homo sapiens
gccagcagggccttgggccaggctgtggggcaggacagtcatgggtcagcagagggtccccagccagggggctggggtgcagctagagtgggagtcctgtrggggtgttggaggggagaacccctgggagggcagggggctggacaagtgacacgcacaggtggccgtcttcttgcggctgccgtggccaggctcagcagc

SEQ ID NO: 501484 - DNA, 201 bp, Homo sapiens
tgtgaagatgacgtggaagatgacagtgcttcccctcttcccctgggagtcagcctcttcccctctggcacggggcctagggttgggggctctagactcaracccccacagcccagggcaggggaagggtcttgagcttggtcgtgttttcctcctgggccaatcacagaggcaatagtgggagtcctggggaggggcatg

SEQ ID NO: 501485 - DNA, 201 bp, Homo sapiens; identical to SEQ ID NO: 129680

SEQ ID NO: 501486 - DNA, 201 bp, Homo sapiens; identical to SEQ ID NO: 129703

SEQ ID NO: 501487 - DNA, 201 bp, Homo sapiens; identical to SEQ ID NO: 129705

SEQ ID NO: 501488 - DNA, 201 bp, Homo sapiens
tgcagctgggagaacacagctacttctttcgccgggtggtcctcgaactactggagcaggggttgggggctgcggtggcctgttcggaggcagctccggastctttctgggaggctggcctgcgcttctccccgctgactggtgccagcggggaggaccggagagaacagggtgctagcagggcctgcacaaatctgacag

SEQ ID NO: 501489 - DNA, 201 bp, Homo sapiens
agtgcacagtgccataggccagaagcccgtagacggctagttccagcagcagcgacagggtggccagcagggccttgggccaggctgtggggcaggacagycatgggtcagcagagggtccccagccagggggctggggtgcagctagagtgggagtcctgtgggggtgttggaggggagaacccctgggagggcaggggg

SEQ ID NO: 501490 - DNA, 201 bp, Homo sapiens; identical to SEQ ID NO: 129727

SEQ ID NO: 501491 - DNA, 201 bp, Homo sapiens; identical to SEQ ID NO: 129729

SEQ ID NO: 501492 - DNA, 201 bp, Homo sapiens; identical to SEQ ID NO: 350135

SEQ ID NO: 501493 - DNA, 201 bp, Homo sapiens; identical to SEQ ID NO: 350137

SEQ ID NO: 501494 - DNA, 201 bp, Homo sapiens; identical to SEQ ID NO: 350138

SEQ ID NO: 501495 - DNA, 201 bp, Homo sapiens
ccaccaggcctggctaattttttgtatttttagtagagacagggtttcaccgtgttagccaggatggtcttgatctcctgacctcgtgatccacctgcctyggcctcccaaagtgctgggattacaggcgtgagccaccgcgcccagccctctccttgccccactttaggatccctcccccctggacaactgtatacccaa

SEQ ID NO: 501496 - DNA, 201 bp, Homo sapiens
ctcccgagtagctgggactacaggcgcccgccaccaggcctggctaattttttgtatttttagtagagacagggtttcaccgtgttagccaggatggtctygatctcctgacctcgtgatccacctgccttggcctcccaaagtgctgggattacaggcgtgagccaccgcgcccagccctctccttgccccactttagga

SEQ ID NO: 501497 - DNA, 201 bp, Homo sapiens; identical to SEQ ID NO: 350139

SEQ ID NO: 501498 - DNA, 201 bp, Homo sapiens; identical to SEQ ID NO: 350140

SEQ ID NO: 501499 - DNA, 201 bp, Homo sapiens
  misc_feature (1)...(201): n = A,T,C or G
ggacatgtggccaagccctggccacctcccctttccctggaaaatccagatctagagcaatggcctcttcacacaaaccttctctcagtggttcagaccanattaggattagagaagggccccacgaggcaccgccaggcgtgtctgtgagcgactcccaggatggaaggcaaaggctgacccccctctctgttgtgcccg

SEQ ID NO: 501500 - DNA, 201 bp, Homo sapiens
ctgtgaaatccatttgcagtggacaccagccctgcccgcacctcgacaccccgtcacacccagccctgcccccacttcgccggcaccgcacccccccaccmcccgcccatcacaccaaggccttgccccaggactgcagccttccccacggccccctgctcccacccacccactcacccacccgtgccttgccccatccag

SEQ ID NO: 501501 - DNA, 201 bp, Homo sapiens
ttgaaagccatgggccataggatcctctctgtagtccccacccacacaactgtggctgaggcctcagctcttaggacagaccgtggtggacatgtggccargccctggccacctcccctttccctggaaaatccagatctagagcaatggcctcttcacacaaaccttctctcagtggttcagaccacattaggattagag

SEQ ID NO: 501502 - DNA, 201 bp, Homo sapiens; identical to SEQ ID NO: 350119

SEQ ID NO: 501503 - DNA, 201 bp, Homo sapiens
catgacctgtctactgtctatctccccaaccaggggtgctgaggggaccaggtctggtgggtcacggtgctgtccgcctgggcctcaccagcagaggcctrgcctctttccatagcgctgtccccaccctgggcctggatctgtttggttggggtgaagaggggtgaaagggtcaggcggcaggagccctttggatggttc

SEQ ID NO: 501504 - DNA, 201 bp, Homo sapiens
gctctgggcagggcctgtgtggacccgtgagttgggggctctgggcagggcctgtgtgaacccgtgagttgggggctccgggtagggcctgtgtggacccygtgggccctgtgcaggtggccaggctcagagtcctagatccccatccctgggatgcaggtcaggtgaggaggatgggaggtcagggcagcatggggccgt

SEQ ID NO: 501505 - DNA, 201 bp, Homo sapiens
ctcggggctgggcagaggagggccctgtggctctgagagggtgcgctgaagcctgccaaatcctctgccccccgcagtatatccacgctgccggcatcatycacagagtgagtcccggtggagaagccgctcatcagccctcccccagtgcaatccccccgcctccacgtcccacctgtgaggatgtgatggggtctgggg

SEQ ID NO: 501506 - DNA, 201 bp, Homo sapiens
  misc_feature (1)...(201): n = A,T,C or G
ggctccggcggagctgtccttccagcttgtgtccattcttacctcactctggccggttcctacaccacggccaggaggacgcatttagcctcacgtccccntttaaatcgtccccgtctcttgggatcaaagccaaacttccacctggtgtgtgctgccctgccggctccctctggcctctcctcagcccctccctggcct

SEQ ID NO: 501507 - DNA, 201 bp, Homo sapiens
tcctgccctccccctggtctgggcccagcctgagggctggtggtctgggcacccggaccctacctacagggtgagatgctctggaccctcctgggtcatcygagccaccggtgccttgggagaacgagtccctgcgtccaccagcaaagtgccccgtccaccagcaaagtgccccgtcccccggttcctggccaccgctac

SEQ ID NO: 501508 - DNA, 201 bp, Homo sapiens
gtggggggctcctggcacggcctgtgtggacccaagtggggggctctgggcagggcctgtgtggacccgtgagttgggggctctgggcagggcctgtgtgracccgtgagttgggggctccgggtagggcctgtgtggaccccgtgggccctgtgcaggtggccaggctcagagtcctagatccccatccctgggatgcag

SEQ ID NO: 501509 - DNA, 201 bp, Homo sapiens; identical to SEQ ID NO: 350121

SEQ ID NO: 501510 - DNA, 201 bp, Homo sapiens
aagcactctcccgggcaccctccagctctcatgtccacagtccccgctgccccctggacaccccctctgttccctctcctcctccctccacattcttgccyatggctctggcccacgtggctccggcggagctgtccttccagcttgtgtccattcttacctcactctggccggttcctacaccacggccaggaggacgca

SEQ ID NO: 501511 - DNA, 201 bp, Homo sapiens
ccttgggagacgactcccccaagggccgttccccatcctccgccagccccgggaaggactcagccccttgactcggcgcctcagccaggccctggtcaggsaacacgacttggccaggcccaggggatcctccaggtctcacgccaagccttgcccccagccaggaagcccgcggtgagagcatgctcccggcgggaggat

SEQ ID NO: 501512 - DNA, 201 bp, Homo sapiens
gcagcctgctgtggggccgggcgggggtcgggccgtgggtccccaggggagaaggagagcaaggcctgtctctccttgggagacgactcccccaagggccrttccccatcctccgccagccccgggaaggactcagccccttgactcggcgcctcagccaggccctggtcagggaacacgacttggccaggcccaggggat

SEQ ID NO: 501513 - DNA, 201 bp, Homo sapiens
aatggaagcgtgagtggggggctcctggcacggcctgtgtggacccaagtggggggctctgggcagggcctgtgtggacccgtgagttgggggctctgggyagggcctgtgtgaacccgtgagttgggggctccgggtagggcctgtgtggaccccgtgggccctgtgcaggtggccaggctcagagtcctagatccccat

SEQ ID NO: 501514 - DNA, 201 bp, Homo sapiens
caaggccttgccccaggactgcagccttccccacggccccctgctcccacccacccactcacccacccgtgccttgccccatccagccaagcgctctgggrctttttttctttttttttcttttgagaccgagtttcgctcttgttgcccaggctggagtgcaatggcacgatctcagctcactgcaaccttcgcgtcctg

SEQ ID NO: 501515 - DNA, 201 bp, Homo sapiens
gcgcggggtgcccggccttcccgctaagcggtccgccccgcagctcggccgtggacggccgcaccggcgctaaggtggccatcaagaagctgtatcggccyttccagtccgagctgttcgccaagcgcgcctaccgcgagctgcgcctgctcaagcacatgcgccacgagaacgtgagtcgcgcggccccgctccgggaag

SEQ ID NO: 501516 - DNA, 201 bp, Homo sapiens
gatgaatggaagcgtgagtggggggctcctggcacggcctgtgtggacccaagtggggggctctgggcagggcctgtgtggacccgtgagttgggggctcygggcagggcctgtgtgaacccgtgagttgggggctccgggtagggcctgtgtggaccccgtgggccctgtgcaggtggccaggctcagagtcctagatcc

SEQ ID NO: 501517 - DNA, 201 bp, Homo sapiens
cgttgaccgcacactggatgaatggaagcgtgagtggggggctcctggcacggcctgtgtggacccaagtggggggctctgggcagggcctgtgtggaccygtgagttgggggctctgggcagggcctgtgtgaacccgtgagttgggggctccgggtagggcctgtgtggaccccgtgggccctgtgcaggtggccaggc

SEQ ID NO: 501518 - DNA, 201 bp, Homo sapiens
cctatgtggcccccccaggtgatcgggctgctggacgtattcactcctgatgagaccctggatgacttcacggacttgtgagtgccgacctgggctggccrctgggcacgaggggtgttgggcagctctgggcactggcttcaggttctaggttggcaatggggttctcttcctgcagcctgagtgggggatgcacaccgc

SEQ ID NO: 501519 - DNA, 201 bp, Homo sapiens
ccacagagtgagtcccggtggagaagccgctcatcagccctcccccagtgcaatccccccgcctccacgtcccacctgtgaggatgtgatggggtctgggkgctgagccacgccctatgcacagcccctggtgggaacctgcctgggtgcccaggtaccttggtctgcccttgaagggctgcagagagcaagggggccagg

SEQ ID NO: 501520 - DNA, 201 bp, Homo sapiens
ggcagtgaggaccaccttcaccttccacctgagaggggactctcgttgccaccttgaccttggctggggcttgcatcccaaggcatccatcagagcagacrcccgggttccatggaccctcctccccacggccatgcctctgctcttgggcgcccatcatggaggagcacctgaactttctggacaagacctctggccgac

SEQ ID NO: 501521 - DNA, 201 bp, Homo sapiens
cgcggccccgctccgggaaggcgccgcggcctcggcttggttcagctgggctgggttcccccacccggcaacccctcctccaggcagcctgctgtggggcsgggcgggggtcgggccgtgggtccccaggggagaaggagagcaaggcctgtctctccttgggagacgactcccccaagggccgttccccatcctccgcca

SEQ ID NO: 501522 - DNA, 201 bp, Homo sapiens; identical to SEQ ID NO: 241148

SEQ ID NO: 501523 - DNA, 201 bp, Homo sapiens; identical to SEQ ID NO: 241154

SEQ ID NO: 501524 - DNA, 201 bp, Homo sapiens
ttgcggcggggcgcgggaagaggcgggactctttgacgcggcggaggggtcgggcgacggccgacgcgccgccatctttggtccagtgcggtggcggcggyggcggtggcggcggcgactgctgcggtgaaggaggaggaggagccgagcgggcgctggcaccgaggcctgaccatggacgaggaatacgatgtgatcgtg

SEQ ID NO: 501525 - DNA, 201 bp, Homo sapiens
gcgctgggctctggctgtttccaggtgttctgttcctgctcctacgatgccaccacacactttgagacaacctgcaacgacatcaaagacatctacaaacscatggctggcacggcctttgactttgagaacatgaagcgcaaacagaacgacgtctttggagaagctgagcagtgattgtggccgcccccagcccctgct

SEQ ID NO: 501526 - DNA, 201 bp, Homo sapiens
ttgagaacatgaagcgcaaacagaacgacgtctttggagaagctgagcagtgattgtggccgcccccagcccctgctgccccagcctgtgtctgttctccycgagggctccagcatcctctgcttcccccaccacgttcccatcacccacctcattgatccactgaccaaatccttaaccctagcgatggcttgggagatg

SEQ ID NO: 501527 - DNA, 201 bp, Homo sapiens
ccccgcgatgatgcggccgccggcccatcctctggtcactgccatcttctgcgctccgctccccgaaaagccggcgccgtgcccaccccgctgctcccccmgcgacgtcgcctctgctcgttgccatgaccccatctccccgaagaggcccccttcctggccgcctcctgggctacccgggtccgacccccggcgccctcc

SEQ ID NO: 501528 - DNA, 201 bp, Homo sapiens; identical to SEQ ID NO: 241158

SEQ ID NO: 501529 - DNA, 201 bp, Homo sapiens
aaacggacccaaaccccagtgtgccctgccccatgcctttcctttagtggtgggaaacccttatcttgcaaagtgaatgtgtccccttccccaccctctaktgtatttcacagaaaacaaaacctcccaataaaacggttgaaacctgaatctctggatcttgatggttatctcccaaaagctgggtacctggcagggctt

SEQ ID NO: 501530 - DNA, 201 bp, Homo sapiens; identical to SEQ ID NO: 241160

SEQ ID NO: 501531 - DNA, 201 bp, Homo sapiens
cgaggcctgaccatggacgaggaatacgatgtgatcgtgctggggaccggtctcaccgtaagtgcggccccggcgcccctggccctgcgtcgtgccctcgycatcccccgcgatgatgcggccgccggcccatcctctggtcactgccatcttctgcgctccgctccccgaaaagccggcgccgtgcccaccccgctgctc

SEQ ID NO: 501532 - DNA, 201 bp, Homo sapiens; identical to SEQ ID NO: 241163

SEQ ID NO: 501533 - DNA, 201 bp, Homo sapiens; identical to SEQ ID NO: 241169

SEQ ID NO: 501534 - DNA, 201 bp, Homo sapiens
gcatagctgagtaggactagggccaggagtggagatggccgccttgagcattttcttggtagtatttcctcctttccaattcgtgctcttcatttacttcmctccatccttgggtgatgagggcacaaccccagtgcactgaagtacagaagtctccacacttgaaaaaacgagtctccacaaatgtgacttgctcagttc

SEQ ID NO: 501535 - DNA, 201 bp, Homo sapiens
tacggcttgggcgagctgccccagggttttgcaaggtgaggacatgggttttttcagttggcatagctgagtaggactagggccaggagtggagatggccrccttgagcattttcttggtagtatttcctcctttccaattcgtgctcttcatttacttcactccatccttgggtgatgagggcacaaccccagtgcactg

SEQ ID NO: 501536 - DNA, 201 bp, Homo sapiens
ggcctttggagatgcccccacctcccccccaccaactctcgcgtgttggagagaaggggccctcccagcacaaagttgcattcctcccccctaatttattytaatttattaactttgacccaccctttctgagcctgcagccttcccgtgtggcctgagggctgtcgagtgagctgccccagcccctcccagcccttgccc

SEQ ID NO: 501537 - DNA, 201 bp, Homo sapiens
gtttattgcagcactattcacaatagccaacatgtggaatcaacctaagcacccatcaacagatgtgtggataaagtatggaagatatatacacaatggcrtattattcagtcataaaaataaaatcctgttatttgcagcaacatggacagaactgaggccattatgttaagtgaaataaaccaagcaccaaaaggcaaa

SEQ ID NO: 501538 - DNA, 201 bp, Homo sapiens
aataagggacagggaaataaccaagatatgaaaagaagatacaaaactaaaagctttgagagaaaagaagtggttgaaatggaagacatttcagagagaartagttgaaatggaagacaggcaaagaagaaacaacatacaaattattgcagtccttaagggatatacacaaacaacaaaggaacagaactaatatttggg

SEQ ID NO: 501539 - DNA, 201 bp, Homo sapiens
tgaagatacatttgtggttaccagaggctgggaagggggagagaggaatgaaagagaattttcattatcactgaactgtagacttaaaaatgggaaagatrtaagtcatatatgtatcttttacctcaatacatttttttaaaaggaatatttctattgattgcaaggtcacaaggtgttctgttctaaaatttttattat

SEQ ID NO: 501540 - DNA, 201 bp, Homo sapiens
ccttggtaaaataaccagtttttccaattgtgttctgttgcaaaagaaaacagattcttattgtacttatacaaacaactatattgccatcaattaagaayattcacaactagttttcaaattctagagaaatcaggtagagagaaacaaacatgctccaaattttgttcacaggagtatactgtactcaatttttaaaag

SEQ ID NO: 501541 - DNA, 201 bp, Homo sapiens
acatatgtatacatctgccatgttggtgtgctgcacccattaactcgtcatttacattaggtatgtttcctaacgctatccctcccctctgcccccacccmacgacaggccctggtgtgtgatgttccccatcctgtgtccaagtgttctcattgttcaattcccacctatgagtgagaacatgcagtgtttggttttctg

SEQ ID NO: 501542 - DNA, 201 bp, Homo sapiens
agaataatacccctttaatatgttctcacacacaacctttttacaagattaatttttcacaaacctccacaacttgctcgaatcttcagctttatcctatctaatttaaaacaattcttcaaccctctcaacaaggcaaaaagatattcacattcccatgactttttataatcttttcccaaagattagttaagtcacatg

SEQ ID NO: 501543 - DNA, 201 bp, Homo sapiens
tcccatgactttttataatcttttcccaaagattagttaagtcacatgaactaaaaggcattacactttttacttttctgacaaaatgttttatttaagcrcttattatttttaagccagttaaagcccttttatatcacacacaccacacacataaatacacagacaaacaaaagaagatccagtagttgtaagattttt

SEQ ID NO: 501544 - DNA, 201 bp, Homo sapiens
atgttctcacacacaacctttttacaagattaatttttcacaaacctccacaacttgctcgaatcttcagctttatcctatctaatttaaaacaattcttyaaccctctcaacaaggcaaaaagatattcacattcccatgactttttataatcttttcccaaagattagttaagtcacatgaactaaaaggcattacact

SEQ ID NO: 501545 - DNA, 201 bp, Homo sapiens
gagcaactggaaggatgaaattaccatgaactgaaatagaaaatgctctgagtgaagcaggtttggacaagttaaatttgatgcatctactttagttattmaagtggaattgtggagtagacagctggatacatgaatccagtgttcaggaaagagatccaaactgaggacataaattatggagttcttggcatctggctg

SEQ ID NO: 501546 - DNA, 201 bp, Homo sapiens
tatttttgcatcattttacatcattgtatgttgatgaaaatgatgtataatttttgtttcttgtaatagattttgtcaggtttttgtatttatagtatgcyggtcactgtaaatgaattaagtgcacctctttttctgttttatggcagcatttgtgtaggattttttttttttttttaatgtttagaagttatctgggcc

SEQ ID NO: 501547 - DNA, 201 bp, Homo sapiens
ggattggaagaattaatactgttaaaatgaaaatactacccaaagcaatttacagattcaatacaatttgtatcaaaataccaatgacattcttcacagawataagggggaaaaatcctaaaaatttatatgaacccgcaaaagaccctgagtaaccaaagcaatcttgagcaaaatgaacaaagctggaggcatcacact

SEQ ID NO: 501548 - DNA, 201 bp, Homo sapiens
cctaatcttgatgcctgacaagtttttagtttctaagacttacttattcattcaacaaatatttactgtgttgatatcatttgtaaggcgctattccatgmgctggggaatatatcagtgaataaaacataaaaatccatgacctcctagaatttaaattctagttggggaagacagacaataaataaatctatagtatgt

SEQ ID NO: 501549 - DNA, 201 bp, Homo sapiens
taaaatgaatttcgatttttgaagtatattgggaatttcattaggacaaagcttgatctaatttggtaattatttggggtgcacatgaaaaaaatgtgtaktttgcaatggttgaacgcagtatttttatgtatggcagctgtgtctagtttgttaattatagtcttccatatccttcctgcttctgttgtctgtttattc

SEQ ID NO: 501550 - DNA, 201 bp, Homo sapiens
ttaaaatgagaggaactttggaaaatacacaaacaaatggaaattaaacaacatgctcctaagcaaccaatgggtcaaagaagcaagtaagaaggaaattraaaattttcttaaatgaaaagggaaatacaacatagcaaagtgtatggggtatggcaaaagcaatactgaaagggaagtttatagcaataaatgcgtata

SEQ ID NO: 501551 - DNA, 201 bp, Homo sapiens
attaagtgagctagggaggacatggtggagtaggttggggtggggggagtttaggacatgttaaatttgagatgtgtgttagaaatcctagttggagatgmgtagtaggcagttggatgaataaatctggagttcaagggaaaagtctagattgggaacacaaatttgagagttatcagcatttagatttaaaagccagga

SEQ ID NO: 501552 - DNA, 201 bp, Homo sapiens
tgcaaataagacaacttcaaggcatataataatcaaactctcaaaggtcaaagacaaagagaagatcctaaaagcaatgagagataagaagcaaataacayaaaggagctccaattcatggggcaacagacttctccacagaaaccatgcaggccaggagggagtagaacaacattttcaaggcactcaaacaacaccaac

SEQ ID NO: 501553 - DNA, 201 bp, Homo sapiens
ctggattgacatagtgagctgagtcctgtggactcaaggcaggtagtggtggggaggctgagtattgagggttaggcaggtgcaggtgacagagttttttkttttttttttttttttttttttttttcagatctcttcagatggaggcaaggaggcttgggaaggaaatggaggcatggggaggttggtcttacatggctc

SEQ ID NO: 501554 - DNA, 201 bp, Homo sapiens
ggggaagacagacaataaataaatctatagtatgttagatagtgatagatgttgagggaaggagctacagttttgtttcgttttgttttgttttgttttttgtttttttgtttttgagacggagtctcactctgtcacccaggctggagtgccatggtttgatctcactcagctcactgcagcctccacctcctgggttca

SEQ ID NO: 501555 - DNA, 201 bp, Homo sapiens
catctcacacctcaacatgttttgcacagccaaagttccaaggaaaatgaagggctacctcatagtaaagaaaaacattacatacacaggggaacaaggtmtcagcagaaacagcaatcagacacagaatataaaatgtttaatgtttcaataaaggagaggcttgaaaatgaatgaagatgttgagtggaaaaagtcaca

SEQ ID NO: 501556 - DNA, 201 bp, Homo sapiens
tcttgatcaaattaggtagtagtttatttattaacttttccaaaaaatcagtactttgatttactaattggatctatttttctgttctctacttcactgayttctgcttcatatttattatttccttctttgtgttttctttgatttactttattattgttgttttcccattaaaatttattgtttttattctttcattta

SEQ ID NO: 501557 - DNA, 201 bp, Homo sapiens
tgctctttgtttcctaaatattctttctttctttctttctttctttctttctttctttctttctttctttctttctttctttctctttctttctttctttccttccttccttccttctttctatctttctttccttctttcttgagacaagagtcttgctaagttacccaggctggtcttcaactcctaggctcaagcgat

SEQ ID NO: 501558 - DNA, 201 bp, Homo sapiens
ttcttgccacacggcctcctttacagcatggccacttacttcaaagccagctgtggagaatctctagagcaagtcctgtagcaggatagagtcttatatarcaaaatgtcatctcggaagtgagacatctcatcacctttgccagtggtctccttgtttattgtagaggatctatagtatgttttaatgtctggtagggct

SEQ ID NO: 501559 - DNA, 201 bp, Homo sapiens
ctgctctttgtttcctaaatattctttctttctttctttctttctttctttctttctttctttctttctttctttctttctttctctttctttctttctttccttccttccttccttctttctatctttctttccttctttcttgagacaagagtcttgctaagttacccaggctggtcttcaactcctaggctcaagcga

SEQ ID NO: 501560 - DNA, 201 bp, Homo sapiens
tcttcttcttgttgactagaggctgtccttagcttcttgccacacggcctcctttacagcatggccacttacttcaaagccagctgtggagaatctctagmgcaagtcctgtagcaggatagagtcttatataacaaaatgtcatctcggaagtgagacatctcatcacctttgccagtggtctccttgtttattgtagag

SEQ ID NO: 501561 - DNA, 201 bp, Homo sapiens
gctgctctttgtttcctaaatattctttctttctttctttctttctttctttctttctttctttctttctttctttctttctttctctttctttctttctttccttccttccttccttctttctatctttctttccttctttcttgagacaagagtcttgctaagttacccaggctggtcttcaactcctaggctcaagcg

SEQ ID NO: 501562 - DNA, 201 bp, Homo sapiens
tgattttagtatgccattataaaatatatccttaaaaaaatttctgcctgaattagtatttgagcacttctgataattcaataaaatgtatattattgatrtgtaacaaccacagtatgatttgggtaagagttgaagaaatatgtcctttggacaggctatttttggggggttggagaattgtctggatttaaattgatt

SEQ ID NO: 501563 - DNA, 201 bp, Homo sapiens
aattttgtaatattaaacattcctataccaattaaaaatttttactgggagcctattatttcaatatatgtgtgtagatccctaaggttttggcgggtaartcaattccaggtaaaagcacactgaagcaaaagaattacaaaggtttagagttgcaggatttgttagaagactggtgagacattttttatctttgtgctc

SEQ ID NO: 501564 - DNA, 201 bp, Homo sapiens
cctagtgggtatgaagtgatattgcatggtggttttgatttgcaatcccctgataactaatgatgttgagcgtcttttcatgtgcttactggccatctgtrtatcttcctggagaaatgcctgttgagatcctttgcccatttttcagttgggtcatttgccttttaatgagttgtaagttaaactttattttgaactaat

SEQ ID NO: 501565 - DNA, 201 bp, Homo sapiens
tttttagtatattcatcaatatgtgcaaccattaccagagtcaattttagaacatttctttacttaaaaagaaaccctgtaccctttagttatcactttcytatcctcccaattctaggcaaccactaatcaacttcttgtctctctagatttccctgttctagacatttcatatgaatggaataatagaatatgtggtct

SEQ ID NO: 501566 - DNA, 201 bp, Homo sapiens
gagaagtagttgaaatggaagacaggcaaagaagaaacaacatacaaattattgcagtccttaagggatatacacaaacaacaaaggaacagaactaatakttgggaccataatccaagcatgtttcaggatataaaagaatatataaatctatataccaaaaggactcatcaattatgtgggaaaattaatccagaattg

SEQ ID NO: 501567 - DNA, 201 bp, Homo sapiens
aaatttgagacaggtctcagttaatttagaaagtttattttgccaaagttaaggactcgggcctgtgacacagcctcaggaagtcctgatgacatgtgccyaaggttgtcggggcacagcttggttttatacattttaaggaggcatgagacgtcaatcaatatatgtaagaagtacattggttccacccagaaaggtggg

SEQ ID NO: 501568 - DNA, 201 bp, Homo sapiens
gtgggaggaaagttttgtcctgagcagtttccaccttgacttttccctttagcttagtaattttgaggccccaagattttcctttcacaaatacaaacccyccctccaacctcattcccctgtagctattgttacttctttcttgatcctcaaagaactgtctattctcatctctgcatcctctctgctgcaaaaggaatg

SEQ ID NO: 501569 - DNA, 201 bp, Homo sapiens
accacttaactaaaccttgtagaagttacttaaatttttggtgctttcttggttccacccagaaaggtggggacaatttcctcaactttaaaaaggaaatratggtacctaccacataggatcattttgagaactaaaaaggcatttaaagggcttgacacagtgtctaggacaagataagcccttaataaatattatctg

SEQ ID NO: 501570 - DNA, 201 bp, Homo sapiens
cccagaaatgctttaacccacccaatattcttttctgcttctatcagcctgggttaattttccttggtgcaattcatcctgccagactggtacagatgatyaggtcagatggtttcataagatgtaagtacactccttctactttgttttattgctttattgatttgcagtgttctttacttggctcctgctcagggactg

SEQ ID NO: 501571 - DNA, 201 bp, Homo sapiens
gtttatttttgttaacttgtttcctcaagtggtatagaaatttcctcccaacagctattctactggtagttgcctttaaatttctcataaatatttatcaraaatattttatttttcttattataaattattttaaaatatctgtgatttccttggaatacaagacagctctttactgtttgtggacgatattactcttca

SEQ ID NO: 501572 - DNA, 201 bp, Homo sapiens
ccagggctcctgcctctatccattataccaagaggcaaaaggcaaataactaaaaagcaagctgagatcacgttaaatttaacccgactaattatactttyaggtttatggttgtatatgatactaatttacattttcaagaggttttacaatttacaaagcagttaaatcctttcaactgctctgagataaggtagcact

SEQ ID NO: 501573 - DNA, 201 bp, Homo sapiens
gactacaggcgcccgccaccacgcccggctaattttttgtatttttagcagagacggggtttcactgtgttagccaggatggtctcgctctcctgacctcrtgatccgcccgcctcggccttccaaagtgctggcattacaggcgtgagccaccgcgcccggctagcacttttttttttaaagaggtcttggtattcatgt

SEQ ID NO: 501574 - DNA, 201 bp, Homo sapiens
atgttcaatttatggaaagacagaataatacccctttaatatgttctcacacacaacctttttacaagattaatttttcacaaacctccacaacttgctcraatcttcagctttatcctatctaatttaaaacaattcttcaaccctctcaacaaggcaaaaagatattcacattcccatgactttttataatcttttccc

SEQ ID NO: 501575 - DNA, 201 bp, Homo sapiens
taatgaatgtcagaggagagtttccttttccatcaacgcttcaggagacagcggaccgccaccaacacagggcggaagagcacccctgtcacgcagactgkgccgcccccggctcgcctgggcacgccccttcctgccctagcagcggcgtcccgccctttccgcctttcacttcctagtaaccgccctcccttgctccat

SEQ ID NO: 501576 - DNA, 201 bp, Homo sapiens
tggctgaaggcgaaggggtgatggaagactagggagaacttggaacttagaacttgagctgcttgatgtacaggtaggatttcagtagagaatagggacartgattttttagatgaggtatccaattcaggagaattggatgtggaactgagtatttcgtatttagagatagtcgagatgctggccggacaagtgtcacag

SEQ ID NO: 501577 - DNA, 201 bp, Homo sapiens
aaaaggatcattgtggttgctaggttaagaatagatagtcggggagaaaatggaagcagggacaccattcacgtagctatagcaaataatgtacatgggasagaatggcaacttgaatcaaagtggtagcagtagaaatagtggtaagtagcccaggtggatatattgtgaaagctgggtcagcataattgatcatagaat

SEQ ID NO: 501578 - DNA, 201 bp, Homo sapiens
agctgctctttgtttcctaaatattctttctttctttctttctttctttctttctttctttctttctttctttctttctttctttctctttctttctttctttccttccttccttccttctttctatctttctttccttctttcttgagacaagagtcttgctaagttacccaggctggtcttcaactcctaggctcaagc

SEQ ID NO: 501579 - DNA, 201 bp, Homo sapiens
tcttcttttaagagctgctctttgtttcctaaatattctttctttctttctttctttctttctttctttctttctttctttctttctttctttctttctctttctttctttctttccttccttccttccttctttctatctttctttccttctttcttgagacaagagtcttgctaagttacccaggctggtcttcaactc

SEQ ID NO: 501580 - DNA, 201 bp, Homo sapiens
ctcttcttttaagagctgctctttgtttcctaaatattctttctttctttctttctttctttctttctttctttctttctttctttctttctttctttctytttctttctttctttccttccttccttccttctttctatctttctttccttctttcttgagacaagagtcttgctaagttacccaggctggtcttcaact

SEQ ID NO: 501581 - DNA, 201 bp, Homo sapiens
gagtgtcaggttaaaaaggtaaataaaatgacatctaagtcaaagaaaaggaagacctccatagatccttctccagagagccatgaagtaatggaaagaayacttgacagcgttcagggaaagtctactgtatctgaacaagctgataaggaaaacaatttggagaatgagaaaatggtcaaaaataagccagacttttac

SEQ ID NO: 501582 - DNA, 201 bp, Homo sapiens
cctcttcttttaagagctgctctttgtttcctaaatattctttctttctttctttctttctttctttctttctttctttctttctttctttctttctttctctttctttctttctttccttccttccttccttctttctatctttctttccttctttcttgagacaagagtcttgctaagttacccaggctggtcttcaac

SEQ ID NO: 501583 - DNA, 201 bp, Homo sapiens
cagaaataatttctgaagtgaatcatttagataatgacaaaagtatagaatacacagttaaaagtcactcactctttttaacgcaaaaagataaggaaatmatccccggaaacctagaagacccaagtgagtttgaaacacctgctctttctaccaaagatagtggaaacctgtatgattctgagattcaaaatgttttgg

SEQ ID NO: 501584 - DNA, 201 bp, Homo sapiens
gtcttccctcttcttttaagagctgctctttgtttcctaaatattctttctttctttctttctttctttctttctttctttctttctttctttctttctttctttctctttctttctttctttccttccttccttccttctttctatctttctttccttctttcttgagacaagagtcttgctaagttacccaggctggtc

SEQ ID NO: 501585 - DNA, 201 bp, Homo sapiens
tgtcttccctcttcttttaagagctgctctttgtttcctaaatattctttctttctttctttctttctttctttctttctttctttctttctttctttctttctttctctttctttctttctttccttccttccttccttctttctatctttctttccttctttcttgagacaagagtcttgctaagttacccaggctggt

SEQ ID NO: 501586 - DNA, 201 bp, Homo sapiens
acttggccttcgaggttccaccgctaagtgacttcccctgaagatttgtcttccctcttcttttaagagctgctctttgtttcctaaatattctttctttctttctttctttctttctttctttctttctttctttctttctttctttctttctctttctttctttctttccttccttccttccttctttctatctttctt

SEQ ID NO: 501587 - DNA, 201 bp, Homo sapiens
aacttggccttcgaggttccaccgctaagtgacttcccctgaagatttgtcttccctcttcttttaagagctgctctttgtttcctaaatattctttctttctttctttctttctttctttctttctttctttctttctttctttctttctttctctttctttctttctttccttccttccttccttctttctatctttct

SEQ ID NO: 501588 - DNA, 201 bp, Homo sapiens
caacttggccttcgaggttccaccgctaagtgacttcccctgaagatttgtcttccctcttcttttaagagctgctctttgtttcctaaatattctttctttctttctttctttctttctttctttctttctttctttctttctttctttctttctctttctttctttctttccttccttccttccttctttctatctttc

SEQ ID NO: 501589 - DNA, 201 bp, Homo sapiens
ccaacttggccttcgaggttccaccgctaagtgacttcccctgaagatttgtcttccctcttcttttaagagctgctctttgtttcctaaatattctttctttctttctttctttctttctttctttctttctttctttctttctttctttctttctctttctttctttctttccttccttccttccttctttctatcttt

SEQ ID NO: 501590 - DNA, 201 bp, Homo sapiens
ccgtgggctgcacccactgtcctgtaccaactctccaacaagccccactgagatgaacctggtacctcagttggaaatgcagaaatcacccgtcttctgcrtcgttcatgctgggtgctatagactggagctgttcctatttggtcatcttggaacctctcttattcttttaatgcctgtagcatctgtagtgagaacctt

SEQ ID NO: 501591 - DNA, 201 bp, Homo sapiens
ttagtatgccattataaaatatatccttaaaaaaatttctgcctgaattagtatttgagcacttctgataattcaataaaatgtatattattgatatgtarcaaccacagtatgatttgggtaagagttgaagaaatatgtcctttggacaggctatttttggggggttggagaattgtctggatttaaattgatttgctt

SEQ ID NO: 501592 - DNA, 201 bp, Homo sapiens
gtggattgcatgaggccaggagttcaagaccagcctggccaacatggtgaaaccccatctccactaaaaatgcaaaaagtagctgggcatggtggcgtgcrcctgtagtcccagctgctcgggaggctgaggcaggagaatcaccttgaactcggaggcagatgttgcagtgagctgagattataccactgcactccaacc

SEQ ID NO: 501593 - DNA, 201 bp, Homo sapiens
tcacacctgtaatcccagcactgtgggaggctgaggcaggtggattgcatgaggccaggagttcaagaccagcctggccaacatggtgaaaccccatctcyactaaaaatgcaaaaagtagctgggcatggtggcgtgcacctgtagtcccagctgctcgggaggctgaggcaggagaatcaccttgaactcggaggcaga

SEQ ID NO: 501594 - DNA, 201 bp, Homo sapiens
gggaccacttgtattttcttaaatgtttcattttcatgcatttacacatgccattctttcttcctggaatgcccttcctaatcttgatgcctgacaagttyttagtttctaagacttacttattcattcaacaaatatttactgtgttgatatcatttgtaaggcgctattccatgagctggggaatatatcagtgaataa

SEQ ID NO: 501595 - DNA, 201 bp, Homo sapiens
tccaaattttgttcacaggagtatactgtactcaatttttaaaagctgtaaatagctcaaaagaaaaattttgttgacactgaaaaactaaagatcatcarcgtttcaagcaaaaagccaaaaaagattacttcagacttacattggttcagtccatgcagttaaatactgtcctatttgatattcatgaacatttccact

SEQ ID NO: 501596 - DNA, 201 bp, Homo sapiens
tgtgtagcacttaggggattcgagtgaggggaatgaacgtgacccaggagttgagggattcttgccatgattgataaagtgagctgagtcctggattgacrtagtgagctgagtcctgtggactcaaggcaggtagtggtggggaggctgagtattgagggttaggcaggtgcaggtgacagagttttttgtttttttttt

SEQ ID NO: 501597 - DNA, 201 bp, Homo sapiens
tcaaaaacaactgatgagactagaatccaataacaggtgtatcatagtgcttgaaacataattttcttctctctccagtatcacatttttactaaagacawatcataatagaactgatttgtttgcaaaaataagctttagtcttacacttagcctgattatttgtataaagtgcagcaagaataatttttttaaacataa

SEQ ID NO: 501598 - DNA, 201 bp, Homo sapiens
tatgctaatactgtactgtctcaattactgtaaccctcctaacttttttctttttcaaagttttctttgtttttttagctattctaggtcttctgcatttycatatgaattttaaaatcagcttgataatttggcaccattcccttgtttctattacagcttagctctgtaataaaaaacatggttgtgtgttgcctaatt

SEQ ID NO: 501599 - DNA, 201 bp, Homo sapiens
ctggatgatgggtagccttgaggaggtgggctcacactgggtgcttatatatacgtgtgtatatatataatgtatatgtgtgtgtgtgtgtgtgtgtgtgkatacatgtgactttatataggcaatcttatgaagacactgagcactttggaaatggaatttcatgaattctggagttaaggcatcagaagggcaaaaaaa

SEQ ID NO: 501600 - DNA, 201 bp, Homo sapiens
cattcatactttcagattttatataaagtttagcaaatacttaatgcacaaagtatattaagtcatgattgttactttttaaaatgtatttatcagttatmctttttcttttattaatcaatactatgatttttttttctttcacttcagtgatggagtgcccagtgatggaaactggctcactttttacctcaggaatta

SEQ ID NO: 501601 - DNA, 201 bp, Homo sapiens
cctatctccttcaactcctgttagttgggtggttttgatgatttaccctaagtgtgacacagttgaattttcagcagtgaggctgcagtgacccaagacakctactttctacagcgcagaaaaaaactaccaacatgacttttctggaacagatgtagtaagagtagcaggttgttctggcatgttgtggcaactggatga

SEQ ID NO: 501602 - DNA, 201 bp, Homo sapiens
aaaactggggaaaaaaatagaggctggtcctactttatactgttttctaaaacaaattctaaatttcccaaatgcttttcatgtggttctttttggagaawtcagagggctgaggtcaacatctagattaaggaaaagtaaaaactggacagcaggtagatggagaagctggaggtgaaggcacagtatacattcttggta

SEQ ID NO: 501603 - DNA, 201 bp, Homo sapiens
cttgcatcattaattttttccctcccttctggattattcccatcaggatgcaaaaatgttatcatctctcatcttaaaaaataaataaataaacctcttayttcacctacttccccgctactatctcagctctcttcttgcctttacagcaaagctttttgagagatttattcactatctctagtttctcttgatcccaag

SEQ ID NO: 501604 - DNA, 201 bp, Homo sapiens
agtagctttttgttgactttatttatcctgtggatattggtccccttaggaaaatgtctttctttcttttgtgtttagttttattaaattatttttccttmgaaagttatctgtttcatctaagtttttaaatggatgttcacagagttgaccagagtagtctgtcattattcttttaattttgtctgtgttgcatttccc

SEQ ID NO: 501605 - DNA, 201 bp, Homo sapiens
aaaacattattggctggagacactgcccttctcagggctagccaatttttagagatagcaagggaccagccaggagcatgtcttttgttttagtctgtttkctgctgctataacagaataccacatacagggtaatttattgttttcttttcttttttcatttgagatttcattctctaaaaagactgggtaatttataaa

SEQ ID NO: 501606 - DNA, 201 bp, Homo sapiens
tcaaggctgcagtgagccatgattgtgccactgcacagagaaagatcctgactcaaaaaattaaaaataaaaataagtaaatagaacacacacaaaaaaawttttttttaaagtgtcttttgcaatcaatttttctctgatcagtgctttcaatgtatcttgattctgatacatagtgttttcaatgtcgtttttaagttt

SEQ ID NO: 501607 - DNA, 201 bp, Homo sapiens
ctcatgggtattttaaagcaataaccagcagatggcagtaatataaggcagggtaaaagaaaattaaaagtgaaattaaggaccaaggggcctttttttttcttttttcttttttttttaaacagctattgagagatataattcacacaatttaaactgtacaatttagaccagatgtggtggctcacacctgtaatccca

SEQ ID NO: 501608 - DNA, 201 bp, Homo sapiens
aaagttaagctgaggatttagtataattagtgcatgaactatagtgctctgttgtctattagaagcaaatattttgtagggagttgtccatctcacacctmaacatgttttgcacagccaaagttccaaggaaaatgaagggctacctcatagtaaagaaaaacattacatacacaggggaacaaggtatcagcagaaaca

SEQ ID NO: 501609 - DNA, 201 bp, Homo sapiens
gtttaagcagacctcctttgacactacactggtggtaaggggaggtgctgcctactgccaagtggggactgaagtttagacttcccattcagcctctgttracaacactgtggtgggcataactgatgagtgggtctgagagttcaggctgacaccactatggctggaacagggaagggcgcacctcattactttcatggc

SEQ ID NO: 501610 - DNA, 201 bp, Homo sapiens
aattgcttgttgaagcatttttatgatacttgttttaaaatctttgtcagataattccaacatttgtgtcatctcagtgatgatatctattgtcctttctyattcaaatttagagttacctgatttttggtatgacaagtgattgatttttgattgtatcttggacattttagatgcattataagacattggatcttattt

SEQ ID NO: 501611 - DNA, 201 bp, Homo sapiens
acttcccattcagcctctgttgacaacactgtggtgggcataactgatgagtgggtctgagagttcaggctgacaccactatggctggaacagggaagggygcacctcattactttcatggcctctgctgacatgaggatgaggaggataatgaaggggggaggttgttactactgaagagtgatgaaaatcctagttctt

SEQ ID NO: 501612 - DNA, 201 bp, Homo sapiens
acaaattcctaaccctctgttatttttttcagtctcttttctttcttgttcagtttgagtaatttctattgttctatctccaagttcagggatttctttcycccctttttttctcggttttgctgttgagcccatttaatttattttattttatttggttattacatttttcagttctgagctccattcggctctttgtat

SEQ ID NO: 501613 - DNA, 201 bp, Homo sapiens
gaaggggggaggttgttactactgaagagtgatgaaaatcctagttctttattaaaccacttctatccccaccatagaggagagggaggggaactccttcytatcactgaatggggatgtatagcatatagacattttattttctgtgtattatgatgtttttacatcttttaaaacattattggctggagacactgccct

SEQ ID NO: 501614 - DNA, 201 bp, Homo sapiens
aatatggggggagtggaagaaaaagtagtctccacccaagaagtctacagtggaagcaggacctctaagaacagacaactttcagttaaaaaaaaaaaaaattaagcaatagtaacattttagccaggtgtggtggcatgtggctataatcccagctacccaggaggctgaggcaggagaatcgcttgaacccaggaggtg

SEQ ID NO: 501615 - DNA, 201 bp, Homo sapiens
ttgatagcattgaccaaaatcctgttgtctcttttagaaatgttctttctattatatataacatatagatttaatgcttttacttaagtgcacaagtaaakgcacttatttattgaaatgctatctgtgccatagtaaaaaattctcatatttactgtatcactttcaattcattgtagtttgttccattgacttgcctat

SEQ ID NO: 501616 - DNA, 201 bp, Homo sapiens
agttgaagaaatatgtcctttggacaggctatttttggggggttggagaattgtctggatttaaattgatttgcttttggttagttcccagttctactachgtcatattttaaattgtagcctgatacttataatttttaaaatttgtggcctgtgatttgcaagccatttttgttaccccatttgtttatttcctacctt

SEQ ID NO: 501617 - DNA, 201 bp, Homo sapiens
gtttttcctttctgaaaatgtgtgtgtgtgtgtgtgtgtgtgtgtgtgtgtgggcatatgtatatgtatataatatatacacacacacatatatacacacatatatatggtatacatataatgtatacagtatacatatatacatgtgtgtatatatttacacacatacaaacatatattaatatatgtatatataattta

SEQ ID NO: 501618 - DNA, 201 bp, Homo sapiens
cggcagtgtaagataagctggcttctcttgccccaacaaaacaaaacaaaacaaaacaaaatatacagtgccaagatctaccaccatcaacagcccagagmtcaagctagttgagatacttcctggggccaaaaagaggtggaaaaactctgagcagatggtaggagaactgcacttccacatgtgcaatgcccctccctc

SEQ ID NO: 501619 - DNA, 201 bp, Homo sapiens
tgtttttcctttctgaaaatgtgtgtgtgtgtgtgtgtgtgtgtgtgtgtgtgggcatatgtatatgtatataatatatacacacacacatatatacacacatatatatggtatacatataatgtatacagtatacatatatacatgtgtgtatatatttacacacatacaaacatatattaatatatgtatatataattt

SEQ ID NO: 501620 - DNA, 201 bp, Homo sapiens
aaaggagctccaattcatggggcaacagacttctccacagaaaccatgcaggccaggagggagtagaacaacattttcaaggcactcaaacaacaccaacracaaaaaactgacacccaagaatattgtgtccaacgaattgtcatgcaaatttaaaggagagctaaagtctttcacggataaacaaaagctgaggaaatt

SEQ ID NO: 501621 - DNA, 201 bp, Homo sapiens
tttaaaatgtatttatcagttatcctttttcttttattaatcaatactatgatttttttttctttcacttcagtgatggagtgcccagtgatggaaactgrctcactttttacctcaggaattaagagacatttgaaagacaaaagaatttcaaagactactaagttgaatgtttctcttgcttcaaaaataaaaacaaaa

SEQ ID NO: 501622 - DNA, 201 bp, Homo sapiens
cagaatttatagtcattatgttaggtagggttggtctgatagtaacttttagccattaccagaagcagaacctctccgtttatttttgttaacttgtttcctcaagtggtatagaaatttcctcccaacagctattctactggtagttgcctttaaatttctcataaatatttatcagaaatattttatttttcttattat

SEQ ID NO: 501623 - DNA, 201 bp, Homo sapiens
atagatgattaatgtaggcttaaatgaaaaaaataatcatttacctttttggattataccttaagccacttttgattacattcatactttcagattttatrtaaagtttagcaaatacttaatgcacaaagtatattaagtcatgattgttactttttaaaatgtatttatcagttatcctttttcttttattaatcaata

SEQ ID NO: 501624 - DNA, 201 bp, Homo sapiens
aaacaagagcaagagtagctgtactcgtagcagataagataaactacaaagactgtaaaaactggcagtaaaggagggtcactatatgattaaggggtcarttcaaccagaggatataacaattataaatatctatgcactcaacactgcagctccatataaagccaacattactagatgtaaagggagagagagactgca

SEQ ID NO: 501625 - DNA, 201 bp, Homo sapiens
tattttgtccagaatttatagtcattatgttaggtagggttggtctgatagtaacttttagccattaccagaagcagaacctctccgtttatttttgttaacttgtttcctcaagtggtatagaaatttcctcccaacagctattctactggtagttgcctttaaatttctcataaatatttatcagaaatattttatttt

SEQ ID NO: 501626 - DNA, 201 bp, Homo sapiens
atgtgtagcacttaggggattcgagtgaggggaatgaacgtgacccaggagttgagggattcttgccatgattgataaagtgagctgagtcctggattgayatagtgagctgagtcctgtggactcaaggcaggtagtggtggggaggctgagtattgagggttaggcaggtgcaggtgacagagttttttgttttttttt

SEQ ID NO: 501627 - DNA, 201 bp, Homo sapiens
gtcaattcaaccagaggatataacaattataaatatctatgcactcaacactgcagctccatataaagccaacattactagatgtaaagggagagagagaytgcaatacagtaatagtagggggctttaacatcccactctcagtaatagacagatcatccagacagaaaatcaacaaagaaacagcataaactgcacact

SEQ ID NO: 501628 - DNA, 201 bp, Homo sapiens
cttaccacaggaccagatgaggaatgtgtagcacttaggggattcgagtgaggggaatgaacgtgacccaggagttgagggattcttgccatgattgatawagtgagctgagtcctggattgacatagtgagctgagtcctgtggactcaaggcaggtagtggtggggaggctgagtattgagggttaggcaggtgcaggt

SEQ ID NO: 501629 - DNA, 201 bp, Homo sapiens
ctggcttttttcacttagcatattgttttcaaggttcattcatgttgtagcacatatgagcatttcattactttttatggagagacaataattctgttgtrtggatataccatgttttgtttatccattcatcaatcaatggacatttgtattgtttccactttttggctattatgaataatgctgcaataaacattcatg

SEQ ID NO: 501630 - DNA, 201 bp, Homo sapiens
tgcagaacagcaaatattgcagaatggcaaatgttgctgtctgatcgttcctctggaagcttcatctcagaggggcactcggccatatgaggtgtcagtcrgtccctactgggaggtgtctcccagttaggctactcaggggtcagggacccacttgaggcgatagtctgtccattctcagatctcaaaccctgggctggg

SEQ ID NO: 501631 - DNA, 201 bp, Homo sapiens
ttgaacatcctcctttagctcggagaagtttgttattacagatcgtctaaaaccttcttctctccactcatcaaagtcattctccattcagctttgttccrtggctggcaaggagctgcattccttttgaggggaagaggtgctctaatttttagaattttcagctttctgctctggtttctccccatctttgtggtttta

SEQ ID NO: 501632 - DNA, 201 bp, Homo sapiens
tgggagtctaagtctctttgtaggtctctaaggacttgctttatgaatctgggtgctcctgtattggttgcatatatatttaggatggttagctcttcttkttgaattgatccctttaccattatgtaatggccttctttgtctcttttgatctttgttggtttaaagtctgttttatcagagactaggattgcaacccct

SEQ ID NO: 501633 - DNA, 201 bp, Homo sapiens
ttgtgatttctgttcttttacatttgctgaggagtgctttacttccaactgtgtggtcaattttggaataagtgtgatgtggtgctgagaaaaatatataktctgttgatttggagtggagagttctgtagatgtctattaggtctgcttggtgcagagctgaattcaattcctggatatccttgttaattttctgtctca

SEQ ID NO: 501634 - DNA, 201 bp, Homo sapiens
cacccacagtggcctaatactgttactctggaagaaatatttagaaataaatggacctaatgagcttttctcaatatcttagcttatgatttgaaagataycatatatttacttagttttaccctctttttttgtagatatgaaaattgggggcctagataggtatagagactctttgaagatcatcaccagttaattaat

SEQ ID NO: 501635 - DNA, 201 bp, Homo sapiens
agaacagagattcatttggttcacagttctggaggctgggaagtccaagagcatgatgctgacatctggcatgtgtcatcccatgatagaaggtggaagggcaagaaagcatgcaagacagaaaaggagaccagactcctgtaacccactcctgcaataacagcattaatccattcatgagggcagagccctcatgaccta

SEQ ID NO: 501636 - DNA, 201 bp, Homo sapiens
gaaccccaagggacggtcttgtgtgttcagaggctggttttacaggtgaagagaagaaacagccgcagaagttgcgattgtccaaggtcacttaataagtrgcaagaattaggatgttaagtgttctcacccccaggtcagtgcccatccctccaaacagggctgctcagtgccaacgtgtgttaatatattgcacttgga

SEQ ID NO: 501637 - DNA, 201 bp, Homo sapiens
cgattgtccaaggtcacttaataagtggcaagaattaggatgttaagtgttctcacccccaggtcagtgcccatccctccaaacagggctgctcagtgccmacgtgtgttaatatattgcacttggataagtctatctggatagtgtctgcagcttacaaagctttttcacacacagcattcttgtttagtctgtgtgaca

SEQ ID NO: 501638 - DNA, 201 bp, Homo sapiens
gcattgctagttccaactttatggacactgaaattccaatttcacataattttcatgtgtcaaaaaatattcttttaaaaatgcagctttttcaaacactkaaatatgtacaagccattcttagatcatgggccagacaaaaacaaatggtggtccatgggccatagtttgcctgcccttgttcaagtgggagaaacagac

SEQ ID NO: 501639 - DNA, 201 bp, Homo sapiens
aagtatatgaatgtggtgatgcatagtgaaaaggtagtgagattaatggatttgagatctcaatggagttgaggaatttttcaaataggaatactagagtmagtgagctagaagaattgaaggcagtggtcagagagtatacttgaattcaagatgccagaagtcatgcaatgaatgtagtgccaaggctctgggctgaga

SEQ ID NO: 501640 - DNA, 201 bp, Homo sapiens
gggtttcaccatgttggctaggctggtctcgaactcctgacctcaagtaatccatccgccttggcctccaaagtgctgggattgcaggtatgagccactgygccgggcctcaaagctttaaaaatatgcaatctttagctacatacacatgcatgtgcatgcatgtacacatgcaaaagccatccattgacaaactgtatt

SEQ ID NO: 501641 - DNA, 201 bp, Homo sapiens
taaagttgcaggatgcaaaatcaacataattagtagcatttatatacaccaacagtggacaatctgaaaaagaagtcgagaaagcaatcccatttatcatmgctacaaaaaatatgaaatacctaggaatcaatctaaccaaaagaggtgaaagttctatagaaggaaaatgacaaaactctgatgaaagaaataggacac

SEQ ID NO: 501642 - DNA, 201 bp, Homo sapiens
caaaagccatccattgacaaactgtatttcactgcagaagagaatacccttgaacttgaaatctcataaaccatatcaaatctttgaaatgaacagatgaygtattattcaaggttttccagataaaaagaaccaataattagtatgtgcatatatatgtagatatagatacagatatacagatatagattagaaatatgc

SEQ ID NO: 501643 - DNA, 201 bp, Homo sapiens
ggtgggaagattgcttgagcccgagttccaggctgcagtgacctaagaaggtgccactgccctccaacctgggcaacagaatgagataccatctctaaaaaacaaacaaacagaatgtgacatatgacagctccagaaaagcatcctcatgccacctccctatcactacagtccaagggtgtactctcttaacttctaaca

SEQ ID NO: 501644 - DNA, 201 bp, Homo sapiens
catccccacccctaacgccaaccccatcttcaagtgtctccatccccaccacatcttcggctccaactccattcctatccccaccctaatccatttccaamctcatttcgccctagcccatccccatgtctatctctcccacaactccatcctcatcctcagctgcttttccatttccagtctatccctaatcccatccct

SEQ ID NO: 501645 - DNA, 201 bp, Homo sapiens
gtgggaagattgcttgagcccgagttccaggctgcagtgacctaagaaggtgccactgccctccaacctgggcaacagaatgagataccatctctaaaaaacaaacaaacagaatgtgacatatgacagctccagaaaagcatcctcatgccacctccctatcactacagtccaagggtgtactctcttaacttctaacag

SEQ ID NO: 501646 - DNA, 201 bp, Homo sapiens
tgggaagattgcttgagcccgagttccaggctgcagtgacctaagaaggtgccactgccctccaacctgggcaacagaatgagataccatctctaaaaaacaaacaaacagaatgtgacatatgacagctccagaaaagcatcctcatgccacctccctatcactacagtccaagggtgtactctcttaacttctaacagc

SEQ ID NO: 501647 - DNA, 201 bp, Homo sapiens
cgggcgcagcgggaacagcgggcggcgcgcatgacctgtccagcacagcgcgcctcctggcccagcacaagatcctgcagggcgagctgggcgggcggcgrgcgttgctgcagcaggccctgcggtgtggcgaggagctggttgcggccggcggtgccgtcggcccgggagcagacaccgtgcacctggtaggcctggcgg

SEQ ID NO: 501648 - DNA, 201 bp, Homo sapiens
tacaagtttagaaagatagatccctttggctgggcatggcggctcatgcccataatcccagcactttgggaggctgaggcaagaggattacctgagtttargagttcgagcccagcttggccaacatggtgaaaccccgtctctactaaaaatacagaaattaactgggcttcatggtgcacgcctgtaatcccagcgact

SEQ ID NO: 501649 - DNA, 201 bp, Homo sapiens
cacagctttgtttttcacatttggctggggttggctttggttgagggctagaactggtcatggtttggggatctatggtcttagagtcccagggctagaaytggggagccctgtgggctcattaggggtgctagatctcgattatggaggatgggtctactccagattagagggttagtttagagagagctagagttggct

SEQ ID NO: 501650 - DNA, 201 bp, Homo sapiens
ctggcatgtgctgagtcgagcggtgactgaaccagtcccatccctgactttagagactcacagtccattgggaaaaacaggcttgtcatcaatgatgaccsagaattatctgggctggaatgggggcgattgggggactggagagtcaggggtgggtggagaaaggcaacgtttgcaagttgttctttgtgctgcttaaaa

SEQ ID NO: 501651 - DNA, 201 bp, Homo sapiens
tcccatgacatattgtatactgacttgtctgttggctgacttagcaatgagttgttcaattagtgggtgaacaatgcctattccccctctgcaccactctstctgagcatcttattcatccatacattcattcagcaggtgtttactgagtgcctatgcctttctaggtcttgtgctgggcactgctggaaacacagggct

SEQ ID NO: 501652 - DNA, 201 bp, Homo sapiens
ccaatatcccaatttccatagtaaagatcctagaattcagaactctctctctctctcttttgagacaggatcttgctctgttgcccaggttggaatacagkggcatgatcatggctcattgcagcctccaacacctaggctcaagcgatcctcccacctctgcctcctgaggaactgggactacaggtgcatatcaccatg

SEQ ID NO: 501653 - DNA, 201 bp, Homo sapiens
ggaaggccaccctggctgacattgtggaacagctgcaggagaaagaggcaggcccagggctgcctgctggggtaagttgagcctcggatgggtggggatasgaggacccctttttcagagcaggaggcaggatctcagaaacagccagtgcctagccctggcaggacccattccctacctggaccctgcagagacagcatg

SEQ ID NO: 501654 - DNA, 201 bp, Homo sapiens
acacagacacacacacacagacacacagacacagatacacacacagacacacacacacagactcttcccacatctgtcctggactccgtatttcttcagcycagtggggtcccaaatttcttcatagcctcatacacacacacacagaaggaagccccaggtttctcctgcagacagtggggacacgccctgcttgcaccc

SEQ ID NO: 501655 - DNA, 201 bp, Homo sapiens
aaaacaatgaatgtattggcttttggaattaacaagactgtggacagcagatacagatgtatccaggtgcttccatatattttcatgactcttggctctattttttttttttttgagatggagccttgctttgttgcccaggctggagtttagtggcacaatctttgctcactgcaacctccacttcctgagttcaagcga

SEQ ID NO: 501656 - DNA, 201 bp, Homo sapiens
cttcccacatctgtcctggactccgtatttcttcagctcagtggggtcccaaatttcttcatagcctcatacacacacacacagaaggaagccccaggttyctcctgcagacagtggggacacgccctgcttgcacccccacctccagagatctggctgcctctttccaccaccgagagagattccaaaccaatgagtcct

SEQ ID NO: 501657 - DNA, 201 bp, Homo sapiens
cggtggctcacgcctgtaatcccagcactttgggaggccgaggcgagtggatcacgaggtcaggagatcgagaccatcctggctaacacggtgaaaccgcrtctctactaaaaacacaaaaaattagccgggcgaggtgtcgggcgcctgtaatcccagctactcgggaggctggggcaggagaatcgcttgaacctagga

SEQ ID NO: 501658 - DNA, 201 bp, Homo sapiens
ggtggtgtgcgcttgtagtcccagctactctgaagtgggaggatcgcttgagcccaggaggttgaggctgtgtgagccatgattgcaccactacacttcarcctggatgacagagtgagaccctgtctcaaaaaaaaaaaaaaaaaaaaaagaagaagccgggcacggtggctcacacctgtaatcccagcactttgggag

SEQ ID NO: 501659 - DNA, 201 bp, Homo sapiens
cagagtttgagaccagcctgatcaacatagtgagatcctgtctgtacaaaaaaaaaaaaaaaaaaaattagctaggcgtggtggtgtgcgcttgtagtccyagctactctgaagtgggaggatcgcttgagcccaggaggttgaggctgtgtgagccatgattgcaccactacacttcaacctggatgacagagtgagacc

SEQ ID NO: 501660 - DNA, 201 bp, Homo sapiens
acaccatttcaatccatcctaagtgacaagagcttaactccgtctcaaaacaaaacaaaaaaatttttttgtaagatggggtcttgctatgttgcccaggstggtgtggaactcctgggctaaaataaccctcccacctcggcctccgaaagtgctttgattacaggggtaagccagagtgcctagtagtcaccctacttt

SEQ ID NO: 501661 - DNA, 201 bp, Homo sapiens
taaaactggcaaagaccctgaggagcctcagagatatggaacgtcataatcataagcctttaaaacatgacaccctagcacctttgacccttgggaccttracatcttagaaacacggagcgctagaatcataaaatatagatgatcataatcatgaattcttaaaacccaaaggtcagaatcagttccctccaaatctta

SEQ ID NO: 501662 - DNA, 201 bp, Homo sapiens
gcgcagaagccccccacccgaagccttggggcgagtggtggttcctcctgcacccccacctggggccccgcaaagaggcgggcagggaggcaggcaggggscgcacgcgggcgggcgcgcggccgccgcgcgggggcgagggagggggcgcgcggccgccggagcctcagccttcgccgccgctgccgctgccgtcgcagt

SEQ ID NO: 501663 - DNA, 201 bp, Homo sapiens
ggaggtgggaggactgcataagcctgagaggttgaggctgcagtgagccatgattgtggcactgcactcaagcctaggcggcagagtgagattgtgactcaaaaaaaaaagagtaatcctactaaaaaatgtccaagggattttaatgacgtttctccaaagatatacaactgtctgatggagcatgaaaagatgctcaac

SEQ ID NO: 501664 - DNA, 201 bp, Homo sapiens
gaaggaattgagccataaacaaggggaagagcactggggcagggcggagcttgattgggatgggcgtggttctagctagggacccgaaagggaagcagcgaggggtgtgacgcggagtttttgtttgtttgtttgaaacgaagtctcgctccctcacccaggctggagtgcagtggcgcgatctcggctcaacagcagcct

SEQ ID NO: 501665 - DNA, 201 bp, Homo sapiens
tcacctctacacacacatacagttttctttcccttcacacacatgccctgcacatttacacacaggaacacacacccacacaggctcctgtccaggccacrtaccctgtgcacacatggacacacatgagccctcgcacagatgcatacacacacacagatacccacgcacgtgcacagcctgcccgcagggtaggaagct

SEQ ID NO: 501666 - DNA, 201 bp, Homo sapiens
aggctgaggcaggagaattgcttgaacctcggaggcggaggttgcagtgagctgggatcgcgcccctgcactccagcctgggtgacagagcgagactccawctcaaaaaaaaaaaaaaaaaaaaaaagaggtacatgtgtcctcacacaacacacataagggctgtacacactcgtattgtcatatgatttcacagagaca

SEQ ID NO: 501667 - DNA, 201 bp, Homo sapiens
gtgccagacacatgtctgggaaccttatcagagctgttcactttcatcttcacactgacctggttagagagaatttatcaaccctgttttattttattttwtttatttatttatttatttatttatttatttatttatttatttttttagatggagtctcactctgtcgcccaggctggagtgcagtggcatgatctcggc

SEQ ID NO: 501668 - DNA, 201 bp, Homo sapiens
ctagctcactgcaacctccgcctcccgggttcaagtgattctcctgcctcagcttcccaagtaactgggactacaggtgcacgccaccaagcctggctaatttttttttttttttgtatttttagcagagacagggtttcaccattgttggccaggctagtctcaaactcctgacttcaagtgatctgcttgcctcgtcct

SEQ ID NO: 501669 - DNA, 201 bp, Homo sapiens
actgggactacaggtgcacgccaccaagcctggctaatttttttttttttttgtatttttagcagagacagggtttcaccattgttggccaggctagtctsaaactcctgacttcaagtgatctgcttgcctcgtcctcccaaagagctgggattacaggcgtgagccatcacacctggcttacttatttatttttttatc

SEQ ID NO: 501670 - DNA, 201 bp, Homo sapiens
tcttccaaagtgatgagaatgacagctcagggatgttgtcacttgcccagcatcacactgaaaatcaggaaaccagaccttatggctccagaattcatggwcttaatcagtcctctaccctgcctcttatagctgtatcctgtgctcagtgcctggtacgtagtaggtgctaatggatgtcagttggacaaggcagtgaag

SEQ ID NO: 501671 - DNA, 201 bp, Homo sapiens
agctggaagctggtggcaggcacgggtgggatgaggctgaccccccttcctctgctgtgtcaggtcttggaccaggtattggaggtggggaagatcatagmacgctacgaggagctggcggctgagctgctggcctggatccaccgcaccgtgggcctcatcagcaatcagaaatttgccaactccttaagtggggtgcag

SEQ ID NO: 501672 - DNA, 201 bp, Homo sapiens
agtgctgcgtagggttccattttacaccggcagaaactggagaaactttctgaggtcacacagtggctgggtggcttgggcctggattctaccctgggtcrgcgggccctccgcgcccaagaggagtccctgtcctcctcaagtcactctctttcccctgggcaggtggaaccgcatcgtggagctagtggaacagcgcaa

SEQ ID NO: 501673 - DNA, 201 bp, Homo sapiens
cccaaaacacattttaaaaaagcaacatggatgattgggcacagtggctcatgcctgtaatcccagcactttgtgaggccaaggcaggaggatcgcttgarcccaggtgttccagaccagcctgggcaacatagcgagattcacatgcctgtgttcccagctactcagaaggctgaagtgggaggatcacttgagcccagg

SEQ ID NO: 501674 - DNA, 201 bp, Homo sapiens
ccgtgcctggcctaaactttattatttatttattttggaggcagagtctcgctttgtagcccaagctggagtgcagtggcacgatctcggctcactgcaacctccacctccctggttcaagcgattgtcatccctcagcctcctgagtagctgagattacagatgtgcgccactaagtcctgctagttttttgtattttta

SEQ ID NO: 501675 - DNA, 201 bp, Homo sapiens
attgctgcccctatagccatatctcggccccttcccactcaccacccccaccccaggtgctgggggtcccttatttttatgcaataactgagcttgatggsggtgggcagggggccagttgagccaagcccccagccccgatctgcagatcctgccccaagaagctggggtggtgggggcagtaattcctgcccccctctc

SEQ ID NO: 501676 - DNA, 201 bp, Homo sapiens
ggggctttggaaggcgggtctcaggctcagggtgaccattgcgtggagcggtgggactgaggagggggtgtggctcaacttcaggccctccagcaggtggsggtagtaggtggggccagagctggggggtggtggtggcttaaatcaagaaagccaaccaatgagcaggagggggtgtggtttaacgtcaggccctccaac

SEQ ID NO: 501677 - DNA, 201 bp, Homo sapiens
tgtaaatggaataatgcattgtgtgttgttttatgtccggcattattcactcaacattatgcttgtgggagattcatccatgtctccctgtgcttgtgggktggtccttctccttgctgtatagtgttgcgtggtgtgaatgtaccacagtgtgtttgtgcattcacctgttgataagcatttgggttgctgctagtttgg

SEQ ID NO: 501678 - DNA, 201 bp, Homo sapiens
gagagagagaaatctgtatatgccacaaagtatgaaccagattcaactggtggattgccagctttgtctgatctagaaacctagactgatgaaaacatacrctcatggaaacttacagtcatacttttagagccttagaaccttaaaaaggtaggaacatatcaacttagaattctagaatttactaatttagtgtaagtg

SEQ ID NO: 501679 - DNA, 201 bp, Homo sapiens
aggcatgcgccaccatgcctggctaattaaaaataatttttttttttggcgaagcatggtggcggatgcctgtaatcccagcactttgggaggctgaggcrgatggatcacttgagatcaggagtttgagaccagcctgaccaatatggtgacactactaaaaatacaaaaattagatgggtgtggtggtgggcacctgta

SEQ ID NO: 501680 - DNA, 201 bp, Homo sapiens
cactcaagaatcgttggctggccgggcacagtggctcatgcttataagcctagcactttgggaggccaaggtaggaggatcgcttgaggccaggacttcargaccggcctgagtaacatagcaagacctcgtctctccaaaaatattttttaaaatagcagggcatggtggtgcacacctgtagtcccagccgcttgggag

SEQ ID NO: 501681 - DNA, 201 bp, Homo sapiens
aagaatcgttggctggccgggcacagtggctcatgcttataagcctagcactttgggaggccaaggtaggaggatcgcttgaggccaggacttcaagaccrgcctgagtaacatagcaagacctcgtctctccaaaaatattttttaaaatagcagggcatggtggtgcacacctgtagtcccagccgcttgggaggctga

SEQ ID NO: 501682 - DNA, 201 bp, Homo sapiens
ctggactcaagtgatcctcccacctcagcctcctgaatagctggaactacaggcatgcgccaccatgcctggctaattaaaaataatttttttttttggcsaagcatggtggcggatgcctgtaatcccagcactttgggaggctgaggcagatggatcacttgagatcaggagtttgagaccagcctgaccaatatggtg

SEQ ID NO: 501683 - DNA, 201 bp, Homo sapiens
gtggcttgtgactgctgtataggtcagcacagccttagagccttagaaatgtacagtcccagaatggtgggactctgtaagcatattcccttagaatcccraaatgcagagccatcagatccttggaacttgaaatgtctaagagattcttagacctcttgaaatgaagacctctggcctggcgcggtggctcacgcctgt

SEQ ID NO: 501684 - DNA, 201 bp, Homo sapiens
agccaaggagtgggtgagtgggaagctggaagctggtggcaggcacgggtgggatgaggctgaccccccttcctctgctgtgtcaggtcttggaccaggtrttggaggtggggaagatcatagaacgctacgaggagctggcggctgagctgctggcctggatccaccgcaccgtgggcctcatcagcaatcagaaatttg

SEQ ID NO: 501685 - DNA, 201 bp, Homo sapiens
tggttcacacctttagttctgactactcaggaggctgaggtgggaggattgcttgaacctaggagctcgaggctgcagtgagctatgattgcaccactgcrcaatcagcctggacaagagagccagactccatctcttgaaaaaaaaaaaagtaaaaagttgagctctgaagaataagtgggaattaggaacacagaagag

SEQ ID NO: 501686 - DNA, 201 bp, Homo sapiens
gagttcaagactagcctgggcaacacagagagaccctgtctatgttttataaaaaataaaaagtctatttaaaaaattacaaaaaattagccgggcgtggyggtgtgtgcctgtaatctcagctacttgggaggctgaggcatgagaattgcttgaacctgggaggcagaggttgtggtgggccaagatcacgccattgca

SEQ ID NO: 501687 - DNA, 201 bp, Homo sapiens
gggactacaggtgcccgccaccacacccggctaattctttttgtatttttagtagacaccgggtttcactgtgtttgccaggctggttttgaacttctgaycttaagtgatccacttgctttggcttcccaaagtgctgggattacaggcatgagccactgcacctggcctggtgttttttttttttttttttttgagacg

SEQ ID NO: 501688 - DNA, 201 bp, Homo sapiens
agcccaggaggttgaggctgtgtgagccatgattgcaccactacacttcaacctggatgacagagtgagaccctgtctcaaaaaaaaaaaaaaaaaaaaargaagaagccgggcacggtggctcacacctgtaatcccagcactttgggaggctgaggcaggcagatcatctgaggtcaggagttcaagaccagcctggcc

SEQ ID NO: 501689 - DNA, 201 bp, Homo sapiens
gagcctgggaagtcgaggctgcagtaagccaagattgtgccactaaactccagcctgggcaactggactgagaccctgtcagcaaaaaaataaaataaaawaaaaaaaagtctggggaagggtgggttttacctcaggcatggctggatccaggtatggctcaagggtgcttttaggactccatctgagaccaggcatggt

SEQ ID NO: 501690 - DNA, 201 bp, Homo sapiens
gacagagtcttattctgttgccccggctggggtgtagtggtgagatcttgggtcactgcaatctccacctcaccggctcaagccatcctcctacctcagcyccctgactagctgggactacaggtgcccgccaccacacccggctaattctttttgtatttttagtagacaccgggtttcactgtgtttgccaggctggtt

SEQ ID NO: 501691 - DNA, 201 bp, Homo sapiens
tttggtagagatggggttttgccgtgttacccaggctggtctcaaactgctgacctcaagtgatctgcctgcttcggcctcccaaagttaggattacaggygtaagccactgcgcctagcaagaagctgttgttattgtaactattattcagttggataccttgtggtttgagtcaacatcagcgaatgtccagaattaca

SEQ ID NO: 501692 - DNA, 201 bp, Homo sapiens
gaaaccccatctctactaaaaatacaaaaaaaaattagctggacatggtggcacgcgcctgtaatcccaactactctggaggctgaggcaggagaatcacrtcaacctgggaggtggaggctgcagtgagctgagatcaagccattgcactccagcccaggcgacagtgagagactctgtctcaatcaaacaaacaaacaa

SEQ ID NO: 501693 - DNA, 201 bp, Homo sapiens
ggaacctagaaacatggtttaagaaaagagaagttggccggtggcagtggctcatgcctgtaatcccagcagtttaggaggccaaggcgggtggatcactkgaggtcaggagtttgagaccagcctggccagcatggtgaaaccccgtctctactaaaaatacaaaaatgagccaggcgtggtggcgggcgcctgtaatcc

SEQ ID NO: 501694 - DNA, 201 bp, Homo sapiens
tgagattacaggtgtgagccaccgcgcccggcctgtttgtttttctgcatgagctttcttcttaggccagtcctcctctcctggtgataaaaggcctccartggattcaggtttacctcccaccagcaaaactgaagagaatttcccacctcaataatgtcagcagtagtctcaggaataactctcattggctcaccatgc

SEQ ID NO: 501695 - DNA, 201 bp, Homo sapiens
cagcacttcaggaggctgagatgggtggatcacttgagctcatgaattcaagaccagcctgggcaacatggtgaaaccccgtctctctctctacgtgcgcrcacacacacacacacacacacacacacaaaatatatatatacacacacatatatatacacacatatatacgtatatatacacatatatacgtatatatac

SEQ ID NO: 501696 - DNA, 201 bp, Homo sapiens
tatatatacacacatatatacgtatatatacacatatatacgtatatatacacatatatacgtatatatacacatatatacgtatatatacacacatataygtatatatacacatatatatgtatatatatatacacactatatatatgtatatatatatacaaaatttagccaagcatggtggtgcacatttgtagtccc

SEQ ID NO: 501697 - DNA, 201 bp, Homo sapiens
gtatatatacacacatatatgtatatatacacatatatatgtatatatatatacacactatatatatgtatatatatatacaaaatttagccaagcatggkggtgcacatttgtagtcccagctacatgggaggctgagttgggaggatgccttgagcccaggaggtagagattgcagtgagcagagattgtgccactgca

SEQ ID NO: 501698 - DNA, 201 bp, Homo sapiens
tatatacacacatatatgtatatatacacatatatatgtatatatatatacacactatatatatgtatatatatatacaaaatttagccaagcatggtggkgcacatttgtagtcccagctacatgggaggctgagttgggaggatgccttgagcccaggaggtagagattgcagtgagcagagattgtgccactgcactc

SEQ ID NO: 501699 - DNA, 201 bp, Homo sapiens
ctcccaagtaactgggactacagacacgtgccaccacgcctggctaatttttgtattttttttagtaaagaccgggttttgccatgttggccaggccggtctcgaattcctggcctcaagtgatccacctaccttgacctcccaaagtgctgagattataagcatgagccaccgtgccgggccatcattactattttgcag

SEQ ID NO: 501700 - DNA, 201 bp, Homo sapiens
tggagggcagtggcgtgatctcagctcactgaaacctcagcctcccgggttcaaacgattctcctgcctcagcctcccaagtagctgggactacaggcgcragccaccatgaccagctaatttttgtatttttagtagagatggggtttcaccatgttggccaggatggttttgatctcttgacctcatgatccgcctgcc

SEQ ID NO: 501701 - DNA, 201 bp, Homo sapiens
caccattgcaatacagcctgagtgtcaagagcgagactccgtctcaaaaaaaaaaaaaaaaaagattaaaaaaaaaaaaagatttactgtgtgctaagtaytgtcttagggtttatgctgattatttaatttaatcccctctataaccctatgaggtagatattgtcattatcctcatttcaccaaacaatgtatgttgga

SEQ ID NO: 501702 - DNA, 201 bp, Homo sapiens
accaaacaatgtatgttggaagaatagggcactgaaggatggtggggaggtgggtctacagattattttggaagcttcctgatcattctgcagtaggtagwgttatttaagagactggagttttgctgagattttgttttcctgtcttgatgaaaatactcttggctgtcaacagtgttggcgacagaactggcttatcgt

SEQ ID NO: 501703 - DNA, 201 bp, Homo sapiens
ctgatcattctgcagtaggtagagttatttaagagactggagttttgctgagattttgttttcctgtcttgatgaaaatactcttggctgtcaacagtgtkggcgacagaactggcttatcgttgtcatggttgaggaaactgatcaagtgcacttagtacttaaaattgggggagctcagctgtgtgtgcagtgagagtg

SEQ ID NO: 501704 - DNA, 201 bp, Homo sapiens
ctccccaccatctatctatcttctccatctcctgccatccacccacttggggcaggagggccagcaactgatgcaggagaagcccgaactggcggcctccrtgcggaagaagctgggcgagatccgccagtgctgggcggagctggagagcaccacccaggccaaggcacggcagctctttgaggccagcaaagcagacca

SEQ ID NO: 501705 - DNA, 201 bp, Homo sapiens
ggattacaggcatgagccactgtgcctaggccttatcattgttattatgtccactttaaagacagagaaattgaggacaagagaggggacaggactcaaarccagtcactgttagaaatgagacttgatcctagacctaacctacctctccctatgtccaggcctcaccttccccgatggcgcaggtaccaggggaagtgg

SEQ ID NO: 501706 - DNA, 201 bp, Homo sapiens
cttggtcgcttcagtgtggctgagctggtggcggggtggggtgcaggctctactgggaaggttccctttggcccccaactctctgccctgcagggagcagtaagacctgaaactcaattgtcctctgtagagcagctcctgggaggacggagggaggggcaggtgtgggatggaggtgggcttctctgactctcatccttc

SEQ ID NO: 501707 - DNA, 201 bp, Homo sapiens
actaattcctccctctctcttacatattttccacgcccttcttcccctacccagcccagtgccctcacagtcctactgccagcgccgcaccccccaacccrgggcctttccccagcccttatctccccatccccaggaaccaagaaaaccagttacgggcccagcaatggatgcaaaagctacatgaccaacttgagctgc

SEQ ID NO: 501708 - DNA, 201 bp, Homo sapiens
cgcagaagccccccacccgaagccttggggcgagtggtggttcctcctgcacccccacctggggccccgcaaagaggcgggcagggaggcaggcagggggygcacgcgggcgggcgcgcggccgccgcgcgggggcgagggagggggcgcgcggccgccggagcctcagccttcgccgccgctgccgctgccgtcgcagtt

SEQ ID NO: 501709 - DNA, 201 bp, Homo sapiens
tgggcaggacagattcagattttgctagtggaatctgtaggtggtctttcttcctcgtacctaatgccaaggtaggaataaacaagggcacctagtatgtyttgctttgggagggattcctccaggatcgaggctttggatgactggagagacaggaattctttattccagacagtagaccaatagactttccttgagaaa

SEQ ID NO: 501710 - DNA, 201 bp, Homo sapiens
aggggcgtgagactgagatagaaaccgggtgaggctgccgaggtgggcggatcacttgaggtcaggagttggagaccagcttggccaacatggtgaaaccstgtctctactaaaaataaaaaattagctgggcatggtggcacgtgcctgtagtcctagctactggggaggctgaggcaggagaatggcttgaacctgggt

SEQ ID NO: 501711 - DNA, 201 bp, Homo sapiens
aaaccctgtctctactaaaaataaaaaattagctgggcatggtggcacgtgcctgtagtcctagctactggggaggctgaggcaggagaatggcttgaacmtgggtggcagaggttgcagtgagccgagatcgcgccactgcactccagcctggtgacagagcaagactccgtctcaaaaaaaaaaaaaaaaaagaaaaga

SEQ ID NO: 501712 - DNA, 201 bp, Homo sapiens
tcatggttgaggaaactgatcaagtgcacttagtacttaaaattgggggagctcagctgtgtgtgcagtgagagtgctggatacacaggggctgttaagcmaaaaatagctgcaaatatgatgcatttggtgcatgcagactcagttccaagtgctccatagtttatcaccttataacaaccccgcaaggtagattatctc

SEQ ID NO: 501713 - DNA, 201 bp, Homo sapiens
gcaatgggaggattgcttgagcatgggaggtggaggctgcagtgagttgtgatcacaccactgcactccagcctgagcaacagagcaagaccctgtctccaaaaaaaaagaaaaaagaaaagaaaacagagctctacctggggacacagccgtgtctgaagattccaaggaaacacagccctgtcctggggagggggttta

SEQ ID NO: 501714 - DNA, 201 bp, Homo sapiens
tatcagcttattattttattgttacttattgttatttttattgttactgttttgttactattcttgccaggtgttcagtaagtgttagatattattttttatgatgatgatgatgatgatgatgattatcattactcttacctgccacaaaatggtagcctctgccaggtgtggtggctcatgcctgtaatcccaacactt

SEQ ID NO: 501715 - DNA, 201 bp, Homo sapiens
atcagcttattattttattgttacttattgttatttttattgttactgttttgttactattcttgccaggtgttcagtaagtgttagatattattttttatgatgatgatgatgatgatgatgattatcattactcttacctgccacaaaatggtagcctctgccaggtgtggtggctcatgcctgtaatcccaacacttt

SEQ ID NO: 501716 - DNA, 201 bp, Homo sapiens
tcagcttattattttattgttacttattgttatttttattgttactgttttgttactattcttgccaggtgttcagtaagtgttagatattattttttatgatgatgatgatgatgatgatgattatcattactcttacctgccacaaaatggtagcctctgccaggtgtggtggctcatgcctgtaatcccaacactttg

SEQ ID NO: 501717 - DNA, 201 bp, Homo sapiens
tgagccaagatcacgccattgcactccagcctgggcaagaagagcaaatctctgtctcaaaaacaaacaaacaaacaaacaaaggctgggtgcggtggctsacgcctgtaatccctgcactttgggaggcctaggcaggcggatcaactgaggtcaggagtttgagaccagcctgacaaacatgttgaaaccctgtttcta

SEQ ID NO: 501718 - DNA, 201 bp, Homo sapiens
caacctgggcgacagagcaagactctgtatcaaaaagaaaaaaaaacattgtaggctggagggggctggtgtatgctgcccctttgctcactttgctgtacccccccccccacttcctgatggcaggtgctgcaggagaaattctcagagtttgccagcgagacaggtatggcagggcgggaacggctggcagctgtgaac

SEQ ID NO: 501719 - DNA, 201 bp, Homo sapiens
taaactagttccttgcactgatacatatcaatttttacagtttgtcatttgccttctaactctatgaaattttggttgatgcagaagtattttttaattattttttaattatactttaaattctagggtacatgtgcacaacgtgcaggtttgttacataggaattcatgtgccatgttggtgtgctgcacccattaactc

SEQ ID NO: 501720 - DNA, 201 bp, Homo sapiens
ttgtcatttgccttctaactctatgaaattttggttgatgcagaagtattttttaattattttttaattatactttaaattctagggtacatgtgcacaaygtgcaggtttgttacataggaattcatgtgccatgttggtgtgctgcacccattaactcgtcatttacattaggtatttctcttaatgatatccctcccc

SEQ ID NO: 501721 - DNA, 201 bp, Homo sapiens
tccaactccattcctatccccaccctaatccatttccaacctcatttcgccctagcccatccccatgtctatctctcccacaactccatcctcatcctcasctgcttttccatttccagtctatccctaatcccatccctgacttcagcctcagccccaaaccaggatcagccctgacacccgtctcccatcccaaattaa

SEQ ID NO: 501722 - DNA, 201 bp, Homo sapiens
aaagttaggattacaggtgtaagccactgcgcctagcaagaagctgttgttattgtaactattattcagttggataccttgtggtttgagtcaacatcagygaatgtccagaattacagaaatcccgcattccacatagggcagtgtctcacttttatgatccagtaagaaatacacagccaggcagtggctcacgcctgt

SEQ ID NO: 501723 - DNA, 201 bp, Homo sapiens
cacagcaaccccataaattaggtactatttagtaccccattttaccagtgaggaaatggaagcccagataggtggtgtcatctgcccaagatcacatatasctgggtgttggagctgaaattcgaatccaggcaatcttgatccagtatagagacaaatagacaaaggtgtgccttttaggagcttacattgtggtgagga

SEQ ID NO: 501724 - DNA, 201 bp, Homo sapiens
caggtcagggtccaaccccactcaaggtatgtcaaatggaggggatttaatacagggatttatttcaaacttgtagaagatgagaaagggaatattgaagyaatccagctagtaataactgttggaagcagccaccactccctaaggtatggagtacaaagggaaaaggaaggatctagagccacaaagcagtaggtaaat

SEQ ID NO: 501725 - DNA, 201 bp, Homo sapiens
tgagtggcccagggcagtgccagaggtgtgctcagtgctgtccccgcttgtaggctcagctgctgtcccgggagtgtgggcagcacctggtggaggcagaygacctgttgcagaagcatggactgctggagggagacattgccgcccagagcgagcgggtggaggctctcaatgccgctgccctgcgcttctcccagctgc

SEQ ID NO: 501726 - DNA, 201 bp, Homo sapiens
agtcttgaggctggtccatatctctccaagagggtcagagtcgggagtgatggtgcagagtagcaggggctggcataggcaatgggggagaggtgagtggyccagggcagtgccagaggtgtgctcagtgctgtccccgcttgtaggctcagctgctgtcccgggagtgtgggcagcacctggtggaggcagacgacctgt

SEQ ID NO: 501727 - DNA, 201 bp, Homo sapiens
agccatgcgcccggccaagtgagtgcatatctaactttagtagagactgcccgtttgtatcgttttatattcccactagcagtgtaccagagattcagttrctgtgcaccccacccttgcgatggtcaggttttttgttttgttttgttttgtttgagacagagtcccactctgtcgcccaggctggagtgcagtggcgcg

SEQ ID NO: 501728 - DNA, 201 bp, Homo sapiens
ccaggctggcctcgaaatcctgacctcaggtgatctacccgtctcggcctcccaaagtgctgggattacaggcatgagctactatgcccagctggcaattwttattattattattattattattattattattattatgaggcagagtctctctttgtcacccaggctggagtgtagtggtctaatctcggctcactgcaa

SEQ ID NO: 501729 - DNA, 201 bp, Homo sapiens
caacactgggaggccaaggcaagaggatcacttgaggccaggagtttgagactaccctacgcaacatagtgagaccccatctctacaaaaaagaaaaaaaytagtcaagcatggtggtgtgcatgcctgttgtcccagctacttgggagtctgagggaggaggatcacttgagtccaggagggtcaggctgcagtgagcca

SEQ ID NO: 501730 - DNA, 201 bp, Homo sapiens
gaacttgggaggcagaggttgcagtgagccaagatcgtgccactgcctgggtaacagaacaagactccatctcaaaacaacaacaacaataaaaaaaaaamaacaaaaaaaaaccgcttaaaggctgggtggggtggctcacacctgtactctctttggaagcctaggcgggaggatcacttgaacccaggagttcaagac

SEQ ID NO: 501731 - DNA, 201 bp, Homo sapiens
ccaagatgggcagatcacttgaggttatgagtttgagaccagcctgaccaacatggtgaaaccccatctctactaaaaatacaaaaaaaattagcaaggcrtggtgtcaggtgcctgtagtcccagctacttgggaggtcaaggcacaagaatcacttgaacctgggaggtggaggttgcagtgagctgaggttgcccact

SEQ ID NO: 501732 - DNA, 201 bp, Homo sapiens
taatcccagctactcgggaggctgaggcaggaggattgcttgaacccggaaggcagaggttgcagtgagctgagacagcgccattgcactccagcctgggyaacaagagcaaaactccatctcaaaaacaaaataaacaggccgggcatggtggctcacgcctgtaatcccagcattttgggaggccgaggcgggcagatc

SEQ ID NO: 501733 - DNA, 201 bp, Homo sapiens
ctgatttgttcatcctgaggtcaggagttcaagaccagcctggccaatatggtgaaaccccatctctacaaaaatacaaaaattagccgggcatgatggcrggtgcctgtaatcccagctactcaggaggctgaggcgggagaatcacttgaagccaggaggtgaaggttgcagtgagccaagattacgccattgcactcc

SEQ ID NO: 501734 - DNA, 201 bp, Homo sapiens
ggctgacacggtgaaaccccgtctctactaaaaatacaaaaaaattagctgggcatggtggcgggcgcctgtagtcccagctacttgggaggctgaggcasaagaatggcttgaacccgggaggtggagcttgcagtgagctgagattgcgccactgcactccagcctgagcgacagagcgagactccatctcaaaacaaa

SEQ ID NO: 501735 - DNA, 201 bp, Homo sapiens
cccgtctctactaaaaatacaaaaaaattagctgggcatggtggcgggcgcctgtagtcccagctacttgggaggctgaggcagaagaatggcttgaaccygggaggtggagcttgcagtgagctgagattgcgccactgcactccagcctgagcgacagagcgagactccatctcaaaacaaaacaaacaaacaaaacaa

SEQ ID NO: 501736 - DNA, 201 bp, Homo sapiens
tctactaaaaatacaaaaaaattagctgggcatggtggcgggcgcctgtagtcccagctacttgggaggctgaggcagaagaatggcttgaacccgggagrtggagcttgcagtgagctgagattgcgccactgcactccagcctgagcgacagagcgagactccatctcaaaacaaaacaaacaaacaaaacaaaacaaa

SEQ ID NO: 501737 - DNA, 201 bp, Homo sapiens
aaaaatacaaaaaaattagctgggcatggtggcgggcgcctgtagtcccagctacttgggaggctgaggcagaagaatggcttgaacccgggaggtggagsttgcagtgagctgagattgcgccactgcactccagcctgagcgacagagcgagactccatctcaaaacaaaacaaacaaacaaaacaaaacaaaacaaaa

SEQ ID NO: 501738 - DNA, 201 bp, Homo sapiens
tacagacatgagccactgcaccaggcccagtccctaatctttttggcaccaaggactggttttctggaagacaattttttccacaaaccggtgggaaaagraggaatgttttcaggatgattcaagcgaattacatttattgtgtgctttatttctattgttattacattataacatataatgaaataattataaaactca

SEQ ID NO: 501739 - DNA, 201 bp, Homo sapiens
aggggatgcgtggtcatttttgtggtttgcacagtgaccttgattttgtctgtgctcaggcaagattatggagcgagcttggttttgtcctactccatcgyggtcagagtggccccatctgatatgagcgttctgtgagttttttttattattattgttgttgtttattgctttttttttttttttttttagacacttgat

SEQ ID NO: 501740 - DNA, 201 bp, Homo sapiens
tgactaggtgattgggggtcttaatcattttgatctaggtggtgggaggaagagaaggaggctgttgcattcattggcagctgtcattcatctgagccggygaggggatgcgtggtcatttttgtggtttgcacagtgaccttgattttgtctgtgctcaggcaagattatggagcgagcttggttttgtcctactccatc

SEQ ID NO: 501741 - DNA, 201 bp, Homo sapiens
attagccgggcgaagtacatctaatcgggaggcaggagaatcacttgaacctgggaggtggagtttgcagtgagctgagatcgcgccactgcactccagcstgggtgacagaggcagactctgtctcaaaaaaagaagaagaaaaaagaatgaaagggaggaaggaaggaaggaaggaaggaaggaaggaaggaaggaagg

SEQ ID NO: 501742 - DNA, 201 bp, Homo sapiens
agctcaagaagctgcaggtatggtcttcctggcccagatgagggctccctatgccacatgggggccaggtcagggtccaaccccactcaaggtatgtcaartggaggggatttaatacagggatttatttcaaacttgtagaagatgagaaagggaatattgaagcaatccagctagtaataactgttggaagcagccacc

SEQ ID NO: 501743 - DNA, 201 bp, Homo sapiens
aaaaaagattaaaaaaaaaaaaagatttactgtgtgctaagtattgtcttagggtttatgctgattatttaatttaatcccctctataaccctatgaggtrgatattgtcattatcctcatttcaccaaacaatgtatgttggaagaatagggcactgaaggatggtggggaggtgggtctacagattattttggaagctt

SEQ ID NO: 501744 - DNA, 201 bp, Homo sapiens
accctaatccatttccaacctcatttcgccctagcccatccccatgtctatctctcccacaactccatcctcatcctcagctgcttttccatttccagtcyatccctaatcccatccctgacttcagcctcagccccaaaccaggatcagccctgacacccgtctcccatcccaaattaaagctgctcccttcctctgagc

SEQ ID NO: 501745 - DNA, 201 bp, Homo sapiens
gagtcttggggctggggctggggctatgggtggagactgtcaggactggtgctaatagaggcaagagtgactcctgagagaaggaaagagtgagctccttrtccttggaggcatttaagcagagcctaagattacattccactggggaagtcatagggagaatcagtgccctgagtggcaggatgggccactcgacctctt

SEQ ID NO: 501746 - DNA, 201 bp, Homo sapiens
gtttgaccacaaggtggctatgagggagagctggctgaatgagaaccagcgtctggtctcccaggtacaaggtgtagggcttggctccagggtaaagggayggagggcggggctgatggtcctgggaccagagagggagacttgatcttctaggcaacagggaagagttagattagtctcctggtgataaatgaggatggg

SEQ ID NO: 501747 - DNA, 201 bp, Homo sapiens
actccatcctcatcctcagctgcttttccatttccagtctatccctaatcccatccctgacttcagcctcagccccaaaccaggatcagccctgacacccrtctcccatcccaaattaaagctgctcccttcctctgagctctactgtgtgccagacacatgtctgggaaccttatcagagctgttcactttcatcttcac

SEQ ID NO: 501748 - DNA, 201 bp, Homo sapiens
ggcccagctctggagggagggtgggcaggggtggcatgacggcagggctcctgagctcatgccccttcaggttccaggagaaggggaacctagaggtgctkctcttcagcatccagagcaaactgcgtgcctgcaaccgtcgcctctttgtgcctcgggagggctgtggcatctgggatattgacaaggtgaggccgggga

SEQ ID NO: 501749 - DNA, 201 bp, Homo sapiens
ggctacaggcatgagccaccacgctggctaatttttgtatttttagtagagacacggtttcaccatgttggccagactggtcttgaactcttgaccacccrccttggcctcccaaagtgctgtgattagcggcatgagccactgcacctggccttaagtggatatattgtgaaaaggtaacctgaggctgtcaacccaaaa

SEQ ID NO: 501750 - DNA, 201 bp, Homo sapiens
agctggagtacagtggcttgatctcagtccattgcagcctcaaactcttgggctcaagtgattctcccacttcagccttccaagtagctgagaccacaagygcataccaccacgtctggataatctttttaaattttttatagagacagggtctcaccatattgcctagggtagtctcaaactcttgggctcaagcaaccc

SEQ ID NO: 501751 - DNA, 201 bp, Homo sapiens
atagcaaagcctggatttcagtccagtgcccttgactcttcactcctcctttttgatatatttcctatgtagttatatagtgcttggcatagtgtatggcaaaaaaaaaaaaaaaggctagtaagaaatacataatgacactgattagtatgtattcattcatctctgtggcaaataattattaggtaccagctgggtgtg

SEQ ID NO: 501752 - DNA, 201 bp, Homo sapiens
ataaggacattgtgaaggtgaaaagacataatgctttaagtggtttcagaactgctgacccaacaaatctaagattcagtatttattcacaggtctttaattttttttttttttagaccaagttttgttcttgtcacccaggctggagcgcagtggcacaatctcggctcactgcaaccctctgcctcctgggttcaagtg

SEQ ID NO: 501753 - DNA, 201 bp, Homo sapiens
gaaacaagacctgtatgtgcaaaggccaacggtgtgagcctggcttaagtgcagacagcaagaaagagtatgtcaacagaggagactgagacaggtgtggkggtgcctgttgtcccagctacatgggaggctgaggtaggaggattatttgagcctggggattcgatcccatctcaaagaaaaaaaaaaaacaaaaaatgg

SEQ ID NO: 501754 - DNA, 201 bp, Homo sapiens
ggtgcccggcggacacgacttgagcagaaccttgccctgcagaaggtcttccaggagatggtgtacatggtggactggatggaggagatgcaggtgccggsgggggggcggggatgcgggtggagtgccaggagggaggggaggatgcagacgctgaaagagttgtcagacagctggagatggagagggaagggcagagat

SEQ ID NO: 501755 - DNA, 201 bp, Homo sapiens
caagactccgtctcaaaaaaaaaaaaaaaaaagaaaagaaaaaaaaagaaaggaaactgggtgaggctggatagaggtgagcttatccatttagggaagcrgagctttccctgcatgctgaaatgcagggctttctgaacccaagacttgcagaaaacagagtcctggccaggtgtagtggctcacacctgtaatctcaac

SEQ ID NO: 501756 - DNA, 201 bp, Homo sapiens
ggtcagtcctgcacagggcagggtgaagaagcttggactatgggtctcaagatcccgggctgaagcatccatccacctcggcctcccaaagtgctgggatyacaggcgtgagccactgccccagcctattgctaggattcataattatcttgcagtgattactaattcttccccagcagtgttttgcagtggctgaaggca

SEQ ID NO: 501757 - DNA, 201 bp, Homo sapiens
agttcaagaccagtgtggccaacgtggcgaaaccccatctctactaaaaatacaaaaagtagccaggcatggtggcacgtgcctgtagtcccagacactcrggagactgaggcacaagaatctcttgaacctgggagatggaggttgcagtgagctgacatcgagccattgcactccagcctgggggacagagcaagactc

SEQ ID NO: 501758 - DNA, 201 bp, Homo sapiens
tgcgtgcctgttagacctgtgaggctgaggtgggaggaccgcttgagcctgcgaattggaggcttcagtgtgccataaacgagttcatgaatagccactgygttctagcctgggcaacatagtgagatctcacgtcttaaaaaaatttttttaaatctaaatatctaacgtgttaatataacttttttattaaaaataact

SEQ ID NO: 501759 - DNA, 201 bp, Homo sapiens
aggctgaggcaggaggatcacttgagcccaggagtttaaagctgctgcattccatcctgggtgatagagtgacaccctgtctctaaaaaagcaaaataagragaggacttgctggctgttattatctttatcagttgagtcacacaaaaagttaaataacgttaaggcacacaaaaagttaaaaaagactcacaaaaagtt

SEQ ID NO: 501760 - DNA, 201 bp, Homo sapiens
tggggggctgtggcaggttgaggggaccagctgagccctcctgccctgttctgcacagctggatggctggatccatgagaagatgctgatggcgcgggatrgcacgcgggaggacaaccacaagctgcataagagatggctccggcaccaggcattcatggccgagctggctcagaataaggagtggctggagaagatcga

SEQ ID NO: 501761 - DNA, 201 bp, Homo sapiens
tattattattattattattattatcattatcattattattatttggactgctgccaggctggagtgtggtgataaaaatcatagctcactacaacctccarctcctgggcttgagcaatcctcccaccgtagcctcccaagtagctgagactacaggcatgcaccatcatgcccagctaattttcttattattttattttt

SEQ ID NO: 501762 - DNA, 201 bp, Homo sapiens
caactagggcgcaactagggcgcaaaggtccagaggtaggaaggctcagacatattcagaccttgaggatgttaatgaagagttattaggcagagtgctgyggctctgccttgagccccatcttgtcgctccaggtcgtgggtgagcctgtactgtgtgcttagtaagggggaactgggcttctacaaggactccaagggc

SEQ ID NO: 501763 - DNA, 201 bp, Homo sapiens
ctggcttcaagtgattctcctgcctcagcgtcctcctgagtagctgggattacaggcacctgccaccacgcctggctaatttttgtatttttagtagagayggggtttcaccatgttggccaggctggtctcaaactcctgacctcaagtgatccacccacctccgcctcccaaagtgctgggattacaggcatgagccac

SEQ ID NO: 501764 - DNA, 201 bp, Homo sapiens
gctgcacagcacacacagcttgccccttggctagactgtgcccttctgcccattgccctgggcagtgctcagacaagggtggcttcttccctgcttgcccrccggctctggagcctgcctgctgcctgcctgctctgtgcccctgcccaggcctgatctcgtggacttcagcaaactcaccaagtccaatgccaactacaa

SEQ ID NO: 501765 - DNA, 201 bp, Homo sapiens
ccaccgcgcctggctgtgcctcattttcttcttcagtaaaatgggcataatgatatttctgacctcataaggacattgtgaaggtgaaaagacataatgcwttaagtggtttcagaactgctgacccaacaaatctaagattcagtatttattcacaggtctttaattttttttttttttagaccaagttttgttcttgtc

SEQ ID NO: 501766 - DNA, 201 bp, Homo sapiens
gtatgtgcgccaggagctcaagcccgagcgcctccagccgcgcattgaccggctgccggagatcccggggagggtggagcccgcggccctgccggccgcaycagaggacgcggcggagacccccgcgacccccgcggcggcggagcaggtgcggccacgaccggagcgccaggagtcagctgatcgcgcggaggagctgcc

SEQ ID NO: 501767 - DNA, 201 bp, Homo sapiens
aggaggaggtgtcggaaaagtgggaccgccattgggagtggctgcagcagagtgagtgggggcccaggcacacgtggttcaagggcacagggacatgctcyagcctgtccagccaaggcccagagggtgacaggagcatgctttgcaccctacccatgggtctccagaagcaaacataagggcctggaagggtggacaagg

SEQ ID NO: 501768 - DNA, 201 bp, Homo sapiens
agtgccgggcgctgctggagatggggcacccggacaggtgggcgggcgcgtggccagttcacaggaatggtccagcaggacctgaagcttcgctgttgggrgttggcgcagcgctggaattggacgttgggtgggagaggtcctccttgctgtgtgctggagccctcgaatttggcaagtgggcgggccggaatgggggga

SEQ ID NO: 501769 - DNA, 201 bp, Homo sapiens
taaagcaagaacctatctcaaaaaaaaaaaaaaaaaaaaaaaaaaaagagctttggaaatgtgaaacgttatcatcacagacctaagaaattttagtcatkgttccctaggatcataggcccttagaaactgaaactgtaatacacaggaacctttgggacttgataatactaaacctttggagtttccaattagaaatgt

SEQ ID NO: 501770 - DNA, 201 bp, Homo sapiens
cctggatccttcctttgttccactttttttttttttttttttgagacagggatcttactctgttgcccaggctggagtgcagtggtgcaatcatagctcamtgcagcctggaactcctgggctcaaccaactctcctgcctcagcctcctgagtagctggactataggtgtgagccactgagcatggcctgttccacattt

SEQ ID NO: 501771 - DNA, 201 bp, Homo sapiens
agggagggatccaaggctcagcttcaactcccagtgggaccctggcttccctgggggacacttggtgggcaggtgggctgggccccttccccagatctctsaagtcctgtgtcccttcctgcaggacccaggatggcagtgagtttttgctccaggcaaaagatgaggtgagatctggtcctttcctccctctgtgtggac

SEQ ID NO: 501772 - DNA, 201 bp, Homo sapiens
agagaaggaaaagttattggaacttggaaggggagagttgccagacaggagctggcactcttagtcaagaacggcagccatggccagacgcagtggctcaygcctgtaatcccagcactttgggaggccaaggcgggtggttcacttgagatcaggaattcaagaccaacctgggcaacatggcaaaaccccgtctctact

SEQ ID NO: 501773 - DNA, 201 bp, Homo sapiens
gctgtcttcccctccttcccttgcattccatagaaacgattctagactttggccacattagagatggcctagtaaacattttcctaaaccctaaacagagmtaggcctggccctgagcccctccatctgtgtgacccaggatcatcccctcctccatcatcaccccgtacctaagtttcttccaaccaaagctggttcagg

SEQ ID NO: 501774 - DNA, 201 bp, Homo sapiens
ggaggaagtccaggcagaaaggtcagggcccggatgggagacgtgcagccgctgtgggagaggcagcatttgtcccaggcttgtggtgggtgaggtgtggwcacagagggattgagacggactaatctctgcaccttcccaccatcccagtcatttatttgtctagggacacatttcccaccctgtgggaggagtgggagg

SEQ ID NO: 501775 - DNA, 201 bp, Homo sapiens
cccgaccttgttttgcattgtgatattttccgttccttctattctattccaccaaacaaatgctggctgtgacccattaaattaacttcactgttttctartcgccaactagccatccaggaggaaggtgaactatttaaggaaaaagagggagttcggggttaagcacagtggctcatgcctataatcccaacacttcgg

SEQ ID NO: 501776 - DNA, 201 bp, Homo sapiens
atcagggcaggtgggagggcctggacagctgtgggcagcagagtgggcaaaaatcaggctgtggagcaggtcgaaattaggcagtggcacagacagaaagyggactacagaacaggaagaaattagataatggagcagatagaaaatggactgatggaatgatatatagaaatcaggtattggcagggaaaagtggtacct

SEQ ID NO: 501777 - DNA, 201 bp, Homo sapiens
gcgagacaggtatggcagggcgggaacggctggcagctgtgaaccagatggtggatgagctgatcgagtgtggccatacagcagcggccaccatggccgartggaaggacggactgaacgaggcctgggctgagctgctggagctcatgggcacacgggcccagctgctggccgcctctcgggagcttcataagttcttca

SEQ ID NO: 501778 - DNA, 201 bp, Homo sapiens
ggctggagtgcagtgccatgatctcggctcacagcaacctccacctcacaggctcaagtgattctcccatctcagcctcccaagtagctgggactacaggygtgcaccatcacacctggctaatttttgtatttttagtagaggtggggtttcatcatgttgcccaggctggtctcaaactcctgacctcaggtgatctgc

SEQ ID NO: 501779 - DNA, 201 bp, Homo sapiens
ctgccacctaggctggagtgcagtggcttgatctcagctcactgcagcctctgcctcctgggttcaagcagttctcctgcctcagtctctggagtagctgrgattacaggcctgtgccaccaagcctggctaatttttgtatttttagtagagatggggtttcagcatgttgcccaggctggtctcgaactcgtggcctca

SEQ ID NO: 501780 - DNA, 201 bp, Homo sapiens
actagcctgggtaacggagcaacagcctgtctctattttattttatttagttatttgagccaggatctcgctctgttagcaggctggactgcagtggtgcratcacggctcactgcagcctcaacctctggggctcaagtgatgctcctccctcagtcccgcaagtagctgggactacggacccacaccaccatgcctgat

SEQ ID NO: 501781 - DNA, 201 bp, Homo sapiens
tgggctggggtttggccggctggggatctgggatttgtccttggctatgactgcatttgcctcccgggaccgcggagctggagtccagtgtttgttttttkttttttttttttttttttttttgcaggagggaggagggaggatcttgtgactggagtggggaggagaaaggggaggagcaaactgtttcaggtgccaggt

SEQ ID NO: 501782 - DNA, 201 bp, Homo sapiens
tgagttggggggttcagcactggacttggttctagtgtgtgtatgaaggagtgtgatgctgtcctggacccctggggagcacatgctcaggggacatgggmtggggtttggccggctggggatctgggatttgtccttggctatgactgcatttgcctcccgggaccgcggagctggagtccagtgtttgttttttgtttt

SEQ ID NO: 501783 - DNA, 201 bp, Homo sapiens
tgccttctctatgaggaacgtgggagccatgcgagagtttagagcagagtggagtgatgtgatgtgtacatttgagaaaaataggccgggcatggtggctyatacctgtcatcccagcactttgggaggccaaggcgggtggatcacttgaggacaggactttgagaccagcttggccaatgtggcgaaaccccgcctcta

SEQ ID NO: 501784 - DNA, 201 bp, Homo sapiens
aaacaccgctaagaaacgggtacgattatcattacttttttttttttttgagacggagtttcactcttgtcacccaagttggagtgtaatggcgcgatctyggctcactgcaacctctgcctcccgacttcaagcagttctcctgcctcagcctcccaagtagctgggattacgggcatgagctaccatgcctggctaatt

SEQ ID NO: 501785 - DNA, 201 bp, Homo sapiens
atggtgaaaccccgtctctactaaaaatataaacattagccaggtgtggtggcgcatgcctgtagttccagctagtcaacaggctgaggtgggagaatctyctgagcccgggaagcagaggttgcagtgagccgagattgtgccactgcactccagcctgggcaacaggttgagaccctgtctcaaaacaataagaaacct

SEQ ID NO: 501786 - DNA, 201 bp, Homo sapiens
gaagccactgcttctgaccccattcagatagtttttaatgtgaatctttttctttgcatgagaataattttgcaaaatgtgcattgctaatgagtaagcawtatatatatatatatatatatatatatttaactttttattattaaagtagttcatgacacagaatggcagataaatcatgccaatatttccacaaatgag

SEQ ID NO: 501787 - DNA, 201 bp, Homo sapiens
gaggcaggagaatggtgtgaacctgggaggcggagcttgcaatgagcggagatcaagccactgcactccagccggggttaacagagagagactccgtctcaaaaaaaaaaaaaaaaaaattagctgggtgtggtggcatgagcctgtagtcctagctactcaaaagactgaggtgggaagattgcttgagcccgagttcca

SEQ ID NO: 501788 - DNA, 201 bp, Homo sapiens
ggggagcacatgctcaggggacatgggctggggtttggccggctggggatctgggatttgtccttggctatgactgcatttgcctcccgggaccgcggagstggagtccagtgtttgttttttgttttttttttttttttttttttgcaggagggaggagggaggatcttgtgactggagtggggaggagaaaggggagga

SEQ ID NO: 501789 - DNA, 201 bp, Homo sapiens
tgtagtcctagctactcaaaagactgaggtgggaagattgcttgagcccgagttccaggctgcagtgacctaagaaggtgccactgccctccaacctgggsaacagaatgagataccatctctaaaaaacaaacaaacagaatgtgacatatgacagctccagaaaagcatcctcatgccacctccctatcactacagtcc

SEQ ID NO: 501790 - DNA, 201 bp, Homo sapiens
aggtgggaagattgcttgagcccgagttccaggctgcagtgacctaagaaggtgccactgccctccaacctgggcaacagaatgagataccatctctaaaaaacaaacaaacagaatgtgacatatgacagctccagaaaagcatcctcatgccacctccctatcactacagtccaagggtgtactctcttaacttctaac

SEQ ID NO: 501791 - DNA, 201 bp, Homo sapiens; identical to SEQ ID NO: 230373

SEQ ID NO: 501792 - DNA, 201 bp, Homo sapiens; identical to SEQ ID NO: 230378

SEQ ID NO: 501793 - DNA, 201 bp, Homo sapiens; identical to SEQ ID NO: 230379

SEQ ID NO: 501794 - DNA, 201 bp, Homo sapiens; identical to SEQ ID NO: 230381

SEQ ID NO: 501795 - DNA, 201 bp, Homo sapiens
gctttggtgcggcctcggggccgagctgtgccccccttcgtattcacgcgccgcgggtaagggcatgggttccaccctggcggggggaacaggcgggcggycaggcgtcccgcgccacgggggaacttccaccgctgtaccccactacagccaagccaggacgacccccatattttgagcctcattggagctgggggtgga

SEQ ID NO: 501796 - DNA, 201 bp, Homo sapiens; identical to SEQ ID NO: 230385

SEQ ID NO: 501797 - DNA, 201 bp, Homo sapiens
taccgcgaagtacattggccttggggtggggctggagggatgggcgcctgtgagaatgtgacggactgtgacacaaggaagggtgcgaggatggaaacttyctctgaggggctctagtggggcggaaacaacagtagggaggaagtgcggaggggcggcgggaagtgagggaaaatggaggtgaaatggcctgaggggcta

SEQ ID NO: 501798 - DNA, 201 bp, Homo sapiens
tcactccctcgcgttcgctgacgaggaaggtccccataccgcgaagtacattggccttggggtggggctggagggatgggcgcctgtgagaatgtgacggrctgtgacacaaggaagggtgcgaggatggaaacttcctctgaggggctctagtggggcggaaacaacagtagggaggaagtgcggaggggcggcgggaag

SEQ ID NO: 501799 - DNA, 201 bp, Homo sapiens
ctaggtttaaaaaggaacttttaaattccttaatgttaatattaatgttcatgttaatgtcctaagctggccattaacatgaactacgtcacttttctttkgagggtcaaatatttagtgcattttatagaagtgtaaattatttaaatcttatgtggattcttttattttttccttaaacttcttagtgtttctgaaact

SEQ ID NO: 501800 - DNA, 201 bp, Homo sapiens
cctgaaacaaggcagaattgccagagagactcatttggctaagtacatagagaggagtagttgaaaatgatgggactagtaggcttgcaccagataatacrggaccttgaaggccatatcatggaatttcaacttattctggaacaatgaaagtttttgagttaaaggaatgcagtaatcaaagttttgaaagattaccca

SEQ ID NO: 501801 - DNA, 201 bp, Homo sapiens
cgtaaacttacatactataaaggtactggcaggaatggagacgtacgatacagaatttacttaacaagcatctttcaaatttgttgttgctctttctgtcwtctatatatgcatattttataggactaatcaaacagatgtgttaaagttacccaaatcagcatcgtttctcaaaaacaacaaagtcaattgataacttga

SEQ ID NO: 501802 - DNA, 201 bp, Homo sapiens
ttgtagctggtgccttcggaatatgatggcaaatcaccttgtaaagcctgataatagaaattgcaagaggccaagagaattggaggtaagctgtatgcctrtggagccttaatcttttattctgttttacatactactcaaatttcttccctttaagaaagctctatagataagtgggatttaatgtattcgtatgcccag

SEQ ID NO: 501803 - DNA, 201 bp, Homo sapiens
gaggccaagagaattggaggtaagctgtatgcctatggagccttaatcttttattctgttttacatactactcaaatttcttccctttaagaaagctctayagataagtgggatttaatgtattcgtatgcccagagctaggattgtcctacaacataggaggaactatgttgattccagctgctttttcactaagtatag

SEQ ID NO: 501804 - DNA, 201 bp, Homo sapiens
atgctttctagcatgtttgcctttttctgaaaaatgttttatttgctttttcttaataaacaaaatgtatatgtcctgaagatcttattgactgtacctgytttctttattttgtcctgttagtctccagtgccagatagtccacagctgtcctctcttggaaaatcagattcatctttctctgaaatttccggactattt

SEQ ID NO: 501805 - DNA, 201 bp, Homo sapiens
caatgctattgaaaactttctaatacaaaaaagagagttcctgcgacagaggtttacagtgattgcaaacacattacacagataaaatatatacttgaaawaagctgagaatttaaacctattattgttataatgaaagaatgacatttatgctttgaaagctctcgagttgttaaagaaaatgtatatctcgaatagaga

SEQ ID NO: 501806 - DNA, 201 bp, Homo sapiens
aaggctgggcgcattggctcatgtctgtaatcctagtgctttgggaggctgaggcaggagtatcgtttgaggctaagagtttcagatcagcctgggcaacrctgcaatacattgtctctgaaaacaaaacaaaacaaaacaaaattagctgggcatggtggaatgttcctgtagtcctagctactcaggagtctgagacag

SEQ ID NO: 501807 - DNA, 201 bp, Homo sapiens
tctagatactattaatactattacagcacgtaaacttacatactataaaggtactggcaggaatggagacgtacgatacagaatttacttaacaagcatcwttcaaatttgttgttgctctttctgtcttctatatatgcatattttataggactaatcaaacagatgtgttaaagttacccaaatcagcatcgtttctca

SEQ ID NO: 501808 - DNA, 201 bp, Homo sapiens
agggatgactgtatttatattttacctatatctattttaagaccaaatttaaatactttattagcctaatatgttttatgaagtgttttttttacactgcyggacagtcattatacttggatagtggtttgtgtggctgtaaaaataatgtatgtaattgaatattagtgttataatgtataagatacacttcctgttgtg

SEQ ID NO: 501809 - DNA, 201 bp, Homo sapiens
tgtagcatggagtttgtacctaaatctggcattgttctaagctttgtagctggtgccttcggaatatgatggcaaatcaccttgtaaagcctgataatagraattgcaagaggccaagagaattggaggtaagctgtatgcctatggagccttaatcttttattctgttttacatactactcaaatttcttccctttaaga

SEQ ID NO: 501810 - DNA, 201 bp, Homo sapiens
ctggagtgcaatggcacaatctcggctcactgcaacctccctctcctgggttcaagcgattctctcacctcagcttcccaagtagctgggattacaggcgyctgccaccacgcctggctaatgtttggatttttagtagacacagggtttcaccatgctggccaggctggtctcgaactcccgacctcaggtgatcttcct

SEQ ID NO: 501811 - DNA, 201 bp, Homo sapiens
caaagttagcactgctgtgcatgtgtagtattttctagatactattaatactattacagcacgtaaacttacatactataaaggtactggcaggaatggasacgtacgatacagaatttacttaacaagcatctttcaaatttgttgttgctctttctgtcttctatatatgcatattttataggactaatcaaacagatg

SEQ ID NO: 501812 - DNA, 201 bp, Homo sapiens
ccaggctggtctcgaactcccgacctcaggtgatcttcctgcctcagcttcccaaagtgctgggattacagccgtgagccagcgcgcccggccgaagataraagaatcttaactgagccagtcctgaaacaaggcagaattgccagagagactcatttggctaagtacatagagaggagtagttgaaaatgatgggactag

SEQ ID NO: 501813 - DNA, 201 bp, Homo sapiens
tttttcactaagtataggcctccaagaaactattgggagatttctttttggtagcttgagatctagagacagaagtgagtctgtgcctttatgatccatargattttatgtaattattttgctgtgataagtaagataactaggtactatagttactgatctttttaaagagcacagtatcctgtcttttactactgcccc

SEQ ID NO: 501814 - DNA, 201 bp, Homo sapiens
tgtggattcttttattttttccttaaacttcttagtgtttctgaaacttctaaaaaaggattcagttaatttataatgtttaataatattatacttttagratattttgtttaaatatcagatagttttggagataattttgaaattttttttatggtcaggattataaaagaagattaaaaccttagaggtgatttttcc

SEQ ID NO: 501815 - DNA, 201 bp, Homo sapiens
ttcccaagtagctgggattacaggcgcctgccaccacgcctggctaatgtttggatttttagtagacacagggtttcaccatgctggccaggctggtctcsaactcccgacctcaggtgatcttcctgcctcagcttcccaaagtgctgggattacagccgtgagccagcgcgcccggccgaagataaaagaatcttaact

SEQ ID NO: 501816 - DNA, 201 bp, Homo sapiens
tgtctctcttcttcctgtctggcccattgcagagagtattggaagtttccaaccattggtggtactctatgctcatcctacctcctttgctgaaagacagygtggcagcgcccctgctgtctgcctactaccctgactgtgttggcatgagcccctcctgcaccagcacaaaccgcgccgctgccactggcaatgccagcc

SEQ ID NO: 501817 - DNA, 201 bp, Homo sapiens
aggtggtgaaacctggtctctactaaaaatacaaaaattagccggacgtggtggcacacacctgtaatcccagctactcgggaggctgaggcagaagaatmgcttgaacccaggaggtggatgttgtagtgagccgagatcgcaccactgtactccagcctgagccacggaggaagactccgtctcaaaaaaaagaaaaaa

SEQ ID NO: 501818 - DNA, 201 bp, Homo sapiens
gtattttaaaaatttaaaagtaggtcagtttataacgagtaaatacctaacacaccaagaatgtgcagtgaacctcaggcatttaagacacctcccccacygcccgccccccgccccccccaatcaaagtgtggtcccaaaacaagccaacagctgtatatctcaaaagttaacccaagacaactctgatatttaggttat

SEQ ID NO: 501819 - DNA, 201 bp, Homo sapiens
aaaataaaacactggttgcagggtcttcaggatgcctattttgccaagaaacttcagtatacaggttagaaatatgcttttgtttttgaacaataatataytggtttgctttaaagaagggactaaatatgactttaaagagacttcaaaatattgagtattttaaaaatttaaaagtaggtcagtttataacgagtaaat

SEQ ID NO: 501820 - DNA, 201 bp, Homo sapiens
tgggtgtggtggcgggcgcctgtagtctcagctactcgggaggctgaggcaggagaatggcgtgaacctgggaggtggagcttgcagtgagcagagatggygccactgcactgcagcctgggcgacagagtgagactctgtctcaaaaaaaaaaatagagggtataactgctctaaataaagaaaaaacaaatcgcaattt

SEQ ID NO: 501821 - DNA, 201 bp, Homo sapiens
gagttcaagccattcttctgccttagccttccaagtagctgggattacaggcgtgcactaccgcacctggctgatttttgtattgttaatagagacaggasttcatcatgttggtatggctggccttgaattcctgaccttgggtgatctgcctgcctcagcctcccaaagtgctgggattatagcactttggtggtagct

SEQ ID NO: 501822 - DNA, 201 bp, Homo sapiens
ggcgggcgcctgtagtctcagctactcgggaggctgaggcaggagaatggcgtgaacctgggaggtggagcttgcagtgagcagagatggcgccactgcaytgcagcctgggcgacagagtgagactctgtctcaaaaaaaaaaatagagggtataactgctctaaataaagaaaaaacaaatcgcaatttggggaatgac

SEQ ID NO: 501823 - DNA, 201 bp, Homo sapiens
tctgatttactcctacctgatctttcagttactaagaaaagtgtcttaaagtctgcaattataattgtctcttaacatttccaactataatgcagatatgyctatttttcctttcagttctatatatttttacctcatgtattttttttcttgagatggagtctcgctctgttgcccaggctggagtgcagtggtgcgatc

SEQ ID NO: 501824 - DNA, 201 bp, Homo sapiens
tgaagcctttggcccctggatgttttcccttctatccaggcatcagtttaggtgactacacttcacttcacctctccatttcttatcctccattttctgckgtctgttcagctcctcttcagctacccctttccacagccacatctcagaccttgtcataattacttaatcactaattcaggcctcctcctatcctgtcct

SEQ ID NO: 501825 - DNA, 201 bp, Homo sapiens
tgttactgatttctagtttagttcagcaatggtctgagaatatactttgtatgatttctacgttttaaatttgtcaaagtttgctttatggcccgtaatgyagtgtatcttggtaaatgtcctgcatgcagtggagaaaaatgtgtattttgctattgtcaggtgggtctatcagtgtcaactagaccaagttgattgata

SEQ ID NO: 501826 - DNA, 201 bp, Homo sapiens
tcccccaggctggagtgcagtggcgtaatctcggctcactgcaagctctgcctcccaagttcacaccattctgcctcagcctcccaagtagctgggactayaggcacccgctaccacacctggctaattttttgtatttttagtagagacggggtttcactgtgttagccaggatggtctcgatctcctgacctggtgatc

SEQ ID NO: 501827 - DNA, 201 bp, Homo sapiens
tacttgtgtttgctttaggtttaattttttatttctctagtttcataaattagtagcttcaattatttatttttagatctttcttcttttccaataaatgygtttttaaatgccataaatttctgtccaagtaggttgtgatatttcacaaattttgacaacttttattttaatttagttcaaaatatttttaaatttcca

SEQ ID NO: 501828 - DNA, 201 bp, Homo sapiens
tttgttttttacattagttgtttggaacttagcttaccgtttctatagaaatattgtttatcgtgttgcttgttggaggccagctgacaaattacagtcgytctctcttactcgaggctttgctttcatggtttcagttactgtggtcaaccaaggtctgaaaatatttgatggaaaattccagaaatagattcataagtt

SEQ ID NO: 501829 - DNA, 201 bp, Homo sapiens
tggagtgtagagacataatttcagcttactgcaacctccaacttctgggttccttaatagagatggggtctcgccatgttgtccaggctggtctcaaactyctgggctcaaacgatctgcctgccttggcctcccaaagtgctgggattacaggcgtgagccactgcacccagcgaaacagttatttcttgagtcaaagtt

SEQ ID NO: 501830 - DNA, 201 bp, Homo sapiens
atcacatttattgatttgcatatgttaaaccatccctacatccctggtatgaaacccacttgatcatggtggattatctttttgatatgttgttggattcrgttagctagtattttgttaagcatctacattagctagtattttgttagcgtctatgttcatcaggaatattggtctgtagttttcgtttttggttatgtc

SEQ ID NO: 501831 - DNA, 201 bp, Homo sapiens
acatgcagatagtctcttttctccacggagctcaggatactttgtttgccagtgtactaaatctcaccatctctggagatttgtaaatggccatggcttayatctttttgaaataaaggagcagaaatagaagtgaaatgactcaaaagttatgtaagttaaagagaaaggggcattcagatatgttgcttattttatttc

SEQ ID NO: 501832 - DNA, 201 bp, Homo sapiens
gtacacaccacaccctcctcaaggccctccctacttatccctagcctactgggagaggccacacccatgtcaattttgcaacacagtgtcctcaaatccarccaaccatatctacctctccaagggttgagggtgggatggtgtatgtcgtggtgagacagtagagagaactcatgagctttctgtagacaccagtgtttg

SEQ ID NO: 501833 - DNA, 201 bp, Homo sapiens
taaaccatccctacatccctggtatgaaacccacttgatcatggtggattatctttttgatatgttgttggattcggttagctagtattttgttaagcatmtacattagctagtattttgttagcgtctatgttcatcaggaatattggtctgtagttttcgtttttggttatgtcctttcctggttttggtattagggtg

SEQ ID NO: 501834 - DNA, 201 bp, Homo sapiens
gtttagaactcagctgtgatttcagtagtgaaccttcatccttagtcattttgccatcatcagtgaaattttaacatcagctgtgactcccttaggcgaaraagaaagcaacagagacaacagatgaggatgaagatggtggctcagagaagaagtacaggaaatgtgaaaaggcaggctgtacggcaacatgtcctgtgt

SEQ ID NO: 501835 - DNA, 201 bp, Homo sapiens
atctcatgagaactcattatcacaagaacagcatgagggtaactgcccctgtggtttaattacctcctaccagctccctgccatgacacatggggattatrggaactacaattcaagatgagatttgagtggggacccagccaaaccatatcagtatgtatatatgtgtgtgtgtgtacacacacacacacacacacacac

SEQ ID NO: 501836 - DNA, 201 bp, Homo sapiens
agatggcgccactgcactgcagcctgggcgacagagtgagactctgtctcaaaaaaaaaaatagagggtataactgctctaaataaagaaaaaacaaatckcaatttggggaatgacttttttttttttgactcatgtcacttttttttttttttttccagacaatctcctctatcccccaggctggagtacagtgacaca

SEQ ID NO: 501837 - DNA, 201 bp, Homo sapiens
atttactttattttttattttattttattttttgagatggagtctcactctgttgcccagactgtagtgcagtgacactatctcagctcactgcatcctcyagctcctgggttcaagcaattctcctgcctcagtctcctgagtagctgggactccaagcacgtgccactacagctggttaattttttttttttttttctt

SEQ ID NO: 501838 - DNA, 201 bp, Homo sapiens
agtagctgggactccaagcacgtgccactacagctggttaattttttttttttttttctttttgagacagaatctcagtctgtcacccaggctggagtgcrgtggcgtgatcttggctccctgcaacctcctcctcccaggttcaagcgattctcctgcctcagtctcccgagtagctgggattacaagcgcatgctacca

SEQ ID NO: 501839 - DNA, 201 bp, Homo sapiens
gttattggactagtttgggaaattttttccagtagaagataccagtgcttctatctaatttagatctgtatattcagtagtgactagatggttttcttgawatttatttgttgagttgtactgaaaaggaatgaatgagttttcttttattttttttgagatggagtcttgctctgttgcccaggctggagtgcagtagca

SEQ ID NO: 501840 - DNA, 201 bp, Homo sapiens
gacagaatgtttgagcaaggacaggcagtgtctagcatctgaaacattagccaaaaagttacaatgggcatggcgtaggagctgttgctgcccctctcacrttctcatcaaataaaatcttgtagatttcatgctgttttttttcactgcctgactttgctgccattccccgtgaagcatatttagctttatttttgagag

SEQ ID NO: 501841 - DNA, 201 bp, Homo sapiens
actgtgcccggcctccagttaaatttttttatgcccgtcaaaaacgccctttgcggagcttgcagtgagccaagattgcgccactgcactccagcctgggygacagagcgagactccatctcaaaaaaaaaaaaaaaaaaaaaaaaaacgccctttgaatctcatttcagacatgacccactgctccaggcctagcacatg

SEQ ID NO: 501842 - DNA, 201 bp, Homo sapiens
taaagcgatctgcctgccttggcctcccaaagtgctgggattacaggtgcgagccactgtgcccggcctccagttaaatttttttatgcccgtcaaaaacrccctttgcggagcttgcagtgagccaagattgcgccactgcactccagcctgggtgacagagcgagactccatctcaaaaaaaaaaaaaaaaaaaaaaaa

SEQ ID NO: 501843 - DNA, 201 bp, Homo sapiens
atgtaggtgattatagctttagcgatagccttgccattgatcaggacaaacgctagtctgttgctgttaataaatatagtaaaagccacattatcaccatraaacttaacagaagcaaggctttcgcagaatgtgtttctcctgaaaggagaatatcaagcactctttccccagattgtagggaaaaagggaagggagtaa

SEQ ID NO: 501844 - DNA, 201 bp, Homo sapiens
ctgtattttatgaccagaaaaggtctcatcaacactggagttctcagcgtgggagccgaccagtatcttctccctaaggactaccacaatgtaggtgattrtagctttagcgatagccttgccattgatcaggacaaacgctagtctgttgctgttaataaatatagtaaaagccacattatcaccataaaacttaacaga

SEQ ID NO: 501845 - DNA, 201 bp, Homo sapiens
tttcctacacaatattatgtaacaactatttacatagcatttacattgtattaggtattataagtaatctagaggtagcgtaaagcatgctggagtctgcrtagattatatgtaaatattatgtcattttacataagggacttgagaatctatggattttggtcttctcaggaggattctagaaccaatctcctcctggaa

SEQ ID NO: 501846 - DNA, 201 bp, Homo sapiens
cgcccaggctggagtgcagcagtgcgatctcagctcaccgcaacctctgcctcttgggttcaagctgggattacagatgtgtgccatcatgcccagcgaakttttgtatttttagtagagtggggtttcaccgtgttggccaggccggtcttgaactcctgacctcaagtgatctgcctgccttggtctcccaaagtgctg

SEQ ID NO: 501847 - DNA, 201 bp, Homo sapiens
attgtttccaccttttccctatttgaatactgctgctgtgaacattttgtttgaacatctgttttcagttctttttggtatatactaaggattggaattastgggtcatatggtattttaggtttaaccttttgaggaaccaaaaaaagtttcaaacattaattggtttgccttttaaattgagaaatttaaacattgtat

SEQ ID NO: 501848 - DNA, 201 bp, Homo sapiens
tcagaagaaattctaacttggcattaaagtagaaattcttttttttttttttttttgagacagagtcttgctctgtcgcccaggctggagtgcagcagtgygatctcagctcaccgcaacctctgcctcttgggttcaagctgggattacagatgtgtgccatcatgcccagcgaatttttgtatttttagtagagtgggg

SEQ ID NO: 501849 - DNA, 201 bp, Homo sapiens
gtggttaaatacacataacataaaatttaccatatttttttccttcttattttttttaaatggagacaaggtcttgctatgttgcacaggctggtctccargttttgggctcaagtgattgctcctcctgcctcagcctcccaaagtggtgggattacaggcatgagccaccgtgcctagccctattccatcttaaccatt

SEQ ID NO: 501850 - DNA, 201 bp, Homo sapiens
gtttccaaaaaaacccacagagattctcttgaccctagcatttttctgatttattaatttaatcagcagtttgcgtcattgctgaattcagaacattgtgsaagactgccaaagtgatcttgactaaagaaagatatgccagtttcaccttggcatttcactggattagaatccagaatgaaatgacataacctgattaag

SEQ ID NO: 501851 - DNA, 201 bp, Homo sapiens
acgatgggtgagtgtgaatatgagcacacaggagtggcacaaatctttatgttagaccagataaagtctaaccttgttttaccttttgatatcaactcaaytctatgcatgatctcaaattatgtaattatgttttacaggcaacaaacaggcatttcccacaaactgttacaggggcatatttgagtggcgttcgagaag

SEQ ID NO: 501852 - DNA, 201 bp, Homo sapiens
ccaccagcattagaaatttgggggcaataaaatagcctgggtatgagacagacctcattaggccaagcccatgaagtaatatttatatggagtggcatactttttttttttttttttaaataatatatcttagggaagttaaagcttatttgcagtcctaaaggaattttgctatgtagatatttcttaggaaaaatcacc

SEQ ID NO: 501853 - DNA, 201 bp, Homo sapiens
tgtttttaaagcttctcaagtgattccagtgtgcagccgtggttgagaaccttgtctgcagtgaccttttctgtaagctcttaataggttttgcctggtgrtaaacagtgtttaaaaatactaccttttaaaattgcaagtcacccgacagttcagcctctgctgttctgtagctccacttcttggtgtccaggacagcaa

SEQ ID NO: 501854 - DNA, 201 bp, Homo sapiens
ggagtgcagtggcgtgatcttggctccctgcaacctcctcctcccaggttcaagcgattctcctgcctcagtctcccgagtagctgggattacaagcgcaygctaccacacctggctaatttttatatttttagtagagacggggtttcatcatgttgcccaggctggtctcgaacttctgacctcaagtgatccgccccc

SEQ ID NO: 501855 - DNA, 201 bp, Homo sapiens
agaattctactttgccagagttgtcaatatagaaaatcagcttctatttttatcaaggagtggtacccatgtccaagtcatatggaccttttgttctcaartaaactttcctcaaataaaattatcgagatttcctcccccagtggtggtctctgcctaggctggtctgcctgtcccctgccctcctgccttggtggctgt

SEQ ID NO: 501856 - DNA, 201 bp, Homo sapiens
ctcccaggttcaagcgattctcctgcctcagtctcccgagtagctgggattacaagcgcatgctaccacacctggctaatttttatatttttagtagagayggggtttcatcatgttgcccaggctggtctcgaacttctgacctcaagtgatccgcccccttcagcctcccaaagtgctgggattacagacatgagccag

SEQ ID NO: 501857 - DNA, 201 bp, Homo sapiens
ggaatcatgctattttccaaaatcgtgcagggtttctattctgtagagcttccatgttgaggacagatagcatatttatatatgttgatcaaatacagttytaccctcatagaattctactttgccagagttgtcaatatagaaaatcagcttctatttttatcaaggagtggtacccatgtccaagtcatatggaccttt

SEQ ID NO: 501858 - DNA, 201 bp, Homo sapiens
tcccgaatagctgggactacaggtgcccgccaccacccccggctaatttttttgtatttttaggagagatggggtttcaccgtgttagccaggatggtctygatctcctgatgtcgtgatccgcccacctcagcctcccaaagtgctgggattacaggcgtgagccaccgcgctggccggtggatagtactttgaacatca

SEQ ID NO: 501859 - DNA, 201 bp, Homo sapiens
gagtagctgggattacaagcgcatgctaccacacctggctaatttttatatttttagtagagacggggtttcatcatgttgcccaggctggtctcgaactyctgacctcaagtgatccgcccccttcagcctcccaaagtgctgggattacagacatgagccagtgcacccggcctgattatttactttaaaggcatcttt

SEQ ID NO: 501860 - DNA, 201 bp, Homo sapiens
aataccccagtattctgtattttgaatagaactccacggatgatttcagaggcccctttgggacctctccatttccacttggttctgcattgtgattggartcatgctattttccaaaatcgtgcagggtttctattctgtagagcttccatgttgaggacagatagcatatttatatatgttgatcaaatacagttttac

SEQ ID NO: 501861 - DNA, 201 bp, Homo sapiens
aaaatagaaaaattagccagatgtggtggcgagcacctgtaatcccagctactcaagaagctgaggcatgagaatcacttggacccaggagatggaggtcrcagtaagccgagattggaccactgcactccagcctgggcaacagagcaagactctgtctcaaaaaaaaaaaaaattaagatgataaattttatggtatgc

SEQ ID NO: 501862 - DNA, 201 bp, Homo sapiens
cttgttaaagtaaatttaagcttgcctaactcatttaaccaactgtgaacttaataccccagtattctgtattttgaatagaactccacggatgatttcasaggcccctttgggacctctccatttccacttggttctgcattgtgattggaatcatgctattttccaaaatcgtgcagggtttctattctgtagagcttc

SEQ ID NO: 501863 - DNA, 201 bp, Homo sapiens
acctgtaatcccagctactcgggaggctgaggcagaagaatcgcttgaacccaggaggtggatgttgtagtgagccgagatcgcaccactgtactccagcmtgagccacggaggaagactccgtctcaaaaaaaagaaaaaatctttttgaataagctgcttcagaaaaacctagggattattataatgaaatctacatat

SEQ ID NO: 501864 - DNA, 201 bp, Homo sapiens
aaaaaaaaaaaaaaaaaagaatttatatacttaatactatagtgggaaaacataaatatattggctttaaaagaatcaaagactttgaaatgtgtgctttytttttttttttttttttttttttgagacacagacttgttctgttgcccaggctggagtacagtggcaccatcacagctcactacagcagcctcgccttcc

SEQ ID NO: 501865 - DNA, 201 bp, Homo sapiens
cggttgtgcacatgtaccctaaaacttaaagtataataataataaaattaaaaaaaaagataaactttctcttcctgagagaaatggaccttatcaagagwtcttttcccctctgactttacttgggaaaagactttggaagttttgggtgttgctgggtgacagaggttgaaagcaaaggagaaagaattggagaatctt

SEQ ID NO: 501866 - DNA, 201 bp, Homo sapiens
gggacagtttttctgtatcttgagcaaaagaggaaaccacttctcaacgaagcgaaattgagacgtttctgaagatatagaacttacatagctttgtttcyggttgtgcacatgtaccctaaaacttaaagtataataataataaaattaaaaaaaaagataaactttctcttcctgagagaaatggaccttatcaagaga

SEQ ID NO: 501867 - DNA, 201 bp, Homo sapiens
aaaaaaattatgtattactaatctgaacatcatatttaaggaggcagcctgtctttaatctggcagtcatagagagtttatttgaagagttggtaggcccragactttttctgaaatgtttattgatggtcaattcaatttcaacttctgctatgagtgtttgtgtgtttgtgtgttcatttacatgagggtccacagagg

SEQ ID NO: 501868 - DNA, 201 bp, Homo sapiens
gcagtggctcacgcctgtaatcccagcactttgggaggccgaggtgggcagatcatgaggtcaggagatcgagaccatcctggccaacatggtgaaacccygtctctactaaaatacaaaaaattagccaggcctggtggcgcatacctgtagtcccagctactcgggaggctgaggcaggggaatcgcttgaacctggga

SEQ ID NO: 501869 - DNA, 201 bp, Homo sapiens
aatactaaatacattatatgtttatattaggtcctagaaaagttataaaacttgaaattgatttcataagaaaaaggtaaatagaaattctcacagctttrgagataattttagactctaatgagcaagtcagaagaaattctaacttggcattaaagtagaaattcttttttttttttttttttgagacagagtcttgct

SEQ ID NO: 501870 - DNA, 201 bp, Homo sapiens
taggcaaggccaagtaagtttgggaagtattgtatacgatactctacttttaggattaaataggagttgtatagggttaaatagaagtatgtgtatgtgtrtatatatatatatatatatatatatatatttttttttttttttttttttttttttttttgagatggagtctcgtgctgtcacccaggctggagtgcagtg

SEQ ID NO: 501871 - DNA, 201 bp, Homo sapiens
ggcaaggccaagtaagtttgggaagtattgtatacgatactctacttttaggattaaataggagttgtatagggttaaatagaagtatgtgtatgtgtgtrtatatatatatatatatatatatatatttttttttttttttttttttttttttttttgagatggagtctcgtgctgtcacccaggctggagtgcagtggc

SEQ ID NO: 501872 - DNA, 201 bp, Homo sapiens
cagtggctcacacctgtaatcccagcactttgggaggccgagacgggcagatcatgaggtcaagagtttgagatcagcctggccaaaatggtgaaactccrtctctactaaaaaaaaatacacaaaaaattagccaggtgtgtggtatgtgcctgtaatccctgctactggggagggtgaggaaggagaatcacttgaacc

SEQ ID NO: 501873 - DNA, 201 bp, Homo sapiens
taatcaggggttagtgattgttatttacttctatgaacctattcattttatagtcagaaaaatgccataagagttattttaggccgggcacagtggctcayacctgtaatcccagcactttgggaggccgagacgggcagatcatgaggtcaagagtttgagatcagcctggccaaaatggtgaaactccgtctctactaa

SEQ ID NO: 501874 - DNA, 201 bp, Homo sapiens
atagatgtggtggaaatcaaagctaaagtggtaattcccagggttaatgaagatgcgatgaagaggcatttgactgctgttagggagagtgtatgtttacraaggaagatttggcagtgtgcatcaaaaacttttaaacagacactctttgacccagcagtgctatttctaggaatttatcttaaacagctaatcaaatgt

SEQ ID NO: 501875 - DNA, 201 bp, Homo sapiens
ccaggtgttatcagcccatttttgtttctacatctgtgtgtgtagagctctggaatagaattgttaagtctgagcaagaaaaagcatagtgggttaaggamaagtgaaacgaagagaaccctctgtccctggcagaatctgcatgtacatttcttgtctgtccttgtctctcttcttcctgtctggcccattgcagagagt

SEQ ID NO: 501876 - DNA, 201 bp, Homo sapiens
agacattcttgccaggtgttatcagcccatttttgtttctacatctgtgtgtgtagagctctggaatagaattgttaagtctgagcaagaaaaagcatagygggttaaggacaagtgaaacgaagagaaccctctgtccctggcagaatctgcatgtacatttcttgtctgtccttgtctctcttcttcctgtctggccca

SEQ ID NO: 501877 - DNA, 201 bp, Homo sapiens
gtcagaaagaattctgtctgggagacattcttgccaggtgttatcagcccatttttgtttctacatctgtgtgtgtagagctctggaatagaattgttaartctgagcaagaaaaagcatagtgggttaaggacaagtgaaacgaagagaaccctctgtccctggcagaatctgcatgtacatttcttgtctgtccttgtc

SEQ ID NO: 501878 - DNA, 201 bp, Homo sapiens
taactatcttgaggtcctaagttaaaggcggggggcttgaatgatagatgattactgagcagagatgcatttttcacatcagacttaaacctaggcttgcratctagtaaatgggcacagctttcagactcacctggcattggggagcttattttgggggagggataagggaggctgttgccatatgtcagaaagaattct

SEQ ID NO: 501879 - DNA, 201 bp, Homo sapiens
ttgccttgcaatttccgtatagattttgggacagtaaagtacaaggggctgacttttttggtcacgttcctcccagtgccagcaagcgagggctttttgcygtgttctatgacatggatccccaggtaaaatcattcgtgaactgtggtttgaatttccgtcttaaagtttagaatttgatgtgataattactcacctatc

SEQ ID NO: 501880 - DNA, 201 bp, Homo sapiens
aggagaatatcaagcactctttccccagattgtagggaaaaagggaagggagtaataagacaagtgccaccacattctttaggaaaataactttctaaggmcatcaaagaaatgtaaatgaacgaatttgctctgcagttccggaacaactaaaacaggacgttgttatcatctgctctaattggacttttgtttcttttc

SEQ ID NO: 501881 - DNA, 201 bp, Homo sapiens
atatatatatatatatatatatatatatttttttttttttttttttttttttttttttgagatggagtctcgtgctgtcacccaggctggagtgcagtggygcaaactcggctcactgcaagctccgcctcccgggttcacgccattctcctgcctcaacctcccaagtagctgggactacaggcacccgccatcacgcct

SEQ ID NO: 501882 - DNA, 201 bp, Homo sapiens
atcacgcctggctaatttttttttttttttgtattttttagtagagatggggtttcaccctgttagccaggatggtctcgatctcctgacctcatgatcckcccgcctcggcctcccaaagtgctggggtaacaggcgtgagccactgtgctccgcccaaatagaagtatattaaaggctctgagaagtcctgcattaaag

SEQ ID NO: 501883 - DNA, 201 bp, Homo sapiens
gtattttttagtagagatggggtttcaccctgttagccaggatggtctcgatctcctgacctcatgatccgcccgcctcggcctcccaaagtgctggggtwacaggcgtgagccactgtgctccgcccaaatagaagtatattaaaggctctgagaagtcctgcattaaagaaatctattttacttttattctgtgctctc

SEQ ID NO: 501884 - DNA, 201 bp, Homo sapiens
tatccatgggaatggaactgagtggcatcaaaagcaaggagctgggctgggcacagtggctcatgcctgtaatcccagcactttggaaggctgaggaggayggattacctgaggtcaggagttcaagaccagcctgaccaacatggtgaaacctcatctctactaaaaatacaaaattcgctgggcgtggtggtgtgcacc

SEQ ID NO: 501885 - DNA, 201 bp, Homo sapiens
cacccaggctggagtacagtggcatcctcttagcccagtgcagcctcaaactcctgagtgcaagtgattctcacctgactcagcctctcaccacaggcacrcgaccatgcacagctacttttttttaatttttttgtagtgacagggtcttgctatgttgcccaggctggtctcaaactcctggcctcaagtgatcctccc

SEQ ID NO: 501886 - DNA, 201 bp, Homo sapiens
tgcacctgtaatcccagctacttgggatgctgaggcaggagaatcactcgaaaccggaaagtggaggctgcagtgagccaagatcgctccattgcactccyagctgggcaacaagagcgaaactccgtctcaaaaaaaaaaaaaacccaaaaaacaaaacaaaacaaaaaacaaccaaggagttcacagggggaaaaaagg

SEQ ID NO: 501887 - DNA, 201 bp, Homo sapiens
ttatttcattcttttttttttgagacggagtcttgctctgtcacccaggctggagtacagtggcatcctcttagcccagtgcagcctcaaactcctgagtkcaagtgattctcacctgactcagcctctcaccacaggcacacgaccatgcacagctacttttttttaatttttttgtagtgacagggtcttgctatgttg

SEQ ID NO: 501888 - DNA, 201 bp, Homo sapiens
ggaggcagaggttgcagtgagccaagattgcaccattgcactccagcctgggtgacagagcaaaactctgtctcatttaaaacaaaacaaaacaaaaaacaaaaaaaaagaggcccttatctgtgggagctgagcactcacagacctcctgcttttcctttcatgtctccagaagaagcacagcgtgctgatgtctgtgat

SEQ ID NO: 501889 - DNA, 201 bp, Homo sapiens
cacttttaatttctctaagtagtttttgaaaactcgaaggttttctgtagaacacttttagacaaatgatacatgttcattattgaaaaattccagcaatrtagaaaagaacaaagatagcagaaaaaaattcatgcagtcttcattgtgaattaaccatcattgagtgagattcattcaagagtatctatatagtgtacc

SEQ ID NO: 501890 - DNA, 201 bp, Homo sapiens
tgtgagggctgtcatcacagagtaccgcagactggctgccttagacaacagaaacttattcctcacagttctggaggctggaagcctgagatcgaggtgtyggcagggttggtttctcctgggtcctctctgtttggctggtagatgctgtcttctccctgtgtcctcacatgggcttccctctgtgtgtgtctgtgtcct

SEQ ID NO: 501891 - DNA, 201 bp, Homo sapiens
ttttaaattttttcttgggtggtggttgtcacttttaatttctctaagtagtttttgaaaactcgaaggttttctgtagaacacttttagacaaatgatayatgttcattattgaaaaattccagcaatatagaaaagaacaaagatagcagaaaaaaattcatgcagtcttcattgtgaattaaccatcattgagtgaga

SEQ ID NO: 501892 - DNA, 201 bp, Homo sapiens
gactcaggtcctaaacagggggcaaaatgtatgagttgggttgtaccatgtctatctcccttctttttttttttttttttgagatggagtctggctctgtygcccaggctggagtgcagtggcgcgatctcggctcactgcaagctccgcctcctgggttcacgccattctcctgactcagcctcccgagtagctgggact

SEQ ID NO: 501893 - DNA, 201 bp, Homo sapiens
caccacattggccaggctggtctcgaactcctgaactcaggtgatctgcctgccttggccttccaaagtgctgggattacaggcatgagccaccgcacccrgcctattttttattatttatttattttttgaaacagagtcttgctttgtcgccaggctgaagtgcaatggcacgatctcggctcactgcaacctccgcct

SEQ ID NO: 501894 - DNA, 201 bp, Homo sapiens
gctctgtggctcagactggagtgcagtggtacagtcctagctcactgcagcctcaaactcccaggctcaggtgaccctcccacctcagcttcccaagtagytgggactgcaggcatgtgccaccaagcctggctaattttttttttattttttgtagagacggggtccgcagtgttgcccaggctggcctcaaacccgtgg

SEQ ID NO: 501895 - DNA, 201 bp, Homo sapiens
aattattttattttaaattttatttatttttttgagacggagtctctctttgttgcccatgctggagtgcagtggcacgatctcagctcactgcaagctcygcctcctgggttcacaccattctcctgcctcagcctcccgaatagctgggaccacaggcgcccgccaccacgcccgactaattttttgtatttttagtag

SEQ ID NO: 501896 - DNA, 201 bp, Homo sapiens
ccagattcggtgactgtttcagaaaagaggtttttaaattttgggtttcttgagtttctagaatcctgagtcattctgattttcagtgattcaggattggrttgttctagatgtctgaaactcaggaactacgatagcttttcaggcaaagacagcattgacttttagcaaatctactttaaatccattctgttatataaa

SEQ ID NO: 501897 - DNA, 201 bp, Homo sapiens
agatggcttttattacattgaggtatgtcccttgtatgccgattttgctgagagttttaatcataaagggttgctggattttgtccagtgctttttctgcrtctattgagatgatcatgtgatttttgtttttaattctgtttatgtggtatatcacatttattgatttgcatatgttaaaccatccctacatccctggta

SEQ ID NO: 501898 - DNA, 201 bp, Homo sapiens
cctgaccttaggtgatccacccaccttgacctcccaaactgctgctcaacctcccgaagtgctgggattataggcgtgagccacagagccaggcctccagrcactctgatttatacattgtttcataaaaatgcttttctttgccagcctgataggtgaaaagagatatcttattgaagataaatggatacctgagactat

SEQ ID NO: 501899 - DNA, 201 bp, Homo sapiens
attcagtattatgttgtctgtgggtttgtcatagatggcttttattacattgaggtatgtcccttgtatgccgattttgctgagagttttaatcataaagsgttgctggattttgtccagtgctttttctgcgtctattgagatgatcatgtgatttttgtttttaattctgtttatgtggtatatcacatttattgattt

SEQ ID NO: 501900 - DNA, 201 bp, Homo sapiens
tctagagatccagaagtgaaagactggccctgcgatgaataggactcacattttcaggtaatgcagctctgggaatgtggcactaggcatccagggctgcrggtgacgtgctgcctgtgcacccaagagcagcttctcatgccaccagcattagaaatttgggggcaataaaatagcctgggtatgagacagacctcatta

SEQ ID NO: 501901 - DNA, 201 bp, Homo sapiens
cagatccccttggcactttcctcaccctgaggaagtattaaatcagaaattatcctaatggggtgaaagtgaattatatggatgatggtaatgcaaggagragaaaaaatacttaggattgctaacaggttggagaagatgaccaagtggtggaggatagaaatggtaactgaagattagctcacttgttcatcttgactt

SEQ ID NO: 501902 - DNA, 201 bp, Homo sapiens
gcgatctcagctcaccgcaacctctgcctcttgggttcaagctgggattacagatgtgtgccatcatgcccagcgaatttttgtatttttagtagagtggrgtttcaccgtgttggccaggccggtcttgaactcctgacctcaagtgatctgcctgccttggtctcccaaagtgctgggattacagatgtgagccactgc

SEQ ID NO: 501903 - DNA, 201 bp, Homo sapiens
gttttcataagactttgctacctgagttgacaaacttcagtgtaccatgtaaccagattcggtgactgtttcagaaaagaggtttttaaattttgggtttyttgagtttctagaatcctgagtcattctgattttcagtgattcaggattggattgttctagatgtctgaaactcaggaactacgatagcttttcaggcaa

SEQ ID NO: 501904 - DNA, 201 bp, Homo sapiens
tgcattctgacctcagcatgttggctttgtcctgtcctcatgcagatatggcagggggagcagtacttccagctggcaaagctggtcacatttcctctgtyttcataagactttgctacctgagttgacaaacttcagtgtaccatgtaaccagattcggtgactgtttcagaaaagaggtttttaaattttgggtttctt

SEQ ID NO: 501905 - DNA, 201 bp, Homo sapiens
gccaggggcttggagggaaggacaaatctttcctatcaaggagtttgcctttgggaatctgcctggacccttgttggatttctggtaagttatgtatctcyacttaattgtatgtagatatgcaaagctgatttcattgctctaacactgtatagactcatggcagatggaattctgaattgtgttccttgaggtgagttc

SEQ ID NO: 501906 - DNA, 201 bp, Homo sapiens
gcccagtttcccaattttaactatcttgaggtcctaagttaaaggcggggggcttgaatgatagatgattactgagcagagatgcatttttcacatcagasttaaacctaggcttgcgatctagtaaatgggcacagctttcagactcacctggcattggggagcttattttgggggagggataagggaggctgttgccat

SEQ ID NO: 501907 - DNA, 201 bp, Homo sapiens
ttgctgagacaggtgtatcacctgaggccaggagtttgagaccagcctggccaacatggtgaaaccccgtcactactaaaaatacaaaaatcagctgggcrtggtggcgggcgcctgtaatcccagcgactcaggaggctgaggtagaatcgcttgaacctgggaggcggaggttgcagtgagccaagatcacgccactgc

SEQ ID NO: 501908 - DNA, 201 bp, Homo sapiens
tgtcgttcaggctagagtgcagttgtgggattatgactcactgcagcctcagtctcccaggctcaagtgatcctcccacctcagccggcagagcagctggractatagagtgcaccaccatgtccagctaatttgttaattctttatagagacaggactcgatatcttgcccaggctggtctcaaatactggactcaagca

SEQ ID NO: 501909 - DNA, 201 bp, Homo sapiens
acagacatgagccacaatgcccaatttttttttaagatggggccttgctctgtcgttcaggctagagtgcagttgtgggattatgactcactgcagcctcrgtctcccaggctcaagtgatcctcccacctcagccggcagagcagctgggactatagagtgcaccaccatgtccagctaatttgttaattctttatagag

SEQ ID NO: 501910 - DNA, 201 bp, Homo sapiens
ttgccatttttattgtggggtgacacaagtatgatcttctttttttttttcttttttacttccagaggaaaatattcaattaagggttaaggttcaataamatcgagaaaacaaatcctatttgtttttaaacacaaagagggccaggcatggtggcatgcgcctgtaatcccagcactttgggagaccaagatgggcgga

SEQ ID NO: 501911 - DNA, 201 bp, Homo sapiens
agggttaaggttcaataacatcgagaaaacaaatcctatttgtttttaaacacaaagagggccaggcatggtggcatgcgcctgtaatcccagcactttgrgagaccaagatgggcggatcagttgaggtcaggagttccagaccagcctggccaacatggtgaaaccctgtctctactaaaaatacacaaattagctggg

SEQ ID NO: 501912 - DNA, 201 bp, Homo sapiens
gtagtcatcatgagaaggctctgatttgatgactccatgttaagtcaactctggaacagtatcacgtatttgaagactgaaaataactgcttttgttcagwtctacatttggcgtcttattttgatgtttgcagtgtacttttccctctgaaagttttttagtagcctttggcaaaaagcggtaatacttactacttggga

SEQ ID NO: 501913 - DNA, 201 bp, Homo sapiens
catcatcagtgaaattttaacatcagctgtgactcccttaggcgaagaagaaagcaacagagacaacagatgaggatgaagatggtggctcagagaagaartacaggaaatgtgaaaaggcaggctgtacggcaacatgtcctgtgtgctttgcaagtgcttctgaaaggtctgtttagatgtgtgtcttggcctcccatt

SEQ ID NO: 501914 - DNA, 201 bp, Homo sapiens
ttggcgtcttattttgatgtttgcagtgtacttttccctctgaaagttttttagtagcctttggcaaaaagcggtaatacttactacttgggagcattatkttttatgcccagtttcccaattttaactatcttgaggtcctaagttaaaggcggggggcttgaatgatagatgattactgagcagagatgcatttttcac

SEQ ID NO: 501915 - DNA, 201 bp, Homo sapiens
gcctgtgatgactgtaacttggacgagaactttgatgttgtagtttgtgtgcatgtttgtgtgtgtgcacactcagggatcaaaaaatatctgccatttcttttttttttttttttgaggcaagagtcttgcctaggctggagtgtagagacataatttcagcttactgcaacctccaacttctgggttccttaatagaga

SEQ ID NO: 501916 - DNA, 201 bp, Homo sapiens
ccaaaccatatcagtatgtatatatgtgtgtgtgtgtacacacacacacacacacacacacacattttttttccaggctccagaatagacatttttttttyccccgaattcctggagcataagtgtcagattgcatttagaaaagcctgtctaccatggattgtggcagtgttgctttggaagccacatagactttctttt

SEQ ID NO: 501917 - DNA, 201 bp, Homo sapiens
gggaggccgaggtgaggagatcgcttgagctcaggagtttgagatcagcctgggcaacatggcaaaaccctgtctctaccagaaaaaaaaaaaaaaaaaaraaaaagaaaaaaacagaaaattagccgggcatggtggtatgcacctgtggccccaggtattcaagaggctgaggtgggaggatctcttgagtgaaggagg

SEQ ID NO: 501918 - DNA, 201 bp, Homo sapiens
cctggggactgtcagagccgcgggagaaccccacggtcctggagtaggaactccctcgcttgttcttcccggccgatagggtgcggccaggagcccgcacrgccttgcaggtgttgtagtaattctctggcacagccaccacgcgttgagacttgatgagcattgccaggttgctggggtaactcctctgggattggagac

SEQ ID NO: 501919 - DNA, 201 bp, Homo sapiens
cccctcgccgtggtgggaggtgggcgggtgccccagggacggatacctcctgccccggattaaaagagggtgcggggtgggtatctgtctgaagaaggggraattcccgggctagggtgttggggcgtggggtcgccgggttcgtcgcgatgttgccggtcggctaacccccctacaatgtttcctttctgtacagcggtg

SEQ ID NO: 501920 - DNA, 201 bp, Homo sapiens
ttatcaccataaaacttaacagaagcaaggctttcgcagaatgtgtttctcctgaaaggagaatatcaagcactctttccccagattgtagggaaaaaggraagggagtaataagacaagtgccaccacattctttaggaaaataactttctaaggacatcaaagaaatgtaaatgaacgaatttgctctgcagttccgga

SEQ ID NO: 501921 - DNA, 201 bp, Homo sapiens
atgattgcagctgtgaacagtcactgtactccagcctgagcaacatagcaacaccctgtatcaaggggaaaaaaaagaaaaaaatttaatttctctttcarataacactatgcctttcttagttttagatactaaaactgacaagaatataccccttctgacagcctgttttatgggtgccataataactttctctacttt

SEQ ID NO: 501922 - DNA, 201 bp, Homo sapiens
caatatagaaaatcagcttctatttttatcaaggagtggtacccatgtccaagtcatatggaccttttgttctcaaataaactttcctcaaataaaattaycgagatttcctcccccagtggtggtctctgcctaggctggtctgcctgtcccctgccctcctgccttggtggctgttcccacctggagctcctcatattg

SEQ ID NO: 501923 - DNA, 201 bp, Homo sapiens
gagttcgaggttgcagcacaccatgattcatgattgcagctgtgaacagtcactgtactccagcctgagcaacatagcaacaccctgtatcaaggggaaawaaaagaaaaaaatttaatttctctttcaaataacactatgcctttcttagttttagatactaaaactgacaagaatataccccttctgacagcctgtttt

SEQ ID NO: 501924 - DNA, 201 bp, Homo sapiens
gctcctttggtcattagcttaattcctttggtacctctccccatgtctcccataccctgggtttgtctctcatttacagttgacactgtctgagctggccrgctagctccagtccttgaaatgtccccttcctgagtcctcttccctctgctctggtccacactggttgacctctgagattactgcagagtgtcctcctgg

SEQ ID NO: 501925 - DNA, 201 bp, Homo sapiens
tcacagacctcctgcttttcctttcatgtctccagaagaagcacagcgtgctgatgtctgtgattgccggggaggctgtcgcatccgtgaggaccctggaygacaaacaggtgctgcagcagtgcatggccacgctccgggagctgttcaaggagcaggtgagagagaggaagccctccttgaaaggggcaagccgtgctt

SEQ ID NO: 501926 - DNA, 201 bp, Homo sapiens
tgtttaaaaatactaccttttaaaattgcaagtcacccgacagttcagcctctgctgttctgtagctccacttcttggtgtccaggacagcaagctggttwtaactcccctgctttgttactctctgcctgaccctggccagtacttgtgcgtttctgtgtttgtattccagccttctggagaaattagggcacagcttca

SEQ ID NO: 501927 - DNA, 201 bp, Homo sapiens
tcctatttgtttttaaacacaaagagggccaggcatggtggcatgcgcctgtaatcccagcactttgggagaccaagatgggcggatcagttgaggtcagragttccagaccagcctggccaacatggtgaaaccctgtctctactaaaaatacacaaattagctgggcacggtggcagaagcctgtaatcccagccactc

SEQ ID NO: 501928 - DNA, 201 bp, Homo sapiens
aatacttacatatactatacatttacaaatactatatatttacatatatttgtggttcatgttatgaataatgtcaggtatattttatatataaatgaagwgatttgtatatttatgtatataataattaatatttatatgtgtctatgaagagatttgttggagtggacagccttttgaaaataaagtccaaaaagcctt

SEQ ID NO: 501929 - DNA, 201 bp, Homo sapiens
cccttgttcttgccagtataacagcatgggttgttgataccagtgtagtggtagtgtgaggttctgttgctgtttgtttgttaactgttaattattttccmcaggtattagtcactgtaccactggctttactacagaaaggtgccattcagtttaatccaccgttgtcagagaagaagatgaaggctatcaacagcttag

SEQ ID NO: 501930 - DNA, 201 bp, Homo sapiens
ttgccctttaattcttctggatttggaagttacagcttgtaggagttgcccatttgtgttacctatcagttccaggcatgaaccgatacttccagcctttstaccagcccaatgagtgtggcaaagccctctgtgtgaggccggatgtgatggaactggatgagctctatgagtttccagagtattcccgagaccccacca

SEQ ID NO: 501931 - DNA, 201 bp, Homo sapiens
ttaacagaagcaaggctttcgcagaatgtgtttctcctgaaaggagaatatcaagcactctttccccagattgtagggaaaaagggaagggagtaataagmcaagtgccaccacattctttaggaaaataactttctaaggacatcaaagaaatgtaaatgaacgaatttgctctgcagttccggaacaactaaaacagga

SEQ ID NO: 501932 - DNA, 201 bp, Homo sapiens
caattgtgaactgtgctgctataaacatgcatatggaagtatgttttttgtataatgacttcttttcctctggatacccagtagtggaattgctggatcawatggtagttctgcatttagttctttaaggaatctccacactgttttccatagtggctgtactagtttacattcccaccagcagtatagaaatgttccctg

SEQ ID NO: 501933 - DNA, 201 bp, Homo sapiens
tgagttctagggcacattagtcctgagagttgaacaagaaaaaaaattccttggccaaataagttaggcaaggccaagtaagtttgggaagtattgtatamgatactctacttttaggattaaataggagttgtatagggttaaatagaagtatgtgtatgtgtgtatatatatatatatatatatatatatatttttttt

SEQ ID NO: 501934 - DNA, 201 bp, Homo sapiens
ttatgaataatgtcaggtatattttatatataaatgaagagatttgtatatttatgtatataataattaatatttatatgtgtctatgaagagatttgttrgagtggacagccttttgaaaataaagtccaaaaagccttctttgggtataacaattataggtagatagtccttttttttttttttttttttttgagatgg

SEQ ID NO: 501935 - DNA, 201 bp, Homo sapiens
ttcaggtatctaaaacttatttcatagtccttgattttcatacagaagtaaaggactgcatgtcacatgggaaagacaggtctagggaatgagttagtcgrggcaggggatcctaacattattcctgccattaaccaactcggagatcttgggcagcaatccccgggctgcacgtcggaaccacctgggaggcgcttacaa

SEQ ID NO: 501936 - DNA, 201 bp, Homo sapiens
gtaaaccttgaaaatttaagtttagttatatcttaagtgactatgaaaaaatataattgatgaactatcactagttcctagactagctatgcttcctacayttcaggtatctaaaacttatttcatagtccttgattttcatacagaagtaaaggactgcatgtcacatgggaaagacaggtctagggaatgagttagtcg

SEQ ID NO: 501937 - DNA, 201 bp, Homo sapiens
caggaggtggaggttgcagtgagccaagattgcgccattgcgctgcagcctgggtgacagagtgagactccatctcaaaagaaatttaaaaaaataataamaaaataaaaatattcggaactggttccagctacttgggagcctgaggcagaaggatcgcttgagcttgggagttcgaggttgcagcacaccatgattcat

SEQ ID NO: 501938 - DNA, 201 bp, Homo sapiens
ataacaattgtttagatctctgaatgccaggaaaagattccccttagccttggagatgtaaattcatgtaatatgagaatcggaaaggatcctggatcacrtggttccatccctcactttttttcataattgctttttgagcaggtgcagtgtattgattattctggagatgaagtgcaggttaccactacagatggcaca

SEQ ID NO: 501939 - DNA, 201 bp, Homo sapiens
ttgtaatcatgggggtgattacttaactgtatttcccttcacaccatattataactatcttctatattccgacacaatgtttattttgtatattctgacasagtataaattctaactccctcagttcagctataacaattgtttagatctctgaatgccaggaaaagattccccttagccttggagatgtaaattcatgta

SEQ ID NO: 501940 - DNA, 201 bp, Homo sapiens
tgggaggctctggctcgccttgtttggggaggatgtgaagttctgggcatgcggctcacgcaggagaatggggctggctttggtgtttagccagggtctasaagtacttttgtggctcattcgtagcctgtgtagcattatccatgtcagtgaggcagctgctgctgcttggaaaccgtagtggccccagtgcatttctat

SEQ ID NO: 501941 - DNA, 201 bp, Homo sapiens
taccacactgctgcctgggcgatagagtgagaccctgtctagggggagaaaaaagaaatcaatcactccaaaggaaggagggctattgggctgaatcagakcagggtctcttatgtttttcttattttttgtagagatggggtcttgccatgttgcctagtctggtcttgaactcctggtctcaagtgatcctcctgcctc

SEQ ID NO: 501942 - DNA, 201 bp, Homo sapiens
ggctggagttgatgacagggagaaattctgggggcttgccacggcccggtgatgcccgactataaagaatggatgggattgggtgggagaaggcattcccrtgagggagagtgggaggtcgcagaccctgcagggtaggaatttaccaggaaaaagattcaaagcattacagcagagcctgcgagtgggcagatcgtagct

SEQ ID NO: 501943 - DNA, 201 bp, Homo sapiens
atccgcaccaacatctactgtggtttgatatttttattatggccattcttgcaggagtaaggtggtatcacattgtggtttcgacttgcgtttccccaatygttagtgatgttgagcattttttcatatgtttgttggccatttatatatctactttgagaattgtctattcatatccttagcccactttttgatggggtt

SEQ ID NO: 501944 - DNA, 201 bp, Homo sapiens
ttctgcttgtgagaagttctttgtggaaacatcatccttgtagatagttttcctaaagatagatacagatactataagtcatctaatctaataatagagayattgcccagacattctgtacacaccacaccctcctcaaggccctccctacttatccctagcctactgggagaggccacacccatgtcaattttgcaacac

SEQ ID NO: 501945 - DNA, 201 bp, Homo sapiens
ctccagcctgggtgacagagcaaaactctgtctcatttaaaacaaaacaaaacaaaaaacaaaaaaaaagaggcccttatctgtgggagctgagcactcasagacctcctgcttttcctttcatgtctccagaagaagcacagcgtgctgatgtctgtgattgccggggaggctgtcgcatccgtgaggaccctggacgac

SEQ ID NO: 501946 - DNA, 201 bp, Homo sapiens
cgtcacagtgggaagaggagctcagattgtcaatgggtgtattaacaacccagtagcattaatgtgtgaacaagtgagtttcttttagctttgtgttgtakataaaggaaagaaaaacagtttcaatttgcttgtgtgcagtattaatatgcttctaaagtaaattacatataacagccccctcatctcctatgcaaagca

SEQ ID NO: 501947 - DNA, 201 bp, Homo sapiens
tacccatgtccaagtcatatggaccttttgttctcaaataaactttcctcaaataaaattatcgagatttcctcccccagtggtggtctctgcctaggctrgtctgcctgtcccctgccctcctgccttggtggctgttcccacctggagctcctcatattggctctcaggcacaggcacaaggatttacactgctgtgtc

SEQ ID NO: 501948 - DNA, 201 bp, Homo sapiens
catttattgttccttctatgactattaaagcaaatattttttatttttatagaaagctgagatatttcaacatagtataaaagaggaaactaggctgggtktggtggctcatacttgtaatcctagccctttggtaggctgaggtgggaagactgctttgcgcccagcctgggcaaagtgagaccctatctcatagtaaga

SEQ ID NO: 501949 - DNA, 201 bp, Homo sapiens
gtggcgtgatcttggctcactgcaacttccgcctcctgggttcaagtgattctcgtgcctcagcctcctgagtagctgggattacaggtgtgcgccaccawgcccagctaatttttgtatttttagtagaggctgggtttccccatgttggccaggctggtctcaaactcctggcctcatgtgatcctcccaccttgtcct

SEQ ID NO: 501950 - DNA, 201 bp, Homo sapiens
cactggaacagttgtaaagaagtaacctgtactgagatgcttagaattagtcagacatcaagccagaaccctcttccagccctgctataaaggaatgtaaracaaaaatgatatcacagggctgtgtccatatagttacaaggtccggttgagtgggacagataagtaagggctggagttgatgacagggagaaattctgg

SEQ ID NO: 501951 - DNA, 201 bp, Homo sapiens
atttagagtaggtttcttttcttttcttttgagacagggtcttgctctggagtgcagtggcgtgatcttggctcactgcaacttccgcctcctgggttcawgtgattctcgtgcctcagcctcctgagtagctgggattacaggtgtgcgccaccatgcccagctaatttttgtatttttagtagaggctgggtttcccca

SEQ ID NO: 501952 - DNA, 201 bp, Homo sapiens
actgcacagcaggaagcggggatgggacttctacaaaagtcacagaaagtggcacaaagcccaggggtctaggagcaacaaagacaggcacaaatctggargcctcttgggcatccgcatgttacaatctagtgcaagaactgaacattttgatgaaagccttgagctgttctaaaaaaaaaaatatttgaagtaactgat

SEQ ID NO: 501953 - DNA, 201 bp, Homo sapiens
tttcattacatgtctttcagagtcaccatataaaaatgtttaatgataatgctttgccttacccttacctagaacaagctgtaggccaggcatgatggtgygtgcctgtagtcccagctactcaggaggtgagaggatcgcttaagtccaggagttagagactgtggtgagctgtgatctcgccactgcacctcagcttgg

SEQ ID NO: 501954 - DNA, 201 bp, Homo sapiens
ctcctgtggcaacccaccacctctaggagacctatgctgtaatcgtccttagtaagttttgactgatatactacaagagaacattttcagaaatatactcycgtcaacagggatcatttaatcaaatgttgtagtgtccagactaattcgtaagttgttaaatttcctggagttgagaacagttattaggctgacgtgcag

SEQ ID NO: 501955 - DNA, 201 bp, Homo sapiens
gtatctcttctttttctcttttcccttcccctctcctgtggcaacccaccacctctaggagacctatgctgtaatcgtccttagtaagttttgactgatayactacaagagaacattttcagaaatatactcccgtcaacagggatcatttaatcaaatgttgtagtgtccagactaattcgtaagttgttaaatttcctg

SEQ ID NO: 501956 - DNA, 201 bp, Homo sapiens
tacaaaaaaaaagggcggggggcaagcatggtggtgtgtgtctgtagtcccagctactcgggaggctgaggtggaaggatagctttgagctgaggaggttraggttccagtgagctatgatcccaccactgcactccagcctgggcaatgaagcaagaccctatttcaaaaaaaaaaggaattttaattcaaaatcttttg

SEQ ID NO: 501957 - DNA, 201 bp, Homo sapiens
ccgaacatttgggaggtcaagcggggaagatcacttgagtccaggagttcaagaccagcctgggcaacatagtgagccttgtgtctacaaaaaaaaagggsggggggcaagcatggtggtgtgtgtctgtagtcccagctactcgggaggctgaggtggaaggatagctttgagctgaggaggttaaggttccagtgagct

SEQ ID NO: 501958 - DNA, 201 bp, Homo sapiens
agtgagttaaggttttttccagtatattttaagaatgcaagagtattacagtttaagaattttaacccattaggcacagtggctcacacctgtaatccgarcatttgggaggtcaagcggggaagatcacttgagtccaggagttcaagaccagcctgggcaacatagtgagccttgtgtctacaaaaaaaaagggcgggg

SEQ ID NO: 501959 - DNA, 201 bp, Homo sapiens
gtgtttaattttaaatttcccagagtagcttacttttatgggaacatgtggtaagccctgtgtgataaatcatcaccctgtaatgtcttttctaggtaagrgtttgtgtgtgccaggatttctttttgttgagcagtgagttaaggttttttccagtatattttaagaatgcaagagtattacagtttaagaattttaacc

SEQ ID NO: 501960 - DNA, 201 bp, Homo sapiens
actcagctccaagatgtccctttaggaggtatggggagaacggtgttctgattgttccatctcagtttcgttgttacctaagcttcatcagcagtggcatygttcatttgcgaggtcggatgtcggcaacagggtagccctcctgagcatttcttttggactgatggattctccaagttctcaggggaggagaactttttg

SEQ ID NO: 501961 - DNA, 201 bp, Homo sapiens
cccgtctcaaaaaaaaaaaaatacaacagagaaacaccttggattcatttttttttttggtcacatttctttctgtttgactttgaaatttgacttatacaggggaagaatattatagaagtcctaagcttacctggatctattttagtttttcataagatacaatttattgtgtataccggctgggcgcggtggctcacg

SEQ ID NO: 501962 - DNA, 201 bp, Homo sapiens
cacgtatttgaagactgaaaataactgcttttgttcagttctacatttggcgtcttattttgatgtttgcagtgtacttttccctctgaaagttttttagyagcctttggcaaaaagcggtaatacttactacttgggagcattattttttatgcccagtttcccaattttaactatcttgaggtcctaagttaaaggcgg

SEQ ID NO: 501963 - DNA, 201 bp, Homo sapiens
caagtgagtttcttttagctttgtgttgtagataaaggaaagaaaaacagtttcaatttgcttgtgtgcagtattaatatgcttctaaagtaaattacatrtaacagccccctcatctcctatgcaaagcagtaagaattacacttctgcctttctgagaaggtagaactagaggatgtaaaatactttttttcctttttc

SEQ ID NO: 501964 - DNA, 201 bp, Homo sapiens
agccacatctacagctaccaccagcggaatggctttgcctgcatcttgctggaggatgtcttccagctggggtgagacgcttagcccgggcccggaactcrgtcccctgggcccatggcttccttctgtcattttgcttccttaattgtgccagctgcttccatcccatgctttcccgagcagcccaagggctcagcaggg

SEQ ID NO: 501965 - DNA, 201 bp, Homo sapiens
cattagtattatttggaaaaagtttgactttgcacatttgtgaaggccacttcagcacccaccccctgccccgggctctaccttgagagctgctggtctasctagatccccctcctcatgatggtttttcctcactcccgaagtctggtctgcctctttctcaggcgcccacctttctcccccactgcccgcccaacccca

SEQ ID NO: 501966 - DNA, 201 bp, Homo sapiens; identical to SEQ ID NO: 274955

SEQ ID NO: 501967 - DNA, 201 bp, Homo sapiens
agggctcagcaggggcagggtcagggaggataaccatgggctgctctgggggctggggcaggagcccacctggctgtccctgatcactgcagcatcccggyacccccccttcctcccggcagacaatttattttcattgtcaccttcacaaccttcctccttcgatgcgtggattacaatgttctctttgccaaccaacca

SEQ ID NO: 501968 - DNA, 201 bp, Homo sapiens; identical to SEQ ID NO: 274956

SEQ ID NO: 501969 - DNA, 201 bp, Homo sapiens; identical to SEQ ID NO: 274958

SEQ ID NO: 501970 - DNA, 201 bp, Homo sapiens; identical to SEQ ID NO: 274959

SEQ ID NO: 501971 - DNA, 201 bp, Homo sapiens; identical to SEQ ID NO: 274962

SEQ ID NO: 501972 - DNA, 201 bp, Homo sapiens; identical to SEQ ID NO: 274963

SEQ ID NO: 501973 - DNA, 201 bp, Homo sapiens
acgcttagcccgggcccggaactcggtcccctgggcccatggcttccttctgtcattttgcttccttaattgtgccagctgcttccatcccatgctttccygagcagcccaagggctcagcaggggcagggtcagggaggataaccatgggctgctctgggggctggggcaggagcccacctggctgtccctgatcactgc

SEQ ID NO: 501974 - DNA, 201 bp, Homo sapiens; identical to SEQ ID NO: 274965

SEQ ID NO: 501975 - DNA, 201 bp, Homo sapiens; identical to SEQ ID NO: 274964

SEQ ID NO: 501976 - DNA, 201 bp, Homo sapiens; identical to SEQ ID NO: 274967

SEQ ID NO: 501977 - DNA, 201 bp, Homo sapiens; identical to SEQ ID NO: 274968

SEQ ID NO: 501978 - DNA, 201 bp, Homo sapiens
ctccagcctgggcgacacagcaagactccatctcaaaaaaaaaaaaaaagagtgtacaagcacacatttcatcagctgtcagtgtgatgtgacatgttcaygtgtcttgtagcctctggaaaactccactgtactctcagagtacaagaatgaaaacatcagaaagcattagtattatttggaaaaagtttgactttgcac

SEQ ID NO: 501979 - DNA, 201 bp, Homo sapiens; identical to SEQ ID NO: 274969

SEQ ID NO: 501980 - DNA, 201 bp, Homo sapiens
agttctcaaagcttttggtcttaggaccaaaaatacacttaatatactttaagttgtacttaagtgtattaagttgtacttaaagtgtattaagtatatcttttttttttttaagacagagtttcactcttgttgctcaggctggagtgcaatggtgaggtcttggctcactgcaacctccacctcccaggttcaagcaat

SEQ ID NO: 501981 - DNA, 201 bp, Homo sapiens
gggtaacagagagagaccttgtttcaataaaaaggaaaaaaaaaaaagaaggaaattgtagctgagaacaactttaaaatgtaagagtgcggctgggcgtrgtggctcacacctgtaatctcagcactttgggaggccgaggcgggcggatcacaaggtcaggagatcaaaaccattctggccaacatggtgaaaccctgt

SEQ ID NO: 501982 - DNA, 201 bp, Homo sapiens
tgagacaggagaatcatttgaacccgggaggtggaggttgcagtgagccaagattgcgccactgcactccagcctgggcgacacagcaagactccatctcaaaaaaaaaaaaaaagagtgtacaagcacacatttcatcagctgtcagtgtgatgtgacatgttcacgtgtcttgtagcctctggaaaactccactgtact

SEQ ID NO: 501983 - DNA, 201 bp, Homo sapiens
agcaggggcagggtcagggaggataaccatgggctgctctgggggctggggcaggagcccacctggctgtccctgatcactgcagcatcccggcacccccmcttcctcccggcagacaatttattttcattgtcaccttcacaaccttcctccttcgatgcgtggattacaatgttctctttgccaaccaaccaagtaacc

SEQ ID NO: 501984 - DNA, 201 bp, Homo sapiens; identical to SEQ ID NO: 274970

SEQ ID NO: 501985 - DNA, 201 bp, Homo sapiens; identical to SEQ ID NO: 274971

SEQ ID NO: 501986 - DNA, 201 bp, Homo sapiens
tgtcagatgccatcctaccctcagcccagtgtgctgagaggttagtgacaacctggtggggccctgggggtgaagcatgggcagtgggtagaggagtagaygggagccccactttgtcccgtcatctagatcagcagttctcaaagcttttggtcttaggaccaaaaatacacttaatatactttaagttgtacttaagtg

SEQ ID NO: 501987 - DNA, 201 bp, Homo sapiens
ccttgctcccctgggaggtccggagccctctgcacagcctttatgtgcagcaaggggagaggtcttagaaggcccctgagcagaggagagggaggaggccrgggaagcagaggtggtgagagcggaagctggacctcggattggctctggcgggagactgctcacccgtctcgttctcctcctcccttctttcccctcctc

SEQ ID NO: 501988 - DNA, 201 bp, Homo sapiens
ccagctcagtgtcacagacctttgtggaagcaacaacagctcccatccttccaacctttctggagaagccgtggcctgatggtgagccgaatgggctgggrggggagaagaaggcggctggggcggtggggagatctggggcccggatcggtgcccctcctccccatgccactgccacctcctcctcctccttcatgccgg

SEQ ID NO: 501989 - DNA, 201 bp, Homo sapiens; identical to SEQ ID NO: 274972

SEQ ID NO: 501990 - DNA, 201 bp, Homo sapiens; identical to SEQ ID NO: 274973

SEQ ID NO: 501991 - DNA, 201 bp, Homo sapiens; identical to SEQ ID NO: 54644

SEQ ID NO: 501992 - DNA, 201 bp, Homo sapiens; identical to SEQ ID NO: 274978

SEQ ID NO: 501993 - DNA, 201 bp, Homo sapiens; identical to SEQ ID NO: 274979

SEQ ID NO: 501994 - DNA, 201 bp, Homo sapiens
gaagagggcaccctccgccaagaggctgctgcgggacccgggtttcccctttccggcgccttccagcctcccaatcctcgggtctcgcctccctccgtctyctccctttcccctgtctgtctttccattggtccatgccgcccacgtgctccccggggctccgcaggcaggactgggccccggggcggtgcgctgggctgc

SEQ ID NO: 501995 - DNA, 201 bp, Homo sapiens; identical to SEQ ID NO: 225243

SEQ ID NO: 501996 - DNA, 201 bp, Homo sapiens; identical to SEQ ID NO: 225251

SEQ ID NO: 501997 - DNA, 201 bp, Homo sapiens; identical to SEQ ID NO: 225250

SEQ ID NO: 501998 - DNA, 201 bp, Homo sapiens
gccgccccgcccactctcgcccggccccgttttcgctttttttccggggttgcccagcttagtcccgcccttcagtttaagccgactccaagcaagtttgkcggccttggggagtctggccccgttcctagtgctggagggggaagttgttgcctttcctgctccgtgggccggccccctctccctccagacccacctggg

SEQ ID NO: 501999 - DNA, 201 bp, Homo sapiens
cccagcggctgtggatggcagaagcccagagtgggactggtcagctgcaggagcagaagaaaggtagggcaccctgactcccgaccccgcgcttccgaatraactgcccttcgcccccggccctgctctcaggctgtccgaaggcagtctctccacgcccctcgggcaagcctgggtaggggcgcggcctcctagcgtctt

SEQ ID NO: 502000 - DNA, 201 bp, Homo sapiens
tcctccctttcccctgtctgtctttccattggtccatgccgcccacgtgctccccggggctccgcaggcaggactgggccccggggcggtgcgctgggctrcacctccctccccgcgccccgtcctctcccgccctacaggccctagcagggcaggcgggaggtgagcgcggccatcccgctcccggagttccgggatcct

SEQ ID NO: 502001 - DNA, 201 bp, Homo sapiens
ggtgtccccggagcccagcggctgtggatggcagaagcccagagtgggactggtcagctgcaggagcagaagaaaggtagggcaccctgactcccgacccygcgcttccgaatgaactgcccttcgcccccggccctgctctcaggctgtccgaaggcagtctctccacgcccctcgggcaagcctgggtaggggcgcggc

SEQ ID NO: 502002 - DNA, 201 bp, Homo sapiens
ggcggtcctgcgcctcctctccccaagacccttcggggacacagcactgcagacccgccggagacaacttgtgcgggagcccggagtcctcggaataacasttggtaagtgttaccgcgcccttcttcccttacgccagtccgtagttcgtggtccttcgccggtgtccccggagcccagcggctgtggatggcagaagcc

SEQ ID NO: 502003 - DNA, 201 bp, Homo sapiens
ggagtgggtttgccactcaggagaaggctggggccccagatagaatcaccaagttgatgaatggttctcaagtccttccagagcccagtcaatgtccactragccaaaccaacaagggcactctagaggtgacgcctggggacggctgggcagccccacctcacctcatcccagtatcttcctctggctcccctcagggca

SEQ ID NO: 502004 - DNA, 201 bp, Homo sapiens
agccgtcagcgtctccgttgataaaatcatctcgcatttcggggccgcccggaacttggtgcagaaggtgaaggtggctggggggaggctgttgggatgasgagagtaatggagctccgcggggggtgcgggaatggttggcgggaggtggctgggaggtgtctggagggatctctggagccatcggcatcgcgccacctc

SEQ ID NO: 502005 - DNA, 201 bp, Homo sapiens; identical to SEQ ID NO: 230141

SEQ ID NO: 502006 - DNA, 201 bp, Homo sapiens
catctctaagttcctattatgccttctccgggccacaagcttctggcatttccagatgtacacatctgtcagtcacaaggaatccagctgtgcaaggcagkcttgcactctctctgggccccaggaggggaacgagggagagagcagtagaagctgatgaaagggggactttggcacccaagtatctacatctgtccttgg

SEQ ID NO: 502007 - DNA, 201 bp, Homo sapiens; identical to SEQ ID NO: 230142

SEQ ID NO: 502008 - DNA, 201 bp, Homo sapiens; identical to SEQ ID NO: 230145

SEQ ID NO: 502009 - DNA, 201 bp, Homo sapiens; identical to SEQ ID NO: 230126

SEQ ID NO: 502010 - DNA, 201 bp, Homo sapiens; identical to SEQ ID NO: 230128

SEQ ID NO: 502011 - DNA, 201 bp, Homo sapiens; identical to SEQ ID NO: 230147

SEQ ID NO: 502012 - DNA, 201 bp, Homo sapiens
acagaggggcatctcgtgtcttgcttgtctgtcctacactcttgatctccacagcctccccatcccttgctgaagtccagggaaggccctcccagtggccyctgacttgcccttcttccctccaggcttcacggctacaggacagaggcagctgaggccagagcactttcaagaaggtaagagtttgggggagcagcatgg

SEQ ID NO: 502013 - DNA, 201 bp, Homo sapiens
aaggccgtaagtgggcgtcccagcctccctgagagcctgtttgcctgcctgcccatcttcgacctctgatcctgccagtccatccatccatgtaccccccctgctgtgagtgcgtccacccgttcatctgcttgtggctgtccgtccatccattgtgtttgtcacctgagtttgttcatcttgagcttcgtactacacttc

SEQ ID NO: 502014 - DNA, 201 bp, Homo sapiens
accccaatgaacagaaggaaggtaagcagctccctctcttctttacccacctttacctcatggccttcccccagagcatgggcttcggggcagacaagacrgtgggctctgccactcaccagttgtataaccttgggtaagttacatacttctccaagcctttgtttcttcatctgtaaaattgaggatatacctgtttta

SEQ ID NO: 502015 - DNA, 201 bp, Homo sapiens
ggtgggggcaggctgtgagctgacacctttcacacctcgcttctcttttcctttcagttattttaaaaggaagagccacaaattgttctttctcatttccmctatatcctcccaaccctttctcctccaccccagattctttcaatcctcccagctcatccagcctttgtgggttccttcacatgtccccgcttcccactg

SEQ ID NO: 502016 - DNA, 201 bp, Homo sapiens
gaaggccgtaagtgggcgtcccagcctccctgagagcctgtttgcctgcctgcccatcttcgacctctgatcctgccagtccatccatccatgtaccccccctgctgtgagtgcgtccacccgttcatctgcttgtggctgtccgtccatccattgtgtttgtcacctgagtttgttcatcttgagcttcgtactacactt

SEQ ID NO: 502017 - DNA, 201 bp, Homo sapiens
gaggaacaaatatcagctccacctctgagcccaaggaagaatgagtcaccccagagccctagagggtcagatggggggaaccccaccctgccccacccatytgaacactcattacactaaacacctcttggatttggtgtcctcattgtctatctaatgtctcacccgcagtgttttaagtggatcttggtgccctggccc

SEQ ID NO: 502018 - DNA, 201 bp, Homo sapiens; identical to SEQ ID NO: 230148

SEQ ID NO: 502019 - DNA, 201 bp, Homo sapiens
aggggaagcactcaaccttcaggaagcctccttaaccaaaggcctaaagatgtttcaagggcctggagtaggagggtgggtggaggaggtggattgggtargctccaaccagctcaaggtccagactttttcctctgaaagctagagacgcatcccagcagagactggggaggacaacccacagccctgagggaaagactg

SEQ ID NO: 502020 - DNA, 201 bp, Homo sapiens; identical to SEQ ID NO: 230129

SEQ ID NO: 502021 - DNA, 201 bp, Homo sapiens
aagctgaggagggcgggagatcacaccagacaattataaaagaagagctggtcctgaagctcacaaccgtaacagccaccagacaagcttcagtggccggsccttcacatccagacttgcctgagaggacccacctctgagtgtccagtggtcagttgccccaggatggggaccacagccagagcagccttggtcttgacc

SEQ ID NO: 502022 - DNA, 201 bp, Homo sapiens
ttagagcactaggcctgggtctggaggaacctcaggtcccgttcactggccctaccctgggcctccccaatgtgccaggggagcagaggacaaccactgtytcttctttatctgcctgcccagtgtcctttcctggagcctgggaggaaggcaggaatgtggaaagtgggctgatcctcccctcttgctctagtgggagga

SEQ ID NO: 502023 - DNA, 201 bp, Homo sapiens; identical to SEQ ID NO: 230132

SEQ ID NO: 502024 - DNA, 201 bp, Homo sapiens; identical to SEQ ID NO: 230136

SEQ ID NO: 502025 - DNA, 201 bp, Homo sapiens; identical to SEQ ID NO: 230180

SEQ ID NO: 502026 - DNA, 201 bp, Homo sapiens
aggaggagcagctgggactgagtcatggcaggaagctgaggagggcgggagatcacaccagacaattataaaagaagagctggtcctgaagctcacaaccrtaacagccaccagacaagcttcagtggccggcccttcacatccagacttgcctgagaggacccacctctgagtgtccagtggtcagttgccccaggatgg

SEQ ID NO: 502027 - DNA, 201 bp, Homo sapiens; identical to SEQ ID NO: 230137

SEQ ID NO: 502028 - DNA, 201 bp, Homo sapiens; identical to SEQ ID NO: 230153

SEQ ID NO: 502029 - DNA, 201 bp, Homo sapiens
ccgccacaggctttctcagaacccagctggtcatgtctaggtgtgttggggctgggagaggattaggggacacggggcaggtgaatacagaggggcatctygtgtcttgcttgtctgtcctacactcttgatctccacagcctccccatcccttgctgaagtccagggaaggccctcccagtggcccctgacttgcccttc

SEQ ID NO: 502030 - DNA, 201 bp, Homo sapiens
tttcaggtggaaaggagggaagaggccctcgcccccactcccagccctggctaggagaaagggtgggctgctcacacattcccccttctatagtgcagccycctccctctcaggaggccacccctctccaacaggaaaagctgctacctgcccaactccctgctgaaaaggaaggtgagcgcttgcccaccctccctcacc

SEQ ID NO: 502031 - DNA, 201 bp, Homo sapiens
tctgaaagctagagacgcatcccagcagagactggggaggacaacccacagccctgagggaaagactggcagaggaaatgagggcctccctccccaatccygtatgccatactccctttaggcccaacctctgagccagtagaggtggagctatcagaccgccacaggctttctcagaacccagctggtcatgtctaggtg

SEQ ID NO: 502032 - DNA, 201 bp, Homo sapiens; identical to SEQ ID NO: 230155

SEQ ID NO: 502033 - DNA, 201 bp, Homo sapiens
aggctccaaccagctcaaggtccagactttttcctctgaaagctagagacgcatcccagcagagactggggaggacaacccacagccctgagggaaagackggcagaggaaatgagggcctccctccccaatcccgtatgccatactccctttaggcccaacctctgagccagtagaggtggagctatcagaccgccacag

SEQ ID NO: 502034 - DNA, 201 bp, Homo sapiens; identical to SEQ ID NO: 230156

SEQ ID NO: 502035 - DNA, 201 bp, Homo sapiens
gggaggagtggcttccagaggaggagcagctgggactgagtcatggcaggaagctgaggagggcgggagatcacaccagacaattataaaagaagagctgrtcctgaagctcacaaccgtaacagccaccagacaagcttcagtggccggcccttcacatccagacttgcctgagaggacccacctctgagtgtccagtgg

SEQ ID NO: 502036 - DNA, 201 bp, Homo sapiens; identical to SEQ ID NO: 230157

SEQ ID NO: 502037 - DNA, 201 bp, Homo sapiens
gcctgcctgcccatcttcgacctctgatcctgccagtccatccatccatgtaccccccctgctgtgagtgcgtccacccgttcatctgcttgtggctgtcygtccatccattgtgtttgtcacctgagtttgttcatcttgagcttcgtactacacttctggcctcctccactcatgatccacacacgcatctgtctacca

SEQ ID NO: 502038 - DNA, 201 bp, Homo sapiens; identical to SEQ ID NO: 230158

SEQ ID NO: 502039 - DNA, 201 bp, Homo sapiens
cagctgcaggattccctatcagcaaagactgaatgatgtcaaacgttcagaaaaggagaaactaagtgggtgcagcacaatcaatcactttgcatttcaasgtgaacttgcagctcttatggggagggaattctctatgtcattttccacgtaaataaagtaatgagaccactttgttgtagcaaagaaattcagtttgtt

SEQ ID NO: 502040 - DNA, 201 bp, Homo sapiens
aggagcttatcagagccacagcaccacgttccaagggcaaagaaggagaaagagctccacatttacatcccagccttggatttaagcctagagatcttccytcctctaccctcccacccccatcacttccccttccagcacccatcattgctccccctggttgaacctcgtccttgtgaggtccaagtgaaaatttcccct

SEQ ID NO: 502041 - DNA, 201 bp, Homo sapiens
agtaagaaggtgtcaactcaatagggcctggcagcccattgtaatgactggggctttcacactgagtgaaagatggtaagcatccaagggagaaacaggasagcaattaaaagagtggcaaaaatctagacttggagagtaattaccaccgattataagaagtggtcaggttccagatgtcttcaaaggcagagccaacag

SEQ ID NO: 502042 - DNA, 201 bp, Homo sapiens
gggtaatatccttttaactctgattgaattatatgttaattccttgcggtggtcttagatttcagacgctattagcaaattatggaggaaaagcaagatcrtatgattcatgaactatcacagcagcaacagtttctaatttccacccatcctctgtgtcatgtgatatgtttcagaaactcacttaaaattgagaaaata

SEQ ID NO: 502043 - DNA, 201 bp, Homo sapiens
cccggtttgggtgggcaggactccaaagcctttaggatcgatggaccagaacagagaaatgaaaatgcaacaagaacagctgtggggaaaaggcagaaggkgggtaggaagcgaagagggtgtgtacttttcctttctgatctgagaaagggaaattttgtgctgggaagagttacgcgggaggaggaaggaaaggcgcca

SEQ ID NO: 502044 - DNA, 201 bp, Homo sapiens
tcgactcccagctcgacagggacctttcttctcctagccagctggaatgcaagctttaaaaaaaaaggaagtgtggggagggctattttttttaataagaygtctcagaaatgatcatgaacacagtaaagctggttttcaaaaaaggaaagtgagaaaagtagtgacaacttgaagctggtagttgaggaagaaggagaa

SEQ ID NO: 502045 - DNA, 201 bp, Homo sapiens
atagcatgctcggggagtgaggagagaagctagagaagactgagatgagtgaaatgcaggcttgattgagaaactaagcagaatttctactaacagtgagsattgagggagaagcgttcctgtaatggaggggaaatgaataaaacctcgactcccagctcgacagggacctttcttctcctagccagctggaatgcaagc

SEQ ID NO: 502046 - DNA, 201 bp, Homo sapiens
gcagacctctttcagcccctgtatttcttactcaggtcatgactggagatacgtgggttggggggctctaatcaccacactcactcttctgtctcacactkcatccctcgtgaatgggtttagttttagtaagaatgtttacaggagagtgttggctacatgtccccaacatcccgggtttgagtcccatctgagccacca

SEQ ID NO: 502047 - DNA, 201 bp, Homo sapiens
aagcacatatcaaaagtactcaggtcaatgaattttccaaagtgagcacacctatgtagccagcaccccaaatccctccttatagccccttttaccacccytaccactgaaatgtaaccactatcctgagaccagcaccataggtttgttttgcctttttctgaactttatatagatggaaatatacagttcatactcaat

SEQ ID NO: 502048 - DNA, 201 bp, Homo sapiens
gaacgcattcgtgagaaggagagttctgctcagttatgaacaaagcaactgcattcaataaatatttgttgagtacctactgtgttccagcagagagctcrcattctagctggggagacagaaaacaaataagtgcatttataattggatgtctgcttgtgatatgtgtgtatcccaggcagagggtccacagaacaaaca

SEQ ID NO: 502049 - DNA, 201 bp, Homo sapiens
attttcaatgtttgagattattcatgaacctgaactgcccttcaacctgtaaatctgaataagtgaggttttactatgatttacaaaaccataaaacaagrcagaaagaggtctgttcatctaatagtggctgtttgtttctcctttcctttttggagaggagggaaaaaaagagcaaatgtctatctagcaagatgacgt

SEQ ID NO: 502050 - DNA, 201 bp, Homo sapiens
gacagctacctgcccagatgatgtaccttagccccaggaaggaggaggaagaagaggcagacagaatgatgcccaaacccctgcggcccggagacgaggtrgtgcctgagtcaggaagctgggagagcccagctcagtggaagaggcatgtggatcctggttaggtgtgaagccaggagggcttcttagccacagcctgaa

SEQ ID NO: 502051 - DNA, 201 bp, Homo sapiens
aaccaacaagaaacacactaaatacaaatggcgtttctcaattcattagagcaagcctgcaagaaccttgacctgggagtagtgaggccactttctcagcsactagttcatgccattatatatacataccagttttaacaatacattatttttataattttcaatgtttgagattattcatgaacctgaactgcccttcaa

SEQ ID NO: 502052 - DNA, 201 bp, Homo sapiens
caccaccaggtgtctggctagaaagatgtcatcttcccaagacagctacctgcccagatgatgtaccttagccccaggaaggaggaggaagaagaggcagrcagaatgatgcccaaacccctgcggcccggagacgaggtggtgcctgagtcaggaagctgggagagcccagctcagtggaagaggcatgtggatcctggt

SEQ ID NO: 502053 - DNA, 201 bp, Homo sapiens
caggattatgcacacaaatgtttcaagcctttataatttttttaagtccaaatggcataggtccatttataaaatattttctgaatttatattatgatttmaactagcaatatcctattaattaacttatttaaaattcataaggagacaagttatttaaaaaaaaaaacactcttgaactgagtaaaaaatagcacgaag

SEQ ID NO: 502054 - DNA, 201 bp, Homo sapiens
cctcccaaagcactgggattacaggcccgagaaccacacacagcctgctgtgagtgattttaagagaagctgttagagattggggccctagcatctcattraatcactggttgacaccaccacagcctcccagctctcaagcaattcctaggaaaacaggaattcatcgggaaaatattcttgatcctgataccaaaatta

SEQ ID NO: 502055 - DNA, 201 bp, Homo sapiens
gaaagagaaaagcaaatgcaaatatcttcaaacgtcataagaaaaggcaaaagtgaatccgataaatatattttaaaacaataataaaagaggcattttgytgacagataaattcatgaaacaagactgacttttttgaatgccattcatagaactgccaggtcagctgtgtagtgtgaggtatatttcaatgcaaaatac

SEQ ID NO: 502056 - DNA, 201 bp, Homo sapiens
tctcattatcttctttctctgaccctctttggactaaataaactcccagtattcttgaccaacagaggtagggttggaacagaacctcaaaagtcatcatyagacttcctactaatagggcattggaagttcaagcgactaactaggaaacaggttagtatttgtacccctacactgtgcaacagattacataccatttgc

SEQ ID NO: 502057 - DNA, 201 bp, Homo sapiens
gtgccatgttggtgtgctgtacccattaactcgtcacttagcattaggtatatatcctaatgctatccctcccccctccccacaccccacaacagtccccsgtgtgtgatgttccccttcctgtgtccatgtgttctcattgttcaattcccacctatgagtgagaacatggggtgttcggttttctgtccttgcaatagt

SEQ ID NO: 502058 - DNA, 201 bp, Homo sapiens
gagtaccacagtcggagcactgtgtcctgctaaatgtgaggagcattctcctctctgatgttatcatcataaggccagggcctgtggcttaagctcctccrttcccttagagtctcccacaccacacaacaagtttggagacagagaaagtagctaatatttccccctaagtgccaggcactgttttctattttttacatt

SEQ ID NO: 502059 - DNA, 201 bp, Homo sapiens
attagttttgataggtgtgattaatggtattgtgtttatgtaagaaaacaccactatttttagcaatcaacacttagatacagaaagctaaaatgacacarttctgggattcggttatcatacatcagccaaaataaaggaggaaggaaggaaaaatgtacagaagtaaaagtaggaaaatactgataattctggaattta

SEQ ID NO: 502060 - DNA, 201 bp, Homo sapiens
tgcgatcttggctcactgaaatctccacctcccaggttcaagcaattctcctgcctcggcctcccatgtagctgggatttcaggcacacaccaacaccccygactaatttttttgaatttttagtagagacaggattttaccatgttagtcaggctggtctcaaactcctggcctcaagtaatccgcccaccttggcctcc

SEQ ID NO: 502061 - DNA, 201 bp, Homo sapiens
tcccagctctcccttactaaaggccagggaggaaattgtctcgaatgctctccagtccaaaatggaaagttagattcaatggtctgtactcttgggctgastaacctccgtttttccttttcccattgtgctgagtcagccacggggggtgggttgtgcattttaagggtttgaatgcagaaggaaggaaggcttcccagt

SEQ ID NO: 502062 - DNA, 201 bp, Homo sapiens
tttgaatttgacccatctttcactaggatctacagatggtgaaatattaatgaacaggtgggttgcacaatattccaagattgcgttagaattgatttttrtaggctaaattattaacaccagagttgctgacatatattctcatatgattagcaaacccagaagccttaatatcaacacagaatacattcagaaccatca

SEQ ID NO: 502063 - DNA, 201 bp, Homo sapiens
atagttacacaaccttgtgaatatactactgcacaccttaacatggtgaattttatggtacgtaaattacatctcaataacatttaaaaaaaaaaaaaaaagcagcagcagatggctgctggaggaggctgagcttaaatacccctggttacacttcctcctttccttgtatttactggaaggagaaggatttgtcctaag

SEQ ID NO: 502064 - DNA, 201 bp, Homo sapiens
gacgcaacgctatccagcttcccagaaaacaccgcctttttttcttacattacagctctgagtcaaagtgtactgtggcctcagacctggggcatacagcycatttgacagccacaatgagggaaacagcctacttctggagcctgtaccagaaggcagaacgggagactcccagctctcccttactaaaggccagggagg

SEQ ID NO: 502065 - DNA, 201 bp, Homo sapiens
ataccacgaagtagaggttaggtcagggaatctggcctaaatatatgggggggtcagggagatggaggttagtcattccattggaggacagaagaaaaagkaacaagaagttcttttatagtgactgaccataaagttttgaaaaaagaggtattcaaatagcactttaatccacactgcatgttatgagaggctatgggg

SEQ ID NO: 502066 - DNA, 201 bp, Homo sapiens
tatatggagattgttatgtgaattaactcatgcaattacagaagccaagaagtcccacaatatgccactgcaagctggagacccaggataggtgtcattcmgttagagtcctaaggcctgagaactgtcatgggaagactttggattcagccatgactcaagtgtaccagtggacttttcagttacatgagaaaatgcatt

SEQ ID NO: 502067 - DNA, 201 bp, Homo sapiens
ctacaaaaataacctggacatggtggtgggcacctgtaatcccagctactcaggaggtgaggcaggagaatcacttgaacccaggaggcggaggttgcagygagccgagatcgcgccactgcactccagcgtgggcgacaagagcaaaactctgtctcaaaaaaaaaaaaaaaaaaaaaaaaaaaaggagtagaaaacaga

SEQ ID NO: 502068 - DNA, 201 bp, Homo sapiens
atatgagagctgagtgaagacagagaatgtatgaggctttgggtacaggttcctgaggcgtgctcaaatgtacgttaagagaaaagactggaatagggaawgagagaaggaattgatggatgttaaaatgaacatattaattttgcctgtgggcatgtttccattaattggcttttggatctgaaccaagaatagcagaat

SEQ ID NO: 502069 - DNA, 201 bp, Homo sapiens
cttactcagtcttcacacaacccacagagggggacaagatatcaccatccgtacttaacagaggaagaaatgcgctgaagtttacacaattaggacgtgtraggatatgattcagggtgtgtctggattcagaactgcacactgcacctgctgtgctttattgcattagctgctgctgctgctctgacctgggctgacgtt

SEQ ID NO: 502070 - DNA, 201 bp, Homo sapiens
actacagatgctttttaagacacttatgagaattgttctttctacagtttaaagtgcctggcacatatttggtgcctaatactggctaaataaggagatgytggctgtgcgcagtggctcacgcctgtaattccaggactttgggaggccaaggcgggtggatcacgaggtcaggaggttgagaccatcctggctaacacg

SEQ ID NO: 502071 - DNA, 201 bp, Homo sapiens
aagccccttacatatgaaatcttactcagtcttcacacaacccacagagggggacaagatatcaccatccgtacttaacagaggaagaaatgcgctgaagwttacacaattaggacgtgtgaggatatgattcagggtgtgtctggattcagaactgcacactgcacctgctgtgctttattgcattagctgctgctgctg

SEQ ID NO: 502072 - DNA, 201 bp, Homo sapiens
tcagttctgcagatttaaatgagtcatttctgaactgttggcataaggcctatccttttcactcaaatattcccttgaggcatcattttttttttttttttcaaaattgggaaagcgaaggatacaagaagttggaaggaaagcccatgaaagaaaaacacatttactataattaagaaagaaaattaaacagatgatgat

SEQ ID NO: 502073 - DNA, 201 bp, Homo sapiens
attgccttggttttcctctagggcttttatggttttgggttttacatttaagactttaatccatcttgagttaatttttgtataaggagggggtccagttygttttctgcatatggctagccagttttcccagcaccgtttattaaatagggagtcctttccccactgcttgtttttgtcaagtttgttgaatagcagatg

SEQ ID NO: 502074 - DNA, 201 bp, Homo sapiens
ccccagtgtgtgatgttcccctccctgtgtccatgtgttctcattgttcaactccaacttataagtgagaacatgaagtgtttggttttctgttcctgtgktagtttgctgagaatgatggcttccggtttcatccatgtccctgcaaagaacacgaattcttttttatggctgcatagtattccatgatgtatatatggc

SEQ ID NO: 502075 - DNA, 201 bp, Homo sapiens
tgccagcagaggaatactacctgggactaggcatgttcaaaatggcggttccatcttctcttccttttttttttttttttttttttttttttggttagttwgtttgtttttgttgttgttgctgttgtttgagacggagtctcgctctgtcgcccaggctggagtgcaatggcatggtggaggctcattgcaacctccacc

SEQ ID NO: 502076 - DNA, 201 bp, Homo sapiens
cttctgacataaacagcctcctttcatcaaaggatcgtgccatcctttctattttctaagcattaaaaggcagtttaagcagatcagtgaattaggcaaaygtttatattctcccttgcccttttctttttgcatctggtagaatttctcctgttctattgttgatctctttgtaaaagcccgtacattcttagctgccag

SEQ ID NO: 502077 - DNA, 201 bp, Homo sapiens
gctatttttattgacctaaattaatctaagaaaagatagtcacttgctaagtagttgcagcttaaaacaagtttcctactcctgctccccttccaatctcrttgcccatgagctctgtctggtattagtgaaagtgacagaaatacatgtagtgaaagctacatgtattctagttcctcaccaaaatgcatatttagaggt

SEQ ID NO: 502078 - DNA, 201 bp, Homo sapiens
gaatggttgtgttgttcgttgaagtatggtttctacaaatacatattgcctttgtgccatcataaagtcaagaaattgttaagtcaaatcatgagtgaggkatcatctgtacattcatacacacacggtatgaatacatgggggtgtgtgtgtgcatgtgtctatgcatgtaaatgtgtgtttcaaagctctggggtcctt

SEQ ID NO: 502079 - DNA, 201 bp, Homo sapiens
tgatggcttagcttgggctcaggggcctaacaatacaggctgacaaggattctttctttgtattaagcactttctagatttcttggagtggttagcaccawgggtattggctaccaatcctcatttctattaatattatttcatgtagacaaatgtagacaattgatgttttctcaatcctatgtaaagttggtgagaagg

SEQ ID NO: 502080 - DNA, 201 bp, Homo sapiens
cctaaaggcagtgttacatggatatccaaatgtttagagaggacaatcttaaatatacaaaagaatgataaataaataaataaataaataaataaataaawaaataaaagatttcctaatttgtcaccacttgcatgctggaaaccgacagcgctaacttgggtaatatccttttaactctgattgaattatatgttaatt

SEQ ID NO: 502081 - DNA, 201 bp, Homo sapiens
ctgaggagagttcagaaaactccatgctgtgcagtgcaattgggaggaaactcaagggagtgctgtcgtgggacctcccggtggtgatttgtacaaatgamgcaacgctatccagcttcccagaaaacaccgcctttttttcttacattacagctctgagtcaaagtgtactgtggcctcagacctggggcatacagccca

SEQ ID NO: 502082 - DNA, 201 bp, Homo sapiens
agaataaaatgagaaaactcacactcccaccccttcccagagtaaccatgggtaccatgtgccttctatttatgtacatgcatacggttgtacatatagakagatagatagatctacttcatgattttaaactactgcatggtatgaccatgacattattattgtcattactattattattgagacagggtcttgctctgt

SEQ ID NO: 502083 - DNA, 201 bp, Homo sapiens
tcttagaacttaaaatgggaacgtcagagacattaatatctcattcctaccacctaccgcttaatcagtgtgttgctaagccccttacatatgaaatcttwctcagtcttcacacaacccacagagggggacaagatatcaccatccgtacttaacagaggaagaaatgcgctgaagtttacacaattaggacgtgtgagg

SEQ ID NO: 502084 - DNA, 201 bp, Homo sapiens
tgtgcttctctgaacttgtttccctaaccacaaacagaacaagttctctagaggttgagtcagaagaatttttgtggtaaagaggacattgaaagggggtwggtctactaaatgtcttgtgttagggttctccagagaaacagagaaatatatatatatttctatatatatgtatatatattttttatatgtgtgtgtata

SEQ ID NO: 502085 - DNA, 201 bp, Homo sapiens
acacacacatgttttatgtaaggtgcatcatttgcaatgggctggtggaccctgatatcgagttgggggtcaccagtacatgttccccttccctaatggtyagtagtcctgccctgccacatggccttagttaggaccagatttgaccatcagatagttaaataaatcagaactgcaaatccatcaagatcctttctcctt

SEQ ID NO: 502086 - DNA, 201 bp, Homo sapiens
ccccattttctcctccctgtgcttctctgaacttgtttccctaaccacaaacagaacaagttctctagaggttgagtcagaagaatttttgtggtaaagargacattgaaagggggtaggtctactaaatgtcttgtgttagggttctccagagaaacagagaaatatatatatatttctatatatatgtatatatatttt

SEQ ID NO: 502087 - DNA, 201 bp, Homo sapiens
aagaaatgttaaatctgaccccagttgctaaaggcagaagaataacacgagatttgagaccaagccagttcctgtttgactattttgaccccatttatagwcatgtcaaatgtcccccatttctgctggctccagccccatcttgttgctgcttccttgagatgtgaggaacaatcattctttcttctgttctaggccagg

SEQ ID NO: 502088 - DNA, 201 bp, Homo sapiens
cacagagggggacaagatatcaccatccgtacttaacagaggaagaaatgcgctgaagtttacacaattaggacgtgtgaggatatgattcagggtgtgtstggattcagaactgcacactgcacctgctgtgctttattgcattagctgctgctgctgctctgacctgggctgacgttgcagtgagtctggagaaaccct

SEQ ID NO: 502089 - DNA, 201 bp, Homo sapiens
ccaggaggcagaggttgcagtgagccaagatcgtgccgttgcactccagcctgggcaacagaacaagactccaactcaacaacaacaataaaaaagttcamtgtgacctttttaaaagaaatgttaaatctgaccccagttgctaaaggcagaagaataacacgagatttgagaccaagccagttcctgtttgactatttt

SEQ ID NO: 502090 - DNA, 201 bp, Homo sapiens
tgccagcgcagcactgggaaagttaattactgtcgacagtcctcgagcctgttttcataactggtaatgactgttaatatgtcaccactgaagttagagaytcagaaaagtcttttgtcctaggactattaaatgtcatggaagaataacccccaaatttgcctttgggtagataaagttcaatgggactggctgggtgcg

SEQ ID NO: 502091 - DNA, 201 bp, Homo sapiens
gtcctcggtaaggttttccttttaatgaaaaccagccccaaatacttttcctttctaacaaagagcagcctgtgaaatcaagctacagacatagatgccascagaggaatactacctgggactaggcatgttcaaaatggcggttccatcttctcttccttttttttttttttttttttttttttttggttagttagtttg

SEQ ID NO: 502092 - DNA, 201 bp, Homo sapiens
ataatataccgaaggctattctctacatagagtaagaatttctagactaaaataaagtcagaatgtcagaaataaaacaggtgttaaaaatcatccaactygagctactgattttataaatgaacactccaggtcctgcatgataaagtgactccccaaggtcacctagctaggagtgacagggcctggggccagtgaaaa

SEQ ID NO: 502093 - DNA, 201 bp, Homo sapiens
gctactcggcaggctgaggcaggagaatggcgtgaacccgggaggcagagcttgcagtgagccaagattgtgccactgcactctggcctgggcaacagagygagactccatctcaaaaaaataaaaaaataataaaataaaaataaaaaataaatctgtttaatcttcacaataattctacaacgaaaaaattgttatctc

SEQ ID NO: 502094 - DNA, 201 bp, Homo sapiens
gcttcatttggttaaccctactcatccgtgaaggctcggccaggggacttccctggctgattgctcccaaaatatgctgtgatggatagcaccatcagtgygcttccatgaggtatcgtaactaactgtgcaatggttctctcctcaccgaggactgtgagatcctagagaacagggaatgggtattagtcatcacatccc

SEQ ID NO: 502095 - DNA, 201 bp, Homo sapiens
gttagccaagaagagaaaagttttcagtcctagaagaaagaaggtctctgctatcacctcataatagctttggggctactccctccaagatcatagagctygtcagcataaatcatagaggagctgtttgcatgcagcagagggacccagagtgccacctggcatggtccaacctaagaacctaggtgagaagcatgggaa

SEQ ID NO: 502096 - DNA, 201 bp, Homo sapiens
tgggcatagtggcaggtgcctgtagtcccagctactcggcaggctgaggcaggagaatggcgtgaacccgggaggcagagcttgcagtgagccaagattgygccactgcactctggcctgggcaacagagtgagactccatctcaaaaaaataaaaaaataataaaataaaaataaaaaataaatctgtttaatcttcaca

SEQ ID NO: 502097 - DNA, 201 bp, Homo sapiens
aatgtaacttcatcacatatatataaatgatatatagtgtacttcatataaaaatgatttgttatatatacatacacacacatatatatatataatggttwgtgtaccttccctgagaatgtgggcaactggagaactctggccatgggtgcaaaagggcctcccttgctgttccatgatggtgctccctcaggcccctct

SEQ ID NO: 502098 - DNA, 201 bp, Homo sapiens
aattagctgggcatagtggcaggtgcctgtagtcccagctactcggcaggctgaggcaggagaatggcgtgaacccgggaggcagagcttgcagtgagccragattgtgccactgcactctggcctgggcaacagagtgagactccatctcaaaaaaataaaaaaataataaaataaaaataaaaaataaatctgtttaat

SEQ ID NO: 502099 - DNA, 201 bp, Homo sapiens
ggttaatcaccttctcattgaatgtaacttcatcacatatatataaatgatatatagtgtacttcatataaaaatgatttgttatatatacatacacacayatatatatatataatggttagtgtaccttccctgagaatgtgggcaactggagaactctggccatgggtgcaaaagggcctcccttgctgttccatgatg

SEQ ID NO: 502100 - DNA, 201 bp, Homo sapiens
ctagcggctgataaaggaaactctgggcagaagagcctgagatgaatgggatattagtgagaggagctgagccggtcacatagccaagttttgcaggaggraaaaagagaatgggaaattaattataatcaattcctactaaaaccctgagaattggagacaacacataggctattgagagggcgatttctcctaattctt

SEQ ID NO: 502101 - DNA, 201 bp, Homo sapiens
aatggagctgggggccactatccttagtaaattcacgcagaaacagaaaaccaaatacctcatgttctcacttataaggaggagctaaatgatgagaacayacggacacaaagaggggagcaacagacattgggacctatttgagggtggagtgtggcaggaaggcgaggatcagaagaaataacttttgggtactaggct

SEQ ID NO: 502102 - DNA, 201 bp, Homo sapiens
gtattttcaggagagaggaatacacttacttgctctaaggccacacatcttaaaccgagatacatctactctgggaggtttgcagctggagttttcagctraacttttaaaaactttgtttaaaataagttgctttacattggaacttaatatcctcagtggattgagatcgacattctgggaattgaaattgtgtctgga

SEQ ID NO: 502103 - DNA, 201 bp, Homo sapiens
ctggacaatttttcagttcatttttgagaagtaggcatggccttgggagaacattttttaccctctccgcactctcattccatctcacatacaaatacatyaagaaaatgaagccaactgaagcagaggtcaggagtgaaagaaaagttgatataagagcttcagcaacagcagctggccccaggcactagcggctgataa

SEQ ID NO: 502104 - DNA, 201 bp, Homo sapiens
agtgatttttgtacattcattttatatcatgaaactttgctgaagttgtttatcagctgggatctaatgaaacttaagagcttctgcacagcaaaagaaaytaccaacagagtaaacaacaatgatctacagtatgggagaaaatatttgcaaactatacatctgataaagatctaatattcagcatctataaggaattta

SEQ ID NO: 502105 - DNA, 201 bp, Homo sapiens
tttattcttttgtggcaattgtgaatgaaattgcattcctgatttggctctcagcttggctgttgctgatgtatagaaatgccagtgatttttgtacattsattttatatcatgaaactttgctgaagttgtttatcagctgggatctaatgaaacttaagagcttctgcacagcaaaagaaattaccaacagagtaaaca

SEQ ID NO: 502106 - DNA, 201 bp, Homo sapiens
ttctgcaatgggttctcttatttgatgggtagctgagaaaaagagaggcaagggggctttagatcttctggaaatcttgattcgtcagagttgattgactygtctcttccctggagtcagtgacaggcaaattcacaatttcactcaatgctcgcactgaatagctaaaaaatggccagtattctgggctagaacctgatg

SEQ ID NO: 502107 - DNA, 201 bp, Homo sapiens
ttttgtcgaagatcagatggttataggcgtgcaggcttatttctgggctctttatcctgtttcattggtctgtgtgtctctttgtaccagtaccaggtggytgtggttactgtagccctgtagtatagtttgacgtgatgcttccagctttgttctttttgcatacaattgccttggctatgtaggctcttttttgattcc

SEQ ID NO: 502108 - DNA, 201 bp, Homo sapiens
ggggctttagatcttctggaaatcttgattcgtcagagttgattgactcgtctcttccctggagtcagtgacaggcaaattcacaatttcactcaatgctygcactgaatagctaaaaaatggccagtattctgggctagaacctgatgacagaaagagatatggaaggaaaacagtgtcctaccacaaagtagcaaagac

SEQ ID NO: 502109 - DNA, 201 bp, Homo sapiens
cttttgttattgttgtttttggtgtctttgtcatgaaatctttgctagttcctatgtacagaatggtattgcctaggttgtcttccagggtttttataatyttgggttttacatttaagtttttaattcatcttgagttgatttttgtatatggtgtatatgtagtcttctacatatggctagcgagttatcccagcacca

SEQ ID NO: 502110 - DNA, 201 bp, Homo sapiens
aaatcatcttatgtaatttattgactaccataccgaaagtgaaaatcgaatggttgtgttgttcgttgaagtatggtttctacaaatacatattgcctttrtgccatcataaagtcaagaaattgttaagtcaaatcatgagtgagggatcatctgtacattcatacacacacggtatgaatacatgggggtgtgtgtgtg

SEQ ID NO: 502111 - DNA, 201 bp, Homo sapiens
gattggataaattctgaaacatacaatgggatattttgcagctattaaagactgtctgtctatattcattgatatgatgaataggtatgatgagttattgagtgaaaaaaatgcagttttcaaactagcacatagtgtaaaacccttttttaaaagtcgtttacactcatgtattttagcataaagaaagacatggaagga

SEQ ID NO: 502112 - DNA, 201 bp, Homo sapiens
gacctactgaacatcatagcttagcctcgcctaccttaaacatgctcagaacacttagattagcctacagttgagcaaaatcatcttatgtaatttattgrctaccataccgaaagtgaaaatcgaatggttgtgttgttcgttgaagtatggtttctacaaatacatattgcctttgtgccatcataaagtcaagaaatt

SEQ ID NO: 502113 - DNA, 201 bp, Homo sapiens
tgcagtctttctcctcagcactatggattataacctgtactttctgtgccgtccttgttctttgaatggcttgagtgtatcttgtctcttttatcttaggstttcttcaattccttttgaaagcagaagaaatatgatataaggcagtgtcatgcccttagttctactgtgcccctgtgttaaggggcataatctactcag

SEQ ID NO: 502114 - DNA, 201 bp, Homo sapiens
ggctcagctaagatcacaacatctagccatggacatgttgactggtacagcctccaggtttttggatggttagcatccagattctagtctttctttctctstctgtctgtctgtctgtctgtctgtctgtctgtctgtctgtctctctctctctctctctctctctctctccctctctccctctctctctctctccctctc

SEQ ID NO: 502115 - DNA, 201 bp, Homo sapiens
aaataaagatctcctaatatttatagtacttgaggttagaatagtcttctaggtagagtactaatatcttgctgataaagcttttgatgctgaatccttgrttattctcttaatataatatcttctgtgcgaataaggctaaaatgcttgcatacactcttgtactcacttaggaatgtaatagagcagtttgggagagtg

SEQ ID NO: 502116 - DNA, 201 bp, Homo sapiens
ttcttatactcatgcttagctctcactctacctttctaacaaatggcctaagcagaggaagatgctaaaggggctgctaaggcagcaagaaaatcaagtarcacagaaacagagtcagttggttctttgcacttaggattctcagaagaattttttgcttctgccttcaaaattaaactggaatattaaaactgatctttt

SEQ ID NO: 502117 - DNA, 201 bp, Homo sapiens
tcctgagcattctctttgatacggaaaataaaacggactaggggagaaggtatagaatgtaacgcactaggggttttttggagggaggataatctctgggmagttccctactcttgaaacctagcctggaatgggctttcacctctgtgctatttatactaaaactgaattggccttagggatgggatggaaagtaattag

SEQ ID NO: 502118 - DNA, 201 bp, Homo sapiens
ctacaggcaggaagaaaatggcaaatggagacaattatttgctgaatttggtctccgtagactcatactttttgcttagttttcattatttgaggataaarattgcttttaggcctaagagactcagctaactggacaatttttcagttcatttttgagaagtaggcatggccttgggagaacattttttaccctctccgc

SEQ ID NO: 502119 - DNA, 201 bp, Homo sapiens
ccaaccccttttattggcagtgaagcaagtcaaatacttactaggaacactagccctttcttagaagcgactcttgttgaaaaaaacatcctgtgctttgygaagtgatttgtccctgaagaactctatgagtaaaagagactctagctgtgactttggccaagtcaggtggtcttgctactgatgagggggctgaatcct

SEQ ID NO: 502120 - DNA, 201 bp, Homo sapiens
tacttgatggccggaagcaaatatcatctcaaggctcccttcctcacaggtctggttcctatgctaataggactcaaagacgaggataggtgactcattamctacccatggcctctatacatgggttggtgttttcacaacatggtggcctaggtattcagactcaaggctccaagaactagtgttctagaaaactaagag

SEQ ID NO: 502121 - DNA, 201 bp, Homo sapiens
taatcaattcctactaaaaccctgagaattggagacaacacataggctattgagagggcgatttctcctaattctttctgcaaggtcttagagtgcttctwacccacaacagaaggtacgagaacctctgccaagcatatggaattgccaacttcaagtcaggagaacttacttgtgagcctcctggagatggttatgtgg

SEQ ID NO: 502122 - DNA, 201 bp, Homo sapiens
gtattcaataaggacacagtagaaatggcttgtctctgttccacaatgtcttggaccttagctggaaagaagcaaaggccaatggttacttgatggccggragcaaatatcatctcaaggctcccttcctcacaggtctggttcctatgctaataggactcaaagacgaggataggtgactcattacctacccatggcctc

SEQ ID NO: 502123 - DNA, 201 bp, Homo sapiens
ggaaattaattataatcaattcctactaaaaccctgagaattggagacaacacataggctattgagagggcgatttctcctaattctttctgcaaggtctwagagtgcttcttacccacaacagaaggtacgagaacctctgccaagcatatggaattgccaacttcaagtcaggagaacttacttgtgagcctcctggag

SEQ ID NO: 502124 - DNA, 201 bp, Homo sapiens
caggtattcaataaggacacagtagaaatggcttgtctctgttccacaatgtcttggaccttagctggaaagaagcaaaggccaatggttacttgatggcyggaagcaaatatcatctcaaggctcccttcctcacaggtctggttcctatgctaataggactcaaagacgaggataggtgactcattacctacccatggc

SEQ ID NO: 502125 - DNA, 201 bp, Homo sapiens
tcttggtggtgcctagttctgtttttacatggaggcatcagataaaatgcaatgattccaataggattcagctatcatcacccattaacaggtcagttctragggaagcagctctctggggatttattgtggaatgagagaggagagaaaactttatagccaaagcaaaacgcaaagagatagatctatttgagaatcctg

SEQ ID NO: 502126 - DNA, 201 bp, Homo sapiens
tctgctttgaatgtgggatttttgcactctatgatatatacctttggagtggttttgttttctttgtggttttttttttgtttgttttttgttttttgttytttttgtgtgagacagtggatttttttatccatcattgcattattggagttttatgtgatttaatgtataaaaagtgaggctattctccaactagttgtt

SEQ ID NO: 502127 - DNA, 201 bp, Homo sapiens
ggactgaggagccaaatccaatgactggcatctttagaagagaagggaaaacagacccagagacccagagggagggccatgtgaagatgaaggcagacgtkggagttctgcacccccaagcccaaaacaccaaagactgccagcaccccgcagaagtctggagaagggcgtggaatgaattctccttcaagccttcagaat

SEQ ID NO: 502128 - DNA, 201 bp, Homo sapiens
ggatcctgacaagtaattcacctctgctttgaatgtgggatttttgcactctatgatatatacctttggagtggttttgttttctttgtggttttttttttgtttgttttttgttttttgttttttttgtgtgagacagtggatttttttatccatcattgcattattggagttttatgtgatttaatgtataaaaagtga

SEQ ID NO: 502129 - DNA, 201 bp, Homo sapiens
ggcggggagccaagctggggcgactgggggggcctgggggagctagcggggcgggacccgagcggggcggagagtggcaggaggaggcgaatctccgcgcyccggcgaactttatcgggttgaagtttctgctgtcgcctcccctttgcgtgcggagctgggctttgcgtgcgccgcttctggaaagtcggctccagtcat

SEQ ID NO: 502130 - DNA, 201 bp, Homo sapiens
ttgagctaggaacatttcaaattttctcttctggctattttgagatactcaatatgtttttgttaactatagtcaccctactttgaggctgaatactagcrcttattccgtctaactatatgtctgtacctattaaccaacctctcttcatcccacacacccttcatagcctctagtagctaccattcttttctctacctc

SEQ ID NO: 502131 - DNA, 201 bp, Homo sapiens
aaggcagtgttacatggatatccaaatgtttagagaggacaatcttaaatatacaaaagaatgataaataaataaataaataaataaataaataaataaawaaaagatttcctaatttgtcaccacttgcatgctggaaaccgacagcgctaacttgggtaatatccttttaactctgattgaattatatgttaattcctt

SEQ ID NO: 502132 - DNA, 201 bp, Homo sapiens
ggccttttttgttgttgttactattgttttctgtttctttaccaaaaaaaatggccagggtggacctcaataacaatcagataacagttgagacagctggkgaaagagatgaggaagaacactaagcgatttcccggaagacagcagaaagaacaaccagtacacaggctgaggatgtaaacaaacccgccatgttgtgga

SEQ ID NO: 502133 - DNA, 201 bp, Homo sapiens
agaggttgtgcaagaccagcctctgtgatctgcgaaggccctgagtcccagacatcgtctccaacactgacctagatccagtgccagcaggacaagaaagwcccctctgctttaacctttacatgaaaagaaactttgaaatgaccaatccacattttttttgtttgtttttttctgctttccacagcccttttctgtctg

SEQ ID NO: 502134 - DNA, 201 bp, Homo sapiens
agcctgagccagtaagacatggttccctctaagatgccaggaaaggacctagggcttccctgggctgagctcttaggtaagccatggcctggcctggcctyttagaggttgtgcaagaccagcctctgtgatctgcgaaggccctgagtcccagacatcgtctccaacactgacctagatccagtgccagcaggacaagaa

SEQ ID NO: 502135 - DNA, 201 bp, Homo sapiens
tcttgttttatactcaagtcatcattaaaatttatagaaaaagagagaatttaaaaaaaaaaacactaaaaaatcaccttgtacgcatatacctcagaagrtctttggcctaatggtaatctgtgacattaaggcaaataaccaaaaatatgtaatttttctatttatttctttgagtgggctcagttgcagatatatgaa

SEQ ID NO: 502136 - DNA, 201 bp, Homo sapiens
ccaacacctttaggaagataggtcttccctgaccctcagtctgaggtctagaagcccttctgccttgcctcacaggcatcttccctcctcccccgtccccyagaccagtccaacagcagcccgtgcagcctctgaagtccactcccagtgctagctgatgggaaccccatgggctcctgtctgctatacaaatggaacaga

SEQ ID NO: 502137 - DNA, 201 bp, Homo sapiens
aaatcaaagactgtctatgaggcaaaacatatactgcagccatttgggggaaagaacaaagcactgaactagagggcaaagaccaacattttggttctagstctgccaagtgtaggacattggactaggcacttaacttcagtaagcctcagtctgcttgtgtacaaaacagagtaaaagatttcttgcatttcctacttt

SEQ ID NO: 502138 - DNA, 201 bp, Homo sapiens
ggcgtgaaccccggaggcggagcttgcagtgagccgagagagcgccactgcagtccggcctgggcgaaagagcgagactccgtctcaaaaaaaaaaaaaaagtgtgttttttgtttttgtgtgtgtgtgtgtgtgtgtgtgtgaatgtctcttcatccaagaaaaatctaaatgggctattgtcttggcgtaggaagtagg

SEQ ID NO: 502139 - DNA, 201 bp, Homo sapiens
ctactcaggaggctgaggcaggagaatggcgtgaaccccggaggcggagcttgcagtgagccgagagagcgccactgcagtccggcctgggcgaaagagcsagactccgtctcaaaaaaaaaaaaaaagtgtgttttttgtttttgtgtgtgtgtgtgtgtgtgtgtgtgaatgtctcttcatccaagaaaaatctaaatg

SEQ ID NO: 502140 - DNA, 201 bp, Homo sapiens
tgggccgggcgcggtggctcacgcctgtaatcccagcactttgggaggccgaggcgggtggatcacgaggtcaggagatcgagaccatcttggctaacacrgtgaaaccccgtctctactaaaaaatacaaaaaattagcctggtgttgtggcgggcgcctgtaatcccagctactcaggaggctgaggcaggagaatggc

SEQ ID NO: 502141 - DNA, 201 bp, Homo sapiens
aatgaattttccaaagtgagcacacctatgtagccagcaccccaaatccctccttatagccccttttaccacccctaccactgaaatgtaaccactatccygagaccagcaccataggtttgttttgcctttttctgaactttatatagatggaaatatacagttcatactcaatacatgctgcatagattctttgattca

SEQ ID NO: 502142 - DNA, 201 bp, Homo sapiens
aaagcttcagccatgcaagaggagttagttctggagacctaatatacagcatagtaacgacagttaacaataccgtattgtagacttgaaatttgctacargggtagatcttaagtgttctcaccacaaaagaaaagaggcagctatgtgaggtgatgggtaagtcaactagtttgattgtggtgatcattttccaatgta

SEQ ID NO: 502143 - DNA, 201 bp, Homo sapiens
ggaggaaaagtgtggcatctttatatagaccagggctcaccggcatatactttgccatttcctgggaaaggaagcttctggctcctggaaaaatggcagamacttgaacagaggattggtgaagtcttttggtttatgtggccagatagtacaaggttcctatcaggaagaaaagcacatagtgtctttcttcactccttt

SEQ ID NO: 502144 - DNA, 201 bp, Homo sapiens
ctccctttattctctctccccttccccaaacccacaatagcctctaccatagtgcttattcttttgacctgttctgatctgctagcctaactattccccarcacctttaggaagataggtcttccctgaccctcagtctgaggtctagaagcccttctgccttgcctcacaggcatcttccctcctcccccgtcccctaga

SEQ ID NO: 502145 - DNA, 201 bp, Homo sapiens
agtggggcctaaacgttgaagacacatgatcacgaagatgggaacaataggcactggggatcactagatggggaaggaagggagcagggggcatgggctgragtgccacctgttgcgtcctatacttattccctgggtgatgggatcattgggatcccaagcctcagggtgatgcaatttacccatgtaataaacctgcat

SEQ ID NO: 502146 - DNA, 201 bp, Homo sapiens
cactctcccagtgccaggagccaggacaattatggggctttccctattgtgtgttcttgctgctaaccagctcccaggcctaggcttctgagaaacagtgyaggcacacaagctgcagatctctcctccctttattctctctccccttccccaaacccacaatagcctctaccatagtgcttattcttttgacctgttctg

SEQ ID NO: 502147 - DNA, 201 bp, Homo sapiens
  misc_feature (1)...(201): n = A,T,C or G
aagtctcgcctgactagaatataagacccatgggagaagagactttctgctctacccttggcacataccgggtgctcaaaaaatattcaagtgctcgcttnggcagtacatgtactaaaactggaacaatacagagaacattagcacggccccttcacaaggatgacacacaaatttatgcagcattccataatttcgaga

SEQ ID NO: 502148 - DNA, 201 bp, Homo sapiens
ccaggtgtgctccttacatttctgcccgggtgatactctcagagagctcctcgccatgagaactaagtcactctcccagtgccaggagccaggacaattayggggctttccctattgtgtgttcttgctgctaaccagctcccaggcctaggcttctgagaaacagtgcaggcacacaagctgcagatctctcctcccttt

SEQ ID NO: 502149 - DNA, 201 bp, Homo sapiens
tattgcaaacatggcaatgactggccaaaaccaggtgtgctccttacatttctgcccgggtgatactctcagagagctcctcgccatgagaactaagtcastctcccagtgccaggagccaggacaattatggggctttccctattgtgtgttcttgctgctaaccagctcccaggcctaggcttctgagaaacagtgcag

SEQ ID NO: 502150 - DNA, 201 bp, Homo sapiens
aaactctaacataatgttattatacagtaagttctcacttaatgtcatcgacagtttcttggaaactatagctttaagcaaaatgacatgtaacaaaagcrtttttttctcatcaacgttataacaaaacgttaaaggaagtgacattatttatgaacctgctgcatgttgttttgcttaaagttacagattccaagaacc

SEQ ID NO: 502151 - DNA, 201 bp, Homo sapiens
gtaaagatatgtcttggtttcatctgtgttaaataaacctgcacgatgttacaagctggcattgcttcataagcttgaccttagctttcaaataggacctygatcattgctcaatgaccaagtcacaaagttgcctaatgatattggcccacagccatgttattgcaaacatggcaatgactggccaaaaccaggtgtgct

SEQ ID NO: 502152 - DNA, 201 bp, Homo sapiens
atctaagactgctccctcatggaaattaaggagaaggggaaagcctaggctacagatggagaaggatgagtcattccagcagccatggccaagggaactcytggagacgtagggactgtttatgtggccactcaccatcatgcaggcccccaatgggggtgaggcaaggaaggacatagaaagactgctcaagtgcatttc

SEQ ID NO: 502153 - DNA, 201 bp, Homo sapiens
ccacatgaccttaaatgactgtctaactcagtccttgagcccacagaatcttgtgagtctagcactcacagataaaaaaacaccctcaggctttctgtgtyccaactccaagttctagataaagatgtctgattggttaaagtgggtcatgtttaaagtgggtctactcccaattcagttattggtggccagggccatgag

SEQ ID NO: 502154 - DNA, 201 bp, Homo sapiens
agcatccagattctagtctttctttctctctctgtctgtctgtctgtctgtctgtctgtctgtctgtctgtctctctctctctctctctctctctctctcyctctctccctctctctctctctccctctctctctctccattcacctcttagtttttagcattagatctgcattccctcacaggtttttttctctttccac

SEQ ID NO: 502155 - DNA, 201 bp, Homo sapiens
ttagcatccagattctagtctttctttctctctctgtctgtctgtctgtctgtctgtctgtctgtctgtctgtctctctctctctctctctctctctctcyccctctctccctctctctctctctccctctctctctctccattcacctcttagtttttagcattagatctgcattccctcacaggtttttttctctttcc

SEQ ID NO: 502156 - DNA, 201 bp, Homo sapiens
gtgtagcatctcctttgcccctctcctgctgctaatggcctgtttccccttcaccttgtgccacgattgtaagtttcctgaggcctcccccagaagcagamgcctgtacagcccacaggaaccatgagctgactaaccatcttttctttataaattacccagttctttatggcaacgtaagaatggaccaatagagcacat

SEQ ID NO: 502157 - DNA, 201 bp, Homo sapiens
tcagtcaagaatttggtcctttaaaaaagaaagaggaagaaaagaaagcatgagctctatccctcttttgactaaatactaccactgactttcctgtttakaactaaaggctgtctcttgttccacaggtcaaatgcatactttttaaaatgccacttgaccccttgggttccccattctcagtagaaaaacaaaatggtc

SEQ ID NO: 502158 - DNA, 201 bp, Homo sapiens
actggtacagcctccaggtttttggatggttagcatccagattctagtctttctttctctctctgtctgtctgtctgtctgtctgtctgtctgtctgtctstctctctctctctctctctctctctctctccctctctccctctctctctctctccctctctctctctccattcacctcttagtttttagcattagatctg

SEQ ID NO: 502159 - DNA, 201 bp, Homo sapiens
cccccaatttcttaggaaatctgcttgtttgaaagtgtgtagcatctcctttgcccctctcctgctgctaatggcctgtttccccttcaccttgtgccacrattgtaagtttcctgaggcctcccccagaagcagacgcctgtacagcccacaggaaccatgagctgactaaccatcttttctttataaattacccagttc

SEQ ID NO: 502160 - DNA, 201 bp, Homo sapiens
  misc_feature (1)...(201): n = A,T,C or G
tcctaggagtattttatttttctaagctaaacacttggtgcataggagcttaccacttgcatgtaattttcttgttttgtataaaataaactgaaaaaccngttctttttttggctgaatttaatcatcaaacctatttttaaaatgctctttgtgtactttctttcctttttagaaaattccttttggtatttaggaaaa

SEQ ID NO: 502161 - DNA, 201 bp, Homo sapiens
taataaaaagtttgtgctcaattgcagtctttctcctcagcactatggattataacctgtactttctgtgccgtccttgttctttgaatggcttgagtgtrtcttgtctcttttatcttagggtttcttcaattccttttgaaagcagaagaaatatgatataaggcagtgtcatgcccttagttctactgtgcccctgtg

SEQ ID NO: 502162 - DNA, 201 bp, Homo sapiens
tttccattgtgcggtaaccgcgcttcatcacagccacctccaatcgaggccgcacggtgtccccagaaccacgctcggtacaacctgccccggccgctgckctcgacttgggagcgcgccccgccccgagcgcacgacctcccttccctctccgcgacttgagcttgcttcccggaaagccagtgtagtggcagcggtttg

SEQ ID NO: 502163 - DNA, 201 bp, Homo sapiens
tgcaattaaattgcttatgagggaggccaggggagtgtgcctcatagctgaccctggaatgactgattacattgtaaagaaacacaaaggagtgtctgaaragaatctgacttcttgagagattgaaaccagcaatcaatttgctgacctgataaagaaatgtcttttcgtgatggctttttttatttttatttttattta

SEQ ID NO: 502164 - DNA, 201 bp, Homo sapiens
acaggccattttcacttgttttgtggtggaatgtcatcagttaaggcaggaaccggcgatctggatgtgtgcgtgcaggtcacaggggatatgatggcttwgcttgggctcaggggcctaacaatacaggctgacaaggattctttctttgtattaagcactttctagatttcttggagtggttagcaccaagggtattgg

SEQ ID NO: 502165 - DNA, 201 bp, Homo sapiens
ttcaggaaaccacatctggaaagggacattgaccaattcaagaaaccccagaaagtgggaagagcacaaccatggtggaccatagacttctttagggcagsgtctgtgccatgcctttgctcacccccactgccctggcacagtgctttatacatagaccatgccgtaagatatttgttgaataaatgagtaaataattca

SEQ ID NO: 502166 - DNA, 201 bp, Homo sapiens
cttcagatccctcagctttcagattgacacagcaacagatcatagtctcctaaattctctggcttaaagcatggagccacacttatcctgccaggctgggkccccagttcttagatgaggctagcagtagccatgaggagtgggcatgtggctagtacaagagaaggaatgctaggtggcacttggtcagcaactttccaa

SEQ ID NO: 502167 - DNA, 201 bp, Homo sapiens
cacaagacaatgtcatcagttaaggcaggaacaggccattttcacttgttttgtggtggaatgtcatcagttaaggcaggaaccggcgatctggatgtgtrcgtgcaggtcacaggggatatgatggcttagcttgggctcaggggcctaacaatacaggctgacaaggattctttctttgtattaagcactttctagatt

SEQ ID NO: 502168 - DNA, 201 bp, Homo sapiens
aaggtactcagtgggggagcttttgagccaggatgagccaggagaaggaatttcacaagacaatgtcatcagttaaggcaggaacaggccattttcacttsttttgtggtggaatgtcatcagttaaggcaggaaccggcgatctggatgtgtgcgtgcaggtcacaggggatatgatggcttagcttgggctcaggggcc

SEQ ID NO: 502169 - DNA, 201 bp, Homo sapiens
gaaggggtttgggggttcttaccttccagaaaagcgggaaaggggttggggcacggagaagaggttggggcacggaaataagggatgggggcacagagatwagaggttggggtgtggaaataagggattggggcacagagatataagaggttggggcgcggaaataagagattgggcgcagagataagaggtcggggcacg

SEQ ID NO: 502170 - DNA, 201 bp, Homo sapiens
aatcctgggctgcaggcattccttggcctggtggccagatttctagcacttgtagcaagctcctaggggaggaggttctggaggaacgcctggccgctgcrgttcaggcgtttggaagttcttgtgtgctggagatgtggctggggtttgtctcacagtggaggcaaggaattgcaacttttttctattattgtacacctt

SEQ ID NO: 502171 - DNA, 201 bp, Homo sapiens
atttataatcctttgggtatatacccattaatgggattgctgggtcaaatggtatttctgattttagatccttaaggaattgccacactgtcttccacaayagaactaatttacactcccaccaacagtgtaaaagcgttcctatttctccacagcctcgccagcatctgttgtttcctgactttttaataatcaccattc

SEQ ID NO: 502172 - DNA, 201 bp, Homo sapiens
gctagaaagggaaaagaacatgaataagtggcaatccagggacagccagaaggaacctggacaatggctcaccggctgagcagagatagagttgcactggktggggggggcgggggtggggggcagttgacagcagcctggattgtgagcaaggagtacgaagaaataataattgaagtagcagaaggtagcaaggggtgc

SEQ ID NO: 502173 - DNA, 201 bp, Homo sapiens
ctagaaagggaaaagaacatgaataagtggcaatccagggacagccagaaggaacctggacaatggctcaccggctgagcagagatagagttgcactgggkggggggggcgggggtggggggcagttgacagcagcctggattgtgagcaaggagtacgaagaaataataattgaagtagcagaaggtagcaaggggtgca

SEQ ID NO: 502174 - DNA, 201 bp, Homo sapiens
agtggtaaccaggttaatagcactgacaaccatgttctttttacaggaaacacaaacgtgaatcacttgttcttacttttcttttacagtggtctcaaatrgtcaagaccccctgctgggaggagcttctatcctgctctgtggaagaaatgggcatgccagatgcctggaagatcagaggctcacattccaggtgggtca

SEQ ID NO: 502175 - DNA, 201 bp, Homo sapiens
ttttctatagaaattactttagagagaaaccctcttccaattgtatttaaatccaccccccaaatataatttattctcttatgaagctttgaaatggaaamttttccccagaagtaaccaggcattgtgcaaagtcgcatccattttgaacaccaaagcagctgtaacaaataagagatgacaaatgccattgtgtaattt

SEQ ID NO: 502176 - DNA, 201 bp, Homo sapiens
gagattggagattacctgtgatggtttggatttagattttgcctccaggtttaggcaatggtaaataggcaggagtttaataggaactaaggttatttgakaattcctgggccactgcaaatagaaagtgttggcaattttgtcttttgggctgcctctgattgaaggcacaggcctgtttcatgaagttctgaaacatga

SEQ ID NO: 502177 - DNA, 201 bp, Homo sapiens
agagcacagaaactccggatcttaattcttgatttcctggcagtgataccttcccattccattacataaggtataagtggcagaagatcagggagaaccayagggctgtaagatattttataagttgttaaataaggggacactgctttatttggggcatgtcactcaatctcttcaacattgtgttaggtaggtatcatg

SEQ ID NO: 502178 - DNA, 201 bp, Homo sapiens
tcaagattattttggagctttaagatttaatgaccgtcctgctgggtttcggacttgcatggggcctgtagcccctgtgttgtggctgagttctcctttcyggaaatggagtatttacccaatgcctgtactcccattgtatcttggaagtagctaacttgtttttgattttacaggctcataggtggaagggacttgcct

SEQ ID NO: 502179 - DNA, 201 bp, Homo sapiens
tttgtgagcactggcaacaatttagcagaacagaatgagttagattcccaattgtggtagatcacgtgtagtagcgaacagagcacagaaactccggatcytaattcttgatttcctggcagtgataccttcccattccattacataaggtataagtggcagaagatcagggagaaccatagggctgtaagatattttata

SEQ ID NO: 502180 - DNA, 201 bp, Homo sapiens
taaaaccatagcaatcattctatttgtttggtcacagtttaaaaaaggaaatttgctataagaaaaataaatacaaacaaacacaaaaagagttgaatgcyacctgcagaagaagcaccaatccaactattttaccctgcccacattcaccatgtttctcacaattgcctataaaaagtagtcaccatttattgtaccagg

SEQ ID NO: 502181 - DNA, 201 bp, Homo sapiens
gcatctagtgtctctatagtaactatttacactcctagggaaaattatctcacagaagcatagagagcctgaccttgtctataaagacagtaaggtataawgattaaaagaataggctctaaagtcaggcagacctgggtaaatctgccacctactagagagcttgggcaagcaagttcaccatgcctggtacctagtgag

SEQ ID NO: 502182 - DNA, 201 bp, Homo sapiens
gatctcatgtacacctagggtcgaagttggaacagagagtatgtggagagcctgggctaagactgaagccgccatgatgaaaaccaaactcaagcagtctygttttttaaaaccaatgggagtagtaaagtataaatgtaaatctcagttatcttatcatgccaccctataggtgtttccagtagttactttagagctatc

SEQ ID NO: 502183 - DNA, 201 bp, Homo sapiens
gtggcatctagtgtctctatagtaactatttacactcctagggaaaattatctcacagaagcatagagagcctgaccttgtctataaagacagtaaggtayaaagattaaaagaataggctctaaagtcaggcagacctgggtaaatctgccacctactagagagcttgggcaagcaagttcaccatgcctggtacctagt

SEQ ID NO: 502184 - DNA, 201 bp, Homo sapiens
cagtcagagagccttgggccagagttccaggggctctgggagtggctgccaggtgagttggacagtccgatttccagtggggtcccacacagatgggacayggcttaggaggaatcctgggctgcaggcattccttggcctggtggccagatttctagcacttgtagcaagctcctaggggaggaggttctggaggaacgc

SEQ ID NO: 502185 - DNA, 201 bp, Homo sapiens
gtagggaatcagacctttagtagacacggagctcttcaaatacagagtgaacttggggcatctgatcatgtgggtcaagatgaacactacagaatacaacygagagccacatgtgagtgaagctgtactcgagctgacaatactgacattcaaaaagcaacaggatgatgagaatgttctggaattagagggtagtgatag

SEQ ID NO: 502186 - DNA, 201 bp, Homo sapiens
ggcaagggaaacaggcccttgaaaagaaggtaatgtagagtgggtagcctccgtattgattaagaaggggacggacttactttccactgtgagagttacgygaagctcggcgtctgtgatggtctagggggcttccaaggcagtcgggcagcatcagtcttcagccgctaagccaagaagatctgggaagcagtcagagag

SEQ ID NO: 502187 - DNA, 201 bp, Homo sapiens
ctttttgccctgaaaattagccttggtggctgagttttgcttttcaggttctcattgctagtgcttattttgacgcttagtgaccatctcattcctactaytggcccgcagtagggaatcagacctttagtagacacggagctcttcaaatacagagtgaacttggggcatctgatcatgtgggtcaagatgaacactaca

SEQ ID NO: 502188 - DNA, 201 bp, Homo sapiens
attgaggataggagagtatatgggtttggcaccatggggtggataggcaaaacaatttggttgataaggcatagatcctgaactaacttgtaaggcttgcytggttttaggacaggtaaaatgggggaatggtaaggagagtttataggctttaaaaggccatgctgtagcaggcaagtgataacaggctttaaccctttc

SEQ ID NO: 502189 - DNA, 201 bp, Homo sapiens
caccctcggctgcgcacgcacagtcgcgcctgccaggccagcgaggcggacgcttgggccaccacccgcaggccgagcccgggcgcgtatcgccacctcgstgcgcaccggcggctctgtggtcttcctgggcgcgcttgcggtcgcgaagggggccctccctttataagggaagccggaggcgcttgggcgggggtggct

SEQ ID NO: 502190 - DNA, 201 bp, Homo sapiens
acccaagtctgactgagttctcccacatttatcccagctgtcacggatgagaggcactttctcttctgctgaccttctggctcctggtgatactgtctacwgcacagatggaaagtacccaggaaacagcataacaacaacaacaaaaaatcacattttttagcttcaaagcaaacaccaaagttaaaagcccaacgcctg

SEQ ID NO: 502191 - DNA, 201 bp, Homo sapiens
tgctgagcctaatgggtgtcagggtcagtccaagtgaaagcaaagagaggctgggatgaagggtgcaaaggaatagtaaagaaagcatgtttgagatccaraacagaataatggattgtggagggaggtattgaggataggagagtatatgggtttggcaccatggggtggataggcaaaacaatttggttgataaggcat

SEQ ID NO: 502192 - DNA, 201 bp, Homo sapiens
gttgttcctgggtctcctgaccacccaagtctgactgagttctcccacatttatcccagctgtcacggatgagaggcactttctcttctgctgaccttctrgctcctggtgatactgtctacagcacagatggaaagtacccaggaaacagcataacaacaacaacaaaaaatcacattttttagcttcaaagcaaacacc

SEQ ID NO: 502193 - DNA, 201 bp, Homo sapiens
taagaattctgaccgcactaaccatgcctaggaaggaaaggcgttgttgttttgtaagggattgaggtttgggagattaatcggacacgatcagcagggaragcacgtgtgtttttatgagaattatgctgagataggtaacagatgaggatgaaatttgggcttgactgaagtaatgggggctgtctgtgaagccttgcg

SEQ ID NO: 502194 - DNA, 201 bp, Homo sapiens
ctgctgcttcccagctgcaccagctaggcaaactcctgccagaggaaatctcacagttggagtgcagtaggcatagatttctcctacttaactggggggasgctgtagtcacagcgaagggaatattattgtgtcccatgggaagaaacatgaagacggagtggacgcttcattcctactccaatcagccatctggagggt

SEQ ID NO: 502195 - DNA, 201 bp, Homo sapiens
atagattttggaagttatgagaaatgtagagagtgagttgagcatagtttgtgatttttagggcctctaaaagtattagggcggcagcagccgctgcatgsagacatgagggctaggctaaaacagtaaggtcaagttgtttgcataggaaggctacagggtgcggtcctggctcttgtgtaagaattctgaccgcactaa

SEQ ID NO: 502196 - DNA, 201 bp, Homo sapiens
gggtctttcctgatgccgtgctgccgggcacaatctcaggagactccagcaccactgtttacaccacccttgtgtgtgtgtgtgtgtgtgtgtgtgtgtgtaagtggacctccaatggactatgtgctcctacagaacaggagctgtattttgaagttgttttgtttgtctacttgttttggttttgttgttagtgttctt

SEQ ID NO: 502197 - DNA, 201 bp, Homo sapiens
ccggattgaagtccgggccaggaacaatagtaattgtgggacttaacaaagactgagtacagctgaaggagctggggagcagaaagtatatgcgtcaggtrtgaggaagaaaatagattttggaagttatgagaaatgtagagagtgagttgagcatagtttgtgatttttagggcctctaaaagtattagggcggcagca

SEQ ID NO: 502198 - DNA, 201 bp, Homo sapiens
ggggtctttcctgatgccgtgctgccgggcacaatctcaggagactccagcaccactgtttacaccacccttgtgtgtgtgtgtgtgtgtgtgtgtgtgtgtaagtggacctccaatggactatgtgctcctacagaacaggagctgtattttgaagttgttttgtttgtctacttgttttggttttgttgttagtgttct

SEQ ID NO: 502199 - DNA, 201 bp, Homo sapiens
ggtgtggtatcaggaataatgtgggaggccggattgaagtccgggccaggaacaatagtaattgtgggacttaacaaagactgagtacagctgaaggagcyggggagcagaaagtatatgcgtcaggtatgaggaagaaaatagattttggaagttatgagaaatgtagagagtgagttgagcatagtttgtgatttttag

SEQ ID NO: 502200 - DNA, 201 bp, Homo sapiens
acaacacctagatacacaataccaggtatgttacaactgcatggaaaagccactttataggccaaatggcagcaattttcaatggctttttttttttttttataacttttgacctacaaaatgtcagtttcctgtgatgccaccctacctgctactagactggccatctgatccccactggagaagccacaatcataggga

SEQ ID NO: 502201 - DNA, 201 bp, Homo sapiens
tagaaaggaaatgagaggttctaagaggcgggctagtggcttgtactatagcatagcctgcctttgctggtgtgtggcgattaggcctggtggaactgccrtcaataaatcaagcgtgatcagggtgaggaacaggaaagaaggaaatatggggaaatggggtgaatgtcaggtggatcagagagatacagtcatgggggt

SEQ ID NO: 502202 - DNA, 201 bp, Homo sapiens
agagtacttttcagagagggacagtcaataaaaagccttcgtgtataactagtccattttcatgctgccgataaagacatacctgaaactgggtaatttayaaagaaaaagaggtttaatggactcacagttccacatggcaggggaagcctcacaatcatggtggaaggtgaatggcacgtcttacatggcggctgagaa

SEQ ID NO: 502203 - DNA, 201 bp, Homo sapiens
gaggtgtgtttttaaaagacctttagtccgttctacttttcctgaagacggaggaccataagggatataaaggtttcactgaatactaagagcctgaaaawctgcttggctgatttgactaataaaggctggtctgttatcagactgtatagaggtgggaaggctaaactgaggaattatgtctgacagaagggaagaaat

SEQ ID NO: 502204 - DNA, 201 bp, Homo sapiens
tgggctcaagtgaccctcccacctcagcctcccaagtagctggggctccaggtgcacaaccacatgttgctgatttttaaattttttgtagggatggggggtctcactgtgttccccaggttggtcttgaactcctggcctcaaacggtcctcccaacttgacctcccaaagcactgggattacaggcccgagaaccacac

SEQ ID NO: 502205 - DNA, 201 bp, Homo sapiens
ttcaggtaaagtagaattctatcaaaattgtcacaaaattgtctttgatgagagccatcatagtgcaaagttgatgactaaaaggagatggttaagttgtytaaagagcaaggccataggagagaagaaactaatattcaaagcttcctcccacagttcaaagttagagaaacctgagaggggtgtactggtatgaccacc

SEQ ID NO: 502206 - DNA, 201 bp, Homo sapiens
agaaacagagaaatatatatatatttctatatatatgtatatatattttttatatgtgtgtgtatatatatatgtgtgtgtgtgtatatatatatatatatggagattgttatgtgaattaactcatgcaattacagaagccaagaagtcccacaatatgccactgcaagctggagacccaggataggtgtcattcagtta

SEQ ID NO: 502207 - DNA, 201 bp, Homo sapiens
ccggccggcctcggagctctaccagcaggctttcatgggagcggaggtgcccacgtttccattgtgcggtaaccgcgcttcatcacagccacctccaatcraggccgcacggtgtccccagaaccacgctcggtacaacctgccccggccgctgcgctcgacttgggagcgcgccccgccccgagcgcacgacctcccttc

SEQ ID NO: 502208 - DNA, 201 bp, Homo sapiens
gggaggtcccccgatccgactcatggcaccaaatttcatgcatgtccgtgtgaagagaccatcaaacaggctttgtgtgagcaataaagcttttaatcacstgggtgcaggcgggctgagtccaaaaagagagtcagccaagggagacaggtggggccgttttatatgatttgggtaggtaaaggaaaaaggggggttgtt

SEQ ID NO: 502209 - DNA, 201 bp, Homo sapiens
aaaagaaggactggggtggtggatcatgcctgtaatcccaacactttgggaggccaaggcaggcagatcacttgaggccaggagttcgagaccagcctggmcaacatggtgaaaccccatctctattaaaaatgcaaaaattatccaggcaagtttccacacacctgaagtcccagagaatctcttgaacccaggagccgg

SEQ ID NO: 502210 - DNA, 201 bp, Homo sapiens
ctaaatgagattttagaaagtagcatagtttctgaaaggagcagccactggaaaccaaaaactttctcagggtactcaaacggtttgaagagaactgatayttgaaaacggaaatccttccatttgtgacaacatggacaaacctggagaacattatgctaagtgagataaaccagtcacagcaagacaaatactgcctga

SEQ ID NO: 502211 - DNA, 201 bp, Homo sapiens
ggagcacaaggaggtaaccagccactccactgaagctgtgtttaggtggtggatatgatctgccagcggcccctcagccaaaaccaccaatacaaatccaygtagacagtttcttaaacaaacttagtaaaatcaaatctagaatatctccccctttcaaacaatgcattttcccagtgccaaagtacagcactttcttag

SEQ ID NO: 502212 - DNA, 201 bp, Homo sapiens
catggacaaacctggagaacattatgctaagtgagataaaccagtcacagcaagacaaatactgcctgatcttttgtatatgtggaatctaaaatagttamtctcctagaagcagagagtagaatggtggttgtcagggctggggtatacaggaaatgaggagatgttggtcaaagggtacaaagcttcagccatgcaaga

SEQ ID NO: 502213 - DNA, 201 bp, Homo sapiens
agggcaatgttagtgagccacagtatgtgcgttgggaaccatgtagagaacaggaaactacagatgctttttaagacacttatgagaattgttctttctamagtttaaagtgcctggcacatatttggtgcctaatactggctaaataaggagatgctggctgtgcgcagtggctcacgcctgtaattccaggactttggg

SEQ ID NO: 502214 - DNA, 201 bp, Homo sapiens
cctggttaggtgtgaagccaggagggcttcttagccacagcctgaaatcgaagcccaggatcgagccacagtctgaaatttttggatcgcagctctgccarttaaaccaatggtaacaataataatgtactgtcatatatgtaagaactgccatatatggagcattttgagccaggcaatgtgccaagcacttgacagaaa

SEQ ID NO: 502215 - DNA, 201 bp, Homo sapiens
gaaatgactgcttgaacgtttcagccttaatgctgacatgtggtgacttgaagccaggtgaatgaaggttcctccagctagagaggtaagatgaacatgcmggaccaggaagaaagcaggtcatcatgttagacaggtgcaattatgtgcagagactataaaagaagagaaaaagacatttagtcatcagagagcagccat

SEQ ID NO: 502216 - DNA, 201 bp, Homo sapiens
ttcttttttccagatttctttggttgaggatatgtaacaaagaatatctttggtgagaacattgcaatcagaaaaaaatgtccgtgtaaccattttttaarattaattctattttcactaagaacactgattttcagacatagctataggtatcacagggttctatatggaatttctagaaatacagtggggagttcatgg

SEQ ID NO: 502217 - DNA, 201 bp, Homo sapiens
actttctcttgccccagaataagacaagaatgccgaggcctggtcagtatcccagggtaccaccgccagtgctggccagagcaggctctgagaggctaacrcaggccacagagcctagggccttgttttggagggtgaggtgaggcttaaagctggtaggataggcgccctctgagattcgccatctgagaagtcagtcag

SEQ ID NO: 502218 - DNA, 201 bp, Homo sapiens
agagttagaaacaataatttttaacccagtatatttttgtgaaaaaaaaatgggaataatgtgaaagtctaatagtatgcagttagtgaaatcaataatgrtacatacatacaatggaatactatgcagccattacaattataccacagaagaaaaggcaatggcctggaaaaatatattgttcataatatattgttacat

SEQ ID NO: 502219 - DNA, 201 bp, Homo sapiens
gtgacttccatgctagaaatcgcttctctgggtccagcttacacttaagtgaatggagatgtaaaatggagacgataccagtaccgattatgcagagttgyggtgaggactgaatgaactaatacatgtaaagcttttagaagggtgcctggcatgtggtgggtgctcaggcatcattagctgttatcattattctgtggg

SEQ ID NO: 502220 - DNA, 201 bp, Homo sapiens
catgggtcacagaagcaatggaaagttggaaaccattgccttctaattagcagatgtctcagtggctaacattatttgccagtagcagtgccagcgcagcrctgggaaagttaattactgtcgacagtcctcgagcctgttttcataactggtaatgactgttaatatgtcaccactgaagttagagactcagaaaagtct

SEQ ID NO: 502221 - DNA, 201 bp, Homo sapiens
tcactcaaatattcccttgaggcatcattttttttttttttttcaaaattgggaaagcgaaggatacaagaagttggaaggaaagcccatgaaagaaaaamacatttactataattaagaaagaaaattaaacagatgatgatcagaactgcggttataaattaaagttaactgattccaagagtgtacgccatcagaatt

SEQ ID NO: 502222 - DNA, 201 bp, Homo sapiens
agtccttacttctgtccagtaaaatccaagacatggcaaggacttgaacctcgcaggaataaaaacatggcccacttggttcagcgtgacagctctcaggrtggcgtgccgttacccacctgcaaattcctaacagcccaaagtggcaccagtcacttcctccttgcgtttctcaggcagcacattgagtggctgctagca

SEQ ID NO: 502223 - DNA, 201 bp, Homo sapiens
ctgaggtttctaaatattgttccagcataggaatttcagcttttattcttttccaacttttcatttatatggcatgcatgggtcacagaagcaatggaaakttggaaaccattgccttctaattagcagatgtctcagtggctaacattatttgccagtagcagtgccagcgcagcactgggaaagttaattactgtcgac

SEQ ID NO: 502224 - DNA, 201 bp, Homo sapiens
ccgacttgaaaaatcttctgattctatgaccaaactggaaggcctgggttgggctctctcagttctgcagatttaaatgagtcatttctgaactgttggcwtaaggcctatccttttcactcaaatattcccttgaggcatcattttttttttttttttcaaaattgggaaagcgaaggatacaagaagttggaaggaaag

SEQ ID NO: 502225 - DNA, 201 bp, Homo sapiens
aaacccccatgacacaagtttacctaggtaacaaacttatacatatactcctgaaccgaaaataaaagttaaaagaaaaaagaaagacccatctgtatagkgctctctctctctttctcttacttggtttattctcttccttatccattgcatgcattaaccctttagaacttccggtgttctggggaccctgaaagatca

SEQ ID NO: 502226 - DNA, 201 bp, Homo sapiens
gagcacccaataacagttagccattatcattattactactacttactaagtccttacttctgtccagtaaaatccaagacatggcaaggacttgaacctcrcaggaataaaaacatggcccacttggttcagcgtgacagctctcagggtggcgtgccgttacccacctgcaaattcctaacagcccaaagtggcaccagt

SEQ ID NO: 502227 - DNA, 201 bp, Homo sapiens
cctttttaagttggtagctgagcttggtgaggtgtgtttttaaaagacctttagtccgttctacttttcctgaagacggaggaccataagggatataaagrtttcactgaatactaagagcctgaaaatctgcttggctgatttgactaataaaggctggtctgttatcagactgtatagaggtgggaaggctaaactgag

SEQ ID NO: 502228 - DNA, 201 bp, Homo sapiens
tgaggttgtgggggtcagggcaagaataataaagggagaaaggacaagattcaatccaatccagttcttttctccacttaatccctggctaccactgactyggcactctgggagtaaagagcagtggagaaagctctagacctattggtgtatatttccaagaggaagatccttggaccagcatcaagttggctttttatc

SEQ ID NO: 502229 - DNA, 201 bp, Homo sapiens
accacggttaaaaatcactactattcacttcttaccatttgatctgttgacagtttcagccatcagtcactgccggctcccacttcatttagttaccatgyccctcactaacacaagatcgccgtctaggggccaatcgtagaactacaggctacacagaggagaagggagccaggccacctttcccatgcatcccactcc

SEQ ID NO: 502230 - DNA, 201 bp, Homo sapiens
cgcaggcccaaatgccttctgggcttgtctaatcctccagaggatatcaaaggcaatacagccagcatacccaatcattaggagtttggcttctgggaccrggcactcttgggtgtgagcaccagctctcttatttataagctgtaaccttggccatgttatttaacccttctgagcctgactttcctcacttgtacaaga

SEQ ID NO: 502231 - DNA, 201 bp, Homo sapiens
aggagctcaaatgggctgtaccttgtagcattctgaggacaggtctgacttctgagaaaggaaagtcgtaaaagtattgtccagtcctttttaagttggtrgctgagcttggtgaggtgtgtttttaaaagacctttagtccgttctacttttcctgaagacggaggaccataagggatataaaggtttcactgaatacta

SEQ ID NO: 502232 - DNA, 201 bp, Homo sapiens
ttaaatgtaagcacctgcagcagggtattggtgaactgtccaggggaagcacaaattagaaaaaatacaaaatacgcttccctgagcccatgaatttaccrtatcaggaatatgtaagatacattaattagttcatcagtaggctccaagacagacattgcagatggtggggaaggtgggggtgggggcaggtgggtgggc

SEQ ID NO: 502233 - DNA, 201 bp, Homo sapiens
gtaatgaaaattggcaggtcccacttgagaatattatactaagtgaaataagccagtgacaaaaagacaaatacttttttccacttctctgaggcactcawattcatagacatgggaagtagaatactgtttgccaggggctgggagaggaggtaacggaaagttgccgtttaatggatgcagagttccacctttgcaaga

SEQ ID NO: 502234 - DNA, 201 bp, Homo sapiens
ttctcttaaagaatacatatgcctgtgttcagattatctcctcttcctgacaaatgagggaaatccccagatgaaagctgataaaacattagacgggggtrattccggacctccacatccctatggaacacatcacagaagccaggattggagagccaactccacacacctccatatcccctcttagatgaatggcaattc

SEQ ID NO: 502235 - DNA, 201 bp, Homo sapiens
agagtggcagtttggggatagcaccaggagatatcagctgtgatggcttggagaaacagcgtaaaccggcagtgtaaataagagcagggcgtgtatgagtrgttgagaacggtgaataggagtatgactagacagaagataatagggatgataagtttttttggggcacagtctaagttggtctggtgtctggaatgagac

SEQ ID NO: 502236 - DNA, 201 bp, Homo sapiens
tgcttgtgcagaacccaaggacagctgcgcatttattgcacatttatattcactgcttcctgatgacattaaatgtaagcacctgcagcagggtattggtraactgtccaggggaagcacaaattagaaaaaatacaaaatacgcttccctgagcccatgaatttaccgtatcaggaatatgtaagatacattaattagtt

SEQ ID NO: 502237 - DNA, 201 bp, Homo sapiens
tattgcttcaccaagagtatactccaggtgatttttttgtgtgtccttaattttgtcattttgtggtcattaataacatcagttaacaataatattattawactgtccactacaatgtgcgtttgtgagcactggcaacaatttagcagaacagaatgagttagattcccaattgtggtagatcacgtgtagtagcgaaca

SEQ ID NO: 502238 - DNA, 201 bp, Homo sapiens
ttcttctcttaaagaatacatatgcctgtgttcagattatctcctcttcctgacaaatgagggaaatccccagatgaaagctgataaaacattagacgggsgtgattccggacctccacatccctatggaacacatcacagaagccaggattggagagccaactccacacacctccatatcccctcttagatgaatggcaa

SEQ ID NO: 502239 - DNA, 201 bp, Homo sapiens
taagagtggcagtttggggatagcaccaggagatatcagctgtgatggcttggagaaacagcgtaaaccggcagtgtaaataagagcagggcgtgtatgastagttgagaacggtgaataggagtatgactagacagaagataatagggatgataagtttttttggggcacagtctaagttggtctggtgtctggaatgag

SEQ ID NO: 502240 - DNA, 201 bp, Homo sapiens
caaaggtcctgtgcttttctgcctaaaatatgtacaatcctcagttggcactgtcaggaatggggaccgccctcatggagaagtggcacttccactcctarccagcctctgtgtgagctggactctaaggtcaggagaatgaggaggccgtgaaggtcttggccgtctctttttcccctcatctctactgagacatagatc

SEQ ID NO: 502241 - DNA, 201 bp, Homo sapiens
aaaggtttgccaattcccatctctatgaaccttggctttgtaccaagtagaatgtacctaaatacttttccttctataaaggatggttactttgacttagstttgccaacatggaacaaaacaaacaaaacaaaaattttacttgtctttcagacctatttcttctcttaaagaatacatatgcctgtgttcagattatct

SEQ ID NO: 502242 - DNA, 201 bp, Homo sapiens
taagtcagtttaatgggtagccactgtgcttttccagtcatctccaaacacacatacccacatgcactgaggagagtggaggagaataagccatctctggyaggctcttgacatttgggtgggcaggattcagtcatcaggcacatgctggtaggcaagaggagcagaaataaggagacacaccaagtggctgagggtgcg

SEQ ID NO: 502243 - DNA, 201 bp, Homo sapiens
tcccacctcagcctccaaagtgctgggattataggcgtgagccactgcgcctggccaacattattttttcaaccatcaacggcgacttagatggtcatttrtgttgttctcaactctattattagagactccactgcagtgatttcacttttctgtgcaattctgaatccatttgcaaatgttcccccagtatcgattctc

SEQ ID NO: 502244 - DNA, 201 bp, Homo sapiens
gcctgggggagctagcggggcgggacccgagcggggcggagagtggcaggaggaggcgaatctccgcgctccggcgaactttatcgggttgaagtttctgstgtcgcctcccctttgcgtgcggagctgggctttgcgtgcgccgcttctggaaagtcggctccagtcatatccctgggcgctgcctgcggccgctcctcc

SEQ ID NO: 502245 - DNA, 201 bp, Homo sapiens
cacaacactcctctgaaaatagggacagctaattttgtaatggattgccagcaaaagctgtgacaatgcctactctggaagtctctaaatttcttttcaayctgagaagggtgttccatgatatttactggagtaagaagtgatggaggaggtagaatagttctggaagtcaggtctctaaatagaacaaatcttgggatc

SEQ ID NO: 502246 - DNA, 201 bp, Homo sapiens
gtgtccccagaaccacgctcggtacaacctgccccggccgctgcgctcgacttgggagcgcgccccgccccgagcgcacgacctcccttccctctccgcgrcttgagcttgcttcccggaaagccagtgtagtggcagcggtttgcctcacagcgcccctggttggttgtttaaattttatcttaggttctcgcaaacaaa

SEQ ID NO: 502247 - DNA, 201 bp, Homo sapiens
ggcctgggggagctagcggggcgggacccgagcggggcggagagtggcaggaggaggcgaatctccgcgctccggcgaactttatcgggttgaagtttctsctgtcgcctcccctttgcgtgcggagctgggctttgcgtgcgccgcttctggaaagtcggctccagtcatatccctgggcgctgcctgcggccgctcctc

SEQ ID NO: 502248 - DNA, 201 bp, Homo sapiens
agaccctgaccagcagggaagagcagtagcaaggagataggagagaagggtggtataaagagtttaccttctttatttttctctgtccacagttcctttaygcggaaagctatttacagcagccacagtctctgtttggtttggcatgacactgactttctatggataagtcaggatctcatgtcctcatctaaaaatggt

SEQ ID NO: 502249 - DNA, 201 bp, Homo sapiens
tcaccctactttgaggctgaatactagcacttattccgtctaactatatgtctgtacctattaaccaacctctcttcatcccacacacccttcatagcctytagtagctaccattcttttctctacctccatgagatccatctttttagctcccacatatgagtaagaatatgcaatatttgtctttcggtgcctggctga

SEQ ID NO: 502250 - DNA, 201 bp, Homo sapiens
ccctatgtaaatcagacaccgcctcttcaaacctgcctaaaaatttggagaattccgccccagcaagtctttccctttcagaagccccgctctctcgctakagagaaagctgttctcctttctctttcttctgcctattaaacctgcgctcctaaaggcctcctttgtgtccctgtcctaaattttcttggcgccaggtaa

SEQ ID NO: 502251 - DNA, 201 bp, Homo sapiens
gaatgactgattacattgtaaagaaacacaaaggagtgtctgaagagaatctgacttcttgagagattgaaaccagcaatcaatttgctgacctgataaaraaatgtcttttcgtgatggctttttttatttttatttttatttatttattttttttgagatggagtctcactctgtcacctgggctgcagtgcaatggcg

SEQ ID NO: 502252 - DNA, 201 bp, Homo sapiens
ccaagctgtagttccttgggctcagctctttttctaggacatgactcaaaaatcagaggaactaggttggtaagtgctgtcagaaagataagcccttatcrgttatggcaaaccaaaatgactggctatggtaacactttttgcagagaatcttcaagcctggagttcttagggctttatggtgcaaacttcattgaatgc

SEQ ID NO: 502253 - DNA, 201 bp, Homo sapiens
tcctgaggcctcccccagaagcagacgcctgtacagcccacaggaaccatgagctgactaaccatcttttctttataaattacccagttctttatggcaaygtaagaatggaccaatagagcacatcactagggtagcacaaaggagagggcccagaagcagaggagagataaacagctcatttttttcatctttctcaat

SEQ ID NO: 502254 - DNA, 201 bp, Homo sapiens
tgtccctacccaaatctcatgttgaactgtgatcccgagtgctggagggagggtttggtgggaggtgattggatcacaggggtggtttttaatggtttagygccattcccccaatttcttaggaaatctgcttgtttgaaagtgtgtagcatctcctttgcccctctcctgctgctaatggcctgtttccccttcaccttg

SEQ ID NO: 502255 - DNA, 201 bp, Homo sapiens
tggtaacttggcaccagttgccagtggcttcatatgaacctatcagctgctgtgggatggcagagcagttaagagtccaagactagtccacgcaggcctgyagctcccacattctgatgcatcaaagccacagcaagttcctaaaacataggctctggatccagatgcttttggttcaaattttcacttcattatttctca

SEQ ID NO: 502256 - DNA, 201 bp, Homo sapiens
gggaacgctggctcacgcctgtaataccagcactttgggagcctgacgtgggtgaatcacgaggtatggagttcaagaccagcctggtcaagatgtgaaamcccgtctctactaaaactacaaaaatgagccaggtatggtggcgggcacccgtaatctcagctactcgggaggctgaggcagggaattgcttgaacccgg

SEQ ID NO: 502257 - DNA, 201 bp, Homo sapiens
gtcccatatcagtttaatacctattttccaatgtaatgccctgaaatcccagaagaggaaaaaagaatttttttctaacaattagaaacatgataaaaaawactatcaaaggtatattcattcagccatgcaaattgtaaaaccatagcaatcattctatttgtttggtcacagtttaaaaaaggaaatttgctataagaa

SEQ ID NO: 502258 - DNA, 201 bp, Homo sapiens
aaataaagtaatgagaccactttgttgtagcaaagaaattcagtttgtttctagaagcagatgtgtgtgcatgggtgagtgggcatgtgcatatttgcttwaaaacattttccaataactgctgacaacagcaacctgaagcctccaggcacccagtttctccccatcctgagatgatctttttgctcctggagcagcatt

SEQ ID NO: 502259 - DNA, 201 bp, Homo sapiens
actttcagcagaattgtacaatatgacattatattgctcaaaatgactcaattttctaatctttgagacttcttaaaaagaaatgaaccccaagtagagtraaggtggactgcaaaaaacagcttagtctgaatgaaaaaaattcatccttggctctgcatctaagaaactggctgtgtgtcctcagacaattcacttaat

SEQ ID NO: 502260 - DNA, 201 bp, Homo sapiens
atgtgtgcgtgcaggtcacaggggatatgatggcttagcttgggctcaggggcctaacaatacaggctgacaaggattctttctttgtattaagcactttytagatttcttggagtggttagcaccaagggtattggctaccaatcctcatttctattaatattatttcatgtagacaaatgtagacaattgatgttttct

SEQ ID NO: 502261 - DNA, 201 bp, Homo sapiens
ggaaaagagtgagggaaataagaagggggagcagagagatacagcaactaagaaaaagaaaaagaaaaaaatacccagccctggggctaaaagatagtcayggtggtcagtcactttgtctgggctctcaactggtgtacttacctctcctgctcaacgtttgagcatgtgcctctgctgcttaatatttgtggggtgaag

SEQ ID NO: 502262 - DNA, 201 bp, Homo sapiens
aacagtgaaagagggagcctactgtccacaactttggtcaatagggaaacactttacttccctaattctttgaccaaccatagaaaacctttaggcagatraaggatactagttttcctttttattttcattttctaaaaataaatatttaccaggttaccaagaaaatacataaagcaacaagtaaaacaccccaccacc

SEQ ID NO: 502263 - DNA, 201 bp, Homo sapiens
gctagttatgaaggggatggaagtgatctctatccaagggaagaacatttgaattgatgtttaaaggagttgtttagattcttatgaaggaatagaggaakagtagaggcaaagacagagaaggggatggatgagaataaagaacaagaaaagaagcagtaggagacaaatgagaaggttaaagctgataatttttacttt

SEQ ID NO: 502264 - DNA, 201 bp, Homo sapiens
ccaccctcggctgcgcacgcacagtcgcgcctgccaggccagcgaggcggacgcttgggccaccacccgcaggccgagcccgggcgcgtatcgccacctcsctgcgcaccggcggctctgtggtcttcctgggcgcgcttgcggtcgcgaagggggccctccctttataagggaagccggaggcgcttgggcgggggtggc

SEQ ID NO: 502265 - DNA, 201 bp, Homo sapiens
gtatcgccacctcgctgcgcaccggcggctctgtggtcttcctgggcgcgcttgcggtcgcgaagggggccctccctttataagggaagccggaggcgctygggcgggggtggcttcccccgcctggcgcgccctttcctacatgctgatgcataggattttcaagacagctaagagaacaaggacttcacgaggcggggg

SEQ ID NO: 502266 - DNA, 201 bp, Homo sapiens
ccagcctctgtgtgagctggactctaaggtcaggagaatgaggaggccgtgaaggtcttggccgtctctttttcccctcatctctactgagacatagatcragacagggacccataaatcaccttggagttaaatcaggggaaaaaagaaaagccctctcaggcaacagcatttcacagcagcaacaggaagttgtaggga

SEQ ID NO: 502267 - DNA, 201 bp, Homo sapiens
ggaattctaaaaaacaaaggtcctgtgcttttctgcctaaaatatgtacaatcctcagttggcactgtcaggaatggggaccgccctcatggagaagtggyacttccactcctagccagcctctgtgtgagctggactctaaggtcaggagaatgaggaggccgtgaaggtcttggccgtctctttttcccctcatctcta

SEQ ID NO: 502268 - DNA, 201 bp, Homo sapiens
ctattgtacccttcctgcctttttcatgcactgctctccacccaccctggcttcccggctttgcctccaacgtcagagtgatttctgggcttgcttttttkttttttttttgcctggaaacttcttctctgaagaactttcaaatggctgccttcttcatgtatctcctctcggagcatcattccctgaccttcctttcta

SEQ ID NO: 502269 - DNA, 201 bp, Homo sapiens
tacccttcctgcctttttcatgcactgctctccacccaccctggcttcccggctttgcctccaacgtcagagtgatttctgggcttgcttttttttttttyttttgcctggaaacttcttctctgaagaactttcaaatggctgccttcttcatgtatctcctctcggagcatcattccctgaccttcctttctagggctc

SEQ ID NO: 502270 - DNA, 201 bp, Homo sapiens
tgatcgttccttataaaaaggccttcattcctcacaaaaatacaactttcagtcaagaatttggtcctttaaaaaagaaagaggaagaaaagaaagcatgwgctctatccctcttttgactaaatactaccactgactttcctgtttagaactaaaggctgtctcttgttccacaggtcaaatgcatactttttaaaatgc

SEQ ID NO: 502271 - DNA, 201 bp, Homo sapiens
cgcttcatcacagccacctccaatcgaggccgcacggtgtccccagaaccacgctcggtacaacctgccccggccgctgcgctcgacttgggagcgcgccycgccccgagcgcacgacctcccttccctctccgcgacttgagcttgcttcccggaaagccagtgtagtggcagcggtttgcctcacagcgcccctggttg

SEQ ID NO: 502272 - DNA, 201 bp, Homo sapiens
accaggtgtcaacaactgtagagttccatcaagagtcatcattttacagttacaagtcggaggggccttcacagatccgtcaggctcaacactgcctcctyagtgagcctgtgaaccacccaagacggctggtcatcagtgtcatcctcttccttttccggacaactatctttaaaagaaaaaaaaagagtgtctttgaat

SEQ ID NO: 502273 - DNA, 201 bp, Homo sapiens
taccctggtaaagtcacctgccttctttgagcttcagttttctcatctggcagttgttcaatgggtttagtcatttgcaatcatttttattaccttctaargtcccctttaggtactgtgatggagaggtagacagacagaaagatgatagatagatagatagatagatagatagatagatagatagatagatgatagata

SEQ ID NO: 502274 - DNA, 201 bp, Homo sapiens
cacatcccgaagtgtcctgcattcctctttctgccccttataggttctttacctgcaaactctctccctcttgtccaaaacattttacctgctctgtcacytttgcatgatcacaggtccttcgcgttccacaatcagttatttccgtaccaggtttgttttatcactttgaaccttaaaacacagggaacaaaattttac

SEQ ID NO: 502275 - DNA, 201 bp, Homo sapiens
cagctaaagcagaagaggcagtgttttaatctagacacaggtacctgcccttaatcactatgcttgacagcttcttaagctagaatgggtggtaggtgacyggggtctgaattaggaatttggaggtagtaatggaaaagagggatcaaattcttagaggtaggataggcaagacttcaccaacaggagcctacggaggtc

SEQ ID NO: 502276 - DNA, 201 bp, Homo sapiens
tcccggaagacagcagaaagaacaaccagtacacaggctgaggatgtaaacaaacccgccatgttgtggaaaccaggaggaggctcatgtgcccaaaatgsagtcagtaggagataaggtcagagaagtaagaaggtgtcaactcaatagggcctggcagcccattgtaatgactggggctttcacactgagtgaaagatg

SEQ ID NO: 502277 - DNA, 201 bp, Homo sapiens
cactacggtaaatagactaggtcatttgaggcagagattgctggcctgggccaccccaggtccacctaggctccccaaagactgaggaatacctattttgyatacaagtgagctgcatccactagttaagaagccaaatcaaagactgtctatgaggcaaaacatatactgcagccatttgggggaaagaacaaagcactg

SEQ ID NO: 502278 - DNA, 201 bp, Homo sapiens
accttttaccatatcttttggctattacttatagtgtaaattcaatgatcttattctacgttcttacccacttctcccattttaaaaattgtactgtttckattctgttagaaaatgcaatgtttaactaccattcttatacccatatctccaaccttgtgttagtcctagatctatatatgaaatatgtagaagcccacc

SEQ ID NO: 502279 - DNA, 201 bp, Homo sapiens
cttaatgttttcaaccttggctgcacccttagtgagatttctaaaatcgcagtgccacaccccatgccattgatatcagaatcttctgaactaggacccagcttcagtgttttttaaagctcccagttgactctaatgtgcagccaagcttgagaaccatggattcagaatattttcctaaattctcccataaacctctgc

SEQ ID NO: 502280 - DNA, 201 bp, Homo sapiens
gcacaaaaggcacaaccggatatacctgttatttcccaatgacctgagagcccgaagtttatgttaagccttgggttatggcacagcttgcacgcaaggcyctgcagctcctgcaggcaattgagaggtggtggtgtacaggacagaggaacaactctgaagtgacagcacataatttaattccccctaagctttccaagc

SEQ ID NO: 502281 - DNA, 201 bp, Homo sapiens
gaccactttgttgtagcaaagaaattcagtttgtttctagaagcagatgtgtgtgcatgggtgagtgggcatgtgcatatttgcttaaaaacattttccartaactgctgacaacagcaacctgaagcctccaggcacccagtttctccccatcctgagatgatctttttgctcctggagcagcattgacgtgttccatag

SEQ ID NO: 502282 - DNA, 201 bp, Homo sapiens
gttgtttcctactcttggttatctggagtcacactgagctcaaaacagatggccctgaaactgctctctgaagcagtgagcacacaccgtctaaacacacmaatatgcgcatgcacgtgcacacacacacacacacacacacacttgtatgtcaccactgaactagtaaccccaagcaagctgaccaagtgctcttctcct

SEQ ID NO: 502283 - DNA, 201 bp, Homo sapiens
tacctcgccagtgtggattgtctacactgcctgcctgctcctggaaaactgatcttcctaccaaccaaacagctggcttcagcttctcgccatgcaagtgyctgccacatgccacttctctacctaggaagttctccctcctttcacctgaacctgtccaaatgttactcttccttcaaaatagggctccaatctcaaaat

SEQ ID NO: 502284 - DNA, 201 bp, Homo sapiens
ctacctcgccagtgtggattgtctacactgcctgcctgctcctggaaaactgatcttcctaccaaccaaacagctggcttcagcttctcgccatgcaagtktctgccacatgccacttctctacctaggaagttctccctcctttcacctgaacctgtccaaatgttactcttccttcaaaatagggctccaatctcaaaa

SEQ ID NO: 502285 - DNA, 201 bp, Homo sapiens
aatcctgcattagggtgggccccagatccaatgagactgtccttaaagtcctccacagcctaactccaggctacctcgccagtgtggattgtctacactgmctgcctgctcctggaaaactgatcttcctaccaaccaaacagctggcttcagcttctcgccatgcaagtgtctgccacatgccacttctctacctaggaa

SEQ ID NO: 502286 - DNA, 201 bp, Homo sapiens
gagaaacagagaaatatatatatatttctatatatatgtatatatattttttatatgtgtgtgtatatatatatgtgtgtgtgtgtatatatatatatatatggagattgttatgtgaattaactcatgcaattacagaagccaagaagtcccacaatatgccactgcaagctggagacccaggataggtgtcattcagtt

SEQ ID NO: 502287 - DNA, 201 bp, Homo sapiens
aaaaaaagctgtcattctttctaaacactaaacttattgtcatcttaaggtcttgactgttggtgttccttctgcttatttacattcacatggcttcttcyttgtccttggtcaagtctcaactcaaatatgattccctccaaaaagcctttccttgttaccccaattatagcagtttataatcagccccaatcttaactc

SEQ ID NO: 502288 - DNA, 201 bp, Homo sapiens
agactcagaaaagtcttttgtcctaggactattaaatgtcatggaagaataacccccaaatttgcctttgggtagataaagttcaatgggactggctgggygcggtggctcacgtctgtaatctcagcactttgggaggccaaggtgggtgggtcacgaggtcaggagttcaagaccagcatggtgaaaccccagctctac

SEQ ID NO: 502289 - DNA, 201 bp, Homo sapiens
ctgcgaaggccagacaattcctggggcattctgtgaagctaggaagccagagttggaagggtcccactctgcctcagccctcacatgacctggtccaacaytgccttacagatgaggaaaactgaggcctagagaggtaaagagacttacctaaaaggcatggttggccactgttaaagttgggatttaaaacccaaattt

SEQ ID NO: 502290 - DNA, 201 bp, Homo sapiens
attggcagtgaagcaagtcaaatacttactaggaacactagccctttcttagaagcgactcttgttgaaaaaaacatcctgtgctttgtgaagtgatttgtccctgaagaactctatgagtaaaagagactctagctgtgactttggccaagtcaggtggtcttgctactgatgagggggctgaatcctgagcattctctt

SEQ ID NO: 502291 - DNA, 201 bp, Homo sapiens
tgcttttgaggccacatgaggagatacacagctgcaggattccctatcagcaaagactgaatgatgtcaaacgttcagaaaaggagaaactaagtgggtgyagcacaatcaatcactttgcatttcaaggtgaacttgcagctcttatggggagggaattctctatgtcattttccacgtaaataaagtaatgagaccact

SEQ ID NO: 502292 - DNA, 201 bp, Homo sapiens
ccatccagcataggaaatagctccacagagtttttatctgagccacatactgcctcagagatcagaacccaagcaaaaactctgcttctttaattcatacsctcccttatttcctcaccttgggctcttcaaatgcccccagcttgactgtggagctggcttcctctccaaccatcattaatttcccagaggggcctgtgg

SEQ ID NO: 502293 - DNA, 201 bp, Homo sapiens
ttttgagctgtctggctggttgagacagatgatctgatggcaagaatgatttgcaaaaaattcaacactgaccaatcagagcagacagtctaaataaacaycgattcttacaaggctaccttccttaccagttaaatatcagtcctgcctcagagaaacataagatctaaagaggaaaatctacacaagattgtgtgtggg

SEQ ID NO: 502294 - DNA, 201 bp, Homo sapiens
attccatacatgttcctgcaaatgatagaatttcattcttttttacggcttaatagtattccattgtgtgtgtgtgtgtgtgtgtgtgtgtgtgtgtgtgkatcacatttgctttatccattcatctgttgatggacacttagattgatactgtatcttggctattgtgaatagtgctgcaataaacatgggagtgcaggt

SEQ ID NO: 502295 - DNA, 201 bp, Homo sapiens
aacccaacccaatttgacttgaataagtaaaggaatttattggctcttacaagtgtaaagtccagaggtttcagttgaggcatggtccaacagctcaacaktttcactgagcacctagtttccttttgtctaatctctgcccaatattgttcatagttccaagatgttcaccaagaggtccctgagctgtgtgctttctca

SEQ ID NO: 502296 - DNA, 201 bp, Homo sapiens
tcttttctctacctccatgagatccatctttttagctcccacatatgagtaagaatatgcaatatttgtctttcggtgcctggctgattttacttaacaaratgcccttcaattccatacatgttcctgcaaatgatagaatttcattcttttttacggcttaatagtattccattgtgtgtgtgtgtgtgtgtgtgtgtg

SEQ ID NO: 502297 - DNA, 201 bp, Homo sapiens
tcttctcttgcccacctttggtgctgcagagtggatcatcttgttttatactcaagtcatcattaaaatttatagaaaaagagagaatttaaaaaaaaaaacactaaaaaatcaccttgtacgcatatacctcagaaggtctttggcctaatggtaatctgtgacattaaggcaaataaccaaaaatatgtaatttttcta

SEQ ID NO: 502298 - DNA, 201 bp, Homo sapiens
gaaatacaaatcaaaaccacaatgagataacatctcacaccagtcagaatggctattattaaaaagacagaaaataagagttgctggtgaggctgcagagraaaggggaaagcttatatgctcttaatggaaacacaaactagttgagccactgtggaagacagtttggagatttctcaaggaactcaaaatagaacaacc

SEQ ID NO: 502299 - DNA, 201 bp, Homo sapiens
tcatgagggtgatttctaatggtttagcaccatccccacagtgctgccttatgatagagttctcaggcgatctggttgtttgaaagcatgtagcacttccrctgcccttctcctgctggccatgtgaaggtgtgcctgtttctcctttaccttctgccatgattgtaagtttcctgaggcctccccaaaagcagaagcctt

SEQ ID NO: 502300 - DNA, 201 bp, Homo sapiens
gactggtgactcactttgtccttccctcctgtaagccatgagaaggaatcagaatgattctgtcatcaagagcatcacaaatcctggatcttcacctgattaatgcttcacgtctagcacaagcactttcattttcaagggattccatactgtattgtctagcccctggctgggttgggatatagttatcttggtggcata

SEQ ID NO: 502301 - DNA, 201 bp, Homo sapiens
cattctagctggggagacagaaaacaaataagtgcatttataattggatgtctgcttgtgatatgtgtgtatcccaggcagagggtccacagaacaaacarcagcatctagtgtggctcggagatgtgctcactcaagttctatgccagatttgagaagcctgcttgactctaacatcccaaatctgcatttccagcactt

SEQ ID NO: 502302 - DNA, 201 bp, Homo sapiens
gtgagagtaatgacgtgagctaatccaatttgaagtataaacaaagaaatttcttcacgcaaagagactgacttattttgtttcagaactaaataccacgmagtagaggttaggtcagggaatctggcctaaatatatgggggggtcagggagatggaggttagtcattccattggaggacagaagaaaaaggaacaagaa

SEQ ID NO: 502303 - DNA, 201 bp, Homo sapiens
tggttactgtagccctgtagtatagtttgacgtgatgcttccagctttgttctttttgcatacaattgccttggctatgtaggctcttttttgattccatwtaaattttaaaatagtttttctttccagttctgtgaagaatatcattgatagtttgataggaatagcactgactctgtaaattgctttggacagtatggc

SEQ ID NO: 502304 - DNA, 201 bp, Homo sapiens
atgtgttaggttgatactgggtgggggcactgaggatttttaaaacgtgatcagggctgccttgttgaaggtaaacctagcggtggtaagtcaaatgaaawggagtcatgagagaacaggtggtactaatcactaccagtactgagtgctttgcagatgctacttcatatacataatctgatttaattctgatagcaagaa

SEQ ID NO: 502305 - DNA, 201 bp, Homo sapiens
taactctgattgaattatatgttaattccttgcggtggtcttagatttcagacgctattagcaaattatggaggaaaagcaagatcgtatgattcatgaaytatcacagcagcaacagtttctaatttccacccatcctctgtgtcatgtgatatgtttcagaaactcacttaaaattgagaaaataagccattcctaatt

SEQ ID NO: 502306 - DNA, 201 bp, Homo sapiens
gccatttgggggaaagaacaaagcactgaactagagggcaaagaccaacattttggttctagctctgccaagtgtaggacattggactaggcacttaactkcagtaagcctcagtctgcttgtgtacaaaacagagtaaaagatttcttgcatttcctactttacaaggtcaacatgaggatcaagaataccatgttcata

SEQ ID NO: 502307 - DNA, 201 bp, Homo sapiens
tctcctttgctgtcacatgtttgaagatggaattgtgctgcttctgagccatccttccaccaattaaaaatgccccagttccttatctctgccttctggamaatgtgctttttcagtatgtccatctgagtatgggcctgaaactgaacatagtatcccaaatatgacattctgtctagcccaggggggtgtggttacttc

SEQ ID NO: 502308 - DNA, 201 bp, Homo sapiens
actgacaagccttggtaacggagcagatataggagataatgaggagagaggagttggagttggagttggtgaggagagatggagttggagttggatacagygacaacttcgaagtttctatccagaggctgggagtgtgatgggccattgacagaaatggcaaacggagagctggtttgcaatggatcaagatgagggttg

SEQ ID NO: 502309 - DNA, 201 bp, Homo sapiens
tttttcatggctacctactacagagtgtcctagtaaaatatatacttgatacattaatatacgctttaaaaagaacagcagttagacattaaccaatatcygttttggttatgttaaagtcacaaatgtttaaaatgcccatcgtttcacagtcaaccacatataagatatatcttgctttattaagtgtatttaacacct

SEQ ID NO: 502310 - DNA, 201 bp, Homo sapiens
agaagataataagtcaacagtcacttttttcatggctacctactacagagtgtcctagtaaaatatatacttgatacattaatatacgctttaaaaagaayagcagttagacattaaccaatatccgttttggttatgttaaagtcacaaatgtttaaaatgcccatcgtttcacagtcaaccacatataagatatatctt

SEQ ID NO: 502311 - DNA, 201 bp, Homo sapiens
aggaggaaggtagagaaaatgggttccagtgtgtgtgtatgtgggggtgggaggggtgtgttgatttaggggtgtacagaaaatggtggtgtgcttcatgmcttttttttttaaagaatgaaaccaggacatcaactgagcatataagaggggaaagtggtgcagtagggttaaggcataatgaaaagatttagaattatc

SEQ ID NO: 502312 - DNA, 201 bp, Homo sapiens
gagttttggtattgattttatgtgtcagtacctgagaaggagagaagtccttgagttgtttcgtaaatgtggctcaagtgagatgctgaacagtgccagcyatgtggactctgccacagtgaaggaggaaggtagagaaaatgggttccagtgtgtgtgtatgtgggggtgggaggggtgtgttgatttaggggtgtacag

SEQ ID NO: 502313 - DNA, 201 bp, Homo sapiens
atctcccaatctctcttcccaagtcattcttttttttttttttaattatactttaagttttagggtcattcttatcttcttctcatctcttacctgttttytcctgaccctaattcctcaaagaagcttaattcacttctagatcccctccttcccccatgaatataaagaaaataactatatctagttcttttagatgtt

SEQ ID NO: 502314 - DNA, 201 bp, Homo sapiens
tagcaatgagcaagactctgtgggcgtaggaccctctgagccatgcgcgggatataatctccttgtgtgccgtttgttaagcccattggaaaagtgcagtmttagggtgggagtgacccgattttccaggtgctgtctgtcactgctttctttgactaggaaagggaattccctgaccccttgcgcttcccaggtgaggcg

SEQ ID NO: 502315 - DNA, 201 bp, Homo sapiens
attcaagctctgctacctataaataagctaatgtctttcctctgggctgttgtcccttagccttcaacatcttctagtctgaagcaaaaatcatgcttcaytttgttttgctatctttctaatacagtaagagcttcaggtcaaagaactgaagagaatgtgagagcttgaccctctgttatgtttttcgttatttgtaga

SEQ ID NO: 502316 - DNA, 201 bp, Homo sapiens
cttcagagtcacacacacacaaaaagataagcttttttctcaattgaaaactggaaagttgaaagaggaagtaaagagaaaaagaaagacatatactatawtccaggagtcccacatgttcagaaactcttcacctgtgaatctacattttactgagttcacatctgccttctgaagggtaaccactctttaccccccaaa

SEQ ID NO: 502317 - DNA, 201 bp, Homo sapiens
tttgccattggttcgaatttcctcctgtagctcggagtagtttgatcatctgaagccttcttctctcaactcgtcaaagtcattctctgtccagctttgtkccattgctggtgaggagctgcgttcctttggaggaggagaggcactctgagttttagagtttccagtttttctgctctgttttttccccatctttgtggt

SEQ ID NO: 502318 - DNA, 201 bp, Homo sapiens
agttctccctcctttcacctgaacctgtccaaatgttactcttccttcaaaatagggctccaatctcaaaatttctgctcccatggggtctttcctgatgycgtgctgccgggcacaatctcaggagactccagcaccactgtttacaccacccttgtgtgtgtgtgtgtgtgtgtgtgtgtgtgtaagtggacctccaat

SEQ ID NO: 502319 - DNA, 201 bp, Homo sapiens
tccatgccaggcatgccccatcacctaggaagaaactcaacccatcagcaggcatccaaaaaggcgtcagccaggtagggtcccaaagagccccacacctygggttatctgggaaaatcccaagttatttagaagacagtgtacctcttgcctctacccttggtggtaaacattgcttcagagtcacacacacacaaaaag

SEQ ID NO: 502320 - DNA, 201 bp, Homo sapiens
caaaagatccatctcctgtggctacctaagagcagtgactctctgggggtggaataatttatacatgtgtaaaaacatttatttttctacatatttacttsaagcatgtgttaaaatatctgcaaacaactccagaccccctccccatcttatttttatcctaaaggcagtgttacatggatatccaaatgtttagagagg

SEQ ID NO: 502321 - DNA, 201 bp, Homo sapiens
gtgtttgaggaatttatccatttcttctagattttctagtttatttgcgtagaggtgtttatagtattctctgatggtagtttgtatttctgtgggatcgstggtgatatctcctttatcattttttattgcatctatgcagttcttctctcttttcttctttattagtcttgctagcggtctatcaattttgttgatctt

SEQ ID NO: 502322 - DNA, 201 bp, Homo sapiens
atcaatgaggaaatatacaaaagagccctagcacagaacctgattcatcactgatgctcggtgagtgttcattatacacccccaacacctctactaaccaygttgactgtgactaaagtaaatgtagattggcaagtcacactctggaataaagcttcccaaccctgacgcctgacacaatcacctgggagctttaaaaag

SEQ ID NO: 502323 - DNA, 201 bp, Homo sapiens
tgagtattcctccgtggagttttagcaacttcccataggaaatccaggctaaggtctgattcatccagtcctgaataatgtgttaatcatgaattggatamaaatcatgaattggatactactcaagaggataagctgttttcaaacatcttagcagtaaatatttgcaaaccaacaagaaacacactaaatacaaatggc

SEQ ID NO: 502324 - DNA, 201 bp, Homo sapiens
tagttttagaaggaatggtaccagctcctctttgtaactctggtagaattcgactgtgaatccatctggtcctggactttttttggttggtaagctattgmttattgcctcaatttcagagcctgttattggtctattcagagattcaacttcttcctggtttagtcttgggaggatggatgtgtttgaggaatttatcca

SEQ ID NO: 502325 - DNA, 201 bp, Homo sapiens
gcttcctctccaaccatcattaatttcccagaggggcctgtggtacttgggaatagcttcggtgatgagaggcaacaaggtctagccaagcacagctctcyaggtcttgaaacatccttaaggcctaagcctagtatcatagacacgggcttgttctaaccccaaactcagacctctaacaatgacctcacttccacttgc

SEQ ID NO: 502326 - DNA, 201 bp, Homo sapiens
cctgtggtctgctttagaattcacccaaaagccaattgtttctgtggttattcaaattttgtttctcttctcactccctcctcttgtctatcctctgatcsccagcatttggacagaataagagagaggaagtaaaactcaaatcattttactttactttttcttggccatttggctaagagatgtgtggggtgaagaggt

SEQ ID NO: 502327 - DNA, 201 bp, Homo sapiens
tgttgaattttgtcaaaggtcttttctgcatctattgagataatcatgtggtttttgtctttggttctgtttatatgttgaattacatttattgatttgcrtatgttgaaccagccttgcatcccagggatgaagcccacttgatcatggtagataagctttttgatgtgctgctggattaggtttgccagtattttattg

SEQ ID NO: 502328 - DNA, 201 bp, Homo sapiens
cactgcgtgagcctgggcaagcctcacaaccttgctggccttgactttcttatttatgagctatagacaattacacccagcctgctgcctggagggctggkgagagtggtgaattgagtgttcaagttgaaagtaagaggtggtcttcagcggttgactccaagcattacttatgatcaaggtctaatttctaagagtcca

SEQ ID NO: 502329 - DNA, 201 bp, Homo sapiens
ccactggagaagccacaatcatagggaaggaatattccatttggggacagataaagtcaatgaaaagatagatgttctcagtacagcccaggccagcatgrgcaaaggtggatacttaatgtctagtcagcttgcatgccatgacaaaataccacagactggggacttaaacaacagaagctgattttttcatagttctgg

SEQ ID NO: 502330 - DNA, 201 bp, Homo sapiens
ggggttttctagatatacaatcatgtcatctgcaaacagggacaatttgacttcctcttttcctaattgaataccctttatttccttctcctgcctaattkccctggccagaacttccaacactatgttgaataggagtggtgagagagggcatccctgtcttgtgccccttttcaaagggaatgcttccagtttttgccc

SEQ ID NO: 502331 - DNA, 201 bp, Homo sapiens
acagtccccctaatgttgtatctttggagtcttctcacattttatttctataaacaattttcaatgaatgtctgcatgcctatatagatgttttatttttstttttaaagtagagaagctgatttttgctgttgtttttgttgctgtataaaagatcactgagtgattgccttagttatgcaacaatagagaaataagtgt

SEQ ID NO: 502332 - DNA, 201 bp, Homo sapiens
gcttaggattgacttggcgatgcgggctcttttttggttccatatgaactttaaagtagttttttccagttctgtgaagaaagtcattggtagcttgatgrggatggcattgaatctgtaaattactttgggcagtatggccattttcacgatattgattcttcctacccatgagcatggaatgttcttccatttgtttgt

SEQ ID NO: 502333 - DNA, 201 bp, Homo sapiens
agtaccatgctgttttggtgactgtagccttgtagtatagtttgaagtcaggtagcgtgatgcctccagctttgttcttttggcttaggattgacttggcratgcgggctcttttttggttccatatgaactttaaagtagttttttccagttctgtgaagaaagtcattggtagcttgatggggatggcattgaatctgt

SEQ ID NO: 502334 - DNA, 201 bp, Homo sapiens
atgacttataatctttggctatatacccagtaatgggtcaaatggctgggtcaaatggtatttctagttctagatccctgaggaatcgccacactgacttscacaatggttgaactagtttacagtcccaccaacagtgtaaaagtgttcctatttctccacatcctctccagcacctgttgtttcctgactttttaatga

SEQ ID NO: 502335 - DNA, 201 bp, Homo sapiens
tgcatgtgtctttaaagcagcatgacttataatctttggctatatacccagtaatgggtcaaatggctgggtcaaatggtatttctagttctagatccctkaggaatcgccacactgacttccacaatggttgaactagtttacagtcccaccaacagtgtaaaagtgttcctatttctccacatcctctccagcacctgt

SEQ ID NO: 502336 - DNA, 201 bp, Homo sapiens
aaatactcaatatatactcatagctcagaaatgctgagttaatagctcatgaatctcaagagaggtgcaaacctgttggtcattggcaaaggggcagattyggaacagtaggagccagggtgctttttggctttcttttctgagccatgggcattctgtctcttgctcacccccacaggacatgatgagctacattgggcc

SEQ ID NO: 502337 - DNA, 201 bp, Homo sapiens
ggggcaggagggaaatctgcatgccaacttctttctcctttcttctctagtctcaatttttttcttatttattttatgttattattattattattattttwtttagttatttattttgagacggagtctcactctgttgcctgggctgagtgcagtggcactatctcggctcactgcaagctccgcctcccgggttcacgc

SEQ ID NO: 502338 - DNA, 201 bp, Homo sapiens
gttcaaatggcactgatgatgtctcccttacaagatggttgtgaggagtaaatgtgatcagcatgtaaagtgtctggcgtgtagtaggctcttaataaacmctggctgaatatgaattggaatgatacaaagtctgagctctactctttctgcattcacgcgtaagtaacagtttcctggtgtttgtcctcctgtgcccac

SEQ ID NO: 502339 - DNA, 201 bp, Homo sapiens
ctgactcctgtttctgtaggctatgagatcaccttcagtttactcaacccagaccccaagtcccatgatgtctactgggacattgagggggctgtccggcrctatgtgcaacctttcctgaatgccctcggtgccgctggcaacttctctgtggactctcaggtgagaccgggagcaagttgaggagtccttttcaatgtc

SEQ ID NO: 502340 - DNA, 201 bp, Homo sapiens
ctctctctagtccctgtgggacagccctagcccctgctgtcatgaaggggccaggcattggtcacctgtgggaccttctccctcactcccctccctcctakttggctttgtctgtcaggtgcagtctggcgggagtccaggaggcagcagctcaggacatggtgctgtgtgtgtgtgtgtgtgtgtgtgtgtgtgtgtgtg

SEQ ID NO: 502341 - DNA, 201 bp, Homo sapiens
ctcccgggttcaagcaattctctgcctcagcctcccgagtagctgggactacaggtgcccgccaccacaactggctaattttttgtaattttagtagaaayggggtttcaccatcttggccaggctggtcttgaactcctgacctcgtgatccacccgcttaggcctcccaaagtgctgggattacaggcgtgagccactg

SEQ ID NO: 502342 - DNA, 201 bp, Homo sapiens
ttactcagtgttcctcatcccagttttgtcctccttttggttccatgatggaaagcagccccattccagaggagaaacaagttcagctcagctgggagtayaggctgcccctcttctttgatccacaagagcctctgacttccctgactcctgtttctgtaggctatgagatcaccttcagtttactcaacccagacccca

SEQ ID NO: 502343 - DNA, 201 bp, Homo sapiens
ccttacaagatggttgtgaggagtaaatgtgatcagcatgtaaagtgtctggcgtgtagtaggctcttaataaacactggctgaatatgaattggaatgawacaaagtctgagctctactctttctgcattcacgcgtaagtaacagtttcctggtgtttgtcctcctgtgcccacaggtccactttgcttccacgtggcc

SEQ ID NO: 502344 - DNA, 201 bp, Homo sapiens
cacactcaccgctgtacattcaggacaaggatggcgctccagtggccaccaatgccttccatagtccccgctggggtggcattatggtaatagtcacactrcgcagaccccagagcccatgcttctgggacaggcaggtgtccctgaaactgtgttccttctgttttccttctggtgtcctccatggcccagcctgtggga

SEQ ID NO: 502345 - DNA, 201 bp, Homo sapiens
cacaggatccagtgctgcctccttgtaccctgtgctcaactttctactctacgtgcctgagcttgcacactcaccgctgtacattcaggacaaggatggckctccagtggccaccaatgccttccatagtccccgctggggtggcattatggtaatagtcacactacgcagaccccagagcccatgcttctgggacaggca

SEQ ID NO: 502346 - DNA, 201 bp, Homo sapiens
gccttggccccccagagtgctgagattacaggcgtgagccaccgcacccgtcctccacatatttttaataaagaatgctggctgggtctggtggctcacastgtaatcccagcactttgggaggccgaggcgggcagtttgcttgaactcaggggttcaagaccagcctgggcaacatggcaaaaccccatctctacaaaa

SEQ ID NO: 502347 - DNA, 201 bp, Homo sapiens
gagtagccagagagggccagagtgtggtgagaccagagagcctgtgaggtccatggtatgtgtgggcttgccatctttagtgtcccagccttcctctagayggcagtaccagcccccaagcaggagtgcagatgagagtgcgaggtttcaagctgaccctaggaaaataaaccatatccctgtagaaagacttccatagat

SEQ ID NO: 502348 - DNA, 201 bp, Homo sapiens
ccggcgctatgtgcaacctttcctgaatgccctcggtgccgctggcaacttctctgtggactctcaggtgagaccgggagcaagttgaggagtccttttcwatgtctatacatatttacaagtgcagtctgttcctccatctcttagagcttgctgatttgctaggaatttcctgtgtgtatatgtatgtgagtgtcataa

SEQ ID NO: 502349 - DNA, 201 bp, Homo sapiens
accagattttgtgtttgtaattttcttgcttttccttagagtttgatcacatatgctgtatctctgtaaacaatgtatttaattttacatttttgaatttrtataaatggtggcttataacacatgttcctctgccacttttattttattcccttcatgtggcagagcctggtgagagaatcatccataattatgtagttg

SEQ ID NO: 502350 - DNA, 201 bp, Homo sapiens
aggcacagtaaggcccagcaccctttccaccaatgcctaggacttactggtataccctcttgtcccttctccttcctaggtgtacaaggctgtagctgccrtccagaagtcggcagaagagttggcgtctgggcacctggcatctgcctttgtcgccagccaggaagctgtgacatcctctgagcttgccttctttgaccc

SEQ ID NO: 502351 - DNA, 201 bp, Homo sapiens
tgcccagcctgtgtattttgttttttatcaggaacattcactgaatttaattattttggggcagtgattggaatgaccatacagtttttctccttttgccyattaatgtaatgactattgaaatagatttcccagtgggaagacgtttcacgctgaaggaccagtgtgtgcagaggtgaaggcaagagctgcggcagatgg

SEQ ID NO: 502352 - DNA, 201 bp, Homo sapiens
tgcttggtctttttctgtaaacagccatcttgctgtcctcagatgctggacagtgttaggtctgggaaggtgggcagaggcatgatgcttgcccttttcaytgtgctacttcttatccctcccagacaaaatgaaaatcaaatgccgtttccagaaggcctatcggagggctttggaccatgaggaggaggccctgtcatc

SEQ ID NO: 502353 - DNA, 201 bp, Homo sapiens
tagctataccatgaggtttatagcttctaaagagcacagaatatgttttccttttctctccagagtgcctagggcagagctgtgcaagggcctggtatgaygttgtggcaatctcattccccctttcaggtatataatgttgactccaaaacctataatgcctcagtgctgccagtgagagtcgaggtggacatggtgcga

SEQ ID NO: 502354 - DNA, 201 bp, Homo sapiens
agtgggaagacgtttcacgctgaaggaccagtgtgtgcagaggtgaaggcaagagctgcggcagatgggcgaaatgggtgtcatgtgtttgatatcatctwtgcagaaatcattagagttggctgcagctgcttggtctttttctgtaaacagccatcttgctgtcctcagatgctggacagtgttaggtctgggaaggtg

SEQ ID NO: 502355 - DNA, 201 bp, Homo sapiens
agctaatttttgtatttttagtagagacggggttatgccatgttggccatgctgctctcgaactcctgacttcaggtgatccgcatgcctcagcctcccamagtgttgggattacaggcgtgagccaccgcgcccagcccctattcagtttaacattaaacactttactggggtacttttttttaggtaccaagaatttag

SEQ ID NO: 502356 - DNA, 201 bp, Homo sapiens
gggtctccttatcttgtttgataaggctgctgcctgtctccctctgtggcaaggactgtttgttcttttgccccatttctcaacatagcacacttgtgcamtgagaggagggagcattatgggaaagtccctgccttccacacctctctctagtccctgtgggacagccctagcccctgctgtcatgaaggggccaggcat

SEQ ID NO: 502357 - DNA, 201 bp, Homo sapiens
ttttgtcattaagtgtgtggtttttattttttatttttttgagacaaggtctggttctattaccctggctggagtgcagtggtgccatctcaggtcactgsaacctctgcctctcaggctcaagtcatcctcccacctcaacctcccaagtagttgggactacaggtgtgcaccaccataactgccttttttttttttttt

SEQ ID NO: 502358 - DNA, 201 bp, Homo sapiens
tggtgatacaacagaagcattgcacgaactaagaactgccgaagagttcaaaacagaagagcaagatgactcagggagtatagaatttggtgtatcttttyctgatagggaatcatcatctatggaaacatccatcgaaccaaaagcaactgaaacttctcacacagagggaattactgccattgaggagagctgggagtc

SEQ ID NO: 502359 - DNA, 201 bp, Homo sapiens
caagatgactcagggagtatagaatttggtgtatcttttcctgatagggaatcatcatctatggaaacatccatcgaaccaaaagcaactgaaacttctcrcacagagggaattactgccattgaggagagctgggagtctatgtttaacgatgatggtgactgcctggatccacgtcttctacaagaggtatgtttaatt

SEQ ID NO: 502360 - DNA, 201 bp, Homo sapiens
atgttttctgagaaatcatctcttgttttttatatcccgtttttcatattttagcatcaggctggtttattgtcttttccaggtccagtagaaattttctrtattaaactactgttctaagttccttaaaaatgtcaggtagcctttctagcccccattttagcatttaagaagactgtcatcagtgatgacttcatggtg

SEQ ID NO: 502361 - DNA, 201 bp, Homo sapiens
ggcagagtagggggtggttggagagcagttagtacaaagaggcagaacagtgtctggtttacttggcatacacagaatctgcactgccggttccagaactscaaagttggtgaactacaggagatgtgggtatttagactccaaagtttatactgagctcagtgcctgggaccgctccagctgcactgcagccagggggga

SEQ ID NO: 502362 - DNA, 201 bp, Homo sapiens
ttcaaaccgcaagtatgggagatttaggccctgcagaggcagaccattccttagtatctcacaaagcagagtaatactggaggcagagtagggggtggttrgagagcagttagtacaaagaggcagaacagtgtctggtttacttggcatacacagaatctgcactgccggttccagaactgcaaagttggtgaactacag

SEQ ID NO: 502363 - DNA, 201 bp, Homo sapiens
ctgatgtctgaagttcatttctaaccacattttttttttttttttcattttaatgtgactttttttctgtgatgtagcgtttactcattttttggtgtcarttgctgtttaataaacctaatacctttgcctagatcagagatgaaaatgttaactaggactaactaactgaccaggtcaccagctgttgctaaaataaat

SEQ ID NO: 502364 - DNA, 201 bp, Homo sapiens
tcttgcttctctagttcttttaattgtgatgttagggtgtcaattttagatctttcctgctttctcttatgggcatttagtgctataaatttccctctacrcaaacagtgtctaggttttataacaggtgaatgacagaatgactgtcatggctttgctgccgctttccactttcccgttttgtttcttttgcttccagtg

SEQ ID NO: 502365 - DNA, 201 bp, Homo sapiens
atctactctagacgtttaagaatttattaaagtttaactgataccttcttgcccacttatgtggtgatcacttcttccagtggtctgccaaaggcaaaacmgtttatgtattctgtttctctttgggagagacttgtcattgtatggattttaagataagcagtttcccttgttatcttacaaactcagctctctggtaaa

SEQ ID NO: 502366 - DNA, 201 bp, Homo sapiens
tggtttaattttatttaattccatggtgaaaatatcaactcacactgatatatgtgggtttgagaacacttgcactaacccttggtatgtgtatagctgawacttatataggagaagttaaaagagttagaagtagatacctttgtatatttagcttataagaaaaaaataagcttcaggaataaagagatgataatccag

SEQ ID NO: 502367 - DNA, 201 bp, Homo sapiens
gttattgcagactccttttgtccctggcctctgagttattccaaactgttaacactaatctactctagacgtttaagaatttattaaagtttaactgataycttcttgcccacttatgtggtgatcacttcttccagtggtctgccaaaggcaaaacagtttatgtattctgtttctctttgggagagacttgtcattgta

SEQ ID NO: 502368 - DNA, 201 bp, Homo sapiens
aaaatatacagaattgagctgtatctataatagccaagccctgagagattttatggaataaagatgaatttaatggattttaactatctgtcaaggaaatrcaaaggaaaacttcttcaaaaaggtttttctatgttgacaaggtatcttttacatgggcctatttaagggaaggagaataatttattactattgttattt

SEQ ID NO: 502369 - DNA, 201 bp, Homo sapiens
agttcccttgtaccccctcacctgtcgttctaatttttttcacaatatcttttaaaagttccagctcattttaacagatttctaattcatattttataaaratgtctgaattgacatgttattgactgcctaagtggggatttattgactcactttccagatgctgtatattctaatgcagtcagttgggacattcagtga

SEQ ID NO: 502370 - DNA, 201 bp, Homo sapiens
actcatgatttggctgttttgtctgttattggtgtgtaggaatgcttgtgatttttgcacattgattttgtatcctgagatttgctgaagttgcctgtcarcttaaggagattttgggctgagacagtggggttttctagatatacaatcatgtcatctgcaaacagggacaatttgacttcctcttttcctaattgatta

SEQ ID NO: 502371 - DNA, 201 bp, Homo sapiens
atctgagtgaattatgtactctgtttttattgttcaatccattagtgaatgatgactagatctctggtccaaacagaaagagggaacattaagtagattcmatcactcatagtttttgtttttgtaaccaggtgactcctaaaattaaaaatctccctttgagctctgttatatttgttgcataacattttttcctcagaa

SEQ ID NO: 502372 - DNA, 201 bp, Homo sapiens
ttctttcattcatatctgtgcatctagtataatagtcacttcttcaaattttatggattggctttcatagggaaaatactttttcctatagatatatctawtcttttggttgggtcaggcactttggttttgattctgggtgggtaaagtagcatagtttctgtatgatatcttgggctgtaatcagttatttgtgtctgt

SEQ ID NO: 502373 - DNA, 201 bp, Homo sapiens
tttctctgatggccagtgatgatgagcattttttcatgtgtcttttggctgcataaatgtcttcttttgagaagtgtctgttcatgtccttcgcccacttkttgatggggttgtttgtttttttcttgtaaatttgtttgagttcattgtagattctggatattagccctttgtcagatgaggaggttgcgaaaattttct

SEQ ID NO: 502374 - DNA, 201 bp, Homo sapiens
ttgtggttccattcaaattttagtattgttttttctatttgtatgaagaattgtcgttggtattttgatagggattgcattgaatctttagattgctttargcagtatggtcattttaacagtattaatttttccagttcataagcatgagatgtcttccgatttgtttgtgttctctccagttttctttcatcagtgttt

SEQ ID NO: 502375 - DNA, 201 bp, Homo sapiens
tagccagttttcccagcaccatttattaaatagggaatcctttccccattgcttgtttttgtcaggtttgtcaaagatcagatagttgtagatatgcagcrttatttctgagggctctgttctgttccattgatctatatgtctgttttggtaccagtaccatgctgttttggttactgtagccttgtaatatagtttgaa

SEQ ID NO: 502376 - DNA, 201 bp, Homo sapiens
ggggttgtttgtttttttcttgtaaatttgtttgagttcattgtagattctggatattagccctttgtcagatgaggaggttgcgaaaattttctcccatkttgtaggttgcctgttcactctgatggtagtttcttttgctgtgcagaagctctttagtttaattagatcccatttgtcaattttggcttttgttgccat

SEQ ID NO: 502377 - DNA, 201 bp, Homo sapiens
aactcattttatgaggccagcatcattttgataccaaagccacgcagagacacaaccaaaaaagagaattttagaccaatatccttgatgaacattgatgsaaaaatcctcaataaaatactggcaaaacgaatgcagcagcacatcaaaaagcttatccaccatgatcaagtgggcttcatccctgggatgcaagattta

SEQ ID NO: 502378 - DNA, 201 bp, Homo sapiens
ggtgacattaccaataaagcatgtatgatggacactacaggtatgtcctgtagtgatcatgtaactgttgatagcccttatgtagttgcagttagaatagytgatgagacctctattaatacacgaagtttctcaaagtttgtaggaatgagtgcagatgcaacccctcttcatgtagctagaagtgggaatgacactgaa

SEQ ID NO: 502379 - DNA, 201 bp, Homo sapiens
gacagtgccgtgggcattgacctgggtagtactggtgatacaacagaagcattgcacgaactaagaactgccgaagagttcaaaacagaagagcaagatgmctcagggagtatagaatttggtgtatcttttcctgatagggaatcatcatctatggaaacatccatcgaaccaaaagcaactgaaacttctcacacagag

SEQ ID NO: 502380 - DNA, 201 bp, Homo sapiens
caaagcacttaggaaattaaaggaattaactcttgttatcaggtaagagagaccaggatatccacttgtctcatgactaaagtttgccttgtaatttggaytaagggaaagtcattggttatatgaagtagacaactgtggttaatactgctcttatttacagagagaaagcggttggaagccaagcaacgggaagacatc

SEQ ID NO: 502381 - DNA, 201 bp, Homo sapiens
gaataagtcttgttaagcatgcatttggacaaaataattaacttgaagcatgtacattttattcattctataaatatatattgactgcctagtttgcaagrtaatatgttcagtgggggaatataggaataaatatgacatgtcagttatagttgaatttaaaaccaaaatgttggtaaggaaattgaaactccatccttc

SEQ ID NO: 502382 - DNA, 201 bp, Homo sapiens
ttctttataaactctaactctttgttgaatttctcattgaggtcatgaattgtttgtctgatttccttgtattatttatctgtgttttcttgtatctcackgacgttctttaatatttttgaattctttgtcaggcatttcatggatttctttttcttttttttttcccatcttttttttttttttatactctaagtttta

SEQ ID NO: 502383 - DNA, 201 bp, Homo sapiens
attttttgtagaggaggactcttgttgtcttgcctaggctggtcttgatcttgtggcctcaagtgatcgtctcacctcagccccccaaagtgttgggattrcaagtatgacccactacacccagcttagaataagtcttgttaagcatgcatttggacaaaataattaacttgaagcatgtacattttattcattctataa

SEQ ID NO: 502384 - DNA, 201 bp, Homo sapiens
cctagatctgattactacaatcatgaagttcctgatattgacctcagtgattgtgaattcccacatgtcattgaaatttatgactttccccaagaatttcrtactgaagaccttctacgggttttctgcagttatcagtgagtatgcaaatgattgtggatgttagggagggtgagatgaagtctttaaaaaatgttttct

SEQ ID NO: 502385 - DNA, 201 bp, Homo sapiens
cagcccttgttagtctattttgtatgttaattactgagttaaatcacttgaagctagagtgctctctcttcttgactccttcctactcccttcctttcttygattcagagttcctccagccagcaaaggagcgtcctgagacttcagcagccctagccagaaggttagtcatcagtgcccttggggttcgaagtaagcaga

SEQ ID NO: 502386 - DNA, 201 bp, Homo sapiens
attactaagatagaaaaaactttgacacagtgcttttcccttaaaattttaattttatacatattgaaacaactctcctaattagacataaatttttttttatcatatttcatcttcatacataaaaaatgtagtaaaataaattggttaagattttcctaatacttcacgttcacaatccaactctttctaataatttgt

SEQ ID NO: 502387 - DNA, 201 bp, Homo sapiens
cctctgatcatcatctatcagacttgtattaattactgctgatgcagcccttgttagtctattttgtatgttaattactgagttaaatcacttgaagctakagtgctctctcttcttgactccttcctactcccttcctttcttcgattcagagttcctccagccagcaaaggagcgtcctgagacttcagcagccctagc

SEQ ID NO: 502388 - DNA, 201 bp, Homo sapiens
ggttgaatctctttgggaatctttgagcttcctatatttggatgtctatatctcttacaagacttgggacattttcagctgttacttcattaaataggttktttgtgcctttagccatctcttctccggaactcccaaaatttaaatatttgtcactttgtgatgtccctcatttcatgtaggctttctttattctgttta

SEQ ID NO: 502389 - DNA, 201 bp, Homo sapiens
tcatgtcttctgcttccttttattcctctttgcagctcgtgatgcgttgggtattaaacacaccatggtgaagattcgtcccttgtcacaggccacaagakcagccaaggccaaagctagagcttatgctggtgagtctataatctctgggtttttttcttgctgatggtggtattattgttctttccagaagttttatag

SEQ ID NO: 502390 - DNA, 201 bp, Homo sapiens
atgggaagcaggtgcttctgactcttgatgttcagggtatgggctgggtcagctgccctacaggctttgcggaggaagaaaagattcgaacagcagctggyacaaactgacgggacattatccaccctggagtttcagcgtgaggccattgagaatgccactaccaatgcagaagtccttcgtaccatggagcttgctgcc

SEQ ID NO: 502391 - DNA, 201 bp, Homo sapiens
ccttggtgacagagggagactccattctcaaaaaaaaaaaaaaaaattaggtgggcatgatggtgtgtgcctgtagtcccagctactcggggaggctgagrcaggagaatcgcttgaacccgggagacggaggttgtagtgagccaagattgcaccaatgcactccagccttggtgacagagggagactccattctcaaaa

SEQ ID NO: 502392 - DNA, 201 bp, Homo sapiens
gtgacagagggagactccattctcaaaaaaaaaaaaaaaaattaggtgggcatgatggtgtgtgcctgtagtcccagctactcggggaggctgaggcaggwgaatcgcttgaacccgggagacggaggttgtagtgagccaagattgcaccaatgcactccagccttggtgacagagggagactccattctcaaaaaaaaa

SEQ ID NO: 502393 - DNA, 201 bp, Homo sapiens
gtcctttcttccttaagtgccaagtgctgagctaaaggaggataactttttggggaagtcatgctgagggtggtagtgtgaccctgcctgaaaaaagggtytcttaccctcccagccctggctcaactctgaagaaggatcttgctacagaaggagcccttgggctcccttctctttgatagcagttataatgcccttgtt

SEQ ID NO: 502394 - DNA, 201 bp, Homo sapiens
gtaccctggtttagggctgcaaatggcaggagcaagaggcaccatttttctaatttgcacaaaggtgctgtgggattgaacagcagcctagcaagcagaargaccatacctttaggttttttgctggggagacagaattcagcaggctctgaatgtcatagcaggggatggttggagttgctgagaccttactgcttctcc

SEQ ID NO: 502395 - DNA, 201 bp, Homo sapiens
gagggagactccattctcaaaaaaaaaaaaaaaaattaggtgggcatgatggtgtgtgcctgtagtcccagctactcggggaggctgaggcaggagaatcrcttgaacccgggagacggaggttgtagtgagccaagattgcaccaatgcactccagccttggtgacagagggagactccattctcaaaaaaaaaaaaaaa

SEQ ID NO: 502396 - DNA, 201 bp, Homo sapiens
ccattctcaaaaaaaaaaaaaaaaattaggtgggcatgatggtgtgtgcctgtagtcccagctactcggggaggctgaggcaggagaatcgcttgaacccrggagacggaggttgtagtgagccaagattgcaccaatgcactccagccttggtgacagagggagactccattctcaaaaaaaaaaaaaaaattaggtggg

SEQ ID NO: 502397 - DNA, 201 bp, Homo sapiens
gatctcttctgattgatagttatgggcttatcagtgtgaccctgcaaggcaggaggggtttcattcatgtgagatgagaaagtcaagggggcattgttgcrtgatttcttagctatctatctcattctcagggacattgacaaggtagatgaactgatgactgacatcacggaacaacaggaggtggcccagcagatctca

SEQ ID NO: 502398 - DNA, 201 bp, Homo sapiens
cagggacattgacaaggtagatgaactgatgactgacatcacggaacaacaggaggtggcccagcagatctcagatgccatttctcggcctatgggctttrgagatgatgtggatgaggtgattgggggtgaagggtcagggaatattgcagaaagtatgggactggccagaaggaacacccaagagaggctcttgggaca

SEQ ID NO: 502399 - DNA, 201 bp, Homo sapiens
gctgaggggcggaggcgggagaggcgagctcgcgatgagtggtctcggcaggctcttcgggaagggtgagccagggtgggactggccagccaggaggcgcwggctggtgcaggggaagaggagaccccggcgagattcggccggaccgctgcgccgggcaggggaagagaatcaggagacaggctgactggaaaaccccgg

SEQ ID NO: 502400 - DNA, 201 bp, Homo sapiens
ctcaaaaaaaaaaaaaaaaattaggtgggcatgatggtgtgtgcctgtagtcccagctactcggggaggctgaggcaggagaatcgcttgaacccgggagrcggaggttgtagtgagccaagattgcaccaatgcactccagccttggtgacagagggagactccattctcaaaaaaaaaaaaaaaattaggtgggcatga

SEQ ID NO: 502401 - DNA, 201 bp, Homo sapiens
tcttcaaactctaagtcaagggttagagacatttgcgaaggcccaaactgggcctttgaggtccagccttgaggagagcccatttgaggcctaaactgaawggaaatcaagaaggcattttcaggtgcatttgtaatttattaaagttcatctgtgtgtgacagaagagattttacccacagtgtggggagtttctatttt

SEQ ID NO: 502402 - DNA, 201 bp, Homo sapiens
gaggtccagccttgaggagagcccatttgaggcctaaactgaaaggaaatcaagaaggcattttcaggtgcatttgtaatttattaaagttcatctgtgtrtgacagaagagattttacccacagtgtggggagtttctatttttctagcctgtgaaatggggttggttgtcctgaggtgcagagaccagaatgtgagaca

SEQ ID NO: 502403 - DNA, 201 bp, Homo sapiens
tagaaaatgatgtggcagctttaagaggagcgcgtcggtctggggctggtggcttgggtcacgtgacaccggtggtctcgtttgcgcctcttgatgtcgcrgcggcgccctgaggacggattgggcaaggctggtccctgtgtgatgagacatcaccctcccaggagcaaggcggaagtctggaggacgctgaggggcgga

SEQ ID NO: 502404 - DNA, 201 bp, Homo sapiens
accccatacactgaggtgccatcacactgcacatttccttccggagaacaagcacgtactcaggtggagatagaactgtctttttacttaatagaaaatgmtgtggcagctttaagaggagcgcgtcggtctggggctggtggcttgggtcacgtgacaccggtggtctcgtttgcgcctcttgatgtcgcggcggcgccc

SEQ ID NO: 502405 - DNA, 201 bp, Homo sapiens
acgccccgagtggcgacgctctagtcgccatttgtctatggcaggcagggtggctgccttagctgccggaggttccgcactctctaaggccccgggtgaarccccacctctgctgcgcgcagcctgcggtgcgggtcatggcgcggctaccgaagctggcagtctttgatttgggtgagggacgggaaggggagaatttcg

SEQ ID NO: 502406 - DNA, 201 bp, Homo sapiens
aaaggaaatcaagaaggcattttcaggtgcatttgtaatttattaaagttcatctgtgtgtgacagaagagattttacccacagtgtggggagtttctatytttctagcctgtgaaatggggttggttgtcctgaggtgcagagaccagaatgtgagacattagactgcatcaggtttgccatctaaacttagggcaaccc

SEQ ID NO: 502407 - DNA, 201 bp, Homo sapiens
accaagatactagcttggttactcctgccctgtcttgaataggttgcagcagaagactggaattcctttctcccagatgatcttctttgatgatgagaggmggaatattgtagacgtcagcaaactgggtactgagtgatgaggaacagccatttggggtccctaggagggattaggtagatacatacaggttggatagtt

SEQ ID NO: 502408 - DNA, 201 bp, Homo sapiens
tcacactgcacatttccttccggagaacaagcacgtactcaggtggagatagaactgtctttttacttaatagaaaatgatgtggcagctttaagaggagygcgtcggtctggggctggtggcttgggtcacgtgacaccggtggtctcgtttgcgcctcttgatgtcgcggcggcgccctgaggacggattgggcaaggc

SEQ ID NO: 502409 - DNA, 201 bp, Homo sapiens
tggagttaaacagaggctgaggatgcctgtccatcccggaaaaacagcaagttgatttccctggttatacttactaactttgcttaataagttaacgtagycctggcccttcactttgctaatcccatcttttacaccgttttgcaggacaagtgagatagaaggggccaaccagctactggagctctttgacctcttcag

SEQ ID NO: 502410 - DNA, 201 bp, Homo sapiens
tgttatacatctaccagtgtagtgctgacatggatggtgaaaccttcggagagtgaattctctcttgactgtggctgtactggacatttaggcctggttgragaacgccttcaagggtttggctgacactgtactctatggctggaatattactgaggactttgggttctacactgtcaggaggttgataatgcagaaaga

SEQ ID NO: 502411 - DNA, 201 bp, Homo sapiens
ccgagtggcgacgctctagtcgccatttgtctatggcaggcagggtggctgccttagctgccggaggttccgcactctctaaggccccgggtgaagccccrcctctgctgcgcgcagcctgcggtgcgggtcatggcgcggctaccgaagctggcagtctttgatttgggtgagggacgggaaggggagaatttcgtaagg

SEQ ID NO: 502412 - DNA, 201 bp, Homo sapiens; identical to SEQ ID NO: 502399

SEQ ID NO: 502413 - DNA, 201 bp, Homo sapiens
gggaggcctaggtgggaggatcacttgagcccaggaatttgagaccagcctaggcaatagagggagaccctatctctaccaaaaaaaaaaaaaaaaattgwagtggcgtgcacctgtagtcccagctacttgggaggctgaggtgggaggatcacttgagcccaggaggtcgtgaccacagtgagccgtgattgggccgct

SEQ ID NO: 502414 - DNA, 201 bp, Homo sapiens
acgcacggactgtcctgggcaaaggtgttcacctttccgagcctcggtttccttatctgtaaagcaaagcgacaccagcaagcctgtgagcattgtgtatrtagcagacatggaggtcctgcagcaggaggtgctcaataaacacaaagcgactgaaggatgggatgtgcgagaatcccagtggtgtgcacccaggccgcg

SEQ ID NO: 502415 - DNA, 201 bp, Homo sapiens; identical to SEQ ID NO: 403744

SEQ ID NO: 502416 - DNA, 201 bp, Homo sapiens
ccccacagacctaatatatgtccggacagcttggatgctgccacgtaaggtcactgctgtggcgagtcttgctatgtctgggtgccccatagtcacagaayacctggacaccgccacatgcagtcatcatcatgttactttcaggagcctcaacacgagagctcaacactgcctccgaccagtccctctgaggcccacagg

SEQ ID NO: 502417 - DNA, 201 bp, Homo sapiens
cagatctgagtgccccacagagtcacagtgtgtctggacagcctggacattggacattgctaagttgggtcactgccacatggagtcttgccatgcctgtktgccccacagacctaatatatgtccggacagcttggatgctgccacgtaaggtcactgctgtggcgagtcttgctatgtctgggtgccccatagtcacag

SEQ ID NO: 502418 - DNA, 201 bp, Homo sapiens
acgtccgttatttcagtgacttggtcccgtgggtctagccttcccccctgtggacaaacccccattgtggctcctgccaccctggcagatgactcactgtsggggggtggctgtgggcagtgagcggatgtgactggcgtctgacccgccccttgacccaagcctgtgatgacatggtgctgattctggggggcattaaag

SEQ ID NO: 502419 - DNA, 201 bp, Homo sapiens
atgagctgagattcagcatcccctggaggagtcggggtctcagcagaaccccactgtccctccccttggtgctagaggcttgtgtgcacgtgagcgtgcgwgtgcacgtccgttatttcagtgacttggtcccgtgggtctagccttcccccctgtggacaaacccccattgtggctcctgccaccctggcagatgactca

SEQ ID NO: 502420 - DNA, 201 bp, Homo sapiens
tgggctgcccagagccactgcagccccacccgccaccctggctcgcgcattgtcctatcgctggatgtccccatcggcctcttgcagatcttactggagcwagcccgggccagggctgccagggagcaggccaccaccaacgcccgcatcctggcccgtgtcggccactgctgagcctgagagagggggtcacagtgatag

SEQ ID NO: 502421 - DNA, 201 bp, Homo sapiens
tacagagtccctctgcccagtcctggtcactgtcttgtgattctcagtccccaacttgtccccggaaaagagtagatagggtgggggctaaggacaccccygggagggatgagtcataggtggggggctgcctcatgccaggaagcatgtaccagctcccaccccagggggctgagggagataaatgggccctgaagcggg

SEQ ID NO: 502422 - DNA, 201 bp, Homo sapiens
tgaatcattcttcctgaagctcactttttaaatgagttgctgggagaacttggatgtggaaaacgatttgaggttgaacaaaacaagccctttgctgtcakcttcttgcatgaatgtggaccatttgcttcccacagatacctcctgttcatccacattgctgtcccttaaccatgagggaatgtacttcccttgctcagg

SEQ ID NO: 502423 - DNA, 201 bp, Homo sapiens
ggaggctgaggcacgaggattgtttgagcccaggagtttaagattgcagtgattgcaacactgcactccagcctgagcaagagtgaggccccatctctttaaaaaaaaaaaaaaaacagccaggtgtggtggcacacacctgtaatcccaatactctgcaggctgaggcgggagatcacttgagcttaggagttcgagacc

SEQ ID NO: 502424 - DNA, 201 bp, Homo sapiens
gctggagttcagtggcacgatctcgactcactgcaagctccgccccccaggttcacgccattctcctgcctcagcctctcgagcagctgggactactggtrcccaccaccactcccagctaattttttgtatttttggtagagacggggtttcacggtgttagccaggatggtctcgatctcctgacctcgtgatccaccc

SEQ ID NO: 502425 - DNA, 201 bp, Homo sapiens
gggcatttgggctttaagatgctttgtgggctgggcgcggtggctcatgcctgtaatctcagtactttgggaggccaaggcggggggattgcttgagcgcrggagtttgagatcagcctgggcaacatgatgaaaccccatctctaccaaaaaaaaacccaagatgctttgtgttaatggggctttttttttttttttaag

SEQ ID NO: 502426 - DNA, 201 bp, Homo sapiens
actgagccccccttgcctgcccgctgcccccgcctcctccgcctgaatgacccgactggaatccactctaaccaatcgcacttaacgactcgggccaccaytgggggggcagggggaggggtccaccatgatttctccatataattttgatcataggccggagtgagtcattccacctgcacctttctgtacaaatactaa

SEQ ID NO: 502427 - DNA, 201 bp, Homo sapiens
tgccaccacggccggctaattttttgtatttttattagagatggggtttctccatgttggtcaggctggtctcgaactcccaacctcaggtgatccaccckcctcggcctcccaaagtgctgggattacaggtgtaagccaccatgcctggccctcgcccacttcttttaacacacacttcccttcctttcttcacacact

SEQ ID NO: 502428 - DNA, 201 bp, Homo sapiens
tgagttcctagtatgcacataggcactgtgaggaaggcatctctaagaagcagaaagcacagaccttgtctcttcattgactgaggtgaaatgagaaagcrtcttaaactatgaaaaattgaaatgacataactttgaaatatttacatggtatttctggttgctaattgagacccaccaccccgtacttccttccttgta

SEQ ID NO: 502429 - DNA, 201 bp, Homo sapiens
cagccctagactgaaagtcggtcagtccttctgaaggtggcaggagaaaaatggctatgttaataacaacttgtgctggccaggccctggtccctgaatgsccatgaggttggccaagcaccttctctgaggagctttctaccaggacctcttgggcccctgtctgcctcaccactgtggtcctggctaccagactggaac

SEQ ID NO: 502430 - DNA, 201 bp, Homo sapiens
gcctgggctgggtctgcaaagcctgtgcagaccccgtcccccagacacatacataaaaatccaaactccaccccccactcaggcctgctttggctcctggsttgagggttctctgtgcccatctcagtggtgggcttctgagtgccagagcctagaagcaacagtgggattgtgtggggtggattccaactcgctcttgcc

SEQ ID NO: 502431 - DNA, 201 bp, Homo sapiens
cacgggccaagaactgggtgaaggagctacagaggcaggccagccccaacatcgtcattgcactcgcgggtaacaaggcagacctggccagcaagagagcygtggaattccaggtggggagatgacagacttgggggaaggagtggagtaagcagctccccccggcctcgcctgggatgctcaggggctttgggaagggcc

SEQ ID NO: 502432 - DNA, 201 bp, Homo sapiens
agtttttagctcatttggctctggaatcttccttcctgggttgcagatcctggctctaccactcattagctctgtagtcttgggcaagttatttaaccttwctttgccgcagtttcctgaaaacaatcagaatgcacctgacacacagaagccctcaatatgtgagttaccactgattgggtataaaggccagaatctgct

SEQ ID NO: 502433 - DNA, 201 bp, Homo sapiens
acacacagaagccctcaatatgtgagttaccactgattgggtataaaggccagaatctgctccagtggaactgggagagttattggggtacccccaacaartgcacttttccccctcccaaacagctaagaagcttcccaagaacgagccccagaatgcaactggtgctccaggccgaaaccgaggtgtggacctccagga

SEQ ID NO: 502434 - DNA, 201 bp, Homo sapiens
gttctctccagaaaggaaactgttgtttctggctagtgaatcattcttcctgaagctcactttttaaatgagttgctgggagaacttggatgtggaaaacratttgaggttgaacaaaacaagccctttgctgtcagcttcttgcatgaatgtggaccatttgcttcccacagatacctcctgttcatccacattgctgtc

SEQ ID NO: 502435 - DNA, 201 bp, Homo sapiens
tcgcgggtaacaaggcagacctggccagcaagagagccgtggaattccaggtggggagatgacagacttgggggaaggagtggagtaagcagctcccccckgcctcgcctgggatgctcaggggctttgggaagggccatgctaggaggcaacagggaagcttccatctgctgtcctctcgtgcctcaggcatgggcctaa

SEQ ID NO: 502436 - DNA, 201 bp, Homo sapiens
gggtggggggtgggcagatttcctgtttggggacattgcatcagaatctttaggtggcaatgtcttagataatttggctgtgccagcttgagagtctctartgggtggccctgggcagaatgccttctctgtcccttcgacattctgtccctgtctcctcaggatacatttgcacgggccaagaactgggtgaaggagcta

SEQ ID NO: 502437 - DNA, 201 bp, Homo sapiens
ggaaactggaggtaagaggaatgtgtgaatgttgtctgacagatgaagtgaggagtccggctccttcacagggaagtgaaggcgcaggggctcccctgctrcagaacatgtactgaatgcttcccgatgccaggccctttgctgagagtctcacatgcatcatcttcctggcagtcctggagacgggtggtactggtctct

SEQ ID NO: 502438 - DNA, 201 bp, Homo sapiens
tggtgtggaagtctaggcactaagcctcagaaatcttattgaaaaaagaatgaaatgaaaccaatctcagttaaggaaggtgggggtgctttccctgtggwaggggacccagctcaccttcagtgcccctctgggataatttacttccctttccgctggaaaaagggtcatcttcctgtggctgtggaaaggcagcacctt

SEQ ID NO: 502439 - DNA, 201 bp, Homo sapiens
gtgtgaggaaatgggttcagtgacaacaccaggccaccctagtaagtggtgcctccagaacttgaactgaagttcaagttgtctgactccagcacttgtgytcttaagctctgtgcagtagggatggaggaagtcctccctggggaagtgaggcagctcctcagctgctctgtggctctgttaggggacccgagccgtctg

SEQ ID NO: 502440 - DNA, 201 bp, Homo sapiens
taacgactcgggccaccactgggggggcagggggaggggtccaccatgatttctccatataattttgatcataggccggagtgagtcattccacctgcacytttctgtacaaatactaattcaattttaagtcttaagtcacttttttaatatatatgatcttctgctcttcccacttcctcccctttctactgctctccc

SEQ ID NO: 502441 - DNA, 201 bp, Homo sapiens
ggggattgcttgagcgcaggagtttgagatcagcctgggcaacatgatgaaaccccatctctaccaaaaaaaaacccaagatgctttgtgttaatggggctttttttttttttttaagaggttatggtttgcatggttggggccttcaccccatgcagatttattggatggtaatggtttctcccctccatttttgtggtt

SEQ ID NO: 502442 - DNA, 201 bp, Homo sapiens
gggattgcttgagcgcaggagtttgagatcagcctgggcaacatgatgaaaccccatctctaccaaaaaaaaacccaagatgctttgtgttaatggggctttttttttttttttaagaggttatggtttgcatggttggggccttcaccccatgcagatttattggatggtaatggtttctcccctccatttttgtggttt

SEQ ID NO: 502443 - DNA, 201 bp, Homo sapiens
tcttctttcccctccccccttgctccaggctcagctctgtcctcccagagcacgtgagtggtttcccagccgcctcaaagggactgcttttcttgggactkctgtccgtgtgtctatagggaggagaataagacccaaaatgaggagtctggaattgaagggccatctctttcccactcccaaacacacacacatacacct

SEQ ID NO: 502444 - DNA, 201 bp, Homo sapiens
tagctgggcttggtggcacgcacctgtagtctcagctgctcaggaggctgaggcacgaggattgtttgagcccaggagtttaagattgcagtgattgcaayactgcactccagcctgagcaagagtgaggccccatctctttaaaaaaaaaaaaaaaacagccaggtgtggtggcacacacctgtaatcccaatactctgc

SEQ ID NO: 502445 - DNA, 201 bp, Homo sapiens
gagcttaggagttcgagaccagcatgggcaatgtggcgaaaccccatgtctaaaaaaatacaaaagttagctgggcatggtggtgtgctactcaggaggcygaggtggggaggatcattagaggccaggagattgaggctgcagtgagcagtgatcgtgccactgcactccagcctgggcaacacagtgagatcctgtctc

SEQ ID NO: 502446 - DNA, 201 bp, Homo sapiens
attgaaaaaagaatgaaatgaaaccaatctcagttaaggaaggtgggggtgctttccctgtggaaggggacccagctcaccttcagtgcccctctgggatratttacttccctttccgctggaaaaagggtcatcttcctgtggctgtggaaaggcagcaccttcctccctactgctgcctcccccaagtctaggtttaag

SEQ ID NO: 502447 - DNA, 201 bp, Homo sapiens
ctgctttggctcctggcttgagggttctctgtgcccatctcagtggtgggcttctgagtgccagagcctagaagcaacagtgggattgtgtggggtggatkccaactcgctcttgcccatggacgctccttctctcttacagcggccttcctcacacagactgtctgcctggatgacacaacagtcaagtttgagatctgg

SEQ ID NO: 502448 - DNA, 201 bp, Homo sapiens
accccaacctctggctctgagccctgttctgaccaaatcatgatgatgagtatttgggggtgggtgggtaagggggggagtgggaggggacggaaccaacyttttctgtattttgtattgtatgttttcttcaacatgtaaccaatcagtatcttgtcaatatagtcagccgatcgatcgacctcacaattgtcttccttg

SEQ ID NO: 502449 - DNA, 201 bp, Homo sapiens
tttttagtagcaacgaggtttcaccatgttggccaggctggttttgaactcctgacctcaagtgatccacttgcctcagccttccaaagtgctagggttayaggcatgagccaccactcccggccccaggcttactttgtgtatttcgtgccagagttgtagattcagctggctctccaaggccactgcctttttagcaaa

SEQ ID NO: 502450 - DNA, 201 bp, Homo sapiens
tcgcttgaacccaggaggtggaggtggtagtgagcccagattgtgccactgcactccagcctgggcgacagagcgagactccatctcaaaaaaaaaaaaaaaaaaaaaaatatatatatatatatatatatatatatatatattctaaaatattgttctttggtgcccaggcttctgagaatagccatcgtccctcaggtc

SEQ ID NO: 502451 - DNA, 201 bp, Homo sapiens
cccaggaggtggaggtggtagtgagcccagattgtgccactgcactccagcctgggcgacagagcgagactccatctcaaaaaaaaaaaaaaaaaaaaaartatatatatatatatatatatatatatatatattctaaaatattgttctttggtgcccaggcttctgagaatagccatcgtccctcaggtctcccactga

SEQ ID NO: 502452 - DNA, 201 bp, Homo sapiens
ccaggaggtggaggtggtagtgagcccagattgtgccactgcactccagcctgggcgacagagcgagactccatctcaaaaaaaaaaaaaaaaaaaaaaatatatatatatatatatatatatatatatatattctaaaatattgttctttggtgcccaggcttctgagaatagccatcgtccctcaggtctcccactgag

SEQ ID NO: 502453 - DNA, 201 bp, Homo sapiens
aggaggtggaggtggtagtgagcccagattgtgccactgcactccagcctgggcgacagagcgagactccatctcaaaaaaaaaaaaaaaaaaaaaaatatatatatatatatatatatatatatatatattctaaaatattgttctttggtgcccaggcttctgagaatagccatcgtccctcaggtctcccactgagaa

SEQ ID NO: 502454 - DNA, 201 bp, Homo sapiens
gaggtggaggtggtagtgagcccagattgtgccactgcactccagcctgggcgacagagcgagactccatctcaaaaaaaaaaaaaaaaaaaaaaatatatatatatatatatatatatatatatatattctaaaatattgttctttggtgcccaggcttctgagaatagccatcgtccctcaggtctcccactgagaact

SEQ ID NO: 502455 - DNA, 201 bp, Homo sapiens
tgtgaggaaatgggttcagtgacaacaccaggccaccctagtaagtggtgcctccagaacttgaactgaagttcaagttgtctgactccagcacttgtgckcttaagctctgtgcagtagggatggaggaagtcctccctggggaagtgaggcagctcctcagctgctctgtggctctgttaggggacccgagccgtctgg

SEQ ID NO: 502456 - DNA, 201 bp, Homo sapiens
ggtggaggtggtagtgagcccagattgtgccactgcactccagcctgggcgacagagcgagactccatctcaaaaaaaaaaaaaaaaaaaaaaatatatatatatatatatatatatatatatatattctaaaatattgttctttggtgcccaggcttctgagaatagccatcgtccctcaggtctcccactgagaacttt

SEQ ID NO: 502457 - DNA, 201 bp, Homo sapiens
tctgtcagccaggctggagtgcagtggtgcaatctcggctcaagccattctcctcagcctcccaagtagctgggactacagaaatgcaccaccacgcctgsctaatttttgtagagacaaggtttcaccatgatgtccaggctggtctcaaactcctgagctcaagcgatctgctcacctcagcttcccaaagtggtggga

SEQ ID NO: 502458 - DNA, 201 bp, Homo sapiens
tttgggtatctttgttctccgttggtcttttccaattcaggtatcatctttttgattgtcttttttttttttgagacagagtctcgctctctcgccaggcyggagtgcagtggcactatctcagctcagtgcaacctctgcctcccgggttcaagcgattctcctgcctcagcctcccgagtagctgggactacaggtatg

SEQ ID NO: 502459 - DNA, 201 bp, Homo sapiens
tggaggtggtagtgagcccagattgtgccactgcactccagcctgggcgacagagcgagactccatctcaaaaaaaaaaaaaaaaaaaaaaatatatatatatatatatatatatatatatatattctaaaatattgttctttggtgcccaggcttctgagaatagccatcgtccctcaggtctcccactgagaactttga

SEQ ID NO: 502460 - DNA, 201 bp, Homo sapiens
tggcactatctcagctcagtgcaacctctgcctcccgggttcaagcgattctcctgcctcagcctcccgagtagctgggactacaggtatgcgccaccacrcccagctaatttttgtatttttagtagagacggggtttcaccatgttggccgggatggtgtcgatctcttgacctcatgatccacccgcctcagcctccc

SEQ ID NO: 502461 - DNA, 201 bp, Homo sapiens
tatgcaaaattctataccagcagcattttttaacctttttattgacatgtgacttatgtataatagtttacaaattgtaaatacagctcgatgggtttttrtattattatacactcatgtatttacctctcaaatcaagttataactcctccatccagcagtgtgcttttttttttttttcttttttttgagacagtgtct

SEQ ID NO: 502462 - DNA, 201 bp, Homo sapiens
gtttttatattattatacactcatgtatttacctctcaaatcaagttataactcctccatccagcagtgtgcttttttttttttttcttttttttgagacrgtgtctcgctctgttgtccaggctggagtgcaatggtgcgatcttcgctcaccacaacctctgtctcctgggttcaagtgattctcctgcctcagcctcc

SEQ ID NO: 502463 - DNA, 201 bp, Homo sapiens
acctcaggtgatccacccacctcagcctcccaaagtgctgggattacaggcatgagccacctcacccggcggcaatgtgcttttttcagtttgatagaaaytcattttttcctagctaaaagctacattttttaaaaacatgcatagaaggtcgcagtccctgttatttttagtaacaggggttatggtaatgagattgtt

SEQ ID NO: 502464 - DNA, 201 bp, Homo sapiens
ctacattttttaaaaacatgcatagaaggtcgcagtccctgttatttttagtaacaggggttatggtaatgagattgttaatattctggggtttttctttytatctctaataggagagccttgcttgagttatgagtcttgggcaggcttgggctctgccaccagctagctggctgtgtgaccctaggcaggtcacttctc

SEQ ID NO: 502465 - DNA, 201 bp, Homo sapiens
ctccctgctgggaaaccacagcattatcacagcattattgtgacagccacgaacccattgcccacaacccctccaccctcggtcaccccaacctctggctytgagccctgttctgaccaaatcatgatgatgagtatttgggggtgggtgggtaagggggggagtgggaggggacggaaccaactttttctgtattttgta

SEQ ID NO: 502466 - DNA, 201 bp, Homo sapiens
ctccccgctcccacctccctgctgggaaaccacagcattatcacagcattattgtgacagccacgaacccattgcccacaacccctccaccctcggtcacmccaacctctggctctgagccctgttctgaccaaatcatgatgatgagtatttgggggtgggtgggtaagggggggagtgggaggggacggaaccaacttt

SEQ ID NO: 502467 - DNA, 201 bp, Homo sapiens
tctcaaactcctgacctcatgatctgcctgcctcagcctcccagtgctgggactacaggcatgagccactgtgcccagccttgcccacttctttttttttktttgtttttgagacagagttttgctcttgttgcccaggctagagtgcaatggcacaatctcagctcaccacaacctccgcctcccgagttaaagagattc

SEQ ID NO: 502468 - DNA, 201 bp, Homo sapiens
ccttctgtgcttggagtaggcttcccctaggctttccctctcttgcccctgctgtgttgctcttcagagagtggtcctgagatggctcagtgcatgcaggmgtcccttctcctgccgttgcctgggctgggtctgcaaagcctgtgcagaccccgtcccccagacacatacataaaaatccaaactccaccccccactcag

SEQ ID NO: 502469 - DNA, 201 bp, Homo sapiens
gaggtggtagtgagcccagattgtgccactgcactccagcctgggcgacagagcgagactccatctcaaaaaaaaaaaaaaaaaaaaaaatatatatatatatatatatatatatatatatattctaaaatattgttctttggtgcccaggcttctgagaatagccatcgtccctcaggtctcccactgagaactttgact

SEQ ID NO: 502470 - DNA, 201 bp, Homo sapiens
attctaaaatattgttctttggtgcccaggcttctgagaatagccatcgtccctcaggtctcccactgagaactttgacttttttcttgttggttgcatasccgctgaccacggtgtgtgtggtgtctgaacaggaggcatttggattgctatttctcttttctcccactttcctctcaaacttgacctctgctctctgtt

SEQ ID NO: 502471 - DNA, 201 bp, Homo sapiens
gaagcctggatagtcctgctgtgagtctgtcctctgtttctgtgtgctggcagtggttttcccttttgaggaagagctgtgttcttgagcctatgggtaartcatctccccaactaatcggagcctgggaagcatttgcaaaaccttgactccagttggcttttaaatcaaatgtcttccactttagcctttgaaccgagt

SEQ ID NO: 502472 - DNA, 201 bp, Homo sapiens
ctcttgctccattttctttaacaactcctttctgctgttgtttttttggtttgattttgttttgttttgctggactcttgtttaaatattcaggaatgccyttttccggggtaaaatgtagctgaagagtcactggtcagaagcacctgcaggggaccctgggcggggtcacttggttctcaggccacctggctaaccttg

SEQ ID NO: 502473 - DNA, 201 bp, Homo sapiens
gtaaaaccccgccgctacaaaaaatacacaaaaatttagccgggtgtaatgacgtatacctatagttccagctactcctagaagctgaggcattagaatcscttgagcctgggtggcagaggttgcagtaagcagagatcgtgccactgcactccagcctgggtgagagagcgagattctgtctcaaaaaaaaaaaaaaaa

SEQ ID NO: 502474 - DNA, 201 bp, Homo sapiens
aagaacagtgtcccatttttctttctctttctcttccatccttggcccagaagtgcctgtgcacagggccagggtgtttaggagcttagatcccttctgcsctttcatgtgcattgtattaataggaaaatagtgtgactccaagtccttatacattctctcccctttcctgtggaagacatgaggttgggactggtgctt

SEQ ID NO: 502475 - DNA, 201 bp, Homo sapiens
aatggtttctcccctccatttttgtggttttgggagctagtctctggaggatacaagattggggttgttgacaggacactgagtatcttctaggaaactgrggaaagacgtcctcttcagcattctctccaaatgagaggtgctgaagaatggagtcccgggaaactggaggtaagaggaatgtgtgaatgttgtctgaca

SEQ ID NO: 502476 - DNA, 201 bp, Homo sapiens
ttggctaatttaaaaaaatcaactttgactgtaactttagctcttatggagaatttgatttttgtctcaaagaagactttgaaaactatgtcagttttggytataattccatcacctgactgcacaagtggataatttttgccaggggttcaaaaagaaagattgccagtaagacacacatccctgggaggcaggacagct

SEQ ID NO: 502477 - DNA, 201 bp, Homo sapiens
ggaaggcaggatcagtgaccaggcagaacatgtcaccagctagttcatgccagggagagcctgtctcagttcattgggatggccagagtctgttcaccaayagtcttggagaaagtgttacaaataaccctgtcagtactcttagctactgtttactcaacatgatgtgtgtgagacagctggcaaacactgccattaacc

SEQ ID NO: 502478 - DNA, 201 bp, Homo sapiens
tcagaagtggcaggagacagtcacatctgtggtgccgaaagccagtgcctgtgctcactctctctctgccagatgctctagccctggctgtgcttcagtgrgtgtgcttcacctgcagatgctgggctctgtgccaaaccttcatgagaatctcgaggggctggctgcacagatgacttcaatgtacagacaccgttgaga

SEQ ID NO: 502479 - DNA, 201 bp, Homo sapiens
atgaatgttaaattatctatctgaaaaatggaggttgtcgtaaagcttgaaggagataatagttgtgcaattgggaagctgaggcgggagggttgcttgargccaggagttggagaccagcctgggcaacacagtgagactccatctctgcaaaaaaaaaagaaagaaagaaagaaagaaaattttaattagctgggtgtg

SEQ ID NO: 502480 - DNA, 201 bp, Homo sapiens
gttttggtgtgtatttctgtgtgtgtgttggcatgtgtttttgtgtgtgtgtgtgtgtgtttcagtgtgtatttgttccggtgtgtgtgtttctgtgtgtstttgtgtgtgtgtatcggtgtgtgttttactatgtgtttgtttctgtgtgtgttttgttttttaatgggtgcgagactttggcccatcaaaaatgagaga

SEQ ID NO: 502481 - DNA, 201 bp, Homo sapiens
tgcctcctgggttcaagcagttctcttgcctcagcctcctgagtagctgggattaacaggcgcctgccaccacacccggctaatttttgtatttttagtaragatggggtttcgccatgttggccgggctggtctcgaactcctgacttcaggtgatccacccgcctcagcctcccaaagtgctgagattacaggtgtgaa

SEQ ID NO: 502482 - DNA, 201 bp, Homo sapiens
tgatcttggctcactgcaacctctgcctcctgggttcaagcagttctcttgcctcagcctcctgagtagctgggattaacaggcgcctgccaccacacccrgctaatttttgtatttttagtagagatggggtttcgccatgttggccgggctggtctcgaactcctgacttcaggtgatccacccgcctcagcctcccaa

SEQ ID NO: 502483 - DNA, 201 bp, Homo sapiens
gtactttcttcacttttttgtttgtttgtttttgagatggagtcttgctctgtcgcccaggctggagtgcagtggcgtgatcttggctcactgcaacctcygcctcctgggttcaagcagttctcttgcctcagcctcctgagtagctgggattaacaggcgcctgccaccacacccggctaatttttgtatttttagtag

SEQ ID NO: 502484 - DNA, 201 bp, Homo sapiens
ggagataatagttgtgcaattgggaagctgaggcgggagggttgcttgaggccaggagttggagaccagcctgggcaacacagtgagactccatctctgcaaaaaaaaaagaaagaaagaaagaaagaaaattttaattagctgggtgtggtggtgtatacctgctggaggctgaggcagtaggatcttggaagctgcagt

SEQ ID NO: 502485 - DNA, 201 bp, Homo sapiens
tctgtcctcccagagcacgtgagtggtttcccagccgcctcaaagggactgcttttcttgggactgctgtccgtgtgtctatagggaggagaataagacccaaaatgaggagtctggaattgaagggccatctctttcccactcccaaacacacacacatacacctccctgagcaacaggtccacaccacgccagggtctg

SEQ ID NO: 502486 - DNA, 201 bp, Homo sapiens
agcactatggttggtttagaatgattttcagtggtgttgcaactagggcattggtttagattgccatgagaaactactgcagctcatgctgatacctttakagcctgagaaggtagagaaatattattattggattaatgaatcggtatgtgtaaagtggtgaaaattaacttccctgctgattttacacatttgtaggga

SEQ ID NO: 502487 - DNA, 201 bp, Homo sapiens
ttatagataaagtgaaagtccctcttactactcccaaaccactctcagttcctttcttagaagtaaactggtagtacatctttctatgcatggatatagaygtttactttgttagaaatagttacttttgttttctgacctttttttcttacacagatgatatattcatttagtaagtcaatgaatattcattgagtactt

SEQ ID NO: 502488 - DNA, 201 bp, Homo sapiens
catgggtatgaactacccggctccacttacaggtggatttttcccaacccaacacagattgaaaatacagtatttcaggtcgggcgcggtggctcacgcckgtaatcccagcactgtgggaggccgaggcgggcggatcacgaggtcaggagatcgagaccatcctggctaacacggtgaaaccctgtctctactaaaaat

SEQ ID NO: 502489 - DNA, 201 bp, Homo sapiens
ctaaaaatacaaaaattaaccgggcatagcggtgtatgcctgtaatcccagctactcgggaggctgaggcaggagaatcgcttgaacctgggaggcggagrttgcagtaagctgagatggcgccactgcacacttgcctgggtgacagagcaagactccatctcaaaaagaaaaaaaagaaatagccatatcacttgttaa

SEQ ID NO: 502490 - DNA, 201 bp, Homo sapiens
atctatcagaacctactatgtgaatataatgagtatacaagaaaatgtttagccgggcttggtggctcatacctgtaatcccagcactttgagaggctgaygattgcttgagcccaggaatttgagaccatcctcggaaacatggcaaaaccccatctctacaaaaaatacaaaaatcagccagacctagtgacatgggcc

SEQ ID NO: 502491 - DNA, 201 bp, Homo sapiens
tcattcatctggaagtattttctgattttcctttttattctcctgtgaccctttgattatttaggcatgggttgtttaatttctatatatttgtgagttcrcaatttttttttcattatttctaatttcagtctactgtgaacagagaacatatttgtattatttcaatcctctttaaaatgtattgagctttgttttatg

SEQ ID NO: 502492 - DNA, 201 bp, Homo sapiens
tgtattatttcaatcctctttaaaatgtattgagctttgttttatggtcaagcatatggtctgtcctggagggtgttccacgtatacttgagaagaaaggwttttttgctgttgggtagagtgtcagtctgccttttttttttttttccttcattaaaaaaaatctttttttactggtcctttcatgataagcaatctgcc

SEQ ID NO: 502493 - DNA, 201 bp, Homo sapiens; identical to SEQ ID NO: 156966

SEQ ID NO: 502494 - DNA, 201 bp, Homo sapiens
ggcggaggttgcagtaagctgagatggcgccactgcacacttgcctgggtgacagagcaagactccatctcaaaaagaaaaaaaagaaatagccatatcayttgttaattaatgctgtgcttttctcataggcaaactcaaatgctgagaaccccaagctgatatcagcaatgctgtgtgctgctttgtatccaaatgtag

SEQ ID NO: 502495 - DNA, 201 bp, Homo sapiens; identical to SEQ ID NO: 156968

SEQ ID NO: 502496 - DNA, 201 bp, Homo sapiens
tggtttaatttttagtgactggctagaatattttagtgaagtctatttccctcctacgattttaagcctctgttgttgctcctctgggaggtacagctttrggtatgcccatggttgattgctgaattgttttcaacaatgctctggagagtaaattcctttacaaactaatccaaccaaagtatggcttctttgaagcaa

SEQ ID NO: 502497 - DNA, 201 bp, Homo sapiens
ctatagataaatttggggagtcattaataggcagtatttaaatccgtgggactggggggttgttccctttttgttgccagtgacatcactgtcatcatctraggttttttgttacaggtgagacactttgacagcccctacctgttgtaccacgagaagataaaaactagtcgagtattcatccgagactgcagcatggtg

SEQ ID NO: 502498 - DNA, 201 bp, Homo sapiens
aactttccaggtgattgctttgatcatttatgggagttgggaaagaattcaaggaaaccgaaatcatataaacccactacccctctttgtgtactttcctwttatgtgggttccagcaatgcctgataggcctaatattctatcttatcagaaggggtcattcaggggggcttattgttatcagggatgctttttcaaaat

SEQ ID NO: 502499 - DNA, 201 bp, Homo sapiens
tatataattttttatctctttattgatgttctcaatttgatatgacattgtcatcataccttcctttactgctttaattgtgcattcctttatttctgtgracatacttataatgactattttgaactccttttctgttaaatctgacatctgttctcactcataggcagtttgtgctttttctctccagtgtatgggtta

SEQ ID NO: 502500 - DNA, 201 bp, Homo sapiens
taactttttttattaaatcctcagttaacatctgactgatttatggctcattttctgcttagcatttgtatgcttttcaaaccatttgaaatgtacttttaaaaaaattgtttgtgctttgtagtgtggttatgaaagggaaaaaagtcatttggatatagatttactggtttttatattatactctagtaatgtaaggtc

SEQ ID NO: 502501 - DNA, 201 bp, Homo sapiens
tatccccaggatctggcacataataagtgctcaataaatatttgtggaatgaataaatagatgaacaaatctccattcccacataagtcattttttcaacyttcaatcattcattccacaaatagatactgaattcctaccatatgctagacactgtgttaagggtacagtggtaatcaaaatagacatagtcttgttttc

SEQ ID NO: 502502 - DNA, 201 bp, Homo sapiens
aatgttgtttgggtctatcttccgctgtttggatcctgctctcaccattgctgccagtttggcttttaagtctccgtttgtaagtaaacaacattcatctmaactggagtctctaagaggaccataggtctctaaggggaccatgggggaatcaagggcatgtgagccccctaaaaatttgcttgtatgttagatgtgaat

SEQ ID NO: 502503 - DNA, 201 bp, Homo sapiens
attctcctgccttagcctcccaagtagctggaattataggcatgcaccaccatcccagctaattttgtacttttagtactaagagacggggtttctccacrttggtcaggctggtctcgaacccctgacctcaggtgatctgcccatctcggcctcccaaagtgctgggattacaggcgtgagccaccgggcccggccctc

SEQ ID NO: 502504 - DNA, 201 bp, Homo sapiens
tggaaatgagcaaacctatttgctgcaggaaatcagttattccctttttattaaagaaaaatattggccaggctcagtggctcatgcctgtaatcccagcwctttgggaggccgaggcgggcggatcacctgaggtcaggagttggagaccagcctgaccaacgtggagaaacctcatctctactaaaaatacaaaattag

SEQ ID NO: 502505 - DNA, 201 bp, Homo sapiens
tctgtctctataattaaaaaaaaaaaaaagctgtaatcccagcactttgggagaccaaggcaggtggattcttgagcacaggagtttgaggccagcctggrcaacatggtgaagtcctgtctctacaaaaaaatacaaaaagccgggtatagtggcacacacctgtagtcccagctacttgggagcttgaggcgggaggat

SEQ ID NO: 502506 - DNA, 201 bp, Homo sapiens
tgggaaactaaaagaaaaaagtgggctggttgtggtggctgtaatcccagcactttgggaggctgaggcaggaggactgccttagcccgggagttcgagascagcctgggcaacacagcaagaccccatgtctacaaaaaataaaattaaattaaccaggtatggtggtgcatgcctgcagtcccagcctctcaggaggct

SEQ ID NO: 502507 - DNA, 201 bp, Homo sapiens
tttatttcacccagaaaatctttcggtttattcagatgttggaaaactaatgtacagattccacaactcattctggctgattctctgagcagcattctgartaaagtcttctacatccaatcccaacaaatccaacaaaggatcactcaaggccaggagtgcaagaccatccagggcaacataacaagactctgtctctat

SEQ ID NO: 502508 - DNA, 201 bp, Homo sapiens
tctgtccattgattgccataggttagtgttacctggacttccagcatatctcattcatgattcgattgaatctagaagaagtttctaaaatgtatttgackttgaattttgtttccagaacttaagctttcaataaatatttgaagggtaaaagaggggaaggaatgaggagagtaaaaagtggcccatctgggtctttcc

SEQ ID NO: 502509 - DNA, 201 bp, Homo sapiens
gccccaacttcctggcttaagcaatcctacaacctccctcagcctctcgagccctactaaatttttaattttttgtagagatggtgtctcccttgtgttgyccagactggtttcaaactcctaggctcaagcagtcttcccacttcagcctctcaaagtgctgtaattacaggcatgaaccaccacacctgacctcaataa

SEQ ID NO: 502510 - DNA, 201 bp, Homo sapiens
gtggtgatgtaagagaggggctaaaaatgcttcatttagggagacaccgttgttagtggctaatgctattaagctacacggattactgtatgaaaaaatastttgtgaaaactgtacgtggatgtgtgaatgattgtgtagccaggaccatggaccttaacatcaaatggggatgaaaagtaatgaattgctttttctctc

SEQ ID NO: 502511 - DNA, 201 bp, Homo sapiens
tttctgaatgaagttcataatttaaaacactagtttttgaagagctatcacaaggcaggacacaatgcagattaattttataaacaatgactgcagctttrggctgggtgtggtggctcatgcctgtaatcccagcactttgggaggctggggcaggcagatcacctgaggtcaagagttcaagaccagcctggacaacat

SEQ ID NO: 502512 - DNA, 201 bp, Homo sapiens
ttttagatacctcatacaagtagaaccatccagcatttgtctttttgtgactggcttatttcacttaacataatgtcctcaaggtttcatccatactgttrcatattgcagaatttctttcttttttaagcctgagtagtattccactgtatgtatatatactgcactttctttatccactcatctgtaatgaacttttag

SEQ ID NO: 502513 - DNA, 201 bp, Homo sapiens
ctcatctgtaatgaacttttaggttgtttccacatcttgggtattgtgaataatattacagtgaacacaggagtgcaagtatctctgctctgcaagattcttttttttttttgtggaaacagagtcttgctcagtcacccaggctagagtgcagtggcatgatcttggctcactgcaacctccacctccgggttcaagtga

SEQ ID NO: 502514 - DNA, 201 bp, Homo sapiens
ttattagagtagctcaccagagggtgctgcgactttgtctcatgtgtcctgtcttaacattgcaaatgttatttctggaatatgtttggccttaccagccrtgtaaaatggactcccgcactgtggcatcaggctttctgtgctgaacctttccactgacctccttttcctctttgtggtgaatttttgtttacttatgcg

SEQ ID NO: 502515 - DNA, 201 bp, Homo sapiens
gtgttagccaagatggtctcgatctcctgacctcgtgatctgcccgccttggcctcccatagtgctggaattacaggcgtgagccaccacgcccagccctrtttttttctttgagtattttaaatatatatgtcattaccttctgccctccattgtttctgtgaagaaatcagtcattaattttattggggttcccccctg

SEQ ID NO: 502516 - DNA, 201 bp, Homo sapiens
gaaaatgtatttagggtttttgctcctaatggagttaaaattagtaccagaaatctaaataatggtaatcataacttgggtatttccctccaataacctaycctgcctgttcctccaagcactgcttatattgtagctttcattttaggtggctgaactggtaaaggagcttcgttgtgaacttgatcagcttctccagga

SEQ ID NO: 502517 - DNA, 201 bp, Homo sapiens
tgtcttaaaaaaaaaaaaatgtattgaggtttcttttatcacctagtatggtctatatcctggaaaatgtttcatgtgtacttcagaagtatgtatagttygttgttgggtggagtgttctatagacacctattaggtctagttggttagagtgttgttcaagtcttttatttccttgttgatcctctgtctagttgttct

SEQ ID NO: 502518 - DNA, 201 bp, Homo sapiens
gggtatttccctccaataacctaccctgcctgttcctccaagcactgcttatattgtagctttcattttaggtggctgaactggtaaaggagcttcgttgygaacttgatcagcttctccaggataaaattaaaaacccaagcattgatctgtgtacgtgtcctcgaggatcccggatcatcagcacaattgtgaaacttg

SEQ ID NO: 502519 - DNA, 201 bp, Homo sapiens
gaatgtataatacaattctgttttaatctgtgtattctttttctcctactttttactggggtgagaggggcatgaagagaaatacgccttttttttttttyttttcctgtcgccaaggctcgactgagagaagtcagaacagagaaggggaaaaaaaacccaaaattatgtgaacaagcaaaattaaaatttcattttagg

SEQ ID NO: 502520 - DNA, 201 bp, Homo sapiens
cttttttcagactattttaattcctgccccgttattactataccaggtgaataaaatgcatcattaaatatgtatcattctaataagcaaatataattatkttaaagtttgagacataagtagatatttatacctctttctagagaagcgattcatttataacataaaatcataaaccatataatgcagctgataaggagg

SEQ ID NO: 502521 - DNA, 201 bp, Homo sapiens
gggattacaggtgtgagccactgcacccggccattgctgggagattttaatttttttaggggacttttaaaaaaagtcatagttacttatttctagcattycattgtgtttaacatcaaagttgatagtggcagtctgtcataaagagggaacttgtgtctgtgacagtatatttgttcatttctggattctgctaaattt

SEQ ID NO: 502522 - DNA, 201 bp, Homo sapiens
aagagggtacacatttgtggaaaaatgcttctggtaggtcaaggaaaatgtgcactaagaattgtccactgcatttgacaatgtgggtatcatggttaacyttgacaagagctgtagtagcataggaaatactgattgggttgtgtttcagagagaagaggaaagaaaatggagacagagacaatgattttgataacctaa

SEQ ID NO: 502523 - DNA, 201 bp, Homo sapiens
atttatacttgctgattctgctgagagcattaaaaaattaatgaattaatacttgcaaagtgcttagaactgtgcttggcacataatgcatgctctcaaaygttagcagttattggctgggtgtggtagctcacacctgtaatcccagcactttgggaggccgaggcgagcagatcacctgagggcgggagttcaagacca

SEQ ID NO: 502524 - DNA, 201 bp, Homo sapiens; identical to SEQ ID NO: 29292

SEQ ID NO: 502525 - DNA, 201 bp, Homo sapiens
ttcagagacatttggagagaggatgaagatctctgaggcagtcaaccagataagcttggatgagtgtatggaacagcgacaggaagaggcatttgctctcragtccatctgtggagaaaaatttatagaaagaattcagaacagagtctggaccattgggttagaactggagtatctgacaagtagattccgcaaatccaa

SEQ ID NO: 502526 - DNA, 201 bp, Homo sapiens
gttctttatcatctctgtgcctcagtttccttatctataaagtggaatcatttagatgagtataatacaaacccacaaggatagtgcccagctagtaagtrcagatccatgattctaattaaaatatgtctaactaaaaaatttgtgtgctttttgtacgtcataccaactgataattcagattcccttattccattaaat

SEQ ID NO: 502527 - DNA, 201 bp, Homo sapiens
tgcccgtggatgtgagaattggcaaactaatgttgtttgggtctatcttccgctgtttggatcctgctctcaccattgctgccagtttggcttttaagtckccgtttgtaagtaaacaacattcatctaaactggagtctctaagaggaccataggtctctaaggggaccatgggggaatcaagggcatgtgagcccccta

SEQ ID NO: 502528 - DNA, 201 bp, Homo sapiens
tgaactgtaattgtatctgactttaattgtaaggctcaattgtgttgctgtggttgggctccctgagttgaaagtttgtagtgacgtatgtttaactatayaaaatccgaggcttggaaggaccttaaggtacgttctcagaaaatctgttttatttaattcatttggttttcttttgtttacttcttatactgtatactg

SEQ ID NO: 502529 - DNA, 201 bp, Homo sapiens
atttgcggaaacttcggaacctgtcgtatattctttgataacccttttagaggaagagtcggaaatagtcaagttactaacgaatacccaccacaagtatrgtgaccctcctgtgaactttctgccagtaccctctaggaccagaataaataatcctgcctgtcataaaacagtgattccaaataattcttttgtttctaa

SEQ ID NO: 502530 - DNA, 201 bp, Homo sapiens
tatagtgaccctcctgtgaactttctgccagtaccctctaggaccagaataaataatcctgcctgtcataaaacagtgattccaaataattcttttgtttytaatcaaattccagaaggtatgtaaggcattgatcttgtggagggaggcattcagaatgatgggtttagaagtcaaagcctttaaggctggtctaggatg

SEQ ID NO: 502531 - DNA, 201 bp, Homo sapiens
gtgaatctggaccagcaggatcccaggccctgataccgaaccaaggcgggctctgccgctgaggttgtccacgctcaaactgcaggttggggccggggggrgcggggcgtgaaattcagtcttggagcaggctaaggggttgattgaagggatcaggctccgttctctgactccgtctgtgtggcttttttggggagaagg

SEQ ID NO: 502532 - DNA, 201 bp, Homo sapiens
agtcccagctactcgggaggctgaggcaggagaatcgcttgaacctgggaggcggaggttgctgtgagccaagattgtgccactgcactccagcctgggcracagagcaagactctgtcttaaaaaaaaaaaaatgtattgaggtttcttttatcacctagtatggtctatatcctggaaaatgtttcatgtgtacttcag

SEQ ID NO: 502533 - DNA, 201 bp, Homo sapiens
ctccagaggctgaggtaggagaattgcttgaacccaggaggcagaggttgcagtgagctgagttcatccggcctgggcgacagagcaagactccatctctaaataaataaataaataaataaataaaactctaaattagacctaaccaaatgagaatctaggattaaagcctagacatgtgtattttgacacttctccatg

SEQ ID NO: 502534 - DNA, 201 bp, Homo sapiens
tccagaggctgaggtaggagaattgcttgaacccaggaggcagaggttgcagtgagctgagttcatccggcctgggcgacagagcaagactccatctctaaataaataaataaataaataaataaaactctaaattagacctaaccaaatgagaatctaggattaaagcctagacatgtgtattttgacacttctccatgt

SEQ ID NO: 502535 - DNA, 201 bp, Homo sapiens
ccagaggctgaggtaggagaattgcttgaacccaggaggcagaggttgcagtgagctgagttcatccggcctgggcgacagagcaagactccatctctaaataaataaataaataaataaataaaactctaaattagacctaaccaaatgagaatctaggattaaagcctagacatgtgtattttgacacttctccatgtg

SEQ ID NO: 502536 - DNA, 201 bp, Homo sapiens
agctacgctgtctgatatggtagcccctacccatgtttggctgtttatattaattaattaaaattaaaaattcagttcctcagtaacactattcttcacayttcaggtgctcaatagccacatgtagccaggtgttgctgtattggacagcacaggtatagaacatttccatcaacacggaaagttctattggacagtact

SEQ ID NO: 502537 - DNA, 201 bp, Homo sapiens
ggtctagttggttagagtgttgttcaagtcttttatttccttgttgatcctctgtctagttgttctaccattaaaagtgaggtactgtagtctcctactaytattattgaattgtctaattctcccttcatttctgtcagttgttgctttgtgtattttggtgccttattattaggtacatatgtgtttttaattgttatc

SEQ ID NO: 502538 - DNA, 201 bp, Homo sapiens
tgcctgttaagattttaatgactctacatttttgtgagtaaagttgacgtttgaacaacatgggtatgaactacccggctccacttacaggtggatttttyccaacccaacacagattgaaaatacagtatttcaggtcgggcgcggtggctcacgcctgtaatcccagcactgtgggaggccgaggcgggcggatcacga

SEQ ID NO: 502539 - DNA, 201 bp, Homo sapiens; identical to SEQ ID NO: 156971

SEQ ID NO: 502540 - DNA, 201 bp, Homo sapiens
aagtcattgtaggctccttggagtgggtccaatgtgactgtggtccagtagatttgtttttttacttagaaataatttttctagcaaagagatagaaattrggtgctcttttttttgctttaagatagagatcaaatataataaaacggtaaatcctacagcacagacagaaatagccatattagagccagacgcagtggc

SEQ ID NO: 502541 - DNA, 201 bp, Homo sapiens
ctcttttttttgctttaagatagagatcaaatataataaaacggtaaatcctacagcacagacagaaatagccatattagagccagacgcagtggctcacrcctgtaatctcagtactttgagaggctgaggtgggcagattgcttgaggtccagagttggagaccagcctggccaacatggtgaaaccttgtctctacta

SEQ ID NO: 502542 - DNA, 201 bp, Homo sapiens
aaaaccaaagaactaatactgaaccagattttgttaatttttcttacatctatcagaacctactatgtgaatataatgagtatacaagaaaatgtttagcygggcttggtggctcatacctgtaatcccagcactttgagaggctgacgattgcttgagcccaggaatttgagaccatcctcggaaacatggcaaaacccc

SEQ ID NO: 502543 - DNA, 201 bp, Homo sapiens
ttttagtagagacaggttttctccctgttggccaggctggtctcgaactcctgatctcaggtgatccgcctgcctcggcctcccaaagtgctgggattatwggcgtgagccaccgtgcccggcctagtcctatcttttctatgcttcaatttccttgttgtaaaatgaagacagtaataaatcctgttatgtaaaactatt

SEQ ID NO: 502544 - DNA, 201 bp, Homo sapiens
tgactccgtctcaaaaaaataaataaataaagactaaataaaagatctaatagaacctaatagaaaagtgggcaaaggacatgactgaacagataatacayacacaaaaattatattcagtgttactagcaagaagaaatgcaaattaaaacagcaaagaaggccgagtgcggtggctcacgcctgcaatcccagcacttt

SEQ ID NO: 502545 - DNA, 201 bp, Homo sapiens
aggctggattttctgggaaactaaaagaaaaaagtgggctggttgtggtggctgtaatcccagcactttgggaggctgaggcaggaggactgccttagccygggagttcgagaccagcctgggcaacacagcaagaccccatgtctacaaaaaataaaattaaattaaccaggtatggtggtgcatgcctgcagtcccagc

SEQ ID NO: 502546 - DNA, 201 bp, Homo sapiens
attcataagtgaatcctgagggcaaagttagagataggacagaggcaagttgcttaaccaatatgggaattggattaaatgctctctaggccctccagttytaaagttctgtgagtctgatttttgacaccatgtaacaccatcacatatgtagtacaatacccaaagaacatcacaatgtatataaattgcactgtaggt

SEQ ID NO: 502547 - DNA, 201 bp, Homo sapiens
tattttcaagacatcattgaaaatacatcattttcaagctattttatttatgtgtttatgtttttctctttttctatatataaatataaatttggaagagmagattaaaatgatatttactggctgggtgcagtggctcacgcctgtaatcccagcactttgggaggctgaggtgggtagatcacaaggtcaagagatcga

SEQ ID NO: 502548 - DNA, 201 bp, Homo sapiens
aggtcaggagttcgagaccagcctggccaatagggtgaaatcctgtctctactaaaatacaaaaattagccaggcatggtggcagtcacctgtaatcccasgtactagggaggctgaggcaggagaattgcttgaacccaggaggcagaagttgcagtgagctgagatcacaccactgcactccagcctgggtgacagagt

SEQ ID NO: 502549 - DNA, 201 bp, Homo sapiens
acagaatctcaggtaatgctataaagcaaaatagagcaggatagagagacagagagtgacaggagaggggccctgcacgtggggtggtcagggaagaactscgggatgagaaacaactgagcaaatcctaaatgaagagcaagtcatgcagatagagagaaaggagaaacattccagcagaggacataagtgcaaacatca

SEQ ID NO: 502550 - DNA, 201 bp, Homo sapiens
gtagccaataagatcgaattgtatgcttaaagagggtacacatttgtggaaaaatgcttctggtaggtcaaggaaaatgtgcactaagaattgtccactgsatttgacaatgtgggtatcatggttaaccttgacaagagctgtagtagcataggaaatactgattgggttgtgtttcagagagaagaggaaagaaaatgg

SEQ ID NO: 502551 - DNA, 201 bp, Homo sapiens
ggaagccaagggacaaaggtgttttaaaggagagtagccaataagatcgaattgtatgcttaaagagggtacacatttgtggaaaaatgcttctggtaggycaaggaaaatgtgcactaagaattgtccactgcatttgacaatgtgggtatcatggttaaccttgacaagagctgtagtagcataggaaatactgattgg

SEQ ID NO: 502552 - DNA, 201 bp, Homo sapiens
gtcacatagactcccacttcttttcttatgccaactgagttggtcaccaggtcccaagaatgcctccttgttgacatctctaagatttgccttttatcccsactgccacttccttagctcaaaccccaaacatcatttgcctgaaattctataataatcttacatctggtgctttctgtctccaaccttctactactctac

SEQ ID NO: 502553 - DNA, 201 bp, Homo sapiens
tctgtgtattctttttctcctactttttactggggtgagaggggcatgaagagaaatacgccttttttttttttcttttcctgtcgccaaggctcgactgmgagaagtcagaacagagaaggggaaaaaaaacccaaaattatgtgaacaagcaaaattaaaatttcattttaggctattggctactgagtaaacttgact

SEQ ID NO: 502554 - DNA, 201 bp, Homo sapiens
attctttttctcctactttttactggggtgagaggggcatgaagagaaatacgccttttttttttttcttttcctgtcgccaaggctcgactgagagaagwcagaacagagaaggggaaaaaaaacccaaaattatgtgaacaagcaaaattaaaatttcattttaggctattggctactgagtaaacttgacttgtgagg

SEQ ID NO: 502555 - DNA, 201 bp, Homo sapiens
tattgcccaggctggtctcgaactcctggggcttaagcaatcctaccacttcagcctcttaaagtgctggaattacaggtgtgagccaatgcccctggccttttttttttttttttaataatcagaaataaagataattgggtattttagaaatggggccttaatattcacaaggaagaatgaaactcagtggttttcaga

SEQ ID NO: 502556 - DNA, 201 bp, Homo sapiens; identical to SEQ ID NO: 29291

SEQ ID NO: 502557 - DNA, 201 bp, Homo sapiens
cgctataaaggtaacatgcctcttgggggaatattataattatgccaaagatttctagtattctttcttaccaagattcggaagaagaaaaatatgattcytgtttcatagttacattgcctttaattcatcagagcaaccttaaacctagaaaaatagttcagatacatatttagaatacaattgttactatatttgcca

SEQ ID NO: 502558 - DNA, 201 bp, Homo sapiens
cctaccctccaggtaactgcttctttattaaggcttgaatgacaattgaaacacttagtccttggctaaatgggagtctattcatgagtgcttgaattacmtgcagactctgcacacaggctacaaggcagtggggttaagaatacaggctttgcagtctgataaacttcccagctctgctattcaggaatcttgaaacct

SEQ ID NO: 502559 - DNA, 201 bp, Homo sapiens
gttgtctatgttatcgattctgggaaaatgaaagaaaagaggtattccgtcttgtggtgatgtaagagaggggctaaaaatgcttcatttagggagacacygttgttagtggctaatgctattaagctacacggattactgtatgaaaaaatagtttgtgaaaactgtacgtggatgtgtgaatgattgtgtagccaggac

SEQ ID NO: 502560 - DNA, 201 bp, Homo sapiens
aggttatttttaaattaatgattacctttggtaatcatttatttaaatatttagaaatatttagaaatattttggtataagaactcttatggccaggcgckgtggctcacacctgtaatcccagcactttgagaggccaaggcaggtggatcacctgaggtcgggagttcgagaccagcctgaccaacatggagaaacccc

SEQ ID NO: 502561 - DNA, 201 bp, Homo sapiens
tgagaggccaaggcaggtggatcacctgaggtcgggagttcgagaccagcctgaccaacatggagaaaccccatctctactaaaaatacaaaaattagccragtgtggtggcacacgcctgtaatcccagctactcgggagtctgaggcaggagaatcccttgaacctgggagacggaagttgcaatgagccgagattgcg

SEQ ID NO: 502562 - DNA, 201 bp, Homo sapiens
gtagcataggaaatactgattgggttgtgtttcagagagaagaggaaagaaaatggagacagagacaatgattttgataacctaaatgagaagttttactmtaagggagctagagggaggagagatgggtcagtagctacagggagatgtgcactcaagggaggatttggcttggtttcatttttttaagagggtagacct

SEQ ID NO: 502563 - DNA, 201 bp, Homo sapiens
ctactcgggagtctgaggcaggagaatcccttgaacctgggagacggaagttgcaatgagccgagattgcgccattgcactccagcctgggcaaaaagagsaaaattctgtctcaaaaaaaaaaaaaacaaaaaaaactcttatttggttgtactaaatttcctctgtaaagctttttattttttattggcagaagtcatc

SEQ ID NO: 502564 - DNA, 201 bp, Homo sapiens
ccagcctcggcctcccaaagtgccaggattacaggcgtgagccactgcgcctggccaagaatctgataaggtttttttccagcaggtctgatataatgaastctggtaaatactatagaaaatggagaatctcctcacattcattgtcatcttttgtaagatacttgacaatccagtttgtattgtgtatatctggggacc

SEQ ID NO: 502565 - DNA, 201 bp, Homo sapiens
tactccaggctgggcgacagagcaagaaaaaaaaaaaaggaattgaacagagaaggcatataaccagaagaactattagaagaaataatacattactattrttagtaaataagaaatatgaagtaattagaaactaaagaaagacttttagataaaaagaatgaaccaaaagaaaaagaaataattcctagaacaagacaa

SEQ ID NO: 502566 - DNA, 201 bp, Homo sapiens
aatttgtgtgctttttgtacgtcataccaactgataattcagattcccttattccattaaattatggaacaagaaaattcctttgaggttgggcatggtgrctcacgcctataatcccaacactttgggaggctgaggcaggaggatcacatgagcccaggagttcaagaccagcctgggcaatatattgagaccttgtct

SEQ ID NO: 502567 - DNA, 201 bp, Homo sapiens
cttgaacctgggagacggaagttgcaatgagccgagattgcgccattgcactccagcctgggcaaaaagagcaaaattctgtctcaaaaaaaaaaaaaacaaaaaaaactcttatttggttgtactaaatttcctctgtaaagctttttattttttattggcagaagtcatctagtaaagactgttttgctcttgaacttg

SEQ ID NO: 502568 - DNA, 201 bp, Homo sapiens
tttcctagctcaatttttaaggcattttctagtttttctttgaaaaaattaatgatcagtcatttaaaatatattattgatttggctgggcacagtggctmatgcctataatcccagcactttgagcggctgaggccagaggattgcttgagcccaggagttcaagaccagcctgggcaacatggtgctgccttgtctctt

SEQ ID NO: 502569 - DNA, 201 bp, Homo sapiens
aggcaggagaatcaattgagcccccaggaggttgaggctgcagtgagctgtgatagcaccactgcactccaccctggtcaagaaagcaagaccctgtctcraaagaaaagaaaagaaaagaaaagaaaagaaaagaaaagaaaagaaaactgaaatatgagaaggaatcccaggtgacaaacgggggtaaggaaagtatgt

SEQ ID NO: 502570 - DNA, 201 bp, Homo sapiens
agcatggggtgtagaccgtgccatatagagccttgttagtaagaattctaatgagaagtcattggattttaagcagaagagtggcacaatcagatttttctttttttttttaagagatggggtcttgctatatcggctaggttggtcttgaactcctggcctcaagcattcctcccacctcagcctcccaaactgctagga

SEQ ID NO: 502571 - DNA, 201 bp, Homo sapiens
aactagcccttgaaaacttcattttaggacttatttgttttaatgtacagatgtgggaaaaccacacaaattccgcagtttattctggatgattctctgartggaccacctgagaaggtagccaacatcatctgtacccaaccccgacgaatctctgcaatctctgttgctgaacgcgttgctaaagaaagagcagagagg

SEQ ID NO: 502572 - DNA, 201 bp, Homo sapiens
taaggcaagaatgtgcttggaaggtttaggaaatagcaaagaaccatgtggctagaatgagtgggcaagaaggcaagtggtaggcaattagatcagaaagrccagactgtataggacttcatgggccattattaggactttggcttttacatgaagtaagacagaaggcctttggagggtttgaggcaagggtgtgtgata

SEQ ID NO: 502573 - DNA, 201 bp, Homo sapiens
tgaggcaggagaatcgcttgaacctggaaggcagaggttgcagtgagctgagaccacgccattgcactccagcctgggcggcagagtaaaactctgtctcaaaaaaaaaaaaaaaaaagttagctattattatcatcatcatcattgtactcgcatagagtttgcagtatagcctgagtgttaagatatctgtataaacaa

SEQ ID NO: 502574 - DNA, 201 bp, Homo sapiens
atgcgcgttgtgcgcacggtgtgcgcgtcaccctgtttgtcagtgtgtctgccgcctcctgctccaggagtggtcgggatctgacgagcatcgcggcccaktgtgtttcatccagtctgcctggggccggtgaatctggaccagcaggatcccaggccctgataccgaaccaaggcgggctctgccgctgaggttgtccac

SEQ ID NO: 502575 - DNA, 201 bp, Homo sapiens
ctccagtgtatgggttatacttaagtgtttctttgcatgccttgtgacttttttgttgttaactgaacattttggataacatactgtaacaactctgggtwctgattctcccctttcaggggcttcttattgttatttgctggtttaatttttagtgactggctagaatattttagtgaagtctatttccctcctacgatt

SEQ ID NO: 502576 - DNA, 201 bp, Homo sapiens
ggcttgatggctttcgcactttttcaataacaaccgtggcatcttcaatgaagtaatccttccagactttcatgatgttctctctatcagaattctctttsgtagcattgacagtcctttccatagagtacctgtataatgagccttaaaggtcctcatgaactccgcatatagaggctaaattagagacatatttaggga

SEQ ID NO: 502577 - DNA, 201 bp, Homo sapiens
tggaaaagggtcttctagaggaggaagaggaggcaggagtcacgccagtaaatctcatgggagtggtggcggtggcggtggtggtggtggtggaggtggcrgcaacagaaaggcctccagtagaatatgggatgatggagatgacttttgtatcttcagtgaatcaaggcgcccttccaggtcattataactctttgaatg

SEQ ID NO: 502578 - DNA, 201 bp, Homo sapiens
ttgaagggatcaggctccgttctctgactccgtctgtgtggcttttttggggagaagggtggggacgatgtgagttcgaaaaaggatacgagatctggatrtctggatggagctggatatattgtgatcagtcagagatctgcctgggaggagagtagtgtgtagtcacttttcagtgccttggctatcaaacaaagaata

SEQ ID NO: 502579 - DNA, 201 bp, Homo sapiens
attgtcaaactatcctttgctggcattaaatttcccagctttagatccttcccttccgtttgctttaagttgctttgctttttcttgactcatacaggtawgccttatagcaatcttgctcccacataaaaactgcattttcaatgagataaaaaggtatttctcaaaaagcgtaagattttcacacctgctggcatagct

SEQ ID NO: 502580 - DNA, 201 bp, Homo sapiens
tagctgggcgtggtggcaggcgcctgtagtcccagctactccagaggctgaggtaggagaattgcttgaacccaggaggcagaggttgcagtgagctgagwtcatccggcctgggcgacagagcaagactccatctctaaataaataaataaataaataaataaaactctaaattagacctaaccaaatgagaatctagga

SEQ ID NO: 502581 - DNA, 201 bp, Homo sapiens; identical to SEQ ID NO: 29290

SEQ ID NO: 502582 - DNA, 201 bp, Homo sapiens
actccagaggctgaggtaggagaattgcttgaacccaggaggcagaggttgcagtgagctgagttcatccggcctgggcgacagagcaagactccatctctaaataaataaataaataaataaataaaactctaaattagacctaaccaaatgagaatctaggattaaagcctagacatgtgtattttgacacttctccat

SEQ ID NO: 502583 - DNA, 201 bp, Homo sapiens
tgctgttattggcaaatatattacatacatattaccttcttgtaggtgacatgcccaacattatatcatatacatattattttatataactgctttttaartcatttcagagaaaagaagagacaatacttttgtactggttttcaaataaataaatgtccaatataaatgtggatttttaaaaataattactcaattacc

SEQ ID NO: 502584 - DNA, 201 bp, Homo sapiens
ggtgcccaccaacacacctggttaatttttgtatttttagtagagacgaggtttcaccatgttggctaggctgatctcaaactcctgacctcgggtgatcygcctgcctcagccttccaaagtgctgggattacaggtgtgagccaccgtacccggccaagactttactatgtagaagagctgagctctgaggacaggttg

SEQ ID NO: 502585 - DNA, 201 bp, Homo sapiens
cccctaataaggtatcacgtgaagagaggcaagaagtaagtaaaggaataagctgtgaagttctgagtacagcattcaaggcagagggaagagcaatttcytaaggcaagaatgtgcttggaaggtttaggaaatagcaaagaaccatgtggctagaatgagtgggcaagaaggcaagtggtaggcaattagatcagaaag

SEQ ID NO: 502586 - DNA, 201 bp, Homo sapiens
tagaaaatggtgctccttcctttggacagttatagccccacaccaggatcatggcttagccagcagaacatggaccggattttgctgtcccttcctccctyttcttccctcccagccaggaacctttgtgcagtgtacagtctatgaatctatactcaatagcattgactgggtgtgctttgtagagaataaactataaag

SEQ ID NO: 502587 - DNA, 201 bp, Homo sapiens
tggagtatacttaatgtttacaggtcgtcctggggtaggaaatgcaattccttaaattcagccacaccatgttctatcacttgctgtccccagcaataccrctgactgagggaagattgaataagaataaacagactggaaattggactatttctggaaagactatttccatttgaagaaaattctactgaataccaaaaa

SEQ ID NO: 502588 - DNA, 201 bp, Homo sapiens
aggttgggcatggtggctcacgcctataatcccaacactttgggaggctgaggcaggaggatcacatgagcccaggagttcaagaccagcctgggcaatayattgagaccttgtctctactacaaatgttttttaaaattagccgggcatggtagttggcacctgtagtcccagctactcaggaggctgaggcgggaggat

SEQ ID NO: 502589 - DNA, 201 bp, Homo sapiens
aacttgagcctaggaaattgaggctgcagtgagccgtgattgtgccactacactacagccggggtgacagagtgagacactgtctcaaaaaataataaatrggcaaaactttttaaaaattataatactgccagacatggtggcatgcactggtaatctcagttacttgggaggctaagataggaggatcactgtagccca

SEQ ID NO: 502590 - DNA, 201 bp, Homo sapiens
aaaatatatctgaatttagattaccagattggccagtcaattatagtttctttttctcatttccagtaaaatgtttatggattttatttattaataaaatwgtcttcctgtcttataaggttaggagaataactcttcctatagaaatagaatgtcaaggtcaggtgtggtggtgcatgcctgtagtcccaactactcggg

SEQ ID NO: 502591 - DNA, 201 bp, Homo sapiens
tgaggcaggggaatcacttgaacctaggaggtagaggttgcagtgagccaagatcatgccactgcactccagcctgggtgacagagcgagactgcatctcaaaaaaaaaaaggctgggtgtggtgactcacacctgtaatcccaggactttgggaggccgaggcaggcagatcacctgagttcaggagttcaagaacagcc

SEQ ID NO: 502592 - DNA, 201 bp, Homo sapiens
cctcacattcattgtcatcttttgtaagatacttgacaatccagtttgtattgtgtatatctggggacccctgaggagagtgtaaaagttctgattgaagrtatgtgtgtaattttgctcttttgttctctatagacctagcaacagtaacataagcaaaggagagtcacgcccaaaatggaaacccaaagccaaagtacc

SEQ ID NO: 502593 - DNA, 201 bp, Homo sapiens
gtatatctggggacccctgaggagagtgtaaaagttctgattgaaggtatgtgtgtaattttgctcttttgttctctatagacctagcaacagtaacatargcaaaggagagtcacgcccaaaatggaaacccaaagccaaagtaccccttcagactctacatatgacttctgagaatcaagagaaagtgaaagctcttct

SEQ ID NO: 502594 - DNA, 201 bp, Homo sapiens
accccttcagactctacatatgacttctgagaatcaagagaaagtgaaagctcttctccgagacctgcaagaacaagatgctgatgctggatctgagtaamttgttttatttgagtcaattattatattaaggaaaacatactggcagtgtgaaggtcctgtgcatctttggaatgctgtgtcagtactgattctattgtg

SEQ ID NO: 502595 - DNA, 201 bp, Homo sapiens
tcccagcaaggggttggagtgggaggattgccttagcctgagaggtggaagctgccatgagccatgatcgcaccactgcactccagcttaggcaacagagsaagaccctgtctcaaaaaaacagaaaaaaaccacacaccacattttgtatgtcatatgtattacatactgtattctcttttgtttctttctttttttttt

SEQ ID NO: 502596 - DNA, 201 bp, Homo sapiens
gtaaattgttttatttgagtcaattattatattaaggaaaacatactggcagtgtgaaggtcctgtgcatctttggaatgctgtgtcagtactgattctaytgtggccatttaattagttgaaagtgagccaagagtaatacaagaataattattcagccacaattttagagtgagtttgttttgcaacatccatgggatt

SEQ ID NO: 502597 - DNA, 201 bp, Homo sapiens
tttcattgtagcacttaacactgtctgaaattggagttttgcatacttcagtaggatataagctccttaagagtagagatttcggccaggcacagtggctyaccaccaagcaacaacagcaaaactccgtctcagaaaaaaaaaaaaaaaaaaaaagaatagacatttcttgttcaccactgtatttctcagaccctagaa

SEQ ID NO: 502598 - DNA, 201 bp, Homo sapiens
gggaagggctcagagcaagggaaattgagaaaagggcccaaggaggagatggtgtcttagatgccacaggagaagaggtaaagaatgtggagttggttctyatttctctttaattagcacctaaatacaatcttaacctgggaacacttgtagacattcttcttcacttaagcctttgagcagtgggttaatggcattctt

SEQ ID NO: 502599 - DNA, 201 bp, Homo sapiens
gacagtgccgcagcacttggagttggaattccagtcaaaacaaacagcattttttgctgtcctaagaatttcgtggaaaatcaggcctacccaaaatccartgagagtgtttaaaattgtaatctagagttaaataaatgatccttggatttattgaatttttgcatttctgcataaccgtttcagtttgcctgccagttt

SEQ ID NO: 502600 - DNA, 201 bp, Homo sapiens
tattttgtctaacttatctaatttattggcatataattattcataatgtccctttataatcctttttatttctgtaaggctagtaataatgtccctttttytgattctagtaacttgagctttccctctctttttcttggtcagtctagctaaagatttgtcaattttctttgtcttttcagagaatcaacttttggtttt

SEQ ID NO: 502601 - DNA, 201 bp, Homo sapiens
gcgatctcagctcactgcaacctccacctcctgggttcaagccattctcctgcctcagcctctgagtagctgggattacaggcgcatgccaccacaactcrctaatttttgtatttctagtagagacaggatttcaccatgttggccagcctggtcttgaactcctgatctcatgatccgcccgccttggcctcccaaagt

SEQ ID NO: 502602 - DNA, 201 bp, Homo sapiens
ctagatctttccattttttgtttgatttgtagccaagtgatgtaagttaagatgtgcatattaatcatcttaaagagatatatacgcatgtgtgcacacaygcacacccttttaaacttagtatacattttcggccgggtgcggtggctcacgcctgtaatcccagcactttgggaggccgaggcgggcggatcacgaggt

SEQ ID NO: 502603 - DNA, 201 bp, Homo sapiens
accaatgagaacctacctctggcttgtcgtttacatatttctgagtttctttatgacaaggccttgacatttgcggaaacttcggaacctgtcgtatattytttgataacccttttagaggaagagtcggaaatagtcaagttactaacgaatacccaccacaagtatagtgaccctcctgtgaactttctgccagtaccc

SEQ ID NO: 502604 - DNA, 201 bp, Homo sapiens; identical to SEQ ID NO: 156967

SEQ ID NO: 502605 - DNA, 201 bp, Homo sapiens
ttttccccttcccccagcccctcataaccacaaatctgctgtctatctctatggatttgcctactctggacatttcatagaaatggaattacacaatatgsagctttttgagatgggcttctttcacttagctaatgtgttcaaggttcatccgtgttctagcacatatcactacatcattcctttttattagtgaataat

SEQ ID NO: 502606 - DNA, 201 bp, Homo sapiens
atcgcttgaacctgggaggcagaggttgcagtgagctgaaattgcgccaccacactccagcctgggtgacagagcaagactccgtctaaaaaaaaaaaggaaaaaaaaaaaacagaaagaaatagcctctttttactttttaaattggcaaaactgggctgggcatagtggctcgtggcactttgtaaggctgaggtgaga

SEQ ID NO: 502607 - DNA, 201 bp, Homo sapiens
cacacctgtaatcccagcaatttgggaggccaaggcagaaggattgctggagcccaggagttcgagaccagcctgggcaacatggtgagaccctatctctrcgaaaaaatttaaaaaataaaagcttttttttttttaaacacaagtgtgagatatgtattaaatgtccaagaggagatggcaagtcaatagttatactgc

SEQ ID NO: 502608 - DNA, 201 bp, Homo sapiens
tcccataacatgtggggattatgggaacttcaattgaagatgagatttgacttgcagccaaaccattatcaaccgtataaagaatgtacaattattatgtrtcaataaaaatttttagttaaaaaataaataaagctaagagaaagtatgaaaaacaaaggggattgagaaggagctgccaatgaagtaggaaactaagag

SEQ ID NO: 502609 - DNA, 201 bp, Homo sapiens
tttggacaggctgatctcaaactcctgaccttgtgatccgcccacctcggcctcccaaagtgctgggattacaggcgtgagccactgagcctggcccacttttttttttttttttttttgagatggagttttgctcttgttgcccaggctggagtgcaatggcgcgatctcggctcaccacaacctctgcctcctgggttc

SEQ ID NO: 502610 - DNA, 201 bp, Homo sapiens
gctggtctcgaacttccacctcaggtgatccgcccacctcagtctcccaaagtgctggaattacaagcgtgagccacccggcccagcctatctaccaccctttttttttttttttttttttgagacaacaaggtctgcagtggagtgatcggtgatcagtaaattttcttttcctttttttttcttttttttgaaacggag

SEQ ID NO: 502611 - DNA, 201 bp, Homo sapiens
taagctcaagtgttgcaagtactgcttagaatgcctgtcatttccgtgagcagtttgtctctccagtaaattgtgtattgtaataaaaaatgatctctagyggttctcacatattttttattgtgtttagtgcagtactgtagtaaaccttgcataacaccatgggatccatatgaagtgatgcttcaagtgctcccaaga

SEQ ID NO: 502612 - DNA, 201 bp, Homo sapiens
attgactgtttatgttatctgtaaggtttctagttactggtaggctataagttgaattgcttgatatgtaccatagatcaaggtttgccattgtggttgcrtgccattttaagataattaatccagtaaggagtgttgtaaaaaaagaaaagaaaatctgtgaagccatcactgtagctacgttagcagccatgaaaacct

SEQ ID NO: 502613 - DNA, 201 bp, Homo sapiens
ctctgtagatgagaccacctatgaaagactagcggaggaatcactggactctttagcagagttttttgaagaccttgcagacaagccatacacgtttgagkactatgatgtttcctttgggagtggtgtcttaactggtaaactgggtagagatctagcaacctacgtgatcaacaagcagacaccaaacaagcaaatctg

SEQ ID NO: 502614 - DNA, 201 bp, Homo sapiens
ggcaggtgtggtggctcgtacctgtaaccccagcactttgggattctgaggtgagagcgtagtttgagctcagactagcctgggcaacataatgagaaccygtctcaaaaaaaaaaaaaaaaattctgccctgggaccttctccccctcaattctaccaaactggttagaaatacaatctcagtgattaataatagagatc

SEQ ID NO: 502615 - DNA, 201 bp, Homo sapiens
tttctgtctgtgtgtaaacacaaatcagtttttaaaatttaggtttgtattgtacatactgtctgacaacttactgttgttttctgtttttacatggcagstttatgaaatttattacaagtggagatagtttcaatatagttttaatatacgtctgtgtgtgtacgtgtgtgtgtatgtatatgtgtgtgtgtgatttta

SEQ ID NO: 502616 - DNA, 201 bp, Homo sapiens
gccaggtgtggtggtgctcagctgtaatcccagctacttaggaggctgtggcacgagaatcgcttgaaccctgaagtgggggaggttgcagtgagcagagrttgcatcactgcattccagcttgggcaacagagagagaccctgtctcaaaaaagtaaataaataaataaaaataaataataaaataaggctgggtgcagt

SEQ ID NO: 502617 - DNA, 201 bp, Homo sapiens
caccctcatgggtgccctcctcctcctccacactcggccttcaacatcctgtgcaagctggctctgcctgcgaatggcctcctcacgtagcttatattccracaaccatgcaggtaccctgtgatgtggatacccacttggtggctataagagtgaatttttcaggaagggaagagaattctgatttcctaagttttactt

SEQ ID NO: 502618 - DNA, 201 bp, Homo sapiens
ctattaattgaagagatcagttttcacattactttatatggccttcataattattagcacttgatagaataatattagtaggctgggcgcagtggctcacrcctgtaatcccagtactttaggaggccaaggtgggtggatcacctgaggtcaggagttcaagaccagcctggccaacatggggaaaccccttctctactt

SEQ ID NO: 502619 - DNA, 201 bp, Homo sapiens
tgtagagacaagatctcactgtattgcccaggcaggtctcaaactcctagcctcaagtgatcctcctgcttctgcctcccaaagtgctgggattacaggcrtgagccactgcatctgcccttaatagatcttatttgatccttccctctttatatagcaaatctcccattgctgctttgaacccttctatgtggaggtgct

SEQ ID NO: 502620 - DNA, 201 bp, Homo sapiens
tcctgagatggagtttcactctcgtcgcccaggctggagtgcagtggcacaatctcggctcactgcaacctccgcttcccaggttcaagcaattctcctgyctcagcctcccaagtagctgggattataggcgttcgccaccagacccagctaatattttgtatgtttagtagagacgggttttcaccatgttggtcaggc

SEQ ID NO: 502621 - DNA, 201 bp, Homo sapiens
accagcctggccaacatggcgaaacctcatctctactaaaaatacaaagcaattagccaggcatggtggcaaatgcccataatcccagctactcaggaagytgaggcatgagaatcgcttgaacctgggaggtggaggttgcagtgagccaagatcatgccactgcactccagcctgggtgaagtgagactctgtcaaaaa

SEQ ID NO: 502622 - DNA, 201 bp, Homo sapiens
tgataaccattagcatgtcctcaatatttgttggatggctgctactaatcttgagggcatcatgccaatattgactgatgtatcaatcaatgctactggcrtgtggtatttacagcaaaaaactaagtgtgctcatttagctataacatgtctttagcagaagagataagtcagatgttaacatttgatacctgcatctat

SEQ ID NO: 502623 - DNA, 201 bp, Homo sapiens
agttggcttattcctttgcctttgaccacagctttgttggaggtcagcagcatcctaagagccagggagcaggccaggcacagtggctcacgcctgtaatyccagcactttgggaagccagggcaggtggatcacttgacgtcaggagttcaagaccagcctggccaacatggcgaaacctcatctctactaaaaatacaa

SEQ ID NO: 502624 - DNA, 201 bp, Homo sapiens
gcacttggtattttaaaaatttagccattatactagatgtataatttttttttaaggaaaaaactttatttcattcttcaataactgtaattactagtggwgtgtatgttgggtattgtacaacttctcaaaccttagaatcattatacaccatcagctcttttcctgtaccatacaattttcacatagcatttatttttt

SEQ ID NO: 502625 - DNA, 201 bp, Homo sapiens
tgaagtagagaatgctgttttctctagttacattcctttgtttcttcttacacttatttatagggtgaccatatgtcctagtttgcctgatacagtctggktttccaaagtctaatagtgccccttttcattcacagaattgtcctagtctaggtggtaaattaaatggcagtattacttacataacatttaatgtatgcc

SEQ ID NO: 502626 - DNA, 201 bp, Homo sapiens
actagaaacatagagcatcttcccctttaaagttgctggtagaagctggatcgggaattggttaggggagaggtagttgtagttagtttttttttttttttaaatttcagtagttttttggggaacaggtgtgtttggttacatgaataagttctttagtagtgatttatgagattttgatgcacccatcacccaagcaat

SEQ ID NO: 502627 - DNA, 201 bp, Homo sapiens
caaatacacaaagccaaagaaggcttgggaggccactgatagtatatataatattattattatagtacatataatagtatatattgtgtgagtgtgtgtgtatatgtatatttttaattgggaggtgccccaaagtgaagtgtactagtcttaaatgaaaataattacagaaattatttttattaaatatgctcctagcca

SEQ ID NO: 502628 - DNA, 201 bp, Homo sapiens
gaccatatgagtggggactggctctgtcacccaagcctgagtgcagtggcgcttccaactcaccttcccgagtaggtgagactacaggcacacaccatcaygcctggctgattttttcatttttttgtagaaaaatggagtttctgctgggcgcagtggctcacgcctgtaatcccagcactttgggaggccaaggcaggt

SEQ ID NO: 502629 - DNA, 201 bp, Homo sapiens
gtttctattattctacccatcttacatatgggaaagttgaagcacaaagaggtcaagtgacttggctaaaatcatgcagctgtatttgaatagtaagtggyagcaccaggattgagtgcaggctgtttgacaccagtgctcttacccacgccactcttgcccctatgctggtcccaaatatatctgtctgcctctgtagac

SEQ ID NO: 502630 - DNA, 201 bp, Homo sapiens
gcaaatacacaaagccaaagaaggcttgggaggccactgatagtatatataatattattattatagtacatataatagtatatattgtgtgagtgtgtgtgtatatgtatatttttaattgggaggtgccccaaagtgaagtgtactagtcttaaatgaaaataattacagaaattatttttattaaatatgctcctagcc

SEQ ID NO: 502631 - DNA, 201 bp, Homo sapiens
ggctttggaatttgaagggtttcctttgttttcacaaaatccttatagattctacatgtaccactaggccaatccgattatagtcttctttctcagaagaytgaatggtgaccttttttcatctttgtaatgccagctattcagcattccctctgagaccctccagtgatgaggtttcccagcatttggagagtatcaagt

SEQ ID NO: 502632 - DNA, 201 bp, Homo sapiens
gggcatggtagctcacgcctgtaatcccagcactttgggaggctgaggcaggcagatcacctgaggtcaggagttcgagaccagcctggccaacatggtgraaccccatctctactaaaaatacaaaaattagccaggcgtggtggcacacacctgtaatctcagctactcgggaggctgagacaggagaatcgcttgaag

SEQ ID NO: 502633 - DNA, 201 bp, Homo sapiens
tcaagtgattctcctgcctcagcttcctgagtagctgtgactacaggtgcacgccaccacgcaaggctaatttttgtatttttagttgagatggggtttcmccatgttggcaaggccggtctcgaacccctgacctcaggtgatccgcccacctcaacctcccgaagcgctgggattacaggcataagccaccgcacccgt

SEQ ID NO: 502634 - DNA, 201 bp, Homo sapiens
tcaccagtaatgtgttctagtttctcctcattctcatcaacacttactattttctgtctttttgattatagacatgctactggatgtaaatggtgtctcttggtggttttgatttgaatttccctaatgttgggcatctttttatgtgcttgttagcgatttctgtttcttctttgggaaagtatctgttctaattctttg

SEQ ID NO: 502635 - DNA, 201 bp, Homo sapiens
acagattttccaggcgcatggtgcaagctgtcagtgtatctaccattctggggtctggaagacggtggccctcttctcatagctccactaggcagtgcccmagtagggactctgtgtggggattccaaccccacatttcctttctgaactgccttagcagaggttctccatgagggccccgcccctgcagcaaacttctgc

SEQ ID NO: 502636 - DNA, 201 bp, Homo sapiens
aattcttgaactaatgagttgttaattaaggtaggttaaaaaaaaaccaggcatttttatatgaagatactttctgtatgaaatttgattaggcagtatarcatttaactagtaagtgtgaaaaattatttactaagaagcaaagaacaggatttaaaagaagtacaaccaacttccagttatagatgtctgaggagcctt

SEQ ID NO: 502637 - DNA, 201 bp, Homo sapiens
aggggaaaatgggggagttattaagtagtgggtatagaatttcagttttacaaggtaaaaatggagatggatggtggtgatggctatacaatgctatggaygtattcaataccactgaactgtacacttagaaatggttaagatggtaaatatgtatattttaccacaataaaaaagtaaaaaaataagtcataggaataa

SEQ ID NO: 502638 - DNA, 201 bp, Homo sapiens
gaagcatctgcaaagaacactaagaacgacctgtcagagaagtagggaggagaataggaaaagagcatgtcctggaccctagttatagaattatttctgcyccaaaaagtgtaacttttttaaaaaagaaagcctgaatgcaagcatttttcatctgtctggtttgtaccatcacaagacataatttccaaatagaataag

SEQ ID NO: 502639 - DNA, 201 bp, Homo sapiens
tttcactgcagtactttctgctaggttgtgctatgtctcagttgaattactactggaatttgtgtaattgtgtgtgttagataaacatctctctttttctrtatttgataggcaaaatgatgtctttatagtcttgtgggcaatattttacaaatggccttctggctgtgtatcactgctgctccatgccaaaactccttt

SEQ ID NO: 502640 - DNA, 201 bp, Homo sapiens
agttgtcagtatataagtgagtgtgaataagatcaccgagggagagggaagagaggaccagaaacctcatgggagaagcatctgcaaagaacactaagaaygacctgtcagagaagtagggaggagaataggaaaagagcatgtcctggaccctagttatagaattatttctgctccaaaaagtgtaacttttttaaaaaa

SEQ ID NO: 502641 - DNA, 201 bp, Homo sapiens
tcacctgaggtcaggagttcgagaccagcctggccaacatggcgaaaccacatctctactaaagtacaaaaatcagccaggtgtggtggcgggcgcctgtratcccagctactcaggaggctaaggcagagaattgcttgaacccgggaggtggaggttgcagtgagccaagatcatgcaactgcactccagccttggtga

SEQ ID NO: 502642 - DNA, 201 bp, Homo sapiens
aaatgagataagtataaaatacatgctagatttcaagttagtacaaaaattgaataaataaaatttctcagtaactttttatattgatgacatagtgagayaatattttaggtatattggagtaaatacttttttttttttttgagacagggtctggctctgtcatccaggctgtagtgcagtggtgcaatctcagcatac

SEQ ID NO: 502643 - DNA, 201 bp, Homo sapiens
gaacactaaaaaatatttgattaaccgaagagaaagcacaacaggaacaacagaggaacatagcaagagaaggagcaagtaggaaacaaatagcaaggtgrtagatataaacctagccaaagcaataatgacattaaatgtaattggtctaaaaacatcaagtaaaaggcacagagatcatattttcctgcctgtagtctt

SEQ ID NO: 502644 - DNA, 201 bp, Homo sapiens
aatatggtgaaaccccgtctctattaaaaatgcaaaaaaaaaaaaaattaattggacatggtggtgtgcacctgtaatcccatctactcaggaggctgagkcaggagaacgcttgaacccaggaggcagaggttgcggtgagccaagatcgtgccactgcactccaacctgggtgacagagtgagactctgtctctaaata

SEQ ID NO: 502645 - DNA, 201 bp, Homo sapiens
atcaccagtaatgtgttctagtttctcctcattctcatcaacacttactattttctgtctttttgattatagacatgctactggatgtaaatggtgtctcttggtggttttgatttgaatttccctaatgttgggcatctttttatgtgcttgttagcgatttctgtttcttctttgggaaagtatctgttctaattcttt

SEQ ID NO: 502646 - DNA, 201 bp, Homo sapiens
aaaaaaaaaaaattaattggacatggtggtgtgcacctgtaatcccatctactcaggaggctgagtcaggagaacgcttgaacccaggaggcagaggttgyggtgagccaagatcgtgccactgcactccaacctgggtgacagagtgagactctgtctctaaataaataaataaataaacaaaacagggaaaaagtagaa

SEQ ID NO: 502647 - DNA, 201 bp, Homo sapiens
gttgctcttgtcatccgggctggagtgcaatgacacgattttggcttactgcaacctccgcctcctgggttcaagcaattttcctgcctcagcctcccgartagctgaaattacaggtgcctaacaccacgcccaagtaatttttgtatttttggtagagacaggtttcactatgttggccaggctggtcttgaactcctg

SEQ ID NO: 502648 - DNA, 201 bp, Homo sapiens
ccacccatctcagcctcccaaagtgctgagattacaggcgtgagccacctcacccggcctttttttgtttgtttgtttgtttgttttgcaattttggctcrctgcaacccccgcctcccagattcaagcgattctcctgcctcagcctcctgagtagctgggattacaggcgtgtgccaccacacccagctaatttttgta

SEQ ID NO: 502649 - DNA, 201 bp, Homo sapiens
tgttggccaggctgttcttgatctcctgacctcatgatccacccatctcagcctcccaaagtgctgagattacaggcgtgagccacctcacccggcctttktttgtttgtttgtttgtttgttttgcaattttggctcgctgcaacccccgcctcccagattcaagcgattctcctgcctcagcctcctgagtagctggga

SEQ ID NO: 502650 - DNA, 201 bp, Homo sapiens
cttgaacctgggagatggaggttgcagtaagccgagatcccgccattgcacttcagcctgggtgataagagtgaaactctgtctcaaaaaaaaaaaaaaaagataaaagggatatattgacctgaacactttgtcactagggaatattcttctcatctatgttgattttttttttgagggggacttaaagtcagtgtcgcc

SEQ ID NO: 502651 - DNA, 201 bp, Homo sapiens
cagtagacctagcaccatttactaaaaagaccatcttttccctgccacactgcagtgtcacttttatcataaatctgatgttcaaatatatttgagtctcrttctgttcctttggtctgtttgtctattatgctgatacttctgacttcattattatggcattttaataggcctcgatatattgtagtaaatgaaatactg

SEQ ID NO: 502652 - DNA, 201 bp, Homo sapiens
gtagagacaggagtttcaccatgttgaccaggttggtcttgaactcctgaccacaagttttccaaccgccttggcctctcaaagtgctgggattataggcrtgaggcaccgcgcctggtcaaattttttgttatatttttattttctttcctatgtacttcctttcttttctctgcctgtttaccttttcagtctgatcac

SEQ ID NO: 502653 - DNA, 201 bp, Homo sapiens
gaatcctggaggtggagcttgctatgagctgagattgcactgctgcactcaagcctgggcaacagggcgagactatgtctcaaaaaaaaaaaaaaaaaaaagattgtttttagaaaataatttgtgtataattcatgataattttatgctatccttgatacatgaagatgcttcacactgtggtaaggaccagcttttaga

SEQ ID NO: 502654 - DNA, 201 bp, Homo sapiens
tatgttggccaggctggtctccactcctgacctcaggtgatctgcccacctctgcctcccaaagtgctgggattacaggtgtgagccaacgcgcctggctragaggctctttcaatattatgagattaatcctttgtaatgtgagttccagatattttcttcagttcattatttgacttttgattttgtttatgctatatt

SEQ ID NO: 502655 - DNA, 201 bp, Homo sapiens
taaaatgaaataataaaaagaaaacccattaaaaaaatacaccaaaggctgggtacggtggcttacgcctgtaatcccagcactttgggaggcggggggggtgtggatcacttgaggtcaggagttcgagtccaacctggccaacatggtgaaacactgtctctactaaaaatacaaaaattagccaggcgtggtggcagg

SEQ ID NO: 502656 - DNA, 201 bp, Homo sapiens
gcctgtggtcccagctactcaggaggttgaggcaggaaaattgcttgaacttgggaggcagaggttgcagtgagctgagatggtgccattgcactccagcmtgggcaacagagcaaaactacatctccaaacaaaacaaaacaaaactgagtgcctttaacagcacccaggtcacctcttgaatgctttgctgcttagaaa

SEQ ID NO: 502657 - DNA, 201 bp, Homo sapiens
attatgcttagttgtaatacatgtccttcacacattttatccggtttcctatcttcatgctacaaagcttagacctctaacaccttaaattaattgttcarttacaaaagcagattcaaaattcttctgtgagaaatgttttggatttatccataggcataattgctactcacctctgcaaaaggggagagccttccatgt

SEQ ID NO: 502658 - DNA, 201 bp, Homo sapiens
gtcttgaactcctaatcttgtgatccacctgcctcaccctcccaaagtgctgggattacaggcctgagccactgcactggcctttttttttttttttttttaaagtaaaacacaggatcagaaatctctttgttttgcatcatttgtgcaatatttgttttgtttgttttttccttaatgtcttgagagccagcaaagatt

SEQ ID NO: 502659 - DNA, 201 bp, Homo sapiens
gggatgtgaaggttaaggcatgaatggagggcttggccttagatagtaacatagttcaatcaagataatagaaggaagacagaataatatgtgtggctacratagcaagtagatggtacattgtggctgggcatgtgtggaggatctttactgattttctctggtggttttttgttgttgttgttgtttgacagagtcttg

SEQ ID NO: 502660 - DNA, 201 bp, Homo sapiens
atcaagataatagaaggaagacagaataatatgtgtggctacaatagcaagtagatggtacattgtggctgggcatgtgtggaggatctttactgattttstctggtggttttttgttgttgttgttgtttgacagagtcttgctctgttgcccaggctagagtgtagtggcgtgatcttggctcactgtagcctccgact

SEQ ID NO: 502661 - DNA, 201 bp, Homo sapiens
aagatgaatatgctacaggcaccaaatgtggcctgcaaagcttaaaatatttaccatctggccctttgtagaaggtttgctggttgtataatccatgatayagattcatagaacctattttttaatcaaaaaagtaacagaattaagtcattcatatttcaagtttgaattgacatcatccttctactaattttctttgtt

SEQ ID NO: 502662 - DNA, 201 bp, Homo sapiens
tccagcctgggcaacagagtgagactccatctcaaaaaaaaaaaaaaagcataatattagtaatcaggttttctccttccattgagtgtcttcacaatatrccttgcccaacagcgaggtgggtgacaccaatagcaagatatcccaatggtgcaaaaggaaagctaaccagaggccgggcatggtggctcacacctgtaa

SEQ ID NO: 502663 - DNA, 201 bp, Homo sapiens
ctcttatgtatgagtggacagcactgacgcatttaatctgtgctttgctgcagttcatcacagtggcttccaaaatagaaagcacccacccacttctgtakgcttattgaatataaggatcagctaactatggcctgtttgcatgccagattgggcccatggcctgtttttgtactgtgtggcagtttagaatttttcttt

SEQ ID NO: 502664 - DNA, 201 bp, Homo sapiens
ctcaggcaaatgcagtgttaccattgcattatataggtcatcattgtttccagccttcagtaacagttacttgctactcagtcgcaattgcaggtgtcacrtatgttacatgtttgttatggcaataacgtactcctattaccagtttctggactagcttttccgaagtaaggctgctgtaacaaccctcaaattgtagtg

SEQ ID NO: 502665 - DNA, 201 bp, Homo sapiens
ccctcccggctgctttcatgggctggcattgagtttctacagattttccaggcgcatggtgcaagctgtcagtgtatctaccattctggggtctggaagayggtggccctcttctcatagctccactaggcagtgcccaagtagggactctgtgtggggattccaaccccacatttcctttctgaactgccttagcagagg

SEQ ID NO: 502666 - DNA, 201 bp, Homo sapiens
acttaaaaaaatacaaaaattaaccgggcgtggtgacgggcgcctgtaatcccagctactttggaggctgaggtaggagaatcacttgaacccaggaggcrgaggttgaagtgagctgaggtcgcgccactgcactccagcctgggcaacagagtgagactccatctcaaaaaaaaaaaaaaagcataatattagtaatca

SEQ ID NO: 502667 - DNA, 201 bp, Homo sapiens
ctctttttaaaaacaacatctttattgggatattcagatatcttacaagttaccttttggaagtatacaactcagtggtttttagtatcctcacaggttaygtgcacccatcactacagtcaattttagaacattcattatccccaaaagaaccctgtacccattagcagttattatctttactttttaaatgcgggaaat

SEQ ID NO: 502668 - DNA, 201 bp, Homo sapiens
atattgatggtatccctttgattccattttgtaaggtaaattttcattcccactagttccatcatcttttctatgttttctttgtttctttgtttctttcwttttttctttttttaagatagagtctcactctgttgcccaggctggagcgcagtggtatgatcacagctcactgcagtcccgacctcctggactctaacg

SEQ ID NO: 502669 - DNA, 201 bp, Homo sapiens
agtagagacagggtttcaccatgttggccaggatggtctcgaactcctgacctcaggtgatcagcctgcctcggcctcccaaagtgctgggattacaggcrtgagccactgcacctggcctgcctggataatttttttaaaaatgttttgaagaggtaaggtctctccatgtttcccagtgtggtcttgaacttctgggtt

SEQ ID NO: 502670 - DNA, 201 bp, Homo sapiens
ttaaggtatttagaccaaaatttaagaaactttataagatcttattggctaaatattgacttaactatatatatatatatatatatatatatatatatttwtttttttttttttttttttttttgagatggagtctcactctgtcacgcaggttggagtgcagtggtgtgatcttggctcactgcaacctccgcttgctgg

SEQ ID NO: 502671 - DNA, 201 bp, Homo sapiens
gtttaaggtatttagaccaaaatttaagaaactttataagatcttattggctaaatattgacttaactatatatatatatatatatatatatatatatatwtttttttttttttttttttttttttgagatggagtctcactctgtcacgcaggttggagtgcagtggtgtgatcttggctcactgcaacctccgcttgct

SEQ ID NO: 502672 - DNA, 201 bp, Homo sapiens
atgggaaaagtgtcaagaatatcttcgaaaaatcaaccgtgatattgcccagctactgactcattcacgttcaataggtaccctcctaatctaactgcacrtttaacagaatgtactataatggcttaaaatggttacttattttaaattgtttgaatttttaaaggtatgtgtcccaggcaggaaagttgagaacgcttt

SEQ ID NO: 502673 - DNA, 201 bp, Homo sapiens
gctgaggcaggaggatcatttgagcccaggagttcaagaccagcgtgggcaacataatgagactctgatgctacaaaaaacttaaaaaaaaaaaaaaaaaattaaccaggcatggtggcacatgtctagctacttgggaggctgaggtgggagtattgcttgagcccaggaggtcaaggctgcagtgagtggtgattgtac

SEQ ID NO: 502674 - DNA, 201 bp, Homo sapiens
cacatcactgccctccagcctgggagacagagtgagactgtgcctcaaaaataaatacatagatagatagatagatagatagatagatagatagatagataaatggaaaccttgatttaagtagttgcttcagtagttcatttgggctttgtcagtcaataacacattttacttctgtagtaatgggttactgataaggga

SEQ ID NO: 502675 - DNA, 201 bp, Homo sapiens
tcacatcactgccctccagcctgggagacagagtgagactgtgcctcaaaaataaatacatagatagatagatagatagatagatagatagatagatagataaatggaaaccttgatttaagtagttgcttcagtagttcatttgggctttgtcagtcaataacacattttacttctgtagtaatgggttactgataaggg

SEQ ID NO: 502676 - DNA, 201 bp, Homo sapiens
atcacatcactgccctccagcctgggagacagagtgagactgtgcctcaaaaataaatacatagatagatagatagatagatagatagatagatagatagataaatggaaaccttgatttaagtagttgcttcagtagttcatttgggctttgtcagtcaataacacattttacttctgtagtaatgggttactgataagg

SEQ ID NO: 502677 - DNA, 201 bp, Homo sapiens
ttcctaggcaaaagattgaatggctatatgaaagaaatcagaacagccccatcactggctagaaatgtaggaaagttatcaaaattatttccttttccccmcaagaaaggcttctagcccttctgggtttaccaataatttttttttttttttttttttttgagacagagtcgcactctgttgcccaggctgggatgcagt

SEQ ID NO: 502678 - DNA, 201 bp, Homo sapiens
gatcacatcactgccctccagcctgggagacagagtgagactgtgcctcaaaaataaatacatagatagatagatagatagatagatagatagatagatagataaatggaaaccttgatttaagtagttgcttcagtagttcatttgggctttgtcagtcaataacacattttacttctgtagtaatgggttactgataag

SEQ ID NO: 502679 - DNA, 201 bp, Homo sapiens
cattcacctgaattactgcagtagccttctaatgagtcttcctccttcctcgctctcctgtaagtgtgcctataagacagatatgccacctttctactcaraatcaccaatggcctgtcatctcactcagaagaaaggctttattttttctgcttacatatacccctccctccccagtcttccaaaaacatctctgatctt

SEQ ID NO: 502680 - DNA, 201 bp, Homo sapiens
ttggcttccctgggccacactggaagaagaacagttgtcttgggccacatataaaatacactaacactaatgatagctgatggactaaaaaaaaaaaaaaattttcacaaaaaaagtctcataatgttttaaggaagtttgcgaatttgtgttgggccacattcaaagccatcctgggttgcgtgtggttcatgggccatg

SEQ ID NO: 502681 - DNA, 201 bp, Homo sapiens
gcggaggttgaagtgagctgaggtcgcgccactgcactccagcctgggcaacagagtgagactccatctcaaaaaaaaaaaaaaagcataatattagtaawcaggttttctccttccattgagtgtcttcacaatataccttgcccaacagcgaggtgggtgacaccaatagcaagatatcccaatggtgcaaaaggaaag

SEQ ID NO: 502682 - DNA, 201 bp, Homo sapiens
catcctaaagtatttgactgatgtctacagcaatcagtttcttaaggcattcacaacaggattcagttatgtaagagctcttctgccagtcagcctcaccytcattccatttctctcttgctgctttgaaagacctttttgtttttgctgtcctgcagttatatggtgatatatctaggtttggcttaaatctattgggat

SEQ ID NO: 502683 - DNA, 201 bp, Homo sapiens
caagcaatccacccgcctcggcctcccaaagtgttgggattactggcgtgagccactgcacagtgcacaaccagcttttttttttttttttttttttttttgagatggagtctcactctgttgcccaggctggagtgcagtagcgcaatcttggttcactgcaacctctgcctcctgggttcaagtgattctcctgcctca

SEQ ID NO: 502684 - DNA, 201 bp, Homo sapiens
accttatagttgggtaatccctaatgccagtatctttaggtcttccttcatggcctggtcatgtatatcagagaagatgcaactattccacctggaatatmaaggtctagtgaccagcatgatgccatgttttccctgaagcgtgtgtgtatgtgtgtgcatgtgtgtaggtgttgtgtgtgtgtgtgtgtgtgtttatag

SEQ ID NO: 502685 - DNA, 201 bp, Homo sapiens
attgaggtaacacctggctggtgataataaaattgtcatcaagtaaaaggattcttacttttgtataaaataggaatatgcatctatatgtccaaaacagktttttaaaattttactaatttatttatttttgagacagggtctcactccagtcacctgggctgcaatgcggtggtgcgatcttggctcactgcagccttg

SEQ ID NO: 502686 - DNA, 201 bp, Homo sapiens
ccaacctcaggtgatccacccacctcggccttccaaagttctgggattgtaggcatgagccactgcgcctggccacttgttaatgtttatgaagtaactcrtgcatatagtttaaagttgtatttctcaactatttctgtgcatcagaaactttcagagcccttttcgaaccacttgtagctgggtcccatccacctcctg

SEQ ID NO: 502687 - DNA, 201 bp, Homo sapiens
tttttagtagagatgggatttccccatgttggtcaggctggtctcgaactcccaacctcaggtgatccacccacctcggccttccaaagttctgggattgyaggcatgagccactgcgcctggccacttgttaatgtttatgaagtaactcgtgcatatagtttaaagttgtatttctcaactatttctgtgcatcagaaa

SEQ ID NO: 502688 - DNA, 201 bp, Homo sapiens
aggacttactgcaagaagtacatgaagagcaactggttaacctgctcactgttctgtctcaaaatgagacacattaacgggtaggctacaatgttcctggrcttctttcaaagtggaagcacttctgagctctttagcattgaagtgtcaaaagcaattcacatgggaagacaatttcttatatgtgctttgtgactgcca

SEQ ID NO: 502689 - DNA, 201 bp, Homo sapiens
gattaggaggtagaaggtttgaatttgaatcatagctctacagcttactggccataattcctaagtaacttcctgtatgtatgtttctttttgtatatgtrtgtgtgtgtgtgtgtgtgtgtgtgtgtgtacacacacacacacacacatactctggtggaagccatgcatttagggactggactaaggaaagagaagtta

SEQ ID NO: 502690 - DNA, 201 bp, Homo sapiens
taaaaatgatctaaacttccctgttaaagacaaagattatcagtatgcctcttagaaaaacccaataatatactgtttttaagagactcttcgaggccaaragcggtgactcacacctgttatcccaacactttgggtggctaagatgggaagattgcttgcggccaggagttcaagaccagcctgggaaacgtagcaaga

SEQ ID NO: 502691 - DNA, 201 bp, Homo sapiens
gagctagccacactgataggccttgttttgtggctttctcaatgatgctttaaaaggaaacagtttcatttgaattatttcttttctttttttgaggtagrgtcttgttggactgcagtggcgcaatcttggctcactgcagctttgacctcctgggctcaattgatcctcccacctcagctccccgagtagctagcacta

SEQ ID NO: 502692 - DNA, 201 bp, Homo sapiens
taaagcaagaaagatgttcaggaaagcaaaaacgcagtagcaggattaaaattcacatcaaagacaatagagtagaactgatacttagacaagatgctgcrcctcagggtgatgtgactgcagactgatcctaccagtacttcaaaacatttagctagtgatattcaggaagaactgcagatgatctctcagtatcctgag

SEQ ID NO: 502693 - DNA, 201 bp, Homo sapiens
gtaacttcagaagaggtagagggggaaagtgagtaacaaaatgatgatcattacaatgaaaggcaggaagggaaaataaactccaaaaagtataattagcrcaaaataataaaatagaaacaaatccgaatcatggtaagtaaaaatgatctaaacttccctgttaaagacaaagattatcagtatgcctcttagaaaaac

SEQ ID NO: 502694 - DNA, 201 bp, Homo sapiens
tagatgctaatagcttgcaggtcttttggctgttggtaatttgtctccaaccacctgggatttgatggttaccatattactgtatcagtttgctatggctrccataacaaggtgccatagactgagtagcttaaacaacagaaatgcattttctcacagttctggaggccggaagtccaagatcaaggtgtcagcaggttc

SEQ ID NO: 502695 - DNA, 201 bp, Homo sapiens
ctttgggaggctgaggtgtgtggatcacttgaggttaggaatttgagcccagcctgaccaacatggtgaaaccccatctctactaaaaatacaaaattagytgggcatggtggcacatgcctgtagtcccagctacttgagagtctgaggcaggagaattgcttgaacctgagcagcagaggttgcagtgagccgagatca

SEQ ID NO: 502696 - DNA, 201 bp, Homo sapiens
actgcttaaagaaaaagtaatttttctttctcctttgaggaaaagtttattcttttcttacctatcatgcatccactttattgtagacaaaacatgaaatstaggaaagcagaattgtgacggaatacatcatatgaccatatgagtggggactggctctgtcacccaagcctgagtgcagtggcgcttccaactcacctt

SEQ ID NO: 502697 - DNA, 201 bp, Homo sapiens
aaatgaatgatgtttcgcatataatggctcttgcatgtagttgcaataataatgaagtgagaataatgttagaaaaagctttgaatactgtcagaaaatgrtcaaaagcccaagtgcttgcagggttctggttgccatggtgactaagactgtcgaagcagaatggaatacttagtgagattatataaggcagcatctcga

SEQ ID NO: 502698 - DNA, 201 bp, Homo sapiens
gggattatagatttaaaggtaggaaggcatttaaaagcttgcatttaaatcccttgtgtaacttctggcacatgggctctcaaacttaaaacactgacatrgttataatagctcggaccccatttttttgagacagttttatggagctatatttatatacaataaaatttgcccattcaaagtttacagttgaaaagtttg

SEQ ID NO: 502699 - DNA, 201 bp, Homo sapiens
agaagaattctatatctgtcttggataaaaaatactatcagatgatataactaaggtttttttctatttttatttttacctcctgcatgaatgaacatatrttttcttacaggactgaatttgctcttaaagaaatcatgtcctctggaggtgctgaagatgatatcccacagggagagaggaaaacagttacagattttt

SEQ ID NO: 502700 - DNA, 201 bp, Homo sapiens
agcctcctgagtagctgggactacaggtgcccaccaccacgcccggctaatttttgtatttttagtagagacaagctttctccatgttggccaggctggtsttgaactcctgacctcaggtgatccgtccacctcggcctcccaaagtgctgggattacaggtgtaagccactgcgcccgactgagatgatctgttttctt

SEQ ID NO: 502701 - DNA, 201 bp, Homo sapiens
tcatattcattactcactcaaagtctggaatgttcaaggccagccagagcctaagccaaagtaccagtgataattcttatgttttgcttaaacataaggtktgtatttgtttttctttgaaggatgaaaagctgccgtctgtaatcctagcactttgggaggctgaggcgggtgcatcacttgaggccaggaggtcgagac

SEQ ID NO: 502702 - DNA, 201 bp, Homo sapiens
tctacaaaaaaatacaaaaaattagccgagcatggtggtgtgcctggagacccagctactcaagaggttgagataggaggatggcttgagcctgggaagcrgaggttgcagtgagccatgatcacgccactgcacaccagcctgggcaacatagcgagaccctgtctccaaaaaaaaaaaatctagagattaaggcatgct

SEQ ID NO: 502703 - DNA, 201 bp, Homo sapiens
tgtaaccccagcactttgggattctgaggtgagagcgtagtttgagctcagactagcctgggcaacataatgagaacccgtctcaaaaaaaaaaaaaaaaattctgccctgggaccttctccccctcaattctaccaaactggttagaaatacaatctcagtgattaataatagagatccacccctccttagagttatgtg

SEQ ID NO: 502704 - DNA, 201 bp, Homo sapiens
ggataaaaaatactatcagatgatataactaaggtttttttctatttttatttttacctcctgcatgaatgaacatatgttttcttacaggactgaatttrctcttaaagaaatcatgtcctctggaggtgctgaagatgatatcccacagggagagaggaaaacagttacagatttttgttatcttctggataaatctaa

SEQ ID NO: 502705 - DNA, 201 bp, Homo sapiens
gtttttaatgagaaaagagaactgggtaactgatgtattatttctggagtattttctttgctatatatgttttatataggtctggatgttttatgagtatrtaagtgttttgtaaatgtttcttcatttaaacagtttcatgtacatttcttcatttaaatattactcgttaatttttttttttttttttttttttttttg

SEQ ID NO: 502706 - DNA, 201 bp, Homo sapiens
tgaactcctgacctcaggtgatagacctgcctcagactcccaaaatgctgggattacaggcgtgagccactgtgcccggcctgaattcaattatttatttwttttttttgagacggagtttcgctctgtcgcccaggctggagtgcagtggcacaatctcggctcactgcaagctctgcctcctgggttcatgctattctc

SEQ ID NO: 502707 - DNA, 201 bp, Homo sapiens
agtggctcatgcctgtaatcccagcactttgggaggctgaggcgggcggatcacttggggtcaggagttcaaaaccagcctggccaacgtggtgaaatccygtctctactggaaattaaaaaattagctgggaggggtggtgtgcacctgtagtcccagctacttgggaggctgaggcaggagaatcgcttgaacccggga

SEQ ID NO: 502708 - DNA, 201 bp, Homo sapiens
aggcaggagaatcgcttgaacccaggaggtggaggttgcagtgagccgagatagcattacggcactccaccctgggcaacagagcaagactccatctcaamaaaaaaaaagaaaagaaaagaaaaactgcagcatagaagtgatgtgaactttcattaaagcttctcttttttatgttaggaacccatagtaatcggtatc

SEQ ID NO: 502709 - DNA, 201 bp, Homo sapiens
cgtccagaacataccaatcttcagaaatgaaaagggaggccaggcgtgcagtggctcatgcctgtaatcccagcactttgggaggctgaggcgggcggatyacttggggtcaggagttcaaaaccagcctggccaacgtggtgaaatcccgtctctactggaaattaaaaaattagctgggaggggtggtgtgcacctgta

SEQ ID NO: 502710 - DNA, 201 bp, Homo sapiens
cacctcctgggctcaagccacccagccaattcagcctctggagtagctgggactacaagcgcctgacacctcacccagctcttttttttttttttttttttgtagagacaaggtttggccatgttgcccaggctggtctcaaactcctgggctcaaatgatccaaccaccttggcctactaaagtgctgtgattacaagtg

SEQ ID NO: 502711 - DNA, 201 bp, Homo sapiens
atgttgggattacaggcgtgttccaccgtacccagccagcagtgtactttcttaaattgtatatttgttttgtttttgtgggaaatggaagaatgtgagargctgctgaatgaaaaggtttattggctaccccaattaaacttataaagccagaggggtccaggcattttgtgtcttcacagaattcaaaagaagtactct

SEQ ID NO: 502712 - DNA, 201 bp, Homo sapiens
tttgtttttctctcagtgctatgatgcaaaggagatatgagcagaccaaactgaagaataagatttctgagatgtggctgacacagtttaacagttcttcrttgttgttttcccagccttcatcccggggatctctatcctttcaccaggaagccactgttcatcattgtggattcgtctaatagtgttgcgtataaggtg

SEQ ID NO: 502713 - DNA, 201 bp, Homo sapiens
ttctcaaaaaaaatgtgtttgatatttatttaaacgttaagttataggcaaccatgtatcctggaaaatagtcaggagtatatatattttactgtcatagratgtggtccatgcaatactttaagtgaataaggccagttgcatagtttatatcatataatttcattttcgtttaagagaaccacatgtttgattatgcaa

SEQ ID NO: 502714 - DNA, 201 bp, Homo sapiens
agttctttttcttttttcttttcttttcttttttttttttttttgagacagagttttactctgccgcccaggctggagtgcagtggcactatcttggctcmctgcaacctctgccttccgggttcaagcgattctcctgcctcagcctcccaagtagctgggattatagtcatgcatcaccacacccagctaatttttgta

SEQ ID NO: 502715 - DNA, 201 bp, Homo sapiens
caccatgttggccaggctggtgtcaaacttctgacctcaagtgatctgcccacctcggtctcccaaagtgctgggattacaggcgtgagccaccgcgcccrgctaattttttaacttttaacaaattttgcattgtttctttttggtattcctagaagtaattgtatacgtaatataatctttcttttctcattgatgagt

SEQ ID NO: 502716 - DNA, 201 bp, Homo sapiens
ggttgggttattgttttacaagagattggcttcacacagatttaatagaaaagaaatgactccaaaacaaggcttagctaataacatttattctttagccygtgtaatcttaattcatatctcttcaaaagcctggtgacaactgtcatgtaggaccagggaatagtctgttaatgctgtttgaattttctctctcttttt

SEQ ID NO: 502717 - DNA, 201 bp, Homo sapiens
tttaagatgtcatgaactttaaataaaaccatgttgtttatccttgtttgttgttttgtgtatgtgattttctttcatttcaggagctgcctgccaatagygtgcttctgatttacctgtcggccactggcgttttccccacaggtcgttctgatagtgaaggtacaataaaggaatgctccctgttgtgagcagggcttg

SEQ ID NO: 502718 - DNA, 201 bp, Homo sapiens
aattacttcttctatttaagcatatgaaactaactttttttcttttaagagaccggggatgggggtgtgcatctcactatgttgccccttctttaatcccygcctcttggctggtctccagctcctggcctcaaatgatcctcccaccttggccctccaaagtgctgggattacaggtgtgagctgccacacctagacttt

SEQ ID NO: 502719 - DNA, 201 bp, Homo sapiens
aatttgtaaactcttttatcctctctactagaatatcaactagtgggtagattctgtatttactaaaacttcctatcatctgagtcttaaggcctataaayagatatttgaattaaattaaagcatgcttggggccagacatggtggctcatgcctgtaatcccagcactttgggaggccgaggcgggtgggtcacttgag

SEQ ID NO: 502720 - DNA, 201 bp, Homo sapiens
gcttgatcctatgtctttttgacattctttagcattccttgagcactttcttgcttactaccacaagatattccagattgatcctgtactttttctacccstgtgctgtaattagtgaattacaattctccagagatgtctggttccttttattggagaatggtattaggggccaagtgttaggtgctagaaacgttcata

SEQ ID NO: 502721 - DNA, 201 bp, Homo sapiens
tttacagcagaaggatccaggggagaatcaggcattatacctcagttttcccttgtctttgaaggaaagtacttgacatttttgaagattacaggttggtyattttgtagaatgtcccccaacttggttttgtctgtttcctcatgattagactcaggctacagaactttgacaggaacagtacttctcatcgcatgggac

SEQ ID NO: 502722 - DNA, 201 bp, Homo sapiens
actatgctggtttcagtgcatgttcaactgctataattagtgtagttttaatgtgctcattttgctgcattaggtttgtattttgttactgtattttactrtgtttgtattttgttcaccaattcatcattggtggttgaacatttttcttattaacattgaaatttactcctgtctagtccttagaccccattcaggcct

SEQ ID NO: 502723 - DNA, 201 bp, Homo sapiens
ctcacgcctgtaatcccagcactttgggaggccgaggcaggcggatcacgaggtcaggagatcgagaccatcctggctaacagtgaaaccccgtatctacyaaaaatacaaaaaattagccgggcgcggtggcaggcacctgtagtcccagctactcatgaggctgaggcaggagaatggtgtgaacccgggagtcagagt

SEQ ID NO: 502724 - DNA, 201 bp, Homo sapiens
tattgtgcaaatatcatagagtgtacttacacaaactagatggtataggcttcctacatacctaggcttcacggtatagcctgttgctcctgggctgcaawcctgtacagcatggtactgtactgaatactgttagcaattatacaatgttaagtacttgtatatccaaacatatctaaacatagaaatggtgcagtaaaa

SEQ ID NO: 502725 - DNA, 201 bp, Homo sapiens
aaaaaaaatttttttaaatgcaaaaaatacaaaagcaaatagaatttcatctacaaaagttctttttcttttttcttttcttttcttttttttttttttttgagacagagttttactctgccgcccaggctggagtgcagtggcactatcttggctcactgcaacctctgccttccgggttcaagcgattctcctgcctca

SEQ ID NO: 502726 - DNA, 201 bp, Homo sapiens
gggcagatcacctgaggttgggagttcgagaccaacctgaccaacatggagaaaccctgtctctactaaaaatacaaaaattagccaggcgtggtggcgcwtgcctgtaatcccagctactagggtggctgaggcaggaaaatctcttgaacccagcaggcggaagttgtggtgagccaagattgtgccattgcactccag

SEQ ID NO: 502727 - DNA, 201 bp, Homo sapiens
gagcctgggaggtcaaggctaccctgagtcatgatcatgccactgctctccatcctgggtgaaagaatgagaaaccctttcttaaaaaaaaaaaaaaaaaatacagttgaccttgtgtcctgcagtcttgctaaattttgttagttcttttagcttttttacatgttccttaaaattttctatatacaagatcatgtcatc

SEQ ID NO: 502728 - DNA, 201 bp, Homo sapiens
tgggaggcagaggcgggcggatcacaaggtcaggagttggagaccagcctggccaaggtggtgaaacctcatctttactaaaaatacaaaaaaaaaaaaaattagccgggtgtggtggcgtatgcctgtagtcccagctacttgggaggctgaggcaagagaatcacttgaacctgggaggcggaggttgcaatgagccga

SEQ ID NO: 502729 - DNA, 201 bp, Homo sapiens
attattgataaataaatgaccgtgtagtttatgtttttattgtgtgtatatgtcaagaagaaggaatagcttactctattgatatttagtcttggccattygttaagttcttattgcttttttctttaggcggatcctgtaatggtattaaatgatgataataccattgttatcacatcgaatcgccttgctgaaacagga

SEQ ID NO: 502730 - DNA, 201 bp, Homo sapiens
cacactctatgaccaagcatttccagtattttcttattgatctgtaagagttctgaatatattctacatgaaagtcctttgtcagatttatgtgttgaacyatcttctcctactcttgtcttgccttttactctcttctgatatcttctgtctctttttctccttttctttaaacatctgttaaaatatttattagtatct

SEQ ID NO: 502731 - DNA, 201 bp, Homo sapiens
tcatatgattttttttctttctctttttttccttctaatgtgttgaattaatttgattgattttttttttaaatgttaaaccaaccttaaatttctggaayaaacccaacttagtcacgatccttttttaacatattgctgaattcaatttactcatatgtgttttaagatttttacatctatattttgtacatacactgc

SEQ ID NO: 502732 - DNA, 201 bp, Homo sapiens
aaatgtaattggtctaaaaacatcaagtaaaaggcacagagatcatattttcctgcctgtagtcttccacgcttcgttgtattcttaacttaaacatttaytactttctttaggaagccttttctcacccaagatctagtcctgtgggcacaaatagcattctttatttctcctatcattatattattccgttgtgttgta

SEQ ID NO: 502733 - DNA, 201 bp, Homo sapiens
ggagtgcaatggtgcaatctcggctcactgcaacctccgcctcccaggttcaagcgattctcctgcctcagcctcctgagtagacaggcatgtgccaccaygctcggctaattgttttttctgatagagatgggatttcacgatgttggccaggctggtctcgaactcctgacctcaggttatccgcccaccttggtctcc

SEQ ID NO: 502734 - DNA, 201 bp, Homo sapiens
aaaattatttaaaatattatgtaaagttacctttaggttatgtgtatacggtacatatgaaacattaataaacttcgtgtttagacttgggacctgtcccsaggacatctcattatgtatatgcaaatattgcaaatcccaaaaaacccaaaatccaaacacttgtggccccaagcattttggataagggatactcaactt

SEQ ID NO: 502735 - DNA, 201 bp, Homo sapiens
aatgatctaaacttccctgttaaagacaaagattatcagtatgcctcttagaaaaacccaataatatactgtttttaagagactcttcgaggccaagagcrgtgactcacacctgttatcccaacactttgggtggctaagatgggaagattgcttgcggccaggagttcaagaccagcctgggaaacgtagcaagacccg

SEQ ID NO: 502736 - DNA, 201 bp, Homo sapiens
tatccctttttctgttctacttcttattttttaaataaaaaagtttgtgtgtatatattcttttcccctcgtttattcattctagattttgctttctgtcwtccttcctctgctcaaatacaagccctgtgagggcagggatatttctttgttgataaagcacagaaaatagtggaacatagtagatgttcaacaaattct

SEQ ID NO: 502737 - DNA, 201 bp, Homo sapiens
ataaactggtaaaaacctagagtttttatttgtaataaaattttacttgtaataaaaaatttaaacatcttaaaataaattcagtgactgtttcatgttayagtctatcctatattcctggtatccctttttctgttctacttcttattttttaaataaaaaagtttgtgtgtatatattcttttcccctcgtttattcat

SEQ ID NO: 502738 - DNA, 201 bp, Homo sapiens
ctttacccttgctctatatttttttcctatatctctaagtttctttttttgattattttccttttgcttaaaggacactcttccttttgttctgctggtgrtgaattccatatatatttttttcttttcttttcttttcttcgtttcatttctttcattttgagctgggtcttgctctgttgcctccagtggtgtgcagtg

SEQ ID NO: 502739 - DNA, 201 bp, Homo sapiens
cttctaaaactgaggtagtgtaattttatcaggcattcctctataatgattgaggtaatcaggtaaaaggagttgttttcagtaacctaggtacgtttttrcttttcagtatgaaagaatataagactaataagaatgaaaattttgtttctaggtagtttatgctattgcatgtgtcttatatgcaagatttaaaggctg

SEQ ID NO: 502740 - DNA, 201 bp, Homo sapiens
tggctcactgcaaccttcacttcctgagtggctgggattacaggtgtgtgccaccatgcctatctaatttttgtatttttaatagagatgctgttttgccrtgttggccaggctggtctcgaacacccaatccaagtgatccgcccacctcagcctcccaaagtgctgggattacaggcgtgagctactgcgctgggccta

SEQ ID NO: 502741 - DNA, 201 bp, Homo sapiens
tgtcactagggaatattcttctcatctatgttgattttttttttgagggggacttaaagtcagtgtcgcctgataatagcgtagctacacttcttcccttytggttgatgtttcaagatatgtattttccatactttgacttacaaccttttcaatcttttactcatgtatcagttttttttcttaaatccaatctgatgg

SEQ ID NO: 502742 - DNA, 201 bp, Homo sapiens
agtgtaatagatgctgccaagttaaattgtcttctaaagtgtttatatcaatttatactcctattacctacatatgagtatttccccacattcttgccaamagtgtatattctcaaacttttagaaattttgcttaactgatagggtaaaaatggaattttgagatggagtctcgctctgtcatccaggctggagtgcagt

SEQ ID NO: 502743 - DNA, 201 bp, Homo sapiens
caccatgttggccaggctggtctcgaactcctgacctcaggtgatctacccacctcagcctcccaaagtgctggaattacaggcgtgagccaaagttcctyaggcttctaaaactgaggtagtgtaattttatcaggcattcctctataatgattgaggtaatcaggtaaaaggagttgttttcagtaacctaggtacgtt

SEQ ID NO: 502744 - DNA, 201 bp, Homo sapiens
caggtagcaggcactaaaccaaatggaaggaggagtccaagagaggataacttttttcgcagagtgctagtgcttattaggggataaggtttatatattamctcattagaagatgggggcattattcacatttagaaagagaaactgagacttaggaaattaaagtgattgacccaaagtaacacagctaggaagtggcac

SEQ ID NO: 502745 - DNA, 201 bp, Homo sapiens
gccactaagttatgtagcaggggataactggattagcattccattttgccggagtttagagatcatactatacgttgaactgtaagaacaagaacaagatrtatttctaccttcaggagcactgttagttttataagagaagaaatatggattatgtgtccccttcctttatagattgttatttcactgtctttcatttta

SEQ ID NO: 502746 - DNA, 201 bp, Homo sapiens
tgatcccgggaggcggaggttgtggtgagccgaggtcgtgccattgcactccggcctgggcaacagagtgagactccgtctttttaaaaaaaaaaaaaaaattgtattatttggccaggcgcggtacctcacacctctaatctcagcactttgggaggcagaggcgggcggatcacaaggtcaggagttggagaccagcct

SEQ ID NO: 502747 - DNA, 201 bp, Homo sapiens
atttgaaatactgggataactcgggatcagacaaccctatttcacaatatttgtgtttttatcttaggatgcatactatgagggtcctttgggaagaagarcatgactttggggttttttttctaactgtgtaattctggagaaataacttacttaagcctgttttttcatctctaaattctggtgacagtgcctacctta

SEQ ID NO: 502748 - DNA, 201 bp, Homo sapiens
ttgttttgaatttttttggtcatagtattggtatgtgtttagttttataagaaattgcagtgattcctcagggatctagaactagaaataccgtttgaccyagcaatcccattactgggtatatacccaaaggattataaatcatgctgctataaagacacatgcacatatatgtttattgcggcactattcacagtagca

SEQ ID NO: 502749 - DNA, 201 bp, Homo sapiens
ccctgcattgttcaggggtcagctatatttgagttctgacatatttgtccatttatggattcgtcttaccattcatcagtagatcttttttttttttttttgagatggagtcttgctctgttgcctaggctggagtacaatggcgtgatcactgctcactgcaacttctgcctcctgggttcaagcaattctcctgcctca

SEQ ID NO: 502750 - DNA, 201 bp, Homo sapiens
ggaaaaaaaaaaaaaaaaactgccacaaaggacatttattagttaaatttcaggtagttaaaagttatacatggatttttcagggagttgaaagttatacwtggatttttaactgtgttagggagggggctcagcatccctaacccctgcattgttcaggggtcagctatatttgagttctgacatatttgtccatttatg

SEQ ID NO: 502751 - DNA, 201 bp, Homo sapiens
tctactaaaaatacaaaaattagctgggcgtcgtggcgtgagcctgtagtctcagctactcgggaggctgagacaggagaactgcttgaacccagaaggtsgaggttgcagtgagctgagatcacaccactgcactccagcctgggcgacagagcaagactccatccccccccgcaaaaaaaaaaaaaaaaaaaagacata

SEQ ID NO: 502752 - DNA, 201 bp, Homo sapiens
ttcatgtacaaaattatttaaaatattatgtaaagttacctttaggttatgtgtatacggtacatatgaaacattaataaacttcgtgtttagacttgggacctgtccccaggacatctcattatgtatatgcaaatattgcaaatcccaaaaaacccaaaatccaaacacttgtggccccaagcattttggataagggat

SEQ ID NO: 502753 - DNA, 201 bp, Homo sapiens
tttttggctatcaagaataatagtcctgtgaacatttgtatacaagtttttatgtgagcgtaggttttccttttttttgagacagagtgttgctcttgtcrtccgggctggagtgcaatgacacgattttggcttactgcaacctccgcctcctgggttcaagcaattttcctgcctcagcctcccgagtagctgaaatta

SEQ ID NO: 502754 - DNA, 201 bp, Homo sapiens
aatttgcatgtgctgtggccatgagataagacagcttagggagcatgtagagaaatttattttattgtatttttttgagatggagtcttgcactgtcgcccaggctagatgcagtggcgcagtctcagctcactacaacctctgcctcccaagttcaagcgattctccttgcctcagcgtcccgagaagctgggattacag

SEQ ID NO: 502755 - DNA, 201 bp, Homo sapiens
ctgagaatttgcatgtgctgtggccatgagataagacagcttagggagcatgtagagaaatttattttattgtatttttttgagatggagtcttgcactgtcgcccaggctagatgcagtggcgcagtctcagctcactacaacctctgcctcccaagttcaagcgattctccttgcctcagcgtcccgagaagctgggat

SEQ ID NO: 502756 - DNA, 201 bp, Homo sapiens
ttttgagatgaagttttgctcttgtcccccaggctggagtgtgatggtgcgatcttgctcactgcaacctccgcctcctgggttcaagtgattctcctgcytccaagcgattctcctgcctccaagcgattctcctgcctcggcacccaccgcccccctaccccgagtagctgggattacaggtgcctgtcaccatgcccg

SEQ ID NO: 502757 - DNA, 201 bp, Homo sapiens
caaaactagctgatcagtaagcacttctgagatctaaagcctatagttttctcattagccaagagttacttcatttattcaatttttttttttttttttttgagatggggtctcactctgtcactcaggctggagtacagttgtgtgatcatagctcacttcagcctctacctcctgggctcaggtgatcctcccacttca

SEQ ID NO: 502758 - DNA, 201 bp, Homo sapiens
gtctcactattttgcccaggctggtctcaaactcctgggctcaggtgattctcccacctcccaaagagctgggattacagtcgtgagccactgtgccgggsctcactgaggtgtaaagtatgtttcaatatctgatgagtctagttccccctctgctctttttcagagttctcttggggaatccagtttttccatatgaac

SEQ ID NO: 502759 - DNA, 201 bp, Homo sapiens
tattcactttgaaagctgtttttaggaggtcggtgatgtgaatggtatttagaattttagctttttaattatacccattttggaaggctaaacttagtgartgacaggtcattaaaaaagcaaaaaagaaacggcattgttccaggaaaggttcttggttgaaaattacagaccttaattccagccaacttaagcagaaaa

SEQ ID NO: 502760 - DNA, 201 bp, Homo sapiens
aaggttgcagtgagctgtgattgtgccactacattccagcctgggtgacagagtgagaccctgtctttctcttaaaacaaaacaaacaaacactgcccccsccaaccccaaaccaaaaaaaaacccagctagattactgcctcaaacttaatgtgcacacaagccatcttgaaagcttgttgaaatgcaaattctgatttt

SEQ ID NO: 502761 - DNA, 201 bp, Homo sapiens
agcctgggtgacagtgagaccctgtctcaaaaaaaacaaaacaaaacaaaacagttgagaccattctattgacgtatcaacaaaaactttttaaatgaaamattttaaatttacagaaaattaaatagaataattaatccccacattctcatcacctaacttcaacaatcatgaattgatggccagttatatactttacgt

SEQ ID NO: 502762 - DNA, 201 bp, Homo sapiens
tgttatgaatattgtctaatggaatcttcataatacctttatgaggggtaaataatataaactctgttttggagttgaagaaatcccaaagctgagaaaakttaaaaacatgcccaaagtaaaatagctagtaattcaagtcattccttgagaggtagatctgataaccaaaatcaatttctaaaaattgttttagtgatt

SEQ ID NO: 502763 - DNA, 201 bp, Homo sapiens
actgtctctactaaaaatacaaaaattagccaggcgtggtggcaggtgcctataatcccagctacttgggaggccgaggcacgagaatagcttgaacttargaggcagaggttgtagtgagccaagattgcaccactaaactccggcctgggcgacagagcaagactccatctcaaaaataaataaataaataaataaatg

SEQ ID NO: 502764 - DNA, 201 bp, Homo sapiens
attcttttgggtctcataatatttttttcaaagagtgatttttaatcactgggtaggggaaagcctgaaaatacgtttacttatgttttaaggaaaaggaraggtaggatctatgggatttgaaatactgggataactcgggatcagacaaccctatttcacaatatttgtgtttttatcttaggatgcatactatgaggg

SEQ ID NO: 502765 - DNA, 201 bp, Homo sapiens
tgagccgagattgcaccactgcactccagcctggtgacagagcaagactgtctcagaaaaaaaaaaaaaagactatctactatcccctgtctcttgccctytttagttttcccttctggcactggcattgaaacaaattcatgcagatctgtatgccttaagcagtgaaagtaatttgttcttttgccctgaacacgtcat

SEQ ID NO: 502766 - DNA, 201 bp, Homo sapiens
tcctttggcttccttttcttaaactctctgtcctcatggtattattcagtttctttatacattgatcaacaagaagtttggtacctatgcatttctctttkcattattattataacatgtaactttttttctttgagttagagtctcattttgtcacccaggctgtagtgcagtggcacagtcatgttcattgcagcctag

SEQ ID NO: 502767 - DNA, 201 bp, Homo sapiens
gcggaggttgttgtgagcggagatcgtgccactgtactccagcctggtcaacaggagcgaaactccatctcgaaaaaaaaaaaaaaaaaattagctggacrtggtggtgcatgcctataatcccagctacttgggagcctgaggcaggagaattgcttaaacctgggagcagaggttgcagtgagccgggagatcatgcca

SEQ ID NO: 502768 - DNA, 201 bp, Homo sapiens
attgtatactgtcagtagatgaagtttcttatttatcccccttttaaaagaatataaccacatgcatgatttttcttttgaggacttcaaattactacctstacagtcgattttttttttcttggtatctaagataatgtgggaaatcttgagaaatcctacttttttactttttgatgttgtgtaaggatctcagctatt

SEQ ID NO: 502769 - DNA, 201 bp, Homo sapiens
acagttttgacatgtttttctcaagaacactttgtggttgactgttgtaagctttccaactaaacagtgacattttggggaaagccccactcttgtaaatmtccttaatttccttgcatgtcttgttcagacttgtctaggggcgtttgcatggcacatgtaaggggtgcagatgctggagtgtacatttttcatatcttt

SEQ ID NO: 502770 - DNA, 201 bp, Homo sapiens
tgtaatcccagctactcgggaggctgaggaaggagaattgcctgaacccaggaggcggaggttgcagtgagcagagatcatgccgctgcactccagcctgkgcaacagagcaatactcagtcttggaaaaaaaaaaatgatgttactgtgaaattcttgtatcagtttcctggtacacatatgtaagattttctctgagga

SEQ ID NO: 502771 - DNA, 201 bp, Homo sapiens
aagcaagctgtttttctattgaggtaacacctggctggtgataataaaattgtcatcaagtaaaaggattcttacttttgtataaaataggaatatgcatstatatgtccaaaacaggtttttaaaattttactaatttatttatttttgagacagggtctcactccagtcacctgggctgcaatgcggtggtgcgatctt

SEQ ID NO: 502772 - DNA, 201 bp, Homo sapiens
acattcagtcttaatcttcgtagaaattgtgtggaaaagcatacatttttataacgtgtactcgtttaccaggctttattgagtgcctgctatgtaatagmccttcgaaagcatagagaagtttatgttacctaagcaataaatatcaaagatgtttaacagatgtcacaatgccaaaggagggttgggttattgttttac

SEQ ID NO: 502773 - DNA, 201 bp, Homo sapiens
gatggaagtgtttaagtgcagtaggtcagtgccagtgagaaaaaaaataaaatcatacaaaaaaagaaatattgaataaattaagaaaaaggtatatcatraatacataaaatatatgtagacactagtctattttatcatttactactataagatatatacaaatctattatgaatgattaaaatttatgcacacactta

SEQ ID NO: 502774 - DNA, 201 bp, Homo sapiens
gcccaggctggagtgcagtggcgtgatctcggctcactgcaacctctgcctctcgggttcaagcgattctcctgcctcagcctcccaagtagctgagattmcaggtgcccgccaccatgcccggctaattttttgtatttttagtagagacggggtttcacgtgttagctaggatgttctcgatctcctgacctcgtgatc

SEQ ID NO: 502775 - DNA, 201 bp, Homo sapiens
ggcatgtgtgcctgtttgacagtgtcctggaaattcttttctagacggggagtgcatgttgaaggtgctcacacgtggtttcctaaaatcctgcaaagtgrcagttaggacttttgtttgtttgtttgtttctttgtttctttgagacggagtctcactctcgcccaggctggagtgcagtggcgtgatctcggctcactg

SEQ ID NO: 502776 - DNA, 201 bp, Homo sapiens
tgggccactgagtgcccagacatttggtcaaacattatcttaggtgtgtctgtgaggatgtttctggatgaaattaatatttgaagtgattgagtaaaacrgatacccttccgagtctgggtgagcctcatccaatcatttgaagacctggctagaacaaaaagactgagcaagagggagcttctcctgcctgactccttg

SEQ ID NO: 502777 - DNA, 201 bp, Homo sapiens
gcctcaagtgctctgtctgactaggcctcccaaagtgctgggattacaggtgtgagccaccgggcctggccttcacttacttctttttcctttttattttycttctgagacagggcttggctctgttgtcaaggctgaagtgaagtggtgcaatcacagctcactgcagcctcgacctggtaatccttccacctcagcctc

SEQ ID NO: 502778 - DNA, 201 bp, Homo sapiens
caggctgtagtgcagtggtgcaatctcagcatactgcaacctccacctcctgggctcaagccacccagccaattcagcctctggagtagctgggactacargcgcctgacacctcacccagctcttttttttttttttttttttgtagagacaaggtttggccatgttgcccaggctggtctcaaactcctgggctcaaat

SEQ ID NO: 502779 - DNA, 201 bp, Homo sapiens
gccttgtggctgggtatgctggctcactcctttaatgccagcactttgggaagctgaggcaggcagatcacttgatcccaggagttggagaccagctgggyaacatggtgaaaccctgtctctacaaaaaatacaaaaaattacttgggctgtggtggcacatgcccatagccccagttacctgggaggccgaggtaacag

SEQ ID NO: 502780 - DNA, 201 bp, Homo sapiens
cagggtgagcactcaaaatgcatctagcatgactgaggaactaaatttttaattttatttaattgtaattaaattaacttgagaaactgctacttgatcasctattggaaaacgttcaagtatgttttgaacaacttgggtatgtgagtctgtatttttcatccgtcattttatgaaatctaagtatatatcaaatatttc

SEQ ID NO: 502781 - DNA, 201 bp, Homo sapiens
ataaataaataaatggtgatttaaatgaaagtacattgtattttctgcctctgtgagttctctactggagacagtttgaatgaattgttaggagtaggcgrctttgagtcatgcttccttacatccgtctccagattcatattttggatgctttctttcattttgtgtatttttgtatttcctgccccattagcttcataa

SEQ ID NO: 502782 - DNA, 201 bp, Homo sapiens
cctaaatgttttggagtctaattctggacttttcattctgttccattggtttcctgcctactcttgtaccagcaccactttaattactgacgtttttcttytgttatgttttgttttgttttgttttttgttttgagacagggtctcgctctgttgcgcagggtggagtgcagtggcacaatcagagctcattgtagcctt

SEQ ID NO: 502783 - DNA, 201 bp, Homo sapiens
atttctgtgttaatatgcatttgagtgtaatagatgctgccaagttaaattgtcttctaaagtgtttatatcaatttatactcctattacctacatatgartatttccccacattcttgccaacagtgtatattctcaaacttttagaaattttgcttaactgatagggtaaaaatggaattttgagatggagtctcgctc

SEQ ID NO: 502784 - DNA, 201 bp, Homo sapiens
aaccaccgctcccagcctagcttccagtatttctttttttttcttttttgagacagagtttcactcttgttgcccaggctggagtgcaatggcgtgatctyggctcactgtaacctctgctccccaagttcaggccattctcctgccttagcctcctgagtagctcggattacaggtgcacgccaccacacctggctaatt

SEQ ID NO: 502785 - DNA, 201 bp, Homo sapiens
ggttgcagtgagccgagagcgcgccattgcactccagcctgggtgacgagaatgaaactccatctcaaaaaaaaaaaaaaaaaaaaaaaaaaaaaatatatatatatatatatatatatatatatatatatatatatggatcacagttgtatttcagcatagctaattcatcaaaagttagctcttttttctcatgtagca

SEQ ID NO: 502786 - DNA, 201 bp, Homo sapiens
gaggttgcagtgagccgagagcgcgccattgcactccagcctgggtgacgagaatgaaactccatctcaaaaaaaaaaaaaaaaaaaaaaaaaaaaaatatatatatatatatatatatatatatatatatatatatatggatcacagttgtatttcagcatagctaattcatcaaaagttagctcttttttctcatgtag

SEQ ID NO: 502787 - DNA, 201 bp, Homo sapiens
aggaggttgcagtgagccgagagcgcgccattgcactccagcctgggtgacgagaatgaaactccatctcaaaaaaaaaaaaaaaaaaaaaaaaaaaaaatatatatatatatatatatatatatatatatatatatatatggatcacagttgtatttcagcatagctaattcatcaaaagttagctcttttttctcatgt

SEQ ID NO: 502788 - DNA, 201 bp, Homo sapiens
gaggaggttgcagtgagccgagagcgcgccattgcactccagcctgggtgacgagaatgaaactccatctcaaaaaaaaaaaaaaaaaaaaaaaaaaaaaatatatatatatatatatatatatatatatatatatatatatggatcacagttgtatttcagcatagctaattcatcaaaagttagctcttttttctcatg

SEQ ID NO: 502789 - DNA, 201 bp, Homo sapiens
aaatacaaaattagcctggtgtggtggcgcatgcccataatcccagctactctggaggctgaggcaggagaatcgtttgaacccgggaggaggaggttgcrgtgagccgagagcgcgccattgcactccagcctgggtgacgagaatgaaactccatctcaaaaaaaaaaaaaaaaaaaaaaaaaaaaaatatatatatat

SEQ ID NO: 502790 - DNA, 201 bp, Homo sapiens
atagtcaaagtactatttgttttaaaggcttgcctcccaaacacttcatttggtcagactcatttataacttaaaaatttgatcttggttttagataaacrattaatactaaaggatttattgttcttgcagcttcacttgtcttaataatgtgtagcattgtattataacttgtatatgtgaatgaatggttttcagaag

SEQ ID NO: 502791 - DNA, 201 bp, Homo sapiens
ctagaaacatagagcatcttcccctttaaagttgctggtagaagctggatcgggaattggttaggggagaggtagttgtagttagtttttttttttttttwaatttcagtagttttttggggaacaggtgtgtttggttacatgaataagttctttagtagtgatttatgagattttgatgcacccatcacccaagcaata

SEQ ID NO: 502792 - DNA, 201 bp, Homo sapiens
ccatcactacagtcaattttagaacattcattatccccaaaagaaccctgtacccattagcagttattatctttactttttaaatgcgggaaataaacctrcatagaaagaccagaaagactttatgctcttgaactgtataaactgactccagcctacctgttgtaccttttgttgttgttgttgttgttgttgttgtta

SEQ ID NO: 502793 - DNA, 201 bp, Homo sapiens
ctcaaatgatccacccaccttggcctcccagagtgctgggattacaggcatgagccactgtacctggcccagtttcaatccacagagttcattctaacttyttccatttccatatttgcatctcccttctctgccaagtgagaactctgggtcccattgcctttaataaatcttttttaaaaaagaattttttttttttta

SEQ ID NO: 502794 - DNA, 201 bp, Homo sapiens
acaagttaccttttggaagtatacaactcagtggtttttagtatcctcacaggttacgtgcacccatcactacagtcaattttagaacattcattatcccyaaaagaaccctgtacccattagcagttattatctttactttttaaatgcgggaaataaacctacatagaaagaccagaaagactttatgctcttgaactg

SEQ ID NO: 502795 - DNA, 201 bp, Homo sapiens
ttttattaatcatattgtcaactactggcagcacacgttttaaatgctgatcatagatgatagtattatctaacttttttgtgttttcactaggtgctgtrtattcttaggtcgttacctgtattaactcagtaactcttgtcatcaaacctatggtctaggctctattattattatctccattttataaatgaggaacta

SEQ ID NO: 502796 - DNA, 201 bp, Homo sapiens
tactgtagttatgtgaccagtaggactactttcatagttaatatctggcaagttaatgatgttaatacacagaaaacctcaatagtaaatagacacgaaaygctgatggtggaagtgccaacagagtttccttgtcacactttaggcctgtactgtccaatccagtaaccatatgcagggtgagcactcaaaatgcatcta

SEQ ID NO: 502797 - DNA, 201 bp, Homo sapiens
tttattagagaagtaaagaaagaaaagaatggctactctgtaggcagagcagccccgagggctgctggttggctaatttttaaatttttttgtagagacarggtctcacttcgttgcccatgctggtctcgaactcctggcctcaaatgatcctcctgccttggcctcccaaagtgctaggattgcaggcttgagtcactg

SEQ ID NO: 502798 - DNA, 201 bp, Homo sapiens; identical to SEQ ID NO: 344484

SEQ ID NO: 502799 - DNA, 201 bp, Homo sapiens
ataaaagggcttacactatgaagtagtattggctaaaacatccctctcacctggagtcctcatttttcagaggcaatcacttttgactctttctgattttrgttttcctggcatttactttcatttctcaaatatacttttatcactctttcttcgtttattaatttatacattctcctttgatatcctgccacaataaat

SEQ ID NO: 502800 - DNA, 201 bp, Homo sapiens
cttgaccttgtgacctgcccaccttggcctcccaaagtgctgggattacaggcgtgagccactgcacccggccccagattgctacttctaaaaattaagcmgaatgtaagagggggaagaaatattgtcactgtcacagtatacatactgagagctatgaaaccaatgagtaaagatcagttggccgggtataaaaaactt

SEQ ID NO: 502801 - DNA, 201 bp, Homo sapiens
gagcgagactccgtctcaaaaaaaaaaagaaaaagaaaaagaactaaaaaacaaaccttagctggatgttggtcatgtgcctctagtcccagctgcttgggagactggggtggaagaatcacttgagcccgggaagtcaaggctgcagtgagccatgattgtgccacacacttcagcctgggtgacagaagcagaccctgt

SEQ ID NO: 502802 - DNA, 201 bp, Homo sapiens
taaatcagaaaatatttatatattacagcttactgttaggagccctagtatagcattttagatcactttttatgtacttttagcctgcgtacgaagtcctsttcctttataaccctttttacttgacacctgaaataaaacactggcttctagttctgttttctcccttaacaggatgtattactgagatttattaatttt

SEQ ID NO: 502803 - DNA, 201 bp, Homo sapiens
attcctttggcggaggagaggcgctctgctttttagagtttccagtttttctgctctgttttttccccatctttgtggttttatctacttttggtctttgrtgatggggatgtacagatgggtttttggtgtggatgctgtttctgtttgttagttttccttctaacagacaggaccctcagctgcaggtctgttggagtt

SEQ ID NO: 502804 - DNA, 201 bp, Homo sapiens
cattagaaaaaggatgatcataggagttttcctatggacaaattttaaaaaatttaaaccctattttgaaaaagaaactggtgtctttataactgatttaractggaatagtagatgttctaaattcttttgaggaaaatagtatagaagttagccaatgttgttcatagctataaatcagaaaatatttatatattacag

SEQ ID NO: 502805 - DNA, 201 bp, Homo sapiens
tcctgtagcttggagtagtttgatcgtctgaagccttcttctctcaactcgtcaaagtcattctccgtccagctttgttccgttgctggtgaggagctgcrttcctttggcggaggagaggcgctctgctttttagagtttccagtttttctgctctgttttttccccatctttgtggttttatctacttttggtctttga

SEQ ID NO: 502806 - DNA, 201 bp, Homo sapiens
tcctcctgtagcttggagtagtttgatcgtctgaagccttcttctctcaactcgtcaaagtcattctccgtccagctttgttccgttgctggtgaggagcygcattcctttggcggaggagaggcgctctgctttttagagtttccagtttttctgctctgttttttccccatctttgtggttttatctacttttggtctt

SEQ ID NO: 502807 - DNA, 201 bp, Homo sapiens
tgcagcagctgctccagatgggctgccaccaccatcataatcccagctacttgagaggctaaggcgtgagaatcgcttgaacctgggagggagaggttgcrgtgagtggagatcgcaccactgtactccagcttggacaacagagtgagaccctgtctcaaacaaaaatattagctgagtgtggtgccatgcacctgtagt

SEQ ID NO: 502808 - DNA, 201 bp, Homo sapiens
attatgatgttagctggttattttgctcgttagttgatgcagtttcttcctagcctcgatggtctttgcaatttggcatgattttgcagtggctagtaccrgttgttcctttccatgtttagtgcttccttcaggagctcttgtagggcaggcctggtgatgacaaaatctctcagcatttgcttgtctgtgaagtatttt

SEQ ID NO: 502809 - DNA, 201 bp, Homo sapiens
gggggcagggagcttcttaagaccctgagaacacagggaagcatgggtccaaagctgcagctgggtagctgcagctgcacccaggagcgctgggctcccasccctccaactcagtaggtggcccggcttccacctgttcctggcctccacccattctgtggagcatgcagccctggccacaacttccccactgcagtcggc

SEQ ID NO: 502810 - DNA, 201 bp, Homo sapiens
tctggtcctggactctttttggttggtaagctattgattattgccacaatttcagagcctgttactggtctattcagagattcaacttcttcctggtttaktcttgggagggtgtatgtgttgaggaatttatccatttcttctagattttctagtttatttgcgtagaggtgtatatagtattctctgatggtagtttgt

SEQ ID NO: 502811 - DNA, 201 bp, Homo sapiens
agactagcggaggaatcactggactctttagcagagttttttgaagaccttgcagacaagccatacacgtttgaggactatgatgtttcctttgggagtgktgtcttaactggtaaactgggtagagatctagcaacctacgtgatcaacaagcagacaccaaacaagcaaatctggttatcttctccatccagtggactc

SEQ ID NO: 502812 - DNA, 201 bp, Homo sapiens
cagaagctctttagtttaattagatcccatttgtcaattttgtcttttgttcccattgcttttggtgttttagacatgaagtccttgcccatgcctacgtmctgaatggtaatgcctaggttttcttctagggtttttatggttttagatctaacatttaagtctttaatccatcttgaattaatttttgtataaggtgta

SEQ ID NO: 502813 - DNA, 201 bp, Homo sapiens
gggaggccacggatgggcctggaaaaagcacctcgagttctcactctgggccatggacttcaaccagaactggcagccttatccccccaggcccgcctccyatgctcgtcattacccaaagtctggagagggctgaggcagcagggggcttgtgaatcagtgccgtcatgagcacacccagtcagttgtgacaggtcccag

SEQ ID NO: 502814 - DNA, 201 bp, Homo sapiens
aatcacttttgttattgttaaatttttctggtatttctccatttttggcttttatgaccattattttgcaaatgtctacaacgtttttgaaattatagtawgaatatactaaatggaaatattttgaaacatttatggtttgtatagttatactatcttaaggctcggtatttttctcacttttttttaattcaaagaaaa

SEQ ID NO: 502815 - DNA, 201 bp, Homo sapiens
atttgatggttaccatattactgtatcagtttgctatggctgccataacaaggtgccatagactgagtagcttaaacaacagaaatgcattttctcacagytctggaggccggaagtccaagatcaaggtgtcagcaggttcagtttgttctgagccctctctccttggattgcagatggatgcctccttcctgtgccctc

SEQ ID NO: 502816 - DNA, 201 bp, Homo sapiens
gcttattgaatataaggatcagctaactatggcctgtttgcatgccagattgggcccatggcctgtttttgtactgtgtggcagtttagaatttttctttytttttttttacattttcaaagggttgtaaaaagggaaaagatgaatatgctacaggcaccaaatgtggcctgcaaagcttaaaatatttaccatctggcc

SEQ ID NO: 502817 - DNA, 201 bp, Homo sapiens
tagcctgtgtaatcttaattcatatctcttcaaaagcctggtgacaactgtcatgtaggaccagggaatagtctgttaatgctgtttgaattttctctctytttttttttttttttggaggtggagtcttgctctgtcgcccaggctggagtgcagtggtgcgatctcaactcactgcaacctccacctccacttcctggg

SEQ ID NO: 502818 - DNA, 201 bp, Homo sapiens
ggtctcgaacacccaatccaagtgatccgcccacctcagcctcccaaagtgctgggattacaggcgtgagctactgcgctgggcctaatcttgcccttttytggggggggtggggggttataattaaaaccattctattatttgacttcattagtacttacacagtgttttacattttttttttttttttttttgagacgg

SEQ ID NO: 502819 - DNA, 201 bp, Homo sapiens
aatattttaattcctttaaatgaaatcaaattctgcccttgggggcaggtgtggtggctcgtacctgtaaccccagcactttgggattctgaggtgagagsgtagtttgagctcagactagcctgggcaacataatgagaacccgtctcaaaaaaaaaaaaaaaaattctgccctgggaccttctccccctcaattctacc

SEQ ID NO: 502820 - DNA, 201 bp, Homo sapiens
tatgactggactgagaaaaactgggtgtactcccacgattgcgtgtccctccatgatgtgctcgctgcagagctcactaaagccttaaaaaccaaactggrcttgtcttccttggcctattctggagaagacgcttgatgcccagcccggttttaaggatattaaaagctgtcaggccaagaccccagcttcattatgcag

SEQ ID NO: 502821 - DNA, 201 bp, Homo sapiens
ccaagacacatttggcaatatctggagatatttttagccgtcaaaacaagtaggggggtgatgcaactggcatctagtgcgtagaggcgagggatgccgcyaaacactctacagtgtaccagacaacccccacaacaaagacttatttggcccaaaatggcaggagtgagaaggttaagaaactctatgttagggagtttt

SEQ ID NO: 502822 - DNA, 201 bp, Homo sapiens
aagaaaaaacaaggggaaaaaccccaccagttctgtctagctggggtctggccttgcctttgtcttcttagtttggggcctccctgcatttagcaattgcwttctttttatgtgtgttgtgtgaccagttagtatcaccagattcatcttagattgaaaaaaaaaatccccagatggaagtaattgcattcataagccctt

SEQ ID NO: 502823 - DNA, 201 bp, Homo sapiens
gatacaaggtcaatgcacaaaacttaattgtagttctatatagtagcaatgaacaactggaaacaaaaatttaaaaaaaatcacaatagccccatccctgcaaatgaaatatttaggtataaatctatcaaaatatgtacagtatttatgtgctgaaaactacaaaactgatgaaagaaattaaatatgacctaaataaat

SEQ ID NO: 502824 - DNA, 201 bp, Homo sapiens
ttccaataattctgattcacagccagatttaggaaccaatgctatagaccatacgacaactgcactgcccactttatcccctcccaggaatgtttttgacwgaagcatgcctttttaatgtctgtcttcttgctcctcaccctctaactcccccaggcctcccagttcaggccaagaaacatgctacatcagccaagaata

SEQ ID NO: 502825 - DNA, 201 bp, Homo sapiens
cctcagaactggggattctgacagcctgttgtaccatctccactggaaagatgttaagggcatttgatgttcacgcatcatcatgagcactctttgagccyatgtgtccccagtctcctctctacacatccccctctctacttttttggtcctaatgttcaacttgcaaaatctgatatgtggccttcctctgttataccc

SEQ ID NO: 502826 - DNA, 201 bp, Homo sapiens
catgtctgcgtcctctaaacaaccatgaatctagaagtcagatgggaaatggggagatgttggaatgtccagaactaaatcaaactattgacttaagtccrcagggcaataaattacagtctggtgaatgtctactcctgtcacatagggcctaaagtttttctgccttatgtgaaagatagtcttattcttttttcagaa

SEQ ID NO: 502827 - DNA, 201 bp, Homo sapiens
attttcatcccttttcttgcagagcctccttggccatccacagactgaacctagctctggcatactttgaaaaggcaattggcgatgttattgctgccaasggtgataggacgtcagatctgatcagcctgtacgaggaagctgctcagatagagcagctgaggaggaaccacaaccaggccatccagtacttgcagcagg

SEQ ID NO: 502828 - DNA, 201 bp, Homo sapiens
caagagctttaagaatgggtagggtaaaggggggccagcaaagaaaatagaagactcaggaggacccgtgtcatcaaagccaagggaggagagagggtttkgaaaagaagtacaacagtggtttcaacagttcagatggtagaggaaggtcaaataaggtaatggctgaggagagacccatggatttggcggttggtaggt

SEQ ID NO: 502829 - DNA, 201 bp, Homo sapiens
tgagggagccagcaataatacctcttcaccttccctaaagaaagcacattgggaaggcaaatgagtacaagcacctttgtcctatgaataatttccagtgyatacttaatttatttttgctgtatagtaagtagttaacagtgagagctttgctgaaagacaattagcctagaccttttaaaaatgtcaatgttatgaaag

SEQ ID NO: 502830 - DNA, 201 bp, Homo sapiens
tacatttacagcacatcttaattcagaccagcaatatttcatgtgcttgatagccacatgtggctagtagttaccaagttggatagcatttttttttttttgagacagagttgtggagcaccagattctgttgctgtttggggggcccctatgtaacctgccacaatccctggtggactgaacaaaggaggggtgaatgtg

SEQ ID NO: 502831 - DNA, 201 bp, Homo sapiens
tcagatttcaaaaatgccatttcactaatgtaatacagattctgactttgatgaatttgagtatacgtatgaggatacctgttcagcaggcaaggctccaraacccattttacatgtgggaaaactgaagttttatgatttactgaagttaactcacccaggaagagacaaaggtagaattttaatctgggtctctctgac

SEQ ID NO: 502832 - DNA, 201 bp, Homo sapiens
tgcctggatttaaaactcaggctccatcactcagctctctgacctaggtgaagtgacttaactccctcagcctctgtttattcatcagtaaaatattagtrctttcctcaaaaagtacgttttctgaaagttaatgagatgataaataatacaagacttagatcagggcctggaaggtcttagcaggtcttaaatgcccaa

SEQ ID NO: 502833 - DNA, 201 bp, Homo sapiens
aattgctagtttgtttattagatcacaatagcatttttcatcttacaattcagatactggagatcagataggtcccagataaaactaggcaagaaccacaytgtttcattctttgctagcattaaccgaattatttttttttcagattggtttcattcttttgatgaaactgagcaactctgtccgacaagatttagtttg

SEQ ID NO: 502834 - DNA, 201 bp, Homo sapiens
tgcctggcagagtatgcgctcaataagtgttcgtaaaacacccttccttccccttcttcacagaagattgccttttgctttcagggcaacagttcagaatwtttgaaatcagagatgattgttagccactattaccataggttagttttgagattttgaatctttgaacatatctaaagtatattttgtgctctgaaggta

SEQ ID NO: 502835 - DNA, 201 bp, Homo sapiens
tcctcaccctctaactcccccaggcctcccagttcaggccaagaaacatgctacatcagccaagaatacactgttgacctggaaggcaaatacgacctcarataaggagaaagaggaaatcctggaagctctggtcaagctgtactacactctgggcgtggcctggctcctgcagaaccgatatccttccattcctagctg

SEQ ID NO: 502836 - DNA, 201 bp, Homo sapiens
aatgggactgaaaaggtaatttgggcccagatatcagggagtgtggagagttattaaaaggtttgaagtgaggtggtaataatcaagcttgtgttataaaatgagagactccaggatgggttggactgggtagagaaagaagaggcaaagaccagttaggccgttatcctgcccagatgagagtcgatgagggcattgggt

SEQ ID NO: 502837 - DNA, 201 bp, Homo sapiens
cttcttgctcctcaccctctaactcccccaggcctcccagttcaggccaagaaacatgctacatcagccaagaatacactgttgacctggaaggcaaataygacctcaaataaggagaaagaggaaatcctggaagctctggtcaagctgtactacactctgggcgtggcctggctcctgcagaaccgatatccttccatt

SEQ ID NO: 502838 - DNA, 201 bp, Homo sapiens
agctttcgcgaggcaccgctttggcgcccggaccgaggtgcgccagggtcaggaggccgacgcagcgggaggaagccgcgccgtcgggctcagggagctgrgaggctggttccggggcgtggtttctccgccttgagccaggtgccctttgcgcactcgcgcgttctcttagagcctccgcggcagagaggctctcagagc

SEQ ID NO: 502839 - DNA, 201 bp, Homo sapiens
cttaggaaacaaatgaaatgtagtgcaggtgtttgaaatgtaaacttgtgacaagatctcagttccgctggtcctttcctgagtttggtttgcagttaagktgcttgctatctgattctctttaacctgttgtttctcacctcacctagtgtctgatgattcaaatctttgtatatggaggtgaacacagtagaagtaggg

SEQ ID NO: 502840 - DNA, 201 bp, Homo sapiens
tcatagaaggaggaaaaattaggagatctaattcagaccttaggtggtatgagtttctttaggtacttggaaattaatttttctttctgtaaattacaacraaaccaaacctaccaagaaagtccatataaggggaaaagaagagtcttttaaggactttgctgtggcagaaggtttttctttccctgaaacaagcccata

SEQ ID NO: 502841 - DNA, 201 bp, Homo sapiens
taatatgtttaagtgtagcaaggtcacaggatacaaggtcaatgcacaaaacttaattgtagttctatatagtagcaatgaacaactggaaacaaaaattwaaaaaaaatcacaatagccccatccctgcaaatgaaatatttaggtataaatctatcaaaatatgtacagtatttatgtgctgaaaactacaaaactgat

SEQ ID NO: 502842 - DNA, 201 bp, Homo sapiens
tcaaagctgaccttacctgattcttggtaggaagaagatgcaagccagccccatccgtatcccaactgttagcaatgacatcgactgggatttctgcttcyatatgtaagtatcacagcattttgacatcacaggtacttactgggctgaaacactgggacctcctgcttaaggcaaacctgggtgaggagctttgcatga

SEQ ID NO: 502843 - DNA, 201 bp, Homo sapiens
caaagctgaccttacctgattcttggtaggaagaagatgcaagccagccccatccgtatcccaactgttagcaatgacatcgactgggatttctgcttccrtatgtaagtatcacagcattttgacatcacaggtacttactgggctgaaacactgggacctcctgcttaaggcaaacctgggtgaggagctttgcatgag

SEQ ID NO: 502844 - DNA, 201 bp, Homo sapiens
gaatcagaggtaataaaattttattttgattttagaaagtctatgtttatgggtgaattatcccatcttgtgaattcctggaagccatttttccatttgctttttaaaaaaaattagacaacagcacgacatagtaatgggtttaatgagtggtcgtcaatgaaatctgatgggtaaaatgcaggataattggagtttatt

SEQ ID NO: 502845 - DNA, 201 bp, Homo sapiens
caccaataatatctctaacagagatagagttattggaacacaatgtagtacagaaatagacctgtataattatggccaattaatttttgataaatgtgcaraagtaattcaatatggaaaggatagtctttaaaacaaatgatactgcaacaactggataccacatgccaaaaaaaaattggactcttactcatgccatac

SEQ ID NO: 502846 - DNA, 201 bp, Homo sapiens
tcgtttaccactgagagttggttgctttgcttaaatccaacacgccgtcagacctgcaaaaacaatatctgagttaagtaggtgaccatagttttgatgayccaggaactgtaaatgtgcttgctttgagacataaaggccagggattttggagaagtagggtggagttgaaattaggggaaagaaatttaacttagacat

SEQ ID NO: 502847 - DNA, 201 bp, Homo sapiens
aatgttaatctcctttggcaacaccctcgcagacacacccaggatcaatactttgcatccttcagtccagtcaagacactcagtattaatcatcacacccrtgtatcagaaatggacagatacacaggcagaaaatcagtaaggacataatcaaattcaacagcaccatcaatcaacttaataaaattgacatctattgac

SEQ ID NO: 502848 - DNA, 201 bp, Homo sapiens
cctcctgagtagctgggactacaggcacacaccaccatacctgcctaatttttacatttttgtagagatgcgttctcattatgttacctaggctggtctggaactcctgggctcaagtgatcctcctgcctcagcctctcaaagtgctgggattacaggcatgagccactgtgcccaggtagagtccattctttaaccatt

SEQ ID NO: 502849 - DNA, 201 bp, Homo sapiens
gtgaattacaagtctctgagaacgacctaacacttgctttgggcaggtaagatctgggcttggagaagctgaggcttttatgaatgaggcttggaattacrtgatataagggagaaaaatatttagagcaaaaaaacccagaaactcaaatgataataaaagaggctcatatttaccaaatggatacactgggcattttgt

SEQ ID NO: 502850 - DNA, 201 bp, Homo sapiens
taaatacagaggccaaggtgagaagatcacttgaagccaggaattttatactggcttgggcaacatagtgagaccccatctctaccacaaaaaaaaaaaaraagaagaagaagctgggtgtggtagcatgtgcctatagtcctagctactcaggaggctgaaataggaggattgcttgagttaagggttccagtctacaga

SEQ ID NO: 502851 - DNA, 201 bp, Homo sapiens
gtccagtgagactgagctaaggttatgactttatttttgctatgaaatctaataaaaattatactagccaacatttattgagaacttaccacgtgatgagyaccgtgccctgtgctttgcatataccatctcacttaatccttcccaaaccctaatcagtgggaattatatattccttctacgaatgaaggtgaaattact

SEQ ID NO: 502852 - DNA, 201 bp, Homo sapiens
ttgtatgtagcagagcagctccctcactgcagtctatggaaagtcagccctggacacaggtttgtatttttaaatctttaaaaagaaaagaaaagaaaaamcaaggggaaaaaccccaccagttctgtctagctggggtctggccttgcctttgtcttcttagtttggggcctccctgcatttagcaattgctttcttttt

SEQ ID NO: 502853 - DNA, 201 bp, Homo sapiens
ctttggtctcccattccagtgattttttcatggcatgatgcttcttcctcgaaagagaacttagtatttgctgtggtcagcccatggtgaactctaaaaaatgctgactaaatggatgttttggaagcatcaggggaagtttccttctaccattgcttgcttctgtatatttgagcagggggcaggtaaaacatgaagttg

SEQ ID NO: 502854 - DNA, 201 bp, Homo sapiens
ggccagaataaccaacaacatggaagaacaaagttggaggactaacactacccaacttcaagacttactaaaaaaccacagcaatgaagacagtatagatragaaatcatcttactgtagtcacagtggctattatgaaaaagacaaaaaaacaaaaacagatgttggtgagggtgcagagaaaagggaactctcatacac

SEQ ID NO: 502855 - DNA, 201 bp, Homo sapiens
  misc_feature (1)...(201): n = A,T,C or G
tgtactacactctgggcgtggcctggctcctgcagaaccgatatccttccattcctagctgcgtttagtgttcggggccacaggccacacatgccagatgngtcatctcatacaggagggtgggagatggaaccaaggccttgtagatctgttccaacatcaaggccctccatgagcctctcctctccatctagaagggtg

SEQ ID NO: 502856 - DNA, 201 bp, Homo sapiens
tattcaacatagtactggaagtactagccagagcagttaggcaggaaagataaataaaaaacatccaaatatgaacagaagtagaattatttctgtttgcwgaatgacatgatgttatgtagaaaaccctaatgatcacatacacacacacacacacacacaaacacacacacacaacctgtttgaactaataaactcaac

SEQ ID NO: 502857 - DNA, 201 bp, Homo sapiens
taatctgataaaaggcatataccaaaaaccctgcagctgatttcatgcttagtggtgaaagactgagtaccccttaagatcaagaacaaggcaaggatgtkcactctcactgctcctattcagcagagtactagaagtccagcaaatgcaagaaggcaagaaaaataaaatggtccctatttgcagtcaaaatgattgtct

SEQ ID NO: 502858 - DNA, 201 bp, Homo sapiens
ccactgaagaattttgcaaatggcttgtccaaaatggagaaaaacaggtaaatatgatcaatgcataaacagaattgctagtttgtttattagatcacaakagcatttttcatcttacaattcagatactggagatcagataggtcccagataaaactaggcaagaaccacattgtttcattctttgctagcattaaccga

SEQ ID NO: 502859 - DNA, 201 bp, Homo sapiens
catttttcaaacctggtgtaaaagattacagttggcatacagctcttaaaggtggcacagacccaaagagtgagcagcagcagcaaaaaaaaaaaaaaaaaggttacacttggcagttattttcttcttgtgcttttctgattttttttttatttaaacattgaacattcactctttaagctttttgtgcttttctgaatt

SEQ ID NO: 502860 - DNA, 201 bp, Homo sapiens
ttaatagggtctgctgcagtaatatttagtatttataatatccctttcaatgctgagcattatagaaaagccccgcaagacaaggttgttgttgatcacastgtgatagttatgatatggattcagagaaagtaaatgagtaccttaaaataatttttcttgctgaacatacaaagtctaggtccctaaacataaggcaag

SEQ ID NO: 502861 - DNA, 201 bp, Homo sapiens
cctgacatacaaattaagacatcatccaagattttttacatattcaatgcatagcttatacgtttttcttttttttcttttcttttcttttcttcttcttyttttttttttttttttttgagacggaatctcactctgttgtccaggctggagtgcagtagcgtgatctcggctcactgcaagctctgccacccaggttca

SEQ ID NO: 502862 - DNA, 201 bp, Homo sapiens
agataatgcattatatgtaaagtgcttagcagagtgcctggccccatagtaatcatgtactaagtaacagctatttttagttttactgaaagctggtcttygactttattaccttctactggcaccactgttgcacgaagcaaacggagataggggctgaatattttgaaaagctactaccaagctgatgtggaaaatatt

SEQ ID NO: 502863 - DNA, 201 bp, Homo sapiens
gctgtacctctataaatcggcttcttctgaactaccacattgctgtcttaatgctaggctttgagggcgacgtgagtttactgcctagctttattccttcmggtttatgttagaaatcatgtccctatcccctagttgggagagctatgcccttcaattttaccttgtttgagatggagaaggttaaatcctgaatccttg

SEQ ID NO: 502864 - DNA, 201 bp, Homo sapiens
acatatatatacacacacatatacatatatacgtatatatacaaatacatatatgtgtgtatgtgtgtgtgtgtgtgtgtgtgtgtgtgtgtgtgtgtgtrtatccatcctggaaggtttcaggatgctatctcttaggtaacaaaaaggctgggatagtaaggcaggaggttgagaacaggtaggcaggcaggtctaagc

SEQ ID NO: 502865 - DNA, 201 bp, Homo sapiens
agtaaacaaacattagaaccagggctgaaactttaggtttttggttccttgaagtgctattttcacttaaccaggaaaaaaatgcctgaccctatcgactygttcagccaataatggctgtgtttgtaaagtcactgaaatatatgacttgaagatacagttcggtgatttcttagagagctctacctgtcatttctatag

SEQ ID NO: 502866 - DNA, 201 bp, Homo sapiens
tgatctcacagtgtggacagtcaaacaaattatttaaaaaattccatttctgtgattagataaggaattattgttaatattttggtgagataatgattttktggtatgtttctaagtccatatcttttagaggtatttacgaaatgtttacagaggcaacaatggaatgtctgatttgcttcaatttaaggtgaggatggg

SEQ ID NO: 502867 - DNA, 201 bp, Homo sapiens
atgtattcactatcaccagaacagcatgggaaaaccctgcccctgtgattgaattacctcccactgggaccctcccatgacacgtggggattatgggagcyacaattcctggtgagatttgggtgaggacacaactaaaccatatcatggaggaagggggaagaagctactgagtttggtttctgaaagcaggtctagagc

SEQ ID NO: 502868 - DNA, 201 bp, Homo sapiens
actccagcctgggcgacagagcgagactctgtagtagtgtgtagaaagagaggggaagagaatagaggactgaagactggagagcaagagctttaagaatrggtagggtaaaggggggccagcaaagaaaatagaagactcaggaggacccgtgtcatcaaagccaagggaggagagagggttttgaaaagaagtacaaca

SEQ ID NO: 502869 - DNA, 201 bp, Homo sapiens
tctgactcaaatcccaagctcatcaaattgtataaagtgaacaggtgcagttctttgtatatcagttatagctcaataacgctgtttttttttttttttttaaatcaaacccaacctagtactcctagccctgaagggcaggggatgccacatcagcagcagaagtgctgggatgacatctggagcccgtattggttgtcc

SEQ ID NO: 502870 - DNA, 201 bp, Homo sapiens
gaactaatatgtttaagtgtagcaaggtcacaggatacaaggtcaatgcacaaaacttaattgtagttctatatagtagcaatgaacaactggaaacaaaratttaaaaaaaatcacaatagccccatccctgcaaatgaaatatttaggtataaatctatcaaaatatgtacagtatttatgtgctgaaaactacaaaac

SEQ ID NO: 502871 - DNA, 201 bp, Homo sapiens
aaacatccaaatatgaacagaagtagaattatttctgtttgcagaatgacatgatgttatgtagaaaaccctaatgatcacatacacacacacacacacayacaaacacacacacacaacctgtttgaactaataaactcaactaaattataggaaacaaaatcagcatacaaaaatcagttgtatttttatatgctaacg

SEQ ID NO: 502872 - DNA, 201 bp, Homo sapiens
agtgtccacatggtatagtggagcctagacttgaacccagattttctgataccagcctagatttttttttagaataggttgtgactgtaagctttctttgrgaatagcccagtgcctctttgctttcttcacttaagcttttatttcagtttcttcacttcagcttttttagtgtctggtccatggaataagtaaggcttt

SEQ ID NO: 502873 - DNA, 201 bp, Homo sapiens
catatatatacacacacatatacatatatacgtatatatacaaatacatatatgtgtgtatgtgtgtgtgtgtgtgtgtgtgtgtgtgtgtgtgtgtgtgtatccatcctggaaggtttcaggatgctatctcttaggtaacaaaaaggctgggatagtaaggcaggaggttgagaacaggtaggcaggcaggtctaagct

SEQ ID NO: 502874 - DNA, 201 bp, Homo sapiens
aaaaaaaaaaaaaatatatatatatatatatatatacacacacatatatatacacacacatatacatatatacgtatatatacaaatacatatatgtgtgtatgtgtgtgtgtgtgtgtgtgtgtgtgtgtgtgtgtgtgtgtatccatcctggaaggtttcaggatgctatctcttaggtaacaaaaaggctgggatagt

SEQ ID NO: 502875 - DNA, 201 bp, Homo sapiens
cagtgagctgagatcatgccattgcactccagcccgggccgacaacagctagactctgtctcaaaaaaaaaaaaaaaaaatatatatatatatatatatayacacacacatatatatacacacacatatacatatatacgtatatatacaaatacatatatgtgtgtatgtgtgtgtgtgtgtgtgtgtgtgtgtgtgtgt

SEQ ID NO: 502876 - DNA, 201 bp, Homo sapiens
ctctgacatcaaagccataaaaagacactacaagaacactacaggtcaatatccctgaatgcatatagatgcaaaaattctcaacaaaacactagcaaacyaaatttaacagcacattaaaagagtcatgcaccatcaccaagtgggatttatccctgggatgtaagaatggtttggcatacaaaaatcaatcaatgagat

SEQ ID NO: 502877 - DNA, 201 bp, Homo sapiens
tgagatatatttcataagaagtatcaatgcatatcgagcaacattgggctcagaggattttgaaacactgagcaccactgaagaattttgcaaatggcttktccaaaatggagaaaaacaggtaaatatgatcaatgcataaacagaattgctagtttgtttattagatcacaatagcatttttcatcttacaattcagat

SEQ ID NO: 502878 - DNA, 201 bp, Homo sapiens
aatcccagctacttgggaggctgaggcaggagaattgctggaacccaggaggcagaggttgcagtgagctgagatcatgccattgcactccagcccgggcygacaacagctagactctgtctcaaaaaaaaaaaaaaaaaatatatatatatatatatatatacacacacatatatatacacacacatatacatatatacg

SEQ ID NO: 502879 - DNA, 201 bp, Homo sapiens
ttgagatatatttcataagaagtatcaatgcatatcgagcaacattgggctcagaggattttgaaacactgagcaccactgaagaattttgcaaatggctygtccaaaatggagaaaaacaggtaaatatgatcaatgcataaacagaattgctagtttgtttattagatcacaatagcatttttcatcttacaattcaga

SEQ ID NO: 502880 - DNA, 201 bp, Homo sapiens
atagcatttttcatcttacaattcagatactggagatcagataggtcccagataaaactaggcaagaaccacattgtttcattctttgctagcattaaccraattatttttttttcagattggtttcattcttttgatgaaactgagcaactctgtccgacaagatttagtttgtacttggaaactgcagagtaggctcaa

SEQ ID NO: 502881 - DNA, 201 bp, Homo sapiens
gagcttgattattagtgttgtctgccctggggtacgggtgggggaacagctggacttctaccacatacttgctgttcaggtatagagaaagagcactgtaytctgagtcaaggcaccttgtgtgtgaatcccaaaaaccatgcgaccttaagtcacttaaacattgagtctcagtttcttcatcttcattcattcctttaa

SEQ ID NO: 502882 - DNA, 201 bp, Homo sapiens
ctgctattaattagtgaaatgaccccgggggggggggggggaaagcagaattaaccaatacactggctgtgcttcgtttaccactgagagttggttgcttwgcttaaatccaacacgccgtcagacctgcaaaaacaatatctgagttaagtaggtgaccatagttttgatgacccaggaactgtaaatgtgcttgctttg

SEQ ID NO: 502883 - DNA, 201 bp, Homo sapiens
gcggtctccatatctaagtatgcgtagtctgtggatttaggatgggttatatatttgagcagttttagtttaatgttaatagcaaaccagagggggaaaayagaacagacacccagccttttctctcaaagctgaccttacctgattcttggtaggaagaagatgcaagccagccccatccgtatcccaactgttagcaat

SEQ ID NO: 502884 - DNA, 201 bp, Homo sapiens
actatgagccagatatcaggttttcagaaacaaatgaggctcagcccctgccgtattggagtttactttgccagcaggcaaagaagactcagaaacaaacyaaagaaacaacaataaaaaaatcaaacaacaataaaaaaaaatcacagtgtactagcagtttgggggaaatttttgaaagccctttggaggctgccttta

SEQ ID NO: 502885 - DNA, 201 bp, Homo sapiens
tcttaggctcaagagatcctcccacctcagcctcctgagtagctgggactacaggcacacaccaccatacctgcctaatttttacatttttgtagagatgsgttctcattatgttacctaggctggtctggaactcctgggctcaagtgatcctcctgcctcagcctctcaaagtgctgggattacaggcatgagccactg

SEQ ID NO: 502886 - DNA, 201 bp, Homo sapiens
cgggttacacttagatctgacctaacaacactgaatcatttggacactatttttttttccttacagtaactccatgaggtagatggtacaggtttccaaayctcagaaaaggaagctgagatcaaagtggcctgccccaaagcaacacaatcagtaaacaaacattagaaccagggctgaaactttaggtttttggttcct

SEQ ID NO: 502887 - DNA, 201 bp, Homo sapiens
ggacttatcttctatttggggagataatagacaaacaatagtaatagctaataaaatattagatagaagtaagtactatgaagaaaaagtaaaataggtartgggatattgagtgatgaagtggtgtctattttagataaggtggccaaaaaaggcctgttgataagaaaagtgaaaatgaaatgagaaagtgaatgacat

SEQ ID NO: 502888 - DNA, 201 bp, Homo sapiens
cttctatttggggagataatagacaaacaatagtaatagctaataaaatattagatagaagtaagtactatgaagaaaaagtaaaataggtaatgggataytgagtgatgaagtggtgtctattttagataaggtggccaaaaaaggcctgttgataagaaaagtgaaaatgaaatgagaaagtgaatgacatggaagagt

SEQ ID NO: 502889 - DNA, 201 bp, Homo sapiens
tttagataaggtggccaaaaaaggcctgttgataagaaaagtgaaaatgaaatgagaaagtgaatgacatggaagagtgtcccaagcagtgggagcagcasgtgcacagccctacattggaagttagctggtgatgttcaggaaccgctggtcagtgtagttctagcagacagagtaggaggaaagggtggtagaaaatga

SEQ ID NO: 502890 - DNA, 201 bp, Homo sapiens
caatcacggctcactgcagccttggcctcttaggctcaagagatcctcccacctcagcctcctgagtagctgggactacaggcacacaccaccatacctgsctaatttttacatttttgtagagatgcgttctcattatgttacctaggctggtctggaactcctgggctcaagtgatcctcctgcctcagcctctcaaag

SEQ ID NO: 502891 - DNA, 201 bp, Homo sapiens
  misc_feature (1)...(201): n = A,T,C or G
gttgataagaaaagtgaaaatgaaatgagaaagtgaatgacatggaagagtgtcccaagcagtgggagcagcacgtgcacagccctacattggaagttagntggtgatgttcaggaaccgctggtcagtgtagttctagcagacagagtaggaggaaagggtggtagaaaatgaagtccagaggtgattggcattgggtca

SEQ ID NO: 502892 - DNA, 201 bp, Homo sapiens
aggtgattggcattgggtcagattatgcagagccttggaagccatggtgaggactttgaattatattaagaagaaaaagcgggaagctgttggaggatttygaacaggaaagtcatgatctaatttatatcttaagatataaacacataaaatacgttttaaaatccataagtttctaataataataacaagctatttgat

SEQ ID NO: 502893 - DNA, 201 bp, Homo sapiens
caattgagccaaagctgatattagacatttgtaaaggttagcagcttgccttaaataattgtttcaatttttccagatgctgttgagatatatttcataaraagtatcaatgcatatcgagcaacattgggctcagaggattttgaaacactgagcaccactgaagaattttgcaaatggcttgtccaaaatggagaaaaa

SEQ ID NO: 502894 - DNA, 201 bp, Homo sapiens
tctgtgattagataaggaattattgttaatattttggtgagataatgattttgtggtatgtttctaagtccatatcttttagaggtatttacgaaatgttwacagaggcaacaatggaatgtctgatttgcttcaatttaaggtgaggatgggtggatgaggggtctagatatgaaacaagattggccaggagtagatcac

SEQ ID NO: 502895 - DNA, 201 bp, Homo sapiens
tgcagagtaggctcaaagtattttagagggactcgatattgatggcaaaagaaaattggcagccatatgtttgcttctaacggttccctctctgacaaactttttttttttttttgagacagggtctctgtcacccaggctgtagtgcagtggggcgatctcggctcactgcaacctccgcctcttgggttcaagagattt

SEQ ID NO: 502896 - DNA, 201 bp, Homo sapiens
aagtaggtcagaaaggaagtggactgggagaggaatgctgagtccagtttttgatgtatagattttgaattgcaatagagaatccacaagttgagaatcgstaatctgaaaatctgaaatccaaaatgttccaaaatctaaaactttttgaatgctgatgtgacgcttaaaggaaatgctcactggaacattttggatttc

SEQ ID NO: 502897 - DNA, 201 bp, Homo sapiens
ccaattagattccaagttaagtcaagataagtgaacaggttataccacaaaacatggtgataaatccttttctccctaactgacagtttttcctgctgcawgaatagagaactacgttggggcaataagttggaggagacacaagttttcctgtacgagagacttttttgtttgtttttcctagatgggaaaggcagcttg

SEQ ID NO: 502898 - DNA, 201 bp, Homo sapiens
gaatgtttttgactgaagcatgcctttttaatgtctgtcttcttgctcctcaccctctaactcccccaggcctcccagttcaggccaagaaacatgctacwtcagccaagaatacactgttgacctggaaggcaaatacgacctcaaataaggagaaagaggaaatcctggaagctctggtcaagctgtactacactctgg

SEQ ID NO: 502899 - DNA, 201 bp, Homo sapiens
ggatttggcggttggtaggtcattgcaacttggtttggtagagacaagtacactccttgggccctgggagagcccagattcacagagactagctaagggtytttcactggaattcaaacttgaggtgatgaacttgaactgaagaggaaggcatttgagagggagatttctctgaaactaggcaaggccagatgctgccct

SEQ ID NO: 502900 - DNA, 201 bp, Homo sapiens
ggagggtgcaggctttcaaaagcctcagggactgcctcagaacaactttcttgagtggtagttgttttatttgacattcacaagcccagaaggagtgtccrctcatttggggtggtttttagtagctcctgcagtttcacctttcttcttcctaaggacccagggaactgtctgaatttggtttttatagtccttaatgac

SEQ ID NO: 502901 - DNA, 201 bp, Homo sapiens
tggtttttagtagctcctgcagtttcacctttcttcttcctaaggacccagggaactgtctgaatttggtttttatagtccttaatgacacactcctaacrgcccacctacttgtggaaaatgacctgcttgatcaaaacactttctcagttttctactttgttttcttggtctaaagtagccatctcggcttccagtatc

SEQ ID NO: 502902 - DNA, 201 bp, Homo sapiens
ggttgccttgtttggccccaggcttggttctcagggccagggaagcatgggcttctcagaagaacaagggctggaattgattctgttttaaccctgacttycctccagatccacctaagagcccttgatcaaaccttaaatgaccaggccagagaacactgactcaggtgggcgaatgtgctgtgtcattggctgtgcaga

SEQ ID NO: 502903 - DNA, 201 bp, Homo sapiens
actgatcctggtgggttatgtcattgttgggtacaatgccttctccatagagctcagggaacagaaccagcatgctccttcggaattgccaggctgatttaaaaaaaaaaaaaaaaaaaacgttttatccctcaggaggcttacagactgctaaaggcttcattaaagtcccaggtattcagctacagtgactatagcaaa

SEQ ID NO: 502904 - DNA, 201 bp, Homo sapiens
tgggattacaggcgcccaccactacacccggctaatttttgtagaaacggggtttaatcctgttggtcaggctggtctcgaactcccacctcaagtgaccrcccgcctcggcctcccaaagtgctaagattagaggcgtgagccacagcacccggccggttcagaagattaacatgagatcccaatgccatgggttgatct

SEQ ID NO: 502905 - DNA, 201 bp, Homo sapiens
caaaaatatctggaattaataagtgattatagaaaagattcaggatacaagtttaatatgcagaagtcaatactttcctatataccagcaatgaataagtmaaatttaaaatttaaaacaataccatttacattagcactccaagaaaatttaaaacaataccatttacattagcactccaagaaatgaaataattaggta

SEQ ID NO: 502906 - DNA, 201 bp, Homo sapiens
ctttcagaggtgattaggctatgagggcccctccctcatgaatgggattaaggccgttataaaagaggctttttgtggtgtttggttctttttctcttccrtttttcatcatatgtggatgcagcaagaggtccctcacaagaagctggcgtcttcatcttagacttttcagcctccagaactgtgagaaatttctgttct

SEQ ID NO: 502907 - DNA, 201 bp, Homo sapiens
ctgatcctggtgggttatgtcattgttgggtacaatgccttctccatagagctcagggaacagaaccagcatgctccttcggaattgccaggctgatttaaaaaaaaaaaaaaaaaaaacgttttatccctcaggaggcttacagactgctaaaggcttcattaaagtcccaggtattcagctacagtgactatagcaaaa

SEQ ID NO: 502908 - DNA, 201 bp, Homo sapiens
cattagtgagcaatatatatagcataactcataagtatatgtaaatatgtagttagtgcaaaggacagtaattatctctaggacaggattatggaggactytcaaattctatgttatgtatttctgtgtcattttactttttacaataaatattgtgatgataaaaaagatacattttaagagtatggtatatgtgtcaaa

SEQ ID NO: 502909 - DNA, 201 bp, Homo sapiens
tttgtggtgtttggttctttttctcttccgtttttcatcatatgtggatgcagcaagaggtccctcacaagaagctggcgtcttcatcttagacttttcakcctccagaactgtgagaaatttctgttctttataaattacctggtctcaggtattttatacctgacatacaaattaagacatcatccaagattttttaca

SEQ ID NO: 502910 - DNA, 201 bp, Homo sapiens
aacagaattgctagtttgtttattagatcacaatagcatttttcatcttacaattcagatactggagatcagataggtcccagataaaactaggcaagaaycacattgtttcattctttgctagcattaaccgaattatttttttttcagattggtttcattcttttgatgaaactgagcaactctgtccgacaagattta

SEQ ID NO: 502911 - DNA, 201 bp, Homo sapiens
  misc_feature (1)...(201): n = A,T,C or G
aggcgtgagccactgtgcccgggctgcttatacgtttttcaattcagagtttcccttcagtcatctttctaccttccctaaccatcctgtatccacccaanctcatcccccagtgcagcacacatacatacacacacttgcttgttctgtcttcaaggcctcaagctatttaatccaaggggaaatccctccttgtatcag

SEQ ID NO: 502912 - DNA, 201 bp, Homo sapiens
  misc_feature (1)...(201): n = A,T,C or G
ttgtatcagtcaaaatcctatccactcttgaaaaacaagatgagtcctacttcttcgataaagattttactaactatgtatttctccaagtgtggtcctcngacaaccttgcattattaccaagattagttcttacaaatgggaatccttggttaccacctgaaacatggttgcttgttttaaatgtgtattcttggttct

SEQ ID NO: 502913 - DNA, 201 bp, Homo sapiens
tcttattccagaacttgtgagctgtaactactggaagtgtgggacaggaatctgcattttaatagggtgcttataatgcacagtgcaatttgaaggccacycttaacttaggacacagccctctccagagtccatttttctctttagttgaaacctatggaacagatatttctgagtattctgcagagacttcttgtctct

SEQ ID NO: 502914 - DNA, 201 bp, Homo sapiens
gcattctatggcataacctactttggtcctggactatctctgtgtgtttggtaagggtcagcttctataattattattgttgttcaacagttggaggatgragaagcgttgtgggttgaaaaggtcacatggcattagtagtagaatcaggaataggatactcaccttccattcctgtctctgtcttgagttccaaactga

SEQ ID NO: 502915 - DNA, 201 bp, Homo sapiens
cgaatgaaggtgaaattacttgcacaagactcatagctaggaagtggcagagctgggactcaaactcacctctcatctaaatccacagtgaacactgtcaytgggtgcttaccttgtcatgattttctttattccaggctcattctgtctgtgtttctttgttcactgaagtcagccccaaaactgcagaaatgagtgcgt

SEQ ID NO: 502916 - DNA, 201 bp, Homo sapiens
gcttgagttaagggttccagtctacagagagctataagcgtgccactgcactctagcctgggtaacacagtaagaccctgtctctaaaaataataagaccmaaattcatgtggaaaataagtttaaatcatactagtaattacaaaaataaaagcaaagttactctttttgtctaacaaattgtcaaaattttaaaaaatg

SEQ ID NO: 502917 - DNA, 201 bp, Homo sapiens
gcactccagcctgggtaacagaatgagactgtgtctctaagaaaataaagtaaaaatttgaaaaacctaaaaattatcatttgattgtttttgttgctgtyacctttaacttaaaattaaaaaaaaaaatagctgggcgtggtggctcacacctgtaatcccagcactttgggaggccaaggtgggcagatcacctgatgt

SEQ ID NO: 502918 - DNA, 201 bp, Homo sapiens
gaaacttttcataatacgggcaggatctgctttgccaaaggagagcccagaaaggcaattcagctgctgaggaaggcgacttttggctggtttcgttacaktttcccctgggcttgtaagcaggatgtgaggagggatgtatgtacatatgtatgcatgtatatatgtattttcccttcccttccatttcattccatctct

SEQ ID NO: 502919 - DNA, 201 bp, Homo sapiens
tcatcccccagtgcagcacacatacatacacacacttgcttgttctgtcttcaaggcctcaagctatttaatccaaggggaaatccctccttgtatcagtsaaaatcctatccactcttgaaaaacaagatgagtcctacttcttcgataaagattttactaactatgtatttctccaagtgtggtcctcagacaaccttg

SEQ ID NO: 502920 - DNA, 201 bp, Homo sapiens
tgcagcacacatacatacacacacttgcttgttctgtcttcaaggcctcaagctatttaatccaaggggaaatccctccttgtatcagtcaaaatcctatycactcttgaaaaacaagatgagtcctacttcttcgataaagattttactaactatgtatttctccaagtgtggtcctcagacaaccttgcattattacca

SEQ ID NO: 502921 - DNA, 201 bp, Homo sapiens
aaccttgcattattaccaagattagttcttacaaatgggaatccttggttaccacctgaaacatggttgcttgttttaaatgtgtattcttggttcttatyccagaacttgtgagctgtaactactggaagtgtgggacaggaatctgcattttaatagggtgcttataatgcacagtgcaatttgaaggccacccttaac

SEQ ID NO: 502922 - DNA, 201 bp, Homo sapiens
ttgtattagtcagggttctctagagggacataactaataggatagatacatatatataaaggggagtttattaaggaatattaaactcacaggatcacaargtcccgcaataggccatcttcaagctgaggagcaaggaagccagtccaagtcccaaagtctgatgtttgggggtaggaagcatccagcacaggagaaaaa

SEQ ID NO: 502923 - DNA, 201 bp, Homo sapiens
  misc_feature (1)...(201): n = A,T,C or G
aatgttcaacttgcaaaatctgatatgtggccttcctctgttatacccttagcagggggctattgaaaatgtgggaaatagaagaatgtttgggaattaangggatttttgcttttctgctgtttgcctttggcccaaaacctgctttgcttggactttctaaatgacccagaaagttcctttcagcgtaattagttcctc

SEQ ID NO: 502924 - DNA, 201 bp, Homo sapiens
catatattaaccattaatttatttaatatttacaacaactttttataacaaatactattcttattatccctgatttacatttacaagactgccttcaagamtggagttcagtccagtgagactgagctaaggttatgactttatttttgctatgaaatctaataaaaattatactagccaacatttattgagaacttacca

SEQ ID NO: 502925 - DNA, 201 bp, Homo sapiens
gggtgaatgtgggaataaaagacaagagacaaaagagtatacttggaagaaggggtcagggggcaccttgcctctagtggacgaaggccctgagctgtacrcagccctctgtatttattaggcaaaagagatggtgagaaggggggtggaagaaggggtcagctgcttagtccagagtaggcttgcaagacttcattcctc

SEQ ID NO: 502926 - DNA, 201 bp, Homo sapiens
aacaaaatagtaataataacaattctctatctgaagtacaagagataatatgtcagaatgttaaaataagaggcttctttgtatcaccgtattattgtttwatattaagagtaataggtacagagtatacattactggagtctgacctgtgatcttaacctgccttttccactcacaaagtatgtgaccttgggcaaatga

SEQ ID NO: 502927 - DNA, 201 bp, Homo sapiens
ttatagtccttaatgacacactcctaacggcccacctacttgtggaaaatgacctgcttgatcaaaacactttctcagttttctactttgttttcttggtytaaagtagccatctcggcttccagtatccgaagcagagttttctgtgacctaactagtgatgctgccttcttcctccagacctgtgaagactccctgtta

SEQ ID NO: 502928 - DNA, 201 bp, Homo sapiens
taccttaatgttattcaaggcttaatttaaaatatttcgggcttataatttttactatccataattagcaatctggtgactccaatagatttaacttctgytctaggtctgtgaaatatgcagcttaagcaaaatttgctattgagatatgatctcttttttttttaactgccccttgcagaacagggctagctcataggc

SEQ ID NO: 502929 - DNA, 201 bp, Homo sapiens
attcctttaacaaacattttttgagcacctactaagtgccaggtgcagttagagctgcaggtggtaataaagataaataaaacatggtcattaatcttaargggacaacattctagtgtaagagaaaacatgaagaaataataacatgaaatttaagttctggaatagcattctcagtgcaatgaaaggagagacaatcta

SEQ ID NO: 502930 - DNA, 201 bp, Homo sapiens
tggggtttcaccatgttggccagggtagtctcaatctcctgaccttgtgattcgcccaccttggcctcccaaagtgctgggattacaggcgtgagccaccrcgcccagccagatgctgtatttcttctggtaaacctggattactttgccagtttgctgacctttatagtgtccttgcacaatctgaacttcatcatccta

SEQ ID NO: 502931 - DNA, 201 bp, Homo sapiens
tgtaatttacagtttccgctcactcctgcaaacactgcctacctactctagtcttggattcaggcaaccaccacaggaaacccaagcccctgttccttttytaaagaattcttgcttcttgacaacataatacatggaaaataaagaacatagttaagtacccatttttaatattgcttcacttttccaagagcccctttt

SEQ ID NO: 502932 - DNA, 201 bp, Homo sapiens
ttggccagggtagtctcaatctcctgaccttgtgattcgcccaccttggcctcccaaagtgctgggattacaggcgtgagccaccacgcccagccagatgstgtatttcttctggtaaacctggattactttgccagtttgctgacctttatagtgtccttgcacaatctgaacttcatcatcctatttggggggcatgga

SEQ ID NO: 502933 - DNA, 201 bp, Homo sapiens
gaagacataatcttgtgaatttggaaaggtgcatttgaaatgcttttttatggttcttgctttggtcagaagtcacaaaagaactgaactttattttgacsactgctgcttatataatggttgcaaaagggagaagggacctgggtcacctttagaactctcccagggaagaccatgttccctttcattgctataactcat

SEQ ID NO: 502934 - DNA, 201 bp, Homo sapiens
aagtgcccaggaacaccagcaaaaaacaaggggacaaatgagatgtggctggaaagggggatgccctttcacccttcatgcaatgcatatttgaggggaayctggtgctaaatcattagataacctgcttctgggttagggttttgtatgtagcagagcagctccctcactgcagtctatggaaagtcagccctggacaca

SEQ ID NO: 502935 - DNA, 201 bp, Homo sapiens; identical to SEQ ID NO: 468054

SEQ ID NO: 502936 - DNA, 201 bp, Homo sapiens; identical to SEQ ID NO: 468055

SEQ ID NO: 502937 - DNA, 201 bp, Homo sapiens; identical to SEQ ID NO: 467974

SEQ ID NO: 502938 - DNA, 201 bp, Homo sapiens; identical to SEQ ID NO: 468056

SEQ ID NO: 502939 - DNA, 201 bp, Homo sapiens; identical to SEQ ID NO: 468057

SEQ ID NO: 502940 - DNA, 201 bp, Homo sapiens; identical to SEQ ID NO: 468058

SEQ ID NO: 502941 - DNA, 201 bp, Homo sapiens; identical to SEQ ID NO: 468059

SEQ ID NO: 502942 - DNA, 201 bp, Homo sapiens; identical to SEQ ID NO: 467976

SEQ ID NO: 502943 - DNA, 201 bp, Homo sapiens; identical to SEQ ID NO: 467977

SEQ ID NO: 502944 - DNA, 201 bp, Homo sapiens; identical to SEQ ID NO: 468061

SEQ ID NO: 502945 - DNA, 201 bp, Homo sapiens; identical to SEQ ID NO: 467978

SEQ ID NO: 502946 - DNA, 201 bp, Homo sapiens; identical to SEQ ID NO: 467979

SEQ ID NO: 502947 - DNA, 201 bp, Homo sapiens; identical to SEQ ID NO: 468063

SEQ ID NO: 502948 - DNA, 201 bp, Homo sapiens; identical to SEQ ID NO: 467980

SEQ ID NO: 502949 - DNA, 201 bp, Homo sapiens; identical to SEQ ID NO: 467981

SEQ ID NO: 502950 - DNA, 201 bp, Homo sapiens; identical to SEQ ID NO: 468066

SEQ ID NO: 502951 - DNA, 201 bp, Homo sapiens; identical to SEQ ID NO: 468065

SEQ ID NO: 502952 - DNA, 201 bp, Homo sapiens; identical to SEQ ID NO: 467982

SEQ ID NO: 502953 - DNA, 201 bp, Homo sapiens; identical to SEQ ID NO: 468067

SEQ ID NO: 502954 - DNA, 201 bp, Homo sapiens; identical to SEQ ID NO: 468068

SEQ ID NO: 502955 - DNA, 201 bp, Homo sapiens; identical to SEQ ID NO: 468069

SEQ ID NO: 502956 - DNA, 201 bp, Homo sapiens; identical to SEQ ID NO: 468070

SEQ ID NO: 502957 - DNA, 201 bp, Homo sapiens; identical to SEQ ID NO: 467983

SEQ ID NO: 502958 - DNA, 201 bp, Homo sapiens; identical to SEQ ID NO: 467986

SEQ ID NO: 502959 - DNA, 201 bp, Homo sapiens; identical to SEQ ID NO: 468071

SEQ ID NO: 502960 - DNA, 201 bp, Homo sapiens; identical to SEQ ID NO: 468072

SEQ ID NO: 502961 - DNA, 201 bp, Homo sapiens; identical to SEQ ID NO: 468073

SEQ ID NO: 502962 - DNA, 201 bp, Homo sapiens; identical to SEQ ID NO: 468074

SEQ ID NO: 502963 - DNA, 201 bp, Homo sapiens; identical to SEQ ID NO: 467988

SEQ ID NO: 502964 - DNA, 201 bp, Homo sapiens; identical to SEQ ID NO: 468076

SEQ ID NO: 502965 - DNA, 201 bp, Homo sapiens; identical to SEQ ID NO: 467990

SEQ ID NO: 502966 - DNA, 201 bp, Homo sapiens; identical to SEQ ID NO: 468077

SEQ ID NO: 502967 - DNA, 201 bp, Homo sapiens; identical to SEQ ID NO: 468078

SEQ ID NO: 502968 - DNA, 201 bp, Homo sapiens; identical to SEQ ID NO: 468079

SEQ ID NO: 502969 - DNA, 201 bp, Homo sapiens; identical to SEQ ID NO: 468080

SEQ ID NO: 502970 - DNA, 201 bp, Homo sapiens; identical to SEQ ID NO: 468081

SEQ ID NO: 502971 - DNA, 201 bp, Homo sapiens; identical to SEQ ID NO: 468082

SEQ ID NO: 502972 - DNA, 201 bp, Homo sapiens; identical to SEQ ID NO: 468083

SEQ ID NO: 502973 - DNA, 201 bp, Homo sapiens; identical to SEQ ID NO: 468085

SEQ ID NO: 502974 - DNA, 201 bp, Homo sapiens; identical to SEQ ID NO: 468086

SEQ ID NO: 502975 - DNA, 201 bp, Homo sapiens; identical to SEQ ID NO: 467991

SEQ ID NO: 502976 - DNA, 201 bp, Homo sapiens; identical to SEQ ID NO: 467992

SEQ ID NO: 502977 - DNA, 201 bp, Homo sapiens; identical to SEQ ID NO: 467993

SEQ ID NO: 502978 - DNA, 201 bp, Homo sapiens; identical to SEQ ID NO: 467994

SEQ ID NO: 502979 - DNA, 201 bp, Homo sapiens; identical to SEQ ID NO: 467995

SEQ ID NO: 502980 - DNA, 201 bp, Homo sapiens; identical to SEQ ID NO: 468088

SEQ ID NO: 502981 - DNA, 201 bp, Homo sapiens; identical to SEQ ID NO: 468090

SEQ ID NO: 502982 - DNA, 201 bp, Homo sapiens; identical to SEQ ID NO: 468089

SEQ ID NO: 502983 - DNA, 201 bp, Homo sapiens; identical to SEQ ID NO: 467996

SEQ ID NO: 502984 - DNA, 201 bp, Homo sapiens; identical to SEQ ID NO: 468091

SEQ ID NO: 502985 - DNA, 201 bp, Homo sapiens; identical to SEQ ID NO: 468092

SEQ ID NO: 502986 - DNA, 201 bp, Homo sapiens; identical to SEQ ID NO: 468094

SEQ ID NO: 502987 - DNA, 201 bp, Homo sapiens; identical to SEQ ID NO: 468093

SEQ ID NO: 502988 - DNA, 201 bp, Homo sapiens; identical to SEQ ID NO: 467997

SEQ ID NO: 502989 - DNA, 201 bp, Homo sapiens; identical to SEQ ID NO: 468095

SEQ ID NO: 502990 - DNA, 201 bp, Homo sapiens; identical to SEQ ID NO: 468096

SEQ ID NO: 502991 - DNA, 201 bp, Homo sapiens; identical to SEQ ID NO: 468097

SEQ ID NO: 502992 - DNA, 201 bp, Homo sapiens; identical to SEQ ID NO: 468098

SEQ ID NO: 502993 - DNA, 201 bp, Homo sapiens; identical to SEQ ID NO: 468099

SEQ ID NO: 502994 - DNA, 201 bp, Homo sapiens; identical to SEQ ID NO: 468101

SEQ ID NO: 502995 - DNA, 201 bp, Homo sapiens; identical to SEQ ID NO: 468100

SEQ ID NO: 502996 - DNA, 201 bp, Homo sapiens; identical to SEQ ID NO: 467999

SEQ ID NO: 502997 - DNA, 201 bp, Homo sapiens; identical to SEQ ID NO: 468102

SEQ ID NO: 502998 - DNA, 201 bp, Homo sapiens; identical to SEQ ID NO: 468000

SEQ ID NO: 502999 - DNA, 201 bp, Homo sapiens; identical to SEQ ID NO: 468103

SEQ ID NO: 503000 - DNA, 201 bp, Homo sapiens; identical to SEQ ID NO: 468104

SEQ ID NO: 503001 - DNA, 201 bp, Homo sapiens; identical to SEQ ID NO: 468001

SEQ ID NO: 503002 - DNA, 201 bp, Homo sapiens; identical to SEQ ID NO: 468002

SEQ ID NO: 503003 - DNA, 201 bp, Homo sapiens; identical to SEQ ID NO: 468003

SEQ ID NO: 503004 - DNA, 201 bp, Homo sapiens; identical to SEQ ID NO: 468105

SEQ ID NO: 503005 - DNA, 201 bp, Homo sapiens; identical to SEQ ID NO: 468106

SEQ ID NO: 503006 - DNA, 201 bp, Homo sapiens; identical to SEQ ID NO: 468107

SEQ ID NO: 503007 - DNA, 201 bp, Homo sapiens; identical to SEQ ID NO: 468109

SEQ ID NO: 503008 - DNA, 201 bp, Homo sapiens; identical to SEQ ID NO: 468110

SEQ ID NO: 503009 - DNA, 201 bp, Homo sapiens; identical to SEQ ID NO: 468111

SEQ ID NO: 503010 - DNA, 201 bp, Homo sapiens; identical to SEQ ID NO: 468112

SEQ ID NO: 503011 - DNA, 201 bp, Homo sapiens; identical to SEQ ID NO: 468113

SEQ ID NO: 503012 - DNA, 201 bp, Homo sapiens; identical to SEQ ID NO: 468004

SEQ ID NO: 503013 - DNA, 201 bp, Homo sapiens; identical to SEQ ID NO: 468114

SEQ ID NO: 503014 - DNA, 201 bp, Homo sapiens; identical to SEQ ID NO: 468005

SEQ ID NO: 503015 - DNA, 201 bp, Homo sapiens; identical to SEQ ID NO: 468006

SEQ ID NO: 503016 - DNA, 201 bp, Homo sapiens; identical to SEQ ID NO: 468007

SEQ ID NO: 503017 - DNA, 201 bp, Homo sapiens; identical to SEQ ID NO: 468009

SEQ ID NO: 503018 - DNA, 201 bp, Homo sapiens; identical to SEQ ID NO: 468008

SEQ ID NO: 503019 - DNA, 201 bp, Homo sapiens; identical to SEQ ID NO: 468010

SEQ ID NO: 503020 - DNA, 201 bp, Homo sapiens; identical to SEQ ID NO: 468011

SEQ ID NO: 503021 - DNA, 201 bp, Homo sapiens; identical to SEQ ID NO: 468012

SEQ ID NO: 503022 - DNA, 201 bp, Homo sapiens; identical to SEQ ID NO: 468013

SEQ ID NO: 503023 - DNA, 201 bp, Homo sapiens; identical to SEQ ID NO: 468116

SEQ ID NO: 503024 - DNA, 201 bp, Homo sapiens; identical to SEQ ID NO: 468014

SEQ ID NO: 503025 - DNA, 201 bp, Homo sapiens; identical to SEQ ID NO: 468117

SEQ ID NO: 503026 - DNA, 201 bp, Homo sapiens; identical to SEQ ID NO: 468118

SEQ ID NO: 503027 - DNA, 201 bp, Homo sapiens; identical to SEQ ID NO: 468015

SEQ ID NO: 503028 - DNA, 201 bp, Homo sapiens; identical to SEQ ID NO: 468016

SEQ ID NO: 503029 - DNA, 201 bp, Homo sapiens; identical to SEQ ID NO: 468119

SEQ ID NO: 503030 - DNA, 201 bp, Homo sapiens; identical to SEQ ID NO: 468120

SEQ ID NO: 503031 - DNA, 201 bp, Homo sapiens; identical to SEQ ID NO: 468017

SEQ ID NO: 503032 - DNA, 201 bp, Homo sapiens; identical to SEQ ID NO: 468020

SEQ ID NO: 503033 - DNA, 201 bp, Homo sapiens; identical to SEQ ID NO: 468024

SEQ ID NO: 503034 - DNA, 201 bp, Homo sapiens; identical to SEQ ID NO: 468026

SEQ ID NO: 503035 - DNA, 201 bp, Homo sapiens; identical to SEQ ID NO: 468027

SEQ ID NO: 503036 - DNA, 201 bp, Homo sapiens; identical to SEQ ID NO: 468124

SEQ ID NO: 503037 - DNA, 201 bp, Homo sapiens; identical to SEQ ID NO: 468028

SEQ ID NO: 503038 - DNA, 201 bp, Homo sapiens; identical to SEQ ID NO: 468127

SEQ ID NO: 503039 - DNA, 201 bp, Homo sapiens; identical to SEQ ID NO: 468128

SEQ ID NO: 503040 - DNA, 201 bp, Homo sapiens; identical to SEQ ID NO: 468129

SEQ ID NO: 503041 - DNA, 201 bp, Homo sapiens; identical to SEQ ID NO: 468032

SEQ ID NO: 503042 - DNA, 201 bp, Homo sapiens; identical to SEQ ID NO: 468034

SEQ ID NO: 503043 - DNA, 201 bp, Homo sapiens; identical to SEQ ID NO: 468035

SEQ ID NO: 503044 - DNA, 201 bp, Homo sapiens; identical to SEQ ID NO: 468036

SEQ ID NO: 503045 - DNA, 201 bp, Homo sapiens; identical to SEQ ID NO: 468037

SEQ ID NO: 503046 - DNA, 201 bp, Homo sapiens; identical to SEQ ID NO: 468039

SEQ ID NO: 503047 - DNA, 201 bp, Homo sapiens; identical to SEQ ID NO: 468038

SEQ ID NO: 503048 - DNA, 201 bp, Homo sapiens; identical to SEQ ID NO: 468040

SEQ ID NO: 503049 - DNA, 201 bp, Homo sapiens; identical to SEQ ID NO: 468041

SEQ ID NO: 503050 - DNA, 201 bp, Homo sapiens; identical to SEQ ID NO: 468042

SEQ ID NO: 503051 - DNA, 201 bp, Homo sapiens; identical to SEQ ID NO: 468043

SEQ ID NO: 503052 - DNA, 201 bp, Homo sapiens; identical to SEQ ID NO: 468044

SEQ ID NO: 503053 - DNA, 201 bp, Homo sapiens; identical to SEQ ID NO: 468045

SEQ ID NO: 503054 - DNA, 201 bp, Homo sapiens; identical to SEQ ID NO: 468047

SEQ ID NO: 503055 - DNA, 201 bp, Homo sapiens; identical to SEQ ID NO: 468130

SEQ ID NO: 503056 - DNA, 201 bp, Homo sapiens; identical to SEQ ID NO: 468050

SEQ ID NO: 503057 - DNA, 201 bp, Homo sapiens; identical to SEQ ID NO: 468051

SEQ ID NO: 503058 - DNA, 201 bp, Homo sapiens; identical to SEQ ID NO: 468052

SEQ ID NO: 503059 - DNA, 201 bp, Homo sapiens; identical to SEQ ID NO: 468132

SEQ ID NO: 503060 - DNA, 201 bp, Homo sapiens; identical to SEQ ID NO: 468053

SEQ ID NO: 503061 - DNA, 201 bp, Homo sapiens; identical to SEQ ID NO: 309772

SEQ ID NO: 503062 - DNA, 201 bp, Homo sapiens; identical to SEQ ID NO: 309774

SEQ ID NO: 503063 - DNA, 201 bp, Homo sapiens; identical to SEQ ID NO: 309776

SEQ ID NO: 503064 - DNA, 201 bp, Homo sapiens
ggggctggggctgtgtgggcctgaccttgaccgtgacccccacccccctcaggccacacactacagccttctggccacgctggagctgctggggaagctgytgctgggcactctggccggaggcctggctgatgggttggggccacatccctgcttcttgctcctgctcatcctctctgcctttcccgttctgtacctgga

SEQ ID NO: 503065 - DNA, 201 bp, Homo sapiens
ccaggaaactgctgcctctgttgaggtcggtgctgcgcttccgcctcgggggcctagcctgtcagactgccttggtcttccacctggacaccctgggggcyagcatggacgctggcacaatcttgagaggtgaggggctggccttgaggaggaagagaggggccaggagcctggggcactgctgacttctgccctcccagg

SEQ ID NO: 503066 - DNA, 201 bp, Homo sapiens; identical to SEQ ID NO: 309766

SEQ ID NO: 503067 - DNA, 201 bp, Homo sapiens
ccagtgtaccctgcccacccacttgtacctgagctgcccccaatccactatactgacccatttcccacccccatcccaggaaactgctgcctctgttgagrtcggtgctgcgcttccgcctcgggggcctagcctgtcagactgccttggtcttccacctggacaccctgggggccagcatggacgctggcacaatcttga

SEQ ID NO: 503068 - DNA, 201 bp, Homo sapiens
ggtcggtgctgcgcttccgcctcgggggcctagcctgtcagactgccttggtcttccacctggacaccctgggggccagcatggacgctggcacaatcttragaggtgaggggctggccttgaggaggaagagaggggccaggagcctggggcactgctgacttctgccctcccagggtcagccttgctgagcctatgtct

SEQ ID NO: 503069 - DNA, 201 bp, Homo sapiens
tgctgcctctgttgaggtcggtgctgcgcttccgcctcgggggcctagcctgtcagactgccttggtcttccacctggacaccctgggggccagcatggamgctggcacaatcttgagaggtgaggggctggccttgaggaggaagagaggggccaggagcctggggcactgctgacttctgccctcccagggtcagcctt

SEQ ID NO: 503070 - DNA, 201 bp, Homo sapiens; identical to SEQ ID NO: 275319

SEQ ID NO: 503071 - DNA, 201 bp, Homo sapiens
ggactgctgcttctcctcagtgtccagccctgggctgagagtgggaaggtgctggtggtgcccactgatggcagccactggctcagcatgcgggaggcctygcgggacctccatgcgagaggccaccaggtggtggtcctcaccctggaggtgaatatgtacatcaaagaagagaactttttcaccctgacaacgtatgcc

SEQ ID NO: 503072 - DNA, 201 bp, Homo sapiens; identical to SEQ ID NO: 275573

SEQ ID NO: 503073 - DNA, 201 bp, Homo sapiens
aaggtgctggtggtgcccactgatggcagccactggctcagcatgcgggaggccttgcgggacctccatgcgagaggccaccaggtggtggtcctcacccyggaggtgaatatgtacatcaaagaagagaactttttcaccctgacaacgtatgccatttcatggacccaggacgaatttgatcgccttttgctgggtcac

SEQ ID NO: 503074 - DNA, 201 bp, Homo sapiens
atgcaagccttgcctctgagctttttcagagagaggtgtcagtggtggatcttgtcagccatgcatctgtgtggctgttccgaggggactttgtgatggaytaccccaggccgatcatgcccaacatggtcttcattgggggcatcaactgtgccaacgggaagccactatctcaggtctgtattggtgcctttatccaat

SEQ ID NO: 503075 - DNA, 201 bp, Homo sapiens
gctctaccctctggccctgtcctacctttgccatgctgtttctgctccttatgcaagccttgcctctgagctttttcagagagaggtgtcagtggtggatmttgtcagccatgcatctgtgtggctgttccgaggggactttgtgatggactaccccaggccgatcatgcccaacatggtcttcattgggggcatcaactg

SEQ ID NO: 503076 - DNA, 201 bp, Homo sapiens; identical to SEQ ID NO: 275730

SEQ ID NO: 503077 - DNA, 201 bp, Homo sapiens; identical to SEQ ID NO: 275413

SEQ ID NO: 503078 - DNA, 201 bp, Homo sapiens; identical to SEQ ID NO: 275321

SEQ ID NO: 503079 - DNA, 201 bp, Homo sapiens; identical to SEQ ID NO: 275328

SEQ ID NO: 503080 - DNA, 201 bp, Homo sapiens; identical to SEQ ID NO: 275613

SEQ ID NO: 503081 - DNA, 201 bp, Homo sapiens; identical to SEQ ID NO: 275653

SEQ ID NO: 503082 - DNA, 201 bp, Homo sapiens; identical to SEQ ID NO: 275385

SEQ ID NO: 503083 - DNA, 201 bp, Homo sapiens; identical to SEQ ID NO: 275566

SEQ ID NO: 503084 - DNA, 201 bp, Homo sapiens; identical to SEQ ID NO: 275540

SEQ ID NO: 503085 - DNA, 201 bp, Homo sapiens; identical to SEQ ID NO: 275797

SEQ ID NO: 503086 - DNA, 201 bp, Homo sapiens; identical to SEQ ID NO: 275587

SEQ ID NO: 503087 - DNA, 201 bp, Homo sapiens
cactctgtcagcccttccctgctccaaccccaccctccctcctggcacagcccagcatggctgttatctacaggaggagagccactgtggtctgaagagaygctactgcctggagactggggtcttaacctccagcctggcactgagccacctgcaacctagcagcaggtgaccttggctcccagcctgactcagctgaac

SEQ ID NO: 503088 - DNA, 201 bp, Homo sapiens
attgatgggaggatgcctgtcctttgcctttaccccccacctggctcaggagacagggtggctgttttcttccccattcactcattaccattcactgagcrcctactgtgtgtcaagccctggacgggacataggcaatgggtaactagacaaacaggcatacagtagcaggatccatgtggcacaggggaggtacagagg

SEQ ID NO: 503089 - DNA, 201 bp, Homo sapiens
ccaccctccctcctggcacagcccagcatggctgttatctacaggaggagagccactgtggtctgaagagatgctactgcctggagactggggtcttaacytccagcctggcactgagccacctgcaacctagcagcaggtgaccttggctcccagcctgactcagctgaacctggatcctgtgcataggcaagagctgac

SEQ ID NO: 503090 - DNA, 201 bp, Homo sapiens; identical to SEQ ID NO: 139810

SEQ ID NO: 503091 - DNA, 201 bp, Homo sapiens; identical to SEQ ID NO: 139811
  misc_feature (1)...(201): n = A,T,C or G

SEQ ID NO: 503092 - DNA, 201 bp, Homo sapiens
ggacctgagcctctccagctctgaggtgatcattgcccctttgagcctgccatgtagcacatgctggggtcccagggtgggggacggccatgtcaagattrtagagcaggcatattgacacatatcttcccttctcctcaggaggagtgctggcatctccatgactacctggtggacaccttgggcccctatgtgatcaat

SEQ ID NO: 503093 - DNA, 201 bp, Homo sapiens; identical to SEQ ID NO: 139813

SEQ ID NO: 503094 - DNA, 201 bp, Homo sapiens; identical to SEQ ID NO: 139815

SEQ ID NO: 503095 - DNA, 201 bp, Homo sapiens
taaggggagccaggaggccccctctggagcaggtgagtagaaggagggggctcagctgcccgcccacgactagaaaacccccagcatagacctgccggacrgcaggaccttggttaagatgggaaaacagtagggtttgggcacaggaggtctgggcccccaacctggtgaccgttggacaccctgtggatataggaagga

SEQ ID NO: 503096 - DNA, 201 bp, Homo sapiens; identical to SEQ ID NO: 139816

SEQ ID NO: 503097 - DNA, 201 bp, Homo sapiens; identical to SEQ ID NO: 139817

SEQ ID NO: 503098 - DNA, 201 bp, Homo sapiens; identical to SEQ ID NO: 139818

SEQ ID NO: 503099 - DNA, 201 bp, Homo sapiens; identical to SEQ ID NO: 239660

SEQ ID NO: 503100 - DNA, 201 bp, Homo sapiens; identical to SEQ ID NO: 239672

SEQ ID NO: 503101 - DNA, 201 bp, Homo sapiens; identical to SEQ ID NO: 239662

SEQ ID NO: 503102 - DNA, 201 bp, Homo sapiens; identical to SEQ ID NO: 239669

SEQ ID NO: 503103 - DNA, 201 bp, Homo sapiens; identical to SEQ ID NO: 239664

SEQ ID NO: 503104 - DNA, 201 bp, Homo sapiens; identical to SEQ ID NO: 239665

SEQ ID NO: 503105 - DNA, 201 bp, Homo sapiens
ccaccctagtgccgctgttccggaactcgcgcctggtccagttccacttcaccaaggacctggagacactgaagagcctgtgccggatcatggacaatggyttcgtgagtggtgccagcagacgcaggggaggggccggccagggcagagcgagcccggaccgctcacgggggcggacatgggagaggaacagagcaccat

SEQ ID NO: 503106 - DNA, 201 bp, Homo sapiens
ccagaccagctggggagagagggtggctagtgtgggcgtgacttctgggggctctgtgctgtccccacggcactggatggggcactgaccctggttctgcrggggcctgctcctcctctgccacatcagggctgactcagcaccaactccgcgctctccactcctcagggacaggcgcccttgtcactcctggtttcccgg

SEQ ID NO: 503107 - DNA, 201 bp, Homo sapiens
cccaggtgacacgcttctgagcaggggcccctggggacttcaactgcccagcaacatggaggatggtgtcctgaggcctccaaggacggtccccacccctytacgtttccccaataaagccttttaaaaacctgcctgccttctctgctcactgcccgatgccttgcagccccctagctctaaggtggcccagcaggctgg

SEQ ID NO: 503108 - DNA, 201 bp, Homo sapiens
agaccccactgccctggttgggcagccagacttggtgtgggcggagtgtgatgcgatggctggagcaaggagctgcaggggagcccggaggatgccgggckggttcccaccagggctccatggaaaagcggccactgggcggctctgcagggctggagggtgggtcttggcgcggcggcagggaagccagcggagcgggga

SEQ ID NO: 503109 - DNA, 201 bp, Homo sapiens
agcaccggctcagcaacaagctgctggcttggagcggcgtcctcgagtggcaggaggtgagtctctgtggggctgcggctggcctccagggtcttgtcttrtccctgcggggacaggccagggcatctaggctgtgcacagtgacgcccctcctgcccccacagaagcgcagaccctactctgactccactgcaaagctga

SEQ ID NO: 503110 - DNA, 201 bp, Homo sapiens; identical to SEQ ID NO: 476598

SEQ ID NO: 503111 - DNA, 201 bp, Homo sapiens
gcaggtcctgtgcaccaggtgagggccgggacctgtctcaggccactggggagccatggggggctgtgagcagatgaggggcagggcctgttcccctgggrctagagaatggacccagctggggctaacaggccaaggctcggagggagggatggcaggccccaggacagacagacaggtttcccaggagcctgggcccct

SEQ ID NO: 503112 - DNA, 201 bp, Homo sapiens
ctcccctttgttgcgcgttcgggccggggtggggggttgggggacgggggcggggcgggctcatattactgctgactccgcggcccgatttaaacgcgggytgggggcggcagacaggcagccggcacgctcgcttgtttttcctattggagagttgctcgctctccgggcaggaaacctggaaatgggggcggttttggg

SEQ ID NO: 503113 - DNA, 201 bp, Homo sapiens
cgcgggctgggggcggcagacaggcagccggcacgctcgcttgtttttcctattggagagttgctcgctctccgggcaggaaacctggaaatgggggcggktttgggggacagcggcgagggaggggcccgcgctttgtaccagcgcccccagatgtcgcacccgtgggcgttctcccctggcggccgctccgtgcccgtg

SEQ ID NO: 503114 - DNA, 201 bp, Homo sapiens
cccagcgccataaacaacttgtatgttgtaagtgtaccctcatctcgaaagtcacctccagctgtgcgttttaactcatctcagatgctggatgtccggtrtggtgcctgaagcccccggggcaacatccactctctgtccaactcattctaacgccaagatactcaggttttctatctgatcttctgacgactgcccaaa

SEQ ID NO: 503115 - DNA, 201 bp, Homo sapiens
gtctgtaatcccagcactttgggaggccgaggcgggcggatcacttgaggtcaggagttcgagaccagtctggccaacatggtgaaaccccatctctactaaaaaaaaaaaaaaaaaaaaaattagccgggcatgatggcgcggcttgcagtgagcgaggttgcagtgagctgagatcgcaccactgcactccagtctggg

SEQ ID NO: 503116 - DNA, 201 bp, Homo sapiens
tcgtttttaaatatgatcgtcccatcttgatgtgctgctcctgctgtggaaggtatccctgggttttaggcaagcatatgtgttctttactatggctccaratcccagcatatttgaagtcctgagtcaacctgctctcctagacaagcagacattaagtatgtcgcttgggctcttaagtgcgttctcctgacttttacc

SEQ ID NO: 503117 - DNA, 201 bp, Homo sapiens
tctccttcctgcctccccccggggtcagacttataaggccagagaggtgggcactggcctgagccagaggaaggaattgaactttgggatgacagggagcyttaggagagtttcagcctgggaaagacagggcaagctggtgtgtgggacagacacagcgcaagccggcttgtgcctgtggaggctgcaaggaagccctgg

SEQ ID NO: 503118 - DNA, 201 bp, Homo sapiens
tgccgttgagcgccctgggttccgctagggcctcccttctccctcaggagaccaggggcagaccagggcttgtgcctggcatgaggtctcttaagtgaccygttcccccttcacccagcaccgtttgttgagggcctgccatatctgggccccgagtacccagtctgtagggaaagtggacatccatactcaccccccagg

SEQ ID NO: 503119 - DNA, 201 bp, Homo sapiens
gcgggctgggggcggcagacaggcagccggcacgctcgcttgtttttcctattggagagttgctcgctctccgggcaggaaacctggaaatgggggcggtkttgggggacagcggcgagggaggggcccgcgctttgtaccagcgcccccagatgtcgcacccgtgggcgttctcccctggcggccgctccgtgcccgtgg

SEQ ID NO: 503120 - DNA, 201 bp, Homo sapiens
ctgcctctacccgtcccagctgccgttgagcgccctgggttccgctagggcctcccttctccctcaggagaccaggggcagaccagggcttgtgcctggcwtgaggtctcttaagtgacccgttcccccttcacccagcaccgtttgttgagggcctgccatatctgggccccgagtacccagtctgtagggaaagtggac

SEQ ID NO: 503121 - DNA, 201 bp, Homo sapiens
acagacagacaggtttcccaggagcctgggcccctcttcccaccccgttcccttccaacaggcagtgggacctggtggtgtcaactcaggcccagtccagrtcgtcaacaacaagtttctggcatggagtggtgtcatggagtggcaggaggtgagcactcggcagcccagggacttgggacccccagatcctcacggact

SEQ ID NO: 503122 - DNA, 201 bp, Homo sapiens; identical to SEQ ID NO: 476600

SEQ ID NO: 503123 - DNA, 201 bp, Homo sapiens
caggccgcgcggggcccgctgggagttggagtcccttgcccacctcgccacgtcaccgactgcaaaccttcagctgtctcaggctcgggtgcaatccgtamcctcagtgggttccctttcagtgggttcctttgtccccaggcccattattccgtcctcccctcttccctgatgtattttggcgcggtctcctggctctgc

SEQ ID NO: 503124 - DNA, 201 bp, Homo sapiens
ggggacttcaactgcccagcaacatggaggatggtgtcctgaggcctccaaggacggtccccacccctctacgtttccccaataaagccttttaaaaaccwgcctgccttctctgctcactgcccgatgccttgcagccccctagctctaaggtggcccagcaggctggacagcccgggaactcactgggtctggctctcg

SEQ ID NO: 503125 - DNA, 201 bp, Homo sapiens
catagggagaccgaccagtggccgcagaagctgatcatgcagctgatccctcagcagctgctggtgagacccgcccctcccaccccacccactctgagcamccccatgcctggctgacccagctgtctgtcctgtcgcccccagaccaccctgggccccctgttccggaactcccagttggcacagttccacttcaccaac

SEQ ID NO: 503126 - DNA, 201 bp, Homo sapiens
accgatgatctcccttcatcccctacaggtggggcggtccagggtggtgggggcacagtggccccgggcagtgaccacagggtcctgacccgcggcccccrcaggcgggctgcatgctgttcccccacatctccccctgtgaggtgcgcgtgctcatgctcctgtactcgtccaagaagaagatcttcatgggcctcatcc

SEQ ID NO: 503127 - DNA, 201 bp, Homo sapiens
ctggttctgcgggggcctgctcctcctctgccacatcagggctgactcagcaccaactccgcgctctccactcctcagggacaggcgcccttgtcactccwggtttcccgggagcttgtgccacatcccaaaggcccattgctgggcagggagggctgtctgcccccagcaaggtcccagaatatttggcgattgtcttat

SEQ ID NO: 503128 - DNA, 201 bp, Homo sapiens
cccccacagaagcgcagaccctactctgactccactgcaaagctgaagcggaccctgccctgccaagcctacgtgaaccaaggcgagaacctgtgagtgcyggggcgtggcagccagggcggtggcaggggcagtggctgtggccgtggggatcagggcagccctttctgaccagctccttcccatagggagaccgaccag

SEQ ID NO: 503129 - DNA, 201 bp, Homo sapiens
ggggagagagggtggctagtgtgggcgtgacttctgggggctctgtgctgtccccacggcactggatggggcactgaccctggttctgcgggggcctgctsctcctctgccacatcagggctgactcagcaccaactccgcgctctccactcctcagggacaggcgcccttgtcactcctggtttcccgggagcttgtgcc

SEQ ID NO: 503130 - DNA, 201 bp, Homo sapiens
ccaccgtgtcatcccaataagggggcccacctccagggtgggtggggggtgtgaggacagagcagttaggctgtgcctggctcatggagcccacggcatgrtgccgtggttggagggatgctggtccctgtggtgctgtctggtgacaccacgccctgtgcctgccaggccggctgcgtgcacttttcctacaaagcatcg

SEQ ID NO: 503131 - DNA, 201 bp, Homo sapiens
accagctccttcccatagggagaccgaccagtggccgcagaagctgatcatgcagctgatccctcagcagctgctggtgagacccgcccctcccaccccayccactctgagcacccccatgcctggctgacccagctgtctgtcctgtcgcccccagaccaccctgggccccctgttccggaactcccagttggcacagtt

SEQ ID NO: 503132 - DNA, 201 bp, Homo sapiens
gcgctgcacgggctctcagaggcccctcacctatggccatggccttgactgtgggggcctctgtccaccgatgatctcccttcatcccctacaggtggggyggtccagggtggtgggggcacagtggccccgggcagtgaccacagggtcctgacccgcggcccccgcaggcgggctgcatgctgttcccccacatctccc

SEQ ID NO: 503133 - DNA, 201 bp, Homo sapiens
aggcctgggtggggccaggcctctgctcacagggatgtggggtcagtgcttgggagcctgtggccagcagcccccactgcacccctgcccccaggtgacaygcttctgagcaggggcccctggggacttcaactgcccagcaacatggaggatggtgtcctgaggcctccaaggacggtccccacccctctacgtttcccc

SEQ ID NO: 503134 - DNA, 201 bp, Homo sapiens; identical to SEQ ID NO: 476601

SEQ ID NO: 503135 - DNA, 201 bp, Homo sapiens
aggccgtggtgggagaagccagagctgggggtcccctcgcttccccgcagaccaccctagtgccgctgttccggaactcgcgcctggtccagttccacttyaccaaggacctggagacactgaagagcctgtgccggatcatggacaatggcttcgtgagtggtgccagcagacgcaggggaggggccggccagggcagag

SEQ ID NO: 503136 - DNA, 201 bp, Homo sapiens
tgggtggggccaggcctctgctcacagggatgtggggtcagtgcttgggagcctgtggccagcagcccccactgcacccctgcccccaggtgacacgcttytgagcaggggcccctggggacttcaactgcccagcaacatggaggatggtgtcctgaggcctccaaggacggtccccacccctctacgtttccccaataa

SEQ ID NO: 503137 - DNA, 201 bp, Homo sapiens; identical to SEQ ID NO: 476599

SEQ ID NO: 503138 - DNA, 201 bp, Homo sapiens
gccgcgcgcccgcgcccgcgcccctcagtcggtggagcccgcagccccccttgtggcccgcggcagctccccgcccgctcggcccgcgcccgccatggtcsgtccgcgccgtgccccgtaccgctccggcgccgggggccccctcgggggtcgcggccgccctccgcggcccctcgtggtgcgcgccgtccgctcgcgctc

SEQ ID NO: 503139 - DNA, 201 bp, Homo sapiens
gtggctgtggccgtggggatcagggcagccctttctgaccagctccttcccatagggagaccgaccagtggccgcagaagctgatcatgcagctgatccckcagcagctgctggtgagacccgcccctcccaccccacccactctgagcacccccatgcctggctgacccagctgtctgtcctgtcgcccccagaccaccc

SEQ ID NO: 503140 - DNA, 201 bp, Homo sapiens
gtaaaatgggctaacctccccgagtggcctgagctggccgtgagggagcagagctgagggtgctgaagcaggcgcggtgagtaggtcctcaggcctggctycaaggggacccaggtatccagccagtggctgtgcagggactgagtggggcaggcgcggccatgacctggacccggggggctgccaagggatctgagagcg

SEQ ID NO: 503141 - DNA, 201 bp, Homo sapiens
ctggcggcagggggtgatgtgggtgggaggtagtgccttcttggcattctcaccgcagcctgggtgccgggtgccactctgacctcagccatggcagggtmgggggatgccgatgggcgctgcacgggctctcagaggcccctcacctatggccatggccttgactgtgggggcctctgtccaccgatgatctcccttcat

SEQ ID NO: 503142 - DNA, 201 bp, Homo sapiens
ccagagctgggggtcccctcgcttccccgcagaccaccctagtgccgctgttccggaactcgcgcctggtccagttccacttcaccaaggacctggagacrctgaagagcctgtgccggatcatggacaatggcttcgtgagtggtgccagcagacgcaggggaggggccggccagggcagagcgagcccggaccgctcac

SEQ ID NO: 503143 - DNA, 201 bp, Homo sapiens
cagggttgggctggttgagcggtggagatgacgtttcctgaggtagggaggacaggggagtctcagtttggtcctgggcccgggggactcagcgggctggragccgggaggccgtggtgggagaagccagagctgggggtcccctcgcttccccgcagaccaccctagtgccgctgttccggaactcgcgcctggtccagt

SEQ ID NO: 503144 - DNA, 201 bp, Homo sapiens
ggtgcttccttccccattccctccagcacgggcggggggaggggacgctgagcggatgaatttatagacaccatccccctcgccttggcatgaaaagcggmaatggggtggacagcgtcaatgtctaacaggtgtttgtttcatatgggtctaaaactaatgcttttctcaagaccccgcaactcagcctggaccagtttc

SEQ ID NO: 503145 - DNA, 201 bp, Homo sapiens
agatggcctcagtccacagggaggaagggactctaacagcctctgtttgcccacagttcactctggctacagaatgctttcagctgggctactcaacagayggccactgcaaggggcacccggaccccacactaccccagccccagcggctgcaatgggaccttccagaccaggtgaggctgggtttctgggcctctcctc

SEQ ID NO: 503146 - DNA, 201 bp, Homo sapiens; identical to SEQ ID NO: 283014

SEQ ID NO: 503147 - DNA, 201 bp, Homo sapiens
aggcacaggtgtggatttctctcccgccagactggggcctccaaggcctcaatgacatccaccgacttctgactccttccagcaggcagctggcctctccraggaataagggtgaaattgccacagctggctgacacaggacaggggcaactggtttggcaaccccacatccaggccaataaagatgtgtgagctgggtgt

SEQ ID NO: 503148 - DNA, 201 bp, Homo sapiens
ggtctctgtccccctctctctgggtctctgccccctctctctctgcgtctctgtccccctctctctgggtctctgtcccctgtctctgggtctctgttccyttctctcttggggtctccgatgctcttaagtctctgtgtccttctctttgggtttctgtcccactgtcgacccctgccccgtcaactccctggctccggt

SEQ ID NO: 503149 - DNA, 201 bp, Homo sapiens
cagtggcgtgatcaaagctcactgcagccttgacctcccagactcaagccatcctcccatctcagcctcctgagtagctgggactacaggcatgtgccccyaagcccggctaatttttaaattttttgtagacatggggtcttgctatgttgcacagactggtctcaaactccgaggctcaagctatcctcccacctcagc

SEQ ID NO: 503150 - DNA, 201 bp, Homo sapiens
acgtttctgggtgaggagcggtgctggtcggtttccttccggggatccaggtttctgcttccgggatgtctgaggctcacttccggcatttcagctggttyatttctgggagactatcacccctttttccgagaattttgatgtctgctcccaggacccctttagcaatttctccgtggctcacttctgggatccacagcc

SEQ ID NO: 503151 - DNA, 201 bp, Homo sapiens
tgatgaacatgaacctgagaccgcatctgtgaatatcagaggtttctgtttctcagggactgccccctacccgaaaaagggctgcatgaaaagaggtcccrggttagatggcctcagtccacagggaggaagggactctaacagcctctgtttgcccacagttcactctggctacagaatgctttcagctgggctactcaa

SEQ ID NO: 503152 - DNA, 201 bp, Homo sapiens
ggggtttcaccatgttggccaggctggtctcgaactcctgacctcaggtgatctccctgcctcggcctcccaaagtgctgggattacaggcgtgagccaaygcacctggctggaactccatttttacaacgtaactctgcccatttaacctctttgtgacttgtgaccttcctttgcacccctgtaccctctctgcccaga

SEQ ID NO: 503153 - DNA, 201 bp, Homo sapiens
tggtgcgatctcagctccttgcaacctctgcctccccgactcaagcgattctcctgcctcaggctaccgagtagccgggattacaggcgtgcaccaccacrtgtggctaatgtttgtatttttagtagagacagggtttcatcatgttggccaggctggtcttgaacacctgacctcaggtgatccacccgcttagcctcc

SEQ ID NO: 503154 - DNA, 201 bp, Homo sapiens
catgctctgctggctggccggggccatgatcggtgagtgagtcttgggatggggcccccagatgtggcacccgagaatccagtatcagacctaggaccccygacagtagacagccagaccctggagcccacacctgcagagtctgtagaccaggggctgcatagagctgaggaccccagacccagtgctttgggacctgga

SEQ ID NO: 503155 - DNA, 201 bp, Homo sapiens
tcaaccccattcctacccccaacccgaaacccatgcttcccccacccccaaatcaggccatatgcatccacaacctcaaaccccaacacgaacctcatctycagccccaactccaaccgtcctcccactgccaatcccatcctcaaccccaaccccatctctacctgtttcagactcaaaaaccaccactgtccaacccca

SEQ ID NO: 503156 - DNA, 201 bp, Homo sapiens
aaggggccgctttctttgtgtcactggatgctgagcccgcggggctcaccagggaggacccggcagcgtcgttggatgcctacgcccatgctctgctggcyggccggggccatgatcggtgagtgagtcttgggatggggcccccagatgtggcacccgagaatccagtatcagacctaggacccccgacagtagacagcc

SEQ ID NO: 503157 - DNA, 201 bp, Homo sapiens
ccgggaggcggagcttgcagtgagccaagatggcgccactgcactccagcctgggcgacagagcgagactccgtctcaaaaaaaaataaaataaaataaawaaataaataaataaataaataaataaataaataataaagacagaatcctgcttttatggagttctcattcgagttgggggagaaggcaataaaacagatg

SEQ ID NO: 503158 - DNA, 201 bp, Homo sapiens
tcgttcctcattcattccatgccctggtacttctagaaggccttactgagctccagaccctgctctgaatagggatcatttttctttttcttttcttttcttttttttttttttttgagacagggtcttacttactttgttacccaggctggagtgcagtgtcaccatcacagctcacttcatccctgaactcctgggctc

SEQ ID NO: 503159 - DNA, 201 bp, Homo sapiens
ccccgtctctactaaaaatacaaaaattagccgggtgtggtggtgcgcgcctgtagtcccagctactcaggaggctaaggcaggataatcacttgaacccrggaggcggaggttgcggtgagtcgaaattgtgccactgcacttcagccttggtgacagagcgagactctgtctcaaaaaaagaaaaaaagtatgagcttt

SEQ ID NO: 503160 - DNA, 201 bp, Homo sapiens
ggataatcacttgaacccgggaggcggaggttgcggtgagtcgaaattgtgccactgcacttcagccttggtgacagagcgagactctgtctcaaaaaaaraaaaaaagtatgagctttgcccgtctctagtcatgtagtcttaggcaaggatctcatcgttgttgattgtcaaggccttcatctgtaaaatgaggtatga

SEQ ID NO: 503161 - DNA, 201 bp, Homo sapiens
cacctcttctcccttgccctacacctagccccgcacctacaaggtattgtggttccatggaaggagtttggactctggggccagacacacctaggaacccrcctggctctccctggctgtgtgaacctggccaaatgatttcccctctctaagcctcagttccccatctgtaaaatggggttgatattcccaccttgcagg

SEQ ID NO: 503162 - DNA, 201 bp, Homo sapiens
cgtgaacccaggaggcggagcttgcagtgagccgagatagcaccacagcactccagcctgggcgacagagcgagactccatcccaaaaacaaaacaaaacaaaaaaaacgctgattgctggaccccaccccgagagattctggcttgttaggtcttaaaggcacccaggaatatgcatttcgaacaagctcccaggcagtg

SEQ ID NO: 503163 - DNA, 201 bp, Homo sapiens
gccgagatagcaccacagcactccagcctgggcgacagagcgagactccatcccaaaaacaaaacaaaacaaaaaaaacgctgattgctggaccccacccygagagattctggcttgttaggtcttaaaggcacccaggaatatgcatttcgaacaagctcccaggcagtgctcccaggagccacagtttcagaactattg

SEQ ID NO: 503164 - DNA, 201 bp, Homo sapiens
cttgtaaatggcacctggaatgtagtaagtgctcattaaacgttagttatctctctgaggcttccaaaggagtttagttagtaacgcagtgctgttggtcrttcctcattcattccatgccctggtacttctagaaggccttactgagctccagaccctgctctgaatagggatcatttttctttttcttttcttttcttt

SEQ ID NO: 503165 - DNA, 201 bp, Homo sapiens
gtctcccaagtagttgggattacaggtgcctgccaccatgcccggctaatttttgtatttttactagagacggatttcaccatgttggccaggccagtctygaactcctggcctcaagtgatccgcctgcctcagcctcccaaagtgttgggattacaggcgtgagccaccgctggtcttgaactcctgggctcaagggat

SEQ ID NO: 503166 - DNA, 201 bp, Homo sapiens
gccaggctaatctcgatctcctgacctcaagtgatctgcctcccaaagcgcttgggttacaggaatgagccaccgcgcccggcccaaactcctgctctgtycctgttctggaatgcgcatgcccaatgtgtaaccagcacccatgtctgtcccagggtttctggttctagaactcttgcactgtctccatacagggactcc

SEQ ID NO: 503167 - DNA, 201 bp, Homo sapiens
cgtgatcaaagctcactgcagccttgacctcccagactcaagccatcctcccatctcagcctcctgagtagctgggactacaggcatgtgcccccaagccyggctaatttttaaattttttgtagacatggggtcttgctatgttgcacagactggtctcaaactccgaggctcaagctatcctcccacctcagcctccca

SEQ ID NO: 503168 - DNA, 201 bp, Homo sapiens
tggacgccgtggctcgaagggggcggggatagaacgcggggattggaaggaggcggggataaaacccgggacctgaatacccggctagggacacgagagasaggaatcggggtttctgggtgacggtgatctcggggtgggcaggactccaaaggcccgtcgacccggtggtggactccttgcactgggattggacatatg

SEQ ID NO: 503169 - DNA, 201 bp, Homo sapiens
aacatgttggccaggctaatctcgatctcctgacctcaagtgatctgcctcccaaagcgcttgggttacaggaatgagccaccgcgcccggcccaaactcytgctctgtccctgttctggaatgcgcatgcccaatgtgtaaccagcacccatgtctgtcccagggtttctggttctagaactcttgcactgtctccatac

SEQ ID NO: 503170 - DNA, 201 bp, Homo sapiens
gtctagggttggggggtacctgggcggaatgtgacggtcatgctcagtgacctggatctagacgcgccatctgggattcatcattccaccctcttttgggktcaggacctgtatttgggtcagtggctccatcgggggcaaacctgaccctgggtgttttgccatcccctctcctggtccccaggacttcctgtatgtcac

SEQ ID NO: 503171 - DNA, 201 bp, Homo sapiens
cagagtctcactctgttgcccagactggaatgcagtggggtgatcttggctcactgcaaccacctcccaggttcaagcgattctcctgcctcagcctcccragtagctgggattacaggcatggattatacgcccagctaatttttgtatttttagtagagacggggtttcaacatgttggccaggctaatctcgatctcc

SEQ ID NO: 503172 - DNA, 201 bp, Homo sapiens
tgggccccccaaaaactacccacttccagtttctagaactccatatccttcccttatggtgaaattatcatttcttcctttcatctccagcttcttttgtrgttgttgtttctgagacacagtctcactctgtcgcccaggctggagtgcagtggcgggatctcagctcactgcaacctccgcctcctgggttcaagcaat

SEQ ID NO: 503173 - DNA, 201 bp, Homo sapiens
aaccttgtctctactaaaaatacaaaaattaggccaggcatggtggctcatgcctgtaatcccagcactttggaaggctgaggcacgtggatcaactgagrtcaggagttcaagaccagcctggccaacagggtgaaaccctgtctctactaaaaatacaaaaaattagctgggcgtggtggcaggagcctgtaattccag

SEQ ID NO: 503174 - DNA, 201 bp, Homo sapiens
taaggcaggataatcacttgaacccgggaggcggaggttgcggtgagtcgaaattgtgccactgcacttcagccttggtgacagagcgagactctgtctcaaaaaaagaaaaaaagtatgagctttgcccgtctctagtcatgtagtcttaggcaaggatctcatcgttgttgattgtcaaggccttcatctgtaaaatga

SEQ ID NO: 503175 - DNA, 201 bp, Homo sapiens
caactttgtcagggccatggaggacaaagagaagacggtgggtgcagccctcgcttgaggcttcagttatttctgtgtactcactcatccacttgcaaacrttgatgggacctactgaagccagcctccacgaggagcacaagggacaagggatgaatcggacctggcctctgacttcaaagagctcactgatggggggag

SEQ ID NO: 503176 - DNA, 201 bp, Homo sapiens
gattctcttgcctcagcctcctgaggagctgggattacaggtgcccactaccacacccggctaaatttttttatttttaatagagatgaggtttttccatgttggccaggctggtctcaaactcctgacctcaggtgatccagccacctcagtctcccaaagtgttgggattacaggcgtgagccaccgcgcccggcattt

SEQ ID NO: 503177 - DNA, 201 bp, Homo sapiens
tacgcccatgctctgctggctggccggggccatgatcggtgagtgagtcttgggatggggcccccagatgtggcacccgagaatccagtatcagacctagracccccgacagtagacagccagaccctggagcccacacctgcagagtctgtagaccaggggctgcatagagctgaggaccccagacccagtgctttggga

SEQ ID NO: 503178 - DNA, 201 bp, Homo sapiens
gacagagcgagaccttgtctccaaatactaagtaaataaaagtcctagggtgctgatgattactagggtactttgaacaactgacgacacctaagaagtakataataaatggtcactatttttatgtgtctggccttcctgcccccatgcttctgccaacgccacccctagactacatccgccacctccatgacagccaac

SEQ ID NO: 503179 - DNA, 201 bp, Homo sapiens
ccgcttagcctcccaaagtgctgggattacaggcgggagccaccgcgcccagctgtaccttgttatttccaccagctatgtaatattccactgccggagtrtaacagggtttagctaactgatcccccatggatggatttctaggtgatcgctagttactgactacgatggctgacttctttggctctatcctccctgcct

SEQ ID NO: 503180 - DNA, 201 bp, Homo sapiens
gggtttcatcatgttggccaggctggtcttgaacacctgacctcaggtgatccacccgcttagcctcccaaagtgctgggattacaggcgggagccaccgygcccagctgtaccttgttatttccaccagctatgtaatattccactgccggagtgtaacagggtttagctaactgatcccccatggatggatttctaggt

SEQ ID NO: 503181 - DNA, 201 bp, Homo sapiens
cgacagagcgagactccatcccaaaaacaaaacaaaacaaaaaaaacgctgattgctggaccccaccccgagagattctggcttgttaggtcttaaaggcrcccaggaatatgcatttcgaacaagctcccaggcagtgctcccaggagccacagtttcagaactattgccttagagtagtgatagctggaaggaaaaact

SEQ ID NO: 503182 - DNA, 201 bp, Homo sapiens
ccctctgggtctctacccccgactctctctgggtctctgcccccctctctctctgggtctctgtccccctctctctgggtctctgccccctctctctctgsgtctctgtccccctctctctgggtctctgtcccctgtctctgggtctctgttcccttctctcttggggtctccgatgctcttaagtctctgtgtccttct

SEQ ID NO: 503183 - DNA, 201 bp, Homo sapiens
ggtttccttccggggatccaggtttctgcttccgggatgtctgaggctcacttccggcatttcagctggttcatttctgggagactatcacccctttttcygagaattttgatgtctgctcccaggacccctttagcaatttctccgtggctcacttctgggatccacagccccacctgctgagaacctctgctcacttct

SEQ ID NO: 503184 - DNA, 201 bp, Homo sapiens
ggctgggcaggatggactcaggcacatcccgggccctccaggggcacgtgggcccaggtgcggacatccctgaagacccaggcagcggaggccctggaggyggtggaaggggccgctttctttgtgtcactggatgctgagcccgcggggctcaccagggaggacccggcagcgtcgttggatgcctacgcccatgctctg

SEQ ID NO: 503185 - DNA, 201 bp, Homo sapiens
gaggcatgagaatcgcatgaacccgggaggtggaggttgcagtgagctgacattgtgccactgtacttcagcctgggcgacagagcaagaatacatctcaaaaaaaaaaaaaaaaaaaaaaaaagaaaagaaaaactgaggctcagggagaggcagaggctggcccagggtcacctggcaaagaaaggggactgggatgag

SEQ ID NO: 503186 - DNA, 201 bp, Homo sapiens
ctttgcacccctgtaccctctctgcccagatcccacctgccctgcacctcttctcccttgccctacacctagccccgcacctacaaggtattgtggttccrtggaaggagtttggactctggggccagacacacctaggaacccgcctggctctccctggctgtgtgaacctggccaaatgatttcccctctctaagcctc

SEQ ID NO: 503187 - DNA, 201 bp, Homo sapiens
gtttccttccggggatccaggtttctgcttccgggatgtctgaggctcacttccggcatttcagctggttcatttctgggagactatcacccctttttcckagaattttgatgtctgctcccaggacccctttagcaatttctccgtggctcacttctgggatccacagccccacctgctgagaacctctgctcacttctt

SEQ ID NO: 503188 - DNA, 201 bp, Homo sapiens
aggcatgagaatcgcatgaacccgggaggtggaggttgcagtgagctgacattgtgccactgtacttcagcctgggcgacagagcaagaatacatctcaaaaaaaaaaaaaaaaaaaaaaaaagaaaagaaaaactgaggctcagggagaggcagaggctggcccagggtcacctggcaaagaaaggggactgggatgagg

SEQ ID NO: 503189 - DNA, 201 bp, Homo sapiens
ggcatgagaatcgcatgaacccgggaggtggaggttgcagtgagctgacattgtgccactgtacttcagcctgggcgacagagcaagaatacatctcaaaaaaaaaaaaaaaaaaaaaaaaagaaaagaaaaactgaggctcagggagaggcagaggctggcccagggtcacctggcaaagaaaggggactgggatgagga

SEQ ID NO: 503190 - DNA, 201 bp, Homo sapiens
gcatgagaatcgcatgaacccgggaggtggaggttgcagtgagctgacattgtgccactgtacttcagcctgggcgacagagcaagaatacatctcaaaaaaaaaaaaaaaaaaaaaaaaagaaaagaaaaactgaggctcagggagaggcagaggctggcccagggtcacctggcaaagaaaggggactgggatgaggac

SEQ ID NO: 503191 - DNA, 201 bp, Homo sapiens
cgggaggtggaggttgcagtgagctgacattgtgccactgtacttcagcctgggcgacagagcaagaatacatctcaaaaaaaaaaaaaaaaaaaaaaaargaaaagaaaaactgaggctcagggagaggcagaggctggcccagggtcacctggcaaagaaaggggactgggatgaggaccttcctttgatgagttggta

SEQ ID NO: 503192 - DNA, 201 bp, Homo sapiens
gtagggcggccagccctccctggttctggggacccctgccccatctccaaagaccgtcctctccagcgccttagtgtcagaagaaaaactgaggcttggcygggcacggtggttcatgcctgtaatcccagcattttgggaggccgaggtgggcggatcatgaggtcaggagttcgagaccagcctggccaacatagtgaa

SEQ ID NO: 503193 - DNA, 201 bp, Homo sapiens
cagagcgagactccgtctcaaaaaaaaataaaataaaataaataaataaataaataaataaataaataaataaataataaagacagaatcctgcttttatrgagttctcattcgagttgggggagaaggcaataaaacagatgagcaaaacagaaggcaataaaacagatgagcaaaatatagggtatggtgacattctat

SEQ ID NO: 503194 - DNA, 201 bp, Homo sapiens
tccttccaggattcccacaggctggggcagcacattgaggacgcactgctggatgtggcctccctgttccaggcgggacagcattttaagcgccggttcaragggtcagggaaggagaactccaggcacaggtgtggatttctctcccgccagactggggcctccaaggcctcaatgacatccaccgacttctgactcctt

SEQ ID NO: 503195 - DNA, 201 bp, Homo sapiens
cacccaggaatatgcatttcgaacaagctcccaggcagtgctcccaggagccacagtttcagaactattgccttagagtagtgatagctggaaggaaaaastgtcccctcaatagaaataatggctgtcatttattaaacacctaccaacttccatggaaagtgactttggaagcttggtgctgccacaatgggagggggc

SEQ ID NO: 503196 - DNA, 201 bp, Homo sapiens
ccacggtagcttttattaacacaaggctattgtgtgccattcagttgtgagtataataaatgtgccaagaagatgcagtcgttaaaatgagacaaaactaygcacagaggactaaacaggatttcagactcgagacgcaaaccccgaggtcaggctcagctagagacactgaactggcccagtatcttgccgagtaaatca

SEQ ID NO: 503197 - DNA, 201 bp, Homo sapiens
gccatgcctggtccgcagccaccgtgtcatctgccccaaagtcagacatttcttctgacacaaatataaaatgagcctaatacttccagacaacccagtcytccctacggcagctgagtcgtgtcttttatacaatgctgccagtaacagtcacacctggctgcacagctggctgcctcaacttctaggtgcctcgaaatg

SEQ ID NO: 503198 - DNA, 201 bp, Homo sapiens
cactcccaccctgtcaatgcctctctgaattatgtgatcaactgcctggagtatgaactaggcacatgcaaatagagaacagaggtcttgttgaaaatatratgctgaattttaaaaactcactccccaaattgaaggaacaagaccagagcatttggtttcctgtggtcacttgatccctctccagagccagctgctgct

SEQ ID NO: 503199 - DNA, 201 bp, Homo sapiens
gtgatcaactgcctggagtatgaactaggcacatgcaaatagagaacagaggtcttgttgaaaatatgatgctgaattttaaaaactcactccccaaattraaggaacaagaccagagcatttggtttcctgtggtcacttgatccctctccagagccagctgctgctctccattgtcagcacactccactcactgcccta

SEQ ID NO: 503200 - DNA, 201 bp, Homo sapiens
gtgtgatgatgttaatataatgtaaatgttgatgtaacagtacatttctggcaacatttcagggtccttcctcttgccttattagggggtgatgcattcakacagacttcccctgttagaagagctagcagtaagacagcccaagtacttggaggaaattcactctagcccattggtttggaaaagaaggtatagcctgca

SEQ ID NO: 503201 - DNA, 201 bp, Homo sapiens
taatataatgtaaatgttgatgtaacagtacatttctggcaacatttcagggtccttcctcttgccttattagggggtgatgcattcatacagacttcccytgttagaagagctagcagtaagacagcccaagtacttggaggaaattcactctagcccattggtttggaaaagaaggtatagcctgcaatttagaaatgc

SEQ ID NO: 503202 - DNA, 201 bp, Homo sapiens
aaatgcaccttatttttaaatacttgaattctgctgctgctcactggaccaggaggagtcagtgataaatgctcatatttacctttttgggggcaaaaacscagttctgaaatgctgggtattgtaatcagatgtaaagaaggtgcctatgatagacgagtgaaaacaatgatatctaaggagaggaactgacgctccaac

SEQ ID NO: 503203 - DNA, 201 bp, Homo sapiens
attccttgcaccttctcccgttcctatatacatactttttacatataaacaattacaacttcataaggatttggtacatatttacatgcttctctttgccrtatagtttgccttattattacagaactgtgattaagagtgtctgtggtggatagaggtgtatgaagtgctccagacatatatacaacatgctaaaccatg

SEQ ID NO: 503204 - DNA, 201 bp, Homo sapiens
tattagggggtgatgcattcatacagacttcccctgttagaagagctagcagtaagacagcccaagtacttggaggaaattcactctagcccattggtttrgaaaagaaggtatagcctgcaatttagaaatgcaccttatttttaaatacttgaattctgctgctgctcactggaccaggaggagtcagtgataaatgct

SEQ ID NO: 503205 - DNA, 201 bp, Homo sapiens
cgtcccgggtctcccagcaggaatggaaatcacacctaacgttgccttcaccaatgcactgcttcctctctgaaaaagagtggagaaaacgccgtttagtrcgacgacctggggaatgtgtgtgacccaccacaggtcagcactcaaggcagttggggccttgaccaggcactggctctgcacaggatggtcactgagcca

SEQ ID NO: 503206 - DNA, 201 bp, Homo sapiens
ctggtccgcagccaccgtgtcatctgccccaaagtcagacatttcttctgacacaaatataaaatgagcctaatacttccagacaacccagtcctccctayggcagctgagtcgtgtcttttatacaatgctgccagtaacagtcacacctggctgcacagctggctgcctcaacttctaggtgcctcgaaatggctaaat

SEQ ID NO: 503207 - DNA, 201 bp, Homo sapiens; identical to SEQ ID NO: 385215

SEQ ID NO: 503208 - DNA, 201 bp, Homo sapiens
cccagacctgctggagcaaggggactggagcctgtcccagaacaagagcgccctggactgccctcatcagcacctagacgtaccgcacgggaaggaggagyagatctgctgacctcagggcctgacagtgtgggacaggctcttctttcccaaaattagggagctcttgacagaaagcagttctgatgcttacatctggaa

SEQ ID NO: 503209 - DNA, 201 bp, Homo sapiens
tagtaagtgcccaagagaacaagaataaacctagatccgtgggactccaagcctgtgcgcgctccatgcttgctttttccaccacaccacgttaacacaakttcctccttccatgagaccccaggggaaaggggcacctgagaagccctcgtggcaccctcccaggttgtttccacggctactacagtaagaaagtgttgc

SEQ ID NO: 503210 - DNA, 201 bp, Homo sapiens
gtggctcacacctgtaatcccagcactttgggaggtcaaggcaggagaatcacttgaagccaggagttcaagaccagcctgggcaacaaaatgagaccctrtctctacaaaaaaatttaaagattagccttccaggcctatagtcccagctactcaggagactgaggtgggaggatcacttgaacccaggaagtcaaggct

SEQ ID NO: 503211 - DNA, 201 bp, Homo sapiens
gtcaaggcaggagaatcacttgaagccaggagttcaagaccagcctgggcaacaaaatgagaccctatctctacaaaaaaatttaaagattagccttccakgcctatagtcccagctactcaggagactgaggtgggaggatcacttgaacccaggaagtcaaggctgcagtgagctgtgatcatgccactgcactccagc

SEQ ID NO: 503212 - DNA, 201 bp, Homo sapiens
ggcaggagaatcacttgaagccaggagttcaagaccagcctgggcaacaaaatgagaccctatctctacaaaaaaatttaaagattagccttccaggcctrtagtcccagctactcaggagactgaggtgggaggatcacttgaacccaggaagtcaaggctgcagtgagctgtgatcatgccactgcactccagcttgga

SEQ ID NO: 503213 - DNA, 201 bp, Homo sapiens
aacctagatccgtgggactccaagcctgtgcgcgctccatgcttgctttttccaccacaccacgttaacacaatttcctccttccatgagaccccaggggmaaggggcacctgagaagccctcgtggcaccctcccaggttgtttccacggctactacagtaagaaagtgttgctgggggaaggtcagctctctggcccac

SEQ ID NO: 503214 - DNA, 201 bp, Homo sapiens
tccctggaggagtgacccatccatctttcctcaggatagcaacaaaaagtccttgtcgaaaccacatttcaagtccttttacgtataaccatccttcggcmagccccggtaggcaggtaagggcaggactcatttcaccattttttttaaactggcccagaggtttgaggtgacttgtggaaggtcaccatatcagtgaag

SEQ ID NO: 503215 - DNA, 201 bp, Homo sapiens
gagctcttgacagaaagcagttctgatgcttacatctggaatctgaggcatcctctgactccactcaaagagggtgagggccttcttaagatacaaatggyggaggattgctgccagagaagtctggtcagagccacagggtctgcctccagccaaacgggagcttttggtgagaaggtgttggacaggggattggcgccc

SEQ ID NO: 503216 - DNA, 201 bp, Homo sapiens
cacatacatgttctctaatccttctaagaaccccctagattagactttgtaacctccttttacaaatgaggaaactggctgggtgtggtggctcacacctrtaatcccagcactttgggaggtcaaggcaggagaatcacttgaagccaggagttcaagaccagcctgggcaacaaaatgagaccctatctctacaaaaaa

SEQ ID NO: 503217 - DNA, 201 bp, Homo sapiens
gctgggtgtggtggctcacacctgtaatcccagcactttgggaggtcaaggcaggagaatcacttgaagccaggagttcaagaccagcctgggcaacaaartgagaccctatctctacaaaaaaatttaaagattagccttccaggcctatagtcccagctactcaggagactgaggtgggaggatcacttgaacccagga

SEQ ID NO: 503218 - DNA, 201 bp, Homo sapiens
tggagatgtcagggctgaagaccctggagcatgtggcagtgacagtctccatcactcacccacggcgcggcagcttggagctgaagctgttctgccccagwggcatgatgtccctcatcggcgccccccgcagcatggactcgtatgtacacccgcccgaggcctgagcaaccttttcagcaagggcctttccagggaaaa

SEQ ID NO: 503219 - DNA, 201 bp, Homo sapiens
acattttgcaaaatatcagcatgctaattacctctgaagtaattgtttaaaattccatttgggaattgttgctcaagaacagtagtagtcaactccggctscacatgagaatcacaggggaaaaatatttttaatagcaattatctgggcctcataccaaaagacactggtttgattggtctgggttattctaggcatctg

SEQ ID NO: 503220 - DNA, 201 bp, Homo sapiens
ggcaacttcagtaagacctaggggcactgcatataagaatactaaagattagatggaacaaaaatattttacagtataattgaggtccagggttttccctragcaatcaaaaataaactcttatgagctagagaagaagaatggagcataattgctacctgccatgcatattacaaatgttagaaattttatatatgaatt

SEQ ID NO: 503221 - DNA, 201 bp, Homo sapiens
taataactggagattttgacattagaataaagaaaaaaaaacttccaaaactcccataaaaagctaatgcatttatgcatatcaaacagaacaggaataarttacatagactgaactaatggaagactgaaataatctttatgacactttgtttgaaacactgctaattctttgatttttcagagtccaaaaatccttttt

SEQ ID NO: 503222 - DNA, 201 bp, Homo sapiens
ccgacctccctgggatggagctcccagagggaggggcaggccacctttttgctgttttgcagccttcactgttgatatctttagatactggaaaattcaargccactggggactggagtggacccccagcatactgcagcagccctgtggaaaagtggccagactgttatgtggtccccaatcgtgtagctcctcactggg

SEQ ID NO: 503223 - DNA, 201 bp, Homo sapiens
gaaaattgggtttaacattaatagtacactaatgcaaaggtgaaatttggctttctcttttgaataaatttttgtgtaatattaaaaagtaataaaaaatrttttgtttgccttttgaataaatgacagaaaaaagaaaggaaagaagagacagattcagttggcctcatactgtctttattgggttttatttgaaaagct

SEQ ID NO: 503224 - DNA, 201 bp, Homo sapiens
ctattgacttcatgcaattcagtttttttccttcaaaattaacattcgtagagatttacttagacatctcccttcccaaataaatgaggttagtagatgasaaaggtaatcaaatgtgatctggtgaagtcttcatgttggagctgaaatcacacctgacgttggtgttcagagaatgccaaagccatccgagtaaggcaa

SEQ ID NO: 503225 - DNA, 201 bp, Homo sapiens
gatataaattaagacatattgatcctgcaagtcagagcatacaatagatgtagatgctggtccttacttggcttgcttccactgagacagtttaatgataygcaactgtatatgatgtcgagatttatctttagctttttctttttcataaaaaattttaataaccagttttaaaatcattttcgtggttaatctttctaa

SEQ ID NO: 503226 - DNA, 201 bp, Homo sapiens
atgaaactttggaagaattattttgtcaaagtttattctgtacccatgagttcaatacttcaataataaacaccacccaggagttgtgtcttagtgcacaygaatacaacaatataaattgtaaattgttggttctttcattaaagaggccaaataaagctaaaatatcctaaggagtcacttattttttttctttacttg

SEQ ID NO: 503227 - DNA, 201 bp, Homo sapiens
ggtaaaaaatataaaggtgtagccaagaaccttaatttccagtacattatccatgagtcaaaaatattgttgagcacattttatgttccaggctctatttkagattgtatgggcacatgaaaaacttggagtctctgctggcaagatgcttacatgctagaggaggtacatatgtagttgtttttttaaaaagtaaacgta

SEQ ID NO: 503228 - DNA, 201 bp, Homo sapiens
atgctagaggaggtacatatgtagttgtttttttaaaaagtaaacgtatgagactggacatggtgtctcaggcctgtaatcccagcactttgggaggctgmggtgggtggatcacttgaggtcaggagttccagaccagcctggccaatatggcaaaattttgtctctactaaaaatacaaaaattagtcaggcgtggtgg

SEQ ID NO: 503229 - DNA, 201 bp, Homo sapiens
gactggacatggtgtctcaggcctgtaatcccagcactttgggaggctgaggtgggtggatcacttgaggtcaggagttccagaccagcctggccaatatrgcaaaattttgtctctactaaaaatacaaaaattagtcaggcgtggtggcatgtgcccatagtcccagctactcaggaggctgaggcatgagactcattt

SEQ ID NO: 503230 - DNA, 201 bp, Homo sapiens
gctgcccaggctggagtgcagtggcccagtctcggctcactgcaaccaccatctcccaggttcaagcgattctcccgtctcagcctcccaagtagctgggattacaggcacccgccatcatgccccactaatttttgtattttagaagagatagggtttctccatgttgatcaggctggtcttgaactcctgacctcaggt

SEQ ID NO: 503231 - DNA, 201 bp, Homo sapiens
agtggcaggaaggatacaaaagagaactataacacttggactgggaattgtttaccttattctgtgggcagcatggagtcactgagacttttacaaagggmacagaaagcataaagtagacaagtaaagtggtagtggaatagattggattcgaaggaaattaagcatttcaaagtcaacacaggaatcaagcattttctt

SEQ ID NO: 503232 - DNA, 201 bp, Homo sapiens
gctaggtaccaatatgtgctataaagaagataaaataaggttaatgcagtagacagtgactgctttagctggtgtgtttggccaaagaccttaaggtgacmtaggaaatccaatgtggatgataaatggggctggatgagcttggaggcgtggcaaatagtttggattttattctaggtggaggattttccgcaagggagt

SEQ ID NO: 503233 - DNA, 201 bp, Homo sapiens
tttttttttctccaacttatgtctgttctacaggggcatactctggagtacgcaaatccaacagtcctgacagaggaaagcagcttcctgtatagttgacstggaaggtcaacttcttgtcagagttttacatgaattatttttatggtggaaatagatgtaaatgttccaccaaaaatgatttttatcaggtaaatatcc

SEQ ID NO: 503234 - DNA, 201 bp, Homo sapiens
taactgggttttagaaagagagcatacttctgagtaattgttccaagggaattttaattaaagtaaattagtgtgaccagctaaatcttgctaggtagtayacagctgagctggaaaatgatatagagaagtttatttgctccagacagaaatattttaaaggcatcgggtaaatatataaactaataatgttaattttgc

SEQ ID NO: 503235 - DNA, 201 bp, Homo sapiens
tatattttacttttcatattttatcatttgagccttgtgttattaagtaaatgtccacctgccattccagtttgtaaagttcttgccaattagagttcacrtgctgttcatttttgcatccttcagcacacctagccaagcacagcactcataatagatgtttaacaaatgttcattgtgaatgagctcatggaccaactt

SEQ ID NO: 503236 - DNA, 201 bp, Homo sapiens
aatttttgtttaatggtttaatttaaaataaaccattaatttaaagtttttaaaataaattggtggttttttttttttctccaacttatgtctgttctacrggggcatactctggagtacgcaaatccaacagtcctgacagaggaaagcagcttcctgtatagttgacctggaaggtcaacttcttgtcagagttttaca

SEQ ID NO: 503237 - DNA, 201 bp, Homo sapiens
cattcttttgctgatacaataaaggccaactatcccatcttatgagagtccagcttctaatttcaactgaggttataatgcttctgtacctaatggagtartatcctccctgagattcataaaacctaaataggaattccttgagtcctctacaaaatgtaaataaagctgaggcccaaagagtaatgaggctgtagtgac

SEQ ID NO: 503238 - DNA, 201 bp, Homo sapiens
cagcatgcccacatagccagctgggtctcatcttttgcaaaatatggccctctggccaggtggatcaggcatgagcagagagactatggctgaacttgackgctccttgacagatccctcaccctctttatggtccaaagctgcccagtctccagagccacaaaaccagccttagtttaatgttgcctagaggggtcatag

SEQ ID NO: 503239 - DNA, 201 bp, Homo sapiens
aaccaccaaaaggcattcctcatttctgctactgtttctttgatttctagcatttccttttgattctttctcatagtttctgtctgtattgacattatctrtctgattttgcatgttgtgtacttttttccatccctttttttattaatcatagtgtaactgtgtaccctcatttttctaagagatagttttttactatct

SEQ ID NO: 503240 - DNA, 201 bp, Homo sapiens
gaatttgagatgtgactagaactcacaacagagtattggggttgaagattatatttgagtttcgtctgcatggagattgtcgctgaaaccttgaatagagrtgtgatacctgggaaagaacaagaagtggggttagaacctttgtggatgtgtaaatgcaaaggagtgggaaaaaataaacttaatagcaggaaaaccgga

SEQ ID NO: 503241 - DNA, 201 bp, Homo sapiens
ggttattctaggcatctgaatgtgctggaagctccccacagtgacttgagtgagttagagtctcttccaacgaacaggtgtatgtctggaggcaggtgggygggatgaggccacctgaggcctgttggtaatcaggaagaaagtctccaatgcacacggagtacctattaaaaagactataggatggttcctgagcctgga

SEQ ID NO: 503242 - DNA, 201 bp, Homo sapiens
ggcaaagatttcatgaaggcaccagaattaattgcaacaaaagcaaaaattgaaaaatggaatctaattaaacttaagagcatttgcaaagaaattatcarcagagtaaacagccagcctacagaaggggagaaaacatttgcaaactgtgcatctgacaaagttctaacattcagcatcaataaggaacttaaatttaaa

SEQ ID NO: 503243 - DNA, 201 bp, Homo sapiens
ggggtttcgtcatgttggccaggctggtctcacagccctggccttaagtgatccacctgcctcggcctcccaaagcgctgggattacaggcttgagccacygcaccaggctgggaatacatctttcttttcggttggcgctggtcctctagtaaggcagtagcttaatcatttacatgtcctctttctatctcagccttcc

SEQ ID NO: 503244 - DNA, 201 bp, Homo sapiens
tgctccaaaagtgaggtggtacccataaagacaagatcctgctcctcttcccctaagcaagctttggaataaaatgtcactttctttataccttgctcctsttaattggagtgactggacttgtgttttggttacaaaatgtggagtggggagtgactggacttgtgttttggttacaatttttgtggctcatatggggaa

SEQ ID NO: 503245 - DNA, 201 bp, Homo sapiens
tttcttcttttctctgggcctcagtttctatatttttaaatcaattaaaattgcctttattttgagcaaaagaaggtaatagccagggtaccattgatcarttgataaaaccacttcactgaaaattatttttctcttgtaattaactgttgacacttctatttgaatgcgtttccattctgcggttaaaagatatattag

SEQ ID NO: 503246 - DNA, 201 bp, Homo sapiens
ctccctgagatgtagctcccagagggaggggcaggccaccatctttgctctttagcagccttagctgccttcaggcattagagtccatggtgaccaggggmtgtagtggatccccagaaaagcacaactatcttgaggaaaagcagccaggctgcttttttacatgggtccctgatcctatacctccttactgggtgggat

SEQ ID NO: 503247 - DNA, 201 bp, Homo sapiens
gtggcttgagagaactgacttcaattttgaaagatgttcaattgtgagtaaaatgctatcaaacagcatcacacactagagagaaatctttcatgagtcamttgatgtggtaaacttcattgttgtcttattttaaggaactgtcacagccacctcaaccttcagcaaccaccactgttcaaggcaacatccttcagcagc

SEQ ID NO: 503248 - DNA, 201 bp, Homo sapiens
catttccttttgattctttctcatagtttctgtctgtattgacattatctatctgattttgcatgttgtgtacttttttccatccctttttttattaatcrtagtgtaactgtgtaccctcatttttctaagagatagttttttactatctttcttcttctcgctctccttcttttccccacttcctacttaggtctttag

SEQ ID NO: 503249 - DNA, 201 bp, Homo sapiens
atggaagatggacctaaggggtcaagggcagtggtgcagggataaaagcctattgcaatggtataggtgagagaagaggcatcttggactattagagcagkggagatggtgagaaatggacattttcaggatataatatggatattgagccggtgaacctataatagatataagagacagaaagaaatagatgataaagac

SEQ ID NO: 503250 - DNA, 201 bp, Homo sapiens
tccaggctctattttagattgtatgggcacatgaaaaacttggagtctctgctggcaagatgcttacatgctagaggaggtacatatgtagttgttttttwaaaaagtaaacgtatgagactggacatggtgtctcaggcctgtaatcccagcactttgggaggctgaggtgggtggatcacttgaggtcaggagttccag

SEQ ID NO: 503251 - DNA, 201 bp, Homo sapiens
taatgtttaaaggaaagaaagaaaatgcatggtaaatttcttctagagcaacaaggcagttttcatcaagtttgagaaatgtagttttattaatagaaggkcatgtcttaccatacacactgtccccagataaataaaatcccaacatctttgaaagcacacaaacacacagttttacagggtacaatacaaagtgaactt

SEQ ID NO: 503252 - DNA, 201 bp, Homo sapiens
atttcctattttccagttttgaaaagcacaatttttcttgagatgtttatgattctttacagtattttgaatatgtgtgcttttctccaaaacaattcccracattaatctaatttctagaattctctctctcctgtaatcaatacttttctattgcattagtgttagcctagaggaccttgtaatgaaaacacttatttt

SEQ ID NO: 503253 - DNA, 201 bp, Homo sapiens
agtggaatagattggattcgaaggaaattaagcatttcaaagtcaacacaggaatcaagcattttcttttgaaggtcatctccaatttggtcctgtgtttstggtctcatttcttaccattaccttgtagatcctttcaggcctatacagataacgacctcttccattatctgaacacaaacgttaactccattttttttg

SEQ ID NO: 503254 - DNA, 201 bp, Homo sapiens
agatactccctacagggcacgttcatttaactatgtgctcagaagctcgagagcagaactctccaccaggaggctgcctcgaaaaacagtccatctacaawccaaagtgtgcctgctgcaaaactctctctcacctggagaattttcaaaagcttttactacctagatcttcccatgaaggggccagcagtcacctgctaa

SEQ ID NO: 503255 - DNA, 201 bp, Homo sapiens
cacttataagtgggagctaaatgatgagaacacatggacacaaagaaggaaacaacagacactagtgcctagttgaaagtgaagagcaggagaaaagagawgatcagaaaaaataattattgagtactaggttttatacctggatgtcaaaataatctgtacaacaaacccttatgacatgagtttacctatataagaaac

SEQ ID NO: 503256 - DNA, 201 bp, Homo sapiens
tgggagatgaccttcgcaagtgtttcaatttctcctccaggggtatagtttttttttcccattgctccccattttccctggctgtggcattctcaatcaayttccttgccgccttctcccctgctgactatggatttttttgtcccttaggtgagacgggaaagtgggctggagttgagcagagttcagagttctcctagc

SEQ ID NO: 503257 - DNA, 201 bp, Homo sapiens
tatagaggttgtgaggattaaaagaaattaagatagaggtcatggtaatggcctgaggtaaccaggtgatagatctgggtagcttagggaatacgtgtgtktgtgtgtgtgtgtgtgtgtgtgtgtgtgtgtgtgttttgagacagtcttgctctgttacccaggctggagtgcagtggcacgatctcggctcactgcaac

SEQ ID NO: 503258 - DNA, 201 bp, Homo sapiens
gagatgtgatacctgggaaagaacaagaagtggggttagaacctttgtggatgtgtaaatgcaaaggagtgggaaaaaataaacttaatagcaggaaaacyggaaggatgagagtaaaactaggacaagatgtaaagaaaattaataagccattaatttattttaatagctttaaaataaataaaccattaatttttgttt

SEQ ID NO: 503259 - DNA, 201 bp, Homo sapiens
agtctctaaataattatcttgcgtaaagagaaaagtagagcacaatatatatatatcacaaaccaaatcacactctctgtaacattacaacatggaatttmcttaatcaaaaataaaagcaaactggctgaagaaggctgtatcatttttttctcaatattacgctaatttctatttttggcatgaattattaaccttttc

SEQ ID NO: 503260 - DNA, 201 bp, Homo sapiens
gcacaccatttgcatgtgtgaatgaatgactttttgtatgggccctattgcctttctttgctctctacctcccatttcaccctcctgactatctcggagasctgcccacctagggtgctgagactctccctgataaatgagaagggcgggcctggtgcccccacactgtgtaatggttggaaggttcccaaggttccatct

SEQ ID NO: 503261 - DNA, 201 bp, Homo sapiens
caatacaaagtgaactttgatgatgttcttacttgcatttactaaaaatctgagaaagactgtaatcagtctctaaataattatcttgcgtaaagagaaargtagagcacaatatatatatatcacaaaccaaatcacactctctgtaacattacaacatggaatttacttaatcaaaaataaaagcaaactggctgaaga

SEQ ID NO: 503262 - DNA, 201 bp, Homo sapiens
gtagctgggattacaggcacccgccatcatgccccactaatttttgtattttagaagagatagggtttctccatgttgatcaggctggtcttgaactcctracctcaggtgatccgcccaccttggcctcccaaagtgctgggattacaggcatgagccaccgcgcctggcccaaggccctactgtatttaagacctggct

SEQ ID NO: 503263 - DNA, 201 bp, Homo sapiens
ggcacccgccatcatgccccactaatttttgtattttagaagagatagggtttctccatgttgatcaggctggtcttgaactcctgacctcaggtgatccrcccaccttggcctcccaaagtgctgggattacaggcatgagccaccgcgcctggcccaaggccctactgtatttaagacctggctgctagtgatagcatt

SEQ ID NO: 503264 - DNA, 201 bp, Homo sapiens
ctggcccaaggccctactgtatttaagacctggctgctagtgatagcatttgagcattttatgcatttgtatttatttgaatatgaagttccataggaacktggctcagactcagcttcctgtggagccatttggaactggggcgggggattcaggacctcacccagacccttgactggggactcatttggaagcacacca

SEQ ID NO: 503265 - DNA, 201 bp, Homo sapiens
gcctttctttgctctctacctcccatttcaccctcctgactatctcggagagctgcccacctagggtgctgagactctccctgataaatgagaagggcggscctggtgcccccacactgtgtaatggttggaaggttcccaaggttccatctggtcactttacctttttttttcttctcctcctttctttctcacacccca

SEQ ID NO: 503266 - DNA, 201 bp, Homo sapiens
aatagaaagagggaaagtcaaactattcctttttgcagactacatgattctatgtctagaaaaccccatagtctcagtctgaatgctccttcagctgatamcttcagcaaagtctcaggatacaaaattaatgcacaaaaatcactaacatttctatacaccgacaacaacctaactcagagccaaatcagaaaggcaatc

SEQ ID NO: 503267 - DNA, 201 bp, Homo sapiens
tgatctgctctttaacacaacattgtaaaggattataaaaaatttatgaaaattttaccttatggtcaaattaattaagattggatagatttgtttataargttttattgaaaattgggtttaacattaatagtacactaatgcaaaggtgaaatttggctttctcttttgaataaatttttgtgtaatattaaaaagtaa

SEQ ID NO: 503268 - DNA, 201 bp, Homo sapiens
atgttggccaggctggtcttgaactcctgacctcaagtgatccacctgcctcagcctcccaaattgctgggattacaggtgtaagactgtgcctggccttycatttttctgatttggacttggtgaaatcactactaccttattcctcgtaatacaggagagaaaaatatgtcagcctgctaccgccctcctctgtaacta

SEQ ID NO: 503269 - DNA, 201 bp, Homo sapiens
ttaccagagatccaacaaaaaaaaggaaatttcaggccaatatgcctaatgaacacggatgtaaaaatcctcaacaaaatacttgcaaaccgattctagcagcacaccaaaaacctaaaccaccatgatcaagtaggctttatcctagggatgcaaggttggtttaacctatgcaaattaatgtgattcatcacataaaca

SEQ ID NO: 503270 - DNA, 201 bp, Homo sapiens
cttggtgaaatcactactaccttattcctcgtaatacaggagagaaaaatatgtcagcctgctaccgccctcctctgtaactaaagatgctttgagtctawcatctagataaattgtgcccaacattaacctttgtttttcttctgtttctatagaaatgcctcttattaaaaatatatttgccttcatcacatacagagg

SEQ ID NO: 503271 - DNA, 201 bp, Homo sapiens
actagctagattaataaagaagaaaagagaggaggtccaaataaacataattagaaatgacaaaggggatattaccacgaccccacaaaaatacaaataaycatcagagactgctacaaacacctccatgcacaccaactagaaagcctagaagagatttataaattcctggacacatacaccctcctaaaactgaaccag

SEQ ID NO: 503272 - DNA, 201 bp, Homo sapiens
ccactagctagattaataaagaagaaaagagaggaggtccaaataaacataattagaaatgacaaaggggatattaccacgaccccacaaaaatacaaatwaccatcagagactgctacaaacacctccatgcacaccaactagaaagcctagaagagatttataaattcctggacacatacaccctcctaaaactgaacc

SEQ ID NO: 503273 - DNA, 201 bp, Homo sapiens
tgcgtttccattctgcggttaaaagatatattagttggccgggcgcggtggctcacgcctgtgatcccagcattttgggaggccaaggagggcagatcackaggtcaggagatcgagaccatcctggctaacaaggtgagaccccgtctctactaaaaatacaaaaaattagccgggcgcggtggcgggcccctgtagtcc

SEQ ID NO: 503274 - DNA, 201 bp, Homo sapiens
ttaagtgttcctatcagcttagggcatccaggagcttctgctggatgtgtggcaaaagtaagcaagtatcagatgctcttgtatctcactggatgtgcatmtctctccagatgggtggctgtttgccctgagtccttggttctctggtaggtccaaaagccattgatttttggacctaccaaaatccagtttttctggatg

SEQ ID NO: 503275 - DNA, 201 bp, Homo sapiens
ttagatactggaaaattcaaagccactggggactggagtggacccccagcatactgcagcagccctgtggaaaagtggccagactgttatgtggtccccartcgtgtagctcctcactgggcaggtcctcttggcttgggtctccaactaccctctgctgaggctatagagccaatagcagctctgtaactccctgggcag

SEQ ID NO: 503276 - DNA, 201 bp, Homo sapiens
tgcaatctcatgataaacttgaatggatgaggagttgcttcttacggataagcaaaaaatgtggtttcatgagatagaatctactcttggtaaagatgctrtgaacacgaagtgacaaccaataatttagaaaattacataaatgtagctgataaagcagtggcttgagagaactgacttcaattttgaaagatgttcaat

SEQ ID NO: 503277 - DNA, 201 bp, Homo sapiens
taattagaaatgacaaaggggatattaccacgaccccacaaaaatacaaataaccatcagagactgctacaaacacctccatgcacaccaactagaaagcytagaagagatttataaattcctggacacatacaccctcctaaaactgaaccaggaagaagttgattccctgagcagaccaataacaagtcccaaaattga

SEQ ID NO: 503278 - DNA, 201 bp, Homo sapiens
tgtaagaacatacctcaatataataagagccatctatgacaaacctacagccaacatcatactgagttagcaaaagctggaagtattcccattgaaaatcrgcacaagacaagatgccctctctcactactgttattaaacatagcattgtaagtcctggccagaacaattaggcaagagaaagaaataaagcacatccaa

SEQ ID NO: 503279 - DNA, 201 bp, Homo sapiens
gttcaaggcaacatccttcagcagcagaaagattgactcgctgtaggctcaggtaattgttagcatttttaagcaatattttaaaattaaggtatatacaytgtttatctgggcataatgctactgcacacttaatagactacagtttactttaaacataacattttatgtacctggcatccaaaaaattcctatgactcg

SEQ ID NO: 503280 - DNA, 201 bp, Homo sapiens
ccacttcactgaaaattatttttctcttgtaattaactgttgacacttctatttgaatgcgtttccattctgcggttaaaagatatattagttggccgggygcggtggctcacgcctgtgatcccagcattttgggaggccaaggagggcagatcactaggtcaggagatcgagaccatcctggctaacaaggtgagaccc

SEQ ID NO: 503281 - DNA, 201 bp, Homo sapiens
caagatgttcacattttattttaaaactggcagatttcttttgtgaatacaatacatttaaattggttcttgtctaatacatttccaatctatccaggagyggtggatgattggataaactacttcagagcagaagagtatttaatgaactattcacagagaagatgaaacacagtgaactggtaagacactttgaagatc

SEQ ID NO: 503282 - DNA, 201 bp, Homo sapiens
caatggccagagtgccatatgtcctccaaatgaccacactaattttccaacaaggattcttaaccagactgatctggctgaaatgacaaaaatagaattcrgaatataggaaaaacaaagataattaaaattaaaattcaggaggatggcaaaccccaatccaaggaaaataagaaccacaataaaactatacaggagctg

SEQ ID NO: 503283 - DNA, 201 bp, Homo sapiens
acaagcgcccaccaccacgcccagctaatttctatatttttagtagagatggggtttcactgtgttggtcaggctggtctggaactcctgacctcatgatscgcccaccttggcctcccaaagtgctgggattacgagcgtgagccaccacgcccagctatactcccatttttctaagagatagtttattttctcactctc

SEQ ID NO: 503284 - DNA, 201 bp, Homo sapiens
ccttttttccctcattttattgtaaacatacagagagctcataaccagcctcttcggggactgatgcagtgtattttccacagaaattgttcaataaataygtgttgcatggaagaatgaattaattaatgcatgatttgaagaatgaataaacacactcctgtctttttatctactgtgcagcttcctgatcctgtaggc

SEQ ID NO: 503285 - DNA, 201 bp, Homo sapiens
tgttttgggggttgtgaactatgctcatagagacagaaaacttaatccataaatattgtgtgtgttctgactgctccaccaaccagctgctccctcatctytcttcctcttcttgggcctccctattccccgagacacaacaatattgaaattaggtcaattaataagcttacaatggcccctaagtactcaagtgaaagg

SEQ ID NO: 503286 - DNA, 201 bp, Homo sapiens
gcatttactgacttcatgtctttgtgtcacaatttagtaattctcacaatagttcaaactttttcattattattatatctgttatgatggtctgtgaatcygtgatctttcatgttactgttgtaattgttttgggggttgtgaactatgctcatagagacagaaaacttaatccataaatattgtgtgtgttctgactgc

SEQ ID NO: 503287 - DNA, 201 bp, Homo sapiens
cagatgttggttcatgaggtttaaggaatgaagcatctccattacataaaaatgcaaggtgaaaagcagcaagtgctgttgtacaagctgcagcatgttayccagaagatctagctaagatgattgacgaaggtggctacactcaacaacagattttcagtgttgaccaaacagccttctgttggaagatgccatctagga

SEQ ID NO: 503288 - DNA, 201 bp, Homo sapiens
tactcaagtgaaaggaagagtcacacatcactcactgtaaatcaaaagctagcaataattaagcttagtgaggaaagcatgtcaaaagccaaaataggccraaagctgggcctcttgtgccaaatggtcagcaaagttttaaatacaaagaaaaagttatagaaggaaactcaaagtgctacttaagtgaacacacaaata

SEQ ID NO: 503289 - DNA, 201 bp, Homo sapiens
gaggctgaggcaggagaatggcgtgaacccaggaggtggagcttgcagtgagccaagattgcatcactgcactccagcctgggcgacagagcgagactccmtctcaaaacaaacaaacaaacaaaaaaacagaattcatgattcatagaaggaggtcaaaatatcaacattaatgagagtttggaagttgattccaaccct

SEQ ID NO: 503290 - DNA, 201 bp, Homo sapiens
tgaaataataccaaacacactctcagaccacagtacaaaatagaagtaaagacttaaaaataaatcactcaaaaccatgcaattacatggaaattaacctkctcctaaacaagttttgggtaaataatgaaattaagtgagaaatcaagaaattctttgaaactaatgagaacaaagataccagaatctctgggacacagc

SEQ ID NO: 503291 - DNA, 201 bp, Homo sapiens
ataaatagtaagagaatgaagttagatgtggagcctgaagatgtaactgaatcactgcaatctcatgataaacttgaatggatgaggagttgcttcttacrgataagcaaaaaatgtggtttcatgagatagaatctactcttggtaaagatgctatgaacacgaagtgacaaccaataatttagaaaattacataaatgt

SEQ ID NO: 503292 - DNA, 201 bp, Homo sapiens
gctgccatcaatagtgattgctctgttggaaataggtaaatcgaaaactttctggaaagtattcactattctagatgccattaagaacattcatgattctrggaggccaaggcgggtggatcacgaggtcaggagatcgagaccatcctggctaacatggtgaaaccccgtctctactgaaaataccaaaaatgagccggg

SEQ ID NO: 503293 - DNA, 201 bp, Homo sapiens
cagaaattttgatttagtagcactgggaaggtgctggaatatatattttagcaattactatatgattttgatgaaagtggttgagggaccatctttgaggmaacactgcctaagccttcgccaaggtataatctgctacccttgggaatgttccctgtcttaaattttggatctagcacctagtgtctggccctgggtata

SEQ ID NO: 503294 - DNA, 201 bp, Homo sapiens
gcggttaaaagatatattagttggccgggcgcggtggctcacgcctgtgatcccagcattttgggaggccaaggagggcagatcactaggtcaggagatcragaccatcctggctaacaaggtgagaccccgtctctactaaaaatacaaaaaattagccgggcgcggtggcgggcccctgtagtcccagctactcgggag

SEQ ID NO: 503295 - DNA, 201 bp, Homo sapiens
aatgaatatggcacctaaatcccatagaaatgaaatggaacttggcagtggggaatcgtaacccaatactcccatttttcttttcttttttcttttctttyttttttttttttttttttttgagatggagcctagctctgtcgcccaggctggagtgcaatggcacgatctcggctcactgcaacttctgcctcccgggtt

SEQ ID NO: 503296 - DNA, 201 bp, Homo sapiens
caggcacatgtggagccctgggagccttagatatccagcttcctgtcaaaaagtagctgcagctctttcaaagtgagaggttagatcctcgtacctacccrtaggaaaggggctgaatccaggggagtgagcagcgatggactacaggcacctcactggataagacccaccggcttgggaacccagccagtcaccaataat

SEQ ID NO: 503297 - DNA, 201 bp, Homo sapiens
tcaatataataagagccatctatgacaaacctacagccaacatcatactgagttagcaaaagctggaagtattcccattgaaaatcggcacaagacaagaygccctctctcactactgttattaaacatagcattgtaagtcctggccagaacaattaggcaagagaaagaaataaagcacatccaaatagaaagagggaa

SEQ ID NO: 503298 - DNA, 201 bp, Homo sapiens
ctgacaagaaaaagcaatggggaaagactccctattcaataaatggtgcctggataacagggtaatcatataaagaatactgaaatgggaccccttctttwtaccatatacaaaaaaatcaattcaagatgaattgaagacttaaatgttaaacccaaaattataaaacccctggaagacaatggaataggcaataccatt

SEQ ID NO: 503299 - DNA, 201 bp, Homo sapiens
agcaaaaattgaaaaatggaatctaattaaacttaagagcatttgcaaagaaattatcaacagagtaaacagccagcctacagaaggggagaaaacatttkcaaactgtgcatctgacaaagttctaacattcagcatcaataaggaacttaaatttaaaagaaaaaaacaaccccattaaaaagtgggccaaggacatga

SEQ ID NO: 503300 - DNA, 201 bp, Homo sapiens
ttagtagatgagaaaggtaatcaaatgtgatctggtgaagtcttcatgttggagctgaaatcacacctgacgttggtgttcagagaatgccaaagccatcygagtaaggcaaaggagatctaatgaggctggcaagtaaaaaaaatgaaagtagtgttaaaggaaccaaatcctatgagtctatatcatcttctctcaaca

SEQ ID NO: 503301 - DNA, 201 bp, Homo sapiens
aacatttgcaaactgtgcatctgacaaagttctaacattcagcatcaataaggaacttaaatttaaaagaaaaaaacaaccccattaaaaagtgggccaargacatgaacagtcacttttcagaataagatgtacatgtgaccaacaagcatatgaaaaaaagttcaacattactgatcattagaaaaatgcaaatcaaaa

SEQ ID NO: 503302 - DNA, 201 bp, Homo sapiens
ggcagtggtgcagggataaaagcctattgcaatggtataggtgagagaagaggcatcttggactattagagcagtggagatggtgagaaatggacattttsaggatataatatggatattgagccggtgaacctataatagatataagagacagaaagaaatagatgataaagactagatttttggctcatcaactgaata

SEQ ID NO: 503303 - DNA, 201 bp, Homo sapiens
aaataaaaatcattctatcatggagatacatgcatgcatatgttcattgcagcactgttcacaatagtgaagacatagagtcaacctaaatgaccatcgaygacagactggataaaggaaatgtgatacatatacaccatggaataccatgcaatcatataaaagaataagatcatgtcctttgaagaaacatggatgaag

SEQ ID NO: 503304 - DNA, 201 bp, Homo sapiens
tgcccatggggaggcctttctaggacggaggaagagcatagacaaatgcatcagtgctggaaagcagtgagcttggcttgcagcccttgctgcaatgtttyggttgtaaagcagcaggttgaaaatctttctctctcttcctcacgctaatcaggaggtctagtctgactgaaattttgagtgcacgtagaacaatgtagg

SEQ ID NO: 503305 - DNA, 201 bp, Homo sapiens
caacagagcttgaccctataataacaaaaaaaaaagaggccaggcacggtggctcacgcctgtaatcccagaactttgggaggccgaggcgggtgaatcaygaggtcaggagatcaagaccatcctggccaaaatggttaaaccctgtctctactaaaaatacaaaaattagctgggcgtggtggcacatgcctgtagtcc

SEQ ID NO: 503306 - DNA, 201 bp, Homo sapiens
ataccagaatctctgggacacagctaaagcagcgttaagagggaaatttatatcactgaatgcccatatcaaaaagttagaaagatctcaaattaacaacstaccattacaactaaataactagagaagcaagaacaaaccaatcccaaaactagcagaagagaagaaataatgaaaatcggagctgaactgaaggagatt

SEQ ID NO: 503307 - DNA, 201 bp, Homo sapiens
aatctattggagtcttttgtatcgagctcacagttcagtaagcaattagatccttgtaaatcttatatgtatattttgttataaataaagtgttctcctaytgacttcatgcaattcagtttttttccttcaaaattaacattcgtagagatttacttagacatctcccttcccaaataaatgaggttagtagatgagaaa

SEQ ID NO: 503308 - DNA, 201 bp, Homo sapiens
aatgaaaatcggagctgaactgaaggagattgagacacaaaaaaacattcaaaggatcatcaaatccaagagtaggctttttgaaaaaatttaataagatyggccactagctagattaataaagaagaaaagagaggaggtccaaataaacataattagaaatgacaaaggggatattaccacgaccccacaaaaatacaa

SEQ ID NO: 503309 - DNA, 201 bp, Homo sapiens
cttatatgtatattttgttataaataaagtgttctcctattgacttcatgcaattcagtttttttccttcaaaattaacattcgtagagatttacttagayatctcccttcccaaataaatgaggttagtagatgagaaaggtaatcaaatgtgatctggtgaagtcttcatgttggagctgaaatcacacctgacgttgg

SEQ ID NO: 503310 - DNA, 201 bp, Homo sapiens
tgattcatcacataaacagagctaaagacaaaatccacatgattatctcgatacagaaaagggttttgataaaattcaacatcccttaaaacctctcaatkaattaaatattgtaagaacatacctcaatataataagagccatctatgacaaacctacagccaacatcatactgagttagcaaaagctggaagtattccc

SEQ ID NO: 503311 - DNA, 201 bp, Homo sapiens
tctggatgccattcatgctagcatgccaggccccctttaaaagcacttgctttctgctccaaaagcaaagcagtactcttaaaggcaagagcctatacttyttcccctaagcaagttttggagtaaaaagtcactttctttataccagaacttgcttttttaattggactctgcacgtggcaagtggccgaacctgtgttt

SEQ ID NO: 503312 - DNA, 201 bp, Homo sapiens
cgctgggattacaggcttgagccaccgcaccaggctgggaatacatctttcttttcggttggcgctggtcctctagtaaggcagtagcttaatcatttacrtgtcctctttctatctcagccttcccaccacacttccccactcaaggctcactccagacattgttagaagaaattttccttctatccatgtgatttgttg

SEQ ID NO: 503313 - DNA, 201 bp, Homo sapiens
tttacatgtcctctttctatctcagccttcccaccacacttccccactcaaggctcactccagacattgttagaagaaattttccttctatccatgtgatktgttgtaaagaaagactaaaaagtatccaaattgtactttataaacaatttcctatagtggagattgatactcaatgtatgaaggtcaaatgatgaagat

SEQ ID NO: 503314 - DNA, 201 bp, Homo sapiens
ctaggacccttaagaataatgctaaatctaccacgcctgtgcagtataaatgaaacagaaaagcctgggtgatagcacaactgtttataacatggtttacyggatattttaagccaactgttgaaacctactgctcagaaaaagagattccttcaaaatgttactgcttatgaacaatgcacctggtcacccacgtgttct

SEQ ID NO: 503315 - DNA, 201 bp, Homo sapiens
attaccattatctctcaggggtaactgcaaataatttgcttcctccaaataaatacataatcttcataatatataaatttatttggatatttgtatttgtstatactgctgatccttgaacaacatgggtttgaattgtgtggtccacttttatgtgaatttttttaaccatgtgcagatcaaaaatacatgtgaatcatg

SEQ ID NO: 503316 - DNA, 201 bp, Homo sapiens
ggactacaggcacctcactggataagacccaccggcttgggaacccagccagtcaccaataataaccgttacacctccctgagatgaagctcccagagggyggggtgggccacatctttgttgttttacagccttagcaattgttgcctttggactctaggagtctgaagtgactggaggctggagcggacccccagtcca

SEQ ID NO: 503317 - DNA, 201 bp, Homo sapiens
tcaggtcttttgcccatatttaaatcaggtatttcatgattctactactgagttgtatgagttctgtacaaattttgtatattaaccctgaggagattttktatcacctgtctttacagatgaggacacaaggccttggggagggggcccataaattatctaaaatcactctgctaataaatggtaagggatagaactttt

SEQ ID NO: 503318 - DNA, 201 bp, Homo sapiens
atggtatctgttttgggggaatgtattgaaattccatttatggcctatgtatataaataaaccatttgtgtttgaagagactctaggtctctctgtgcagwctctcttgggtgcgaacttctctatatcactattagatcacgcttgttaactgtggtattcaaatctctctgaatgctactgatcaaatgtatcctggtc

SEQ ID NO: 503319 - DNA, 201 bp, Homo sapiens
acaattgcttaagcaatcaagacatgctaattatttcctgtggattatgttaataattctgtagttgaactgcattttgcaaaggactttcataaacactrtaagttttcttgtatattttcagtatgatgttggatacatacagatagtaaaaaggttactataattaggagcaaattaacatacccatcatctcacttt

SEQ ID NO: 503320 - DNA, 201 bp, Homo sapiens
tgaaattgtatccggtcaaacagaagaaccctgcttaagttttaatagtttgtggcttctctaggtagttgaccacatctttatctgccaataatgcgaaytttccctctttttatcttttacgcttcttctatcttctgcttttactgtgttggctagcacctagataggcttacgtgctagaactgaaagcaagtatca

SEQ ID NO: 503321 - DNA, 201 bp, Homo sapiens
aggccatctttttagacccactttgagttttctctggatagacaagtactaaaaaaataaagagctcatgactgacatagtttttcttcctatttcaggaratcctgggtgaaatttggtagtgggtccaattgcctgcgtactttactttgaaataaaataatcagaaatttaccttgttccataattatagtctgttca

SEQ ID NO: 503322 - DNA, 201 bp, Homo sapiens
tctgtgagtgagtagagtaatttgggtgaggtctgatctacagctgtcttataagactatatgagaaccatgcctatgttctaaatatctatgggaacccrgctgtttttaaaatttgacaataatgatgtagatcagcctctgagcagaataatcttgaacagttgacaatagaatgctgagaatgaagcagtttgtctt

SEQ ID NO: 503323 - DNA, 201 bp, Homo sapiens
aatcctgggtgaaatttggtagtgggtccaattgcctgcgtactttactttgaaataaaataatcagaaatttaccttgttccataattatagtctgttcrttttattatggtaaaatattctatactcaaaatatatctgaaatgctttaaattggccctgatggatattgagtagagagaatttataagcagatacttc

SEQ ID NO: 503324 - DNA, 201 bp, Homo sapiens
gctcctgagaaagccatgtgttataggtaactctcaacaatgttgtgttaaccaaaccacagctggaaagaagaaaaataccaggaaggttttttttttttgtttttttgttttttaaaaaaagcatggctaggcatagtggttcatgcctgtaattcagtactttgggaggccaaggtgggaggattgcttgaggccagg

SEQ ID NO: 503325 - DNA, 201 bp, Homo sapiens
ctcaaatagaagcagtttactttttggttaggaattttattcttagctcacttatctagaaatgtcatccacctgggacacacctgagaccccccccccccaacaaccacctgccacccccaaaagtaggtgttaaaaagatctctatgaagaccaaatagatgtcacaacatttgcacactaaaagttcaactctctgcc

SEQ ID NO: 503326 - DNA, 201 bp, Homo sapiens
atacctgtgagcatttaaccattttcactatttcatatatttacttattattgtagcttttaatacgttgtttttaaaatcataaccaagattgctatccrgagttataaccctgacactgtgaagaaatgcagcttccttttgaaatcagtagggcagaaaggaaaacaaaaaaattgaagctggaataagtatcaatct

SEQ ID NO: 503327 - DNA, 201 bp, Homo sapiens
aaatttaaatgtttgctaatatacatctggtaaataacaattataaaggtaaagaggatgctttctatttttactctaagtgttttttttgggggggggggatcatgaatgggtgttgttttattgtacgcttttcaatatcgatttttttttgaaatgtctcttaaaatgtcctgaattcactgataaacttttgataat

SEQ ID NO: 503328 - DNA, 201 bp, Homo sapiens
acctagataggcttacgtgctagaactgaaagcaagtatcatgtatcttaaatgttcaagcttctaagtttttaatattaaatttaaatgtttgctaatawacatctggtaaataacaattataaaggtaaagaggatgctttctatttttactctaagtgttttttttgggggggggggatcatgaatgggtgttgtttt

SEQ ID NO: 503329 - DNA, 201 bp, Homo sapiens
caagctatgtttttgccaataacacatgaataataatagtgaggatatgctgtctcttgcaggggtgaggacctgctaaatataactgtcctcattgaagygtgtttggactactttggcaagatgggcaagtagcaattgcttataattcagtgggtcaggatatgaagactttggttcaagctcgctgaagacacacag

SEQ ID NO: 503330 - DNA, 201 bp, Homo sapiens
tctttctagagataagtaaagccagtattgtatgttaaatgacaactaagggaaagcgcaaagggttaagtgaaattacatctgttaaaaaaaaaaaaaaagcaggcattttcccttcatataaaaattcactggcaccatttgaacataaactttagaacataggagttgaaaatgcatttccagtataaccactaaatt

SEQ ID NO: 503331 - DNA, 201 bp, Homo sapiens
actgccactcttggttgttggtttactagcctgagatggaagatggtgtcagaattcatattggatgtctcagaggcaactgctcacaggatccaggcagrttaattaaatgactgatgatggctagacataatgtgatagggagcaatgtagactttggtgaactggagagcatatgtttcccctaaatgcaaaaactgc

SEQ ID NO: 503332 - DNA, 201 bp, Homo sapiens
gctaagctctgcaaggcccactggatattgctacaaagcctgcctttataccctgcaagtgtagggtgtgggaaagggaaaatagtttataggccagtaamtacaagtcaaatgatttgaaattaccacaaattagataaagttaatttcttcttttcaacttttgaggaacataattgttatgttcagataaactgctgg

SEQ ID NO: 503333 - DNA, 201 bp, Homo sapiens
aaatctcaaagttccacaattagctgtttaaaaatagagttttggaccagtagcttttttactctagtttatttctgccacttgtagtagcataaatgaarcttcctcgtctaaggttatgtcctgggcaagtaaaagtcatggagtagaaaattgattttttttaatgattttgaatagtcataactgctgcttaatgga

SEQ ID NO: 503334 - DNA, 201 bp, Homo sapiens
ctgccttcaggattttttttttgtttggtttttactatttgaatatgatatgcctaagtgtgatttttttggggggggtgggaggggtagtcatcctgctwggtgttctctaatctccttggatctgtggcttgatgtcatgaatacaggaaaacctaagtcatcatttcctcaagtatttcttctgcctctttatctctt

SEQ ID NO: 503335 - DNA, 201 bp, Homo sapiens
ttggtttttaagggagattaattaacagaactttatatttgcatttaaaaaatgtttttccaatacatccgttaaacatattggctttttttgggaggccraggcgggtggatcacgaggtcaggagatcgagaccatcctggctaacaaggtgaaaccctgtctctactaaaaatacaaaaaattagccgggcgcggtgg

SEQ ID NO: 503336 - DNA, 201 bp, Homo sapiens
tattcaccgggtatagtattctgagttgacagaagtgaacacaaatatgtcgctctgttgtcttctggcttgcatggtttatgacaagaagataagttctkatttacttttagataaagtgttttttaaactctctctggctgccttcaggattttttttttgtttggtttttactatttgaatatgatatgcctaagtgt

SEQ ID NO: 503337 - DNA, 201 bp, Homo sapiens
gaggcattcacagccatgaaaattattgcaacctactaagtaacaactgacccataatgagataatctgcaaaggtggtgtgaaattaatgtttcctaacmcctggactagttctatgcaccagcatgcgataattatctcctcagcctcatataatgttctataattgcccccagcttcattatttagaaaacattgtat

SEQ ID NO: 503338 - DNA, 201 bp, Homo sapiens
gttgaaaatgcatttccagtataaccactaaattcttaagacaaactacattttgattcttaaattatgatgagttgggttttttttttagttttgcttaraattagtaatatgtatctttggtaaattggtatctatattttaattttaaatacagtatatatgcatttaagaaaaattcataacaaggcagttgtgctg

SEQ ID NO: 503339 - DNA, 201 bp, Homo sapiens
gttaatgaagataaccaatatctggttaatatctggttaatgaagataaccagagaatactatcctctaaagcagggcttctcaacctgagcactactgayattttgggccacataattctatggtgttgagggctgtcttgtgctgtgtagtttgcttagcagcatctctggcttgtatcctctagatgccatccatctg

SEQ ID NO: 503340 - DNA, 201 bp, Homo sapiens
cactactgacattttgggccacataattctatggtgttgagggctgtcttgtgctgtgtagtttgcttagcagcatctctggcttgtatcctctagatgcyatccatctgcagttgtgacaagcaaaaaagtctccagacatggccaaatgtcccctggggggcaaaatcacccccaattgagaactactgctctaaactg

SEQ ID NO: 503341 - DNA, 201 bp, Homo sapiens
aaaatgtgggtatcacctttaattaaatattttaaatttctctctccaaatcagatttatctatgtgtgggagtttagatagtcccaagacttttgctaakacagtatttccaatttaatcttaagtagaaaaatgtatgtaattaagagatttattataaaacatttggcaaagaaggaaagaaaacagtaactatgtag

SEQ ID NO: 503342 - DNA, 201 bp, Homo sapiens
gaatttataagcagatacttctttagagcttttgttagtgaaccaggtatcaatttaggttcaatcagataaaatgctgcaatagagaaatcattctgacrgttgatgtttatgttctagacattctcagcggagatcttgctgataaaactatgctcaatcctagagattgccagtgagaatttgcatatgcctcttcct

SEQ ID NO: 503343 - DNA, 201 bp, Homo sapiens
tgcattggagggtatgcctttctacgaattgagccctctataaatagcacaggagggaatacttgctatttgtctttgaaccagtgtttacttttattaaraaaaaattactgagaaagggaccatgaaccctaactcgaacattacttttgaacatcaagcccactttgccatctactaaaaagtgttaactcatatcaa

SEQ ID NO: 503344 - DNA, 201 bp, Homo sapiens
ggggtttctccatgttggtcaggctggtcttgaactcccaacctcaggtgatctgcccgcctcagcctcccaaagtgctgggatttcaggcgtgagccacygcacccggcctgggatttagctaatttttcataatcatatttttcatatgtgaaaaaaatgaagtaactactgaatatctttttatttgggtctgctttt

SEQ ID NO: 503345 - DNA, 201 bp, Homo sapiens
ccatttatttttagagaagcttctagtagaattctataagaataaatagagttgctcacttccaagattgttgccttgcaagaataaaaggtgctggagawgctgattttttttttttttttttttttgagacagtcttgcactgtcacccaggctggggtgtagtggcacgatctcggcccactgcaagccccgcctcct

SEQ ID NO: 503346 - DNA, 201 bp, Homo sapiens
acactataatagaatgatttgatatagtttaaacagaagaaaaagggaaaaatttcaggttacaaaacccctccccctgaacaaatttaaaaaaaaaaaawaagcacactttttccaaatgggtcaatgtgacgaatgttttcagtgactaattatgtctaattcctattgcacaaatggtcaatggaattaaaaagaaaa

SEQ ID NO: 503347 - DNA, 201 bp, Homo sapiens
aactacaaagcaaataacttaaaacataccagcagactgagagtttgtaatctttaatgtatagcactctcattttttagctcatttaaaaataacatatattgtaaaattgattgcttaaaatcttttagttattggatacaatctggtgatatgtgaggttatactttagttattttaaaatcagattttggggttttt

SEQ ID NO: 503348 - DNA, 201 bp, Homo sapiens
atattttgataatcattttctagcatctctcacctgttagtgtagcaacctgaaacactcccactataggggacttattacagttgagaagtattctgtamtattgacatagtaaaaaagaaagcaggatctaggtcagttaattttgttatttcacaattgcttaagcaatcaagacatgctaattatttcctgtggatt

SEQ ID NO: 503349 - DNA, 201 bp, Homo sapiens
acttttgaactgtgtattgaatgaaagggtgctcagaggaaagaggatttgcaggggcaaggtggcatgcaggaagtacttcagtggcagattgggatgayaactggaaatgtaaactttacactagattgtaaaagattttcaaaagtctactgaaagaatcgatggcaccaagaagacttggtggccaatcagacttgg

SEQ ID NO: 503350 - DNA, 201 bp, Homo sapiens
atcaccagttcttattgatattttaaaatatagtctgttgagagtacttatgtgactttatgggaaggtttgtgaaaaaaattggtttatataaatttacktctctgccaactttgctgcatgtaaatatatccctatcaaatttctaccttcatcgggtaagggtagcacacccttaaacaaagtatgtacaggaaaaga

SEQ ID NO: 503351 - DNA, 201 bp, Homo sapiens
tatttagccacggttaaataagcagtaaaattaaaagtatttatacaatatggcttaaacatgacaagaaactcgcaagtcaaatcaatcaaatgcacagrtacttttaaatatcttctgcataccaaacataatgacagagcaaagacaaaaagggccattctctttcaaaagtttaggaactaagtgggattaaagaat

SEQ ID NO: 503352 - DNA, 201 bp, Homo sapiens
aactaacatgtggtctgtagtagacatgcaggaaatgcttatggaatggatcctaacatagtgctaaagatgtctctggtttagaatgttctgctaagctytgcaaggcccactggatattgctacaaagcctgcctttataccctgcaagtgtagggtgtgggaaagggaaaatagtttataggccagtaactacaagtc

SEQ ID NO: 503353 - DNA, 201 bp, Homo sapiens
ttttttggggggggtgggaggggtagtcatcctgcttggtgttctctaatctccttggatctgtggcttgatgtcatgaatacaggaaaacctaagtcatyatttcctcaagtatttcttctgcctctttatctctttcttctccagttatacagtatgtacatcgtttgatattattccacagtgtttggattctttatg

SEQ ID NO: 503354 - DNA, 201 bp, Homo sapiens
catttggaaaacaaaaacagtctgtaagaatatggctctaaatagaaaatatttttacctgttcacataaatcatttagaagaataacctcctattcaccrggtatagtattctgagttgacagaagtgaacacaaatatgtcgctctgttgtcttctggcttgcatggtttatgacaagaagataagttcttatttactt

SEQ ID NO: 503355 - DNA, 201 bp, Homo sapiens
tgatttattctatgaatttccagcccttatcttttcaaagataatattttctctcatctttgtaataatatgagctgaaaagactgataagctctaaagtwtacttagcaggtgaataaaggtatttatacattgatttgacatgcaaataaagggttgttttttttttttacagtaaatcttgcaatagtgttcttagct

SEQ ID NO: 503356 - DNA, 201 bp, Homo sapiens
tagtgttcttagctttatttatatttttcattcagcgttgttaactaattttcccatgtcttttagactcagaattactgggtattcgtttttcatcctgraacttacacaaatgaattctcaaaagtcattgacaagtaaataatttaaacttaattttaaaacgttttaaactcacagagcaaagtttctcagaagagt

SEQ ID NO: 503357 - DNA, 201 bp, Homo sapiens
cagcatttgcctaaatgttcagtagaatctccaagagttcctgtgcctttagaattatttacctggactccaaactcttcatagcagttattgtttcatamtgggttcttcatggatgctagtggaatatatttaagttggcaaaaggataaacactttcttttctttttaaagcaacataaaaagtcccatgttactcaa

SEQ ID NO: 503358 - DNA, 201 bp, Homo sapiens
caaaaaagtctccagacatggccaaatgtcccctggggggcaaaatcacccccaattgagaactactgctctaaactgtgagtctgagtttcaactgatgyagtacaggttttacacataagcaaactacttacaatgtctgtgaatactccaggcctcataagattgatcatttttgcaacctggaaaacatccacagca

SEQ ID NO: 503359 - DNA, 201 bp, Homo sapiens
cttgctcctgagaaagccatgtgttataggtaactctcaacaatgttgtgttaaccaaaccacagctggaaagaagaaaaataccaggaaggttttttttktttgtttttttgttttttaaaaaaagcatggctaggcatagtggttcatgcctgtaattcagtactttgggaggccaaggtgggaggattgcttgaggcc

SEQ ID NO: 503360 - DNA, 201 bp, Homo sapiens
aacaaggaaggggctcatcctttaaattactaatataagagcccccccatgcttactcatcccacaagaaggcagcaaaatatttacttaaaaaaacttaktattatcatctgtgcaacacattgcaaagcttacatttctgatggcaaagaaaatattgagttctagtatattgtttttataattaggtcaacagaccta

SEQ ID NO: 503361 - DNA, 201 bp, Homo sapiens
gccaaggtgggaggattgcttgaggccaggagttcaagacccacctgggcaacacagggagatctgtctctaaaaaaattaaaaaaaaaaaaaaattaacyagtcatatggtacatgcctatagtctttgctattcgggaggctgatgtgaaaggatcgcttgagcccaggagtttggggttacactgagctttgatgatg

SEQ ID NO: 503362 - DNA, 201 bp, Homo sapiens
cttactctttagctttacacaaatcacttgggagaccagctgtatgtttgattcactccctctctctcccataggacattgcctcctcagatcctgaaacyagtggagattttactcttttggtgtagcctcctgttagttatgaccctactgacttctactccccccagtgaagtttcttcacctatctcatgttcaatc

SEQ ID NO: 503363 - DNA, 201 bp, Homo sapiens
tccactgtatgaaaaacgaaggtggcttacaggagctacaccaaggctccctctatgcatgcaccatccctctaacactaatacagtctcccacaggtagrtataggactctttacaataaaatactaggctaggatatcaaatatagattggtacaagagatgtgctgctttatattcccatccatatgtctttgtctct

SEQ ID NO: 503364 - DNA, 201 bp, Homo sapiens
agaaacttcctgtgcaattcttataaattctttcaacttttgttgtctaaaaaaatatttcttttaccttcatgcctaaagtatattttcataggttatakaagtctaggccagtagttttttttatcatttaaaaaatattattttatcattttctggcttccatagttactgttgaaaattcagcctcattcagtctta

SEQ ID NO: 503365 - DNA, 201 bp, Homo sapiens
ttagtagttattgtcagaagtacaataggcatatggatctatcccaagcagggctacattaataatctaacacttcctgcaaaatgcaagactacaatacygtttgtctacttcttgctctttttgctagtaatgtcatgtattttactcccatgttttgcatatgttacaaggtaattttattgtattaatcaatgctat

SEQ ID NO: 503366 - DNA, 201 bp, Homo sapiens
tcaaagcttcaacaatagactagataaagcagcagaaagtttttcagaacatgaagacaggtctttcaaaataaaacattcagacaaaaagacaaaaaagmataaaaaataaaaagaaagccttcatgatttatgggacagcaaaaagtgatctaaaattcaaattttaaatgttccagaagatgaagataaattttatga

SEQ ID NO: 503367 - DNA, 201 bp, Homo sapiens
gggcattgttggtacctgcccaagagccctagctcatgacctgttctcctccaccttggtcagggcctagtggtattgtctactggcctggacccacctcrgctctcagtggtgctttaaatccccttagggttggcagtgaatcctaagtagtctgtccaaaagtcctttaatacagagtctcttcatccctgcaatcac

SEQ ID NO: 503368 - DNA, 201 bp, Homo sapiens
ccaaatattttggtactgagagcagggtgctgctgtaacaaatacctgaaaatgtgaaagtgactttggaattgggtgatgggtgaaggctggaagaattytgaggtgcttggtagagaaagcctgcattgccttaaagagagtgttggaagaaacataaatattaaagatgcttcaggtaaagtctcaaacagaaatgaa

SEQ ID NO: 503369 - DNA, 201 bp, Homo sapiens
agtttagggacagaagatacaatgaaagaccaagagtataactttctcccttgtttctgtctactctattttagtaaaggaatggagagaaaaacctcagrattaggtgaacacatagctaaatttaggtcatccttccttccctagactcaatttcaattaaaagtgaaaatatcagaaggggaatgtttttatatagtt

SEQ ID NO: 503370 - DNA, 201 bp, Homo sapiens
caggtgtgtgcacattcagggcagtgctaacataacagccccctgccaccttggccccctctagactttgggcactgacaagcatacagggggaatctgarggagggctgagggcagcttggcactggcctgcaggtgccccttggcatgagcagcctggacatcatggatggtggcatgaggcagataggctcctgggcg

SEQ ID NO: 503371 - DNA, 201 bp, Homo sapiens
ggatcactgtggatctgcctttattgtctctttcaatctcccttacattttcattgtatgctagacaatgtgtatatacgtacattggaaacctcacagcrtatccccccagagcaggctaagggtctaatcactagaatccagtaaacaatttagctgtgttggggctgggtagcacttttaattagcctcactccatct

SEQ ID NO: 503372 - DNA, 201 bp, Homo sapiens
acacactgcctggggcatgggtgttggtccactgtgcttatgacagtctgcactcatgcacagcactgggcgcctgagaacaggcctgcctggcctggcaytggcccccagtcccagtgcacaaacatattcaggaattgtcctgcttcatcagttgccagaggcacacacacctaaggagctaataacagccccagagca

SEQ ID NO: 503373 - DNA, 201 bp, Homo sapiens
ggggctccctgtctatataagcaactttactaaaaatataagactcctgagaccctatgagatgtggttatttatcaatgaacatagatcttgtttcttcygcagttcactgtactatttatttaacactaattacattatttctcatggcactgtatcatccttcattcctcccatgaatactggctttcaatgactttc

SEQ ID NO: 503374 - DNA, 201 bp, Homo sapiens
cccaccaagcagcagaatccaaggtgaggacttgattgccacatctacagggctagcacagaaaactctgctgagaacaatattattcccactgcagggayaggcagatggtgacacacagatgcaggaccagatggagttgtgtgattctgtcttatcaacagaatcagagaaaccggggaatttccggggaaattactg

SEQ ID NO: 503375 - DNA, 201 bp, Homo sapiens
agggagtgttacacatggaagcaaaagacagtatctacaatcataaaagcacatgcaaatgtaaaacacgcaaatgaggaagagacaggattcaaaagttkttttttttattaaaatgaaaaatatttatttattataaacctatttttttgtttgtttgtttttattatactttaagttttagggtacatgtgcacattg

SEQ ID NO: 503376 - DNA, 201 bp, Homo sapiens
tctcattgttcaattcccacctatgagtgagaatatgcggtgtttggttttttgttcttgcgatagtttactgagaatgatttccaatttcatccatgtcyctacaaaggacatgaactcatcattttttatggctgcatagtattccatggtgtatatatgccacattttcttaatccagtctatcattgttggacattt

SEQ ID NO: 503377 - DNA, 201 bp, Homo sapiens
gaggaataatgggttttttcttttgctataaattatacagtgtaatcaatatagtaaataataatgtagtacacactttaaaatcactgagagtgaatttyaaatgttctcaccacaaaaagataagtatttgaagttatagatatgttaagtagcttggttaaattattccacattatatgcataaattataacatccct

SEQ ID NO: 503378 - DNA, 201 bp, Homo sapiens
cttttatgttgtgaaaaggagtcccttaaataaatagtgttgagtaaacaatatggatatgcaaaagaatgaaattggacctttatctcacatcatatacwtaaatcaagtcaatgtggatgaaagatttaaccataagtactgaaagtttaaaactactagaagaaaacatatgagaaaaactatgtgacattggtctgg

SEQ ID NO: 503379 - DNA, 201 bp, Homo sapiens
cttcaggtttgcgctgctagtcccaagaaacctgggatgggaaccggagtgggaacttgtggtaccttttcctgacccgctcctggtggcccaaggaccartcagtgtgcactttctcccttcttaggtctataaaagccttgggctcagccagagctaaacagatgacaggatagccagctgcagagaggagctactctc

SEQ ID NO: 503380 - DNA, 201 bp, Homo sapiens
ttaaaaactttctgtggaaggaagtgaaagacttgtacactgaaaactataaaatgttaatgaaaaaattgaagaaaataaacaaatggaaagatacctcrtgttcatggtatggaaaaattaatattgttaaaatatccatcctaggcacagtgatcaacaaattcaatgcaatttccatcaaaatttcaacgtcatttt

SEQ ID NO: 503381 - DNA, 201 bp, Homo sapiens
ggagaaaaattattagaaaaattcagaattctttaatgataaaaactttcaacaaattaggtatagaaggaatgtacctaaacacaataaggaccatatakaataagtccacaaataaaatcataaataacagtgaaaaattgaacccttttccctaagatccagaaaaagacaaggatgtccactctcagcatttctatt

SEQ ID NO: 503382 - DNA, 201 bp, Homo sapiens
agtgggatttattcatgtgatacaaggatgattcaatatttgcaaattaataaatgggacgtgctacattaacagaatgaaaaacaaaaactatatgatcrtctcattagatggagaaaaattattagaaaaattcagaattctttaatgataaaaactttcaacaaattaggtatagaaggaatgtacctaaacacaata

SEQ ID NO: 503383 - DNA, 201 bp, Homo sapiens
aacaataaaaaccagaaaataaataaaatagagactaggaaaataataaaaaagatcaatgcaactatattattttgaaaagataaacaaaattaataaayctttagctcgactaagaaaaaatcggcaattaaaaaggagacattacaactgatactacagaaatacctaggatcataagcgactattatgagcaactag

SEQ ID NO: 503384 - DNA, 201 bp, Homo sapiens
gtacatcaaagacataatacaacatgattaagtagaatttatcccaggaatattatgatagctcaacctacatatgcaaattaataaaacaccatgcagcrcataatagaggacaaaaaccatcatcttaataggtgaagaaaaagcatctgataaaattcaacatcacttcatgataaatacactcaacaaacaaggaat

SEQ ID NO: 503385 - DNA, 201 bp, Homo sapiens
aacaccatgcagcgcataatagaggacaaaaaccatcatcttaataggtgaagaaaaagcatctgataaaattcaacatcacttcatgataaatacactcaacaaacaaggaatagaaggaagatagtttagcataataaaggccatataagacaaacatacagctaacatcatactgaatgggaaaaagctagaagcctt

SEQ ID NO: 503386 - DNA, 201 bp, Homo sapiens
gaatgggaaaaagctagaagcctttcctgtaagaactggaactagacaaggatgcccattttcactattcctagtcaatacagtactggaagtcttagccmgagtaatctggcaagagaatgaaataaagagcatccaaattagaaaggaagaaataaaattgtccttctttgtggatgacataatcttataattagaaaa

SEQ ID NO: 503387 - DNA, 201 bp, Homo sapiens
atgtattatatttcagaaaacgggaagaatgaccccccagggtgggtcagaggccagcaggctaatgctgtcaccatggactcggagggtacaggcccagkgcatagcaccctcacctcctggatttcagaggccataggcagtgctgtcacctggggtcaagacaggtggagccaccaccaggtcatagcatcaagcctg

SEQ ID NO: 503388 - DNA, 201 bp, Homo sapiens
tcaaaaccacagtgagatattatctcatcccagttacaaaagctattatcaaaaagatcaaaagtaacagatgctagcaaagatgtgtaagtatcagaacycctattcagtgttggtggaaatgtaaattagtacagccattatgaatcactgtatggagatttctcaaaaaactaaaaatagaaccaccatacaatccag

SEQ ID NO: 503389 - DNA, 201 bp, Homo sapiens
aaaaccacagtgagatattatctcatcccagttacaaaagctattatcaaaaagatcaaaagtaacagatgctagcaaagatgtgtaagtatcagaactcytattcagtgttggtggaaatgtaaattagtacagccattatgaatcactgtatggagatttctcaaaaaactaaaaatagaaccaccatacaatccagca

SEQ ID NO: 503390 - DNA, 201 bp, Homo sapiens
ctaacatcacaactaaaagaacaacagagccaagaggaaacaagccccaaagctagtagaggacaagacataactaaaatcagagctgaactgaaggagayagagacatgaaaacccttaaaaaagaatccacaaactcaggagctggttttttgagaaagaaataataagatggaccactaggtagactaataaagaata

SEQ ID NO: 503391 - DNA, 201 bp, Homo sapiens
ccattaaaaaggaggcaaagagcattaacagacacttctcaaaagaagacgtacacgtggttaacaaacatatgacaaaaaagtttaacattatggatcaytagagaaatgcaaatcaaaaccacaatgagataccatctcatgccagtcagaatggctattattaagaagtcaaagaacaacagatgctggtgaggttat

SEQ ID NO: 503392 - DNA, 201 bp, Homo sapiens
cagccgggcactgtggctcacgcctgtaatcccagcactttgggaggctgaggcaggcggatcacaaggtcaggagacagagaccatcctggctaacacgrtgaaaccccgtctccactaaaaatacaaaaaaattagccgggtatgatggtggacacctgtagtcccagctacttgggaggctgaggcaggagaatggtg

SEQ ID NO: 503393 - DNA, 201 bp, Homo sapiens
tccactaaaaatacaaaaaaattagccgggtatgatggtggacacctgtagtcccagctacttgggaggctgaggcaggagaatggtgtgaactcgggagkcagagcttgcagtgagctgaaatcatgccactgcactccagcctgggcgacagagcgagaccccgcctcaaaaagaaaaaaaaaagaaaagaaaagaaaa

SEQ ID NO: 503394 - DNA, 201 bp, Homo sapiens
gaaaaaagtggcatggctagactgcctgtgttctcttttctctattttaaaagggtttgtctatgatggctattatgtcaattattatttttttaatattkaaaattatgtaaaagaattcagcagtgaagctatctaggtcagcagtttttcttttcaagaaagttgcttaaatttggattcaatttatttaacagatgt

SEQ ID NO: 503395 - DNA, 201 bp, Homo sapiens
tacttggtaatgatgacttatcctattttatatgttgttaagttttgtatgttaatattttgtttagaattttgtatcccagctccaagtatacagaatcrtaattttcttttaatatccatgtcaagttttggtaccaagctattctgtccgataaaggaatagaagagtagattttttcagttagtgattgcatagtct

SEQ ID NO: 503396 - DNA, 201 bp, Homo sapiens
gtgaaaatccaagaaagtgagaatgagcctggcctaccagcataatcctcagaacagaataaaaactgtctggaaaggataagagagacggctcactttgygttatacacatatagttagatagaagtaataagttctaatgtttgatggtagagtatggtgactataattaacagcaatgaagagtacatttcaaaatac

SEQ ID NO: 503397 - DNA, 201 bp, Homo sapiens
tgcactcttatgtttattataacactattcacaattgccaaaatacggaatcaatctaagtgtccatcagttgatgaatggagaaagaaaatgtggtttayttacatagtagaatattacctgaccattaaaaagcaaaatcattgttacatgaatatactgcaaaaaaatatgtcatttgcagcaacatggatgaaactg

SEQ ID NO: 503398 - DNA, 201 bp, Homo sapiens
gaatcactgtatggagatttctcaaaaaactaaaaatagaaccaccatacaatccagcagtttcactggcaggtatttatccaaaggaaaggaaatcactrtgtcaaaaggatacatgcactcttatgtttattataacactattcacaattgccaaaatacggaatcaatctaagtgtccatcagttgatgaatggagaa

SEQ ID NO: 503399 - DNA, 201 bp, Homo sapiens
aaaagaaaactatattccaatataccagatgacatagatgtaaaagcccttgacaaaatacaagtaaactgaatccaacagtacatcaaagacataatacracatgattaagtagaatttatcccaggaatattatgatagctcaacctacatatgcaaattaataaaacaccatgcagcgcataatagaggacaaaaacc

SEQ ID NO: 503400 - DNA, 201 bp, Homo sapiens
gaagaaataaaattgtccttctttgtggatgacataatcttataattagaaaaaccaaaagaccttaaaaaaacctcttagatctgataaacaagttcagyaaagtttcagatacaaaatcaacatacaaaaatcagtagcatttatatataccaataatgaactagctgcaaaagaaattaacaaagcaatctcactgac

SEQ ID NO: 503401 - DNA, 201 bp, Homo sapiens
ccatggtgtatatatgccacattttcttaatccagtctatcattgttggacatttgggttggttccaagtctttgctattgtgaataatgccgcaataaayatacgtgtgcatgtgtctttatagcagcatgattcaaatgttatcactacagaaagccatcaaaccataaagataagcaataataaagaatgaagacaat

SEQ ID NO: 503402 - DNA, 201 bp, Homo sapiens
acaacattgaatcggtttcaaaaaaaaaaaaaagtctttcaagcccaggacctgacagcttcacagccaacttctaccgaagttataagaacaagtaccartgctcctcaaactagtccaaaaattggaaaaggggaggctactttgtaactcattctatgaaaccagcattaacctactaccaaaaccagacaaggacat

SEQ ID NO: 503403 - DNA, 201 bp, Homo sapiens
tttgatctcaaaagcacaggcaacaaaagcaaaaacagaaaaatgggattgtggctgggtgcggtggctgacgcctgtaatcccagcactttgggaggccraggtgcatggatcacctgaggtcaggagatcaagaccagcctggccaacatggtgaaaccccatctctactaaaaaaaaaaataccaaaaaactagatag

SEQ ID NO: 503404 - DNA, 201 bp, Homo sapiens
aggtgcatggatcacctgaggtcaggagatcaagaccagcctggccaacatggtgaaaccccatctctactaaaaaaaaaaataccaaaaaactagatagktgtggttgtgcacgcctctggtccagctactcgggagactgaggcaggagaattgcttgaacccaggcagcagagactgtggtgagccaagatcatgcca

SEQ ID NO: 503405 - DNA, 201 bp, Homo sapiens
tttatcatttaaaaaatattattttatcattttctggcttccatagttactgttgaaaattcagcctcattcagtcttactgtcttaaagataatgcatctttttttttttttttttaaactcaggcaacttctacgaattttttcttgaatctgcaggttgagatcttttatcattttttggaacattctcagccattta

SEQ ID NO: 503406 - DNA, 201 bp, Homo sapiens
cattattactttatagtgcttctagtaactgtaacagatggatcactgtggatctgcctttattgtctctttcaatctcccttacattttcattgtatgcyagacaatgtgtatatacgtacattggaaacctcacagcatatccccccagagcaggctaagggtctaatcactagaatccagtaaacaatttagctgtgt

SEQ ID NO: 503407 - DNA, 201 bp, Homo sapiens
agataattagacagagagaagatattagatatatattttatatatttatggtatttcaattaaccatctttgagtccactaattttttgtgtccagtctactggtaagccaatccaatgcattcttaatttcggattttctatttctcagttccagaatgtacattaactattcatttttctacctttttattctctttaa

SEQ ID NO: 503408 - DNA, 201 bp, Homo sapiens
aatcaaatctaataatcctagatttggtaatctcagtaccaaatattttggtactgagagcagggtgctgctgtaacaaatacctgaaaatgtgaaagtgrctttggaattgggtgatgggtgaaggctggaagaattttgaggtgcttggtagagaaagcctgcattgccttaaagagagtgttggaagaaacataaata

SEQ ID NO: 503409 - DNA, 201 bp, Homo sapiens
ctgtatggaaaaggtaatagaaatgtctcactctgactgtgttacctttccccttcccccaagtcagcacagtgccacactgaaaagattctccatgaacyacattttctgcagaggaaaaagagaatcagaggtgaacacccagcttttctagcactctgagacttctcccaagaagcccactccagtctcatttcacaa

SEQ ID NO: 503410 - DNA, 201 bp, Homo sapiens
tgggttaaaaagaaagaacactgtcagacttctgggattccacaggaagaaaataaaccaatcgaactatttggatgcaaatatgtattatatttcagaaracgggaagaatgaccccccagggtgggtcagaggccagcaggctaatgctgtcaccatggactcggagggtacaggcccagggcatagcaccctcacctc

SEQ ID NO: 503411 - DNA, 201 bp, Homo sapiens
aaattatgttatattatataaatataattatgtaagtatatttatataatataaatataaatttatatttgtattatatacatataaatatgtatataaayttatatttctatttatcaatataattatatttatgtaatataattatataaatatatttacataaatagaattatataaatttaatatataatataatta

SEQ ID NO: 503412 - DNA, 201 bp, Homo sapiens
tgctcaggagattaggcatgtgatttgtggatccaattagtcatctcagcataaacactgccatcctggactgaagggtaaaggcatgggttaaaaagaargaacactgtcagacttctgggattccacaggaagaaaataaaccaatcgaactatttggatgcaaatatgtattatatttcagaaaacgggaagaatgac

SEQ ID NO: 503413 - DNA, 201 bp, Homo sapiens
gtaaaacgtcaaaaaattcacaaacacatggagattttaaaacgtactcctgaacacccatgcgtcaatgaagaaattaaaagagaaatttaaaaatatcttgagacaaatgaaaatgaaaatatacccaaagttatgggatgcagcaaaataagttctaagaggaaaatttacagcaataaatgcctacatcaaaagagg

SEQ ID NO: 503414 - DNA, 201 bp, Homo sapiens
taaaacgtcaaaaaattcacaaacacatggagattttaaaacgtactcctgaacacccatgcgtcaatgaagaaattaaaagagaaatttaaaaatatcttgagacaaatgaaaatgaaaatatacccaaagttatgggatgcagcaaaataagttctaagaggaaaatttacagcaataaatgcctacatcaaaagagga

SEQ ID NO: 503415 - DNA, 201 bp, Homo sapiens
atttgaaacaaaaataacactgcttagagatgcttctcttttagtaaaaagccaaaaatgtattaaattattacaaatcattttcttgcattagatagcawgacagaagaaccaggctcagcattctatcttcttctcccactcatccataggctcccgtcaattaatctgtccctacttaacactaagtttgaattttga

SEQ ID NO: 503416 - DNA, 201 bp, Homo sapiens
aaaatagaaaaaggataagcctgatgacagcaaaaaaaaaaaaaaaaaaagaaacaataaaaaccagaaaataaataaaatagagactaggaaaataatawaaaagatcaatgcaactatattattttgaaaagataaacaaaattaataaacctttagctcgactaagaaaaaatcggcaattaaaaaggagacattaca

SEQ ID NO: 503417 - DNA, 201 bp, Homo sapiens
cctgatgacagcaaaaaaaaaaaaaaaaaaagaaacaataaaaaccagaaaataaataaaatagagactaggaaaataataaaaaagatcaatgcaactawattattttgaaaagataaacaaaattaataaacctttagctcgactaagaaaaaatcggcaattaaaaaggagacattacaactgatactacagaaatac

SEQ ID NO: 503418 - DNA, 201 bp, Homo sapiens
tattgttaaaatatccatcctaggcacagtgatcaacaaattcaatgcaatttccatcaaaatttcaacgtcatttttcctataaatagaaaaaatacaawcctaaaattcatatgaaagcacaaaaatcttgaaaaactaaggcaatcataagcaaaaagaagaaagctggaaacatcacactatttgatttcaaattat

SEQ ID NO: 503419 - DNA, 201 bp, Homo sapiens
ctggtccagctactcgggagactgaggcaggagaattgcttgaacccaggcagcagagactgtggtgagccaagatcatgccactgcactccagcctgggyaacagagcaagactccatctcaaaaaaaaaaaaaaaaaaaaagaagaagagaaaaatgggattgcatcaaactaaaaagcttctgtacaagaaatgaaac

SEQ ID NO: 503420 - DNA, 201 bp, Homo sapiens
gtaaaatacaagaggaaagggatacatttaagaagaaatagttaagcaaaaagaatccaaaacttgtggatttggaaaattctcagcctatccacattacaaaaaaaaaaaaaaaatagaaaatgtgctttggcggtatcaccaatgttattgctggaaaactgtttgctcaggagattaggcatgtgatttgtggatcca

SEQ ID NO: 503421 - DNA, 201 bp, Homo sapiens
taaaatacaagaggaaagggatacatttaagaagaaatagttaagcaaaaagaatccaaaacttgtggatttggaaaattctcagcctatccacattacaaaaaaaaaaaaaaaatagaaaatgtgctttggcggtatcaccaatgttattgctggaaaactgtttgctcaggagattaggcatgtgatttgtggatccaa

SEQ ID NO: 503422 - DNA, 201 bp, Homo sapiens
agctaacattctatctctctacttcaagagaagcctgggatttggcatttctatctccactgtatgaaaaacgaaggtggcttacaggagctacaccaagrctccctctatgcatgcaccatccctctaacactaatacagtctcccacaggtagatataggactctttacaataaaatactaggctaggatatcaaatat

SEQ ID NO: 503423 - DNA, 201 bp, Homo sapiens
tagaagagtagattttttcagttagtgattgcatagtctatgttttcccatatatttacttcccacttatttgtatccttatatttaaagtatatatgtgsgagacatcaacaagattatagaataggaggtctcatgtttcactatactctcccacaacacacagagagaaaatgtagcagctattcaaagaaaagaaca

SEQ ID NO: 503424 - DNA, 201 bp, Homo sapiens
atattacaagatatatacatatatcttgtaatgttcacagtatgcctagtatacaagttactagtatacaagtcattattctcattccctggaggagatayccgaagcacatgaagcttaaataatctgccttagacattcagttagtaaacaatggagccaaaattaaaaccaaggactgcctgcaaaagtgtcaaagta

SEQ ID NO: 503425 - DNA, 201 bp, Homo sapiens
tttcatccatgtctctacaaaggacatgaactcatcattttttatggctgcatagtattccatggtgtatatatgccacattttcttaatccagtctatcrttgttggacatttgggttggttccaagtctttgctattgtgaataatgccgcaataaatatacgtgtgcatgtgtctttatagcagcatgattcaaatgt

SEQ ID NO: 503426 - DNA, 201 bp, Homo sapiens
ggcccaggaagggccctttgcccccacaggcttgggagtgtcgactctcatggcctggcctctccctgctcacagagcctgctccaatcctgaagtaggawtggggccaagcctggtcactgtcactgcccagccaggtgtgtgcacattcagggcagtgctaacataacagccccctgccaccttggccccctctagact

SEQ ID NO: 503427 - DNA, 201 bp, Homo sapiens
aacacaataattcttcaacaacagactccaatgaagacaaaatttatcaaatgcctgaaaaataattcaaagtaataatattaaagaagtgcagtcagatrcaagagaaaacaggtaacaatacaaaaaaatcagaacaattcaggatataaaagagaaagatatcataaaaaagaaccaaacagaaatcctggaactgaa

SEQ ID NO: 503428 - DNA, 201 bp, Homo sapiens
cactgacactgtttacagccaaagtaatcatacagagagtatactactgtgtgcaactggaatcaaagcaaagctcccctacacgaccaacatttaaatayatctacaggaaaaaagtctttctctacaaaaaccaattcacaaaattagaagtgagtgttacatccaaggtgctaatatcaatgaaagacacaagaaaca

SEQ ID NO: 503429 - DNA, 201 bp, Homo sapiens
tcatccccccactgccactactgacagccaagaaatctgcctaaaggcccaagaaactgcccatctaaaccacctaacaccaatgccaacatataccaccyggggctccaaatataaagacactcagactgctgttgccatcactgaggcataagaactagcctcggcagtctattcccagcaaaagctcaccatagcctc

SEQ ID NO: 503430 - DNA, 201 bp, Homo sapiens
ccaggttgagtgggcagaacaagcccagcaggcccaaacaagagtcaggcaaaggcaccatgggacacagaggtttttagccagagaagtgacacccaaasatcccgtaacactatcaccacaactaccatcactcacaccatgcatgctgctcagagacccaagaactcacacatccaagggacgaaaggactcacacac

SEQ ID NO: 503431 - DNA, 201 bp, Homo sapiens
gagcacagcctgccaggttgagtgggcagaacaagcccagcaggcccaaacaagagtcaggcaaaggcaccatgggacacagaggtttttagccagagaaktgacacccaaagatcccgtaacactatcaccacaactaccatcactcacaccatgcatgctgctcagagacccaagaactcacacatccaagggacgaaa

SEQ ID NO: 503432 - DNA, 201 bp, Homo sapiens
catgagttccaggctggtagggtgagctgagcacagcctgccaggttgagtgggcagaacaagcccagcaggcccaaacaagagtcaggcaaaggcaccaygggacacagaggtttttagccagagaagtgacacccaaagatcccgtaacactatcaccacaactaccatcactcacaccatgcatgctgctcagagacc

SEQ ID NO: 503433 - DNA, 201 bp, Homo sapiens
atagtgaatagtgcccacctggtggggcgcccactattctgtaaaatcacagccaaatactatactacagtttacaatgtaagttataaaataatcttttktgtgtgtgtgtgttgagataaattaaatggatgtaaattgactaaaatagagttggtggatgacaaaagagctataaagataagtacattccctatgtgc

SEQ ID NO: 503434 - DNA, 201 bp, Homo sapiens
caataaagctcctctttgtcttgctcacccttcacatatctgcatagctcattcttcctggttgcagaacaattactcgggacccgctgaatggtgaagcyaaaagagctgtaacacacacacagggctgagacatgtcccttgctcgccacattgcaggtgacaagaaggagagaagagctgtggccctttggggtgccc

SEQ ID NO: 503435 - DNA, 201 bp, Homo sapiens
tcctaggcacagtgatcaacaaattcaatgcaatttccatcaaaatttcaacgtcatttttcctataaatagaaaaaatacaaacctaaaattcatatgaragcacaaaaatcttgaaaaactaaggcaatcataagcaaaaagaagaaagctggaaacatcacactatttgatttcaaattatatatgaagtgaaagtaa

SEQ ID NO: 503436 - DNA, 201 bp, Homo sapiens
ctgctagtagctgaacactcatgggacaccctagttctagaaaggagctgcccctgcgggtctcctctgagctgttctatcactcaataaagctcctcttygtcttgctcacccttcacatatctgcatagctcattcttcctggttgcagaacaattactcgggacccgctgaatggtgaagctaaaagagctgtaacac

SEQ ID NO: 503437 - DNA, 201 bp, Homo sapiens
ttagggagtgttacacatggaagcaaaagacagtatctacaatcataaaagcacatgcaaatgtaaaacacgcaaatgaggaagagacaggattcaaaagtttttttttttattaaaatgaaaaatatttatttattataaacctatttttttgtttgtttgtttttattatactttaagttttagggtacatgtgcacat

SEQ ID NO: 503438 - DNA, 201 bp, Homo sapiens
gaggtatttcctaatatagaccaggagtttctgttggaccaattggatctctgctataaaaaatggtttaattcaagcagaataatcctttacttgggaawtttttgttttgtttttggtaggattataggaaatgtttcatttctccaaaaagctatccttacatgttatgatccttaattatgttatttatttattcaa

SEQ ID NO: 503439 - DNA, 201 bp, Homo sapiens
aagtgaaaagtgcagaggtatttcctaatatagaccaggagtttctgttggaccaattggatctctgctataaaaaatggtttaattcaagcagaataatyctttacttgggaattttttgttttgtttttggtaggattataggaaatgtttcatttctccaaaaagctatccttacatgttatgatccttaattatgtt

SEQ ID NO: 503440 - DNA, 201 bp, Homo sapiens
taaggtctgttggccaactggaacaagtccaggtgtagcccaagggatcaggaaaggcagcccctagccatggtaatttacaaatgtttttagacctgttyttgttcatttctgcaattttgtaggaggagggaatagggagtccagaaacaaaacaaaactacatgttaagtaaattgtctttttaaaaaatatttttaa

SEQ ID NO: 503441 - DNA, 201 bp, Homo sapiens
ccaaaggtatcgtctcttctgggaaagctcgtcagctacaccaacctcacccagggcgccaaagagcatgaggaggccgagagtggggagggcacccgccrgagggcagccgaggtgagctggttggggcggcagaggggccacacctgggaagacagacacagcaccatggaattgactgtttccccacatggtggtgag

SEQ ID NO: 503442 - DNA, 201 bp, Homo sapiens
tccaacaaccccctgggttccttgagtgccagtgtcaggggacatgtgtatgtgatcggagcctgatgctgccttgtggggctttcctgtcccactttttrgtcactaatccagttctctggcccttcagccctcttctctttggggtgactgttacctctttgcctagctcctctgtgtcattgcggctcagtgtagctg

SEQ ID NO: 503443 - DNA, 201 bp, Homo sapiens
ttgccccacctcccggcatgccccgggctgccctgcaggacgccccccgcgcagtgcatggtggggtagccagccggccacctttgggccatggcagccgraggtgctgtgtgcggcttcgtctatctggagggcactgcctgggcggtccctgaggacaccgaacccttggcatcctgcacattgggtactccggaaaga

SEQ ID NO: 503444 - DNA, 201 bp, Homo sapiens
cccgctacgcgctgttgcggctggaggaggggcctcctcacaccaagaactggcggtgagttcccgccagaccctggccagggcgcagaggttcttaggggtcgctgtcggggtcagagggtcgagaggtgccggctccccatcctggggctgcccggggcaccctcctgggccatgctacccaaacctgcagggaccacg

SEQ ID NO: 503445 - DNA, 201 bp, Homo sapiens
gggataaagaatccacagcacagcacctgctgagtggttgttggctcagagaaagcaattgaagcctcatgctgatagcaagagatgtatcagatacaggrggatgcctcaatcagcattctcagctgcagtcaagaaaaatgaattgtggcctatgtaaacagaaaaggttggcgggcatggccagtgcatggcccaatc

SEQ ID NO: 503446 - DNA, 201 bp, Homo sapiens
agcagcctctccccagcagctgctccagctccagcaccggcttgatgaccttctgaggctgccagaggttatttggggatgcagaaagcatttccggcccrccctgccctttcccacactgtccttttcttagagtgactcagcctgggatgggggtgggactgggagctcttgctgtcgctattctgtgggtggcatcct

SEQ ID NO: 503447 - DNA, 201 bp, Homo sapiens
cttcttggagagctatggcgaggctcaggccgccgagcaggtacttgctttggggagggagagctgagccagactacaggggtctggactgcagctggcayggaggggagggcccagtcttggccagggtggccagccaggcagccagcactgctgccacctgagagctggcacaagggggagccagcagtcccatcttga

SEQ ID NO: 503448 - DNA, 201 bp, Homo sapiens
tgaagccgagggcagtacagacatccaggcactacttagacccttacattcccacaagcccttgggagctttgggggaactccgaggagtgcccactgggygtctggcactaactgtcccttttctagtgcatctgggcagttggaaaaacaagtgttacaatctccacttcatagaagaggaaaccaaggccgcacaggg

SEQ ID NO: 503449 - DNA, 201 bp, Homo sapiens
cacccctactctctgtgttccctggggccccactgggggagggggcctgctgagtgactagggctgactctccatggtgcatgcctctgatgctctactcrccccctccctttgtgttcgcataggcacccagcatgggcaccctcatgggggtgtacctgccctgcctgcagaatatctttggggttatcctcttcctgc

SEQ ID NO: 503450 - DNA, 201 bp, Homo sapiens
caactggcggccccggttcaagtactatcactggtgagccatgcctctgacacgggagaccctggggaggccaggagcctcattctgggtgaggcttgggyttcctgggtagggagctcttgaaacactgtggggagggagattatagggctgcgggggactggacctaggtcttacacccagtgacctgaccacccacct

SEQ ID NO: 503451 - DNA, 201 bp, Homo sapiens
ctggctgtctttctgtaccatctgcgccttgaggccgaggtggaggtggtggagatggtgagccctctgccctgccctggccccgtggataccatgtcccrtgcagctgggtcctcacggccaaccctgtccccagcataacagtgacatctctgcatacacctacgagcggacgctgatgatggagcagcggtcgcagat

SEQ ID NO: 503452 - DNA, 201 bp, Homo sapiens
tgggaaggggcccaggctggggggctcaggaagcaggccctgattgtccctctctcttcacaggacatggcaaccacagagagagcagcccttttctttcycccttggaggcttccagaggaattgactactatgacaggaacctggcactgtttgaggtagctgaggagccattttgggccacaggtttggcacacagag

SEQ ID NO: 503453 - DNA, 201 bp, Homo sapiens; identical to SEQ ID NO: 275284

SEQ ID NO: 503454 - DNA, 201 bp, Homo sapiens
cacccgtccgactttcttaggcaaccctagaaggctcctggaatccacttccgctctccacggcctggggcttgccccacctcccggcatgccccgggctkccctgcaggacgccccccgcgcagtgcatggtggggtagccagccggccacctttgggccatggcagccgaaggtgctgtgtgcggcttcgtctatctgg

SEQ ID NO: 503455 - DNA, 201 bp, Homo sapiens
cactacttagacccttacattcccacaagcccttgggagctttgggggaactccgaggagtgcccactgggcgtctggcactaactgtcccttttctagtscatctgggcagttggaaaaacaagtgttacaatctccacttcatagaagaggaaaccaaggccgcacagggagtaagcatgtctccctgggtcacacggg

SEQ ID NO: 503456 - DNA, 201 bp, Homo sapiens
cttcctcccaggtgcccgcgtctctccacagccctttctctatctcctaccccaggaggccccccagagggctgttcttgttaaggcccaccctcggagcrcgaacacggctgaggacatgtgtctgtgtacgtagtggcatatgcatgtgtaattgtgcttgtacaagtgtgtagctgtgggtatcacagggtgaaggct

SEQ ID NO: 503457 - DNA, 201 bp, Homo sapiens
ggcgtggaggcgatctgggggcgggtcaaacgctggccccgcccctctgcaggccccgtccctcagtgtccatacgtgcttgtgctagggcgcctgcgccstcacctggattcccttcactggagggaatgatgtcccaggttttggtcactggcctctctctggctatccctgggccttcaagagcattggcacggtgcc

SEQ ID NO: 503458 - DNA, 201 bp, Homo sapiens; identical to SEQ ID NO: 275288

SEQ ID NO: 503459 - DNA, 201 bp, Homo sapiens
tcaccatgttggccaggctggtctcaaactcctgacctcaagtgatccaccgcctcagcctcccaaagtgctgggattacaggcgtgagccacggcgctgrcctattttttatttttttttgagacggagtccccctctgtcacccaggctggagtgcagtggtgcgatctctgctcactgcaacctctgcttcctggatt

SEQ ID NO: 503460 - DNA, 201 bp, Homo sapiens
gtgaacctggcaggcagagcttgcggtgagccgagattgcaccactgcactccagcctgggcgacagagcgagactccgtcgcaaaaaaaaaaaaaaaaaattagccaggcatggtggtgggcacttgtaattccagctacttgggaggctgaggcagagaatagcttgaacccaggaggcagaggttgcagtagtgagcc

SEQ ID NO: 503461 - DNA, 201 bp, Homo sapiens
gtggggaccattctggccatcattacaacttccctcgtgtgtatcctttcccaggcctggggcaggtggggcagaggacgggaagcgcttggcctgtgtaygttgccaggtcacatgcacagacaccccacacactcatatatagctccccttctcatgcacacatgcacatacacaccacgagactcccagctgtaggtg

SEQ ID NO: 503462 - DNA, 201 bp, Homo sapiens; identical to SEQ ID NO: 275292

SEQ ID NO: 503463 - DNA, 201 bp, Homo sapiens
actcctgtgacccctacttcatgctcaacaatgtgaccgagatccctggcatccccggggcagctgctggtgtgctccagggtgggtcctccctcccgtcrtcttgctcttgagcccacaggctgagcaggggcacagagcacagagctgtccttgtgtggccagcttgggaacgggggcaggactggccgccttcccagc

SEQ ID NO: 503464 - DNA, 201 bp, Homo sapiens
catgtccaaacagtccctttggactccaaacagaaggctcaggctgttcatccccacatgtctggccaaggcctgggtattataaagtaggaagcctcttygagagacaaagacctttactcaggctggtcttcctttcacctccatgccagtttgggccaggcaaggcagaggcctggctgccttcacctcggccctgga

SEQ ID NO: 503465 - DNA, 201 bp, Homo sapiens; identical to SEQ ID NO: 275295

SEQ ID NO: 503466 - DNA, 201 bp, Homo sapiens; identical to SEQ ID NO: 275294

SEQ ID NO: 503467 - DNA, 201 bp, Homo sapiens
gtgctagggcgcctgcgccctcacctggattcccttcactggagggaatgatgtcccaggttttggtcactggcctctctctggctatccctgggccttcmagagcattggcacggtgccatgtgaaaactgagttgcaacctggtgacactgcagctccaaagtgctccacagaaatgatttggggactggctttctggg

SEQ ID NO: 503468 - DNA, 201 bp, Homo sapiens
ttgacgccgccgcagacttcagcagtgtggttctctttggtgcctgcattgagggtgtggttctccgggacaagtgagtgagctgggcccccctctttagsagcggctgggctttggcctgccctcacaccagctcccaaccccgtgggtggtcctaagcctgctggctgcctttggtggtctgtgccatccttccggacc

SEQ ID NO: 503469 - DNA, 201 bp, Homo sapiens
ctggggtgggggcacgtggtactattcagggacagtggggtggcagaggccgagttttccttgacgccgccgcagacttcagcagtgtggttctctttggygcctgcattgagggtgtggttctccgggacaagtgagtgagctgggcccccctctttagcagcggctgggctttggcctgccctcacaccagctcccaac

SEQ ID NO: 503470 - DNA, 201 bp, Homo sapiens
ttatctgctgctgttgtgtgagtgtcctggcgtgggagggttgggctgggcatgggccacggctgcccccacagagcccacccagctgagccgctcacccrggccctccttcccacagaccctgctgacggccatctccatgagtgccatcgccaccaacggtgtggttccaggtcagtgagcgccacccaaggcctggtg

SEQ ID NO: 503471 - DNA, 201 bp, Homo sapiens
ctttgtggttcacgccagggcgggtggcagggtcaggcctttggagaccgcatcggtgggtgcggaggaatcagaatgactcaccgcagccctacccaagmtagtgctcatttcccggaggcaaggtggtcacattgggccagacaggccccatcccccttttcctatgggaccaaggctatctcctgcaattgtcctcag

SEQ ID NO: 503472 - DNA, 201 bp, Homo sapiens
ttttgtatttttagtagagacgaggtttcactatgttggccaggatggtttcgaactcttgaccttaactgatccacccacctctgcctctcaaagtgctrggattacgggtgtgagccactgcaccctgccgaaaatggttttttgaaaacaggattctccatggtacaccataacctaattaatgtgattattctcctg

SEQ ID NO: 503473 - DNA, 201 bp, Homo sapiens
tagcaagagatgtatcagatacaggaggatgcctcaatcagcattctcagctgcagtcaagaaaaatgaattgtggcctatgtaaacagaaaaggttggcrggcatggccagtgcatggcccaatcacaccactagcctgggctggtggtgacagttctgttgccatctccatcactggacaccatgccagtccttctcat

SEQ ID NO: 503474 - DNA, 201 bp, Homo sapiens; identical to SEQ ID NO: 331651

SEQ ID NO: 503475 - DNA, 201 bp, Homo sapiens; identical to SEQ ID NO: 331771

SEQ ID NO: 503476 - DNA, 201 bp, Homo sapiens; identical to SEQ ID NO: 69499

SEQ ID NO: 503477 - DNA, 201 bp, Homo sapiens; identical to SEQ ID NO: 331773

SEQ ID NO: 503478 - DNA, 201 bp, Homo sapiens; identical to SEQ ID NO: 331675

SEQ ID NO: 503479 - DNA, 201 bp, Homo sapiens; identical to SEQ ID NO: 331677

SEQ ID NO: 503480 - DNA, 201 bp, Homo sapiens; identical to SEQ ID NO: 331679

SEQ ID NO: 503481 - DNA, 201 bp, Homo sapiens; identical to SEQ ID NO: 69517

SEQ ID NO: 503482 - DNA, 201 bp, Homo sapiens; identical to SEQ ID NO: 331681

SEQ ID NO: 503483 - DNA, 201 bp, Homo sapiens; identical to SEQ ID NO: 331879

SEQ ID NO: 503484 - DNA, 201 bp, Homo sapiens; identical to SEQ ID NO: 331587

SEQ ID NO: 503485 - DNA, 201 bp, Homo sapiens; identical to SEQ ID NO: 491282

SEQ ID NO: 503486 - DNA, 201 bp, Homo sapiens; identical to SEQ ID NO: 491283

SEQ ID NO: 503487 - DNA, 201 bp, Homo sapiens; identical to SEQ ID NO: 491284

SEQ ID NO: 503488 - DNA, 201 bp, Homo sapiens; identical to SEQ ID NO: 491285

SEQ ID NO: 503489 - DNA, 201 bp, Homo sapiens; identical to SEQ ID NO: 491286

SEQ ID NO: 503490 - DNA, 201 bp, Homo sapiens; identical to SEQ ID NO: 491287

SEQ ID NO: 503491 - DNA, 201 bp, Homo sapiens; identical to SEQ ID NO: 491288

SEQ ID NO: 503492 - DNA, 201 bp, Homo sapiens; identical to SEQ ID NO: 491289

SEQ ID NO: 503493 - DNA, 201 bp, Homo sapiens; identical to SEQ ID NO: 491290

SEQ ID NO: 503494 - DNA, 201 bp, Homo sapiens; identical to SEQ ID NO: 491291

SEQ ID NO: 503495 - DNA, 201 bp, Homo sapiens; identical to SEQ ID NO: 491292

SEQ ID NO: 503496 - DNA, 201 bp, Homo sapiens; identical to SEQ ID NO: 491293

SEQ ID NO: 503497 - DNA, 201 bp, Homo sapiens; identical to SEQ ID NO: 491294

SEQ ID NO: 503498 - DNA, 201 bp, Homo sapiens; identical to SEQ ID NO: 491295

SEQ ID NO: 503499 - DNA, 201 bp, Homo sapiens; identical to SEQ ID NO: 491296

SEQ ID NO: 503500 - DNA, 201 bp, Homo sapiens; identical to SEQ ID NO: 491297

SEQ ID NO: 503501 - DNA, 201 bp, Homo sapiens; identical to SEQ ID NO: 491299

SEQ ID NO: 503502 - DNA, 201 bp, Homo sapiens; identical to SEQ ID NO: 491300

SEQ ID NO: 503503 - DNA, 201 bp, Homo sapiens; identical to SEQ ID NO: 491298

SEQ ID NO: 503504 - DNA, 201 bp, Homo sapiens; identical to SEQ ID NO: 491301

SEQ ID NO: 503505 - DNA, 201 bp, Homo sapiens; identical to SEQ ID NO: 491302

SEQ ID NO: 503506 - DNA, 201 bp, Homo sapiens; identical to SEQ ID NO: 491303

SEQ ID NO: 503507 - DNA, 201 bp, Homo sapiens; identical to SEQ ID NO: 491304

SEQ ID NO: 503508 - DNA, 201 bp, Homo sapiens; identical to SEQ ID NO: 491305

SEQ ID NO: 503509 - DNA, 201 bp, Homo sapiens; identical to SEQ ID NO: 491306

SEQ ID NO: 503510 - DNA, 201 bp, Homo sapiens; identical to SEQ ID NO: 491307

SEQ ID NO: 503511 - DNA, 201 bp, Homo sapiens; identical to SEQ ID NO: 491308

SEQ ID NO: 503512 - DNA, 201 bp, Homo sapiens; identical to SEQ ID NO: 491309

SEQ ID NO: 503513 - DNA, 201 bp, Homo sapiens; identical to SEQ ID NO: 491310

SEQ ID NO: 503514 - DNA, 201 bp, Homo sapiens; identical to SEQ ID NO: 491311

SEQ ID NO: 503515 - DNA, 201 bp, Homo sapiens; identical to SEQ ID NO: 491312

SEQ ID NO: 503516 - DNA, 201 bp, Homo sapiens; identical to SEQ ID NO: 491313

SEQ ID NO: 503517 - DNA, 201 bp, Homo sapiens; identical to SEQ ID NO: 491314

SEQ ID NO: 503518 - DNA, 201 bp, Homo sapiens; identical to SEQ ID NO: 491315

SEQ ID NO: 503519 - DNA, 201 bp, Homo sapiens; identical to SEQ ID NO: 491316

SEQ ID NO: 503520 - DNA, 201 bp, Homo sapiens; identical to SEQ ID NO: 491317

SEQ ID NO: 503521 - DNA, 201 bp, Homo sapiens; identical to SEQ ID NO: 491318

SEQ ID NO: 503522 - DNA, 201 bp, Homo sapiens; identical to SEQ ID NO: 491319

SEQ ID NO: 503523 - DNA, 201 bp, Homo sapiens; identical to SEQ ID NO: 491320

SEQ ID NO: 503524 - DNA, 201 bp, Homo sapiens; identical to SEQ ID NO: 491321

SEQ ID NO: 503525 - DNA, 201 bp, Homo sapiens; identical to SEQ ID NO: 491322

SEQ ID NO: 503526 - DNA, 201 bp, Homo sapiens; identical to SEQ ID NO: 491323

SEQ ID NO: 503527 - DNA, 201 bp, Homo sapiens; identical to SEQ ID NO: 491324

SEQ ID NO: 503528 - DNA, 201 bp, Homo sapiens; identical to SEQ ID NO: 491325

SEQ ID NO: 503529 - DNA, 201 bp, Homo sapiens; identical to SEQ ID NO: 491326

SEQ ID NO: 503530 - DNA, 201 bp, Homo sapiens; identical to SEQ ID NO: 491327

SEQ ID NO: 503531 - DNA, 201 bp, Homo sapiens; identical to SEQ ID NO: 491328

SEQ ID NO: 503532 - DNA, 201 bp, Homo sapiens; identical to SEQ ID NO: 491329

SEQ ID NO: 503533 - DNA, 201 bp, Homo sapiens
ctatacattcatttcaatgtataagaatcaaagtagagatagtgaaatagcctaaatgcagcagttgaataaacgagttgataaatttttatcaatgattrcatctttttttcttttcttcctctatgcatatagctttggagtttaacccttctgccaatccagaggcaagcacaatattccagaggaactctcaaacag

SEQ ID NO: 503534 - DNA, 201 bp, Homo sapiens; identical to SEQ ID NO: 491330

SEQ ID NO: 503535 - DNA, 201 bp, Homo sapiens; identical to SEQ ID NO: 491331

SEQ ID NO: 503536 - DNA, 201 bp, Homo sapiens; identical to SEQ ID NO: 491332

SEQ ID NO: 503537 - DNA, 201 bp, Homo sapiens; identical to SEQ ID NO: 491333

SEQ ID NO: 503538 - DNA, 201 bp, Homo sapiens; identical to SEQ ID NO: 491334

SEQ ID NO: 503539 - DNA, 201 bp, Homo sapiens; identical to SEQ ID NO: 491335

SEQ ID NO: 503540 - DNA, 201 bp, Homo sapiens; identical to SEQ ID NO: 491336

SEQ ID NO: 503541 - DNA, 201 bp, Homo sapiens; identical to SEQ ID NO: 491337

SEQ ID NO: 503542 - DNA, 201 bp, Homo sapiens; identical to SEQ ID NO: 491338

SEQ ID NO: 503543 - DNA, 201 bp, Homo sapiens; identical to SEQ ID NO: 491339

SEQ ID NO: 503544 - DNA, 201 bp, Homo sapiens; identical to SEQ ID NO: 491340

SEQ ID NO: 503545 - DNA, 201 bp, Homo sapiens; identical to SEQ ID NO: 491341

SEQ ID NO: 503546 - DNA, 201 bp, Homo sapiens; identical to SEQ ID NO: 491342

SEQ ID NO: 503547 - DNA, 201 bp, Homo sapiens; identical to SEQ ID NO: 491343

SEQ ID NO: 503548 - DNA, 201 bp, Homo sapiens; identical to SEQ ID NO: 491344

SEQ ID NO: 503549 - DNA, 201 bp, Homo sapiens; identical to SEQ ID NO: 491345

SEQ ID NO: 503550 - DNA, 201 bp, Homo sapiens
gttcaagtgattttcccatctcagcctcctgagtagctgggactacaagcatgtgccatcttgcctggctctatcttatgtctatacattcatttcaatgkataagaatcaaagtagagatagtgaaatagcctaaatgcagcagttgaataaacgagttgataaatttttatcaatgattacatctttttttcttttctt

SEQ ID NO: 503551 - DNA, 201 bp, Homo sapiens; identical to SEQ ID NO: 491346

SEQ ID NO: 503552 - DNA, 201 bp, Homo sapiens; identical to SEQ ID NO: 491347

SEQ ID NO: 503553 - DNA, 201 bp, Homo sapiens
cttccccagcagagcctgagcagctctgttttccttctacttcccctcttctttcacatctcatgaccaagcacttcctattctgtctcccaaatgatcayagattttttcctccacttttgtcactgccactgcccttagcattactctgcctttagagaaagtctcttaattggtttggttgcttccttcagtccttat

SEQ ID NO: 503554 - DNA, 201 bp, Homo sapiens; identical to SEQ ID NO: 491348

SEQ ID NO: 503555 - DNA, 201 bp, Homo sapiens; identical to SEQ ID NO: 491349

SEQ ID NO: 503556 - DNA, 201 bp, Homo sapiens; identical to SEQ ID NO: 491350

SEQ ID NO: 503557 - DNA, 201 bp, Homo sapiens; identical to SEQ ID NO: 491351

SEQ ID NO: 503558 - DNA, 201 bp, Homo sapiens; identical to SEQ ID NO: 491352

SEQ ID NO: 503559 - DNA, 201 bp, Homo sapiens; identical to SEQ ID NO: 491353

SEQ ID NO: 503560 - DNA, 201 bp, Homo sapiens; identical to SEQ ID NO: 491354

SEQ ID NO: 503561 - DNA, 201 bp, Homo sapiens; identical to SEQ ID NO: 491355

SEQ ID NO: 503562 - DNA, 201 bp, Homo sapiens; identical to SEQ ID NO: 491356

SEQ ID NO: 503563 - DNA, 201 bp, Homo sapiens; identical to SEQ ID NO: 491357

SEQ ID NO: 503564 - DNA, 201 bp, Homo sapiens; identical to SEQ ID NO: 491358

SEQ ID NO: 503565 - DNA, 201 bp, Homo sapiens; identical to SEQ ID NO: 491359

SEQ ID NO: 503566 - DNA, 201 bp, Homo sapiens
tcccacagtagttttttttttttaaagtctagccgggtgcagtggctcacgcctgtaatcccagactttgggaggccgaggtgggcagatcacgaagtcargagaccgagaacatcctggctaacacagtgaaaccccgtctctactaaaaatacaaaaaattagccggacatggtaacgggtgcctgtagtcccagctaa

SEQ ID NO: 503567 - DNA, 201 bp, Homo sapiens; identical to SEQ ID NO: 491360

SEQ ID NO: 503568 - DNA, 201 bp, Homo sapiens; identical to SEQ ID NO: 491361

SEQ ID NO: 503569 - DNA, 201 bp, Homo sapiens; identical to SEQ ID NO: 491362

SEQ ID NO: 503570 - DNA, 201 bp, Homo sapiens; identical to SEQ ID NO: 491363

SEQ ID NO: 503571 - DNA, 201 bp, Homo sapiens; identical to SEQ ID NO: 491364

SEQ ID NO: 503572 - DNA, 201 bp, Homo sapiens; identical to SEQ ID NO: 491365

SEQ ID NO: 503573 - DNA, 201 bp, Homo sapiens; identical to SEQ ID NO: 491366

SEQ ID NO: 503574 - DNA, 201 bp, Homo sapiens; identical to SEQ ID NO: 491367

SEQ ID NO: 503575 - DNA, 201 bp, Homo sapiens; identical to SEQ ID NO: 491368

SEQ ID NO: 503576 - DNA, 201 bp, Homo sapiens; identical to SEQ ID NO: 491369

SEQ ID NO: 503577 - DNA, 201 bp, Homo sapiens; identical to SEQ ID NO: 491370

SEQ ID NO: 503578 - DNA, 201 bp, Homo sapiens; identical to SEQ ID NO: 491371

SEQ ID NO: 503579 - DNA, 201 bp, Homo sapiens; identical to SEQ ID NO: 491372

SEQ ID NO: 503580 - DNA, 201 bp, Homo sapiens; identical to SEQ ID NO: 491373

SEQ ID NO: 503581 - DNA, 201 bp, Homo sapiens; identical to SEQ ID NO: 491374

SEQ ID NO: 503582 - DNA, 201 bp, Homo sapiens; identical to SEQ ID NO: 491375

SEQ ID NO: 503583 - DNA, 201 bp, Homo sapiens; identical to SEQ ID NO: 491376

SEQ ID NO: 503584 - DNA, 201 bp, Homo sapiens; identical to SEQ ID NO: 491377

SEQ ID NO: 503585 - DNA, 201 bp, Homo sapiens; identical to SEQ ID NO: 491378

SEQ ID NO: 503586 - DNA, 201 bp, Homo sapiens; identical to SEQ ID NO: 491379

SEQ ID NO: 503587 - DNA, 201 bp, Homo sapiens; identical to SEQ ID NO: 491380

SEQ ID NO: 503588 - DNA, 201 bp, Homo sapiens; identical to SEQ ID NO: 491381

SEQ ID NO: 503589 - DNA, 201 bp, Homo sapiens; identical to SEQ ID NO: 491382

SEQ ID NO: 503590 - DNA, 201 bp, Homo sapiens; identical to SEQ ID NO: 491383

SEQ ID NO: 503591 - DNA, 201 bp, Homo sapiens; identical to SEQ ID NO: 491384

SEQ ID NO: 503592 - DNA, 201 bp, Homo sapiens; identical to SEQ ID NO: 491385

SEQ ID NO: 503593 - DNA, 201 bp, Homo sapiens; identical to SEQ ID NO: 491386

SEQ ID NO: 503594 - DNA, 201 bp, Homo sapiens; identical to SEQ ID NO: 491387

SEQ ID NO: 503595 - DNA, 201 bp, Homo sapiens; identical to SEQ ID NO: 491388

SEQ ID NO: 503596 - DNA, 201 bp, Homo sapiens; identical to SEQ ID NO: 491389

SEQ ID NO: 503597 - DNA, 201 bp, Homo sapiens; identical to SEQ ID NO: 491390

SEQ ID NO: 503598 - DNA, 201 bp, Homo sapiens; identical to SEQ ID NO: 491391

SEQ ID NO: 503599 - DNA, 201 bp, Homo sapiens; identical to SEQ ID NO: 491392

SEQ ID NO: 503600 - DNA, 201 bp, Homo sapiens; identical to SEQ ID NO: 491393

SEQ ID NO: 503601 - DNA, 201 bp, Homo sapiens; identical to SEQ ID NO: 491394

SEQ ID NO: 503602 - DNA, 201 bp, Homo sapiens; identical to SEQ ID NO: 491395

SEQ ID NO: 503603 - DNA, 201 bp, Homo sapiens; identical to SEQ ID NO: 491396

SEQ ID NO: 503604 - DNA, 201 bp, Homo sapiens; identical to SEQ ID NO: 491397

SEQ ID NO: 503605 - DNA, 201 bp, Homo sapiens; identical to SEQ ID NO: 491398

SEQ ID NO: 503606 - DNA, 201 bp, Homo sapiens; identical to SEQ ID NO: 491399

SEQ ID NO: 503607 - DNA, 201 bp, Homo sapiens; identical to SEQ ID NO: 491400

SEQ ID NO: 503608 - DNA, 201 bp, Homo sapiens; identical to SEQ ID NO: 491401

SEQ ID NO: 503609 - DNA, 201 bp, Homo sapiens; identical to SEQ ID NO: 491402

SEQ ID NO: 503610 - DNA, 201 bp, Homo sapiens; identical to SEQ ID NO: 491403

SEQ ID NO: 503611 - DNA, 201 bp, Homo sapiens; identical to SEQ ID NO: 491404

SEQ ID NO: 503612 - DNA, 201 bp, Homo sapiens; identical to SEQ ID NO: 491405

SEQ ID NO: 503613 - DNA, 201 bp, Homo sapiens; identical to SEQ ID NO: 491406

SEQ ID NO: 503614 - DNA, 201 bp, Homo sapiens; identical to SEQ ID NO: 491407

SEQ ID NO: 503615 - DNA, 201 bp, Homo sapiens; identical to SEQ ID NO: 491408

SEQ ID NO: 503616 - DNA, 201 bp, Homo sapiens; identical to SEQ ID NO: 491409

SEQ ID NO: 503617 - DNA, 201 bp, Homo sapiens; identical to SEQ ID NO: 491410

SEQ ID NO: 503618 - DNA, 201 bp, Homo sapiens; identical to SEQ ID NO: 491411

SEQ ID NO: 503619 - DNA, 201 bp, Homo sapiens; identical to SEQ ID NO: 491412

SEQ ID NO: 503620 - DNA, 201 bp, Homo sapiens; identical to SEQ ID NO: 491413

SEQ ID NO: 503621 - DNA, 201 bp, Homo sapiens; identical to SEQ ID NO: 491414

SEQ ID NO: 503622 - DNA, 201 bp, Homo sapiens; identical to SEQ ID NO: 491415

SEQ ID NO: 503623 - DNA, 201 bp, Homo sapiens; identical to SEQ ID NO: 491416

SEQ ID NO: 503624 - DNA, 201 bp, Homo sapiens; identical to SEQ ID NO: 491417

SEQ ID NO: 503625 - DNA, 201 bp, Homo sapiens; identical to SEQ ID NO: 491418

SEQ ID NO: 503626 - DNA, 201 bp, Homo sapiens; identical to SEQ ID NO: 491419

SEQ ID NO: 503627 - DNA, 201 bp, Homo sapiens; identical to SEQ ID NO: 491420

SEQ ID NO: 503628 - DNA, 201 bp, Homo sapiens; identical to SEQ ID NO: 491421

SEQ ID NO: 503629 - DNA, 201 bp, Homo sapiens; identical to SEQ ID NO: 491422

SEQ ID NO: 503630 - DNA, 201 bp, Homo sapiens; identical to SEQ ID NO: 491423

SEQ ID NO: 503631 - DNA, 201 bp, Homo sapiens; identical to SEQ ID NO: 491424

SEQ ID NO: 503632 - DNA, 201 bp, Homo sapiens; identical to SEQ ID NO: 491425

SEQ ID NO: 503633 - DNA, 201 bp, Homo sapiens; identical to SEQ ID NO: 491426

SEQ ID NO: 503634 - DNA, 201 bp, Homo sapiens; identical to SEQ ID NO: 491427

SEQ ID NO: 503635 - DNA, 201 bp, Homo sapiens; identical to SEQ ID NO: 491428

SEQ ID NO: 503636 - DNA, 201 bp, Homo sapiens; identical to SEQ ID NO: 491429

SEQ ID NO: 503637 - DNA, 201 bp, Homo sapiens; identical to SEQ ID NO: 491430

SEQ ID NO: 503638 - DNA, 201 bp, Homo sapiens; identical to SEQ ID NO: 491431

SEQ ID NO: 503639 - DNA, 201 bp, Homo sapiens; identical to SEQ ID NO: 491432

SEQ ID NO: 503640 - DNA, 201 bp, Homo sapiens; identical to SEQ ID NO: 491433

SEQ ID NO: 503641 - DNA, 201 bp, Homo sapiens; identical to SEQ ID NO: 491434

SEQ ID NO: 503642 - DNA, 201 bp, Homo sapiens
caggcacacactacttgccagatgtcaagtattcatctttattgaaataggactgtggtaagccactttatggctctcgattctgtatgagaaaatcatgyttagtgccttgttagtaaaagaaagaaaatctgaaagtccctgccatggaaggaagaaatagcggggagaaaagggagttggtaagtttcagcatttcag

SEQ ID NO: 503643 - DNA, 201 bp, Homo sapiens; identical to SEQ ID NO: 491435

SEQ ID NO: 503644 - DNA, 201 bp, Homo sapiens; identical to SEQ ID NO: 491436

SEQ ID NO: 503645 - DNA, 201 bp, Homo sapiens; identical to SEQ ID NO: 491437

SEQ ID NO: 503646 - DNA, 201 bp, Homo sapiens; identical to SEQ ID NO: 491438

SEQ ID NO: 503647 - DNA, 201 bp, Homo sapiens; identical to SEQ ID NO: 491439

SEQ ID NO: 503648 - DNA, 201 bp, Homo sapiens; identical to SEQ ID NO: 491440

SEQ ID NO: 503649 - DNA, 201 bp, Homo sapiens; identical to SEQ ID NO: 491441

SEQ ID NO: 503650 - DNA, 201 bp, Homo sapiens; identical to SEQ ID NO: 491442

SEQ ID NO: 503651 - DNA, 201 bp, Homo sapiens; identical to SEQ ID NO: 491443

SEQ ID NO: 503652 - DNA, 201 bp, Homo sapiens; identical to SEQ ID NO: 491444

SEQ ID NO: 503653 - DNA, 201 bp, Homo sapiens; identical to SEQ ID NO: 491445

SEQ ID NO: 503654 - DNA, 201 bp, Homo sapiens; identical to SEQ ID NO: 491446

SEQ ID NO: 503655 - DNA, 201 bp, Homo sapiens; identical to SEQ ID NO: 491447

SEQ ID NO: 503656 - DNA, 201 bp, Homo sapiens; identical to SEQ ID NO: 491448

SEQ ID NO: 503657 - DNA, 201 bp, Homo sapiens; identical to SEQ ID NO: 491449

SEQ ID NO: 503658 - DNA, 201 bp, Homo sapiens; identical to SEQ ID NO: 491450

SEQ ID NO: 503659 - DNA, 201 bp, Homo sapiens; identical to SEQ ID NO: 491451

SEQ ID NO: 503660 - DNA, 201 bp, Homo sapiens; identical to SEQ ID NO: 491452

SEQ ID NO: 503661 - DNA, 201 bp, Homo sapiens; identical to SEQ ID NO: 491453

SEQ ID NO: 503662 - DNA, 201 bp, Homo sapiens; identical to SEQ ID NO: 491454

SEQ ID NO: 503663 - DNA, 201 bp, Homo sapiens; identical to SEQ ID NO: 491455

SEQ ID NO: 503664 - DNA, 201 bp, Homo sapiens; identical to SEQ ID NO: 491456

SEQ ID NO: 503665 - DNA, 201 bp, Homo sapiens; identical to SEQ ID NO: 491457

SEQ ID NO: 503666 - DNA, 201 bp, Homo sapiens; identical to SEQ ID NO: 491458

SEQ ID NO: 503667 - DNA, 201 bp, Homo sapiens; identical to SEQ ID NO: 491459

SEQ ID NO: 503668 - DNA, 201 bp, Homo sapiens; identical to SEQ ID NO: 491460

SEQ ID NO: 503669 - DNA, 201 bp, Homo sapiens; identical to SEQ ID NO: 491461

SEQ ID NO: 503670 - DNA, 201 bp, Homo sapiens; identical to SEQ ID NO: 491462

SEQ ID NO: 503671 - DNA, 201 bp, Homo sapiens; identical to SEQ ID NO: 491463

SEQ ID NO: 503672 - DNA, 201 bp, Homo sapiens; identical to SEQ ID NO: 491464

SEQ ID NO: 503673 - DNA, 201 bp, Homo sapiens; identical to SEQ ID NO: 491465

SEQ ID NO: 503674 - DNA, 201 bp, Homo sapiens; identical to SEQ ID NO: 491466

SEQ ID NO: 503675 - DNA, 201 bp, Homo sapiens; identical to SEQ ID NO: 491467

SEQ ID NO: 503676 - DNA, 201 bp, Homo sapiens; identical to SEQ ID NO: 491468

SEQ ID NO: 503677 - DNA, 201 bp, Homo sapiens; identical to SEQ ID NO: 491469

SEQ ID NO: 503678 - DNA, 201 bp, Homo sapiens; identical to SEQ ID NO: 491470

SEQ ID NO: 503679 - DNA, 201 bp, Homo sapiens; identical to SEQ ID NO: 491471

SEQ ID NO: 503680 - DNA, 201 bp, Homo sapiens; identical to SEQ ID NO: 491472

SEQ ID NO: 503681 - DNA, 201 bp, Homo sapiens; identical to SEQ ID NO: 491473

SEQ ID NO: 503682 - DNA, 201 bp, Homo sapiens; identical to SEQ ID NO: 491474

SEQ ID NO: 503683 - DNA, 201 bp, Homo sapiens; identical to SEQ ID NO: 491475

SEQ ID NO: 503684 - DNA, 201 bp, Homo sapiens; identical to SEQ ID NO: 491476

SEQ ID NO: 503685 - DNA, 201 bp, Homo sapiens; identical to SEQ ID NO: 491477

SEQ ID NO: 503686 - DNA, 201 bp, Homo sapiens
tcacgaagtcaagagaccgagaacatcctggctaacacagtgaaaccccgtctctactaaaaatacaaaaaattagccggacatggtaacgggtgcctgtrgtcccagctaatcaggaggctgaggcaggagaatgacatgaacccaggaggcagaggttgcagtgagccgagatcgtgccactgcactccagcctgggtg

SEQ ID NO: 503687 - DNA, 201 bp, Homo sapiens; identical to SEQ ID NO: 491478

SEQ ID NO: 503688 - DNA, 201 bp, Homo sapiens; identical to SEQ ID NO: 491479

SEQ ID NO: 503689 - DNA, 201 bp, Homo sapiens; identical to SEQ ID NO: 491480

SEQ ID NO: 503690 - DNA, 201 bp, Homo sapiens; identical to SEQ ID NO: 491481

SEQ ID NO: 503691 - DNA, 201 bp, Homo sapiens; identical to SEQ ID NO: 491482

SEQ ID NO: 503692 - DNA, 201 bp, Homo sapiens; identical to SEQ ID NO: 491483

SEQ ID NO: 503693 - DNA, 201 bp, Homo sapiens; identical to SEQ ID NO: 491484

SEQ ID NO: 503694 - DNA, 201 bp, Homo sapiens; identical to SEQ ID NO: 491485

SEQ ID NO: 503695 - DNA, 201 bp, Homo sapiens; identical to SEQ ID NO: 491486

SEQ ID NO: 503696 - DNA, 201 bp, Homo sapiens; identical to SEQ ID NO: 491487

SEQ ID NO: 503697 - DNA, 201 bp, Homo sapiens; identical to SEQ ID NO: 491488

SEQ ID NO: 503698 - DNA, 201 bp, Homo sapiens; identical to SEQ ID NO: 491489

SEQ ID NO: 503699 - DNA, 201 bp, Homo sapiens; identical to SEQ ID NO: 491490

SEQ ID NO: 503700 - DNA, 201 bp, Homo sapiens; identical to SEQ ID NO: 491491

SEQ ID NO: 503701 - DNA, 201 bp, Homo sapiens; identical to SEQ ID NO: 491492

SEQ ID NO: 503702 - DNA, 201 bp, Homo sapiens; identical to SEQ ID NO: 491493

SEQ ID NO: 503703 - DNA, 201 bp, Homo sapiens; identical to SEQ ID NO: 491494

SEQ ID NO: 503704 - DNA, 201 bp, Homo sapiens; identical to SEQ ID NO: 491496

SEQ ID NO: 503705 - DNA, 201 bp, Homo sapiens; identical to SEQ ID NO: 491495

SEQ ID NO: 503706 - DNA, 201 bp, Homo sapiens; identical to SEQ ID NO: 491497

SEQ ID NO: 503707 - DNA, 201 bp, Homo sapiens; identical to SEQ ID NO: 491498

SEQ ID NO: 503708 - DNA, 201 bp, Homo sapiens; identical to SEQ ID NO: 491499

SEQ ID NO: 503709 - DNA, 201 bp, Homo sapiens; identical to SEQ ID NO: 491500

SEQ ID NO: 503710 - DNA, 201 bp, Homo sapiens; identical to SEQ ID NO: 491501

SEQ ID NO: 503711 - DNA, 201 bp, Homo sapiens; identical to SEQ ID NO: 491502

SEQ ID NO: 503712 - DNA, 201 bp, Homo sapiens; identical to SEQ ID NO: 491503

SEQ ID NO: 503713 - DNA, 201 bp, Homo sapiens; identical to SEQ ID NO: 491504

SEQ ID NO: 503714 - DNA, 201 bp, Homo sapiens; identical to SEQ ID NO: 491505

SEQ ID NO: 503715 - DNA, 201 bp, Homo sapiens; identical to SEQ ID NO: 491506

SEQ ID NO: 503716 - DNA, 201 bp, Homo sapiens; identical to SEQ ID NO: 491507

SEQ ID NO: 503717 - DNA, 201 bp, Homo sapiens; identical to SEQ ID NO: 491508

SEQ ID NO: 503718 - DNA, 201 bp, Homo sapiens; identical to SEQ ID NO: 491509

SEQ ID NO: 503719 - DNA, 201 bp, Homo sapiens; identical to SEQ ID NO: 491510

SEQ ID NO: 503720 - DNA, 201 bp, Homo sapiens; identical to SEQ ID NO: 491511

SEQ ID NO: 503721 - DNA, 201 bp, Homo sapiens; identical to SEQ ID NO: 491512

SEQ ID NO: 503722 - DNA, 201 bp, Homo sapiens; identical to SEQ ID NO: 491513

SEQ ID NO: 503723 - DNA, 201 bp, Homo sapiens; identical to SEQ ID NO: 491514

SEQ ID NO: 503724 - DNA, 201 bp, Homo sapiens; identical to SEQ ID NO: 491515

SEQ ID NO: 503725 - DNA, 201 bp, Homo sapiens; identical to SEQ ID NO: 491516

SEQ ID NO: 503726 - DNA, 201 bp, Homo sapiens; identical to SEQ ID NO: 491517

SEQ ID NO: 503727 - DNA, 201 bp, Homo sapiens; identical to SEQ ID NO: 491518

SEQ ID NO: 503728 - DNA, 201 bp, Homo sapiens; identical to SEQ ID NO: 491519

SEQ ID NO: 503729 - DNA, 201 bp, Homo sapiens; identical to SEQ ID NO: 491520

SEQ ID NO: 503730 - DNA, 201 bp, Homo sapiens; identical to SEQ ID NO: 491521

SEQ ID NO: 503731 - DNA, 201 bp, Homo sapiens; identical to SEQ ID NO: 491522

SEQ ID NO: 503732 - DNA, 201 bp, Homo sapiens; identical to SEQ ID NO: 491523

SEQ ID NO: 503733 - DNA, 201 bp, Homo sapiens; identical to SEQ ID NO: 491524

SEQ ID NO: 503734 - DNA, 201 bp, Homo sapiens; identical to SEQ ID NO: 491525

SEQ ID NO: 503735 - DNA, 201 bp, Homo sapiens; identical to SEQ ID NO: 491526

SEQ ID NO: 503736 - DNA, 201 bp, Homo sapiens; identical to SEQ ID NO: 491527

SEQ ID NO: 503737 - DNA, 201 bp, Homo sapiens
attcatttcaatgtataagaatcaaagtagagatagtgaaatagcctaaatgcagcagttgaataaacgagttgataaatttttatcaatgattacatctytttttcttttcttcctctatgcatatagctttggagtttaacccttctgccaatccagaggcaagcacaatattccagaggaactctcaaacagatggtg

SEQ ID NO: 503738 - DNA, 201 bp, Homo sapiens; identical to SEQ ID NO: 491528

SEQ ID NO: 503739 - DNA, 201 bp, Homo sapiens
acaacattgttttttccgccaagagaaagaataaaagctcttgtttgatcaggttatagaaagtatttagaaaaactcatattggtttaaatttttcaccytttcacatgttcacttgtcttattttaatatgtgatatactttcctttagttgttatgatgttagtgaaaacgtgtaacctttttgtttatacattttgc

SEQ ID NO: 503740 - DNA, 201 bp, Homo sapiens; identical to SEQ ID NO: 491529

SEQ ID NO: 503741 - DNA, 201 bp, Homo sapiens; identical to SEQ ID NO: 491530

SEQ ID NO: 503742 - DNA, 201 bp, Homo sapiens
gcacagtggggacactgtcaggcacacactacttgccagatgtcaagtattcatctttattgaaataggactgtggtaagccactttatggctctcgattktgtatgagaaaatcatgcttagtgccttgttagtaaaagaaagaaaatctgaaagtccctgccatggaaggaagaaatagcggggagaaaagggagttgg

SEQ ID NO: 503743 - DNA, 201 bp, Homo sapiens; identical to SEQ ID NO: 491531

SEQ ID NO: 503744 - DNA, 201 bp, Homo sapiens
ctgcccttctgccatgattgtaagtttcctgaggcctccccagccatgtgaaactgagtcaattaaacctcttccctttaaaaattacccaacctcaggtrtttctttatatcagtgtgaaaacagattgctatactttctgataatcatgcttaagcaattggggaattcagactacctgggatcaaaccagggccccac

SEQ ID NO: 503745 - DNA, 201 bp, Homo sapiens; identical to SEQ ID NO: 491532

SEQ ID NO: 503746 - DNA, 201 bp, Homo sapiens
atcacgggggcagttatcctcatgctgttcttgtgatattcagtaagtcctcatgagatcttatagggttttgttttgttttgttttttaggatggagtcytgctctgttgtccaggcaggagtgccatggcacgatcttggctcactgcagtctctgcctcttgagttccagtaattctcctgcctcagcctcctgagta

SEQ ID NO: 503747 - DNA, 201 bp, Homo sapiens
agatcacgggggcagttatcctcatgctgttcttgtgatattcagtaagtcctcatgagatcttatagggttttgttttgttttgttttttaggatggagkcttgctctgttgtccaggcaggagtgccatggcacgatcttggctcactgcagtctctgcctcttgagttccagtaattctcctgcctcagcctcctgag

SEQ ID NO: 503748 - DNA, 201 bp, Homo sapiens; identical to SEQ ID NO: 491533

SEQ ID NO: 503749 - DNA, 201 bp, Homo sapiens; identical to SEQ ID NO: 491534

SEQ ID NO: 503750 - DNA, 201 bp, Homo sapiens
gggaggtgatcagatcacgggggcagttatcctcatgctgttcttgtgatattcagtaagtcctcatgagatcttatagggttttgttttgttttgttttytaggatggagtcttgctctgttgtccaggcaggagtgccatggcacgatcttggctcactgcagtctctgcctcttgagttccagtaattctcctgcctc

SEQ ID NO: 503751 - DNA, 201 bp, Homo sapiens
aaaaaaaaaaaaaaagtaaaaaaaattcttttaaaaatatacgaatctggctgggcacggtggctcatgcctgtagtcctagcactttgggaggctgaggyaggcctgaccaacatggagaaaccccgtctctactaaaaatacaaaattagccgggcatggtgacgcatgcctgcaatcccagctacttgggaggctgac

SEQ ID NO: 503752 - DNA, 201 bp, Homo sapiens; identical to SEQ ID NO: 491535

SEQ ID NO: 503753 - DNA, 201 bp, Homo sapiens
tatttcacacatacagtgcctggcatgtagaagggacttaatcaatgttgaaagaaggggaggcattttaaaatccacatcaaaaaaatgttgttctgttygggagtggtggctcatgcctgcaatcccagcactttgggaggccaaggcaggtggatcacctgaggtcaggagttcgagatcaacctgagcaacatggtg

SEQ ID NO: 503754 - DNA, 201 bp, Homo sapiens; identical to SEQ ID NO: 491536

SEQ ID NO: 503755 - DNA, 201 bp, Homo sapiens; identical to SEQ ID NO: 491537

SEQ ID NO: 503756 - DNA, 201 bp, Homo sapiens; identical to SEQ ID NO: 491539

SEQ ID NO: 503757 - DNA, 201 bp, Homo sapiens; identical to SEQ ID NO: 491538

SEQ ID NO: 503758 - DNA, 201 bp, Homo sapiens; identical to SEQ ID NO: 491540

SEQ ID NO: 503759 - DNA, 201 bp, Homo sapiens; identical to SEQ ID NO: 491541

SEQ ID NO: 503760 - DNA, 201 bp, Homo sapiens; identical to SEQ ID NO: 491542

SEQ ID NO: 503761 - DNA, 201 bp, Homo sapiens; identical to SEQ ID NO: 491543

SEQ ID NO: 503762 - DNA, 201 bp, Homo sapiens; identical to SEQ ID NO: 491544

SEQ ID NO: 503763 - DNA, 201 bp, Homo sapiens; identical to SEQ ID NO: 491545

SEQ ID NO: 503764 - DNA, 201 bp, Homo sapiens; identical to SEQ ID NO: 491546

SEQ ID NO: 503765 - DNA, 201 bp, Homo sapiens; identical to SEQ ID NO: 491547

SEQ ID NO: 503766 - DNA, 201 bp, Homo sapiens; identical to SEQ ID NO: 491548

SEQ ID NO: 503767 - DNA, 201 bp, Homo sapiens; identical to SEQ ID NO: 491549

SEQ ID NO: 503768 - DNA, 201 bp, Homo sapiens
gattttttcctccacttttgtcactgccactgcccttagcattactctgcctttagagaaagtctcttaattggtttggttgcttccttcagtccttattrtacagaccactacacacacatctgacagagacttttcacctttttatggttcaatgactgaaattcccagaataaaattaaaaccaccccagcatcaaat

SEQ ID NO: 503769 - DNA, 201 bp, Homo sapiens; identical to SEQ ID NO: 491550

SEQ ID NO: 503770 - DNA, 201 bp, Homo sapiens; identical to SEQ ID NO: 491551

SEQ ID NO: 503771 - DNA, 201 bp, Homo sapiens; identical to SEQ ID NO: 491552

SEQ ID NO: 503772 - DNA, 201 bp, Homo sapiens
agagttccattttaatgtgacactgagagtaaaaaactatcttttcctccttacctatttctcttcctacattctcggccaggaggaaggcactgctacayacccagtcttccccagcagagcctgagcagctctgttttccttctacttcccctcttctttcacatctcatgaccaagcacttcctattctgtctcccaa

SEQ ID NO: 503773 - DNA, 201 bp, Homo sapiens; identical to SEQ ID NO: 491553

SEQ ID NO: 503774 - DNA, 201 bp, Homo sapiens; identical to SEQ ID NO: 491555

SEQ ID NO: 503775 - DNA, 201 bp, Homo sapiens
caaagctaatctgtccctgatccggattgcatgcacctgtgccttttggggcccttctgcattagttcttccttctcttctaacctcaaaaatgtgttttytctgttggctctttccctttaacatagaagtatactcacgcttttgttgaatcttggaataaaagtcttcctttaccacatatctccctttaatactaca

SEQ ID NO: 503776 - DNA, 201 bp, Homo sapiens; identical to SEQ ID NO: 491554

SEQ ID NO: 503777 - DNA, 201 bp, Homo sapiens
tttcctaaacctttcctttaccagaaatatctctagagtcacatggtcctttctcccttcttgcttttgtaggagtccaaagctaatctgtccctgatccrgattgcatgcacctgtgccttttggggcccttctgcattagttcttccttctcttctaacctcaaaaatgtgttttctctgttggctctttccctttaac

SEQ ID NO: 503778 - DNA, 201 bp, Homo sapiens; identical to SEQ ID NO: 491556

SEQ ID NO: 503779 - DNA, 201 bp, Homo sapiens; identical to SEQ ID NO: 491557

SEQ ID NO: 503780 - DNA, 201 bp, Homo sapiens
ccaggaggcagaggttgcagtgagccgagatcgtgccactgcactccagcctgggtgacagagcaagactccatctcaaaaaaaaaaaaaaaaaaaaagtmtgttaaaataaaggtcatcaaaagatcttttcctaaacctttcctttaccagaaatatctctagagtcacatggtcctttctcccttcttgcttttgtag

SEQ ID NO: 503781 - DNA, 201 bp, Homo sapiens; identical to SEQ ID NO: 491558

SEQ ID NO: 503782 - DNA, 201 bp, Homo sapiens
accccgtctctactaaaaatacaaaaaattagccggacatggtaacgggtgcctgtagtcccagctaatcaggaggctgaggcaggagaatgacatgaacycaggaggcagaggttgcagtgagccgagatcgtgccactgcactccagcctgggtgacagagcaagactccatctcaaaaaaaaaaaaaaaaaaaaagtc

SEQ ID NO: 503783 - DNA, 201 bp, Homo sapiens; identical to SEQ ID NO: 491559

SEQ ID NO: 503784 - DNA, 201 bp, Homo sapiens; identical to SEQ ID NO: 491561

SEQ ID NO: 503785 - DNA, 201 bp, Homo sapiens; identical to SEQ ID NO: 491560

SEQ ID NO: 503786 - DNA, 201 bp, Homo sapiens; identical to SEQ ID NO: 491563

SEQ ID NO: 503787 - DNA, 201 bp, Homo sapiens; identical to SEQ ID NO: 491562

SEQ ID NO: 503788 - DNA, 201 bp, Homo sapiens; identical to SEQ ID NO: 491564

SEQ ID NO: 503789 - DNA, 201 bp, Homo sapiens; identical to SEQ ID NO: 491565

SEQ ID NO: 503790 - DNA, 201 bp, Homo sapiens; identical to SEQ ID NO: 491566

SEQ ID NO: 503791 - DNA, 201 bp, Homo sapiens; identical to SEQ ID NO: 425691

SEQ ID NO: 503792 - DNA, 201 bp, Homo sapiens; identical to SEQ ID NO: 425693

SEQ ID NO: 503793 - DNA, 201 bp, Homo sapiens; identical to SEQ ID NO: 425695

SEQ ID NO: 503794 - DNA, 201 bp, Homo sapiens; identical to SEQ ID NO: 425696

SEQ ID NO: 503795 - DNA, 201 bp, Homo sapiens; identical to SEQ ID NO: 425697

SEQ ID NO: 503796 - DNA, 201 bp, Homo sapiens
aagacacactgggtcttattatcagctgtgagatcatggaccaagaaagtattagtctatgtctctaatgtcatatattacagcacatctgtgtcactctkgactacttacattctgctatcacaactactttgggagttcgcacataatgtaggtacaccaatgagcatgtcacacatctgaaccgcacctggaatctat

SEQ ID NO: 503797 - DNA, 201 bp, Homo sapiens; identical to SEQ ID NO: 425698

SEQ ID NO: 503798 - DNA, 201 bp, Homo sapiens; identical to SEQ ID NO: 425703

SEQ ID NO: 503799 - DNA, 201 bp, Homo sapiens
gatcaggactcaaccagactcaccaatcacgatctctctggcacggttctggaaataacctatatgtttacaaaattttgcgggtgattctgatgtgcaawaaaaattaaaactggtctaggataaggaccggtggggggcacaaacaagggaaggagcgaagggaaccctcccttttgtacatgcatgccatgtttctac

SEQ ID NO: 503800 - DNA, 201 bp, Homo sapiens
ggtgatcaggactcaaccagactcaccaatcacgatctctctggcacggttctggaaataacctatatgtttacaaaattttgcgggtgattctgatgtgmaataaaaattaaaactggtctaggataaggaccggtggggggcacaaacaagggaaggagcgaagggaaccctcccttttgtacatgcatgccatgtttc

SEQ ID NO: 503801 - DNA, 201 bp, Homo sapiens
gtggtggccatgcaggatggagaccctactgaatactacagtactgccatcgtcactgtggagggtaacacccgccctatcaatccccactgaccaatccycctgaccctggcattcccttacagtggacatcaattgcccccctcccactaactccaaccctcccgtagaccatgaccaacttgtgtctccccactctga

SEQ ID NO: 503802 - DNA, 201 bp, Homo sapiens
ggcaagcaagcagagctgatcattgaggatgcacagctcagtgatggtggcgagtacactgtggtggccatgcaggatggagaccctactgaatactacaktactgccatcgtcactgtggagggtaacacccgccctatcaatccccactgaccaatcctcctgaccctggcattcccttacagtggacatcaattgccc

SEQ ID NO: 503803 - DNA, 201 bp, Homo sapiens
gctttgatgaggaggcttaaagcagagtcttcttgaaagacagatccatgcctccacctctgtctcctccatctcagctgcacccaagtttgacctcagtrcccggctgaagagtcacatggtggttcgcgctgggacagccctctgcatccatgcagccttctctgtgagttgtccctgaccctgacctccatacactgt

SEQ ID NO: 503804 - DNA, 201 bp, Homo sapiens; identical to SEQ ID NO: 425690

SEQ ID NO: 503805 - DNA, 201 bp, Homo sapiens
cagtcaactagcaagtcagggccagagctgagactctccctgtcgggtacttctgtgagtcacatattacacacaaacacattcagcatcacaagttcttktgttttctggggacagaaagagggacagggcttttggctctatagctgcagaaaaaagatgtcgtggtttgggagcaggcccaagtgtctgtctgtccac

SEQ ID NO: 503806 - DNA, 201 bp, Homo sapiens
gcagaggcctccaagacccatccctgtacactctccaaagcacagctccccagtgccgcttgagttcctaccacaggaaagtcatgccttagggccatgargatttctttgacaccacagagcaagactttatcatacagagtatggtcggcagagagagtagaaatgggtggaggggcaggagggacaaatggagatgaa

SEQ ID NO: 503807 - DNA, 201 bp, Homo sapiens
tgtagccatcacagtctctgactctgactctgactctgcccctcaccagacccctagtgcgacagcctggcaggaaactcctcgacaatggaggaaggccygcccccaaatatcatctgtgtgaccagttgtgccatctcctgtcactactcagggctcaccaccacctgacgtgatctggcagaaagatggcgttcccac

SEQ ID NO: 503808 - DNA, 201 bp, Homo sapiens
cagctaaagagatccctgataactcaaatctgcttgtaagcacagcaaatgggcccagggccctggctctgccactgaccagccatgtgaccttagtaagstacctcattgagcctgttttctcatcttctttataggactatgaggcttaaatgagacagtacacaactgcctggcacaatgtctggcaaatattaagtg

SEQ ID NO: 503809 - DNA, 201 bp, Homo sapiens
gccccccacaaacctacggttgtttgaggaagtccccaacacagtgactctgacctggaaccacagcccagatgtgcaggaggacggtgaggctcactacrtcatcatgaagcgggatgcaagcacagccacctggtacacggcagccgagcgtgtcttcagcaacaagtacacagtgacggggctgctcccaggcaggaa

SEQ ID NO: 503810 - DNA, 201 bp, Homo sapiens; identical to SEQ ID NO: 425692

SEQ ID NO: 503811 - DNA, 201 bp, Homo sapiens
agggcacaaggaggacatgtcgggttggaagagaggaatggccagggttgggatccatggggatattgaagagaggactatgggactgtgcaagaaaggaytgtgtggggatgggagtcaatggagggaggaagcatcagatgtaagggagaggactatgagataataagtgccttggggctgtgtagcatagtgattaag

SEQ ID NO: 503812 - DNA, 201 bp, Homo sapiens; identical to SEQ ID NO: 425694

SEQ ID NO: 503813 - DNA, 201 bp, Homo sapiens
tgacttgaagaggaaaacttgataggaggtaagatggaaatgaggtgaaagagaggtagaatttgccagacacggtggctatagctcacctatagctcacrcctataatcccagcactttgggggtccaaggcgggtggatcacttaaggtcaggagttcgaaaccagcctggccaacatggcgaaacccggtctctacta

SEQ ID NO: 503814 - DNA, 201 bp, Homo sapiens
cactctgcaccttagtgtgctgggtaagggcagggccagtccgggctgggctgagctgagggcacctgctgcccagactcagggcagaaggcaggctgagkaggaggccagagttagagttgaagtttgggctgggaatgggcctagaaggctggctttgcagccagaagcccgcttcctaacttcccagccagttcttgg

SEQ ID NO: 503815 - DNA, 201 bp, Homo sapiens
cgtgaagacagcggcctcatcctgctcaagctcaagaatgaccacggctcagccacggccactctgcaccttagtgtgctgggtaagggcagggccagtcygggctgggctgagctgagggcacctgctgcccagactcagggcagaaggcaggctgaggaggaggccagagttagagttgaagtttgggctgggaatggg

SEQ ID NO: 503816 - DNA, 201 bp, Homo sapiens
catctccaactgtgtgcgtgaagacagcggcctcatcctgctcaagctcaagaatgaccacggctcagccacggccactctgcaccttagtgtgctgggtmagggcagggccagtccgggctgggctgagctgagggcacctgctgcccagactcagggcagaaggcaggctgaggaggaggccagagttagagttgaagt

SEQ ID NO: 503817 - DNA, 201 bp, Homo sapiens; identical to SEQ ID NO: 425700

SEQ ID NO: 503818 - DNA, 201 bp, Homo sapiens; identical to SEQ ID NO: 425699

SEQ ID NO: 503819 - DNA, 201 bp, Homo sapiens; identical to SEQ ID NO: 425702

SEQ ID NO: 503820 - DNA, 201 bp, Homo sapiens; identical to SEQ ID NO: 425701

SEQ ID NO: 503821 - DNA, 201 bp, Homo sapiens; identical to SEQ ID NO: 425705

SEQ ID NO: 503822 - DNA, 201 bp, Homo sapiens; identical to SEQ ID NO: 425704

SEQ ID NO: 503823 - DNA, 201 bp, Homo sapiens
cacagtgaccctctacaagggcgacgtcaacatcacggccaactccaagttctggtacaactccaccagcggcgtgtgcaccctcgtcatccccacctgcrcgctcaaggacagcggcgattacagcgtgctggtggagaacgagctgggcaaggaccgcagcagctgcacgctcaccgtctatggtgagggcgccgcggg

SEQ ID NO: 503824 - DNA, 201 bp, Homo sapiens
agaatcactggtttgagtttatttaagcaggcgaggcagaagtcagcatgaggtgggcaactatctacatgctccccctcctaacctttgcactctctctktcccccacagagcctcctggttttgcctcccagcctcaagtgactgatgtgactaaagaagccgtgaccatcacgtggaatgcccctacccaggatgggg

SEQ ID NO: 503825 - DNA, 201 bp, Homo sapiens
acaaggaccccatccagggtgaggtccttggaacagaggcccaggagtgaccaaaggaggtcttgctgagtggacccattaactactgacacagtccctcmtccaactcttctggaagttttaacaacatcccatgacctcctcttctatgtctctcactcttgttctcaccccatggatgcctctggcctcacgacccct

SEQ ID NO: 503826 - DNA, 201 bp, Homo sapiens
aaaaccactcccagttcctcattaatagcaccaagcgctctgactcaggggtgtaccgaatcttgcttcagaatgagtttggagaagcacgctatgacatmcatgtgcgcgtggcaggtatggagagaaggcagaggcctccaagacccatccctgtacactctccaaagcacagctccccagtgccgcttgagttcctac

SEQ ID NO: 503827 - DNA, 201 bp, Homo sapiens; identical to SEQ ID NO: 105799

SEQ ID NO: 503828 - DNA, 201 bp, Homo sapiens; identical to SEQ ID NO: 425707

SEQ ID NO: 503829 - DNA, 201 bp, Homo sapiens; identical to SEQ ID NO: 425708

SEQ ID NO: 503830 - DNA, 201 bp, Homo sapiens
aacagagtgagaccttgtctctaaaaaaggaaaaagaaaaaagaatcactggtttgagtttatttaagcaggcgaggcagaagtcagcatgaggtgggcarctatctacatgctccccctcctaacctttgcactctctctttcccccacagagcctcctggttttgcctcccagcctcaagtgactgatgtgactaaaga

SEQ ID NO: 503831 - DNA, 201 bp, Homo sapiens; identical to SEQ ID NO: 425709

SEQ ID NO: 503832 - DNA, 201 bp, Homo sapiens
gagtgtgagctgacatccaaggatgtgacactgcgctggaagaaggatgggcagctgctgatgcatggcactaagtacagcatgaaccatgagggcaagcragcagagctgatcattgaggatgcacagctcagtgatggtggcgagtacactgtggtggccatgcaggatggagaccctactgaatactacagtactgcc

SEQ ID NO: 503833 - DNA, 201 bp, Homo sapiens
tcacaaagaaaagaaatcaagtcaaaggtagttagatatgaaagattcagggtcttaacccagttctggatgtgggcatattacagtacagtagtaaccastccactaaatactaaaacacactgagaaaccatctcttcaagccatcctctaagtccacatacctcagccaaaggagatgtctgggagacagaatgtgag

SEQ ID NO: 503834 - DNA, 201 bp, Homo sapiens
ctaactcattttataaagccagcattaccctgataccaaaatatggcaaagacaccacgaaaaaagaaaactacaggtcaatattactgaagaacatagayagaaaaatactcaacaaaatgctagcaaactgaagctagaaatcacatcaaaaagttaattcaccatgaccaagtgggctttatttctgggatgcaaggt

SEQ ID NO: 503835 - DNA, 201 bp, Homo sapiens
acaaagaaaagaaatcaagtcaaaggtagttagatatgaaagattcagggtcttaacccagttctggatgtgggcatattacagtacagtagtaaccagtscactaaatactaaaacacactgagaaaccatctcttcaagccatcctctaagtccacatacctcagccaaaggagatgtctgggagacagaatgtgagca

SEQ ID NO: 503836 - DNA, 201 bp, Homo sapiens
caaagaaaagaaatcaagtcaaaggtagttagatatgaaagattcagggtcttaacccagttctggatgtgggcatattacagtacagtagtaaccagtcyactaaatactaaaacacactgagaaaccatctcttcaagccatcctctaagtccacatacctcagccaaaggagatgtctgggagacagaatgtgagcag

SEQ ID NO: 503837 - DNA, 201 bp, Homo sapiens
gaaaagaaatcaagtcaaaggtagttagatatgaaagattcagggtcttaacccagttctggatgtgggcatattacagtacagtagtaaccagtccactraatactaaaacacactgagaaaccatctcttcaagccatcctctaagtccacatacctcagccaaaggagatgtctgggagacagaatgtgagcagctgc

SEQ ID NO: 503838 - DNA, 201 bp, Homo sapiens
gttcttgctgttataactacagatttccttggatgtttttattccaaccttccttttctaatacttttgaaaacctgtccataccttttctatttcttttygtgtttcattgaaattcacaccctgatttccactgaagaaagtacttaattcagcatcttctcttctcttatctttctcaaaaaagtgaatttaaaaatg

SEQ ID NO: 503839 - DNA, 201 bp, Homo sapiens
aacacaggaaacacctgaaaaatattttaaatgctctaaatacatgccttgctacatgagatagtgtctagttgtgagctctctcaatcattattttactstgagctttccataaattgtagtatgaaacatatatacatatgaagagattctgatgataaaaggcctgatttgtgaaagtttgaggtaacaattgcaaag

SEQ ID NO: 503840 - DNA, 201 bp, Homo sapiens
ccctgatttccactgaagaaagtacttaattcagcatcttctcttctcttatctttctcaaaaaagtgaatttaaaaatgcagttgctttactttcttatmagtgtaatatgactgcctttccccaaacataattaaaaactgaaggtctttcctaatgagttatttttaagtcttttgttaagtgttctatttcttaatt

SEQ ID NO: 503841 - DNA, 201 bp, Homo sapiens
gtcccttgtatgcagattttgatgagagttataatcataaagggatgctggattatgtcaaatgcttcttctgcatctattgagatgatcgtttgattttkatttttaattctgtttacatggtgtatcctgtttgtcaacttgcatgtgttaaaccatccctgcatccctggtgtgaaacccacttgatcatggtggatt

SEQ ID NO: 503842 - DNA, 201 bp, Homo sapiens
ttcatcatctacattaggtatatctcctaatgttatccctccccttgtcccccactccccaacaggccctggtgtgtgatgttcccctccctgtgcccatrtgttctcattgttcaactcccacttaagagtaagaatatgcagtgtttgttttttgttcctgtgttagtttgctgagaatgatggtttccagcttcatcc

SEQ ID NO: 503843 - DNA, 201 bp, Homo sapiens
tatttataagcccttttctattaattttttttaactttttaaacttctttgttaaaaactaagatccagctgggtgcagtggctcacgcctctaatcccarcactttgggaggctgaggaggacggatcacctgaggtcgggagttcaagatcagcctgaccaacatagagaaaccccatctctactaaaaatacacaatt

SEQ ID NO: 503844 - DNA, 201 bp, Homo sapiens
gatatcaatctgtagttttcttttctggctatgtcctttcctagattcagtataagggtgatgctggcttcatagaatgaattaggcaggattccttcttyctccatcttgtggaatagtgtcgaaaggattggtccaattcttctttgaatggctggtagaattcagctgtgaatccatctggtcctggactttcctttg

SEQ ID NO: 503845 - DNA, 201 bp, Homo sapiens
tctccttccttgcagtgacactgaaagaaaatccagagtgtcagtcattttagtcacagtttataggaagagactcttgatctgcctggctgctgcttggkctagctctttaggtttcaaaagaaatctggtttatccatgtttatgacactagaactcatgttgcccaaacttactgaactatttttcaagctaaaggat

SEQ ID NO: 503846 - DNA, 201 bp, Homo sapiens
tagtgaaagacaaaagttgtctttaaaatgaatgactctttccaaattttattaaaagcagagataatcaagactgttgtgctgatgttatttactttgcmtgtgtttgttattggcaagaatgcattttccatttcttgtagacaagcagaaagccacagagactatttaaattcaaattctgggaaatcaagaactaca

SEQ ID NO: 503847 - DNA, 201 bp, Homo sapiens
ttagaatgtagctttacgtcatttgcattaattaaatatatcaaagaagatggaatgtatgctatcagaatttacaatatagagaagaaagtcattttaarttatataactacagaaatggatacctttagtgaaagacaaaagttgtctttaaaatgaatgactctttccaaattttattaaaagcagagataatcaaga

SEQ ID NO: 503848 - DNA, 201 bp, Homo sapiens
gaggtgtgctgcaggagcacagccctcaaggagaatctctgctagtgcagtgcacaagggaaatgtgcagtgggaatccccacacagagtcaccactgggrcaatgcctagtggagctgtgagatgagggccactgtccttcagaccccagaatggtagatccactgacagcttgtaccttggacctggaaaagccacaga

SEQ ID NO: 503849 - DNA, 201 bp, Homo sapiens
ctccagttctcaccattaccaacagtgccaggctgtgcagcacttctcaagcactttacttgagaaggaagaatgaagaatctgccattcaggtggtgccragtggaaaatgtgggatttgggatgcagatgtgataatgagggagcagagtaccaaatttaaaaatcacaccctcgtgacaccctggatgcacagcaaag

SEQ ID NO: 503850 - DNA, 201 bp, Homo sapiens
gtgcaggctgatgatgcaattcaaaagcaaaacccattttctgaggagaaattcaagctggctgcagaaatttgtatagaagccaaatgttaattgctggracaatggggaaaatatctccagggcatttcagaggtcttcatggcagcgccccccataacaagctggtaggcctaggaggaaaaaatggtttcatgggct

SEQ ID NO: 503851 - DNA, 201 bp, Homo sapiens
atctggaaattttctggagagaaggtgtagcttgttttgccaaaaacttgagaccagcaagcagacaactcctgcaccccagagggggttctaattttctktgtttctacttgaaaccagatgttagaaatgatttcagtgatggtggtcctaactgccaatatctagctctgtgaccattgctgaatcacatcacctctt

SEQ ID NO: 503852 - DNA, 201 bp, Homo sapiens
taaaagggaagcagagcattaaagttcagaaaatgtgcaggctgatgatgcaattcaaaagcaaaacccattttctgaggagaaattcaagctggctgcaraaatttgtatagaagccaaatgttaattgctgggacaatggggaaaatatctccagggcatttcagaggtcttcatggcagcgccccccataacaagctg

SEQ ID NO: 503853 - DNA, 201 bp, Homo sapiens
cgcagtagaccctgagtgtgtctctgaatctgcactcaacttactttttaattaattgcatcccccactcataaaaggtggagatcatatcttacctaccstagaatctcagaacctgcttcagtgtatggaacatcataggaaatcagtgcatatttgttatacaaaatacatagtggagaaaatgcttgtctttacgtt

SEQ ID NO: 503854 - DNA, 201 bp, Homo sapiens
gacaatgaagtcctggttgagtagtctcagatagagatgaggaacttgttggaaagtaaaataaaggtgactcttgctatgtttagcaggtggcattttgyccctgccctagagatctgtagatctttgaacttgagagagataatttagggtatcagacggaagaaatttctaagcaacaaagcatttaagaggtgattt

SEQ ID NO: 503855 - DNA, 201 bp, Homo sapiens
aagtcatttaatggatatagaagtgtgcactttcttacaaaggggttcctcaagttttataagattataaaagaggtctgtgatcctaaagataataagartgatgactaaatattctcaaaatcttataattattaaccccttcccctccttcactgaggcagcaaacacttgctcagtgcctaggacttccgcactccc

SEQ ID NO: 503856 - DNA, 201 bp, Homo sapiens
ggtgacccgcaggcttgttctgccaggatgatgcaccaagttaaggttccagatggctgagataaatgcctgtccttgcaaactggaaagaagatgattayagaagggaatgagagaagcaaggtccagaatggccatactttttcaaaggcacataaattttggaattgagtctcttgaaattgaacactctacatgcct

SEQ ID NO: 503857 - DNA, 201 bp, Homo sapiens
aaattttttgtcttgatcaagattcattttccttcaaggttggattcttctatcaactttagcttttgggcaggcaatttccagtaaaatattttagaccrtcaattcagagttcagtacatgaacaattgcagaggaaacagaactctcagtttccctcagctgcttacaatctatccattgtcttttataaacattcaa

SEQ ID NO: 503858 - DNA, 201 bp, Homo sapiens
tctgtgcctcagagggtctttgtcacttatttgctgaattccagtgttctcccttagacatactatttgatgtgtggttatctatttgttgttttgatctytttttgtggaggaggtgagtgctgcatgcctctagtcagccatcttgatgaccaattaaatgtgcacagtttaaagttcttgtcacaaccatcatttttt

SEQ ID NO: 503859 - DNA, 201 bp, Homo sapiens
tcgtgcatgaggtaacttcttccccatctcacccccacagaaagtaggctggcttcaccttactgtgaaaacagcacagaatttccttccagtaacacaamccacaagtgtgcgagcatccatcaaggcccaagaggcatgataaatggagaaaagagatatgaaacttgtgttgccctctgcactgtgaataaaagtcct

SEQ ID NO: 503860 - DNA, 201 bp, Homo sapiens
tatgcttaactaaaaagtaagagctttgctggacatggtggcttatgcctgtaatttcagcaatttggaaggccaaggcgtgcagatcacttgagcttacragttcgagaccagcctgagcaacatggcaaaaccccatacctacaaaaaatacaaaaaccagctgtggcggtgtgtgcctatagtcccagctacttggga

SEQ ID NO: 503861 - DNA, 201 bp, Homo sapiens
aaagagtcccttgtgataggacctcagatctgcattttaacttcacagctgtaacagtattaattaaatcatttccttcaacatgtaaatagctttttgayatacatctgcagccagattctcctggtgtccctaccacttcccctaggagtactttaagcatctttggaagtctccaaggctgtttttcttgccacactt

SEQ ID NO: 503862 - DNA, 201 bp, Homo sapiens
atgtggagatgcagggactaatgagccccacggcaggatgcattctggtggtggctccactctcaaaatggcaccatgctgtagcaactgtgtcagaaatyccacagaattttctccctggaaagatgtagacacatggattccaggcagctccctagtctgggctcaggacctgcaagagttgtggggcttttctgtagg

SEQ ID NO: 503863 - DNA, 201 bp, Homo sapiens
agattaaaactagaatattcatatttaaatattgagtgataatacaaagtactggcacaatatagggaaaataatggattagcccactaaaatttaagtgratatgaggaggcacatgtaaaagaacacactcaataatcttctctcaaatcaactgtctcagcacagactatttaatatgtgaagcttatcattagaaaa

SEQ ID NO: 503864 - DNA, 201 bp, Homo sapiens
tcttccactcttgtttgtgtttgtgatttggtgcttttcatagtgataacattttattcctttttcttacctcatgtattttctctaccagtaaacttcawaactgggcacgttttcatgagagtagacaatgtatttttgcttcctgatgtaggactcccttaagcatttattgcagggccagtctagtggtgatgagtt

SEQ ID NO: 503865 - DNA, 201 bp, Homo sapiens
ttcctgtgttcccacatgggcaagcaagcaaggcagctctctgaggtctcttttataagggcactaacccatccatgagtgacctaatcacttcccaaagrcttcacctactaacaccatcacgctggggattaggtttcaacatatgaattggtgggggtgggagggtaataaacattcagaccatagcatctcctttca

SEQ ID NO: 503866 - DNA, 201 bp, Homo sapiens
atatagtatggtctcatgtgcaaaatacacatcatcaggaagagaacaaaggaaagacattttagataccagggaaaataagctataatagcacagaaacmccataaaatatttaggaatgtttgtggaaaatctggatcaatcaggaagtcataagttactgggtacattcagttcacgaaatgaatggtgaatcagtcc

SEQ ID NO: 503867 - DNA, 201 bp, Homo sapiens
gttctgttgtgaaaagtttaagatcaaggtaccagcagacttggtgtctggtgagggcccacttctctcttcataaatgactgtcttcttcctgtgttccyacatgggcaagcaagcaaggcagctctctgaggtctcttttataagggcactaacccatccatgagtgacctaatcacttcccaaaggcttcacctacta

SEQ ID NO: 503868 - DNA, 201 bp, Homo sapiens
taatgattaatatcattttttagtccttaaaatattgtcctaataaacaaaacaagcataaataaacaaacttaaatagctaatttttcacttattaattrattcactcattcaagaagcaattattgggagacttctgtgagttaggccatgccacaaggatacagagatgaataaaactcgatctgccagaagatctta

SEQ ID NO: 503869 - DNA, 201 bp, Homo sapiens
agacagactctctctcaagaatatcataagcattcaaatgcccaaaccagcaaaccaactggagattccctacaggggaaagatagagaagcccctttacyagaaccagatccaaggttaccactaaactcacagtgaagtagagcctaaaagattgcctatctccttaagccaggattcctgattataattcagcctgac

SEQ ID NO: 503870 - DNA, 201 bp, Homo sapiens
ttcatcctctgtggccgccatttttaagaccataacatgactcaaaatggctgctgaagcttcagccattggttttgtattctggccttggaggtggagarggaacaaaaggaatgtttctttcctttaaggatatgcctcagaaatacacacactacttctgtttacatctcattagccaaaacttggtccacccccaac

SEQ ID NO: 503871 - DNA, 201 bp, Homo sapiens
ttgttgttgttcagttggaagaatttttacatttctatcttgattttatttttgacccaaagctcattcaggatcagattactaaatttccatgtatttgyattgttttgaaggttccttttagagttgatttccagtttcattccactgtggtctgagagagtgcttgttataatttccattttcttaaatttactgaag

SEQ ID NO: 503872 - DNA, 201 bp, Homo sapiens
tggcaaaaacaaaatttacttagtaggcttttcactggttttgcttttttatgatataatacatttctataagatctatttctagaatatcatcattttcrgcacatactactttatattagtttgtatatactttataataggaattatctctctgcaatccagtcttcccaagtctatgacttaacctcatacatttgg

SEQ ID NO: 503873 - DNA, 201 bp, Homo sapiens
gccgccatttttaagaccataacatgactcaaaatggctgctgaagcttcagccattggttttgtattctggccttggaggtggagaaggaacaaaaggartgtttctttcctttaaggatatgcctcagaaatacacacactacttctgtttacatctcattagccaaaacttggtccacccccaactttgcagtgaaga

SEQ ID NO: 503874 - DNA, 201 bp, Homo sapiens
ctggatacaaaattcttcactgataattgttttgtttgaagaggctgaagatagggctccaatcccttctggcttgtgcggtttctgcttagaaatctgcrttaatatgattggtttttctttctaggttacctgatgcttttgcctcacagctcttaaaattatttcctttgtcttgactttagatacactaatgactat

SEQ ID NO: 503875 - DNA, 201 bp, Homo sapiens
tcactttttgttaatagggtttgtctttttgtgttttagtgatgatgtttttaggctttagtctctatggaacataattttgttctatttttcaaggtgamaatctgaataggtattttttaccaataactgaccaatggcaaaaacaaaatttacttagtaggcttttcactggttttgcttttttatgatataatacat

SEQ ID NO: 503876 - DNA, 201 bp, Homo sapiens
tccctgaatgataagatgatgtcacgctttaactgcctcatgttattgtttcttagagtttttgttctacctgctttaaacacacacactaattttggttratctttttaataaaatcaatagttcattaaaattattgacacatcttatcagtttctgtgtttgttatcttttcttgtaacaggtactttcctctaggtt

SEQ ID NO: 503877 - DNA, 201 bp, Homo sapiens
aatttttaagtgtttaatttctgctttggatgggaatataatttcaattattggccatcaacatgattgagtaaacataaattcaatataaatcttgatgrgtaagtcctaatcataaaatgaaatatttgttggaaaagcacctcttaatgaaatgaatgcagcagttttgtttcaatcagttcatgtcttcatggatga

SEQ ID NO: 503878 - DNA, 201 bp, Homo sapiens
ggagaaggaacaaaaggaatgtttctttcctttaaggatatgcctcagaaatacacacactacttctgtttacatctcattagccaaaacttggtccaccyccaactttgcagtgaagaaacctgggtattatagtctttattcttaatgactttatgcttaactaaaaagtaagagctttgctggacatggtggcttatg

SEQ ID NO: 503879 - DNA, 201 bp, Homo sapiens
actgttaagagttaacgaaagaggaaagaaatatgaaaagcagctcaacagtcaaagacaggtttattttggagaataaacctgagaggggcttctggccratttcagtcaggcacattctctcttacaggctaagagtatttaagggttcagggcaagaaaacttatcacaggcttggaatgtgtctgtgtgaaggagaa

SEQ ID NO: 503880 - DNA, 201 bp, Homo sapiens
tgttactaaagtcatggttaatatttttaaattttgtgtaatattacatcaatcatgaatagttattttttctgctctttctttaacaggagatgttaaasgcttctgatacattttgctgaatttcttctccaaaaagcataccattagctgtaaaatatgagtatctagagtgtcattagcacaagttaatctgtttca

SEQ ID NO: 503881 - DNA, 201 bp, Homo sapiens
attttagacttttaagtcccttaaatacttaaactgcaaacatgaattcactgtaatgattaatatcattttttagtccttaaaatattgtcctaataaamaaaacaagcataaataaacaaacttaaatagctaatttttcacttattaattgattcactcattcaagaagcaattattgggagacttctgtgagttagg

SEQ ID NO: 503882 - DNA, 201 bp, Homo sapiens
ttctagacattggcttaggcaaagacttcattaccaagaacctaaaagcaagtgcaacaaaaactatgataaatagataggacttaattaaactaaaaagyttcttcacagcaaaagaaataattagcagagtaagcagacaacccacagagttggagaaaatctttgcgaattatgcatctgacaaacgactaatatcca

SEQ ID NO: 503883 - DNA, 201 bp, Homo sapiens
ctacactcaatttttagatttctagagaaatatacatttcttaatgaagactaaatttattcaatgctattttcctccctgaatgataagatgatgtcacrctttaactgcctcatgttattgtttcttagagtttttgttctacctgctttaaacacacacactaattttggttaatctttttaataaaatcaatagttc

SEQ ID NO: 503884 - DNA, 201 bp, Homo sapiens
aaagacaggtttattttggagaataaacctgagaggggcttctggccgatttcagtcaggcacattctctcttacaggctaagagtatttaagggttcagrgcaagaaaacttatcacaggcttggaatgtgtctgtgtgaaggagaagtttattgaggggttgtaatgtctctggtcagaggggaggttcgggctgacat

SEQ ID NO: 503885 - DNA, 201 bp, Homo sapiens
agaccttaacctataaaaatcttagaagaaaacctaggaaataccattctggacattggctttagcaaataatttatgactaagtcctcgaaagcaattgmaacaaaaacaaaacttgacaaatgggacctaattaaactaaagagcttccgcacaacaaaagatactattgacggagtaaacagacaacctacagagcgg

SEQ ID NO: 503886 - DNA, 201 bp, Homo sapiens
tacaggcgtgagtcacagcgacctgccctctattctactttttatctctgtgcatttgtctattctaattacctcatgcaaatagaattacacaatatttkttcttttgtgtatggtttatttaatgtcccataaggttttcaagtttcatccatattgtagcatgtatcagaatttcatcctttttttttttttgagacg

SEQ ID NO: 503887 - DNA, 201 bp, Homo sapiens
ctcaaaacacaagcactcctaagtcaccttgtagtgaatactgccaggcctgggactctcccttcagggaagtgggctctcctctggcccagaacaggacmagaaatgctttgagagggcgagagactggaatcaaagaccccaagtacccactttttgctttattccactgtggccgagctggtatctaagctaccagaa

SEQ ID NO: 503888 - DNA, 201 bp, Homo sapiens
aggaaaacaaaatgtatagagaggaagtacttaagtcctaggacgtagaagtgtgcaaaggtgtgtgtgtgtgtgtatctcactctgaacaataccgctctgtgtgtgtgtgtgtgtgtgtgtgtgtatataaaatgagcatatcatgaaatatactcaagcatattgcagcttcctatgataggattccttttggtgggg

SEQ ID NO: 503889 - DNA, 201 bp, Homo sapiens
tcctactgtttcccaacccttattcatttaataccaccttcagcgatatcatgacagctatgtacaagcttgtgtcagagactggctggctcttcactaarcccgtttgtttgttctcctcccaagcacacaattgtaccatctatcccagcctccaggcagttagatgccccatgagattgtattctagacgagggttcc

SEQ ID NO: 503890 - DNA, 201 bp, Homo sapiens
atacaacatatacccttgtatccaaattgaataaatgttaacatttgccatttttgtttcaggtatgttttaataaacttgactgataccattaaagcagmcttgcatcttgttttctccattacccctcaagttggggtgtgtccttctcctcatgtgcttatcttattaatgtatatggaattacatgtagattacaga

SEQ ID NO: 503891 - DNA, 201 bp, Homo sapiens
ggaaaacaaaatgtatagagaggaagtacttaagtcctaggacgtagaagtgtgcaaaggtgtgtgtgtgtgtgtatctcactctgaacaataccgctctgtgtgtgtgtgtgtgtgtgtgtgtgtatataaaatgagcatatcatgaaatatactcaagcatattgcagcttcctatgataggattccttttggtgggga

SEQ ID NO: 503892 - DNA, 201 bp, Homo sapiens
cagacaactggtctgactaaaatttactaggcaggaatttcctcatcctaataggcctgggagcgctacgggagaccagggcttatttcatcccttatctrcaactgtataagacagacagtcccagagtggccattttagagacctacccctgggaatgcattctctttctcagggctgttccttggtgagaaaaagaat

SEQ ID NO: 503893 - DNA, 201 bp, Homo sapiens
aaaagaaatcaagtcaaaggtagttagatatgaaagattcagggtcttaacccagttctggatgtgggcatattacagtacagtagtaaccagtccactaaatactaaaacacactgagaaaccatctcttcaagccatcctctaagtccacatacctcagccaaaggagatgtctgggagacagaatgtgagcagctgcc

SEQ ID NO: 503894 - DNA, 201 bp, Homo sapiens
aggagttcaatataatatttttaaattgataaattataataatcataattgtattacatttatggagtacaatgtgatgttttcatatatgtatataatayggagttattaaatcaaattaattaacatatatatcccttcccttgcttgacattttttgtgatgacatctttgaaatttactctcttattttgaaataca

SEQ ID NO: 503895 - DNA, 201 bp, Homo sapiens
aagcatgccagcaagtctaaggggatgtatttggaggagtaggtcatttctcaggtaaaaaagtgttttatttatggtgtgcaagcatgggaatgagaagrtctgggtttcagcctggacccttgatctgattcgctttaaggacaaccacaagtcacttagactccatgggcttcagttttttcatttgtaaaatgtaaa

SEQ ID NO: 503896 - DNA, 201 bp, Homo sapiens
aaagaaatcaagtcaaaggtagttagatatgaaagattcagggtcttaacccagttctggatgtgggcatattacagtacagtagtaaccagtccactaaatactaaaacacactgagaaaccatctcttcaagccatcctctaagtccacatacctcagccaaaggagatgtctgggagacagaatgtgagcagctgcca

SEQ ID NO: 503897 - DNA, 201 bp, Homo sapiens
cactcttgtttgtgtttgtgatttggtgcttttcatagtgataacattttattcctttttcttacctcatgtattttctctaccagtaaacttcataactkggcacgttttcatgagagtagacaatgtatttttgcttcctgatgtaggactcccttaagcatttattgcagggccagtctagtggtgatgagttccctc

SEQ ID NO: 503898 - DNA, 201 bp, Homo sapiens
ataaaaacagacacatcgacctatggaacaggacagaaagctcagtaataaactcatgccttcatggtcaattgattttttacaaaactgccaagaacccrtaatggaggaaaaacattctattcaataaattgttcaaggaaaaccagttatccacattcagaaaaaaatgaaattagacccttaccttacactatgctc

SEQ ID NO: 503899 - DNA, 201 bp, Homo sapiens
atatttctgtttgattctgttttatatctatctctttgttgaatttttcattgagatcatagttttcaagattttgttgaattatctatctgtactccctygtttctcactgaatgtccttaagattgtcattttgaattccttttcaggaatttcatagatttccttttctattactgaagagttattgtgttcctttga

SEQ ID NO: 503900 - DNA, 201 bp, Homo sapiens
gttcagccagcacccatttctctgtgccataacagggtttagacccaccatctgaatttcctgtgattccattttctcctgaacccacccaaatcaaaccrtctacctccctgtcctctgaaattgcccttgtcaagatctcctcaacctcaactttgtgggaagagggtacaataatcaattatctgtcctcattctcat

SEQ ID NO: 503901 - DNA, 201 bp, Homo sapiens
actttggccttaaatattttttggcaacttaacatatttgcatttttgcctcaagctatttaaatattttaggattccattatttacagagagcataatgrgggaactctccagagttactgaaggttaaaccggataaaaagtgaaagtatccacagaataaaataactccctagatatcttgtgtacacatgtccaacc

SEQ ID NO: 503902 - DNA, 201 bp, Homo sapiens
ggtatatctcctaatgttatccctccccttgtcccccactccccaacaggccctggtgtgtgatgttcccctccctgtgcccatatgttctcattgttcarctcccacttaagagtaagaatatgcagtgtttgttttttgttcctgtgttagtttgctgagaatgatggtttccagcttcatccatgtccctgcaaagga

SEQ ID NO: 503903 - DNA, 201 bp, Homo sapiens
gccagcacccatttctctgtgccataacagggtttagacccaccatctgaatttcctgtgattccattttctcctgaacccacccaaatcaaaccgtctasctccctgtcctctgaaattgcccttgtcaagatctcctcaacctcaactttgtgggaagagggtacaataatcaattatctgtcctcattctcatcagtc

SEQ ID NO: 503904 - DNA, 201 bp, Homo sapiens
gaaaaatgttactttttacccaagaatagagtgggtcctcactccattgcctcacaagataaaattgtaattgtcttttacttcaacgttaacagatattsatagttgagccttaatgggaacactttgttttgttgttctatattagttgctttgatacaaaatgctgtacattagaatttaatgtgatctgcctgaagt

SEQ ID NO: 503905 - DNA, 201 bp, Homo sapiens
attaaagggcccctgcaaatctatgatgctagatgacagattctaccagaaggccagagtattaatagcacccgtgataactgtaataagaatatgtctcrttttcttttaaagacatagatattccattttaatcctgtataactcaaagaaaatttgggtgttaacactttgaaatacctttacctcctttgggggaaa

SEQ ID NO: 503906 - DNA, 201 bp, Homo sapiens
caatgctttcctatttccagttctcttgctcctacgttggctctgtgttttataaatcttctttttcataatgtagattcattgacctgctggatagtagattatatatatatatatatatatatatatatatatatatatatagtacctaatagagttggctccttgccttgtatttatcaaagattcttcccccaactc

SEQ ID NO: 503907 - DNA, 201 bp, Homo sapiens
aatgctttcctatttccagttctcttgctcctacgttggctctgtgttttataaatcttctttttcataatgtagattcattgacctgctggatagtagattatatatatatatatatatatatatatatatatatatatatagtacctaatagagttggctccttgccttgtatttatcaaagattcttcccccaactct

SEQ ID NO: 503908 - DNA, 201 bp, Homo sapiens
cactgcactccagcctccgcgacagagcaagactccgtcttaaaaacaaaaacaaagtatactatcttatgggtcaaattaaattaccaaaggtttaaaarctaaaaatatctctaactttgtggttaagttatatgaggtttatgtatccataacccaactgtggtgtagtatattaataacagtctttttttttttttt

SEQ ID NO: 503909 - DNA, 201 bp, Homo sapiens
atgctttcctatttccagttctcttgctcctacgttggctctgtgttttataaatcttctttttcataatgtagattcattgacctgctggatagtagattatatatatatatatatatatatatatatatatatatatatagtacctaatagagttggctccttgccttgtatttatcaaagattcttcccccaactctc

SEQ ID NO: 503910 - DNA, 201 bp, Homo sapiens
aagatgaatattttataggccagtcatttcaaacatattagtaccatcattattatatattgatgttatattgataatataacatcattatattatatcawtacattgataatatatcatattatattgataatataatataatgatgtattatatattatcattgaataatttatcaaaaatatctagaaaatagttaat

SEQ ID NO: 503911 - DNA, 201 bp, Homo sapiens
tctttcacccattttcccaatttattctcttgcatttttggtgtctgcttcacaaaggactctgcccagtgtgacaatctctgtacagcctgcagaaaaawaagtgtttttagagaaaggggtagagagatactcttcaccactactcttactgcagcaaaccattaccttctgggggaaacagaagggtgtaatttaata

SEQ ID NO: 503912 - DNA, 201 bp, Homo sapiens
agatactcttcaccactactcttactgcagcaaaccattaccttctgggggaaacagaagggtgtaatttaatataagattccaaatctagggtttttttwaaacatttaacactagaataattaatggaaaatagatgaagacagtctctcaaaataagcaagttaatcccacttttttcatttcgagtccatcttttta

SEQ ID NO: 503913 - DNA, 201 bp, Homo sapiens
accctagtgaaatgctgaaatcacatgtttgaaaatacagatacaaacatatttctgaagaaaataaataaaccaaatcaggcttgttactctggttcaayaataaattcaaatatgaagaacaggaactcttaaatataaagattagaaagaaaggtactctcatgtcaaaatctcagttgttttatttggtaaaaaaaa

SEQ ID NO: 503914 - DNA, 201 bp, Homo sapiens
tatcttggaagtaattaacatgcttttgattttacaggctcataggtggaagggacttgctttatctcagatgagactttggactctggatttttgagttwatgctgaaatgtgttaagactttgggggacagttgggaaggcatgattcattttgaaatgtgaggacatgagatttggtaggggccaggagtggaatgtt

SEQ ID NO: 503915 - DNA, 201 bp, Homo sapiens
atctctttctaaatctgcttccatcatagtgttaaatacttcacattagcaccatgtggagaaaaaggcagacatttttaaaattgtcgtcttattaactratgtgagaaaatgtttctgaatctaatgaagtatgaattagttatatccttatattttccaggctgtgattattagtaccctagtgaaatgctgaaatca

SEQ ID NO: 503916 - DNA, 201 bp, Homo sapiens
gcagaggagagtggaagataagccttggagccaggctgaagcaggatcataaagggactggaagtggatagcaagtgcatatgcatttgcaccagtgaaayaatctttgttactgagtacctacctcaaattgtgaataaagatttaagaagatgtgtattgccatcaaaattcaaacatgctataattgctataaaactc

SEQ ID NO: 503917 - DNA, 201 bp, Homo sapiens
tgacatctgcaaaatctctttctaaatctgcttccatcatagtgttaaatacttcacattagcaccatgtggagaaaaaggcagacatttttaaaattgtygtcttattaactgatgtgagaaaatgtttctgaatctaatgaagtatgaattagttatatccttatattttccaggctgtgattattagtaccctagtga

SEQ ID NO: 503918 - DNA, 201 bp, Homo sapiens
gaacaaagtgcagagactgttcagactagagatggatcaactaaaaaaatcaaagaaagtgacatttacaactgggcttaaagaatgagagggtttgtgcrtgcagagatgtgagaacagggtgagggggtcatgggaaagcaaagaatggggtgtactcagggagttggagtacagatgcatggcagaggagagtggaag

SEQ ID NO: 503919 - DNA, 201 bp, Homo sapiens
gactctactatcctttttctttccacatgtttatacttcatccatctgttgaagatggtattatataatcattggcttgttctcatctttagtgcatgatscacacaatatcaaagcaaggcagcaaaaatctggagaacttattgaatcatggcaataactctgatgcacacaagcagagctggagtttacagtggctga

SEQ ID NO: 503920 - DNA, 201 bp, Homo sapiens
taaactcctggacaagacactgctgagaaaacagggacttacttgaaagggatgcactcacagagtaaggcaggcatttaggagtcgactcatctgcaacrtgtggtgaaggggacagagttactgtcaaagagtggggaccagcagggttgtaacctcggccaccccacacagaggaagttcaggcagcacagaacagga

SEQ ID NO: 503921 - DNA, 201 bp, Homo sapiens
cttttacttcaaaggatagattttctttttgttaatttgtgcacatatgcatttgtgaagatttagaatttatggatatttgttataatgtatttcaagcraatagaaaatacaacatatacccttgtatccaaattgaataaatgttaacatttgccatttttgtttcaggtatgttttaataaacttgactgataccat

SEQ ID NO: 503922 - DNA, 201 bp, Homo sapiens
agaatctactgattctcacagtgcatatatttttttttttttggtaactatctagttggttgcatgtaactgtcctaaaggctgattctctctccttcagyctcactagagctcagatttagatcctgaaacattttcctaatttgctgagatggctctgccaaatagctacacaatgactagctaatcctcccactagca

SEQ ID NO: 503923 - DNA, 201 bp, Homo sapiens
aactgctgtatcagttcaacagggtgactggaaaagtcttatcctatcatattatttctctctccccagtgaaggaagcagtatgcattctgaaatatccrtagcatttttgatatctttcaagtgtttggtttcatgtaaaatcaaccaaagttaacccataaatgaaaagactctactatcctttttctttccacatgt

SEQ ID NO: 503924 - DNA, 201 bp, Homo sapiens
atgtgcaaaattggtaagggtgatcctgaagtcacagtgaacatttcaaaggagccaccacatttgcctaataagccattaagaatctactgattctcacrgtgcatatatttttttttttttggtaactatctagttggttgcatgtaactgtcctaaaggctgattctctctccttcagcctcactagagctcagattt

SEQ ID NO: 503925 - DNA, 201 bp, Homo sapiens
atttttgagcttttactcattattataattgtattatcttaaaaatgaaagcaaacctcctttcagaaaaacaaatatatgatggaacattaaatgtaacsagttataggactatactactatatgagattattttaaaaattcataaatgacagaatacaaaatataaattgaatttcataaatagttaaaagcttctga

SEQ ID NO: 503926 - DNA, 201 bp, Homo sapiens
agtttgttaaatcttttacttcaaaggatagattttctttttgttaatttgtgcacatatgcatttgtgaagatttagaatttatggatatttgttataawgtatttcaagcgaatagaaaatacaacatatacccttgtatccaaattgaataaatgttaacatttgccatttttgtttcaggtatgttttaataaactt

SEQ ID NO: 503927 - DNA, 201 bp, Homo sapiens
tatacttcaatcaccaagtttgtgctatgatctttaaatagatgtgttttattatgcatttgttataactatgaattgattcactaaaaaatacctgtgcrtttaggaattagtcccaataattaagtcctatcatatggttttgtaattaatttagtttattgccttactttaatattgctttattttatgttcttttcc

SEQ ID NO: 503928 - DNA, 201 bp, Homo sapiens
tatcaaataaatcatgagacaaatgtcatagacaactcctttttcacttcctatgtcgtgtataagtacatgaaaaatccattcaacagtcactaatgaaygctattaatagataaaatgtcatcaggcaaaagcagagctcagtaacagtacttacaaaatagtcctggattctgaagcggctctctggaaaatctatac

SEQ ID NO: 503929 - DNA, 201 bp, Homo sapiens
aacattcacactgttatactaaagcattttcagtaaggtcagccaataaaacagaaatgtttttaaagtaagaccagacaataaaagagatgtttatcctyttaaataacaaaatggcatataatatttttaagagctatagtcttggaccaattatttaagatttaatggagatctgattttacactaccttaaaaagaa

SEQ ID NO: 503930 - DNA, 201 bp, Homo sapiens
taaattgccaattatagaacatatatgaataaaaatttgaggtaaactggtaatttggggaattggtcatttgacaaattgcttaatttggtgactggttrtcttgccatgaatctataatccttttactaaaatcttttaaaacaaagcctaccctgtatgtttaagcatcccagctctgaaatcaaactatcaggtgtc

SEQ ID NO: 503931 - DNA, 201 bp, Homo sapiens
agtagcctttgcacataaagcctattaatttctctacagtaagtaaggtggcttgactagtaataagtggcatcaaaatgagctgatttttttaacatgtycagattctagtctggctccaataaatatcaaataaatcatgagacaaatgtcatagacaactcctttttcacttcctatgtcgtgtataagtacatgaaa

SEQ ID NO: 503932 - DNA, 201 bp, Homo sapiens
ctggaagatcttcagagtagaaaaccagtccattgttttgcacccctagcaatgtatgaacatttgaaggtgagagcagaggacagtgctgtgagtcaaasatggaaaaatgtgcaaaattggtaagggtgatcctgaagtcacagtgaacatttcaaaggagccaccacatttgcctaataagccattaagaatctactg

SEQ ID NO: 503933 - DNA, 201 bp, Homo sapiens
gtttcaaaacaccctgacctctatgctccagagttacagtaacaaagtctgatgtatcagcctcagcactaaaacaggccctctacacgaatgcctgcccrctcagaaggaggaatcacatctccctactccctgctttagacaggtcagagctctccagttctcaccattaccaacagtgccaggctgtgcagcacttct

SEQ ID NO: 503934 - DNA, 201 bp, Homo sapiens
aatattttattgctgtatatttgaagtaaaagaagtatattagaatgtgaacggtactgcttgaaacaaaacctgaactagcactaatatcattttatctrtgtgactttatgatagagctttatcaaattgcctggatatacatacacacacaaacacaattagttaatgtaaaagctggagaaaactgcatgtgctcca

SEQ ID NO: 503935 - DNA, 201 bp, Homo sapiens
agtgaacatttcaaaggagccaccacatttgcctaataagccattaagaatctactgattctcacagtgcatatatttttttttttttggtaactatctasttggttgcatgtaactgtcctaaaggctgattctctctccttcagcctcactagagctcagatttagatcctgaaacattttcctaatttgctgagatgg

SEQ ID NO: 503936 - DNA, 201 bp, Homo sapiens
ctaggagtatgcttgctttttgcacacttttgcattttccccagggactttcaaattgaagaactcagctagagggttcacacatctactgcagccaggtytttgtggtaggtagcataatggacctccaaagatgggcttgtcctaatccccagacctgttaatatgttatcttacatagaacaaggtactttgcagctg

SEQ ID NO: 503937 - DNA, 201 bp, Homo sapiens
gtagtgcaaataaggtattataagcttctgaattttaaatagtcactatagggatgaacaaagggaaggacaatatatccatataaaaaacaggtagaatwaatatagaactggtgaggcaaagtgagaaagaatgcaaataacttccaaatttctaatttagacaactatgttggtgatagtctatctgctaatattcaa

SEQ ID NO: 503938 - DNA, 201 bp, Homo sapiens
atttataataatatagagattatggttggcaaattctgtttgaggacttgaagaatgatttaatatttctagtatggcatgtcattgtcttattgttttcrgctaatggtactgtctatctccattgcctggccaaaaattctttcatgtcatctatcaagacaatattaaggtccattagtgaatagttagatctgacaa

SEQ ID NO: 503939 - DNA, 201 bp, Homo sapiens
tagtgcaaataaggtattataagcttctgaattttaaatagtcactatagggatgaacaaagggaaggacaatatatccatataaaaaacaggtagaataratatagaactggtgaggcaaagtgagaaagaatgcaaataacttccaaatttctaatttagacaactatgttggtgatagtctatctgctaatattcaaa

SEQ ID NO: 503940 - DNA, 201 bp, Homo sapiens
ccaatatcctattgaatgggcaaaagctggaagcattccctttgaaaaccagcacaacacaaggatgccctctctcaccactcctattcaacatagtattrgaagttctggccagggcaatcaggcaagagaaagaaataaagcatattcaaataggaagggaggaagtcaggttgtctctgtttgcagacaacatgattt

SEQ ID NO: 503941 - DNA, 201 bp, Homo sapiens
aaagagatatgaaacttgtgttgccctctgcactgtgaataaaagtcctctgtttctgacccagcacccatggaacagtaatagactaatttgttaatttrtaagtagggtaaaatccctgcaaagtttctgacattaagtagctatgctttctcttagaagttacttaataccttaactgaaatacgttacatatagaag

SEQ ID NO: 503942 - DNA, 201 bp, Homo sapiens
ggagtaagtgacttctcactctcatggtaatggattagtttctgagagaacaggttgttagagtctggtttccttggtttcattctccctccatgcgatcratttgcacatgccagcttccctctgctttctgacacaagttgacgcagcctaagacccccaccagatgcagatgcccaactctgaacattccagccatca

SEQ ID NO: 503943 - DNA, 201 bp, Homo sapiens
aattataaatgaaataacccacttcaaaaagaagatagggaaggtaggcagtctctttggccattggttatcccaatgcttcctgcctagctaaatttctrtggccatatttgtatctctagctatctcttttcttttatactcatgatcagatttgtgtctcaagtgcacattaaggtatacttcataccttataacaat

SEQ ID NO: 503944 - DNA, 201 bp, Homo sapiens
ctttcctatttccagttctcttgctcctacgttggctctgtgttttataaatcttctttttcataatgtagattcattgacctgctggatagtagattatatatatatatatatatatatatatatatatatatatatagtacctaatagagttggctccttgccttgtatttatcaaagattcttcccccaactctcatc

SEQ ID NO: 503945 - DNA, 201 bp, Homo sapiens
gcatccatcaaggcccaagaggcatgataaatggagaaaagagatatgaaacttgtgttgccctctgcactgtgaataaaagtcctctgtttctgacccakcacccatggaacagtaatagactaatttgttaatttataagtagggtaaaatccctgcaaagtttctgacattaagtagctatgctttctcttagaagtt

SEQ ID NO: 503946 - DNA, 201 bp, Homo sapiens
gcaacagaaagagctccagacattgccatttgtaaaaacataccctcaatggctccttattggctaagtcagctgctcagtgagaagcagacaggcagggrgtggacatgtcagtctgtatgcccagagggtggtgcctgactgcctaagcatggggatcagagcacagctgctctgccatccactgcctcccagtggctg

SEQ ID NO: 503947 - DNA, 201 bp, Homo sapiens
cacagataggtcaattaaatttaatccatttcaaaataacaaacactttggagcaccaggtatgtgctaagtgctcacgcagagattaataaaatatgtaygttcactgagacaatttaatagacctctagttttacaaaaacacagataatttactgccattttggacaagagacagggttcatcacagctgagtttaag

SEQ ID NO: 503948 - DNA, 201 bp, Homo sapiens
gatgttaaattttatcaaaggccttttctgcatctattgagataatcatgtggtttttgtccttagatctgtttatgtgatgaattacatttattgttttstgtatgttgaaccagcttgcatctcagagatgaagccaacttgattgtggtggataagctttttgatgtgctactggattcagtttgccagtgttttgtt

SEQ ID NO: 503949 - DNA, 201 bp, Homo sapiens
cagtggctgagcaacatggtgacccacaagggaacttcagaattgctaccatgctggagttctgaaattcatccactgtatttcagacaccctggttttcytcccttacctcactttgcaatgcaattcttctcatttattcattcagaagcatttgatgaaacattcttcttagcaggcagtgctaagtgttagaaatgc

SEQ ID NO: 503950 - DNA, 201 bp, Homo sapiens
ttatttattatataactgtgaagttaactgtacatatttaatagtatgtaattccccagtactttgtttccagaatcacatctaagggacaccaggttaaytgactaaattccaagacagtcaaatcattatttgttgatgattttttaaaatacatttcaattcaccttgctaattcatgtatcttttttccttaattta

SEQ ID NO: 503951 - DNA, 201 bp, Homo sapiens
tatgtaactggtttactgaatgggttggtagaatacagttgaaaggcaattttgtttgttctctcactgtcccttcaagtacacattacggctttgttcartctcaccctttggatcatatttcaagcagaatttatagctcttttagctcctcagagatattaaatatctagtccaggttactgcaaattctcatccact

SEQ ID NO: 503952 - DNA, 201 bp, Homo sapiens
tgtcttttggctgcataaatgtcttattttgagaagtgtctgttcaggtccttcacccactttttgatggggttgtttgtttttttcttgtaaatttgttkgagttcattgtagattctgcatattagccctttgtcagatgagtagattgcaaaaattttctcccattctgtaggctgcctgttcactctgatggtagtt

SEQ ID NO: 503953 - DNA, 201 bp, Homo sapiens
attatataatcattggcttgttctcatctttagtgcatgatccacacaatatcaaagcaaggcagcaaaaatctggagaacttattgaatcatggcaatarctctgatgcacacaagcagagctggagtttacagtggctgagcaacatggtgacccacaagggaacttcagaattgctaccatgctggagttctgaaatt

SEQ ID NO: 503954 - DNA, 201 bp, Homo sapiens
taagttaaagaaaccattcacagaagaccacatggtatatgataccatttatatgtaatgctgtaataggcaaatctatagagacagaaagtagatcagtygtcacttacactggggatggggtggtgaggaggaggagagatggagagtgactgttaatgggcattgggtttctttttgcaattatgtgaatgttctaaa

SEQ ID NO: 503955 - DNA, 201 bp, Homo sapiens
gaatgggttggtagaatacagttgaaaggcaattttgtttgttctctcactgtcccttcaagtacacattacggctttgttcaatctcaccctttggatcrtatttcaagcagaatttatagctcttttagctcctcagagatattaaatatctagtccaggttactgcaaattctcatccacttaaaaactctcccgctc

SEQ ID NO: 503956 - DNA, 201 bp, Homo sapiens
tcatttgacaaaggttacactgtatgattagaatccaatgtgatagaaattctgcatttttgattctacatttagttctctttgctttaagttcccaattaaaaaaaaaaagaaacaataaattgtaacgtacaaaacgaataattctaatttgatgtgaggaagatatttctgagagacatttgtgagatttgagagtgt

SEQ ID NO: 503957 - DNA, 201 bp, Homo sapiens
tccactgagcagcagggccctctccactccaagcccaggcacttggacagctcaatcagcagcctgagctgcccaacccttcctgtgcagagactgtggtrcaacagggtcctctatgctccacacccaggattaggagtttacctccccaccacccatgcagagaacttccagcagaagagaattctcagctccatgcct

SEQ ID NO: 503958 - DNA, 201 bp, Homo sapiens
gctgggattacaggcgtaagccaccacactgaaacttcagttactattcaatctgtttaaattcaatagtctacattcctttaaataatctgttccatttrtaacttaaattcccttaaacatttaacatgaattcattgtaattatcatttttggaagtccttcatatatttgtcccaataaacaaaacattcgctggtt

SEQ ID NO: 503959 - DNA, 201 bp, Homo sapiens
cttggctgaagcactgccagacataggtgcgattaatcatttgttctcacaataaagataacagtttttagaattataagaaaagtttctcattcccattkttctttattagacataaagtccatgtattctcctttttagtaagataattagcaaaaaaatatttctgaggaggttttaaagagggagattatttggggt

SEQ ID NO: 503960 - DNA, 201 bp, Homo sapiens
atgtcctgaatggtattgactaggttttcttctagggtttttatggttttaggtctaacatttaagtctataatccatcttgaattaatttttgtataagrtgtaaggaagggatccagtttcagctttctacatatggctagccagttttcccagcaccatttattaaatagggaatcctttccccattgcttgtttttc

SEQ ID NO: 503961 - DNA, 201 bp, Homo sapiens
agactgtggtgcaacagggtcctctatgctccacacccaggattaggagtttacctccccaccacccatgcagagaacttccagcagaagagaattctcasctccatgcctagacacacgtctcagtgcttagtgccttctcactggacatcccttcagcactgatgcttgtgcctgccattggtggacctgcaagcaggc

SEQ ID NO: 503962 - DNA, 201 bp, Homo sapiens
tgctcttgatgggcaagggtctttgtctattttagttgatgtttgttgattaatttcaaaatggtgtctgtcacatattaggttcttcatatgttttgtamaaatgaactaatactcattaactaagatgagcaatgattacaagtgactagtaggtagcttttattttgcaaaagatgtaatttctatataagcatattt

SEQ ID NO: 503963 - DNA, 201 bp, Homo sapiens
gtgtggtgctgagaagaatgtatattctgttgatttgaggtggagagttctgtagatgcctattaggtccacttggtgcagagctgagttcaattcctgartatccttgttaacattctgtcttgttgacctgtctaatgttgacagtggggtaacaaagtctcccattattattgtatgggagtttaagtctctttctag

SEQ ID NO: 503964 - DNA, 201 bp, Homo sapiens
tgaaaggcagatgaagatgtttgtgctagcagaaaattcttaaacaatcttaattaattacatgttgatcatatataaagatgtgtgtctcccaggatacyggacataaaataatactaccaatgaaaacccaggactccatataatagattaaatgaattgtatcaagacccaacaaacaatgacactttcaaaaatatt

SEQ ID NO: 503965 - DNA, 201 bp, Homo sapiens
agaataagaacaatttaagattttcccaatttaagaatgagtcctggacaattatttctttaggttcttcatctgctaaccctatcatagaaataaattcrgatatgctgttgtcattagaaacacgctggctttcttgtgacctttctcgggatatttacacattatcgcttaataatttattctaaaatctctttcaag

SEQ ID NO: 503966 - DNA, 201 bp, Homo sapiens
tatgtggttacttcatagtgtcactagtctgtgcacttccatatgtttttgtaatggctggtaacgatttttcctttccatatttagtgcttccttcataygctcctgtaaggcagaggtttaacatcccactgacattattaggcagttcattgagacagcatttgcctgcctaagcatttgcctgtctgaaaaggatct

SEQ ID NO: 503967 - DNA, 201 bp, Homo sapiens
aataagcgtatcagtgaatctaaaggaataacactgaaaacaattggaaaaagccactttgagcaccttactcaaaggagatattattttcaaagactctytggagtgacttgaaatgacacgacaggagagagatcttatctcatggtttgtgctactggggaaaaaacggggtagaaaatgaaagcaatgccagtcaaa

SEQ ID NO: 503968 - DNA, 201 bp, Homo sapiens
tctaaatatctgcttctcttccacctacttttctatcatttggcagtgatgaggagggagaaaagaagaggtctcttagttgaacttaagatcttcaaaakcctttccatggtttattcatgcttgtcctatcctttggtgttgttataggaagatatttaaacttgcttgggtgttattaacattcctggagttatgatt

SEQ ID NO: 503969 - DNA, 201 bp, Homo sapiens
gatcttatttctccttcacttataatgcttagtttgtctggatatgaaattctgggctggaaattattttcttttttttatttttattttttgtttttttktttgtttgtttgtgttcagtacaaacttagggctctttaggcaataaagtaaggaacagcaaagtgggaggactacaccttcaccgtggcaacagaaagc

SEQ ID NO: 503970 - DNA, 201 bp, Homo sapiens
cagcaagagggaagtccacccccatgatccagtaacctcccatgaagaccctcctccaacattggagattacagttcaatatgagatttgggtggggacayaaatcgaaaccatatcaagggcacatcacaaagtccagaagtagagccagtgtccaggttgactaatgtgataatgtcataaaaaacctaggttcttccc

SEQ ID NO: 503971 - DNA, 201 bp, Homo sapiens
ggcaacagaaagcctcaaaaatgtaaagtccctcaacttctattgggcagactcttcctagctcagaagaaacacattttaactggctgggaacaaggccwgccagcctggccacagtgtggaagggcagctggtcacacagcctctggtcaggcctggaagtgctcagagagaacttccagcagctcctgcttcttcagc

SEQ ID NO: 503972 - DNA, 201 bp, Homo sapiens
agaccctcctccaacattggagattacagttcaatatgagatttgggtggggacacaaatcgaaaccatatcaagggcacatcacaaagtccagaagtagwgccagtgtccaggttgactaatgtgataatgtcataaaaaacctaggttcttcccatgtctctgtttagcttctctgctccttgtgggctttcaattaaa

SEQ ID NO: 503973 - DNA, 201 bp, Homo sapiens
gttcaagactaacctgggcaacatagcaagaccctgtatcttttaaaaaaataaaacccaaccaaaatttacctaaacattaacatttgttactgaagatrtgcctgatatcctaaattaccaaagcagctacatcaatgactgaattatcatagtttcaattctaccttaaaaattactatgtgaaagggctttcgatca

SEQ ID NO: 503974 - DNA, 201 bp, Homo sapiens
acatttattatttttctgaaaaaagaaatctttttctacctaagttgaaaaataagcatatattcttcccaggtggtaaatttaacaaaaaacacacacamaaaaaattgttttgtgtaaattaggtaaaatgtgtgcatacatgcatacgcatgcatgatttataagtacaccaaactataaatgtaacacattagtacc

SEQ ID NO: 503975 - DNA, 201 bp, Homo sapiens
tagtataatactagctgtgagtctgtattatatggcttttcttaacgttgacgtatgtttcttctttacccaatttttagaggattcttatcatggaagcrtgtagaattttatcaaatgatttctcagcatcagttgaaatgatcacatggtttttatccttcattctgttaatatgatgtattgcattgtttggtttgc

SEQ ID NO: 503976 - DNA, 201 bp, Homo sapiens
atttcatagtcagatcctaatataggttaacatttcaaatgacatctgcaaaatctctttctaaatctgcttccatcatagtgttaaatacttcacattarcaccatgtggagaaaaaggcagacatttttaaaattgtcgtcttattaactgatgtgagaaaatgtttctgaatctaatgaagtatgaattagttatatc

SEQ ID NO: 503977 - DNA, 201 bp, Homo sapiens
attaatctgttctcacgctgctatgaagaaatacccaagactgggtaatttataaaggaaagtggtttaattgactcacagttcatcatggttggggcagmctcaggaaacttacaatcatggcagaaggcaccttttcacagggtggcgggagagagaatgagtgccaagagaagggggaagtccctgataaaaccacaa

SEQ ID NO: 503978 - DNA, 201 bp, Homo sapiens
gtaaaatctttccaaattagaaaaaaataataaacagaaataaaaaggaaaggaaggagcattgtcctttagacaatattatttcatagtcagatcctaayataggttaacatttcaaatgacatctgcaaaatctctttctaaatctgcttccatcatagtgttaaatacttcacattagcaccatgtggagaaaaaggc

SEQ ID NO: 503979 - DNA, 201 bp, Homo sapiens
atatagtttcagccttaagaatgtggcttcttccctctttctccttcttttctcttcatcacactcttcatcctctttctcttcttccttgccttcccccmgctttctctttttcatcttcacacaataaatactagctgaatgatgagactaaagtagggatgtcaggaaagaccctgctgaaaactatttgagaatcca

SEQ ID NO: 503980 - DNA, 201 bp, Homo sapiens
cagacaccaggggagggaataagcagaggcctggaagatcttcagagtagaaaaccagtccattgttttgcacccctagcaatgtatgaacatttgaaggwgagagcagaggacagtgctgtgagtcaaagatggaaaaatgtgcaaaattggtaagggtgatcctgaagtcacagtgaacatttcaaaggagccaccaca

SEQ ID NO: 503981 - DNA, 201 bp, Homo sapiens
ccccagagtgatccaaataaataagaggaccgtctctcctaagacttcttcccctgaggatcctaagagcctagacttctgttctgctgggcgcacaagayagcacagataggcctgggtgacagttgcactaaaaggccctctcgggagccatagaaaaagaaatgtggccacaaagcatggggagatgaaactgtccac

SEQ ID NO: 503982 - DNA, 201 bp, Homo sapiens
cttcttctgatattaggctgcaaattgcaactggcacatttatttgggctcacaaaggctagtctgggttgtatatgttgaatgatgagagacaaaagtayattgaaaaccctaacagtttttgaaaggaaatgaatccctcagatgtgggttcaatattttacattaaaaagctctaaatagttctttatataaacattt

SEQ ID NO: 503983 - DNA, 201 bp, Homo sapiens
aggcagagctcagtgtaacctagataatttataagtccccatagccacaaagacatgtatactcaacccaacccaagaccttgcctgtcacattctgacamgacaaaaaccactctctatcctcaaaatatactcgtagtcatgtgacacatttatgaattctcttttagtttacattttggattgtaaacgggtaaatat

SEQ ID NO: 503984 - DNA, 201 bp, Homo sapiens
ctaatagtagtggcaaaggtaaaagttaaactgagatctctctgaccacaaagatggactcttgaccaccataaccatcaactgtgaggtgagtgttggawcccaggaacaaggctgaaacccatcctgagacctgggtatatcagagcaacgctgttggcaagagtggcctcatgttgatcccccaactgtcagatggaa

SEQ ID NO: 503985 - DNA, 201 bp, Homo sapiens
atctgcctgtagccgggcaatggggttaggcaccctgcagggagctgagagctgaggtctgctctcagtatgagagtgagtcacgagtatgagacaagtgygagagtgagtccacaagggaacaagggagtgaaggggggtctgggccggaggcaccacaaggtccatagaagggggactatcagagcagttctgatttac

SEQ ID NO: 503986 - DNA, 201 bp, Homo sapiens
agtgcaaataaggtattataagcttctgaattttaaatagtcactatagggatgaacaaagggaaggacaatatatccatataaaaaacaggtagaataartatagaactggtgaggcaaagtgagaaagaatgcaaataacttccaaatttctaatttagacaactatgttggtgatagtctatctgctaatattcaaag

SEQ ID NO: 503987 - DNA, 201 bp, Homo sapiens
ctcatttctattgatttgaacatattattatgaaaaattgatggttgttgctcactgaattgaaaaagttacaataaggccaaacgtaaagtctaagaacyctagattattagacacaagcatcctggagctatgttgttcttttgactcatatcttgtaattcttgtgctgcagaaaaatgcttttaaaagcttaagcca

SEQ ID NO: 503988 - DNA, 201 bp, Homo sapiens
taaaaaaaaaaaagaaataaagaaaatgggtaccattcatgaaaaaaagttctcatttctattgatttgaacatattattatgaaaaattgatggttgttkctcactgaattgaaaaagttacaataaggccaaacgtaaagtctaagaaccctagattattagacacaagcatcctggagctatgttgttcttttgactc

SEQ ID NO: 503989 - DNA, 201 bp, Homo sapiens
ctgtggaaaggacaactatagattggttagctttggttgtgactaaaaggttaagtagtggcggcttattgattataaatattgactggcattttctttawtaatacttttgatttttgatggttcctcagaaattaatatgtatttggaaggtctttaattttcatcatccacagcaccttgcacagtgttaagcacaaa

SEQ ID NO: 503990 - DNA, 201 bp, Homo sapiens
tcccttcctgtacctcccccttttaaagctattgtctgtatgtttctaaaatgtaaatccaattattaacttatcaacttaaaaaaagtgaatttctctaycagagagtccattccaaaccaatattttcaatggattacagaataaattagcagatttatttaacctattctcaaactttcaacaagagaaagcatacat

SEQ ID NO: 503991 - DNA, 201 bp, Homo sapiens
agaggggttgtctaaagaggaggaacttctcatatatagtaagaaagaatgaaggaataaatgtagacacaaaatacaatcaggtgtgtctgcacattggytcacctaaatagtcttacactcaacaaagtaatagaacaggcaatgttttttattacattgaggactttcatagaatcaaagatttgtattgtaagaaaa

SEQ ID NO: 503992 - DNA, 201 bp, Homo sapiens
gataagctcccttggaaggatagtaagccaacatttactaaacatttaaaaacactgcccttccaaggggattatggaagcatttttatgctctctgatarcaaataagtatactcaataccaaatagatgtttagcaaataagcattgatagctctgtctttgtttgtaattgtccttttgttagctaatttgagcaaca

SEQ ID NO: 503993 - DNA, 201 bp, Homo sapiens
gttttgtgatttagctttttgccatctatttcaacccttcctatctgaagttttgtattagtccactagaacaatttttagttgtcttgcttcttagcttrtatcagtctttcttacttttagagcaatgagttatgtatttatgtgttattctgtgttgtttattcaacaaacaggtttttaatgagaccttcttacctt

SEQ ID NO: 503994 - DNA, 201 bp, Homo sapiens
tcccagccaggtgctttgcttccctctctgtgctgagtttctgtgcctcagagggtctttgtcacttatttgctgaattccagtgttctcccttagacatrctatttgatgtgtggttatctatttgttgttttgatctttttttgtggaggaggtgagtgctgcatgcctctagtcagccatcttgatgaccaattaaat

SEQ ID NO: 503995 - DNA, 201 bp, Homo sapiens
aggcatctttaaaagtgaatatgttttgtgatttagctttttgccatctatttcaacccttcctatctgaagttttgtattagtccactagaacaattttyagttgtcttgcttcttagcttatatcagtctttcttacttttagagcaatgagttatgtatttatgtgttattctgtgttgtttattcaacaaacaggtt

SEQ ID NO: 503996 - DNA, 201 bp, Homo sapiens
aattcatcaattacggtccaaagttttctacccggtttaggtttctgttccattaagttgtgattctctgtacctacgtgcatatctccaattttgggagsagtggtttgccctgcaaccttacttctctgagtatctaagaagagttgttgatttttcagtttttctagcttttattgttggagcatggactgacgactt

SEQ ID NO: 503997 - DNA, 201 bp, Homo sapiens
ctagctagatatttgtagaattcccagtcctcttctgggcttagcataaattgtgtgcctcgatcagtgatgatgtctcccatagttactgcggagggttstcaaggcacacatgacagaattggaaacctcattatctggggatcctcaaagttccactttagttcaataaggatactggccattattcaagaactggtc

SEQ ID NO: 503998 - DNA, 201 bp, Homo sapiens
ttcaagctctgaaattctttcttccacttgatctattctgctattaatacttgtgattgcattgtgaagttcttatactgtgtttttcagttctatcatgytcctctctaaacttgctattttggctgtcagcttctgcattgttttattatgatttttagattctttgtgttgggttaaaacatattcctttagctcagc

SEQ ID NO: 503999 - DNA, 201 bp, Homo sapiens
gggtcgcacaatcactcactgcttcctttaactggatatgggggttcccttggccctgtgtcacacccaggtgggccatcgccctaccctgcttttctttyttctccatgagttgggttatttccctgaccaatcccactgtggatagctggataattcagttgaagttgctgtatccactcaccccagttcataaccaag

SEQ ID NO: 504000 - DNA, 201 bp, Homo sapiens
ctcctgggaaaaatgctttttaaaaaaataaagataatacatgttttttatttaaagtttagaagttgagaaaataacgatgacaaaaacaatgctcctayacccatctgttctgagcttaccacttgaaacccattattgaaatagaaaccagtttgtcactggtaagcttgaggttcctacatgtcaccatgtagcatg

SEQ ID NO: 504001 - DNA, 201 bp, Homo sapiens
gcatcaaacctggatcatcaaactgttttaactcttctgtttcccctttctccattataatctgagactcccatagatctcagacctcttggtatcactargcagaagcaaacttcctgtatttgtattaaatgtctgggtcttggttttcactggttcatttgtttcccaatagagctttattggagaaggcttgagagc

SEQ ID NO: 504002 - DNA, 201 bp, Homo sapiens
cagaccatgcaaccgcactgcactcctgggaaaaatgctttttaaaaaaataaagataatacatgttttttatttaaagtttagaagttgagaaaataacratgacaaaaacaatgctcctacacccatctgttctgagcttaccacttgaaacccattattgaaatagaaaccagtttgtcactggtaagcttgaggttc

SEQ ID NO: 504003 - DNA, 201 bp, Homo sapiens
tacttactttttgctaccaacccccagtactaaataagctattcgtgggtctcactctgctagattctcatgtacaggagagtgtctgtgtcctaggtagkggtcatagatattgcttccaatgttgctgatttcagtaccataaagaagatatagcccagtaaatggaagagcaaagtagaatgaaatttttaatagctt

SEQ ID NO: 504004 - DNA, 201 bp, Homo sapiens
agaaaagcaactttcctccagctcttatcctgtatctctcttctatcagccaagtttctggaaagagaaatacgtttttactgtttccatttccaagtctyccatttactacccaaagaaagggacccttgccattccaatggagctgctctctcagtggccactaataaccacttcatgtaaattcaagccaacacctct

SEQ ID NO: 504005 - DNA, 201 bp, Homo sapiens
cccaaacttcttggatgctttgttcctttaaaaagtttttcttttctttgtcttcgctggattgggttaattcaaaaacctttctttctttctttctttcttttttttttttgagctctgaagttctttattctacttgttcaattctattgctgagactctccagtgcattttgcatttctctgagtgtgtcctttattt

SEQ ID NO: 504006 - DNA, 201 bp, Homo sapiens
aatcccagcactttgggaggccgaggcgggtggatcacgaggtcaggagatcgagaccatcctgactaacacagtgaaaccccgtctctactaaaaatacaaaaaaaaaaaaaaaaaaattagccgggcttggtggcgggtgcctgtagacccagctactctggaggctgaggcaggagaatggcgtgaacgctggaggca

SEQ ID NO: 504007 - DNA, 201 bp, Homo sapiens
gagactctccagtgcattttgcatttctctgagtgtgtcctttatttccagaagttgtgattgtgttttatttacattatttatttctctggagatttttctttcatatcctgtaacattttttaaatgtctttaagttggcattcacctttctttggtgcctcgttaagtaccttaataatacaccttctgaattctttt

SEQ ID NO: 504008 - DNA, 201 bp, Homo sapiens
atcccagcactttgggaggccgaggcgggtggatcacgaggtcaggagatcgagaccatcctgactaacacagtgaaaccccgtctctactaaaaatacaaaaaaaaaaaaaaaaaaattagccgggcttggtggcgggtgcctgtagacccagctactctggaggctgaggcaggagaatggcgtgaacgctggaggcag

SEQ ID NO: 504009 - DNA, 201 bp, Homo sapiens
catttctgagtctggctctgatacttcctttgtctcttcaaactaagaagtttgaagttctcttttagtatgccttgtaattgttttctgatagctggacrtaagtgcagagcagaaggaaacatgataaatgtgcctttaacgatgtggtggtaaggtgtagggggaagtgatgcattttacagccttgcgattaagtct

SEQ ID NO: 504010 - DNA, 201 bp, Homo sapiens
acactatattagagggaagatctggggctcagtagctgctgttcagattgttttgtcccatggtgtgactccttcatgtggtgctctccccctttccctargaatgggacttcctgagagctgaactgcagtgattgttatttctctcctggatctaggctcccagcagagcctcctgggctcaaggatggtactgaggag

SEQ ID NO: 504011 - DNA, 201 bp, Homo sapiens
tcccagcactttgggaggccgaggcgggtggatcacgaggtcaggagatcgagaccatcctgactaacacagtgaaaccccgtctctactaaaaatacaaaaaaaaaaaaaaaaaaattagccgggcttggtggcgggtgcctgtagacccagctactctggaggctgaggcaggagaatggcgtgaacgctggaggcaga

SEQ ID NO: 504012 - DNA, 201 bp, Homo sapiens
ccatggtgtgactccttcatgtggtgctctccccctttccctaggaatgggacttcctgagagctgaactgcagtgattgttatttctctcctggatctargctcccagcagagcctcctgggctcaaggatggtactgaggagtgtctgcaaagggttccgtgatgtgattggtcttcaggtctctcagccatggatacc

SEQ ID NO: 504013 - DNA, 201 bp, Homo sapiens
ccagcactttgggaggccgaggcgggtggatcacgaggtcaggagatcgagaccatcctgactaacacagtgaaaccccgtctctactaaaaatacaaaaaaaaaaaaaaaaaaattagccgggcttggtggcgggtgcctgtagacccagctactctggaggctgaggcaggagaatggcgtgaacgctggaggcagagc

SEQ ID NO: 504014 - DNA, 201 bp, Homo sapiens
ccaagtttatttccaggcagccactaagcagggctgagaacttgccccaggctaccagcttcctcactgagaaagcaagcagggctctcaagtttcacacmtccccacctgccaatggcttctgtgctgtgtctgcattcctggttcactctctcccccagattctgtccaggaaaacttcgcattcagtcaaaattgtta

SEQ ID NO: 504015 - DNA, 201 bp, Homo sapiens
ataagaactttaatgaaagcaaaaatcatttcatcatactgatggtatagagtatttctttttcttttcatggtttcttctttattcttagttcatttccttttttttttttccttgtgacctggtatttgcttctattataaactaagactatgctagcaaaagaaaatggaccaaggaggcatttatctgaataattca

SEQ ID NO: 504016 - DNA, 201 bp, Homo sapiens
aagcaagcagggctctcaagtttcacacctccccacctgccaatggcttctgtgctgtgtctgcattcctggttcactctctcccccagattctgtccagraaaacttcgcattcagtcaaaattgttacaaagttcagctggaagtttccttctccctgtagtctttccctaatttgactggcgagacacaggaccccag

SEQ ID NO: 504017 - DNA, 201 bp, Homo sapiens
accacttgtggaaaatgatgaggaatcagtgatctgaccaatctagaatatctcagctatgctttattcaggaggcaaattaatttagaaaggaaattaawaatacttaactttccaaaaaatataaatggaatccacataggaatttgaaacatagtcatgcattgcataaggacattttggttaatgacaaaccacata

SEQ ID NO: 504018 - DNA, 201 bp, Homo sapiens
agtttccttctccctgtagtctttccctaatttgactggcgagacacaggaccccagtgagacaaagtcttaagtggcttccctggggactgagagttccyacagggcttctctcaatgcttcctctagccctatattttcctcagctctctaaattcatctcagctccaggtaaggtcaaattctcccatgatctggacc

SEQ ID NO: 504019 - DNA, 201 bp, Homo sapiens
attataaacacctctacgcaaataaactagacaatctagaagaaatgataaattcctggatgcatacacactaccaagactaaaccaagaggaagttgaawccctgagtagaccaataacaagccctgaaattgaagcagtaattaatagcctaccaaccaaaaaaaccccaggaccagatggattcatagctgaattcta

SEQ ID NO: 504020 - DNA, 201 bp, Homo sapiens
gacaggagaattgcttggacctaggaggcataggttgcagtgagcccagttcatgccactgcactccaccctgggtgacagagcaagacactccatctccaaaaaaaaaaaaaaaaaaagtcctcttttgagtagtgtctgtttatatcatatcctttgcccactttttgatggggttgttttttcttgtaaatttattta

SEQ ID NO: 504021 - DNA, 201 bp, Homo sapiens
acaggagaattgcttggacctaggaggcataggttgcagtgagcccagttcatgccactgcactccaccctgggtgacagagcaagacactccatctccaaaaaaaaaaaaaaaaaaagtcctcttttgagtagtgtctgtttatatcatatcctttgcccactttttgatggggttgttttttcttgtaaatttatttaa

SEQ ID NO: 504022 - DNA, 201 bp, Homo sapiens
tcttcagcttttggactcttggacttacaagagtgatttgccagggacactctggcctttggccacagactaaaggctgcactatcagcttctctactttwgaggttttgggactcagactggcttccttgctcctcagcttgcagacagcctattgtgggacttcacattgtgatcatgtgagtcaattctcgtaataaa

SEQ ID NO: 504023 - DNA, 201 bp, Homo sapiens
ctgtctttgtttgtaattgtccttttgttagctaatttgagcaacaatgaaaggatatgtcatacaggtactttcctcattcaagcccactgcctacatgsaggatgcaggtcacaattctctgttcaggccagttcttcctttcaactaacttatgtttcatgaagttattttctaatttattgaaaagtagtttctctg

SEQ ID NO: 504024 - DNA, 201 bp, Homo sapiens
ttttctcatacgtagaataaaatcaacaatacaacttagcacttggagatagaaggacttagtgaattaatgaacatacagtgttcaaaatagtatccaaytaaaccctgtgctaagcactagatatccattatcttgataatcttcacaataattggtgaagtagtatgattatatctatttgacagattacaaactgag

SEQ ID NO: 504025 - DNA, 201 bp, Homo sapiens
ttctcattgttcaactcccacttaggagtgagaacatgcagtgtttggttttctgttctgtgttagtttgctgaggatgatggcctccagcttcatccacrtctctacaaaggacatgaactcactcttttttatggctgcatagtattccatggtgtctatgtgtcacattttctttatcctgtctattattgatggaca

SEQ ID NO: 504026 - DNA, 201 bp, Homo sapiens
aagcagagaggttaacatcatgggctccaaagccagagcgtccctacctaagtggtttggggacatgttaattaaactctgtgcctcaattttctcatacrtagaataaaatcaacaatacaacttagcacttggagatagaaggacttagtgaattaatgaacatacagtgttcaaaatagtatccaattaaaccctgtg

SEQ ID NO: 504027 - DNA, 201 bp, Homo sapiens
ctactttgctaagtaaatgcagctttggattgtgaaaggagaactgcatattgatcagcagtaagcagagaggttaacatcatgggctccaaagccagagygtccctacctaagtggtttggggacatgttaattaaactctgtgcctcaattttctcatacgtagaataaaatcaacaatacaacttagcacttggagat

SEQ ID NO: 504028 - DNA, 201 bp, Homo sapiens
ttaagccaccatttaaaaagtacatagcatatagtgagcaacgtgtggaggtggatagcacttaattctaagaaaggattactctgaagaattacaccatyatcctggggattacagtataaaagaccttgccactactttgctaagtaaatgcagctttggattgtgaaaggagaactgcatattgatcagcagtaagca

SEQ ID NO: 504029 - DNA, 201 bp, Homo sapiens
aatagtaataacaaatgctggcaagtatttggagaaaagggaacccttgtatactgttgatgggaatgtaaattagtacagcaactatggagaacagtttrgaggtttctcaaaaaactgaaaagagagcttccatacaatccagcaatcgcactgctgggtaaatattcaaaagaaaggaaattggtatatcatagagat

SEQ ID NO: 504030 - DNA, 201 bp, Homo sapiens
aataaattattgttcactatagtctttctactatactatcaactcctggaatttattccttctatctagtggtgttttggtccccattaaccaaattctcytcattcattctccccactacccttcctagcctctggtaattgcagcactattcacaatagccaagatatggaatcaacttctgtccatcaatggatgaat

SEQ ID NO: 504031 - DNA, 201 bp, Homo sapiens
gaggccagagccaagaatgaatgattttaataacaagccttgggaaagcaggagggaagctgaataactcagttttgggaataataaacatggattctatgctgtgcacaatgctagctattgctgacatgttgcttttttgtactctcctcagttttgaaagcagaactcaggggagagtgaaggctcagaattgtcgac

SEQ ID NO: 504032 - DNA, 201 bp, Homo sapiens
tttacaatagcaaagacatggaaacaaacaaaatgcccatcgatgatagactggataaagaaaatgtggtaaatatacaccatagaatgctatgcagccakaaaaaggaatgagatcatgtcctttgcagggacatagatgaagctggaacccatcagcctcagcaaactaactcaggaacagaaaaccaaacaccccatg

SEQ ID NO: 504033 - DNA, 201 bp, Homo sapiens
tttctgagaaattaaaatctctagtgaagacacacaaaatgagtggctaaagtgagagtcaaatttggaacaccagaacccacatccatggatgttttccrggatgtgattcaggtttggggttggaagcatttaattgacttatcaggatccaaaacttcatgagtcgatccagcagggagtgaagggaggaagtggaat

SEQ ID NO: 504034 - DNA, 201 bp, Homo sapiens
ccatatgcctctttcagcatgggcacagtgaaattgcccagcatgcccttgctgatattggccttcagctcctcttctgaatacttcatcttgggtctttygcttccaaaatcttcattattttgttttctcttggtaaatttcccttcaggattgtaatctggtgggtaaacaagctccttaaactcaaccaccagggag

SEQ ID NO: 504035 - DNA, 201 bp, Homo sapiens
caggatctgagtccttgactgcacttcccttcagggatggcagagcactagctgatgtggggagggcagcttcccccatgagcctgccagataatgacttkgaaacctcctatggtttgacatgaaaggtcacacataggatcttggcctggagccagacacctcatttcctggttgaaatttgtaatgctaaaattttaa

SEQ ID NO: 504036 - DNA, 201 bp, Homo sapiens
ttattcgaaagattatattctcacggttctgtcattaggatctaaaatgttggccattccacgtgctgcattccttggtgatctttatcatgacatctgcyaagggaccttgcagatcgtcatagctcaactcacattccccatttagtccttcatggcaccattcatctcgtctgcagttgaggaaatcctatttctgag

SEQ ID NO: 504037 - DNA, 201 bp, Homo sapiens
cacattaatcactgaagcacctcaactcctcggaccctcaataaatacctctaccccctaagagagatttactgttgttgtgttctgttgttgtgtttttwttattattattattattatactttaagttttagggtacatgtgcaacgtgcaggtttgttacatgtgtatacatgtgccatgttggtgtgctgctcccat

SEQ ID NO: 504038 - DNA, 201 bp, Homo sapiens
ataagtgcaattgaacaatgagaacacatggacacagggagggaaacatcacacaccagggcctgttgggggttggaggctaggagaggaatagcattaaragaaatacctaatgtagatgatgagttgatgggtgcagcaaaccaccatggcacttgtatacctatgtaacaaacttgcacattctgcacacataaccca

SEQ ID NO: 504039 - DNA, 201 bp, Homo sapiens
gatgagttgatgggtgcagcaaaccaccatggcacttgtatacctatgtaacaaacttgcacattctgcacacataacccagaacttaaagtataatttaygaaaaaaaaatatatatatatacacaaattaaaaaaaagaattatctatttgtaaactgtggatttctttggagcattgtcctcataaactttttgtata

SEQ ID NO: 504040 - DNA, 201 bp, Homo sapiens
cattcatttctgacatctgtgggtagaaggaagaagctataagatgtaacagaatcaaattacatttttgtaagataagggagaactacacatttttgaaggcagaagggaaagagtctgtgcaaaggacatactggagacaaactcaatagagcaacagaaaaatctttgagagtaaagataacgaaggaacactgcaga

SEQ ID NO: 504041 - DNA, 201 bp, Homo sapiens
atgggtgcagcaaaccaccatggcacttgtatacctatgtaacaaacttgcacattctgcacacataacccagaacttaaagtataatttatgaaaaaaawatatatatatatacacaaattaaaaaaaagaattatctatttgtaaactgtggatttctttggagcattgtcctcataaactttttgtatagcattaatg

SEQ ID NO: 504042 - DNA, 201 bp, Homo sapiens
aagcaactgaagggaaatatcatgttaatatagttctggggcttttccaaagacatctcagaactcttagtttgggcaataagaaaatgggaatcaaaggaaaaaaaatcattatataaaaaagacacaagcatgcatatttttatcacagcataattcacaattgcaaagatatgaaaccaacctaagtgtccatcaact

SEQ ID NO: 504043 - DNA, 201 bp, Homo sapiens
gggtgcagcaaaccaccatggcacttgtatacctatgtaacaaacttgcacattctgcacacataacccagaacttaaagtataatttatgaaaaaaaaawatatatatatacacaaattaaaaaaaagaattatctatttgtaaactgtggatttctttggagcattgtcctcataaactttttgtatagcattaatgat

SEQ ID NO: 504044 - DNA, 201 bp, Homo sapiens
tatcatgttaatatagttctggggcttttccaaagacatctcagaactcttagtttgggcaataagaaaatgggaatcaaaggaaaaaaaatcattatatmaaaaagacacaagcatgcatatttttatcacagcataattcacaattgcaaagatatgaaaccaacctaagtgtccatcaactgaagagtggataaagaa

SEQ ID NO: 504045 - DNA, 201 bp, Homo sapiens
aaaggagattattaaaagagcaaagaataataatagagagactagctccttgactaatgagaaattgtatagtggtatactgtaaagaagtgaatattgttttttttttagaacataagctgattctaatatagcaaccacacttactatgaataaaatgtgtgcaggcatatgcacatacatagttaatgaacaacattt

SEQ ID NO: 504046 - DNA, 201 bp, Homo sapiens
atgcatatttttatcacagcataattcacaattgcaaagatatgaaaccaacctaagtgtccatcaactgaagagtggataaagaaaattaggtatattcrcaccagggaatactacccagccacaaaaaagaatgaaataatgtcttctgcagcaacttggatggaacttgagaccattattcaaagtaattcgggagtg

SEQ ID NO: 504047 - DNA, 201 bp, Homo sapiens
tctggcatattgattgttttgagttaaagaggaagtgggaagggggagagggagaaagaaaaaaaaagaatgagtgagagagaagaaagagagagaaagamggaaggaaggaaggaaggaaggaaggaaggaaggaaggaaggaaggaaggaaggcaggcaagcaagcaagcacactccaaccttcctaaaagcaggagat

SEQ ID NO: 504048 - DNA, 201 bp, Homo sapiens
ctggcatattgattgttttgagttaaagaggaagtgggaagggggagagggagaaagaaaaaaaaagaatgagtgagagagaagaaagagagagaaagaaggaaggaaggaaggaaggaaggaaggaaggaaggaaggaaggaaggaaggaaggcaggcaagcaagcaagcacactccaaccttcctaaaagcaggagata

SEQ ID NO: 504049 - DNA, 201 bp, Homo sapiens
aatatcatgtgttctcacttataagtgggagctaagctatgggtacacaaagggatacagagtggtatagtggatattggagactcagaagggaggagggwggaaagaggataaggtgatttttaaaaaactacatattgtctcaaactatgaaactactacaagaaaacattaggaaaactccccaggacatcagtctgg

SEQ ID NO: 504050 - DNA, 201 bp, Homo sapiens
gcatattgattgttttgagttaaagaggaagtgggaagggggagagggagaaagaaaaaaaaagaatgagtgagagagaagaaagagagagaaagaaggamggaaggaaggaaggaaggaaggaaggaaggaaggaaggaaggaaggaaggcaggcaagcaagcaagcacactccaaccttcctaaaagcaggagataaaa

SEQ ID NO: 504051 - DNA, 201 bp, Homo sapiens
attgattgttttgagttaaagaggaagtgggaagggggagagggagaaagaaaaaaaaagaatgagtgagagagaagaaagagagagaaagaaggaaggamggaaggaaggaaggaaggaaggaaggaaggaaggaaggaaggaaggcaggcaagcaagcaagcacactccaaccttcctaaaagcaggagataaaactcc

SEQ ID NO: 504052 - DNA, 201 bp, Homo sapiens
gccaaattatatcacccatgtatttcaaaactacacactttgatgtggtaactaaaagcttcaacaataaagtgatttgtgtttctttttctgtataaaaygttattttctgtgtggtgtttcctttgatataccttgtatagaaaactgagttgtcatgtggtaagtttaaaaaaaaatgtttctaatctagtactgaaa

SEQ ID NO: 504053 - DNA, 201 bp, Homo sapiens
gtgatgttctcctccctgggtccctgtgttctcattgttcaactcccacttaggagtgagaacatgcagtgtttggttttctgttctgtgttagtttgctraggatgatggcctccagcttcatccacatctctacaaaggacatgaactcactcttttttatggctgcatagtattccatggtgtctatgtgtcacattt

SEQ ID NO: 504054 - DNA, 201 bp, Homo sapiens
agttaaaaaccttctccatagcaaatgaaacaatcaacaaggtgaagagatgatgtacagaatgggagaaaacatttgcaaattacccctctgtcaagggrttactaactagaatatataaggagctcaagcaactctataggaaaaactccaattatccagttagaaaatgggcaaaagatctgaatagatatttcttaa

SEQ ID NO: 504055 - DNA, 201 bp, Homo sapiens
actacacatttttgaaggcagaagggaaagagtctgtgcaaaggacatactggagacaaactcaatagagcaacagaaaaatctttgagagtaaagataaygaaggaacactgcagaggggttgtctaaagaggaggaacttctcatatatagtaagaaagaatgaaggaataaatgtagacacaaaatacaatcaggtgt

SEQ ID NO: 504056 - DNA, 201 bp, Homo sapiens
gtagattaaaacacaaccatgtcaatgactatatgaaatgtaaatagaccaagcactccagttaaagacagagattagaacaatggatttttaaaatgacratagttaatgttatttatatgaaatacacattaaacataaatacatacatatatttaaattaaaaagatggaaaatatatgctatgtaaacgataatcag

SEQ ID NO: 504057 - DNA, 201 bp, Homo sapiens
caaggaatgaaaaacagaggagaagaggcaactgataacattcatttctgacatctgtgggtagaaggaagaagctataagatgtaacagaatcaaattayatttttgtaagataagggagaactacacatttttgaaggcagaagggaaagagtctgtgcaaaggacatactggagacaaactcaatagagcaacagaaa

SEQ ID NO: 504058 - DNA, 201 bp, Homo sapiens
catatgctcattcgaagaatttgagtatgtcattctcaatttgagtatgtcatgtgtattatatttgacataaatatacaacttctaaaccaatatttttkgtatcattccactcagaaagtatccagtttaagacaggagaatacacaattataatgtttaaaaaactgggatggggtcaaaggcattggaaaaatattt

SEQ ID NO: 504059 - DNA, 201 bp, Homo sapiens
tgtgagctgaaatgcagtgattgttgtctctcttctgggcctagctacccagtaagtctacccagctctgggctggtactgggggttgtctgcacaaagtcctgtgatgtgaaccatctatgggtttctcagccatggataccagtgcttgttctggtagaggtggtgggaggttcagtggactctgtgagggttcttagt

SEQ ID NO: 504060 - DNA, 201 bp, Homo sapiens
ggctattaacctttaagagagcaatctcagcagaaaagtagggccagaaggcagattgcaatgaattaagcaaggaatgaaaaacagaggagaagaggcarctgataacattcatttctgacatctgtgggtagaaggaagaagctataagatgtaacagaatcaaattacatttttgtaagataagggagaactacacat

SEQ ID NO: 504061 - DNA, 201 bp, Homo sapiens
gcagaacctaataattgcagtctagttgggtcctaatgtcaacactatgtgaatttggatggataaaaaggccattagatttgacaaaatgtaggctattwacctttaagagagcaatctcagcagaaaagtagggccagaaggcagattgcaatgaattaagcaaggaatgaaaaacagaggagaagaggcaactgataa

SEQ ID NO: 504062 - DNA, 201 bp, Homo sapiens
aattaagctgtaggttatcacttacaacaaaatgtgaagtcagagtaaatgaaaaatgttactttttacccaagaatagagtgggtcctcactccattgcytcacaagataaaattgtaattgtcttttacttcaacgttaacagatattcatagttgagccttaatgggaacactttgttttgttgttctatattagttg

SEQ ID NO: 504063 - DNA, 201 bp, Homo sapiens
atacctcacacatggttatcaggtgctttttctttttctccttgtccacccttaaagccaccatttaatgttcttactaccttgactcctaaactttatgaaaaaaaaaaaaaacaccaaatcttctcctcttagtttctttatgtccttgtaatccagttttttactcccagaactctcttggaattgcattttgtaagg

SEQ ID NO: 504064 - DNA, 201 bp, Homo sapiens
ccttagcatttcagaagctgatttccaattatcccagtaaaatgtaaatgtgccagacaatatttttgtttctgggggatcaccagaaaaacttggactcktctaatggaaaataaaagagtgattttttattaacttttagctttggataactcgggtagaaattgtaatacacaccagcgtcatctcccatcttgctcc

SEQ ID NO: 504065 - DNA, 201 bp, Homo sapiens
acgctgcaaggatggagatgagacatcccaccaagcactttctaaatttcagaatcatgatcaaaataaatcactggggttgtttcaagctgctaagtttkgggaggtttattatatagtaatagtcaatttgtttgatagataatataataatagatatgtttgttatatagtaatagataatacagaacttaaaccatt

SEQ ID NO: 504066 - DNA, 201 bp, Homo sapiens
gcatcaaagactgtaaaccaacattcatatggctttcgtctggaattattcgaaagattatattctcacggttctgtcattaggatctaaaatgttggccrttccacgtgctgcattccttggtgatctttatcatgacatctgccaagggaccttgcagatcgtcatagctcaactcacattccccatttagtccttcat

SEQ ID NO: 504067 - DNA, 201 bp, Homo sapiens
tgtctatttggggagccagatcttaagatactagaagcttctaccttgacatggaacacttactcttggaactcagccaccatgctgtgagaaaggccaascaagcagctccgtagataatctcatgaagaaagaaactaagactcctggctgagctcccagccagcagctaggaccaacttgccagacatgtgagtgagt

SEQ ID NO: 504068 - DNA, 201 bp, Homo sapiens
aagacttagcatagtaattctgtgaattcaagcatcaaagactgtaaaccaacattcatatggctttcgtctggaattattcgaaagattatattctcacrgttctgtcattaggatctaaaatgttggccattccacgtgctgcattccttggtgatctttatcatgacatctgccaagggaccttgcagatcgtcatag

SEQ ID NO: 504069 - DNA, 201 bp, Homo sapiens
acactactcaggtgacaggtacactaaaatttcagacttcactattatgcgattcatccatgtaaccaaaaccacttatacccctaaagctactgaaattaaaaaaaaaaaagaaataaagaaaatgggtaccattcatgaaaaaaagttctcatttctattgatttgaacatattattatgaaaaattgatggttgttgc

SEQ ID NO: 504070 - DNA, 201 bp, Homo sapiens
atcaaacaattgtccacataaatgttaaattgcaactgcgataagtgatacgaaggagcacactagccatgagatgtctaatggggtatctgcctgtagcygggcaatggggttaggcaccctgcagggagctgagagctgaggtctgctctcagtatgagagtgagtcacgagtatgagacaagtgcgagagtgagtcca

SEQ ID NO: 504071 - DNA, 201 bp, Homo sapiens
gtgcaaggcagtggaattaggtgtcatgcactccatctgctgattcagccatacatatcacagcatctgccacatttcactaggtaggacttttacgtacrtcccgcaagttaggaaggccatgaaacaccattcaattacagaaaagcaggattccctactacgaaacatcccctctcaacttccacagacacatatgga

SEQ ID NO: 504072 - DNA, 201 bp, Homo sapiens
caagggaacaagggagtgaaggggggtctgggccggaggcaccacaaggtccatagaagggggactatcagagcagttctgatttactcattaagcatctrttgaggacctgtactgtgctaagtttggaaaaataggaaagaattcaaatgtcagaggccctgctctgcaggcactaaccatgtaaggagtgaggaggcg

SEQ ID NO: 504073 - DNA, 201 bp, Homo sapiens
agacacatatggatagaggaatgcctgtctttctcttacattctcctgagaactataaactccatatttctacatgtggctttatctgcatcgaggggctraacagtctactgagtttaccatgactcactggatggcaggagcagcacctgcaacagaaagagctccagacattgccatttgtaaaaacataccctcaat

SEQ ID NO: 504074 - DNA, 201 bp, Homo sapiens
agtcttttcttattctctgatcctttgttaatgtagccattacatacaaaattgtggcaaaatatatatgtttaaatttttgtcttgaaaaaatgtggagrcaaattttcttttaaaaatgtgtaggctattttaagttataaaagaactctattatcctatactagatactaacagtttttattaatcatcttgaacaat

SEQ ID NO: 504075 - DNA, 201 bp, Homo sapiens
gtgggacttttccatgctgttcttgtgatagtgaataagtctcatgagatctgctggttttataaaggggagtttccctgcacatgatttcttgcatgccrccatgtaagacatgattttactcatcatttgccttctgccattattgtgaggcctccccagccatgtgcaactgtgagtcaattaaacctctttccttta

SEQ ID NO: 504076 - DNA, 201 bp, Homo sapiens
acctgcctcaccagcctcatgctctggtagccttgcctggtgtttgtgtcccggtctagcaatatttcctcagtctctcatggataccttcttccatacaygttaatggtgaatcactctctgctccttcacctctagagtgtcttgagtatgttttataatttgttcatgtttatgtcttctaggcaaagtgttctttga

SEQ ID NO: 504077 - DNA, 201 bp, Homo sapiens
gcatatatatactatagcgagtataatatatagatagtatgtgttacatattataatcatatgtcatatagctattatacacaatgttatactaaaaaactgtgtgtgtgtgtgtgtgtgtgtgtgtatgtgttactgagagcatttcctagtcctctcctactcactccctcaggctgtactagatgccctgacacctga

SEQ ID NO: 504078 - DNA, 201 bp, Homo sapiens
atacagtaaattggtgccaggagtggagtattgctgtaaagatacccaaagatgtataatcaactttgaaactaggtaacaggcagagagtggaacagttygaagggctcagaagacaggaaggtgtgaaaaagtttggaactccctagagacttattgaataactttgttcaaaatgctgatagtgatatggacaatgaa

SEQ ID NO: 504079 - DNA, 201 bp, Homo sapiens
ataagttgtgatataggaaacagtcttggcctacctcccagtcagatattgttacctttatgaagctccagattacgtcttattctaatatgggtataaaytatctatttgataaaagtacctaaagaatcattaatctatgagtatgagaaatctgttcacaaaaattgccttttaaaaaagagcatgttgttatttggg

SEQ ID NO: 504080 - DNA, 201 bp, Homo sapiens
catatatatactatagcgagtataatatatagatagtatgtgttacatattataatcatatgtcatatagctattatacacaatgttatactaaaaaactgtgtgtgtgtgtgtgtgtgtgtgtgtatgtgttactgagagcatttcctagtcctctcctactcactccctcaggctgtactagatgccctgacacctgag

SEQ ID NO: 504081 - DNA, 201 bp, Homo sapiens
aggcatgattcattttgaaatgtgaggacatgagatttggtaggggccaggagtggaatgttatggtttggctgtgtccccacccaaatctcatcttgaaktatagctcctataattcccacgtcatgggagggacccagtgggaggtagttgaatcttggctgtgggtttttcccatgctgttctcatgatagtgaataa

SEQ ID NO: 504082 - DNA, 201 bp, Homo sapiens
cattagaggcagcagcttttcaatggcagtgagaagagttctggagcagaaatccatactgacttttcactgtgaggggaaagagctttttcattgcaagrgattttctctcaaaattgcttcttctatttttagtattgtcttcctttattggccaaaccaccacacagataggtcaattaaatttaatccatttcaaaa

SEQ ID NO: 504083 - DNA, 201 bp, Homo sapiens
tacccttttaccagaaaatctatttttatataaaatagatggcttctgctcataccaaattttgagctgcttctaagtgctagatagaactattaaagatktagactgacttactcactatacaccatctctggtctctatattcagttccatgctcagaaaagtaaagcaacagtttatctaaagttccactcacccaag

SEQ ID NO: 504084 - DNA, 201 bp, Homo sapiens
cattttgaaatgtgaggacatgagatttggtaggggccaggagtggaatgttatggtttggctgtgtccccacccaaatctcatcttgaattatagctccyataattcccacgtcatgggagggacccagtgggaggtagttgaatcttggctgtgggtttttcccatgctgttctcatgatagtgaataagtctcacaat

SEQ ID NO: 504085 - DNA, 201 bp, Homo sapiens
agacaatttttccagaggttgggcgagttggttttgggatgaaaatgttccacctcagatcatcaggcattagttagattgtcataagtagccgcagcctrgatccctcgcatgggtagttcacaatagggcttgtgttcctatgagaatctaatgccacgctgatctgacaggaggcagagcttaggcagtactggtctg

SEQ ID NO: 504086 - DNA, 201 bp, Homo sapiens
ttacttctcactcattaatgacattttctttcaaattaaacaactccctgtagcatttcttgtcaaaaaagtctggtgttaatgaagtttttcagcttttktctgagaaagtctttatttctccttcatgtttaaagaatattttcactggatatactcttctatggtgaaagctttttccttcaacactttaaatatgtc

SEQ ID NO: 504087 - DNA, 201 bp, Homo sapiens
ccacccaaatctcatcttgaattatagctcctataattcccacgtcatgggagggacccagtgggaggtagttgaatcttggctgtgggtttttcccatgmtgttctcatgatagtgaataagtctcacaatatctgatggttttataaaggggagttcccctgcacacactctcttgcctcccaccatgtaagacatgac

SEQ ID NO: 504088 - DNA, 201 bp, Homo sapiens
gatgaaaatgttccacctcagatcatcaggcattagttagattgtcataagtagccgcagcctagatccctcgcatgggtagttcacaatagggcttgtgytcctatgagaatctaatgccacgctgatctgacaggaggcagagcttaggcagtactggtctgtggcctggagattgggaacccctgctttaggggaata

SEQ ID NO: 504089 - DNA, 201 bp, Homo sapiens
agactttgaactgtcccacatagaacagaagttcaagttcttctctcatctgagtcccctactcaagctcctcctgcagattggatgccagaattggacaraaacttcagctgtggtccctgcaacacaaaggagagcacacacaccctctcacttgctctagatattttgcttttatgagtcaccttaagatcatgtttt

SEQ ID NO: 504090 - DNA, 201 bp, Homo sapiens
tgggagctagggcctggaatgggggcctcaggactctgccaggtgccctatcctactgtggctgagctggtatccatgttgcaagagaacctcctctttaytcttccctctcctctcaagcagagggaaggaatctcttacaaagctgtgatctgtactagctggtgttggtggggaggggtgacacaagctctttcttga

SEQ ID NO: 504091 - DNA, 201 bp, Homo sapiens
agttgctctcggtaagttggtgagggagcgatgggtgaatgtgaaggcctaggatgttactccacactgctgtagactataaacactgtacacttaggctrtactacatttaatttttaaatttactttcttcaataataaattcattttagcttactgtaacatttttactttataaaccttttaaagaaccttttgact

SEQ ID NO: 504092 - DNA, 201 bp, Homo sapiens
atcctcgcaggccagtgactaacgatccctcctgcgctcagtttatgttgaaattaaagtaaaatcctattttcagtattgagtaaatggggtcgctagartgctatgcaacagaattatatgtggaaaaaaatgatgtgacgtatacaattacctcagctattcaaattagctcttttcagaagtggtctctggaaccct

SEQ ID NO: 504093 - DNA, 201 bp, Homo sapiens
aacaaactggaaaaccctgaggaaatggatatattcctaaaaatatacaacctactgagattgacccaagaagaagtagaaaacctgaacagttaaatagygagtaatgagattaaatcagcaataaaatgtctcccaacaaagaaaagtccaggaacagacagatttatcaatgaattacaccaaatgtataaagaacta

SEQ ID NO: 504094 - DNA, 201 bp, Homo sapiens
taaacttctttgttaaaaactaagatccagctgggtgcagtggctcacgcctctaatcccaacactttgggaggctgaggaggacggatcacctgaggtcrggagttcaagatcagcctgaccaacatagagaaaccccatctctactaaaaatacacaattcgccaggcatggtggtgcatgcctgtaatcccagcgact

SEQ ID NO: 504095 - DNA, 201 bp, Homo sapiens
aagtgatccacattcttcagcctcccaaagtgctgggattgcaggcatgtgccaccgtgtctggcccagaatacacattttttaaagagcacatgcagcattttccaggacagaccaaatgacaggctgtaaaacaagtctcaataaattttaaaggattaaattatttaagtgtgttctctgaccataagaacattgaat

SEQ ID NO: 504096 - DNA, 201 bp, Homo sapiens
actgggatggggtcaaaggcattggaaaaatattttaatatggagattacggacgttacagaagcatatgtttggttattacaatcttgaaagttagattyttatgcacatattatagaaagacaaaatttctgtggaaaatttgtttcctgatcaaattaataattattgtacttgtattaccaagggtaaataccaatg

SEQ ID NO: 504097 - DNA, 201 bp, Homo sapiens
ggcagagacacaataaaaaaagagaattttagaccaatatccttgatgaacattgatgcaaaaatcctcaataaaatactggcaagccaaatccagcaacrcagcaaaaagcttatccaccatgatcaagtgggcttcatccctgggatgcaaggctggttcaacatatgaaaatcaataaatttaatccagcatataaac

SEQ ID NO: 504098 - DNA, 201 bp, Homo sapiens
taatagcactgcttaatcttatgatattcactgtttttggtcatctttcactagatattctctgaagcaaattctcatttttgttttaacaatattattayctaatttagatttttaagatcaacagaacattttagcaagataattattaaagctaggcttctacatattttcctgtatgtaccattaaattattcccca

SEQ ID NO: 504099 - DNA, 201 bp, Homo sapiens
gcttatccaccatgatcaagtgggcttcatccctgggatgcaaggctggttcaacatatgaaaatcaataaatttaatccagcatataaacagaaccaaasacaaaaaccacatgattatctcagtagatgcagaaaaggcctttgacaaaattcaacaaccttcatgctaaaaactctcaataaattaggtgttgatggg

SEQ ID NO: 504100 - DNA, 201 bp, Homo sapiens
agtagctgagattacaggcatgcgccaccacacctagctaattttctatttttagtagagatgggtttctccatgttggtcaggctggtctcgaacccccracctcaagtgatctgcccacctcggcctcccaaagtgctgggattacaggcgtgagcccctgcgtcagcactaaagaatttatatcatttcttccttaaa

SEQ ID NO: 504101 - DNA, 201 bp, Homo sapiens
taatattttgttgaagtttttgtgtctatggcctgcagttttcttctcttgtaatgtctttgtctggcttttgtattaggataatgctggcctcctaaaaygagttagatcacataccctctgcctctattttctggaacagattttagagaattttttttttttttgagatggagttttgctcttgttgtccaggatgga

SEQ ID NO: 504102 - DNA, 201 bp, Homo sapiens
tacttgtattcaattcctagtttcttctcacttctagtttgctgaaagtttgtaattataaatgggtattggattttgtcaaatgctttctgtgtacctaygatcctgtgatttttcttctttagcatgctgatgtgatgaattacattagttgatattagaaaagtaaattagccttctataactgggataaatctcact

SEQ ID NO: 504103 - DNA, 201 bp, Homo sapiens
ttgaagtttggtagtaacagtctgccaacttttttcttctttacatagtgttggctattctaggacgtattgctctccatataaactgtagatttggttgkttggcatccacaagataactttctgggattttgattggaattttgttgaatctatagattaagttgggaaagactgacatggtgatgatattgagtctcc

SEQ ID NO: 504104 - DNA, 201 bp, Homo sapiens
agagacaaaaggagaccaggctctctcctgtctcttcttattggggcactagtctcatcatgggggctccaccctcatgacctaattaccttccaaaagcrtcacctcctaataccagcatgttaaggattagagtttgaacatgtacattctgaggggacacaagcattcagttcataacacttggctatttacagtagc

SEQ ID NO: 504105 - DNA, 201 bp, Homo sapiens
gagagacaaaaggagaccaggctctctcctgtctcttcttattggggcactagtctcatcatgggggctccaccctcatgacctaattaccttccaaaagsatcacctcctaataccagcatgttaaggattagagtttgaacatgtacattctgaggggacacaagcattcagttcataacacttggctatttacagtag

SEQ ID NO: 504106 - DNA, 201 bp, Homo sapiens
ggaggacaggaagtccaagatcagggtgccagcatagtcaggctcgggtgagggcccccctcttgattcacagatggatgccttctgtctgtaacctcacrtggtagggaagagagacaaaaggagaccaggctctctcctgtctcttcttattggggcactagtctcatcatgggggctccaccctcatgacctaattac

SEQ ID NO: 504107 - DNA, 201 bp, Homo sapiens
gagagggcattaatcttggttctgatgtatctcaacactgctgtacttactgaggttactttgttagtacatagaataaaaggtaatatacaaataagtatttttttttgagacagagccttgctctgttgcccaggctggagtgcagtggcatgattatagtcactccagccttgaactcctgggctcaagcaatcctcc

SEQ ID NO: 504108 - DNA, 201 bp, Homo sapiens
cacctaaatcatctggctggcagcatgacacatgggcaagaggcagatgacctgtgtgtctctctgacacctgctcccaagtccattattatcctcaattstctatcacatgaatatggtagaccagatagaagtctacaaacttaaaaatatatatattgtgtaaattttaaaacaaataagagtagacaatacagtata

SEQ ID NO: 504109 - DNA, 201 bp, Homo sapiens
aggacttccatttctcacaagcctagcaatttgccttctctgcagtttatatgtcaagtgtgccagggaaaaaaatagccttacaggttaaaccgagcagygttaccttgatttgctctcataatgtgatttttaataattatccatcaattcttccaaatatgtggagagcaaatgctagaatgtgaagaatacatatag

SEQ ID NO: 504110 - DNA, 201 bp, Homo sapiens
aggtttgataactccctaggatgactcacagagtcctggaaagcactttgctaaagattactggtttattacaaaggatacaactcaggagcagccaaacrgaagaaagcccaggacaagatatgagggcgaggtttccatgccctcttgccagtgtaccacgggcagcactttgatgtgttgatgtgttgatttgttcca

SEQ ID NO: 504111 - DNA, 201 bp, Homo sapiens
acacacacaaatagtggtgagtgctctaaaaatgatagacacaacatgctttggaaatgcaaaggagaaaatgtttgacttcctggggaaatttagtcagwcttcatgggagaaacatgagcctaacatatgtatattgcaatttccatgctttctacttgccctgattgtcctctccactatatttcacctatttagagc

SEQ ID NO: 504112 - DNA, 201 bp, Homo sapiens
aaattcacatttttattgttgggaaaattctaattttgtgggtttttgcttttttttctgactctaacccattctccaataccaaatggaggtccaacaaytccctttaattctgacactacctagagctagcatagaccccacaggttaagggctcagttccacaagactacgcctacatctcattccagctacaaatgg

SEQ ID NO: 504113 - DNA, 201 bp, Homo sapiens
tggggaaatttagtcagtcttcatgggagaaacatgagcctaacatatgtatattgcaatttccatgctttctacttgccctgattgtcctctccactatwtttcacctatttagagcctcttctatatggctctgaccagttctaactctaccacaagctttatatctaccactctttaacccactttatgatctgagca

SEQ ID NO: 504114 - DNA, 201 bp, Homo sapiens
gtgctatgattgctcgcctgatttttgattcttatgaaggtgttttctctgtgtagatagttgttaacttggtgttcttgctgaagggatgatcggtggcrttttctattccaccatcttaccccaactctcctgaaattcttctaatttaaatgagaataggttatgtgaaaattcacatttttattgttgggaaaattc

SEQ ID NO: 504115 - DNA, 201 bp, Homo sapiens
gtggtgtgtgtgtgtgtttgtgtgtgtgtgtattcttaaaaatctagtccaagaaaatgaactttatttatttaaatttgcttgagtaaggccttatgcakttattatgatggcagatcaaaccctgctcaaaaatgtgatcatcatctctactgacttctatattctctttaattcagaattattaagttctcttaggca

SEQ ID NO: 504116 - DNA, 201 bp, Homo sapiens
aaagaacaatagatcgttggaaataccatgaaggcaatttgagccataaaggcataaacaaaaataggtattaccataagagtaacaagtggtgtgtgtgwgtgtttgtgtgtgtgtgtattcttaaaaatctagtccaagaaaatgaactttatttatttaaatttgcttgagtaaggccttatgcagttattatgatgg

SEQ ID NO: 504117 - DNA, 201 bp, Homo sapiens
agggcataatttatttcctctcactggaatggaagagaatctttgaaggagtctgagtaaaaggcagcaaaaggaaaattctattgataaaaatacaaaamttgaaagcagttgaaatctttaatataagaagtgtttcaagaacattaatatgaggtaaattatgtactaatcaattttaaagcattttaccttaacagt

SEQ ID NO: 504118 - DNA, 201 bp, Homo sapiens
tcttactgtttagctttggaaaagtagttcgagggaaaagttttagatttctcttctttagcacaacaaagatcatactgggaaaaccagactcaaagacwgactgtttcagtcttattgaggtaacattgacaaacaaaaattgtatatattcaaggttataatgtgatgttttgatatatgtacacattatgaaatgac

SEQ ID NO: 504119 - DNA, 201 bp, Homo sapiens
cacccagtcctgtctccacacactgtaaccaaaagcccctctagacacagcctcttgccttctgactcttccaagtgtgagttgggtgccaagccccatgyttcccaaaatgtaagaaatgttaagctccccaagtgctttcgcagcaccccctcacctggcttgaggtgagaggaggtgcccgctgggtgggaggaacca

SEQ ID NO: 504120 - DNA, 201 bp, Homo sapiens
gaagtactttctttagcctttcttgtaggacaggcctggtatttatgaaatcactcagtttttgtttgtctgagaaaatatttatttttccttcatgtttraaggatgtttgcactggatatactattctaggacaaaagttattttccttcagggctttaaatatgtcctgccactctctactagcctgtaaggttttca

SEQ ID NO: 504121 - DNA, 201 bp, Homo sapiens
ggccaaagtgggtggatcacctgaggtcaagagtttgagaccagcctggccaacatggtgaaaccccatctctactaaaaatataaaaaaattagccagayctggtggtgtgcacctgtaatcccagctactcaggaggctgaggcaggagaattgctcgaactcagaagacagaggttgcagttggccgagatcttgcca

SEQ ID NO: 504122 - DNA, 201 bp, Homo sapiens
taatttatgaatttccttttccaacttataatgtatggaagcctcagagaagtaaggtgaccacaaggccagacaccaggggagggaataagcagaggcctggaagatcttcagagtagaaaaccagtccattgttttgcacccctagcaatgtatgaacatttgaaggtgagagcagaggacagtgctgtgagtcaaaga

SEQ ID NO: 504123 - DNA, 201 bp, Homo sapiens
agagaccgtctatatttctgctgtggaagatccctgaatgcacaccccctgctggggccaactatgtgtgtacaaatgggcactgtcatggaaggctgatkcaccttctcttgggaccattcagcacctttgcatcactcagtgcttgaatgcacttggtgttcatgacagtatggtgatgagcttttatttcttggagaa

SEQ ID NO: 504124 - DNA, 201 bp, Homo sapiens
tctactaaaaatataaaaaaattagccagacctggtggtgtgcacctgtaatcccagctactcaggaggctgaggcaggagaattgctcgaactcagaagrcagaggttgcagttggccgagatcttgccactgcactccaacctgggtgacagagcgagactctgtctcaaaaaaaaaaaaaaaaaccaaaaacaaacaa

SEQ ID NO: 504125 - DNA, 201 bp, Homo sapiens
ccctgacctctatgctccagagttacagtaacaaagtctgatgtatcagcctcagcactaaaacaggccctctacacgaatgcctgcccgctcagaaggargaatcacatctccctactccctgctttagacaggtcagagctctccagttctcaccattaccaacagtgccaggctgtgcagcacttctcaagcacttta

SEQ ID NO: 504126 - DNA, 201 bp, Homo sapiens
agtcattttaagtattagtttgagaagatactctgtcctgcttcaaggcagcataggacatcagaagcagtgattgtgtagtgagctgtgctcatcattarctgagatactgagacagtgggtgtagttatttcctacatacaattaatgctgcatgccaagagcattatattaattttggttcagtataaaatgcaggca

SEQ ID NO: 504127 - DNA, 201 bp, Homo sapiens
tctctctcatttagtggcgcacatcttggtgtgcacaggaagtacatttgttgagacttttatgtttaatgtatttttatttaagctacacacttgatctrttatttgtctaggtgtaaaatgctgggcataacatcattttttcattatattctttctatattctttagcacccagtatcactggtaagaaagtcaaagc

SEQ ID NO: 504128 - DNA, 201 bp, Homo sapiens
tttgatacacaaatacttaccattgtgttccatctgcccacagtattcagtacagtaacttgctgcacatgcttgtagcctagaaggaatagcttataccrtatagcctagatgtatagttggcaacaccatctagttttgtgtaagtacacttcatgttgcctacacagcgaaaagcacctgatgatgccattgtcagaa

SEQ ID NO: 504129 - DNA, 201 bp, Homo sapiens
aagttaattataaattatttctaagttataacaaactagtgtttccattttatccacatttttcctcatagaaggaaacagatctttctctttctctctcyctccctctctctctttctcgctgattttaagtacagaaaatctatattaaagttagtggtattttctgaagacatctttctttgtcacagttcaatcaac

SEQ ID NO: 504130 - DNA, 201 bp, Homo sapiens
tagtaagcactgtgtaatttaatttggtagaaaggggaagtgtgatttttatgctgaaagaatactagtttttgtatcacacatacacacacacacacacmcacacacacacacacacacacacacaaatactcatgaacacacattgagcttaacaaaaatttcaaggcaccattctgaaatctgtccattagcacttca

SEQ ID NO: 504131 - DNA, 201 bp, Homo sapiens
tagcctagatgtatagttggcaacaccatctagttttgtgtaagtacacttcatgttgcctacacagcgaaaagcacctgatgatgccattgtcagaaggkatccctgttgttaagcaatgcatgactagagcatatttgtatctgcaaactcaggacagagaactctgtggtgacatgtagtgcaaggaatttgctgaag

SEQ ID NO: 504132 - DNA, 201 bp, Homo sapiens
tagaattacacaatatttgttcttttgtgtatggtttatttaatgtcccataaggttttcaagtttcatccatattgtagcatgtatcagaatttcatcctttttttttttttgagacggagtctcactctgtcacccaggctagagtgcagtggcgcgatctcggctcactgcatgctctgcctcccgggttcatgccat

SEQ ID NO: 504133 - DNA, 201 bp, Homo sapiens
tatatgggttgtcccatttaatcctcaaaatagccctatacattattgttcttcacattttatagattagaaaaataccaaggcttaatataaaaaataawagaataagatagtcatgttaacaatagttaatatttaatgaatacaagctatgtttagggcactgttctaagtgtttcatgtgtattatactatttgagc

SEQ ID NO: 504134 - DNA, 201 bp, Homo sapiens
ctgagtgacctacaaagagacttagactcccacacaataataatgggagactttaacaccccactgtcaacattagacagatcaatgagacagaaagttascaaggatacccaggaattgaacccagctctgcaccaaggggacctaatagacatctacagaactctccaccccaaatcaacagaatacacatttttttca

SEQ ID NO: 504135 - DNA, 201 bp, Homo sapiens
gactaatattcattttgagccaagtattctaaacctctgagagataaggagatcccagtaacatctagggtatgtaaagctcatgcacaacagctgagatytcctcacagcagcacagctgaaagtgcaaatgcaggagcatccaactggactctcactgttcatgtcccctcctgcccaagcattagaatctagaactca

SEQ ID NO: 504136 - DNA, 201 bp, Homo sapiens
gactcacatcatgaacttttgttccaagaactactgcaggaacatatcaggaaaactgaaagaattcgtagagcctttgaaagaagtggcttgccactgcstactccgtgaaacagccgaaaactgtgagtgcccaaagtgtgagagggggaatgtctgtttccaaccacacatcctcactgggaaacttgaaaattcaca

SEQ ID NO: 504137 - DNA, 201 bp, Homo sapiens
tcagtctttctgactaagctaacaatggcaatatttattccctttttcctccttgaaaacttttttctatagcatattctccaaaggcaatgatgactgaytcaagccatcaagttatatggcctcttactgcaaattgtttccatttgttggagggctccagaagaagctactattttgatcctgaacaaaggagaggag

SEQ ID NO: 504138 - DNA, 201 bp, Homo sapiens
gtgggactgatcaactttcttctctactgtcttcatattctttctgctagttaaagattatatatctatttctcatctttcaatagttattcttttctggtttttttttttttttgagacaatgtctcactctgtcaccaggctggagtgcagtggctcgatctcggctcactgcaacctccacttcccgggttcaagcaa

SEQ ID NO: 504139 - DNA, 201 bp, Homo sapiens
aatgatctagaatcagaaataccatttgacccagcaatcccattactgggtatatacccaaagtaatataagtcattctactataaagacacatgcacacrtatgtttattgcagcactatttacaatagcaaagacatggaaacaaacaaaatgcccatcgatgatagactggataaagaaaatgtggtaaatatacacc

SEQ ID NO: 504140 - DNA, 201 bp, Homo sapiens
tggaaaggcctgtccaaagagaggctgagctcagacacgcctaaccctgccaccacctaatggtctttctctacccaccctggtagccaaagacaaaagayataatatcttgggagctctaacggccctgccctcaacctgagaaagctgagtgctcctccaggtgaccgtaggggaagtttgtatcctccctatactact

SEQ ID NO: 504141 - DNA, 201 bp, Homo sapiens
acaactggtctgactaaaatttactaggcaggaatttcctcatcctaataggcctgggagcgctacgggagaccagggcttatttcatcccttatctgcarctgtataagacagacagtcccagagtggccattttagagacctacccctgggaatgcattctctttctcagggctgttccttggtgagaaaaagaattca

SEQ ID NO: 504142 - DNA, 201 bp, Homo sapiens
atgtatcccgtgtttgtttgtttggaagaaataaagaaaaaattttcaataaaagtttggggtttttaactctcaaaaaaaaaaaagaaaaggagagagaragagtgaaagccaagctaccctgccttgaaggggtcaattaggaagaaccaaactgaaagtaaccagcaatcctttattcattgttgtagtgcaggccag

SEQ ID NO: 504143 - DNA, 201 bp, Homo sapiens
caaacaagtagaagaaagaacttcagagctcaaaaacaaggcttttgcattaatccaatctaacaaaaacaaagaaaaaaatcagaaaaaaatgagtaaascctctacgaagtttgggattatgttaaacagccaaacgtaagaataattggtgttcctggggaagaggagaattctaaaagtttggaaaacacatttgag

SEQ ID NO: 504144 - DNA, 201 bp, Homo sapiens
aatgaccaactaagaaataatcacagataagagaagaagagcatgacatttaaacgaaaatgctttctagcaaactacagattttttctaacttcttactstgttttctctgcattccatcaaggtggtccagcagtaaaagtagacttcttcacatcactttgtgttataggactaatgatttcttgagttattggtagg

SEQ ID NO: 504145 - DNA, 201 bp, Homo sapiens
tatcaaaataattcaaattccattaaaatgtacatatattgaatgcatattgaaagccagggattttcataaatttatcccatttattctcacaatcttargaaactgttttaatatctctacactttacagatgaggaaactgaagcccgtggtggtcaagtaatttacttttgatcacacagctgagaaacggcatttg

SEQ ID NO: 504146 - DNA, 201 bp, Homo sapiens
aaggcttttgcattaatccaatctaacaaaaacaaagaaaaaaatcagaaaaaaatgagtaaagcctctacgaagtttgggattatgttaaacagccaaaygtaagaataattggtgttcctggggaagaggagaattctaaaagtttggaaaacacatttgagggaataagtgaggaaaacttttctggccttactacag

SEQ ID NO: 504147 - DNA, 201 bp, Homo sapiens
gtgaaatttgtctttttgtgcctggcttattttttttaacataatgacttccagttccatccatgttgttgcaaatgacaggatctcattctttgttatgrctgaatagttctcaattgtgtatacataccacattccctttattcattcttttgttgatggacacttgttgccccaaaatcttggctattgtgaagagtg

SEQ ID NO: 504148 - DNA, 201 bp, Homo sapiens
tgttttaatatctctacactttacagatgaggaaactgaagcccgtggtggtcaagtaatttacttttgatcacacagctgagaaacggcatttgcctgargtaacctaggtcttctaattctgaatccagtagagttgcctctagagtcaatattatgtattttaatcccctcacttatttttatgacagtgaaaggaga

SEQ ID NO: 504149 - DNA, 201 bp, Homo sapiens
aggactagtccaacaggaaaatattacaatcctaaatatatatgcatctaacacttgagctcccaaatttgtaaaataataactactagacctaagaaatkagataggcagcaacacaataatggcaggggacttcaatactccatggacagcactaggcaggtgatatagacagaaagtcaacaaagaaacaatgaactt

SEQ ID NO: 504150 - DNA, 201 bp, Homo sapiens
atctctacactttacagatgaggaaactgaagcccgtggtggtcaagtaatttacttttgatcacacagctgagaaacggcatttgcctgaggtaacctargtcttctaattctgaatccagtagagttgcctctagagtcaatattatgtattttaatcccctcacttatttttatgacagtgaaaggagatagaataat

SEQ ID NO: 504151 - DNA, 201 bp, Homo sapiens
ttttttttttgctttcttttttcccttttcctgacttctgttaaactgatattgatttaaatcttcctggtcttaatgtttgtatgcctgcatgtaggtakgtatttgccactcacttgaaaaatgtacctatattttcttctattaaagattacttttaatttcttcctaatctttaaattaaactttaaaaatataatt

SEQ ID NO: 504152 - DNA, 201 bp, Homo sapiens
taaatcttcctggtcttaatgtttgtatgcctgcatgtaggtaggtatttgccactcacttgaaaaatgtacctatattttcttctattaaagattacttktaatttcttcctaatctttaaattaaactttaaaaatataattggattcatgtacagctgtaggaaattataaaggaagagcttgtgtacttttaccttg

SEQ ID NO: 504153 - DNA, 201 bp, Homo sapiens
ggaaattttctacacataatagttgtcatattgggtttgtttgggaccattcagtacagacctcgatacataatggtggtaagtcttatttttatcatttygcttcatataaacaattcaaaatttctataagaatataaataaaatatttctaagtggccccttctgatataatgtggcattgcttttctagccctcaaa

SEQ ID NO: 504154 - DNA, 201 bp, Homo sapiens
ttttttttctttttttgcttcattgagtcaggacaacgttgatgtctcagtcaatttgagctgctacaacacagcaccatagactgagtggcttaaacaayagaaatgtatttgtcgcagttctggaggacaggaagtccaagatcagggtgccagcatagtcaggctcgggtgagggcccccctcttgattcacagatgg

SEQ ID NO: 504155 - DNA, 201 bp, Homo sapiens
ccttgctatgcaaagaggagcagtcacaaaccagcaacatcactgttacctaaaagcttccagagtctactagaaatgcagaatctcagctcttctccaartctactgaatcagaatttgtagtttaacaagatctcaggtagtgtggatgaggatttcagtttgagaagcagtatgcacatttagcccttctaaggttcc

SEQ ID NO: 504156 - DNA, 201 bp, Homo sapiens
ataggctctgccctccttcagctgctcataataacaattgcttcctgcactccttgctatgcaaagaggagcagtcacaaaccagcaacatcactgttacytaaaagcttccagagtctactagaaatgcagaatctcagctcttctccaaatctactgaatcagaatttgtagtttaacaagatctcaggtagtgtggat

SEQ ID NO: 504157 - DNA, 201 bp, Homo sapiens
tactttgcaagtcccaaatacaggggttctggtggtaaagaataaaggaagaagggatattgaataggcaactagcaacccacaatatagaagcctacacrtatatgtattctcttccttcacattttttaaacaaatggtagcttactaacacagtcacattgcttttaactctatcctccacattcattagatttcagt

SEQ ID NO: 504158 - DNA, 201 bp, Homo sapiens
ctattgaggtagcgattgagctacttaactgttttcgaatttcatatttttctatattaagaataagaacaatttaagattttcccaatttaagaatgagycctggacaattatttctttaggttcttcatctgctaaccctatcatagaaataaattcagatatgctgttgtcattagaaacacgctggctttcttgtga

SEQ ID NO: 504159 - DNA, 201 bp, Homo sapiens
ctaattgtttagccttttaggcttaagcctaaagtaggttttaaggttttaagtaggttttaagctggatactttgcaagtcccaaatacaggggttctgktggtaaagaataaaggaagaagggatattgaataggcaactagcaacccacaatatagaagcctacacatatatgtattctcttccttcacattttttaa

SEQ ID NO: 504160 - DNA, 201 bp, Homo sapiens
caggacagaccaaatgacaggctgtaaaacaagtctcaataaattttaaaggattaaattatttaagtgtgttctctgaccataagaacattgaatagaayggaaactaaaacataacgtatcaaaatgtacaagacacagctaacacagttatgagaggtaaattgacagttataaatggacatattagaaatgaaaaag

SEQ ID NO: 504161 - DNA, 201 bp, Homo sapiens
ctatcacatcaatattccaggcaagaagaaggaagaacaaaaggatatcactcccagcagtcagctccctttaaagagctttcttgaaaatcccacatcayatctaattgtttagccttttaggcttaagcctaaagtaggttttaaggttttaagtaggttttaagctggatactttgcaagtcccaaatacaggggttc

SEQ ID NO: 504162 - DNA, 201 bp, Homo sapiens
atggtttccagcttcatccatgtccctgcaaaggacattaactcattttttatggctgcatagtattccatggtgtatatgtgccacattttctttatccrttctaacattgatgggcatttgggttggttccaagtctttgctattgtgaatagtgctgcaataaacataggagtgcatgtgtcattatagtagaatgat

SEQ ID NO: 504163 - DNA, 201 bp, Homo sapiens
gaataagaacaatttaagattttcccaatttaagaatgagtcctggacaattatttctttaggttcttcatctgctaaccctatcatagaaataaattcaratatgctgttgtcattagaaacacgctggctttcttgtgacctttctcgggatatttacacattatcgcttaataatttattctaaaatctctttcaaga

SEQ ID NO: 504164 - DNA, 201 bp, Homo sapiens
attatgtactttggtgctatatgaattaaccatttacttaattattttaaaaactgctcactaatctttgtaagaattaaagaatttcatttgaatttgcragattgtgtttttaaaaaatttcttcctttctttttatatttattgcctcacatgttcaataatgaagacttttacctcatcaactcagttatcttgata

SEQ ID NO: 504165 - DNA, 201 bp, Homo sapiens
aaaagcttcctaatttatgacttttttatcttctatcctagaatatgtagacactgtgggccccaattaactttctctattggtggatggaacctaagatractcaataatctccccttatagtactcatgcccttgcataatcctctcctcttgagtgtgagtagcatctgggatttgcttctaactaatagaatatgac

SEQ ID NO: 504166 - DNA, 201 bp, Homo sapiens
tgaacacatttatgtgtacaaactagaaaacctagagaagacggataaattcctggaaatatgcaaccctcctagattaaaccaggaagaaatagaaaccytgagcagaccaataacaagcagcaagattgaaatggtaatttttttaaaaaattaccaatagaaaagtccaggaccagatggattcatagctgaattcta

SEQ ID NO: 504167 - DNA, 201 bp, Homo sapiens
tcctgaagcataaagaaaacaaccataaatagtgataaagctggcacttgggcatcatctccctgcttggacatctcttcgggatcacaaagttatttcargaagggggtagcacagccccaaccacccccgggacataagcaacggtttaaggcactgtcaagtccactgtgcccagcagacccatcatggtgccttggt

SEQ ID NO: 504168 - DNA, 201 bp, Homo sapiens
gagtgcagtggcactatctcggctcactgcaagctccgcctcctgagttcacgccattctcctgcctcagcctcctgagtagctgggactataggcgcccsccaccacgcctggctaatttttttgtatttttagtagagacggggtttcaccgtgttagccaggttggtctcgatctcctgaccttgtgatccgccccct

SEQ ID NO: 504169 - DNA, 201 bp, Homo sapiens
tataccgattgcatgaggcccacccacattacagacggcaatctgctttactcaaagtctactgatttacgtgttaatcacttttcaaaataaaaaatttaaaaaaaaaaacacctttacagcgagaggtaaactgaagttttaccaaacatctggacaccatggcctggccatgctgacacataaaagtagccatcacag

SEQ ID NO: 504170 - DNA, 201 bp, Homo sapiens
ataccgattgcatgaggcccacccacattacagacggcaatctgctttactcaaagtctactgatttacgtgttaatcacttttcaaaataaaaaatttaaaaaaaaaaacacctttacagcgagaggtaaactgaagttttaccaaacatctggacaccatggcctggccatgctgacacataaaagtagccatcacagg

SEQ ID NO: 504171 - DNA, 201 bp, Homo sapiens
gaggtgaaagaatcacttgaggccaggagttcaagaccagcttgggcaaaatagtgagaccgtatctctacaaaaacaaacaaataaacaaaaaatacctaaaaaaaaatttaaattagccaagcatggtggcatgtacctatgaccccagccacttgagggactgagggaagggaagaagattacttgagcccaggaatt

SEQ ID NO: 504172 - DNA, 201 bp, Homo sapiens
agaatcacttgaggccaggagttcaagaccagcttgggcaaaatagtgagaccgtatctctacaaaaacaaacaaataaacaaaaaatacctaaaaaaaawtttaaattagccaagcatggtggcatgtacctatgaccccagccacttgagggactgagggaagggaagaagattacttgagcccaggaattagaggctg

SEQ ID NO: 504173 - DNA, 201 bp, Homo sapiens
aacaaacaaataaacaaaaaatacctaaaaaaaaatttaaattagccaagcatggtggcatgtacctatgaccccagccacttgagggactgagggaagggaagaagattacttgagcccaggaattagaggctgcagtgagtgcactactgcactccagcctaggcaatacagcaaaagcctgtctctaaaaagagagag

SEQ ID NO: 504174 - DNA, 201 bp, Homo sapiens
cttcttggagattcactatgtgaattaacacattaaaattcctgagaaactttgctgttaaaaaacaaaacaaaaaaaactcacggaaaacaaagtgagaractctgccagattaaaggagactgaggaaacacgacaactaaataaaacttgtgaccctagaccaaaaaacagacattaatgagacaactgttgaaagtt

SEQ ID NO: 504175 - DNA, 201 bp, Homo sapiens
acaaacaaataaacaaaaaatacctaaaaaaaaatttaaattagccaagcatggtggcatgtacctatgaccccagccacttgagggactgagggaagggaagaagattacttgagcccaggaattagaggctgcagtgagtgcactactgcactccagcctaggcaatacagcaaaagcctgtctctaaaaagagagaga

SEQ ID NO: 504176 - DNA, 201 bp, Homo sapiens
tgaaccgagatcgaggcactgaactccagcctgggcaacaagtgcgagactccgtctcaaaaaaaaaaaaaaaaaaaaaaaaaaaaaaaaaaaaaaacttwtatagtcagcctaaaaagaagtatcatctagaaacagaaagtatgccttctcagattggaaaacctggctactccagtggttcggaattgattgtcattt

SEQ ID NO: 504177 - DNA, 201 bp, Homo sapiens
caaacaaataaacaaaaaatacctaaaaaaaaatttaaattagccaagcatggtggcatgtacctatgaccccagccacttgagggactgagggaagggaagaagattacttgagcccaggaattagaggctgcagtgagtgcactactgcactccagcctaggcaatacagcaaaagcctgtctctaaaaagagagagag

SEQ ID NO: 504178 - DNA, 201 bp, Homo sapiens
aaccgagatcgaggcactgaactccagcctgggcaacaagtgcgagactccgtctcaaaaaaaaaaaaaaaaaaaaaaaaaaaaaaaaaaaaaaacttatwtagtcagcctaaaaagaagtatcatctagaaacagaaagtatgccttctcagattggaaaacctggctactccagtggttcggaattgattgtcatttca

SEQ ID NO: 504179 - DNA, 201 bp, Homo sapiens
ctagaactacaagcgtgtgccaccatacctggctagtattttcattttttgtagatacaaggtctcaatatgttccccaggcttgaaataagtgcattttwaaatacatgcgttggaaagatattagagttataaagagtcaatttgcaaatttcgtctgcttgacaatgtcatacaggtcaaaatcctcaaatcatgaga

SEQ ID NO: 504180 - DNA, 201 bp, Homo sapiens
atgagagaagcaaggtccagaatggccatactttttcaaaggcacataaattttggaattgagtctcttgaaattgaacactctacatgcctacacaccayttaggaggtcttacattcacttggggcacaccttctccagtttgaagaccactggtctcttattgccgcccttctcactccccacaatgaggaagaatga

SEQ ID NO: 504181 - DNA, 201 bp, Homo sapiens
ttgagtggctgctattgcaactaggtactagaagacagccaaggccaatccctatttcagggtagccctgcagcgagctctgcaggtactttcactgcctsctttctgtctctgacaatccgggtacacaggaaacccacctctgatgatcaggctgtaggacagatgcagaggtggtcacgtctctctgcactttcctga

SEQ ID NO: 504182 - DNA, 201 bp, Homo sapiens
aaataagcaatgggaaaaggactcccctattcaataaatgctgctggaatcactggctagccacattcagaagaataaatttgaatacctacctttcacayatacaatactgaaaatggattaaatatcttatatgtaagaccttaacctataaaaatcttagaagaaaacctaggaaataccattctggacattggcttt

SEQ ID NO: 504183 - DNA, 201 bp, Homo sapiens
cccagcactttgggaggccgaggcgggtggatcacgaggtcaggagatcgagaccatcctgactaacacagtgaaaccccgtctctactaaaaatacaaaaaaaaaaaaaaaaaaattagccgggcttggtggcgggtgcctgtagacccagctactctggaggctgaggcaggagaatggcgtgaacgctggaggcagag

SEQ ID NO: 504184 - DNA, 201 bp, Homo sapiens
acacaaagaattattttcctacatctgaaaattccagtaaggttttagagttatcttaaagtaatttttaattgttctgtgaaaactttttattcttcacrtgaaaacaatgtgtaaggcattgtattagagtgcccacacatcgtgccagttctgatgaccacagcatggtatttctatttcaactctgtagctgaatat

SEQ ID NO: 504185 - DNA, 201 bp, Homo sapiens
tcacattttcaaatatgtgtatgcatgtgtgtatgtatgaaatgaccctaactctgcaatttgtgaatctgtataaatccaccaaatatccagatcccaaycaagcctcaaaacctttcaaagaccctttttaaaagtgttgatttggccaaaaaaatgactgtcttcaattctccacctttagtttgaggcttaccaatt

SEQ ID NO: 504186 - DNA, 201 bp, Homo sapiens
gagaatacaggtgtgagccactatgccctgcctggtgttgtatttaaaaagatattgccatacccaagatcacctagattttttttttacatattcaaggmattttatagttttgtgttttacatttaagtctataatgcattttgaattaatttttaaggagtgtattcatatttttgcatatggatgtcctatttttcc

SEQ ID NO: 504187 - DNA, 201 bp, Homo sapiens
caccatattggccaggctggtctcgaactctttgccttaagtgatctgcccacctcggtctcccagagtgctgagaatacaggtgtgagccactatgccckgcctggtgttgtatttaaaaagatattgccatacccaagatcacctagattttttttttacatattcaaggaattttatagttttgtgttttacatttaa

SEQ ID NO: 504188 - DNA, 201 bp, Homo sapiens
ttctcccacctatcctccctcccttccttctatcctttctccctcccttccttcttgccttttttccctctttccttttttcctcccttcctcccacccawcctcactcccttctttcctccctcctttcctccctccctctctccctccctccttctgtctttccttccttctttcctttttccttccttcctttcttcc

SEQ ID NO: 504189 - DNA, 201 bp, Homo sapiens
cacttcttgaaggtggatacagcttcttaaatattggtatttgtagaaaaatttggtggcaggcaaaacttgaatcatctttcttgaacttgcattcaaataaagggtaaaaatcatgttaaatgctaaacatttttaaaaactgaaatatttaaagaatccaaaatatgctttagcttaaacttgagagctaagttaagt

SEQ ID NO: 504190 - DNA, 201 bp, Homo sapiens
tggtttccagcttcatccatgtccctgcaaaggacattaactcattttttatggctgcatagtattccatggtgtatatgtgccacattttctttatccgktctaacattgatgggcatttgggttggttccaagtctttgctattgtgaatagtgctgcaataaacataggagtgcatgtgtcattatagtagaatgatt

SEQ ID NO: 504191 - DNA, 201 bp, Homo sapiens
aatgctaaacatttttaaaaactgaaatatttaaagaatccaaaatatgctttagcttaaacttgagagctaagttaagtaaaaagaagaaaagaatagamggtagaaaggaagggagaggaaaatggagagaagatgaggaagagaaagagaaagaaagggaatggacaaggagacaggaaggaagaatccaaagttgaa

SEQ ID NO: 504192 - DNA, 201 bp, Homo sapiens
ttgagatatgttccatcaatacctagtttattgagtgtttttagcatgaaggagggttgaattttgtcgaaggccttttccgcatctattgagataatcaygtggtttttgtcattggttctgtttatgtgatggattacattcattcatttgcatatgttgaaacagccttgcatcccagggatgaagctgacttgatca

SEQ ID NO: 504193 - DNA, 201 bp, Homo sapiens
tggctagccagttttcccagcaccatttattaaatagggaatcctttccccattgcttgtttttgtcaggttggtcaaagatcagatagttgtagatatgyggcattatttctgagggctctgttctgttccattggtctatatctgttttggaaccagtaccgttctgttttggttactgtagtcttctagtatagtttg

SEQ ID NO: 504194 - DNA, 201 bp, Homo sapiens
tatttctccttcacttgtgaagctcagtttggctggatatgaaattctgggttgaaaattcttttctttaagaatgttgaatattagcccccaatctcttstggcttttagggtttctgcagagagatctgctgttagtatgatgggcttccctttgtaggtaacccaacttttctctctggctgcccttaacattttttc

SEQ ID NO: 504195 - DNA, 201 bp, Homo sapiens
tgttgaggctgagcagctctgcttatttctcccagtaaagttggcataaaagcctctgagttgattctcgaggtctaagaaaatctaatctccaacattgwagtttcagctctaagaacatctaagatatgcatcctaaatgtcattacccagaatgtctataatcttcatcaaacctgatatttctacattaattaattc

SEQ ID NO: 504196 - DNA, 201 bp, Homo sapiens
agaatgttgaatattagcccccaatctcttgtggcttttagggtttctgcagagagatctgctgttagtatgatgggcttccctttgtaggtaacccaacytttctctctggctgcccttaacattttttctttcagttcaaccttggtgaatctgacgattatgtgtcttggggttgctcttctcaaagagtatctttgt

SEQ ID NO: 504197 - DNA, 201 bp, Homo sapiens
attgggttactatatgttccattcgctctgaggagttcgttattacccatcttctgaagcctacttctgtcaatttgtcaaacacattctccattcagtattgttcccttgctggtaaggagttgtgatcctttggaggagaagaggcgttctggttttgggaattttcagccttattggactggtttttcctcatctttg

SEQ ID NO: 504198 - DNA, 201 bp, Homo sapiens
gcaatgcataagaatgatacaatggaatttggggacttgggggaaagactgggaggtgggtgagggataaaagactataaattgggtacagtgtatactgyttgggtgatggatgcaccaaaatctcataaatcaccactaaagaacttattcatgtaaccaaacactacccgttccccaaaaaacctattgaaataaata

SEQ ID NO: 504199 - DNA, 201 bp, Homo sapiens
aaacacattctccattcagtattgttcccttgctggtaaggagttgtgatcctttggaggagaagaggcgttctggttttgggaattttcagccttattgsactggtttttcctcatctttgtggctttatctacctttggtctttggcattggtgacctttggaaggagtgtttacatggtcatgctctttgttgatgtt

SEQ ID NO: 504200 - DNA, 201 bp, Homo sapiens
aagattgctgcctcctcctacttctggaagctgtgtcccagaggggcacctgccagatgctagccagagctctcctgtatgaagtgtctgtcgacccctgytgggagatgtctccccatcaggaggcatgggggtcagggacccacttgtggaagcagtctgtcccttagcggagctccagtgctgtgctaggagatctgc

SEQ ID NO: 504201 - DNA, 201 bp, Homo sapiens
agcagtctgtcccttagcggagctccagtgctgtgctaggagatctgctgctctcttcagagctggcaggtgggaatgtttaagtctgctgaagctgcgcycacagctgccccttcccccaggtgctctgtccccaggagatgggagttttatctataagcccctgactagggctactggctttctttcagagatgccctg

SEQ ID NO: 504202 - DNA, 201 bp, Homo sapiens
ctaggagatctgctgctctcttcagagctggcaggtgggaatgtttaagtctgctgaagctgcgctcacagctgccccttcccccaggtgctctgtccccrggagatgggagttttatctataagcccctgactagggctactggctttctttcagagatgccctgcccagagaggaggaatctagagaggcagtctggct

SEQ ID NO: 504203 - DNA, 201 bp, Homo sapiens
tgctgattgcattttattgtgagacagttgcaaaattcaaagcctttgcatcttataacaatgagctgcagggttttagctcttggtttttataaaatgayagttgaggtaagaatgataccaataattccctggtatcatgtctttcccttctttattgatagtaaatgtttccttttattttgtatctacaaagtcaat

SEQ ID NO: 504204 - DNA, 201 bp, Homo sapiens
caaggtgagatttgggtggcaacacaaccaaaccatctcaggcatttaggttgattccatgtctttgccgttgtgaatggtgctgcaatgaacacacacaygcatgtatctttataacagaataatttatattcctttaggtatatatccagtaatgggattgctgggccaaatggtatttctgctgctaggtctttgtaa

SEQ ID NO: 504205 - DNA, 201 bp, Homo sapiens
tcagatttcacctcttatttgaagcctgtcttgcatggccatttggaactgacatttctgctgcaattccaaagcgcgaactccgggggctgaagtccacytacgctccacttaaccccatatactcagaatgcgcagtgcggcatctgtccactgggggcgtctttttcctcgaattgcgctagggctccccagcggcta

SEQ ID NO: 504206 - DNA, 201 bp, Homo sapiens
ttgatcctgtcatcatgatgctagctgattatttttgcagactagtttatgtggttacttcatagtgtcactagtctgtgcacttccatatgtttttgtamtggctggtaacgatttttcctttccatatttagtgcttccttcatacgctcctgtaaggcagaggtttaacatcccactgacattattaggcagttcatt

SEQ ID NO: 504207 - DNA, 201 bp, Homo sapiens
tcttcctggcgtcttcccacttttggtggctggcagcaatccttgctggctgccacatcccagtctctgcttctatggtcacattgcctttgcctcttctwccttgtgtctaatctctctctgcctccctcttataagaatatacacgattgcatttagggtccactcagatagtccatgatcatctccccatctcatgat

SEQ ID NO: 504208 - DNA, 201 bp, Homo sapiens
ctgattatttttgcagactagtttatgtggttacttcatagtgtcactagtctgtgcacttccatatgtttttgtaatggctggtaacgatttttcctttccatatttagtgcttccttcatacgctcctgtaaggcagaggtttaacatcccactgacattattaggcagttcattgagacagcatttgcctgcctaagc

SEQ ID NO: 504209 - DNA, 201 bp, Homo sapiens
cttgctgctttgtacagtccggagacttggtgccctgcatcccagttgtggctaaaaggggccaatgtacagctcaggctgttgtttcagagggtgcaagsccctagccttggcagcatacacgtggtattgggcttgcagaggcacagaaattaagaactgaggtttgagaacctccacctagatttcagaggatgtatg

SEQ ID NO: 504210 - DNA, 201 bp, Homo sapiens
ggaagcaaaagattgaaagccagctacctttttattagtagctattactttattaacatcagcatacaaaattaaaactatcactttgtttggtgacccgsaggcttgttctgccaggatgatgcaccaagttaaggttccagatggctgagataaatgcctgtccttgcaaactggaaagaagatgattatagaagggaa

SEQ ID NO: 504211 - DNA, 201 bp, Homo sapiens
aattttaattaagttcagcttataaattatttctttcaaggaacatgtttttggtgttgtatttatttatttattatttaattttttagttttttgagacrgaagctcgctctgtcgcccaggctggagtacaatgacgcgatctctgctcaatgcaacctccgcctcccaggctcagtgattctcctgcctcaatccccc

SEQ ID NO: 504212 - DNA, 201 bp, Homo sapiens
gtccttagctggataagatctaagaatattcttgcctgatgtacttgaccaaactcatatctaaccattcttccttttttccttcctttgtcccccacctycctccctccctccgtccatcccttctttccttccttcctccctccctccctccctttctcccacctatcctccctcccttccttctatcctttctccctc

SEQ ID NO: 504213 - DNA, 201 bp, Homo sapiens
caggtgagcttacctttcaaatttttctgagacttcctaaatgtgacaagaactctgctgtgtggcaaccttatgtatccacaacagaactaaggaccgaaaaaaaaaaaaaaaagatctctatcccaatagattttataaaatccatactctaaaactcctgagttttacatgtaccctaaaacttaaagtatagtaaaa

SEQ ID NO: 504214 - DNA, 201 bp, Homo sapiens
tcacagtgatgcaagaggtgggctcccacagccttgggcagctccacttctgtggctttgcagggtacaacctccttcccagctgctttcatgggctggtkatgagtgtctatggcttttccagatgcacagtgcaatctgtcagtgggtctaccattctggggtctgaaggatggtgaccctcttcttgaagctccacta

SEQ ID NO: 504215 - DNA, 201 bp, Homo sapiens
atcagtgtgcatctctgatgtttgtgtgcaggtaaattgccttgcgttaaactgaatttggtagctgaagcaattatttctctataatattttcccttcaragagtaactgcaaatgatacaggtagcaaaccaacaaccaaaaaaatgacctaaacgttttattatcaataaagtgctacaactgtgaaggtaactgaat

SEQ ID NO: 504216 - DNA, 201 bp, Homo sapiens
atgggctggttatgagtgtctatggcttttccagatgcacagtgcaatctgtcagtgggtctaccattctggggtctgaaggatggtgaccctcttcttgmagctccactaggcagtgcctcagtgggcaccttgtgtgagggctccaaccccacatttgccttctccactgccctagcagagggtctccatgagggctcc

SEQ ID NO: 504217 - DNA, 201 bp, Homo sapiens
tttggtagctgaagcaattatttctctataatattttcccttcaaagagtaactgcaaatgatacaggtagcaaaccaacaaccaaaaaaatgacctaaaygttttattatcaataaagtgctacaactgtgaaggtaactgaatagaaaaccaacaatcaaaaggaaaaaggcataacatgttttattattgatataatt

SEQ ID NO: 504218 - DNA, 201 bp, Homo sapiens
agatgcacagtgcaatctgtcagtgggtctaccattctggggtctgaaggatggtgaccctcttcttgaagctccactaggcagtgcctcagtgggcaccytgtgtgagggctccaaccccacatttgccttctccactgccctagcagagggtctccatgagggctccgcacctgcagcacacttctgcctggatatcca

SEQ ID NO: 504219 - DNA, 201 bp, Homo sapiens
aaatggggttttcttttctatcacatcatcaggctgcaaatcttccaaacttttaggctctgcttcctcctgaatgcgtcaccgcttaaaaatttcttccyccagatatgctaaatcatctctttcaagttcagtgttccacagatctctaggacaggggcaaaatgccaccagtctctttactggagtaaagaacaacct

SEQ ID NO: 504220 - DNA, 201 bp, Homo sapiens
taccttctcctggaggtgtcatgtcactctatctaaatggcaaaaccagcaggacagggtcaacacaatacttaagtgaagattgtcatatcacagaatgyagaacccaaaaagtatttagagatgatcttgaccaagcatgtcaaatgcaggggagtggggcaggcaagaaaggaaattgtgattttcttgaggtatttc

SEQ ID NO: 504221 - DNA, 201 bp, Homo sapiens
ggaggtgtcatgtcactctatctaaatggcaaaaccagcaggacagggtcaacacaatacttaagtgaagattgtcatatcacagaatgtagaacccaaaragtatttagagatgatcttgaccaagcatgtcaaatgcaggggagtggggcaggcaagaaaggaaattgtgattttcttgaggtatttcagcaaagaaag

SEQ ID NO: 504222 - DNA, 201 bp, Homo sapiens
cttgatatgggtgtaccatagcttatttaaacaattgcctgtgaaaggacatctatgttgtttacagttttgggccattacaaataaagctgttatgaacrtttatgtaaaggtttttatgtgaaaaaaagttttcatttctctgtgataaatgcttaaaagtgtaatttctggatactatggtatttgcatatttagttt

SEQ ID NO: 504223 - DNA, 201 bp, Homo sapiens
accagttcccaggtagagtgagtgcctcataatagtaaaatagtcctagtttatcttcccatgccttgtatcactacttatttattttactcatacagaarcatatgtaaacatatataatcaaatatattattattatgaataagctattgtctattagatcagttaagaataagcaaaactaaaatgtttattttatct

SEQ ID NO: 504224 - DNA, 201 bp, Homo sapiens
aataggaatgcttttaccctcttggtgtgaatgtaaattagttcaaccattgtagaagacagtgtggtgattcctcaatgatctagaatcagaaataccayttgacccagcaatcccattactgggtatatacccaaagtaatataagtcattctactataaagacacatgcacacatatgtttattgcagcactatttac

SEQ ID NO: 504225 - DNA, 201 bp, Homo sapiens
aaacaccaaatggaaaaaaagaaaatgggaaaacatattactgtgttcataccttcttgtcctcccccaggagaagtgttctgtcttatctaggcagaggraaggctaagacatgagagatttatgactaaacaatactctctttgagtagttgacaccagaactacataatacaaagtgataggaagacttagcatagta

SEQ ID NO: 504226 - DNA, 201 bp, Homo sapiens
gtggagagaacatgggcctggttgtgtcagaagagtgctgcctccctcagcccatggcatgatggacgattacacatacgtctctgtcacaggctgcatcrttgacttccagtacctggaggtcatccacagtgctgtccaaatactactctctgtaagtgtcacttttgtgtcattatctaatcagaactcttctttgct

SEQ ID NO: 504227 - DNA, 201 bp, Homo sapiens
ctctgccaaatagctacacaatgactagctaatcctcccactagcaagatctatgaaggtagaatctttgttttgctccccactgtaaccctatagttcaraaaaatgccttgtatgtagaattcaataaagaaatatttgttggctgggtgtggtggctcaaccctataatctcagcactttgcaaggctgaagcaggca

SEQ ID NO: 504228 - DNA, 201 bp, Homo sapiens
aggtcatccacagtgctgtccaaatactactctctgtaagtgtcacttttgtgtcattatctaatcagaactcttctttgctggcatttttttctccacayctacctgatagaaaatgccacagataagcacacagagaacatccaacagaaatagaagcaattatggtaccactagttatacctgatggcaggttacacc

SEQ ID NO: 504229 - DNA, 201 bp, Homo sapiens
tttttttccatcttttctctcttgcttctcagttttggaagtttctattgtcatattctcaaactcagagattattttctcatcagtatccagtctaccartgagtccataaaaacatttgtcatttctgttagtctttcttatcactagaaattttttaaaacctagaatttccattgctctttttacatcgtctatctt

SEQ ID NO: 504230 - DNA, 201 bp, Homo sapiens
tggtttagtgtcttacattagttttggggaaattcacagtcattgttgcttcaaatattgcttctgctcctttctctttttctgctcctctggtgtgctcrttatgcaaatgttatggcattcttagttgtcccatggttcttgaacattctgcttttttttttttttccatcttttctctcttgcttctcagttttggaa

SEQ ID NO: 504231 - DNA, 201 bp, Homo sapiens
cattttcagaaacctatattttctggttttgttttcattttttaccagggctaaaagtcacctggctcaacattttctatagactttttgtagccacttayacagtatctatgattcatatttaattattactgttttctcccactaagaaacaaaaatccagacttttccctttatactcaatatgcagaagtgtactag

SEQ ID NO: 504232 - DNA, 201 bp, Homo sapiens
gctataggtaaacaccagtgacatttagtcctggtgattttaccctctaaatgttaaccgtatgcactattcacataactgctgcctttgttgaggcttaygccttctctcttctatagatagactttgcctcttattttctacctttctcccttccaatttgctctttgtacttttcttaaattactggcttaaaaccac

SEQ ID NO: 504233 - DNA, 201 bp, Homo sapiens
tcagaggcaaagtgaattttatatatatacatatatatatacacacacacatatatacacacatacacacatatatattgttcaaagtgcttcactgaacrccagaggagttaggtgggacatttagaagagagatttgtacatttggtgaaactttaattaaaaatggaagatgcaaacaagtaaaattgtgtagctaga

SEQ ID NO: 504234 - DNA, 201 bp, Homo sapiens
cttggaaccaaaagaggcatggttagttttatatttcaaatatttatggcatcaggtcattatagtcagatgtcctcaccttgtctacaagatgtgagtgsatgagtccttgatcaggcacaggcttagacaggcactgaccatgtttgcctcattgtctcccccattcctaggctttatggctgctaataccttttcctg

SEQ ID NO: 504235 - DNA, 201 bp, Homo sapiens
actatgttgccctggctggtctcgaactccggcctcaagcaatattccctccttggcctcccaaagtgctgaaattgcaggcatgaaccaccacacccagyctgcctaagacatttataaaatgccttccccacattcaagaatcatacattagttctagaattttctctctagattgtaaacaagattgaggatagaagt

SEQ ID NO: 504236 - DNA, 201 bp, Homo sapiens
ttttattggggaatcccaatagtttttgtctttatcttttctgctgtagagtggatcaaattacccaggaaagacttctaatttctatctacaggaagggrtctagaagccagctccaagtagaagaaagagctgggggtgtttgcattcagtattcagtatgcatctgatgatgaatccccatgttgtcagtatggtaca

SEQ ID NO: 504237 - DNA, 201 bp, Homo sapiens
tactgttatcactaggagaaacaaatatatttctggcatacatctttcttaacctacattatcctcctactgctaattccacatgaaaaatagacatctcraaaggatattgacttatttagtgacctggtcatgtacttagtgtttacaatgcatataccattgttcaacatagtctgctcagttccactatagacatat

SEQ ID NO: 504238 - DNA, 201 bp, Homo sapiens
tgacaactattagtggaggcatataatagattttatgattaatcaagtaacgtaataactactttattaactcatttgatgttcctagcaatgttattatyagctccatttcacaaataagaaaactaaggcaagaaaatgctattcggcttgcctagaatcatacaccaagcaagtggcagaactgagatttgaaaccag

SEQ ID NO: 504239 - DNA, 201 bp, Homo sapiens
tagaagaaaacataggaaaagctccatgacattggtttggacaaggatttttttagatgtaaccccaaaatctcaagtaacaaaagcacaaatagacaaawgggattgcatcaaattaagaagcttctgcacagcaaaagaaacgatgaacaaagtgaagagacaacccatgcaatgagaaaaatatttgcaaaccatggg

SEQ ID NO: 504240 - DNA, 201 bp, Homo sapiens
atgattggttcctggtgccttatttagtctgtttggtaaggtcataatttccttgatagccttgatacttgtggacgttcatcagtgtctgggcatagaaraattaggaagttattgtagtcttcatagtttgggcttgtttgtacacctccttcttggaaacactttccaggtattcaaaggtccttgattgttgagatc

SEQ ID NO: 504241 - DNA, 201 bp, Homo sapiens
ttttttttgagacagagtctcattcggtcacctaggctagaatgctgtggtgctatgtcaactcactgcaacctccacctcactcattcaagtgattctcytgcctcagcttcccaagtagctgggactacaggcacatgccaccacacctagctgatttttatatttttagtaaagacggtttcaccatgttggccaggc

SEQ ID NO: 504242 - DNA, 201 bp, Homo sapiens
aaagacaggcataagaaattataaaagtattaatttggggaactaataaatgtccatgaaatcttcacaatttatgttcctctgccatggcttcagccagyccctctttttggggtccctgacttccctcaacaattcccaaaagcatgtgtgtatgaagaaaatacttgactcacagtttcataggaaaacaattgtata

SEQ ID NO: 504243 - DNA, 201 bp, Homo sapiens
ctgtaagagggagtgcttttcactgcaacctcactcctctcctttgctggtgtatgtaccaatgtataacctttctgcacaaatgaaatgccatgcaagargtaaaaagtttgagaactagcccatttgtcagtaggagtccaaaactttatactaagaatcctaaatccgataactaagaagtgacttgaggcactcgca

SEQ ID NO: 504244 - DNA, 201 bp, Homo sapiens
ttaacaaagacatcaggcaattccatgggaacacttgagctgtgatatcccttcaaaattgttcactttgagggaaggagattgagattttatacccctgyattgaccagccattggatatggactcttacaggatagaggacatgacattgggtcagacatttttcttcagctgagagtaattccgtgaaagtatctgag

SEQ ID NO: 504245 - DNA, 201 bp, Homo sapiens
catttgcctgcctaagcatttgcctgtctgaaaaggatcttatttctccttcacttataatgcttagtttgtctggatatgaaattctgggctggaaattmttttcttttttttatttttattttttgtttttttgtttgtttgtttgtgttcagtacaaacttagggctctttaggcaataaagtaaggaacagcaaagt

SEQ ID NO: 504246 - DNA, 201 bp, Homo sapiens
agaagcaacgtttccaatattgagttcagtatatttggactaacatctcacttaaataattgtgctagcgattgtagttcaccactaatttctaagatatraaaaagtaattaaattaatgtctagttatattctataaattcagattatgaagtaattttcaaatgcaaatcttatgaataaaataattgcaaataatat

SEQ ID NO: 504247 - DNA, 201 bp, Homo sapiens
gagaccagatgagaacagaccacctcttatcctacttcccttgatgatttgagattttttttttgagagcctacatgacaacgttttcctttgaaaaaacytgtttatagccaagaacattctgttatatccttcaggcattcttgacaaacaatagtttcagatttagatgcttaaacataaaaacttagtgccgagatt

SEQ ID NO: 504248 - DNA, 201 bp, Homo sapiens
ttatgtgaaaattcacatttttattgttgggaaaattctaattttgtgggtttttgcttttttttctgactctaacccattctccaataccaaatggaggyccaacaactccctttaattctgacactacctagagctagcatagaccccacaggttaagggctcagttccacaagactacgcctacatctcattccagct

SEQ ID NO: 504249 - DNA, 201 bp, Homo sapiens
tcaaatcttagttgatttcagtggcaaaaatgctggagttttgattatttgtatagtgatcctgatgtaaatttctccagtaggcaagacagaaaattagrgttgagctgaatgtcaattattcatgctaatttccattcatgtacaaatatctgatgaaactcatataatgaagctgggtccattttcacctttagtgaa

SEQ ID NO: 504250 - DNA, 201 bp, Homo sapiens
caccttcaccgtggcaacagaaagcctcaaaaatgtaaagtccctcaacttctattgggcagactcttcctagctcagaagaaacacattttaactggctrggaacaaggccagccagcctggccacagtgtggaagggcagctggtcacacagcctctggtcaggcctggaagtgctcagagagaacttccagcagctcc

SEQ ID NO: 504251 - DNA, 201 bp, Homo sapiens
gagctcttatgttgctatatttccctatattctttatagtaaatcctacaagatttacttactttttgctaccaacccccagtactaaataagctattcgkgggtctcactctgctagattctcatgtacaggagagtgtctgtgtcctaggtagtggtcatagatattgcttccaatgttgctgatttcagtaccataaa

SEQ ID NO: 504252 - DNA, 201 bp, Homo sapiens
cagaattggaaacctcattatctggggatcctcaaagttccactttagttcaataaggatactggccattattcaagaactggtcttagtcacacacacawaccatagtgtcatgactgagtaactcctcgagctgggtgaaaacaccatgaacacaataaacaaagacaatctcaattttttatcaatgcctcaaaagct

SEQ ID NO: 504253 - DNA, 201 bp, Homo sapiens
taaggatactggccattattcaagaactggtcttagtcacacacacaaaccatagtgtcatgactgagtaactcctcgagctgggtgaaaacaccatgaamacaataaacaaagacaatctcaattttttatcaatgcctcaaaagcttccagacccacaaataatttcaaatgtcaccagggatatatgttctgcatact

SEQ ID NO: 504254 - DNA, 201 bp, Homo sapiens
tctgcatactacctagtccctcacaaccttgtgattctgggaactcagggactttcctggcgtcacttgaaatcactgaaagccaaggctagccctggtgyttttatcatcacttccagcagcctcccttaggtaggaaaacactggagtacaaaagaaaacaaaatatactgttcctaacacagaaatcccaggactttg

SEQ ID NO: 504255 - DNA, 201 bp, Homo sapiens
cattttaaaaaaatttagttctaaataaaatagattcaatagtttttaaagatcactgaaaattgctttggaattgaagaaaataacattgaatgatttayagcttttaggagagatgggatacaagtcaatgacctgaagaaatggaaagaatgaagactcaggaaataaaacagaatgaaaaagataagaatattccac

SEQ ID NO: 504256 - DNA, 201 bp, Homo sapiens
tctcttttcggcctccgcttttgggcctgaatgggcaacactttcctggagctcattccgacgcggcgcaagcggggctacaggggcttcgcggaggtgayggcgacgcgagcgcggaaaccagccgggctgcggctttcacttgctcaaccgaccaggaggaggctctggcggatggcgaatactgcgcagaagtgaaac

SEQ ID NO: 504257 - DNA, 201 bp, Homo sapiens
tccgacgcggcgcaagcggggctacaggggcttcgcggaggtgacggcgacgcgagcgcggaaaccagccgggctgcggctttcacttgctcaaccgaccrggaggaggctctggcggatggcgaatactgcgcagaagtgaaactaaaaacagcaggattagaggaggcggccgaggcagacggcaaaggacaatgctga

SEQ ID NO: 504258 - DNA, 201 bp, Homo sapiens
tgaggcaggagaattgctcgaactcagaagacagaggttgcagttggccgagatcttgccactgcactccaacctgggtgacagagcgagactctgtctcaaaaaaaaaaaaaaaaaccaaaaacaaacaaacaaacaataaaagccattccctcacatagttaccattagtgtgtgtgtgtgatgagaacacttagtatc

SEQ ID NO: 504259 - DNA, 201 bp, Homo sapiens
atgtagctggcatctcactaggtcacatgctccccaagttcactggcaccaaagtccacacagcactaaagcttgcccaggagcgcagtccttatgcttakcctgcttcttgcatttacttaggaccctagagcactcacccttcaatggcaaggcttgccagaacctaagttctgaccactggcatggatgattctcctc

SEQ ID NO: 504260 - DNA, 201 bp, Homo sapiens
ctaggtcacatgctccccaagttcactggcaccaaagtccacacagcactaaagcttgcccaggagcgcagtccttatgcttagcctgcttcttgcatttrcttaggaccctagagcactcacccttcaatggcaaggcttgccagaacctaagttctgaccactggcatggatgattctcctctgactagggctgttata

SEQ ID NO: 504261 - DNA, 201 bp, Homo sapiens
gttgtttacagttttgggccattacaaataaagctgttatgaacatttatgtaaaggtttttatgtgaaaaaaagttttcatttctctgtgataaatgctyaaaagtgtaatttctggatactatggtatttgcatatttagttttaaaataacttgctagactgttttccagagtagttgcaccattgtacattcccacc

SEQ ID NO: 504262 - DNA, 201 bp, Homo sapiens
aaccaatggccatcttgaaaatggcccattcttactggagcagcaactggacgatgaagaggataatgaagaagaccgcccaaatactgaggaatataatyttgatgagccaaatgcagaaagtgattacacatataacagctcctatgaacaattcaatagtgaattgccaaatgtatggcataaaattcccgagtcaca

SEQ ID NO: 504263 - DNA, 201 bp, Homo sapiens
cttaagaaattatcaagttggaaccaagaaatagcaaggaaatatgcaatgttatcttctggcaaagggacatcattcctgtattatagtgtatgtaaacrcacactgtaaatgttactttccattaaacatgggaggggggctcaaatttcagaaaagctaccaagtcttgagttctatgtagcatatgttgcatgtagc

SEQ ID NO: 504264 - DNA, 201 bp, Homo sapiens
gcaaagggacatcattcctgtattatagtgtatgtaaacgcacactgtaaatgttactttccattaaacatgggaggggggctcaaatttcagaaaagctrccaagtcttgagttctatgtagcatatgttgcatgtagccgactttaactgcttctaggagttgtgcaagcttttcattccataacagtcctttcacatt

SEQ ID NO: 504265 - DNA, 201 bp, Homo sapiens
tttcattccataacagtcctttcacattggatttttaaaaaagtggctccgggttgtaagatatcattctctatgtggcactttaaaggaagaaaaaatakgcttctcattctaaaatatgcataataatttagcagtcccatttgtatttttgcatatttttaaaagtatttttaaagaaaaagagggatttcactttaa

SEQ ID NO: 504266 - DNA, 201 bp, Homo sapiens
tgcacacagttttgtttatgcatttccttaaaattaattgtagaatccaagacacaaaccacaggtggcaatacaattttagaatgtaacatatagaggtrtatttagcctgttttagaagtcagtggattcaatgtctttttactttaaattttacattaattaaggtgcctcattttttactttgtccattaacattta

SEQ ID NO: 504267 - DNA, 201 bp, Homo sapiens
tgtgaaaagctaacaagtgttgtaacaataatccattgtttgaggtgtttgcggttgtcttaaaaattaaagtattggccaggcgcagtggctcacgcctstaatcccagcactttgggaggccgaggcgggtggatcacgaggtcaggagatcgagaccatcctgactaacacagtgaaaccccgtctctactaaaaata

SEQ ID NO: 504268 - DNA, 201 bp, Homo sapiens
cgaggcgggtggatcacgaggtcaggagatcgagaccatcctgactaacacagtgaaaccccgtctctactaaaaatacaaaaaaaaaaaaaaaaaaattrgccgggcttggtggcgggtgcctgtagacccagctactctggaggctgaggcaggagaatggcgtgaacgctggaggcagagcttgcagtgagccgagat

SEQ ID NO: 504269 - DNA, 201 bp, Homo sapiens
ccactcatccatgactgctctcttctcagcaaggctgtgaccacacagtcaactcagaggatgggaatagtgaggttccacaataaatttcatactaaaaygcactgcccagtagcagaaacattagctgataatgatgaatccaatagcctagcgtttaaccgatacatttaaagcagcatatgacatatttttcataac

SEQ ID NO: 504270 - DNA, 201 bp, Homo sapiens
accaaggaggcatttatctgaataattcaggcagaaacaatttatacttgaagtagcaagaagttttagacaaaggagaatttttgcttggattaaccctmgacctggttcagcttcagactaaaataatgatgatacccgtggtgctgtaactttgattcagccagtgtactgaatagtcggccctgtgctttgggaccc

SEQ ID NO: 504271 - DNA, 201 bp, Homo sapiens
agctaggggcagcccaattaggcggcctcggaatggaggcacttaaggtagaaatgcaaatacacgagacagggtcagctgtagagttgaggggagtgggkgtcaggatctgagtccttgactgcacttcccttcagggatggcagagcactagctgatgtggggagggcagcttcccccatgagcctgccagataatgac

SEQ ID NO: 504272 - DNA, 201 bp, Homo sapiens
gatgcaggagaatcacttgaacccgagaggcagaggttgtggtgagtggagattatgccattgcactccagcctgggcaacaagaatgaaactccatctcaaaaaaaaaaaaaaaaaagacacaaagagatcaaatacgggactttgcatttcagccaataataaaatatgtgcaataatttgctttgtttcaatcttctc

SEQ ID NO: 504273 - DNA, 201 bp, Homo sapiens
gcactaataagcactattgaggtagcgattgagctacttaactgttttcgaatttcatatttttctatattaagaataagaacaatttaagattttcccartttaagaatgagtcctggacaattatttctttaggttcttcatctgctaaccctatcatagaaataaattcagatatgctgttgtcattagaaacacgct

SEQ ID NO: 504274 - DNA, 201 bp, Homo sapiens
caaggttggggggaaatcactaataaagtcacaacagaaagatgccctgttttattaaccaaatgcatctgaccatataaacaattgttgacagtcatttmttttctacctactcacattggatgtgcttgaacatctgctttctgccctttaaaataaaaggcctctcttacaacatcagtggctattagaataggtgag

SEQ ID NO: 504275 - DNA, 201 bp, Homo sapiens
ggcaaatctatagagacagaaagtagatcagtcgtcacttacactggggatggggtggtgaggaggaggagagatggagagtgactgttaatgggcattgrgtttctttttgcaattatgtgaatgttctaaaattagattgtggtgatagttgcacagctccgtggatatactaaaaatcactgaattgtgcactttaaa

SEQ ID NO: 504276 - DNA, 201 bp, Homo sapiens
aacagagtgctaaggactgaaagcttttgtccccccaaaattcatacattaacatcctaatcccaaagatgatagtataaacagtggggtttttagtaagkgattaagtcatgagggctttgaatggaattaatgcccttataaaagagcccccagaagccagatagccctttctaccatgtgaagtcactgcaagaaatc

SEQ ID NO: 504277 - DNA, 201 bp, Homo sapiens
tggaattttcataaggcaaacattctttcacttaattatgttctgtatgtctcataggctttttttttcattcttttaatgttctatttctttttaaacaktaacaatttggttatttcagacctaatagatatctacagaactctccaccccaaatcaacagaatatacatttttttcagcaccatgccacacctattcc

SEQ ID NO: 504278 - DNA, 201 bp, Homo sapiens
atgtctttgtctggcttttgtattaggataatgctggcctcctaaaacgagttagatcacataccctctgcctctattttctggaacagattttagagaattttttttttttttgagatggagttttgctcttgttgtccaggatggagtgcaatggcgcaatctcggctcaccacaacctctgtctcccgggttcaagat

SEQ ID NO: 504279 - DNA, 201 bp, Homo sapiens
tttatatcatttcttccttaaatgtttggtaggattcaccagtgaacccatttgagcttggtgctttttgtttgggaagattaattatagattccgtttctttaatagatatagccctgtttaaattatctatttcttcttgtgtgaattttggcagacatgtctttcaaggaattgatctggtttatctaggtggtccaa

SEQ ID NO: 504280 - DNA, 201 bp, Homo sapiens
ggaattttcataaggcaaacattctttcacttaattatgttctgtatgtctcataggctttttttttcattcttttaatgttctatttctttttaaacagwaacaatttggttatttcagacctaatagatatctacagaactctccaccccaaatcaacagaatatacatttttttcagcaccatgccacacctattcca

SEQ ID NO: 504281 - DNA, 201 bp, Homo sapiens
gacagaccccagtgtgtgatgttctcctccctgggtccctgtgttctcattgttcaactcccacttaggagtgagaacatgcagtgtttggttttctgttctgtgttagtttgctgaggatgatggcctccagcttcatccacatctctacaaaggacatgaactcactcttttttatggctgcatagtattccatggtgt

SEQ ID NO: 504282 - DNA, 201 bp, Homo sapiens
tgattattgaatagtttgaggagccttctttaggttaaatcaacttgttgttctataattttcctgtacttgaatattgatatctttctctaggtttggamgttctttgatattatccctttgaataaactttttaaccctatctctctgtctacctccactttacaggtaataagtctcagatttgctcctttgaggatt

SEQ ID NO: 504283 - DNA, 201 bp, Homo sapiens
atagtactcatgcccttgcataatcctctcctcttgagtgtgagtagcatctgggatttgcttctaactaatagaatatgacaaagatgacatgtccatcmcacgatttattatattatatggcaaaagtgctaggatgttattcccatgattattttacattacacaagactaggaggagcctgcacatctagcagaaga

SEQ ID NO: 504284 - DNA, 201 bp, Homo sapiens
caaatgagagtgctttaagtatagaatgcacactagatttggaaaacttggtacaaaaaagaagataaaatatcatacataattattctatattgattatmtatcttaaaagtcttttggatatattgggttaaatagaatatattattaaaattaattttacctgtttctttaaatttattaatgtggctactagacaat

SEQ ID NO: 504285 - DNA, 201 bp, Homo sapiens
ctcacacttagagtatgcgaatcagaagggtggttcacagctgaaggactctaaacaaaagcccacatgtcagagacagcttctaaaagcttttagcatcyactccctgatcaacaccaagaagtgtttacttagtatattgagtatcagaaacgatgttatcttggtcagatgaatggatctcaagttaaatgaattgac

SEQ ID NO: 504286 - DNA, 201 bp, Homo sapiens
gcctgagctagaatagcatgaagaatgtggaactagagagacttatcagacggacatcaaatcatgagaacatggtcattaattggataagacagcaattkaaagaaaaatcccaaagataatactcagattttgagcctaggtgacaagtgaaattgcagtaatgctgcagaaagagggaaataatgattagaaagtaca

SEQ ID NO: 504287 - DNA, 201 bp, Homo sapiens
tgggggcttatgaaagcctgagctagaatagcatgaagaatgtggaactagagagacttatcagacggacatcaaatcatgagaacatggtcattaattgrataagacagcaattgaaagaaaaatcccaaagataatactcagattttgagcctaggtgacaagtgaaattgcagtaatgctgcagaaagagggaaataa

SEQ ID NO: 504288 - DNA, 201 bp, Homo sapiens
tcagggaagatttagagtcagaacagtcctgcagataggtgggggcttatgaaagcctgagctagaatagcatgaagaatgtggaactagagagacttatyagacggacatcaaatcatgagaacatggtcattaattggataagacagcaattgaaagaaaaatcccaaagataatactcagattttgagcctaggtgac

SEQ ID NO: 504289 - DNA, 201 bp, Homo sapiens
gaggaatttaggcaatccactgtatattttatctacataacgtcatatgttcatcttttggaaacatctgcgttacagatagcaactgacagctcttacayggatgcctggtcttatataaatccaatattatggttatctatcttttgtccacagcatctatgggttttaacaatttaaagcatgtgaacatttaaagct

SEQ ID NO: 504290 - DNA, 201 bp, Homo sapiens
cttctttcacttagcacatatttttaaggttcacccatgtagcatgtatcagaacttccttttttatggctgaataatattctatcatacatttactcttmatatctctgcctgttacagatatatgtataatatttagcaaaattttctgaactaaaatttaaatttagttagccttcaccttcccactgataaattctg

SEQ ID NO: 504291 - DNA, 201 bp, Homo sapiens
cagatttcagcttagctgtctcttctgaaatttaaccatttttctcccaccctttccgggttagttgaagatacggatgatatattgtgagatgctttcaytgcacactgtgctttttccttggcaacatttaacacaactgtaattttttaaagtcatattattcaccaaggctgaccccatttcctaacataaagggaa

SEQ ID NO: 504292 - DNA, 201 bp, Homo sapiens
taaatattaaatgaatgagtcaatgtatgaacaaatggactcagtaagatgattagggtttccaatggcagagatcggggagaaggttcttccttttctcytctctatctccatttatataaatgacagctcttcacatcagctgaaaagcttgggcatattccttgtattccctgactcttccctgattgtccacaccca

SEQ ID NO: 504293 - DNA, 201 bp, Homo sapiens
accacatgattatctcaatagatgcagaaaaggcctttgacaacattcaaaaaccttcatgctaaaaactctcaataaattaggtattgatgggacctatstcaaaataataagagctatctatgacaaacccacagccaatatcatactgaatggataaattcataaattctttatcctgcttgatctagtctattgtgg

SEQ ID NO: 504294 - DNA, 201 bp, Homo sapiens
ggttcaacaataaattcaaatatgaagaacaggaactcttaaatataaagattagaaagaaaggtactctcatgtcaaaatctcagttgttttatttggtaaaaaaaaaatagttgtttaatttggtaacaaattatttaggtcattgtttattcagacagtcttctattagcttctcacaaacaaatagaagaaggtgat

SEQ ID NO: 504295 - DNA, 201 bp, Homo sapiens
aaatctaactttgttggtgtctactgaaagcagtagaaattattgaatttttaatttctggaaagcttaggggaccacatagagagcactcttttctgagygctccgtcagtttcttcccagaagacagacttattgacatttttattattgatttatttgatatacatgcctttcatctccatatttttcttctctttct

SEQ ID NO: 504296 - DNA, 201 bp, Homo sapiens
agatcaccctagcctcattttagagaacttagagtttctatcctcattttggggatgaataattgaggcccaaagaggcaatgtgaccgccggcggctttytcctcctctgccctgcacccttagcattaagactccatcactgagactctgtcacacaaaaaaataaaagcagtgggaatgatttcctcaagttcccagg

SEQ ID NO: 504297 - DNA, 201 bp, Homo sapiens
gggtgtagtaggggttgtgcagttgagatttcctcgggaggggtgccttcgatgtcattaacatcggagcatgggctagcaggcctgtccaggggtctatrgtagctcttagtcatggactgcatctggagctccatttgaagaacgatttgtagttttacagctttgactctgaaagagacaaacttaacaaggaggtta

SEQ ID NO: 504298 - DNA, 201 bp, Homo sapiens
atgtcatatagctattatacacaatgttatactaaaaaactgtgtgtgtgtgtgtgtgtgtgtgtgtatgtgttactgagagcatttcctagtcctctccyactcactccctcaggctgtactagatgccctgacacctgagcacactataatcattgagtttctattctatctactggaaggaaagcttcttgcaggata

SEQ ID NO: 504299 - DNA, 201 bp, Homo sapiens
tcaatatctctgtacatcggtcatggtggagagaacatgggcctggttgtgtcagaagagtgctgcctccctcagcccatggcatgatggacgattacacrtacgtctctgtcacaggctgcatcgttgacttccagtacctggaggtcatccacagtgctgtccaaatactactctctgtaagtgtcacttttgtgtcat

SEQ ID NO: 504300 - DNA, 201 bp, Homo sapiens
gttaatagtaatcaaaggattatctccccattgaataactataacccaatagtttaggcatataatacatgcagccacttggggctttgtcttttgttacytttcacttgaaattgaaatcactgtagcaatttcatctaccctgaattcttcctaaggtcaaagtcaaagacgtgatgtaatacaatttcctcattttgc

SEQ ID NO: 504301 - DNA, 201 bp, Homo sapiens
ctcatgatcctaatttaatcacatctgctcagtcctttattgccttataaggtaaaattcacaggttccaaggattagaagctaagtatcattggtggagrcaattattcagcctgctataaattagcttgatcattaaagtgcctacatgaacattcaagaatataatatgtgaaattcacttagaacaacatctaccat

SEQ ID NO: 504302 - DNA, 201 bp, Homo sapiens
attgaagaaaatcgaaaactgcatagtaaccctgcctacttatatgcactgggaatgttactacccttgtgattcacttaccatatacagcagtgtaaaargagggtttccctactgtccttttcagagagctccaccctgattactttcagtgccacccatgtgtaagttcaaggctttccatttcccactagcttcctc

SEQ ID NO: 504303 - DNA, 201 bp, Homo sapiens
tgtgtgcaggtaaattgccttgcgttaaactgaatttggtagctgaagcaattatttctctataatattttcccttcaaagagtaactgcaaatgatacargtagcaaaccaacaaccaaaaaaatgacctaaacgttttattatcaataaagtgctacaactgtgaaggtaactgaatagaaaaccaacaatcaaaagga

SEQ ID NO: 504304 - DNA, 201 bp, Homo sapiens
atgccctctccaggatgacaaaggtctaaagtaatctcaggtagttaactttagtttttactggtagagaaggaaggagggacatcattgtaaatttatgycttgcttttaggcaaataggaaaaagacagagagatctgtatatatctgcttcttctcagttgccttcagctcaaaaaatcctcatgccaaagtggaaca

SEQ ID NO: 504305 - DNA, 201 bp, Homo sapiens
ttttattaacatgtatatcttatatatatatatataggtgatactcaggactaaaagactaattcttaaataggtggcttagaattcaggcttaaataacrtcttcaactgaaaacaaagaaagaagagtgtggggcaggctagttataggaaacttatgacagataaaaactagttagtaaagttcattatgtagatttc

SEQ ID NO: 504306 - DNA, 201 bp, Homo sapiens
gaccttcttatcaccagagttgaagagtcgaggctgagagaaatctccaccaacaacctgtattaaactaacccttatcttcctagccacttctctgtaawcaactacctcagcccaagcccccttgctttgttacattttcacaatttaccactctttttccaaataagtatataagttgtcaactctaattgcagcttt

SEQ ID NO: 504307 - DNA, 201 bp, Homo sapiens
ggaggtttgagatttcatttttttttttgcccatagaatgcatctcattaagaatatataatcaaaatgccatattataaagtcactttaaatgctttctrtatgtgtgtatagtaccagacggatatgcaattgggtacacttgggttttatttttaatttaaaaaatgttttaataatttagattttttaagaatattg

SEQ ID NO: 504308 - DNA, 201 bp, Homo sapiens
ctatttacagtagctaggctaagggctgagtttgacaccctctcaaagtctcttttagagtcagtcctgcctcccagatctcaggcagattttttccaccrtaagtttataccaagccttgagcgtccctgatggttctcttttacccaagggtaaaatcagcctaatgcccaaaagaccatgctgctaatgtcaaggtgt

SEQ ID NO: 504309 - DNA, 201 bp, Homo sapiens
gacacaaaatacaatcaggtgtgtctgcacattggttcacctaaatagtcttacactcaacaaagtaatagaacaggcaatgttttttattacattgaggwctttcatagaatcaaagatttgtattgtaagaaaagcttatggaaacaaatctgttggtgtaatttttttttttcatttaaagagatgggaaaccatgaa

SEQ ID NO: 504310 - DNA, 201 bp, Homo sapiens
gtaatagaacaggcaatgttttttattacattgaggactttcatagaatcaaagatttgtattgtaagaaaagcttatggaaacaaatctgttggtgtaatttttttttttcatttaaagagatgggaaaccatgaatgaaaaaaataaactgatttgccaagactggtttaaagtaatctagtggccttcaggacttgac

SEQ ID NO: 504311 - DNA, 201 bp, Homo sapiens
ttagtataatactagctgtgagtctgtattatatggcttttcttaacgttgacgtatgtttcttctttacccaatttttagaggattcttatcatggaagsgtgtagaattttatcaaatgatttctcagcatcagttgaaatgatcacatggtttttatccttcattctgttaatatgatgtattgcattgtttggtttg

SEQ ID NO: 504312 - DNA, 201 bp, Homo sapiens
caggtaagtgaaaattaaactcctcaaggatatataaagagtgcaaattctactatttcaattctcctttgattcaagtttaaaattcaggcaacagcttmctaggcaaactgagatgctttttttcctcttaacgatgagactatgattagaacaccagccaaactgtgcttcttaagtctcactcactgggtctgtggt

SEQ ID NO: 504313 - DNA, 201 bp, Homo sapiens
gtttcttcctgtttgttgtggtctctgttccccatttttgtggctttactcaaacgtctaacaattcttagttgtaggctcatatgtaaaagttgggatargaattgctcaaaagctcttaatacgtgctgtgagtcttattgccagtctccttcatagtaagatgacagatttggcttgactctccagctggtcagatat

SEQ ID NO: 504314 - DNA, 201 bp, Homo sapiens
tttcaagtactttgtatgtttcttcctgtttgttgtggtctctgttccccatttttgtggctttactcaaacgtctaacaattcttagttgtaggctcatrtgtaaaagttgggataggaattgctcaaaagctcttaatacgtgctgtgagtcttattgccagtctccttcatagtaagatgacagatttggcttgactc

SEQ ID NO: 504315 - DNA, 201 bp, Homo sapiens
gtcatatgtgggagccaaaataatggatcatatcaaagtggattcagaatcttgaccagacaaagaaagagagaggacgtctccctcaattccagtagaamctcctctatgttacaactctagaatgaggctttttctccccaatcttctgtcgttgcttcccttacctggactgccctgatcatatcttacctggattct

SEQ ID NO: 504316 - DNA, 201 bp, Homo sapiens
gaagactccttcaccttactgagtgtctttaagttcggctccgttcttgacccaccccacccatctgaattagcttgcttcagaagagccagtgggactgygcactaatcacagggtgtttcccagggtctcaggcaccagtcccggagtttttcccagcagggctgtgcaccaatcatagcgcctcacccagaaatgcca

SEQ ID NO: 504317 - DNA, 201 bp, Homo sapiens
aggtgatggaaagtagcaagagtagggcaaccatatttaaaccacccacaccagtggtatgccagacacctgtggaaattccatgctgggctttgagggcyggggactctaagattccagtgtgggctgggaaggaagaacacctgaaccagcagctattgttcccctctcttgctcactgacagctgcaaggtacacttt

SEQ ID NO: 504318 - DNA, 201 bp, Homo sapiens
cactataaaaaataatttccaggttctagtggaaggattaaatcagtcttttgtttgttggtgtgttggcagggaggggacttatttatgaaaagctctcratgttactttgttgtgaagttatgcagccagggctaactactggggtagagaataatgtccacccttcttagcaaacacacacaaatgcctgcaatctga

SEQ ID NO: 504319 - DNA, 201 bp, Homo sapiens
ttttagtagagagtaaattatttttttgaatttagaacttagattttaactatgaaaggaaaattcaagaccagtgctgacgccttctcactttctgcccrgagttctttccattacaccatgcatgttgtcttcctaaatgatacgtttcgtaagaacatgcttattcaagattccacactgcgcaatcatctatgataa

SEQ ID NO: 504320 - DNA, 201 bp, Homo sapiens
tttttcatcatcctaaacagtatctctgtacccattcaacaacaacttttcaacttttcatcctcccctccctccagcctctagtaacctccattctaccttttttttttggagacaaagtctcattcttgtcccccaggctggagtgtgatggtgcgatcttagctcactgcaacctccgcctctccggttcaaacaatt

SEQ ID NO: 504321 - DNA, 201 bp, Homo sapiens
ctcactctgtcacccaggctagagtgcagtggcgcgatctcggctcactgcatgctctgcctcccgggttcatgccattctcctgcctcagcctcccgagyagctgggactgcaggtgcccgccaccatgcctggctaattttgtttttgtatttttagtagagatggggtttcaccatgttagccaggatgatctcaatc

SEQ ID NO: 504322 - DNA, 201 bp, Homo sapiens
aggtgggaggatctcttgggcctaggagattaaggctgcagtgagctgtgatgatgccactgcagtccagcctggacaacaaagcaggaccctgtctcttaaaaaaaaaatgcagactaaagtaagaaaaataacttattttttccaaatgtgagaaaatcaacacaaaaaagtttttatctgttaggggagggctggaat

SEQ ID NO: 504323 - DNA, 201 bp, Homo sapiens
gttaaaaaccttctccatagcaaatgaaacaatcaacaaggtgaagagatgatgtacagaatgggagaaaacatttgcaaattacccctctgtcaagggattactaactagaatatataaggagctcaagcaactctataggaaaaactccaattatccagttagaaaatgggcaaaagatctgaatagatatttcttaaa

SEQ ID NO: 504324 - DNA, 201 bp, Homo sapiens
tttgggtgccaaaatccaaatgcattccaaaatgcagtagtacctttctttccagaattttgttaacaataaagttcttaataaataggctaaaaaagatmgatatacatagagagaaagagagacgttagtcactcactagattaaaactagaatattcatatttaaatattgagtgataatacaaagtactggcacaat

SEQ ID NO: 504325 - DNA, 201 bp, Homo sapiens
tatgcccagttcatcctcgattcaagacaactctaccttccaaatgtatcatgaagcagaccattaccaccattcctgtctaagccatcctcattactcayctgttgcattagcctccagcttccatgctcgccaccccgctggtgctttcctcaccacatccacagtgatctttctaaaaaataaatcagatcaggccat

SEQ ID NO: 504326 - DNA, 201 bp, Homo sapiens
ccagtccactaaatactaaaacacactgagaaaccatctcttcaagccatcctctaagtccacatacctcagccaaaggagatgtctgggagacagaatgwgagcagctgccaagctgcaactcgaacccattcagccagcccagctggggaccatcccttgggtcccttcaggcatcaggagacttctcctgcttttgta

SEQ ID NO: 504327 - DNA, 201 bp, Homo sapiens
agacgaagacccagaaaacttcattgtataagaagttcttaatgcatcaggagaatatgataccaaaactgttagtgaaatgattaaaggtaggacagacwgtacaccactaaaggcaaaaggtgataggttgttcttgattcacaaagaaaagaaatcaagtcaaaggtagttagatatgaaagattcagggtcttaacc

SEQ ID NO: 504328 - DNA, 201 bp, Homo sapiens
gatatacatagagagaaagagagacgttagtcactcactagattaaaactagaatattcatatttaaatattgagtgataatacaaagtactggcacaatrtagggaaaataatggattagcccactaaaatttaagtggatatgaggaggcacatgtaaaagaacacactcaataatcttctctcaaatcaactgtctca

SEQ ID NO: 504329 - DNA, 201 bp, Homo sapiens
ggagaagaatttaaccttacctagagctgaaatgaatttagagagctgagtgaaatataaaagtagaagcagcagctggaagagccctgtaaggactcctsgcccccaaggaagaccagggaagctatttattactttatttcacaggggaccttggggagggctgccagcggaattggggaaaaactacgaggagaaaga

SEQ ID NO: 504330 - DNA, 201 bp, Homo sapiens
aaagaggtgggaaaagatattccatgtaaatggacaccaaaagagagctggagtagctatttttatatcagacaaaacaaacttcaaagcaacaacagttaaaaaaaaaaaagacaaaaagggacattatattatgataaaaggactagtccaacaggaaaatattacaatcctaaatatatatgcatctaacacttgagc

SEQ ID NO: 504331 - DNA, 201 bp, Homo sapiens
caatcatggcagaaggcaccttttcacagggtggcgggagagagaatgagtgccaagagaagggggaagtccctgataaaaccacaagatctcacgggaaytcactcactatcatgagaatggcatgggggaaaccacccccatgattcaattatctctacctggtcccacctttgacacatggggattattacaattcaa

SEQ ID NO: 504332 - DNA, 201 bp, Homo sapiens
ttctggtccttcttccctaatgtcgtgggctgggtccttcctcctatccccactccctctctgcaaaacttgaaggaaagtagcattcaactccagctaaytccctggttttatcttcccttttcttacggagctgtccttgcttccagtttccttgactcttctcaaatgagcctcacttgtttctaatcattaaaacca

SEQ ID NO: 504333 - DNA, 201 bp, Homo sapiens
caaaatacaatcaggtgtgtctgcacattggttcacctaaatagtcttacactcaacaaagtaatagaacaggcaatgttttttattacattgaggacttwcatagaatcaaagatttgtattgtaagaaaagcttatggaaacaaatctgttggtgtaatttttttttttcatttaaagagatgggaaaccatgaatgaa

SEQ ID NO: 504334 - DNA, 201 bp, Homo sapiens
aagaaaattaggtatattcgcaccagggaatactacccagccacaaaaaagaatgaaataatgtcttctgcagcaacttggatggaacttgagaccattaytcaaagtaattcgggagtgaaaaaccaaatatcatgtgttctcacttataagtgggagctaagctatgggtacacaaagggatacagagtggtatagtgg

SEQ ID NO: 504335 - DNA, 201 bp, Homo sapiens
taaaaactaggcttgcttttttttttcctttctaacagtagtgaagagcccaattacacctggtgttatattagtagagacgaagacccagaaaacttcaytgtataagaagttcttaatgcatcaggagaatatgataccaaaactgttagtgaaatgattaaaggtaggacagacagtacaccactaaaggcaaaaggt

SEQ ID NO: 504336 - DNA, 201 bp, Homo sapiens
atattcgcaccagggaatactacccagccacaaaaaagaatgaaataatgtcttctgcagcaacttggatggaacttgagaccattattcaaagtaattcrggagtgaaaaaccaaatatcatgtgttctcacttataagtgggagctaagctatgggtacacaaagggatacagagtggtatagtggatattggagactc

SEQ ID NO: 504337 - DNA, 201 bp, Homo sapiens
aaaaggaagaaatatcaccctccctctgtgaatacatgtgattgttctcactgtctcccttgaaagctttattctcggaagtacacgctactatgctacgrcagatgtacaatctgggaagttttccaaattcgtcactggaaagcatggagtattcagcattagcgcctccgtggaagtttctgtctctgcctcagtcag

SEQ ID NO: 504338 - DNA, 201 bp, Homo sapiens
attccataatttcagtgacaaataattcagttcctcataagagagtgcattccttcaagaatcattagacttcttagaaagttcattcttatattgagtargcatctgtttccattatgggtaacagaagctgacgggaataatattggccttggatctaaacagccagagatggttcagatagtctctagaagcttcagt

SEQ ID NO: 504339 - DNA, 201 bp, Homo sapiens
tctcccagcgttgtgtccaagtttgggagtgtcctgaggagccaagttgcctgagtggggattgtccctttcatccttgagtaatctgatgctatctttgrctgtgtctgcctagataatccttccagacaatgttttgctgggtccttctatctactcaggattttacctgaaaacagatgtgttctcttgtattcccaa

SEQ ID NO: 504340 - DNA, 201 bp, Homo sapiens
taattacataaggcaacataagcataaagtttcctatgataataatgattatgaaaaggaagaggaagagcacatcagtttttactgagtgcattttacayaaattttctaattattaaccaatttaaagtgcaaactccatcacatgatcacatttgaattgttcaggacacaaattaaacttttctcattagaggaata

SEQ ID NO: 504341 - DNA, 201 bp, Homo sapiens
ctccccaacaggccctggtgtgtgatgttcccctccctgtgcccatatgttctcattgttcaactcccacttaagagtaagaatatgcagtgtttgttttytgttcctgtgttagtttgctgagaatgatggtttccagcttcatccatgtccctgcaaaggacattaactcattttttatggctgcatagtattccatgg

SEQ ID NO: 504342 - DNA, 201 bp, Homo sapiens
ataaagactcagatccaaatttctcatcttggtatataaactcatccattatctgacccaacataggttatcagccttgtctcttacacacaacgtgtttytttcttgctcttatctaaacattgcccctgctctttcatgcttatatgatttgggagctcttcatgtataatggttatatcatcttgaatgctagatata

SEQ ID NO: 504343 - DNA, 201 bp, Homo sapiens
ccaatagtaatctcctaatggcttcctgatgtttgacaggtgttccctcggaagttaggaattccctttctctccatattgctgcatgggcatggaggackatgtaagcatacttagagtctgtatatatatttacccttttctctacccctaattctagtgcccaagtgagggctattagttctgccagctgagcactag

SEQ ID NO: 504344 - DNA, 201 bp, Homo sapiens
tttaccatgagatctagcaatcgagctccttggtatttacccaaagaagctaaaaagttttgttcacacaaaaacttacacaccgatatttatagcagccttttttttttttaagacggagtcttgctctttcacccagtggggagtgcagtggcactatctcggctcactgcaagctccgcctcctgagttcacgccatt

SEQ ID NO: 504345 - DNA, 201 bp, Homo sapiens
gatgagaaataatgtatagttcttctgtaatgagcacatctaactgtaagaaattaaatctgatgaccaaaaaagggagcaatcagtgtgcatctctgatrtttgtgtgcaggtaaattgccttgcgttaaactgaatttggtagctgaagcaattatttctctataatattttcccttcaaagagtaactgcaaatgata

SEQ ID NO: 504346 - DNA, 201 bp, Homo sapiens
aattgaagaaaatcgaaaactgcatagtaaccctgcctacttatatgcactgggaatgttactacccttgtgattcacttaccatatacagcagtgtaaarggagggtttccctactgtccttttcagagagctccaccctgattactttcagtgccacccatgtgtaagttcaaggctttccatttcccactagcttcct

SEQ ID NO: 504347 - DNA, 201 bp, Homo sapiens
ccattctcctgcctcagcctcctgagtagctgggactataggcgcccgccaccacgcctggctaatttttttgtatttttagtagagacggggtttcaccrtgttagccaggttggtctcgatctcctgaccttgtgatccgcccccttcggcctcccaaagtgttgggattacaggcgtgagccaccgcgcccggcctat

SEQ ID NO: 504348 - DNA, 201 bp, Homo sapiens
actactactagctgatgaggttcttcttcaattgttttggaagcaaaagattgaaagccagctacctttttattagtagctattactttattaacatcagsatacaaaattaaaactatcactttgtttggtgacccgcaggcttgttctgccaggatgatgcaccaagttaaggttccagatggctgagataaatgcctg

SEQ ID NO: 504349 - DNA, 201 bp, Homo sapiens
cagttaatactttccagtcctcttacaacagtggaaagataatttagtagagggtggtatacacttagtttcaggtcaagattcttccatcgggacaggatttttttttttttcaagggaaattggtctcctgttggatttccaggctcaactccatcaaattaactctacatattgatatgtgaaaacaatgtatcagca

SEQ ID NO: 504350 - DNA, 201 bp, Homo sapiens
agagagagagagtgagaaagctgatactgtggccagtttctcacacataacaccctggggccttctcagagctgggcctacagcatcatcagcctaatttygactcttgtgcaaggcagtggaattaggtgtcatgcactccatctgctgattcagccatacatatcacagcatctgccacatttcactaggtaggacttt

SEQ ID NO: 504351 - DNA, 201 bp, Homo sapiens
attgaagtgcttatagtaagtatttttagactggactagattcatagacaattttgtcctctaggaactgcagtgtctttggctccatggaataaaaatcrtcctcttagcatcataaatgcagaggttaaattctactcctgcatttattctctgaattactagtatccaaagtacaaatcatctcttctgttttatttt

SEQ ID NO: 504352 - DNA, 201 bp, Homo sapiens
gcatgtatctttaagtggaactctcctatggtatggaaaagcaggcattgtcagtcactgctgtgataggatagatgatacaaactttccaaaaaccaataatgtgtaaaaaatagtcataaaaatattcaatggcacttctgaaataataattttacctctgggaatcagatcatcaaaaattcaggaaaagcattaata

SEQ ID NO: 504353 - DNA, 201 bp, Homo sapiens
gatgagaatattttgaatgtttctaccgtaaagaaaagacaaatatttaagtgatgtatatcccaagtacactgatttgatctttgcaaattataggcatktattaaattatcacatgtgcccccaaaactatgtacatctattatgcctcaatttttaaaggtactttaaatattcttacgcagattaagcagatttctg

SEQ ID NO: 504354 - DNA, 201 bp, Homo sapiens
ctttcctttttccttccttcctttcttccttccttccttcttctttcccttcctctccccatcctctttcctttactcacttctttcttttctaactttcyttctcccttttttcttctacttattaattcaagagatatttattgagcttctaccctgtgtttggccttgtgttaggtgtggactatactggtgagcaaa

SEQ ID NO: 504355 - DNA, 201 bp, Homo sapiens
ttctcctgcctcagcctcccgagtagctgggactgcaggtgcccgccaccatgcctggctaattttgtttttgtatttttagtagagatggggtttcaccrtgttagccaggatgatctcaatctccttacctcatgatcctcccaccttggcctcccaaagtgctgggattacaggcgtaagccaccacactgaaacttc

SEQ ID NO: 504356 - DNA, 201 bp, Homo sapiens
gttgaacttaagatcttcaaaatcctttccatggtttattcatgcttgtcctatcctttggtgttgttataggaagatatttaaacttgcttgggtgttaytaacattcctggagttatgattagtcttgaactgtagcctgtagtggaattccacagaagggtaaagtcatagtatcttatgttattcaaacttatctac

SEQ ID NO: 504357 - DNA, 201 bp, Homo sapiens
ctcagaatgcgcagtgcggcatctgtccactgggggcgtctttttcctcgaattgcgctagggctccccagcggctaacagtagccacctgcgcttgtgtkcgcgttatgtatcgtttccatccttcgtggcttgatttagttctttatactctcgtcctcatatctggattatagatcgttcccacagtgtcttcacact

SEQ ID NO: 504358 - DNA, 201 bp, Homo sapiens
agaaggcagaggttgaagtgagccgagatcacgccactgcactccaggctgggcgacagagcaagactctctctgtctcaaaataattaattaattaattmattcattcattagaactcctgtgcttgtataagttctgtaaccatacacacagtaaatatatgtgtgtgagaagacacattttatgcattccaactataa

SEQ ID NO: 504359 - DNA, 201 bp, Homo sapiens
cagactatttattcttgtttctctttaatgttctaagagactcttggtcaaatttcccttctatcagtctgaagccctttcatagcttactgcttatttargccttatgtaagacaagttgtaacttttgagtaaaagagatttaccataaaaaaaaaaaggagcatacatttcagagccccttactgtacatgccccttc

SEQ ID NO: 504360 - DNA, 201 bp, Homo sapiens
atgcagaatgtcaagctctaccccaaaactgagtcagaatctccattttaacaagaactccaggaaattcacatgcacatacacataataggtttaagaarcattaaagtaaaacatctcaatcttattatctcctaagcagactatttattcttgtttctctttaatgttctaagagactcttggtcaaatttcccttct

SEQ ID NO: 504361 - DNA, 201 bp, Homo sapiens
gtaagaaagggtattgggagcaagtgccctgtgctgcccaaagcagagagtgatttgatgagtggaagaagagatgaagttgaaaatgtcagatatgaagrctttggatatcatattgagtttaggctttctttaaacagtggttcttgagaaggagagtggcatgatctggcctgttatttaaaatacagcttaaggaat

SEQ ID NO: 504362 - DNA, 201 bp, Homo sapiens
actcaacacaagcaatttgagtaagctagagctccaaaatttagagtcaatagagaaacatacattattcagttttttgaaagcagatttgaagcacgtaygccatccttccaggctgattatcttcacttcttgggtcagcactcatgccatgacctggcctttcctgctgttttctctctttccacccttcacaatcga

SEQ ID NO: 504363 - DNA, 201 bp, Homo sapiens
tattcatagtcactctttctgtcaattcagatgtgacaaaaagaaacttataaatgcagctgttggggattggtagagtttataagagtctgtataagggrtaaacagaggagcttaaggctatgatgaccatccagctgtttgcagactcttggagtgggtgtggaggagaccaagatggacctgagctgaaggaggtcc

SEQ ID NO: 504364 - DNA, 201 bp, Homo sapiens
gcaacctgatagttcaaaaataaaggaatatacaagtgtcctgaaaggaacaaggaggatgcaattaattttgtttggatcttgggagcaggatggcatcraagcagggtctacagaggaagagactttgcaccaagtctggaatatgtgtggttggctcatgatgaaaaagggtccatcagccctactgttccactgtga

SEQ ID NO: 504365 - DNA, 201 bp, Homo sapiens
agattgaaagaaaaaagcatatttcaaaaatggatcatcagtgtcaaatgtttctttcaaatccaataaaataaaaactgtaatgtctattgtggattccygtgattctagtaaggtactttgattttcctgtgggaaaccatgccttgcctattcttggtttatttggtttgggttgagtgaattccacccagtaattcc

SEQ ID NO: 504366 - DNA, 201 bp, Homo sapiens
gtcagtcagtaagctctggaagaggctgagacagagggtggtgttgggagatggagcaatggcatccggagctggaattttgtaagttatgcagtgatgtragcctcaatggattctcttcagccaggaattagagcaagcagttgatgatctgaaacaattttggataatgtgtaaactgggtctggtatatcctgtgaa

SEQ ID NO: 504367 - DNA, 201 bp, Homo sapiens
tgtcaaaagtatggagacaacagtgattggagatggggatctgtatgagtcagggttctccagagaaacagaaccagtagagaaagagagagagagagagwgtgtgtgtgtgtgtgtgtgtgtgtgtgtgtgtgtgcttccccacacatgcgtgcatctgggggctggcagactggagacccaaggaagagatgcagctca

SEQ ID NO: 504368 - DNA, 201 bp, Homo sapiens
ttactttcaaaatttttttttttttttttttttttttttttttttttgagacggagtctccctctgtcgcccaggctggagtgcagtggcgtgatctcagytcactgcaagctccgcctcccaggttcacaccattctcctgcctcagcctcctgagtggctggaactacaggcacccgccaccatgtccggctaattttt

SEQ ID NO: 504369 - DNA, 201 bp, Homo sapiens
ttttgctcactttgtgtaacgaccacagtgaagctccctataggccagaaagttgtgaatatgtggttattaactcagcccatgcatctctaagaagtccrtctattaaccacctaaaactgttacaaatatttgtatgtgtgtgaaagtcttttttcttcttgttcttctttcggagcctataggtttcatgagactctg

SEQ ID NO: 504370 - DNA, 201 bp, Homo sapiens
ctctaagaagtccgtctattaaccacctaaaactgttacaaatatttgtatgtgtgtgaaagtcttttttcttcttgttcttctttcggagcctataggtktcatgagactctgttaagaatcagagtttaatgtgacaaagtttgccttcattcctccaagctcatcacaaccacagtgagccatttggagacctaattt

SEQ ID NO: 504371 - DNA, 201 bp, Homo sapiens
agctcaaacatttaatgtttacttaaatatattttagggaaaaggtagataccatggaatacatttcttttaagtcataactctgtgaatatataaggtayacctcacacatggttatcaggtgctttttctttttctccttgtccacccttaaagccaccatttaatgttcttactaccttgactcctaaactttatgaa

SEQ ID NO: 504372 - DNA, 201 bp, Homo sapiens
agatttgtatatttagggcaataattttctgacagatgactaagggcaaggctttctagttctcagaaaagtgtcatttgggctcaaggtagtgtcattcrggctcaaggtagtgtcattccaaccttattcgctatagtatctaaaatcaaactctcacaccagttgtcttacattggattccatgagaaacaagctcgc

SEQ ID NO: 504373 - DNA, 201 bp, Homo sapiens
ttttatcagagagtaagattgcaacccctgccttcttttgttttccatttgcttggtagatcttcctccatccctttattttgagcctatgtgtgtctctkcacgtgagatgggtttcttgaatacagcacactgatggatcttgactctttatccaatttgccagtctgtgtcttttaattggagcacttagcccattta

SEQ ID NO: 504374 - DNA, 201 bp, Homo sapiens
tacactagtaaatactgttttggtaccctgttttcatccccttgacaaagccaatgtgacctctcatcagctcctgtagtgattggctgctgatgtctccrggggaacccttcctgcctaggaagttagctcgggctcccatccctgacagcaggccacagctgactgactgacataatagtacaaaaagttagcccccga

SEQ ID NO: 504375 - DNA, 201 bp, Homo sapiens
tccacctcggagctgacatcttagaattattttgataccatcccttgcgattctgtaagcaaagttgttaagagtctgcaaaggcataaatgcatagagcrgttgtctaaaattcttgagagaaaatagtaaatgttctgggactccatgcagatgaaaagcaaagtggcagaactacttttaaagttgttcatccattag

SEQ ID NO: 504376 - DNA, 201 bp, Homo sapiens
aacttccacctcggagctgacatcttagaattattttgataccatcccttgcgattctgtaagcaaagttgttaagagtctgcaaaggcataaatgcatasagcagttgtctaaaattcttgagagaaaatagtaaatgttctgggactccatgcagatgaaaagcaaagtggcagaactacttttaaagttgttcatcca

SEQ ID NO: 504377 - DNA, 201 bp, Homo sapiens
ctgagcaccaactttgttttgggcatttaaacatctattggggctttcatcctcagctactgctcttatcagtccaattttgtgatgcagatcatctgagrttcaaactttcccttgtttagcccacaaagcaatttttaagaaattcaaattttcaattgcttagctcacaaaacaactttcaaaaactatgttctggtt

SEQ ID NO: 504378 - DNA, 201 bp, Homo sapiens
ttaatttaaatattaattaggataactatccttaaagtaatcaagaagtaaaaaggctgcctgtacaacaaccacaaactacaacttttaaatccttcccsttttaaaatcagatacaacagtggattgaagattttttaaattaatcaagtgtatatgaagtgacagattatgtgaaagctcaaaggtcttctcttaagt

SEQ ID NO: 504379 - DNA, 201 bp, Homo sapiens
gagggaaattatgtagcaaatattacttgttggaaaggtctttaactttgcttgattaggttatctgtcacctaagtcaaatcgcagtggtctcttgatgrtctgattccagcgctaattcagagccagcaggggaggtggagccaaagagtgtaagaatagagcttgggtggctgttaacagcggaccactcttcaatgg

SEQ ID NO: 504380 - DNA, 201 bp, Homo sapiens
tttgcttagcttttggagggggaaagaatatgaagaaggcagccattcctacaagaggtgcctgtcatttctggtaacctccccacttctctgtcccttcrcatctaagagagtacagctgatgcgggcaataagggtaggagggttcagtattaacttgtagattttggactatccttcctctctctaaaacacaaacaa

SEQ ID NO: 504381 - DNA, 201 bp, Homo sapiens
cttcccttcatgtggtggcctctcagtggctatctccatttctcagatatgaccctctttcttacaggaaggtgatcccataaataagagcaaccacttayattgatttagtagattcccacatctatctccatatttctaacataacatttatatatttttaatataatctgctaatatgaaatttttgtgtcttcaaaa

SEQ ID NO: 504382 - DNA, 201 bp, Homo sapiens
acagccacccagatctgtcaaggtatcttgccatcggaagcactatgggagatctataaatgctggttacgttccattcatggtgacttggattattacaytgcttcacagagtgggaagctgaagcccacaaagatcaaagggcttgatgaagcctataaagccatcttgcacatcagctttgggaaacatcacgtaagg

SEQ ID NO: 504383 - DNA, 201 bp, Homo sapiens
catttgtgggtaaattaagagacaagtcctttacagaaggtcatttacatgtcttctttttaattaatattactgactggaagatttgcagttaaattagyccattaattataaaagttatcattctggagagtaggaaaggatcatttatttaatatcaaatccaggttttcaataaattgccatttcttctgacactct

SEQ ID NO: 504384 - DNA, 201 bp, Homo sapiens
atttaatgttatttatattctcattcaaattttaatatagtcattgtgaggaatagtaccatttataaatatgttatagttccaacaaatttaatgatacstatgctgaaaggttttatgagtgtaacaaatatgtatgattagttcataaattgactcttgttttatttgtataatataaattttagttaaagtcatact

SEQ ID NO: 504385 - DNA, 201 bp, Homo sapiens
cagttactgttccatggaaatgagcatttgcagttattgcttttgcctccagtcttatagaatgcactctgcattgtgcgtatccagtagggttttcagcaaagacatggtcactacatgcactgtatgttcttgccaaacctcagcttctccatatgcaattgtgtgtctggtcagagtaagggaaaatgaatgcatccc

SEQ ID NO: 504386 - DNA, 201 bp, Homo sapiens
tccagtagggttttcagcaaagacatggtcactacatgcactgtatgttcttgccaaacctcagcttctccatatgcaattgtgtgtctggtcagagtaarggaaaatgaatgcatcccttagcttgcattcattggtcagaatcttaactatcttaagagatggtgcagctctagattcaatagctctcctcagaagtgg

SEQ ID NO: 504387 - DNA, 201 bp, Homo sapiens
ttcaaaatctcagatttcacctcttatttgaagcctgtcttgcatggccatttggaactgacatttctgctgcaattccaaagcgcgaactccgggggctraagtccacctacgctccacttaaccccatatactcagaatgcgcagtgcggcatctgtccactgggggcgtctttttcctcgaattgcgctagggctccc

SEQ ID NO: 504388 - DNA, 201 bp, Homo sapiens
gtatggccactttcacagcattgattctacccttccatgagcatgggatgtgtttccatttgtttatgttgtctatgatttctttcagcagtgttttgtarttttcttcatagaagtccatcaaccccttagttaggtatattcctaattattttattttttgcagctattgtaaaagggttgacttcttgatttgagtct

SEQ ID NO: 504389 - DNA, 201 bp, Homo sapiens
aacaaatatgtatgattagttcataaattgactcttgttttatttgtataatataaattttagttaaagtcatactgaagtgaactcacagtctgcaatargaaaggtcgctgggtaagaatgcttaaggaatggaaatcgctatgaattttgagatcatgctagttcatctcgaacctggtgaattctattaagatgaga

SEQ ID NO: 504390 - DNA, 201 bp, Homo sapiens
catttttattgttgggaaaattctaattttgtgggtttttgcttttttttctgactctaacccattctccaataccaaatggaggtccaacaactcccttyaattctgacactacctagagctagcatagaccccacaggttaagggctcagttccacaagactacgcctacatctcattccagctacaaatggggtctcc

SEQ ID NO: 504391 - DNA, 201 bp, Homo sapiens
gagggggtgacagtggctgaagtgagaataatgagtttgaataatcagttcaaatatccaatttcaaagcagagtagatagtagatagtagtagaggtggkgcatgagacagaggtgtgtcacagacagaatctttaattctgtctctgacacatgtgctattgtctcagaaactcaaagttttcttaccagtaaaaatgc

SEQ ID NO: 504392 - DNA, 201 bp, Homo sapiens
ttatttatacagtcttggctttggggggatctaatcaatgaaatcatatagttttattgtccattcattgtctatagcatttttaatataaattaagatayactttcatagggggaaaaatgtccaatgatttagaaatagctatgctatggacaataaaatcatggttttctgtgtttgagtgtttgactaaatgttaga

SEQ ID NO: 504393 - DNA, 201 bp, Homo sapiens
aatgtacatgaatggactaattttaaaactttatgttgaaaactggcacagctctgaagtggctcagcaggcttccctcgcttggccgtctatggcaaacratactcttgccactcttggcaaacatgcattattttacatgagagtttgggaagcatagatttggaatggaaatggaaatcacattcaacttttccaaga

SEQ ID NO: 504394 - DNA, 201 bp, Homo sapiens
tggcaattcttgtattttgctttaatcattctttcccacacttttctttttcctaaaaggagaaaaacattgataaattggttttggtttcctgtgtcacrtattaaaggtgaaacctgaagatgctaaaaattgatcataaaagccaaaatttgaactgtttaataatagagattagtattagaccatagctctggtttt

SEQ ID NO: 504395 - DNA, 201 bp, Homo sapiens
tcccgcttcttctggtcaagagtctaggaaaatcctgctctcgtcacaggtggcagggctaaaaagctctatttctttgtctctgtaggtgtaggtatggkcatctaagtaagttctggccattgtgatacatgcagaaggattgtgaggaacttctggaagggctgctgtagagctaatgaattagaagctgacccaaac

SEQ ID NO: 504396 - DNA, 201 bp, Homo sapiens
tgtaggagccactttaactcaaggctctgagaacttatttatggaacccaaatattagtaactcgtaattttctaaaagaatagaaatttaaaagcatacmtttctaggattagaattggatggggaaggacaaaagttaattgaaatttagcaaacttcaaagaaaaagaaagaatatccatttgttaaattaatttaca

SEQ ID NO: 504397 - DNA, 201 bp, Homo sapiens
gggttgttaaaagacaatacatcactcctctattttctttttcagtttaaaattaagctggaaaatgacacaggaaatggataaatggaaatcagaatatsatccttatttctcataaatccagttgaagagcatggctttagataggcaattaaagtgtctttcgaatccctgcctctcaaactgagcaccctcacaact

SEQ ID NO: 504398 - DNA, 201 bp, Homo sapiens
ggaagccctcagcattgattcacttttgcctgctttctgattcaggaataacagtaggacaggaaaaatacagtacacagctgtgtgtgtagtaattgtcrgtgtgcttgcatgttaaaatcagtatattgaaacatccagctgtctatgctcacttaaaggctagtttttgtctgaaactttcatcccactacagaaacc

SEQ ID NO: 504399 - DNA, 201 bp, Homo sapiens
aaagtgcctctacctcagttccaggcttcattgagcctgtccttagtattttttgtgaaagcactatccacatttctctctaaagattaaaactttcacakccactgctggctcacagaccagggtccagcaggtctgaggcttcattttcatttatcgtttttgtgtttctttcctgtttttgattgcatatataactca

SEQ ID NO: 504400 - DNA, 201 bp, Homo sapiens
gaatccgagtgtctgataacaagaatgagctagaatcgcctttgccctttggaagccctcagcattgattcacttttgcctgctttctgattcaggaatarcagtaggacaggaaaaatacagtacacagctgtgtgtgtagtaattgtcggtgtgcttgcatgttaaaatcagtatattgaaacatccagctgtctatgc

SEQ ID NO: 504401 - DNA, 201 bp, Homo sapiens
attacatacatataagtatcacttagacactgaattaagcacataaaagagcccaaatagaagtcacttagaaggtatagatttgtttttctctcatgtcraagaggtctggaggcaggcacaccaagctagtaaatatcagagactcaggcacttttaatctttctttgtcattattctcaggttgtagtttttatcctt

SEQ ID NO: 504402 - DNA, 201 bp, Homo sapiens
tgagatcatgctagttcatctcgaacctggtgaattctattaagatgagaaataatgtatagttcttctgtaatgagcacatctaactgtaagaaattaartctgatgaccaaaaaagggagcaatcagtgtgcatctctgatgtttgtgtgcaggtaaattgccttgcgttaaactgaatttggtagctgaagcaattat

SEQ ID NO: 504403 - DNA, 201 bp, Homo sapiens
cttggatggaacttgagaccattattcaaagtaattcgggagtgaaaaaccaaatatcatgtgttctcacttataagtgggagctaagctatgggtacacraagggatacagagtggtatagtggatattggagactcagaagggaggagggaggaaagaggataaggtgatttttaaaaaactacatattgtctcaaact

SEQ ID NO: 504404 - DNA, 201 bp, Homo sapiens
ggagacaggaaggaagaatccaaagttgaaagtcacctaattgggatttgaacagtcagtttttaactcagaattttgttcttgtttctttgattgactamaaacattgaatcattttccatgtaaggcatgtttttcctttcctcttcagagttatttagaaacagttcaaagaaaccaataatctatccatttcttctc

SEQ ID NO: 504405 - DNA, 201 bp, Homo sapiens
gagttatttagaaacagttcaaagaaaccaataatctatccatttcttctcatagaatttgctttggcagacaacttagtctatattagttaggattaggyttacctacaagtaacagaaaaagaaaaatgacaatggattaaataacatagaggtctatttctctttttatttcgaaattctggagacagtcagcaaaga

SEQ ID NO: 504406 - DNA, 201 bp, Homo sapiens
catagtcctggtaccaaaacagacatataggccaacggagcagaacagagacctcagaaataacaacacaaatctacaaccatctgatcttcgacaaactygacaaaaacaagcaatggggaaaggatctcctcctattcaggaaatggtgcttggaaaacaggctagccatatgtagaaaactgaatctggacccatccc

SEQ ID NO: 504407 - DNA, 201 bp, Homo sapiens
aattcctctaaccttttatcaaggttcttagcttcctcgtattgggttactatatgttccattcgctctgaggagttcgttattacccatcttctgaagcytacttctgtcaatttgtcaaacacattctccattcagtattgttcccttgctggtaaggagttgtgatcctttggaggagaagaggcgttctggttttgg

SEQ ID NO: 504408 - DNA, 201 bp, Homo sapiens
tcaggtgagcttacctttcaaatttttctgagacttcctaaatgtgacaagaactctgctgtgtggcaaccttatgtatccacaacagaactaaggaccgaaaaaaaaaaaaaaaagatctctatcccaatagattttataaaatccatactctaaaactcctgagttttacatgtaccctaaaacttaaagtatagtaaa

SEQ ID NO: 504409 - DNA, 201 bp, Homo sapiens
ctcccactgggtccctcctataacacatgggaattatgacagctacaattcaagatgagatttgggtggggaacacagccaaaccatatcattctgccgcwgcccctcccaaatctcatgtcctcacatttcaaaacacagtcatgccttcccaacagtcccccaaagtcttaactcattacagcattaacacaaaatccc

SEQ ID NO: 504410 - DNA, 201 bp, Homo sapiens
atgaaaaaccctccaaaaaatcaacgaattcaggagctggttttttgaaaaaaactaacaaaatagataaaccactagctagactaataaagaagagagaraagaatcaaatagacacaataaaaaatgataaagagatttcaccactgaccccaaagaaataaaaactaccatcagataatattataaacacctctacgc

SEQ ID NO: 504411 - DNA, 201 bp, Homo sapiens
tttaatctatcacataattaaaaaatagtttaattttaatttaaggaagagagtcaaagaattattcctggcagtcaggaaccttaacaaatcctggggtrcaggaagcctctgcacctgtcggcaaggtggggagttctctcaacgggtaacgtcaggtattgcttagcactttacatctactgcatcctacttttgctt

SEQ ID NO: 504412 - DNA, 201 bp, Homo sapiens
ttcttcattgcctctgagacaggtcatcaaaacatcctccaccacaacccagccagggagtaaaatccccttaacatgagagtactgtagtctccacaaarattatttaaaagaacactttattctttacattatttgacagaacatttaacatctgacctgagtcatttgcactgggattccatccccagatcagacttt

SEQ ID NO: 504413 - DNA, 201 bp, Homo sapiens
agtgaagattgtccagaagatgaggcagaactggctggtcccagtagaggccactgaatggaggcaacaaggtgacagaattaaaaaagaggaagaatccragtgtctgataacaagaatgagctagaatcgcctttgccctttggaagccctcagcattgattcacttttgcctgctttctgattcaggaataacagtag

SEQ ID NO: 504414 - DNA, 201 bp, Homo sapiens
aaatataaagcaaaaaaaacagattctacccaccgggagctcctagtccagtggtgaagaggtgtattaaccctcaaggccctaagaaaatccccaatagkgctctgcacaagccgggctctgataggaggtgccagtgcttttcttcttccagtttcagagccccagcgatcccaggatgaaggagagcccatttgcaac

SEQ ID NO: 504415 - DNA, 201 bp, Homo sapiens
ttttatctgcaggaagccactaacagaatgacagtttctgcagaaacccttgtaacaagataccctttggtatgaagttcctaacaagccagtgtctgccrcacagcagggctgcctggaatgtctgctgcggcacagaactgcccaaggaagagagtcaggaaacaggagagattccatccttccatgtcccatctgagg

SEQ ID NO: 504416 - DNA, 201 bp, Homo sapiens
ccatactctaaaactcctgagttttacatgtaccctaaaacttaaagtatagtaaaaaaaagaaaagaaagaaaaactctttaaccctttgtttaaatcckattaactcttaacgatacacagttcgaattatctaaatgaaataattttcaagcacataacagattagaaacagagaatgagaaaggtatagtagatatt

SEQ ID NO: 504417 - DNA, 201 bp, Homo sapiens
gtgtcttgcacacatatggccctggaagcatctgtgcatctgatttgtgcttcctctggttgtggttgtcactgcaactttgatattgtaccagctacctwagcataggagtcaggatccctgactcaggaaggataagtttgagaatgcaaggtagagagaattctgagaagattaaatcaaatatatgaagaaatatgt

SEQ ID NO: 504418 - DNA, 201 bp, Homo sapiens
attcaaatgcttttctgtgtttttgaagacaatttaaaactactgctgcagaatttttcatgcagtcgattgaagataagatcattgtagaagaacaataygtagaaccattattcttataagtgacattaagatttggattttcttgtgatgttgatttgcttcgaatgcaaaatcttagtgttgtgacatgtcaattaa

SEQ ID NO: 504419 - DNA, 201 bp, Homo sapiens
attctaatacatgaaaatttgttaacatttcagaacattacataacattaagccattctgagtagactccaactgctgagctgaattttcacgtaagcatmattatcaagagaattttggtgctgtgaagaaaccacacttttatagcttatattcaaatgcttttctgtgtttttgaagacaatttaaaactactgctgc

SEQ ID NO: 504420 - DNA, 201 bp, Homo sapiens
aaatttaagctacgtcttttcctttggcatgagtctaagtgaacataacttctaaaaatacagtcctcagtttcttttttatagtgagataatttgattcytcctgtagcttttctacaataaagaaaatcacaagcaaggttaagctcagtcttatatttttcataaatttcatcaaatacaaatacctcaaaaatcttt

SEQ ID NO: 504421 - DNA, 201 bp, Homo sapiens
tctgagtttccttaattagtgtgtataatagcctggctatttcgcttttcatggtgaaaagaaaattcttatttctttgtttaaagaataatttttttatktcttcaaagttgaatatctcctaatgtgtttgatagtcggcttttattttcactttttgttaatagggtttgtctttttgtgttttagtgatgatgtttt

SEQ ID NO: 504422 - DNA, 201 bp, Homo sapiens
tggaattatccatttggatagattaatagaaacctccctatgctgtcaatttggtccaaaatatacattctgggatagtgaatctttctttaaaaatgggrtccagagtgatttccacaacctctctgtggattggggtgttattccaatgacagacatggcctatgaatagcacatttgtacgctaaggtgttcttttgc

SEQ ID NO: 504423 - DNA, 201 bp, Homo sapiens
tttagttaaagtcatactgaagtgaactcacagtctgcaataggaaaggtcgctgggtaagaatgcttaaggaatggaaatcgctatgaattttgagatcrtgctagttcatctcgaacctggtgaattctattaagatgagaaataatgtatagttcttctgtaatgagcacatctaactgtaagaaattaaatctgatg

SEQ ID NO: 504424 - DNA, 201 bp, Homo sapiens
tgattttgagcagtttttcatgaacctgttggcctttttaaatttttcttttgagaaatgtctgtgcaggccctttgctcattttttaattgggttattgmttttcttgttgacttgtttgggttccttatatattttgaatagtaatcccttatcagatgtatggtgtgttagtctgttttgtattgttataaaggaata

SEQ ID NO: 504425 - DNA, 201 bp, Homo sapiens
acctgttggcctttttaaatttttcttttgagaaatgtctgtgcaggccctttgctcattttttaattgggttattgcttttcttgttgacttgtttgggktccttatatattttgaatagtaatcccttatcagatgtatggtgtgttagtctgttttgtattgttataaaggaatacccacggctgggtaatttatgaa

SEQ ID NO: 504426 - DNA, 201 bp, Homo sapiens
tatattttgaatagtaatcccttatcagatgtatggtgtgttagtctgttttgtattgttataaaggaatacccacggctgggtaatttatgaagaaaagrtagtcagttttttggctcatgcttctgcagggtgtacaagcaacatggtgccggcacctgctcagcttttggaaaggactcaggaagcttttactcatga

SEQ ID NO: 504427 - DNA, 201 bp, Homo sapiens
ttctattttccctaagtgtcgaccggtctgagaaataaggggaaagagtaccaaagagagaaattttaaagctgagtgtctgggggagacatcacatgtcrgcaggttccatgatgccccccaagccacaaaaccagcaagtttttattagtgattttcaaaggggagggagtgtatgaatagagtgtgggtcacagagat

SEQ ID NO: 504428 - DNA, 201 bp, Homo sapiens
atttctgtgggattagtggtgatctccactttatcactttttattgtgtctatttgattcttccctcttttcttctttattagcctggctagccatctaastattttgttaatcttttcaaaaaaccatctcctgtattcattgattttttgaagggtttttcgtatctctttcagttctgttctgatcttagttatttct

SEQ ID NO: 504429 - DNA, 201 bp, Homo sapiens
catgtcagcaggttccatgatgccccccaagccacaaaaccagcaagtttttattagtgattttcaaaggggagggagtgtatgaatagagtgtgggtcayagagatcacatgcttcacaaggcaataaaaaatatcacaaggcaaatgggggcagaccgagatcacaagaccagggtgaaattaaaattgctaatgaagt

SEQ ID NO: 504430 - DNA, 201 bp, Homo sapiens
aaccaaaaaaatgacctaaacgttttattatcaataaagtgctacaactgtgaaggtaactgaatagaaaaccaacaatcaaaaggaaaaaggcataacawgttttattattgatataatttgaggcatacttataatgatactttgaattccttgaattgaagaaaatcgaaaactgcatagtaaccctgcctacttata

SEQ ID NO: 504431 - DNA, 201 bp, Homo sapiens
taatcctttaaaaacataggtcagaccattgcagcccctaatcaacactctgcatggctccctatttcacctggaggaagagccaagtcttttcaacagcyaacagagccctacatgatctacagagctatctcttccccacctccccactacctccctagcctcatcctctgccctactacttgcctactctgttccagc

SEQ ID NO: 504432 - DNA, 201 bp, Homo sapiens
ttctagagccaatctaacattttgcttggtcctcattgtgctgccacaataaattaattcttctatggtcataacacttggctattttattttggtagggscttctcttctgaattgattggtagtgttgttattttcttgttattcagtttaacaagtacataatcaacatcagtgcttgggaagtcaggagtacgagag

SEQ ID NO: 504433 - DNA, 201 bp, Homo sapiens
ccataattttgcagacaggtttagcttttcttctctagaattgagtttaaaattctagagccaatctaacattttgcttggtcctcattgtgctgccacartaaattaattcttctatggtcataacacttggctattttattttggtagggccttctcttctgaattgattggtagtgttgttattttcttgttattcag

SEQ ID NO: 504434 - DNA, 201 bp, Homo sapiens
gagtccctgaccaaactctctggtcaatcctgcctttcttaactcacgtcctaaaccccagtaatcctgggaaaaattagagatcttcaaacttgctacaytttatatctccatatctctgtaaatattgttctttctgcttacaattagcttttctctagtgtctacctagtgcaagtgcatctatccctatgcggattt

SEQ ID NO: 504435 - DNA, 201 bp, Homo sapiens
tacccttcctagcctctggtaattgcagcactattcacaatagccaagatatggaatcaacttctgtccatcaatggatgaatagacttttaaaaatatgstatatacatacaataggatgtcattcagccacaaaaaaagactgaaatcttatgatttgtagcaacatagatagaactagagatcattgtgttaagtgaa

SEQ ID NO: 504436 - DNA, 201 bp, Homo sapiens
atatgtggacagattactctcctttaaaaaattatcgtagcaaattgctaaaccattttgtggaatgatagcatggccagacctttacaatgcagcaggaygcttggaatccaaaagtcatttccccatagtaactccaattcaaatgaacagcaagtatttatttgataaggagctggagtgtcacataaaaacattccc

SEQ ID NO: 504437 - DNA, 201 bp, Homo sapiens
agtcttgttagtctttaaaaatttttaaactgggtgctcagctcattaatttcagcctttcttcttttctattataaatattaaatgctatatatttttcytaaatgtcatttaatgtattatttctataagtattacttgccatgaaaaagaaatctgtattatgtactttggtgctatatgaattaaccatttacttaa

SEQ ID NO: 504438 - DNA, 201 bp, Homo sapiens
tatgagaaagaggactagaaataacacctgggaggaccttccattccacactaaagaatctatgatcagttgaagcaaccaagaattatagcagttctctygtgcagcattgatcactgatccccatttcttattctggaaactgcccccttctgtgcattcaatgataactactctttctttgtgtacttattatttctc

SEQ ID NO: 504439 - DNA, 201 bp, Homo sapiens
agaagcaatttgagaaaagcacaacacaggttctataaagggcaaagagaattgctgccagaacaaagattttgtgtgtgcaggcctagaagaacactcargatttatgagaaagaggactagaaataacacctgggaggaccttccattccacactaaagaatctatgatcagttgaagcaaccaagaattatagcagtt

SEQ ID NO: 504440 - DNA, 201 bp, Homo sapiens
gacttcttcacatcactttgtgttataggactaatgatttcttgagttattggtaggaaactggaagcttttatttggtcccttccaacagaaccaaatgrcacggacaagctaactgaaggaatgaaattaggttgtttttaagcacggttcatttccttttagtattgtatactgtctcgattatttcgattatacata

SEQ ID NO: 504441 - DNA, 201 bp, Homo sapiens
ttcttcctcaatcattctatgaagccactatcaccctaagaccaaaaccaggaaaggatacaacaacaataacaacaacaaaaactacagaccaatacccytgatgaacatagatgcaaaaatcctcaataaaatagtagctaaccaaatccaatagcatattaaaaagataatccaccataatcaagtgggtttcatacc

SEQ ID NO: 504442 - DNA, 201 bp, Homo sapiens
gcctcatcttgtttccttatcttgtctttgtggttagaaagaaatgaaaataaatcagtagcactacatccttctaggtttcccataattttgcagacagrtttagcttttcttctctagaattgagtttaaaattctagagccaatctaacattttgcttggtcctcattgtgctgccacaataaattaattcttctatg

SEQ ID NO: 504443 - DNA, 201 bp, Homo sapiens
acatatgtatattgcaatttccatgctttctacttgccctgattgtcctctccactatatttcacctatttagagcctcttctatatggctctgaccagtyctaactctaccacaagctttatatctaccactctttaacccactttatgatctgagcaacctctgttgtgaactgcactagaattagcccctgatgccac

SEQ ID NO: 504444 - DNA, 201 bp, Homo sapiens
tactctctcagaccacagaggaataaaactggatatcaattgcaaaaggaaacctcaaaaccctgcaaatatatagaaattaaataatctgctcctgaatrattgctgggtcaacaatgaaatcaagatggaaacttaaaaattgtttgaactgaacaataatagtaacacaacctatcaaagcctctgagatacagcaaa

SEQ ID NO: 504445 - DNA, 201 bp, Homo sapiens
ttgccctgattgtcctctccactatatttcacctatttagagcctcttctatatggctctgaccagttctaactctaccacaagctttatatctaccactmtttaacccactttatgatctgagcaacctctgttgtgaactgcactagaattagcccctgatgccacatgccatttaccttctcctggaggtgtcatgtc

SEQ ID NO: 504446 - DNA, 201 bp, Homo sapiens
gaccataagatagcccacaaaaccagtctcaacaaatttatgaaaattgaaattatatcaagtactctctcagaccacagaggaataaaactggatatcarttgcaaaaggaaacctcaaaaccctgcaaatatatagaaattaaataatctgctcctgaataattgctgggtcaacaatgaaatcaagatggaaacttaa

SEQ ID NO: 504447 - DNA, 201 bp, Homo sapiens
atcagagagaggtgaagtccaacttaaagaaattttttcaatgttactggatatggatggaaaaatctccagagaaatagaaagcacaaattttaaaacartcacaatttctggaaatgaaggacacacttagagaaatgcaaaatacactgggaaatctcagcaataaaatcaaacaagtagaagaaagaacttcagagc

SEQ ID NO: 504448 - DNA, 201 bp, Homo sapiens
tacatatattcttcagtactgtgagagatttaatcatcaagtatgtgaaatgagaatttctgcctcatcttgtttccttatcttgtctttgtggttagaargaaatgaaaataaatcagtagcactacatccttctaggtttcccataattttgcagacaggtttagcttttcttctctagaattgagtttaaaattctag

SEQ ID NO: 504449 - DNA, 201 bp, Homo sapiens
tacatctcattagccaaaacttggtccacccccaactttgcagtgaagaaacctgggtattatagtctttattcttaatgactttatgcttaactaaaaaktaagagctttgctggacatggtggcttatgcctgtaatttcagcaatttggaaggccaaggcgtgcagatcacttgagcttacgagttcgagaccagcct

SEQ ID NO: 504450 - DNA, 201 bp, Homo sapiens
agaatttactcgctatagaacgttcagctagaaggtacttaacttctcaatgtcttcattttgtcttttgtctttttttttagctctaaaatggaattaaragagaattagtaacaataatgtcttataagtttctaaatttaattagataacataggtagtatcttggaacattatgaatgttcaaaattaggttcagta

SEQ ID NO: 504451 - DNA, 201 bp, Homo sapiens
ttgaaagcatcacctcctggctggaggctaaccaactcaaaccataaaagaacaactcataaaagaacatcactgccccaagaaaggagaaaacaacagcyaatttcaccacctgtaacatcctggctaaccagaggtcctgagtctttccatgtgacaactttactgccagcacaaccagcattcaagaaaagcagtgca

SEQ ID NO: 504452 - DNA, 201 bp, Homo sapiens
ccctatactactacagctgatgccgtcttgaaagcatcacctcctggctggaggctaaccaactcaaaccataaaagaacaactcataaaagaacatcacygccccaagaaaggagaaaacaacagctaatttcaccacctgtaacatcctggctaaccagaggtcctgagtctttccatgtgacaactttactgccagca

SEQ ID NO: 504453 - DNA, 201 bp, Homo sapiens
gtcggtggatctaccattctagcgtctggaggatggtggccctcttctcacagttccactaggtagtgccccagtgaggactctgtgtgggggctccagcrccacacttcctttccacactgccttagcagaggttctccctgaggctgtcttatgaagaccagcgtgggaggcaatagaactgtttactgaaagaaatat

SEQ ID NO: 504454 - DNA, 201 bp, Homo sapiens
ccaatttatgatttgtgaaatctgattttactttttgaaaattttcatgtgaatttcccattttcagtgttgtagcacctctctcttcctctaagatcctscaagctcatcaaaagccatgatcttattataccagcagttttatttattcaatctttcaacaagtagttattgaacttctataatgtgccaggctctgga

SEQ ID NO: 504455 - DNA, 201 bp, Homo sapiens
ccacttgagggactgagggaagggaagaagattacttgagcccaggaattagaggctgcagtgagtgcactactgcactccagcctaggcaatacagcaaragcctgtctctaaaaagagagagagataagtagatatgttttaattattagaagaaggtatttatcaataaagaattctcaaaaaaatggaattatcaaa

SEQ ID NO: 504456 - DNA, 201 bp, Homo sapiens
cttcaatttcttcccagaaaatggggttttcttttctatcacatcatcaggctgcaaatcttccaaacttttaggctctgcttcctcctgaatgcgtcacygcttaaaaatttcttcccccagatatgctaaatcatctctttcaagttcagtgttccacagatctctaggacaggggcaaaatgccaccagtctctttac

SEQ ID NO: 504457 - DNA, 201 bp, Homo sapiens
atacagaaaagcctttactctggagaaaaatgtaattcagttttcaggcacattccacttcttttatgatttgaggatatcacaaagcatgccagcaagtytaaggggatgtatttggaggagtaggtcatttctcaggtaaaaaagtgttttatttatggtgtgcaagcatgggaatgagaaggtctgggtttcagcctg

SEQ ID NO: 504458 - DNA, 201 bp, Homo sapiens
tgtaattccattctcaatgttatcttttcatgaacaaaagtttttaatttgtatagttcagttattaagcttaaagtaagaaattctgtggttagtacttyttcatactttttaggactttgcctaaactatgtcccatgaagatattcttctatattatatcatattatattatatattaagcatcttacattgtgatct

SEQ ID NO: 504459 - DNA, 201 bp, Homo sapiens
tgaagaaatccaaccaaacacaagtacaagttcgtgaaagttccacagggacacaacactgttcgggggacagcaaggacagaatgttggaattcttacaratcattatgtaatcctacattagacagagcctttgaaattttggaaataacagttaatgagagtgtatcctcaaaataagataaatgtttaaataagtca

SEQ ID NO: 504460 - DNA, 201 bp, Homo sapiens
actaatgaattttcccttccaaactagctgttcattttaaatatgaagaaatccaaccaaacacaagtacaagttcgtgaaagttccacagggacacaacwctgttcgggggacagcaaggacagaatgttggaattcttacagatcattatgtaatcctacattagacagagcctttgaaattttggaaataacagttaa

SEQ ID NO: 504461 - DNA, 201 bp, Homo sapiens
cacgcacctgtaatcccagcagtttgggaagccaaggtggaaagatctcttgaggccagaagcttgagaccagtctgggcgacatggtgagaccttctctytaaaaaaaaggaaagaaagaaaagtagcagggtgtgctggtgcttgctgcttggaaggctgaggtgggaggatctcttgggcctaggagattaaggctgc

SEQ ID NO: 504462 - DNA, 201 bp, Homo sapiens
gtgacacgcacctgtaatcccagcagtttgggaagccaaggtggaaagatctcttgaggccagaagcttgagaccagtctgggcgacatggtgagaccttmtctctaaaaaaaaggaaagaaagaaaagtagcagggtgtgctggtgcttgctgcttggaaggctgaggtgggaggatctcttgggcctaggagattaagg

SEQ ID NO: 504463 - DNA, 201 bp, Homo sapiens
aaaccatttgttccttctaggcctctgggcctgtgatgggaggggcagctatgaagatctctgacatgccctggagacatcttcctcattgtcttagtgaytagcatttcagctcctcattacttatgcaaatttctgcagacagcttcaatttcttcccagaaaatggggttttcttttctatcacatcatcaggctgca

SEQ ID NO: 504464 - DNA, 201 bp, Homo sapiens
atgaagagacttcaatgccagcaagcatttgttacttgatttaaagagcaaagtaaaacattggctacacttaaataagaatgattaaaaaatatattgcrggaaaaaactggataactaagaaaaaatgtattacataggaaaagaatttgtctaaaactatttaggcaaactctcaggattgttttaagcctcttacct

SEQ ID NO: 504465 - DNA, 201 bp, Homo sapiens
tctcagcttcctgagtcttttcttttctctgacctaaacacaatgttataggggatctgtgctcctaaactcagtgacgaggcagtgtgcaatatagctgkaacaaaacaaaacgcctacgttctggttaattatttgctgaatatagttaaacctgggacataaatgacagcttgagctcactggaaatggcaggttttc

SEQ ID NO: 504466 - DNA, 201 bp, Homo sapiens
catgacagaaggcaaaggaggagcaaaggcacgtcttacatagcagcagggaagagatcatgtccaggggaactctcccttacaaaaccatcagatatcawgagactaatttactatcatgagcacagcatgtgacagacctcccccccatgattcaataacctcccactgggtccctcctataacacatgggaattatga

SEQ ID NO: 504467 - DNA, 201 bp, Homo sapiens
gggtaatttataaaaaataagaggtttaatggactcacagttccacatgactgaggaggcctcacaatcatgacagaaggcaaaggaggagcaaaggcacrtcttacatagcagcagggaagagatcatgtccaggggaactctcccttacaaaaccatcagatatcatgagactaatttactatcatgagcacagcatgt

SEQ ID NO: 504468 - DNA, 201 bp, Homo sapiens
cagtggctcatgcctgtaatcccaaagctttgggaagttgaggtgaaagaatcacttgaggccaggagttcaagaccagcttgggcaaaatagtgagaccrtatctctacaaaaacaaacaaataaacaaaaaatacctaaaaaaaaatttaaattagccaagcatggtggcatgtacctatgaccccagccacttgaggg

SEQ ID NO: 504469 - DNA, 201 bp, Homo sapiens
agtactcttcatataactgcacagtgaacaatttagaaagggaacagatgaccagacacagtggctcatgcctgtaatcccaaagctttgggaagttgagrtgaaagaatcacttgaggccaggagttcaagaccagcttgggcaaaatagtgagaccgtatctctacaaaaacaaacaaataaacaaaaaatacctaaaa

SEQ ID NO: 504470 - DNA, 201 bp, Homo sapiens
gtcatcacagtctcaatttattttcacaacatttctcttatcaacccttctttcctactcaaattattttctagaattcaggtgctcactacttctgcctygcaatagagtaacaatgctctaattggtcttggtgcctatagtcactctttgctccaatccgtcatcaagcaaataatccccaaactaattaaatgtgcc

SEQ ID NO: 504471 - DNA, 201 bp, Homo sapiens
cactgttaaattgcttcctttttgcagggaataaaaggaagagacttgggctgaatcttttcatgcttgcctctctacagtttattttcaaaactgcagcmggcgtaatcctttaaaaacataggtcagaccattgcagcccctaatcaacactctgcatggctccctatttcacctggaggaagagccaagtcttttcaa

SEQ ID NO: 504472 - DNA, 201 bp, Homo sapiens
tgatatgctctgttacattttttcctaataagactcaaaaatacatatataaatgcaaaatgacactgttaaattgcttcctttttgcagggaataaaagraagagacttgggctgaatcttttcatgcttgcctctctacagtttattttcaaaactgcagcaggcgtaatcctttaaaaacataggtcagaccattgca

SEQ ID NO: 504473 - DNA, 201 bp, Homo sapiens
agtttctattgtcatattctcaaactcagagattattttctcatcagtatccagtctaccagtgagtccataaaaacatttgtcatttctgttagtctttyttatcactagaaattttttaaaacctagaatttccattgctctttttacatcgtctatcttttcttgcatgttttctacttcttccattaagcccttagc

SEQ ID NO: 504474 - DNA, 201 bp, Homo sapiens
agtatgatatgctgcattattataaagcacactgctagatttctctgtaattatacttttaattctaaatcaattactttgagaatctatattaaactttkaatgatgaccaattaaaaacgtctttaaatggcattgcccttcaaaatggaatcagtgctaatgaaataaactgcttttgatattgtgaaaatctgatta

SEQ ID NO: 504475 - DNA, 201 bp, Homo sapiens
catcattcataactttgattctattctaactaatgaaaatttctgcattattcaaaatgcaaagttaagccttgttcttgggctgaaaactgccagccagycttaaaaattaataacagctaccacttctctcctctgcactgttaaagtggatatatgggactaacatttcagacagatatttccgaagggtaataaata

SEQ ID NO: 504476 - DNA, 201 bp, Homo sapiens
ttccaatttgtctaagtacacttctggaaatcttattctaaaagagatctgcaaatataatataatgtcagttttttggcaggcaatacatcattcataaytttgattctattctaactaatgaaaatttctgcattattcaaaatgcaaagttaagccttgttcttgggctgaaaactgccagccagccttaaaaattaa

SEQ ID NO: 504477 - DNA, 201 bp, Homo sapiens
cttcagaaggcagatgtgagcaaaaagtaatgtctgaaaccaattgcaatgatctcatacactagtactatttgtgccaacacttagcttttaggtgcaamaatgaactgccccttggatatgacattaccaaccctcagtgaggaagacatgtcctttgaattatttttccaaaacttacacataaaataagtaaacaat

SEQ ID NO: 504478 - DNA, 201 bp, Homo sapiens
caggaagtcataagttactgggtacattcagttcacgaaatgaatggtgaatcagtccttgagggaccttggattccattttacactagtgattttcaacytatttcatacttggcactcatggagaatgcctcttttttaaatttgtttttttagagacagggtctctctctgtcaccaatgctggagtgctgtggcaca

SEQ ID NO: 504479 - DNA, 201 bp, Homo sapiens
cttgccaagaataaacaaatcttcatttcatacctaattttaaaacgaattgtgtccccaaatatggtctattctggctaatcattttttaagcaaatccycacttactttttctgagtcactttagtatgtaactaggataaatttcatagttgatcagaatgcaaatgttctaacttgacatttttgcccaagatacgt

SEQ ID NO: 504480 - DNA, 201 bp, Homo sapiens
tatattttttattgaatgaggtaggaaacaaaagtgcagatgtaattaagttgtcccagggtcttcagaaggcagatgtgagcaaaaagtaatgtctgaarccaattgcaatgatctcatacactagtactatttgtgccaacacttagcttttaggtgcaacaatgaactgccccttggatatgacattaccaaccctca

SEQ ID NO: 504481 - DNA, 201 bp, Homo sapiens
cgtgtggtagctcatgcctataatcccagcactttgggaggccgaggtggctgaatcgcttgagttcaggagtttaagattaacctggccaacatgacaaraccacgtatctactaaaaatacaaaaaaaaacatcaactgggtgtggtggctggcgtgtgcctgtaattctacttgagaggctgaggcatgagaatcact

SEQ ID NO: 504482 - DNA, 201 bp, Homo sapiens
tcatgactctgctaatttgagaagcaaaaaccaaaatttctcttttcaatctttgcaaattaaaaaggaatcttgccaagaataaacaaatcttcatttcrtacctaattttaaaacgaattgtgtccccaaatatggtctattctggctaatcattttttaagcaaatccccacttactttttctgagtcactttagtat

SEQ ID NO: 504483 - DNA, 201 bp, Homo sapiens
cgacacatattagatgttcctataatctaatcatagctatgatttaaactacagactagtatatattatttttcttctctttcatcttttgcctgtgtcamaataacttaatcatgtctttgctcctcctctgcaatctcactgccattgcatttattatggtactctttattaaatagtctcttcatggagcttagaccc

SEQ ID NO: 504484 - DNA, 201 bp, Homo sapiens
cttattgccgcccttctcactccccacaatgaggaagaatgaggatccgagacagagttggggagacttccagaccctccagactcttggggattgccctmagtgtttgtcaaaacaagttgccctcaaggacaattgaactatatcagttcttcacataagtacctgagactgagggggacaggacagagtgggaagcat

SEQ ID NO: 504485 - DNA, 201 bp, Homo sapiens
cctgtattctttccatattttaagtaggctgctaactcctgtacgcattgaaatgtttgattggctgtatttctctcatatcttttcttgttctgaggtcwctaaactgttcatattcaaaagcatttatagtccagaggcaaaatattattgtttaattttagacttttaagtcccttaaatacttaaactgcaaacatg

SEQ ID NO: 504486 - DNA, 201 bp, Homo sapiens
taccaaggctgtcatctgtctcacttaatgaatgggaaactcctgattgagaagaatttgtcttcattaaaactagctaaaatgtacattgcaaatctgargaaaacaatcatgactctgctaatttgagaagcaaaaaccaaaatttctcttttcaatctttgcaaattaaaaaggaatcttgccaagaataaacaaatc

SEQ ID NO: 504487 - DNA, 201 bp, Homo sapiens
acacatttcatagcaacaacttaagcataccctaagaatgaccctatggtttaagaagaatgtgtatttggagatctgtgctaaagaatccaggagtggcyaacccggagattcatctcttatctataaggaacatctgagcccctagtccatcctgtggaacgcagcccattcaggagattgaggccctttgttttgggt

SEQ ID NO: 504488 - DNA, 201 bp, Homo sapiens
atctgggaggtggttggctcatttgttttgaagatactcgacactttgccctagcaaaatattgacttctttgatttttccttcagaaaaataagccctgytattcctatagacctaaataagggaggcagccagtttcaagaggctggctctaacaaaatataccaaggctgtcatctgtctcacttaatgaatgggaaa

SEQ ID NO: 504489 - DNA, 201 bp, Homo sapiens
gctctttagcttctagtgctgactggaatggtgaacatttaaagccagtgtttttcctcttggagccaccttagcactgagtcttgtaaaccttggccagyccttcctcaggccgtgccttctatcttgtgtgaatgatgcatcctttcttaagcgtcttctgctgacctcgtgcagcaccgcaggaagctgggatgcttt

SEQ ID NO: 504490 - DNA, 201 bp, Homo sapiens
tgtgtctggtcagagtaagggaaaatgaatgcatcccttagcttgcattcattggtcagaatcttaactatcttaagagatggtgcagctctagattcaayagctctcctcagaagtggccctggcaaaactgaagataggacatccactgctctttagcttctagtgctgactggaatggtgaacatttaaagccagtgt

SEQ ID NO: 504491 - DNA, 201 bp, Homo sapiens
tgctttactttccttctcttagaaatagcctcaaccaggtacggtggctcacatctgtagtcccagcactttgggaggctgaggcaggaggattgcttgarctcaggagttcaagagcagctagggtttatatatatatatatatatatatagaaatccagtgtctacaaaaaaatacaaaaagtagccagacattggggg

SEQ ID NO: 504492 - DNA, 201 bp, Homo sapiens
taactatggccttacagtatagtttgaaatcaggtagtgtgatgcctccagatttgttctttttgcttagtcttgctttggctatgcgggctcttttttgrtaccatatgaagtttagaactgttttatctaattctgtgaggaatgatgtggtattttgatgggaattgcattgaatttgtatattgcttttgtcagtat

SEQ ID NO: 504493 - DNA, 201 bp, Homo sapiens
ctcaaccaggtacggtggctcacatctgtagtcccagcactttgggaggctgaggcaggaggattgcttgagctcaggagttcaagagcagctagggtttatatatatatatatatatatatagaaatccagtgtctacaaaaaaatacaaaaagtagccagacattggggggcctgtggtcccagctacttggggggccg

SEQ ID NO: 504494 - DNA, 201 bp, Homo sapiens
tgatgagagttataatcataaagggatgctggattatgtcaaatgcttcttctgcatctattgagatgatcgtttgatttttatttttaattctgtttacwtggtgtatcctgtttgtcaacttgcatgtgttaaaccatccctgcatccctggtgtgaaacccacttgatcatggtggattatctttttgatatattgtt

SEQ ID NO: 504495 - DNA, 201 bp, Homo sapiens
tgcattattttttcaaatttttggtaagtctgaaattacttcaaaattaaactttaaaaatatttttataattaaaagtataactgcatttccaatcaatyatctaagataaacacttttggaaatactcccaggaaagacaggggaatttatatccacagagcagctgggagaaagagctgggttgacagagtaaatgag

SEQ ID NO: 504496 - DNA, 201 bp, Homo sapiens
caaccaggtacggtggctcacatctgtagtcccagcactttgggaggctgaggcaggaggattgcttgagctcaggagttcaagagcagctagggtttatatatatatatatatatatatagaaatccagtgtctacaaaaaaatacaaaaagtagccagacattggggggcctgtggtcccagctacttggggggccgag

SEQ ID NO: 504497 - DNA, 201 bp, Homo sapiens
gaggatcgcttgaacccaggagatcaaagctgcagtaagccatgatcatgccactccactccagcctaggcaacagagagaaaccttgtctcaaaaaaatataaaataaaataaaataaaataaaataaaataaaataaaataaaataaaataaaataaaaatacattagcctctgctaagtaactacacaatctcctaga

SEQ ID NO: 504498 - DNA, 201 bp, Homo sapiens
aggatcgcttgaacccaggagatcaaagctgcagtaagccatgatcatgccactccactccagcctaggcaacagagagaaaccttgtctcaaaaaaatataaaataaaataaaataaaataaaataaaataaaataaaataaaataaaataaaataaaaatacattagcctctgctaagtaactacacaatctcctagaa

SEQ ID NO: 504499 - DNA, 201 bp, Homo sapiens
ggatcgcttgaacccaggagatcaaagctgcagtaagccatgatcatgccactccactccagcctaggcaacagagagaaaccttgtctcaaaaaaatataaaataaaataaaataaaataaaataaaataaaataaaataaaataaaataaaataaaaatacattagcctctgctaagtaactacacaatctcctagaag

SEQ ID NO: 504500 - DNA, 201 bp, Homo sapiens
gatcgcttgaacccaggagatcaaagctgcagtaagccatgatcatgccactccactccagcctaggcaacagagagaaaccttgtctcaaaaaaatataaaataaaataaaataaaataaaataaaataaaataaaataaaataaaataaaataaaaatacattagcctctgctaagtaactacacaatctcctagaagg

SEQ ID NO: 504501 - DNA, 201 bp, Homo sapiens
tacttctgttaactttctattagccttcttttcagtgtatataaattgtattgttcactgccagatatcgtcgttccattgactttgatgtctttaattarcttaagtttctctatagaaatctctgaatcagctatttcagtgcccttcaaactgggattgaagcagctgctaggagactattctattagtggtttaatt

SEQ ID NO: 504502 - DNA, 201 bp, Homo sapiens
taagtcctagctgaatctcttacaaagtagatacctacttttgagtagttatcaaacaacaacaacatccaaaacaaacagtcctctttcttttcctcctmactaaactggtcaaagactctcaaaagacaccagtgctcagttgtacctaacagtgggagaaaaggcagattaatcaatagtcttattatgtagtgcaat

SEQ ID NO: 504503 - DNA, 201 bp, Homo sapiens
agaacacaacctcaaaggggtctgatgaacgcttcccatcaaacagatgagtggtgcatgatatatgagttggaatccagaatctgatggggtcttgtctyaatttatttgaccaaacctcagaccctgagattaaaagtatcaggcagtgaaagcatgcagacaaattgcatcatgtatttaatgcttacacagagtttt

SEQ ID NO: 504504 - DNA, 201 bp, Homo sapiens
attgcattgcagtcattgtttgaatttgtaacaaaatgaagcaaagtagctagccattgtaacttccttccagaacacaacctcaaaggggtctgatgaaygcttcccatcaaacagatgagtggtgcatgatatatgagttggaatccagaatctgatggggtcttgtctcaatttatttgaccaaacctcagaccctga

SEQ ID NO: 504505 - DNA, 201 bp, Homo sapiens
tgtcatatcatatattagcaacttttcatcagacacctaaccattatgccgagtagacagtcagcggttgttttacctattaccaattttaggcatgttgrtggcagaattttgaagtctgagtaacagtaatgatatcaatacaataatacattacagaaagatctatatgtatataaaccatataaaatgcaatgaaaa

SEQ ID NO: 504506 - DNA, 201 bp, Homo sapiens
aaatatgatttacattcccagagcattttaaataattaagtagatgattggtatttaatttataagcaacatgatttgattccttctgtagcttttaaacwttaaaatagttatagttaattagtgctagtacaaaatgctcaatcatcagaaaaaaatcaaaactttaaaatggatttcttaataatctttgctgattat

SEQ ID NO: 504507 - DNA, 201 bp, Homo sapiens
ttttcttctccctgcctttcatcttcctggtttctctttgagggctatgcttctgtaagacaaagggaaaaaaagaagtgcagagttgtacagtaatactyggcaattacccgttaatctgggtaattccaatgaagtactgtcacagttactgttccatggaaatgagcatttgcagttattgcttttgcctccagtctt

SEQ ID NO: 504508 - DNA, 201 bp, Homo sapiens
tcttttcttctccctgcctttcatcttcctggtttctctttgagggctatgcttctgtaagacaaagggaaaaaaagaagtgcagagttgtacagtaatayttggcaattacccgttaatctgggtaattccaatgaagtactgtcacagttactgttccatggaaatgagcatttgcagttattgcttttgcctccagtc

SEQ ID NO: 504509 - DNA, 201 bp, Homo sapiens
acacacccctaagggagaacccaccaagaactagaaagttgtttgctggcaaaagccttctaacatatggtttagtaagaaaatgtcccgacgttatgaarccatcactatcacaggccaacataaagaaacaaaaatttgcaacaaatacagcaaaggctttttcccccataagacctcatataaattaatgaaagcaag

SEQ ID NO: 504510 - DNA, 201 bp, Homo sapiens
gaaaggttgaccatataatttgagaagcaggtgataagtgcctttgaggcataaggcactgaggagcacctgagagagtctgtcagagaaaggttccctcscagacagggagaccccgagtagaaacaggcaggagttctcctgtcattcaagggagagttaggagtccagcgtatcaagcattcagcaaacagaagtgcc

SEQ ID NO: 504511 - DNA, 201 bp, Homo sapiens
gtagagagtcagtaaaaaaggataaaatgagtattgacatattttaaactgtcacttaattacccccacacatacacatgcaaataaaatgtggttaacawttcacaaaatagaaccatactaaattttgtttctattttatcttcacgtgaatttgtacatagttctagtaggcactgcagagtctgaacttagtctaag

SEQ ID NO: 504512 - DNA, 201 bp, Homo sapiens
cagcagcaaccgaaaactaatgcaagagagttcttgatttacatgtatgcatgcttgcaggtatacacatatacacacacacccctaagggagaacccacyaagaactagaaagttgtttgctggcaaaagccttctaacatatggtttagtaagaaaatgtcccgacgttatgaaaccatcactatcacaggccaacata

SEQ ID NO: 504513 - DNA, 201 bp, Homo sapiens
aaactgtagagagtcagtaaaaaaggataaaatgagtattgacatattttaaactgtcacttaattacccccacacatacacatgcaaataaaatgtggtyaacatttcacaaaatagaaccatactaaattttgtttctattttatcttcacgtgaatttgtacatagttctagtaggcactgcagagtctgaacttagt

SEQ ID NO: 504514 - DNA, 201 bp, Homo sapiens
acatcaaaactgtagagagtcagtaaaaaaggataaaatgagtattgacatattttaaactgtcacttaattacccccacacatacacatgcaaataaaaygtggttaacatttcacaaaatagaaccatactaaattttgtttctattttatcttcacgtgaatttgtacatagttctagtaggcactgcagagtctgaa

SEQ ID NO: 504515 - DNA, 201 bp, Homo sapiens
agaaacaacaaactctgttttttaaaaagcagctgggaaaaccttgcccaagtttaaatgatttgaaataaactaaaaaatgctttaatttaaaaataacrttaatattcaagttccaaaactaatgccaataattattgttagtattgttacgattattgaaaaagctgataaaacatcaaaactgtagagagtcagtaa

SEQ ID NO: 504516 - DNA, 201 bp, Homo sapiens
aactcctactgtttcccaacccttattcatttaataccaccttcagcgatatcatgacagctatgtacaagcttgtgtcagagactggctggctcttcacyaagcccgtttgtttgttctcctcccaagcacacaattgtaccatctatcccagcctccaggcagttagatgccccatgagattgtattctagacgagggt

SEQ ID NO: 504517 - DNA, 201 bp, Homo sapiens
gcctataggtttcatgagactctgttaagaatcagagtttaatgtgacaaagtttgccttcattcctccaagctcatcacaaccacagtgagccatttggrgacctaatttactcactagcctccagattttacccctttaatccattggtacccacaaactcccattacttttttttctgcttaataaatccaaattcaa

SEQ ID NO: 504518 - DNA, 201 bp, Homo sapiens
catcgaagcattttggtagtaagaaaagattagaaacaacccaaatgcctaccaggggaaaactgcttacataaattatggtactgccatgcaatgggtcrttatgcagctatcagaaaagaatggagtctgtgtgctggagtatttccaagatagggtaaagggcaaagccacatgcagaagtaggtgcagtatgccacc

SEQ ID NO: 504519 - DNA, 201 bp, Homo sapiens
tcaggcaatgcctacattctcacagacaaccactgtgctaattttcatcatcactgataatttggtctgttctcaatataaaatatatacacttttcacaycacttttgcccacacttctcaatcactattttttatatgaaaataagttttgctcactttgtgtaacgaccacagtgaagctccctataggccagaaagt

SEQ ID NO: 504520 - DNA, 201 bp, Homo sapiens
taaaacttttgggaaatttttcagccattccaaattataaccaaagagttcactccaaggcacaaagtcatcaaactgaagtagaggaaaagaagttgctrgatgtggttatgaagtgagtgtgaaacgcagtctgttggaatgatgcttataatttagttgaaggaagaaaacttgcatgcctgggtaaagtaattaatc

SEQ ID NO: 504521 - DNA, 201 bp, Homo sapiens
ttacttccattattagacattgaaccctaaatacacctatgacatcatgaattctctgagtgctttgtaaataggaatctaattagcttttttggcaatcrcattaccttgttcattcccatcaaacctttctaacctggagccataaggttatcattccctgccctgcacacaaaggtaagtgttaagtaaaaattcctc

SEQ ID NO: 504522 - DNA, 201 bp, Homo sapiens
gattcccactcctggggcgtgcaggagggagttgttctctagatgagttctaggcgcttgggtgggtatttttttagtcgttttcttcatgctgtacagcragaagagtggcaaccaaaaagtaaaacttttgggaaatttttcagccattccaaattataaccaaagagttcactccaaggcacaaagtcatcaaactga

SEQ ID NO: 504523 - DNA, 201 bp, Homo sapiens
gccatttggagacctaatttactcactagcctccagattttacccctttaatccattggtacccacaaactcccattacttttttttctgcttaataaatycaaattcaaataaagaaaagctggcagggaccttgaagatggtggaatccaagccactattctgcagatgagggggctgaagcctaagggatttggtgaa

SEQ ID NO: 504524 - DNA, 201 bp, Homo sapiens
ttaaatgatattaagaaatttttgtcaattttgataggtatgctaatgaataggtaaaaagaagaaaagaaattcttaccaattgagcaggttctttcaayctctacacttttgactttggacaaggtaattctttgcagtgggtctgtgccactgtgggatatttaacagcattgttggcctgtaccgcctagatgccag

SEQ ID NO: 504525 - DNA, 201 bp, Homo sapiens
atatgcacttcatagtgatgctgccagacatataaggcataatttcaacaaaccaattgtaatgagatatttccagatgattggagcaagtgattatgggytgagtattaaatgatattaagaaatttttgtcaattttgataggtatgctaatgaataggtaaaaagaagaaaagaaattcttaccaattgagcaggttc

SEQ ID NO: 504526 - DNA, 201 bp, Homo sapiens
atcgcttgaacccaggagatcaaagctgcagtaagccatgatcatgccactccactccagcctaggcaacagagagaaaccttgtctcaaaaaaatataaaataaaataaaataaaataaaataaaataaaataaaataaaataaaataaaataaaaatacattagcctctgctaagtaactacacaatctcctagaaggg

SEQ ID NO: 504527 - DNA, 201 bp, Homo sapiens
cccacctccctccctccctccgtccatcccttctttccttccttcctccctccctccctccctttctcccacctatcctccctcccttccttctatccttyctccctcccttccttcttgccttttttccctctttccttttttcctcccttcctcccacccaacctcactcccttctttcctccctcctttcctccctcc

SEQ ID NO: 504528 - DNA, 201 bp, Homo sapiens
tcagaggccctgctctgcaggcactaaccatgtaaggagtgaggaggcgcaggttctggggctctctagaggtgagtaaatggcagtgaagaggaatgagatcatcagtggggcaaggcctaggggaaggcctgagccaggtgtggagacccaggagggctgagagtctgcacacctcagtgtcatgggcctcctgctgca

SEQ ID NO: 504529 - DNA, 201 bp, Homo sapiens
cagaggccctgctctgcaggcactaaccatgtaaggagtgaggaggcgcaggttctggggctctctagaggtgagtaaatggcagtgaagaggaatgagatcatcagtggggcaaggcctaggggaaggcctgagccaggtgtggagacccaggagggctgagagtctgcacacctcagtgtcatgggcctcctgctgcac

SEQ ID NO: 504530 - DNA, 201 bp, Homo sapiens
agaggccctgctctgcaggcactaaccatgtaaggagtgaggaggcgcaggttctggggctctctagaggtgagtaaatggcagtgaagaggaatgagatcatcagtggggcaaggcctaggggaaggcctgagccaggtgtggagacccaggagggctgagagtctgcacacctcagtgtcatgggcctcctgctgcacc

SEQ ID NO: 504531 - DNA, 201 bp, Homo sapiens
taactgcttctgatactaagactgctactgctgccactacccataaacaatgagaacaaccctttgccactacatcagtttccttactcaggtatgccacrggttgcaagctggtccctcggacctgtgaaaggactcctagagctattcctgtttcttctgtgacatataaagaaaagtcttgccccgttggcaagctta

SEQ ID NO: 504532 - DNA, 201 bp, Homo sapiens
taaggcatgcagacaccggagagtgagtaaggcagagtaggattcattaagcaacagaaaagctctcaacagcaagaggggaaccgaaagtggattgccasaaatggggctgagtttgggtcttttatgtggcagaaacaaggtagtcttctgtgtgttctgccttaatgagagaagtaaagctgccccctgtgggtgttg

SEQ ID NO: 504533 - DNA, 201 bp, Homo sapiens
tgacatttcccaaagcttttggtcaattttcaaagtaatgaaagttgccagttattcaggccaagcctataaacgcctgaaattcacttactgtctgaaaggtcaggtaaattagaggaaaatatagggctggccttgaagagtatgaatgtggtgatcctgagtgctcttaaaagtggctgaaactaagaggcctggtat

SEQ ID NO: 504534 - DNA, 201 bp, Homo sapiens
aggtaggataaaacatggactagatgtacaaacaccagattgatgatcgtagttttctccccaatatcaaaagatggcatttgctgacaagaatggattgytatgaactgtgacttgtcaaatattcctctcatcattttttaaaattaggatgtcataatcatacttcatacattaaaacttaagtaattttcttttttt

SEQ ID NO: 504535 - DNA, 201 bp, Homo sapiens
agaggagcagaaaagataactattgggtactggacttaatacctgcgtgatgaaataatctgtacaacaaacccctggcacatgtttgcctatgtaacaarccttcacatgtacccccaaacctaaaataaaagttaaataaataaataaaataattatgttctgcttttaggatatatatttgtaggtaggataaaacat

SEQ ID NO: 504536 - DNA, 201 bp, Homo sapiens
tcttcatggatgaatattagttattgctagaatgataggctacctcaaatacttccaatatttggtgctagtatttatttatagaaaccttgttcacagaraaaatacaagaatgggaagaaatttgctataacaatgtcactcaattttttaaaattccttccttccccaagtattttttaagacctgctttgtactaga

SEQ ID NO: 504537 - DNA, 201 bp, Homo sapiens
gcagaactaccatgaaacccagcaatcctgttactgggtatatacccaaaggaatataaatcactctattataaagagacatgcatgcctatgtttattgmtgcactattctcaatagtaaaaacacggaatcaacccaaatacccatcaatgatagactggataaagaaattgtggtacatatactccatggaatactat

SEQ ID NO: 504538 - DNA, 201 bp, Homo sapiens
gtggtattttctgaagacatctttctttgtcacagttcaatcaactacaaaactcctactgtttcccaacccttattcatttaataccaccttcagcgatrtcatgacagctatgtacaagcttgtgtcagagactggctggctcttcactaagcccgtttgtttgttctcctcccaagcacacaattgtaccatctatcc

SEQ ID NO: 504539 - DNA, 201 bp, Homo sapiens
tttttaagtaaaatatacaatatagcatagtaaatagtgataagtataaaagagaaaaaagtaaagcagggaaggagatagaacatgtgcagaaggttgayctgtagataaagaggctgagatatgtgcccaaaaatacataatgacctatcatctaaagttatttttaaactactactactagctgatgaggttcttctt

SEQ ID NO: 504540 - DNA, 201 bp, Homo sapiens
ctcaaagagcaaaaagcagaactaccatgaaacccagcaatcctgttactgggtatatacccaaaggaatataaatcactctattataaagagacatgcaygcctatgtttattgatgcactattctcaatagtaaaaacacggaatcaacccaaatacccatcaatgatagactggataaagaaattgtggtacatatac

SEQ ID NO: 504541 - DNA, 201 bp, Homo sapiens
tgtcaagaaaactgtttgaaatgtgctatttaaaataattacgatctgtttatacacttttggtgggagagtaaattaggtcaaccatcgtgaaaatcggygtggcaattcctcaaagagcaaaaagcagaactaccatgaaacccagcaatcctgttactgggtatatacccaaaggaatataaatcactctattataaa

SEQ ID NO: 504542 - DNA, 201 bp, Homo sapiens
ccagaatttgaaattgtcaagaaaactgtttgaaatgtgctatttaaaataattacgatctgtttatacacttttggtgggagagtaaattaggtcaaccrtcgtgaaaatcggtgtggcaattcctcaaagagcaaaaagcagaactaccatgaaacccagcaatcctgttactgggtatatacccaaaggaatataaat

SEQ ID NO: 504543 - DNA, 201 bp, Homo sapiens
atacctacaagttcccccaaaccctcactgacactactgctaacaaagaaaaacaccttctcctgttgccttatcctcactcttgaagggattcatgtatyggatggataaataaaccttgaaaattccttctaacgtaaagattgcataaagctataaaattccaccattataatcccatccctttctcttttagtttaa

SEQ ID NO: 504544 - DNA, 201 bp, Homo sapiens
acaatgatctaatcaaagtgaaaagacaatacccccagaatttgaaattgtcaagaaaactgtttgaaatgtgctatttaaaataattacgatctgtttayacacttttggtgggagagtaaattaggtcaaccatcgtgaaaatcggtgtggcaattcctcaaagagcaaaaagcagaactaccatgaaacccagcaatc

SEQ ID NO: 504545 - DNA, 201 bp, Homo sapiens
gtgaatcaaaaacacccaaaacatacttttaagatcacctaaaaggctttgatcaactccactgtctgctccaagggttttctcagcacccctgttcactkctgacctagcagtggatagctgaatatagcataaactacaagctattctctacagaaagcaatagaacaagcttctgctttgacagattatgcatattat

SEQ ID NO: 504546 - DNA, 201 bp, Homo sapiens
actaaaaatacacaattcgccaggcatggtggtgcatgcctgtaatcccagcgactcgggaggctgaggcaggagaatcccctgaacccaggaggcagagrttctggtgagctgagattgcactattgcactccagcctgggcaacaagagcaaaactctgtctcaaaaaaaaaaggaaagaaaaaactgagatccaaaca

SEQ ID NO: 504547 - DNA, 201 bp, Homo sapiens
tgaaaatgtaaaattgggaaaataatgaatttttatttgccaaataaaaattcggcgaatttttatttgccaacagagaccccccagaagctgtacttttygatgcaatgttcctatagccttgctacggaaaagcctttatagagggtgatgggcaaagccacagattagggctggaaaaaaatccctccaggatacaaa

SEQ ID NO: 504548 - DNA, 201 bp, Homo sapiens
tctttgcaaattataggcatgtattaaattatcacatgtgcccccaaaactatgtacatctattatgcctcaatttttaaaggtactttaaatattcttaygcagattaagcagatttctgatgcagacacaggtaaccaattttgaacaacttgttcaagctgcttttggagtgatgagctgtcattatgtccttaaaat

SEQ ID NO: 504549 - DNA, 201 bp, Homo sapiens
attagacatgttaatcatgaagctctataggacaaccaggcagagctcatggctggaggctagctgtcctttgctgaagcaaaatatattgtctattgtaraatgagaagaccgaaggcaaaactctggtgaaccgacaaactaatatgtgaaagaacttgtaggctgaaagagtaatgggcagagacgaggagaaccata

SEQ ID NO: 504550 - DNA, 201 bp, Homo sapiens
tgcaaagtggccgagactgacagcactcccttcctcacccccctcccactcactctcatgcctcctgagttatcactgaagatgctgtctcagaggccagsagggacttcctaattgtcaagttctcttggatcttatcaagattgattgacagctttggctgctgttgacttctccttccttgaacactttctcccctgg

SEQ ID NO: 504551 - DNA, 201 bp, Homo sapiens
tatataatatggagttattaaatcaaattaattaacatatatatcccttcccttgcttgacattttttgtgatgacatctttgaaatttactctcttattktgaaatacacagtacattattattggctatggtcaccctgctgtgcaacagatctctaaacctcctgtctagctaaaactgtgtatcctttaaacagtaa

SEQ ID NO: 504552 - DNA, 201 bp, Homo sapiens
gattaataagatagaatttctttatccaaggttcttctaatctattggaaaggaaaaaacatgtaagcagctacaaaataatctgataattatatgaagtragtgctgccagaacacagaagagggaacatttgtctttgtgactcagttacagcatcccagagtatatacaggctagatcctaaagggtaaggagggatt

SEQ ID NO: 504553 - DNA, 201 bp, Homo sapiens
tctagaatcttgataatttaagttttacctatatgtgatatattatttctagagtttacaacatttacatcatgctaggtttctgatatgcagagaaggtrtagccaaaaaacaagtaacagtttaaaaagaaagaagaaaacaaatagcaatttaaaaaaaaagaaaagaaaaaacacatagaaggtgtggctgatttat

SEQ ID NO: 504554 - DNA, 201 bp, Homo sapiens
cgtgacaccctggatgcacagcaaagaaaaaaatggactgtaaggatttcatgaggatcttgtgcaatagttttatcctggttattagtggtaaaatttargagcccagcagaagagcagttgacagcatcttgccagggcctctgtgtttccattttaaatctaaattcagtattctaatcccaacaaccccccttctca

SEQ ID NO: 504555 - DNA, 201 bp, Homo sapiens
aaacaaccataaatagtgataaagctggcacttgggcatcatctccctgcttggacatctcttcgggatcacaaagttatttcaggaagggggtagcacarccccaaccacccccgggacataagcaacggtttaaggcactgtcaagtccactgtgcccagcagacccatcatggtgccttggtggccactaggtatgcc

SEQ ID NO: 504556 - DNA, 201 bp, Homo sapiens
tttcatgcagtcgattgaagataagatcattgtagaagaacaatacgtagaaccattattcttataagtgacattaagatttggattttcttgtgatgttratttgcttcgaatgcaaaatcttagtgttgtgacatgtcaattaagagtacagtcttgatgatgaagaatttctggtgacatttgcaacaattaacaaat

SEQ ID NO: 504557 - DNA, 201 bp, Homo sapiens
caggtgccttcctcagtgtctctgagacttgttctatcaccatactatggtttcacaggggggaaatagattaaattggataatgtgtgtatgatatatgkaaagctgcctattactcttcccagtactcaaacatttgactaacaagttcaggaacaagttttctatgttcttagaggacatgaaaggaagtcagcaaca

SEQ ID NO: 504558 - DNA, 201 bp, Homo sapiens
gatgttgcagaggggaaagccaaatgaagtgttcccaggattcaatgtactatgtttgcaactttctgtgagatcgtaattatttcaaaagaaaaagtttmaaaactaaggttatatagttatacaaatatcaaattgcttttatcatttttcattcaagaactaggcagttctgaggaaaaacaaatgatatgccatata

SEQ ID NO: 504559 - DNA, 201 bp, Homo sapiens
ttcacgtaagcatcattatcaagagaattttggtgctgtgaagaaaccacacttttatagcttatattcaaatgcttttctgtgtttttgaagacaatttraaactactgctgcagaatttttcatgcagtcgattgaagataagatcattgtagaagaacaatacgtagaaccattattcttataagtgacattaagatt

SEQ ID NO: 504560 - DNA, 201 bp, Homo sapiens
tcctttttttttttttttttttttttttagaattctcttttaactgtatggttaaatctgtaagaaaaccaacaataccactctcttttctccaaaacttmaaagacacaatataactagcaccttcctttcaagggcagtatgcaacctggtcactgataaagatatgtacttggataggagtagtggagatggctaaca

SEQ ID NO: 504561 - DNA, 201 bp, Homo sapiens
aaattgcctggatatacatacacacacaaacacaattagttaatgtaaaagctggagaaaactgcatgtgctccataataattaatagtattgtaccaatrtcaattccttgtttgatatttacaacagttatatatgatgttgcagaggggaaagccaaatgaagtgttcccaggattcaatgtactatgtttgcaactt

SEQ ID NO: 504562 - DNA, 201 bp, Homo sapiens
caaattcttccactaacttcaataagtcaatatttatttttaatgagtctataattattctaatacatgaaaatttgttaacatttcagaacattacatarcattaagccattctgagtagactccaactgctgagctgaattttcacgtaagcatcattatcaagagaattttggtgctgtgaagaaaccacacttttat

SEQ ID NO: 504563 - DNA, 201 bp, Homo sapiens
aatgacctatcatctaaagttatttttaaactactactactagctgatgaggttcttcttcaattgttttggaagcaaaagattgaaagccagctaccttkttattagtagctattactttattaacatcagcatacaaaattaaaactatcactttgtttggtgacccgcaggcttgttctgccaggatgatgcaccaag

SEQ ID NO: 504564 - DNA, 201 bp, Homo sapiens
ggtctttcctaatgagttatttttaagtcttttgttaagtgttctatttcttaattttcttcattttttaaagcacttgatgtcattttaaaaaagctttmagaatctgtaaactcgccctctgtgtacactttaatttgcccctttacttgagctctcatcccactctagcaaatggaaggtattgatgcatgcatgaca

SEQ ID NO: 504565 - DNA, 201 bp, Homo sapiens
tctaaagattaaaactttcacagccactgctggctcacagaccagggtccagcaggtctgaggcttcattttcatttatcgtttttgtgtttctttcctgkttttgattgcatatataactcatcttttaaacccatcagtgcctttctgcatggcctcttttaatattttattgctgtatatttgaagtaaaagaagtat

SEQ ID NO: 504566 - DNA, 201 bp, Homo sapiens
ttgtaatgagggagtctgataacaaatgaattttttaagtaaaatatacaatatagcatagtaaatagtgataagtataaaagagaaaaaagtaaagcagrgaaggagatagaacatgtgcagaaggttgacctgtagataaagaggctgagatatgtgcccaaaaatacataatgacctatcatctaaagttatttttaa

SEQ ID NO: 504567 - DNA, 201 bp, Homo sapiens
gttcaaatactgaaaaaatctaaaaacaaaaaaatttaaaaacaaaaactgtgtttcattttaatagctgcaaaattctatatggctatccagtgaaattrtgaaatagaagaatacaccattgttaaagtctgacttgatacaatgtaagagaatatgacatgacagatgttgtgggtatgattttaaaaagcaaaaatg

SEQ ID NO: 504568 - DNA, 201 bp, Homo sapiens
aatattcttgactgacaggtttttcttttagtgctatgaatatatcatctcattctgtccaggtctgtaaggtttctgctgagaaatctgttgttagtctmataaggattcccttacatgtgacttgatgtttttctcttgctgttttcagattttttctctgtctttgacttttgatagtttgactatattgtgattctg

SEQ ID NO: 504569 - DNA, 201 bp, Homo sapiens
gaggtacaaggaggaactggtaccattccttctgaaactattccaatcaataggaaaagagggaatcctccctaactcattttatgaggccagcatcatcytgacaccaaagcctggcagagacacaaccaaaaaagagaattttagaccaatatccttgatgaacattgatgcaaaaatcctcaataaaatactggcaaa

SEQ ID NO: 504570 - DNA, 201 bp, Homo sapiens
taattgccacaacctgggtagtattaagagtttttaatcagaaatttgtattgtaatcttatgcctttccataagggttcaaatcgtttttaccaaggagyagatgaatatattattctatcaacagtagctgtatttcttattatatgattagaatcacttattgaacaaagcctatgcaaatataattgaaacactatc

SEQ ID NO: 504571 - DNA, 201 bp, Homo sapiens
ttattttatctcctttcctagtaatcatatttctatgccaacttttttttcccagtgtgatctaccttgtgtcttgtttgttcatttatttgttcacatarcaaattcttttgaagcaccaattatgtgtcaagcactacattaagccctggaatatcaaagattaataagatagaatttctttatccaaggttcttctaa

SEQ ID NO: 504572 - DNA, 201 bp, Homo sapiens
ttggatggatagtaagaaattattgttaatactgagtaatagtaatggcatgcccaaagatataatattgttaataatactgggagttacagaattatcgktatatatatatatatatatacatatatatatataattgttatttttgttaggcacaataacagtattgttatttaacttatatcctttatgtcagagtta

SEQ ID NO: 504573 - DNA, 201 bp, Homo sapiens
atcatgacctctgcagttctgttttgttgttactgattttattaataaatgtaatataaaaatgtaatattaaaaactgaaaaatacatttaattgttaasaagaaagaaaaatctatctttctttattttattgctcaaaggtaaacctaacattttagtactcccatttcttaagctcagcataaatataaatatatgc

SEQ ID NO: 504574 - DNA, 201 bp, Homo sapiens
ctgtgtgaacatcacagaatgtacctccacacatctagatggcatagccttctacacacttaggttatgtggcatagcctattgttcctaggctacaaacmtgtacagcatgttattgtaggcaattgtaacacaatagtaattatgtagatatctaaacatagaacaggtacagtaaaaatgtaggtggtataaaagatt

SEQ ID NO: 504575 - DNA, 201 bp, Homo sapiens
taataaaagcattttcctatgtcataaatgttatttgaaaaccatgtcttaattaaacttcactttgagattattgtaaattcacatgcagttgcatgaartaatacagaagatcttgtgtaccctttttaattttactgtttttaattttggtaagatccaatttattttctttttactggtagtacttttgatgtcaag

SEQ ID NO: 504576 - DNA, 201 bp, Homo sapiens
ctgtgagtaagaatgcctaacctcctgccaatgcagcccagtaggtctcagtcttgttttgtccaacccctattcaagatggagttgctgtggttcaaacrcttctgaaaatttcagagttctaggttggtattttttttttctctctcaacactttaaatatctaactctactctctcttttttactttcatgttttctg

SEQ ID NO: 504577 - DNA, 201 bp, Homo sapiens
aaaccattcacaggtttagtcttaaaaaaagtttaaggaaactttgaagtatgtgttagaaagtagacttttttcaccaaagtaatagacaaactttatcmagctgagtgatcttatttataactcccatggactattctgttttactagacacatttaggggaagatcaaaagtatcttttattggagattcaacaaatg

SEQ ID NO: 504578 - DNA, 201 bp, Homo sapiens
taaacaatttcccagcccaaaccaaaaggctggtatcaataaagagataggagcttggcatgtgatggtttctgacaaagtaaattgctttgcatcattgytgtagaattgtacccatgctataaagtctttatacagtgctttcctgttagctggcattagtaacaaaagactaagagagcatgggatctctttacacac

SEQ ID NO: 504579 - DNA, 201 bp, Homo sapiens
gcttttgcataaagttgatttctttgcaaatctattccattaaacaattttcattcataatatgagcccgtattacattttgtaaccctaaaaatcaccaycggcatcttctattcaacagataataagttgtaaacagagcaaaaactattacggaaaccatgcatataacatgtaaagtaacagtatcaaataaaataa

SEQ ID NO: 504580 - DNA, 201 bp, Homo sapiens
ggaataaaatataatgaagttctgcacatgaaagttcatagcagatttatatgtgacagctgggagctagaaaccatctagatgtccttcatcaggtgaaragaaaagccaacaggtatattcacacaatgcaatactactcagtagtaaaaaaaaaaaatttaaaaaaactattgctatctattgatatatgcaataaca

SEQ ID NO: 504581 - DNA, 201 bp, Homo sapiens
aaacaagaaaagtctaggggactcctatcactaacatcctaagagaaataagagaatattttgtaacatcagcaaaagaatgaaatgcttaaaataatgcaaaaaaaaactacaattgagttcataaaaattaaaaatattacagcagaaataaagaattcaataaatgagtcaataaaatgtttttctcataaagactgg

SEQ ID NO: 504582 - DNA, 201 bp, Homo sapiens
aaatacaagaacaaaataaccccaaagctagcagaagaaaatgaataaccaaaatcagagcagaactgaacaaaattaagatgtacaaatccatacaaccratcaacaaaaccaaaaattggctctttcaaacaataaacaagattgaccactagctagattaacaaagaaaaaaagaaagaaggtcctaacaggcaaaat

SEQ ID NO: 504583 - DNA, 201 bp, Homo sapiens
ttcacaaagaaaagaaatcaagtcaaaggtagttagatatgaaagattcagggtcttaacccagttctggatgtgggcatattacagtacagtagtaaccmgtccactaaatactaaaacacactgagaaaccatctcttcaagccatcctctaagtccacatacctcagccaaaggagatgtctgggagacagaatgtga

SEQ ID NO: 504584 - DNA, 201 bp, Homo sapiens
atatataaggaatttttacaattcaagaatacaaataaccccatttttaaaaatgctaaaaggatttagacagatactttaccaaaaaataaatatggatrgcaagttaaatacgtaaaaagatggtcaacatcattagtcattagagacatgcaaattagaactaaaatgaaatacaactacatacctattaatatggct

SEQ ID NO: 504585 - DNA, 201 bp, Homo sapiens
ttaaaaggagagaggagagagtcttttcaacaaatgatactagaagaaatagccacatgacatttcctttaaccattatcttgcatcatatacaaaaaccrtgttccttttccacactagaaaaaaatccttgtaattctgtgttaggcaaagatttttcagaaaggatactaaaagcatgaaccaaaaaaattggtaaaa

SEQ ID NO: 504586 - DNA, 201 bp, Homo sapiens
tgtggagtaagcatcaggaggaatagcataatcactttcagaagccacagaggagagagacacacctaagagaacaaagaaagaaatcaagtcagtatttmatactggggagggccaaacaccagctctgagtgctcctacagaatgcaattattcctaaatcataagcctccctagactagatttattctcattcctttg

SEQ ID NO: 504587 - DNA, 201 bp, Homo sapiens
gaaaagatgtccaggtaattaaaaggagagaggagagagtcttttcaacaaatgatactagaagaaatagccacatgacatttcctttaaccattatcttrcatcatatacaaaaaccatgttccttttccacactagaaaaaaatccttgtaattctgtgttaggcaaagatttttcagaaaggatactaaaagcatgaa

SEQ ID NO: 504588 - DNA, 201 bp, Homo sapiens
gactacagccatcctagtgagtatgaaaagatgtccaggtaattaaaaggagagaggagagagtcttttcaacaaatgatactagaagaaatagccacatracatttcctttaaccattatcttgcatcatatacaaaaaccatgttccttttccacactagaaaaaaatccttgtaattctgtgttaggcaaagattttt

SEQ ID NO: 504589 - DNA, 201 bp, Homo sapiens
agggtgaagttctgtctcaaaaaaaaaaaaagaatgcctgaacctcttctccataaatgtctttggcaggccaggtccaggagctggctccttccacaaargctgaggccaagaggcaggggcagcaatgaggaccgttaggtcagtgcttctcaaaacccagcacgtgtaagaattatctggagagctgtcaaaacaggg

SEQ ID NO: 504590 - DNA, 201 bp, Homo sapiens
tattctcaatacttttccagttgttataatggatttctgtttatgtatccattcttctgacttgtttcttctgtgatcaatgctatccatttttattaaawtatttttctatttataaaaacacatgcttattacagaaacttggtaagtatggaaaggattttaaaaagaaagaaaccatccatattactgtgatcacag

SEQ ID NO: 504591 - DNA, 201 bp, Homo sapiens
ttactgtgatcacagataattattttatttagatgtgtcagactgagatttataaacttggccttccaatcaccatcctctaagatctcataattacagaraaattgggaactgtatttgccagaacctccttccctgttatggttcccagttagagtttcctgtgagagaatctacttgaagtttagaaggagagggtag

SEQ ID NO: 504592 - DNA, 201 bp, Homo sapiens
cccacctctacttttttctcctctggagtattttaatgtatatcatactactttaccaataaatacttcaggctggatctccagttgataaagattttttytatagccatccatgaccccacaaataacaataattccatattatctaataaacaaatagattttttgagatgggagaaacttaggcaagacaaagccaaa

SEQ ID NO: 504593 - DNA, 201 bp, Homo sapiens
cttttggggaggggattagtttaaacattaataaacagaatataaacaggcagatggatgggtagataagcggtattcgggaatttgagggcttgggacaraaatagattccttttcctttttaggttttctttcctaacttgctgcttccttctatcaaccttatctggtctgtaagaacctgggaaaatataagaaact

SEQ ID NO: 504594 - DNA, 201 bp, Homo sapiens
taaagtgtaggcacaattgtagatacagaagaaggagggcaaaacttactgtttacccttaaaattttaagacacacaggtaatataaataattatctgcsccaccctacaccagtctgcccggtatctatcaatgctgcagatattgggaatacatttagagatcatcttctgcagaggtaggtccaccttcttgaagta

SEQ ID NO: 504595 - DNA, 201 bp, Homo sapiens
gaaaatgcatctaatattacaaattaaaagtctgctgctgttgcaaagctcaaggagctgttgagggctgaattactctcccagacgaaaaatctcattcmgttgtaataatcatcctaccccaagtgagatttccaacccatccccacacaaccttaggctttcaaagtaggtcgttttgtgatcatgttggaaaaacca

SEQ ID NO: 504596 - DNA, 201 bp, Homo sapiens
gaagtgggtgatgcgggttcactatactattttctctactcttgtatgtgcttaaagtcttgcctaataaagttgtaagatttccttttcaagcataattwaaaaaatcaaagattaggctacattgggcttatttagaaatctattaggcacttactctaccctataaaattaaaactttcatgtatctgctgaatctaa

SEQ ID NO: 504597 - DNA, 201 bp, Homo sapiens
atttacctgttaacagtagtagaatggcaagttttgctttggtgctcaccattcaacatacaacgaatgtttactatgcatcaaacactatgcctaggacygaggtttcacagatggataaagaagggagtggaggggtggattatgggaaattatgtaatggggtacaatgtatgttattacgagtgatgggtatcctaa

SEQ ID NO: 504598 - DNA, 201 bp, Homo sapiens
aatcttcagtgttgtcttctctgaccttcattggcagtttccctaacttttaccactcccatacaacttttctaaaagttatgtaagttataaaacttctytaatatttacgtatgtccacaattctatattaacatttttttttttttttttgagatagggtctcactctgtcgcccaggctggaatgcagtggtatgat

SEQ ID NO: 504599 - DNA, 201 bp, Homo sapiens
gaccagctgccttcagtcctttggccagaaatcttcagtgttgtcttctctgaccttcattggcagtttccctaacttttaccactcccatacaacttttytaaaagttatgtaagttataaaacttctctaatatttacgtatgtccacaattctatattaacatttttttttttttttttgagatagggtctcactctg

SEQ ID NO: 504600 - DNA, 201 bp, Homo sapiens
ctttgtgtgattttctcagttgcaccaaattataccaaatttcaacctcataaagattctgaagttttacaaagtaagagaagagagaaaaggaaaagttyaagccctaacacacaaaaagttacttcaattggcatattaaaaatacatacataccttatcttcttgactccgaaaataatataatgtctttcctattag

SEQ ID NO: 504601 - DNA, 201 bp, Homo sapiens
tccttttcctttttaggttttctttcctaacttgctgcttccttctatcaaccttatctggtctgtaagaacctgggaaaatataagaaactgatggttgyggggagggaatagaagaagactgttctaggtcttagaagatgcattaattaaaagttgctaaggcttgtaattaagaatcaagacccttgtaggtgtagg

SEQ ID NO: 504602 - DNA, 201 bp, Homo sapiens
ctctttgactacagccatcctagtgagtatgaaaagatgtccaggtaattaaaaggagagaggagagagtcttttcaacaaatgatactagaagaaatagscacatgacatttcctttaaccattatcttgcatcatatacaaaaaccatgttccttttccacactagaaaaaaatccttgtaattctgtgttaggcaaag

SEQ ID NO: 504603 - DNA, 201 bp, Homo sapiens
cattagcaacactgagtataacggcatgtattttaaatacagctggtcagacctgagagtgtaggctatcaaaagggaaggagaaatactaactgtcccaygtggtcactagaccaagaagtttagtctcattaacacagtaacagtcacaggctgctcttcagaggagcagtcatcattatgttatacaagtactcgtgg

SEQ ID NO: 504604 - DNA, 201 bp, Homo sapiens
tttgaagaactacccaactgttttccacagtggctgcacaattttacatttccaccagcaatgtatgagaccttcaattttttcatataatgcttgttatyattgtccatctctttgactacagccatcctagtgagtatgaaaagatgtccaggtaattaaaaggagagaggagagagtcttttcaacaaatgatactag

SEQ ID NO: 504605 - DNA, 201 bp, Homo sapiens
taaaaagcaagcttttaataataggatgaagaaaacaaattctattaatactatgataatacataacaatactaacctaattgtgtactttaggcacaatsatatgaaaatctaggtttcatccaccctaatatttaaagatggttattcattttaccaaaggatgcaccatgccttgataagcagcaaacagacctagtg

SEQ ID NO: 504606 - DNA, 201 bp, Homo sapiens
actctgacccattcattgtactttagagaaccttccagaagaaagaattgcaattatttaaaaatgttatatacacaagaagttcatttgcaatgttgttyaaactaatggaaaactataagtagcctgtatgtctaatagtaagggaactgatcagtaaatcatcagtatttatttactgagctctttatgattatgaat

SEQ ID NO: 504607 - DNA, 201 bp, Homo sapiens
tcctgtaatctgtcttaatgtgaatttaattctcaggcctgccaaaaaccctaagaaagtagaggtaaaatttcgcctctcctaaaaagcaagcttttaawaataggatgaagaaaacaaattctattaatactatgataatacataacaatactaacctaattgtgtactttaggcacaatgatatgaaaatctaggttt

SEQ ID NO: 504608 - DNA, 201 bp, Homo sapiens
tctctttgccttgtcacattttcacaatttactacactttgtccagtttggtgtataagtgttcacctttatgtcttggagtcttcattgccttaggaagsctcctctgtgatgtaaaacttaaataaatgtatatgtttctcctgtaatctgtcttaatgtgaatttaattctcaggcctgccaaaaaccctaagaaagt

SEQ ID NO: 504609 - DNA, 201 bp, Homo sapiens
attagacacatgaaatatgataaaaaatgtaaatttcgggtaaataaatgaacacatatagatatcatagtttgaatttaaactatgtgaaaagtgctaasatgctatataaatgacattataggaaattatagaaattgttaaagaagccttagtgaaagtgaacttaaactttggtaattaaagttcccaccttaatga

SEQ ID NO: 504610 - DNA, 201 bp, Homo sapiens
ggctgcttcaaaatgacccattatttagttaagcaactagtcataattcaccaaaacagtcatttgacttttttatcccacagaattgatcagcaatttgwttaagttattggatcaaaaggacaagtgtatacatagtctcaaaactgcttattgaaaagaaaaatattgttcctagaaaaaataacaagattagatagg

SEQ ID NO: 504611 - DNA, 201 bp, Homo sapiens
ggccagtattgccaaaaccagaaaaagacgaatatccttgtgaacacagatgcaaaaatctttaacaaaatatcagcaaatccaatccaaatatacacaayaaagatattatgtcatggctaagtggggtttatcctaggaatgcaaggttgttttaacttttgaaaaataaaccaatgtagttcaccatgtcaagtggct

SEQ ID NO: 504612 - DNA, 201 bp, Homo sapiens
ttcagctgtactaaaattcttataggaggcagaaagaaattatttagatagacagttagggtaaagcaagtccccagcagaaaactttcctttttaaaaamgcagctcaaagatagctccttttctaaccccaggcagttcaaggaaatcacttctcttctaacaacaagcagcctgaaagagcagacagtgaaacacaga

SEQ ID NO: 504613 - DNA, 201 bp, Homo sapiens
atttcaaatgtttaatgagcaagtaatgtggtttcaaagcattttgttgaattacttgtttagactatggcactatatagaagcagctggacaagcattawgtcttttggatgtctctagaatattccctaaaccaaaaaccaactagcaaacacatgccaataccacattcttccactactggcaatatgctgacaattg

SEQ ID NO: 504614 - DNA, 201 bp, Homo sapiens
gcgtttcaccatattggtcaggctggtcttgaactcttgacttcaggtgatccacccgcctcagcctcccaaagtgctgagattacaggcatgacccaccrcacgcagccccatggcagcattttaaaaggcagtttattacagggatctagattctggaagaggtttcaaatatttggatatgtaaataactgtgcaagt

SEQ ID NO: 504615 - DNA, 201 bp, Homo sapiens
cacaccaccatgcccagctaatttttttatttttagtagagacagcgtttcaccatattggtcaggctggtcttgaactcttgacttcaggtgatccaccygcctcagcctcccaaagtgctgagattacaggcatgacccaccgcacgcagccccatggcagcattttaaaaggcagtttattacagggatctagattct

SEQ ID NO: 504616 - DNA, 201 bp, Homo sapiens
aataaaaagtaaaacacattttcttttaaactcataaacccagtcagcctttgggctttcaaagctgtggtttaagcaaatgagtaactccaccacctaamggtttgatggatttagaatgctgtttgagagaaaacaaaaaatgtctcatttgagacatgtttcaatttaattaaatttagaaacatatttacagacaaa

SEQ ID NO: 504617 - DNA, 201 bp, Homo sapiens
tttacaacatttaaaaggctgcatagtaaagcattatatggttgtacaaacattttttaaagctataccttaccctacatctaatttgatcccaatttttmtttattatgaaccatgctgtgcaaggaatctttctggggtaatggaaatgttctgcatcttgatagagtcaaaagtaaatagctttcaaaactagtcaaa

SEQ ID NO: 504618 - DNA, 201 bp, Homo sapiens
ggacagaaatagattccttttcctttttaggttttctttcctaacttgctgcttccttctatcaaccttatctggtctgtaagaacctgggaaaatataaraaactgatggttgtggggagggaatagaagaagactgttctaggtcttagaagatgcattaattaaaagttgctaaggcttgtaattaagaatcaagacc

SEQ ID NO: 504619 - DNA, 201 bp, Homo sapiens
tctatttcacaaatgccaagaaagaaacctcattttggccaattatctcacttcattccaacaataaagtgatctccctctcacagacaataaaaagctgaaaaaaaaaaactatataatttgtctgaaatcacagagaattaagaagagaattaggaatataaacatatcagtcataggctaaagttcttttcactaggg

SEQ ID NO: 504620 - DNA, 201 bp, Homo sapiens
gctacattgcccaggccagtctcagactcctgggctgaaagaatcctcctgcctcagcctcccaaagtgctgggatcacaagcgtgagccaccgcatcagyataacatacctttttaaaaatgatgcctagaggcaatttgattatccacagtgtaacaaaagtagtggcaacaaccaaagagcctaaaagtaatatgaaa

SEQ ID NO: 504621 - DNA, 201 bp, Homo sapiens
acatatttgaacgaggctcatttccagggaggtaaagaatctctgaaaacagaggtgaaagtctatagcaaaattttcttccttatttccattaaattgayttgataattattaccaatatctgaataatattagtctacatcattctaaatcaaccaataagtctttgaataccttttcatgcttggatccaattaggag

SEQ ID NO: 504622 - DNA, 201 bp, Homo sapiens
ccacaggaaagtgcttcagtctttccatctataaatgggaataaggtcacctcccacagagggtaattggaaggatgaagaagagatatacttagcacttrgcctgatacatgtgctcaaaaacaatgatcaatagtaacaataataatctataaagagttgtttatatgttaaggatacagtagccatccatgaaatatt

SEQ ID NO: 504623 - DNA, 201 bp, Homo sapiens
acacaccaccatgcccagctaatttttttatttttagtagagacagcgtttcaccatattggtcaggctggtcttgaactcttgacttcaggtgatccacmcgcctcagcctcccaaagtgctgagattacaggcatgacccaccgcacgcagccccatggcagcattttaaaaggcagtttattacagggatctagattc

SEQ ID NO: 504624 - DNA, 201 bp, Homo sapiens
acccatcacccagtgtcaataattatcagcatttttccaaacttcaccacctccccacctctacttttttctcctctggagtattttaatgtatatcataytactttaccaataaatacttcaggctggatctccagttgataaagattttttctatagccatccatgaccccacaaataacaataattccatattatcta

SEQ ID NO: 504625 - DNA, 201 bp, Homo sapiens
agtagctgggactacaggtacacaccaccatgcccagctaatttttttatttttagtagagacagcgtttcaccatattggtcaggctggtcttgaactcytgacttcaggtgatccacccgcctcagcctcccaaagtgctgagattacaggcatgacccaccgcacgcagccccatggcagcattttaaaaggcagttt

SEQ ID NO: 504626 - DNA, 201 bp, Homo sapiens
tatctcagcctactgagtagctgggactacaggtacacaccaccatgcccagctaatttttttatttttagtagagacagcgtttcaccatattggtcagrctggtcttgaactcttgacttcaggtgatccacccgcctcagcctcccaaagtgctgagattacaggcatgacccaccgcacgcagccccatggcagcat

SEQ ID NO: 504627 - DNA, 201 bp, Homo sapiens
acacatgcttatcagttctcagatgaaaacacgaatctctggagctctccctccctccctctctttagctctctcctctcagccctgtgattgattgattkatttattttttagacggagtcttgctctgttgcccaggctggagaacagagctcagcgcaacttctgcctcctgggttcaagtgattctcctgcgtcagc

SEQ ID NO: 504628 - DNA, 201 bp, Homo sapiens; identical to SEQ ID NO: 20675

SEQ ID NO: 504629 - DNA, 201 bp, Homo sapiens
tgactggtagcatgtggcacgccatttctaagattagcttataaaaaacaatgcacttccatcttggtcactctctctctttccccgttagatcatttccyctggggaaggtagctgccatgtcttgagcagtcatttggagaggcccatgtagtgaggtactgaggcttctttgccaacagccacgtgagagagtttgga

SEQ ID NO: 504630 - DNA, 201 bp, Homo sapiens
cagcaatataaaaaactgtgagtgtacacacaccaacatacacacatttatatataaacatataaataaaccaaaaaggtagacatcaaaatattaatacytatttttccttctgcactttttgtattctccaaatgtctatgctgaatgtgtatcattcttacaatcagaaaaaaaaacactttaaattgcatgtatatg

SEQ ID NO: 504631 - DNA, 201 bp, Homo sapiens
ccatcctggccaacaaaccccatctctactaacaatataaaaattagccgggtatggtggtgcgcacctgtaatcccagttattcaggagattgaggcagsagaatcacttgaacccgggaggcggaggttgcagtaagccaagatcgcgccactgcactccagcctgggccacagagcaagattccgtctcaaaaaaaaa

SEQ ID NO: 504632 - DNA, 201 bp, Homo sapiens
tacggaagggaaggaagaggagggatccaggtaacaggaataccatcaggtgcatggtggagaatattgcaaaggtggagtgtgtttgaaggatggggcgmatttattcattcactgtctgctggaggcaggaagtggagaaagagcgggccagtggagccagatgacaaagtgttcttgatgcagatgaagcttaagctt

SEQ ID NO: 504633 - DNA, 201 bp, Homo sapiens
taggaggccaaggtggatggatcacctgaggtcaggagtttgaggccatcctggccaacaaaccccatctctactaacaatataaaaattagccgggtatkgtggtgcgcacctgtaatcccagttattcaggagattgaggcaggagaatcacttgaacccgggaggcggaggttgcagtaagccaagatcgcgccactg

SEQ ID NO: 504634 - DNA, 201 bp, Homo sapiens
atttttatttttccttcgctctgttctgtattctcctttctatattttttcaaggaagtataaaacatgttacagcagaattctcttctgaagaacatggyggttaatgctcaaccactaaacaaggtacaaaaagtcttcaaacaacaaaaaaatttttttaatttctttatcctataaaacactgcatttgttaaaaaa

SEQ ID NO: 504635 - DNA, 201 bp, Homo sapiens
cccaaacctcggccccgcgagcccccctggacggggcgccctcaagggggcggggatcccagggtggcaggaactctggagtggcccctcgtccccgggcyttctcacctgtctatctcagcagcgggtccccggccgcagcgcccgatgtcccggccgcgactggcccccgggatccccggactctcagcccgcgcccgc

SEQ ID NO: 504636 - DNA, 201 bp, Homo sapiens
aacagaaattctacttgtcaaatggaagatgtgactatgctatggaacaagaaatcaaataagtcaagcaaatacaatcaagaaagatataattggtagtrtcaagaaaatgagaaacttggaatgacaaactttgtacggctgccacatatagaggtccttctgaaagatttacaagtgataaatttccttcggaaggct

SEQ ID NO: 504637 - DNA, 201 bp, Homo sapiens
cgtccccgccttcccgctcctcccggcgccccaaacctcggccccgcgagcccccctggacggggcgccctcaagggggcggggatcccagggtggcaggractctggagtggcccctcgtccccgggctttctcacctgtctatctcagcagcgggtccccggccgcagcgcccgatgtcccggccgcgactggcccccg

SEQ ID NO: 504638 - DNA, 201 bp, Homo sapiens
ctgggatttgcttttcaatagtccagtgtgaggggggcaggggaagtgggtggaggtacagatgaggcatgacttgactaattgttgaagtgggtgatgcrggttcactatactattttctctactcttgtatgtgcttaaagtcttgcctaataaagttgtaagatttccttttcaagcataattaaaaaaatcaaagat

SEQ ID NO: 504639 - DNA, 201 bp, Homo sapiens
aaaacatgctgtgaggaacatctcataattaaatcttttgcaaattaagaccacttcctaaggataaatttttaaaactgagattgctggatcaaaggagrtatatatgcgtgtgtgtgtgtgtgtgtgtgtgtgtgttgatttgatattgatttgttcactcaaaattattggctaagttaacacttcagccaagatatt

SEQ ID NO: 504640 - DNA, 201 bp, Homo sapiens
atccttttcattaccactaatgttatagaactatataacattgggaatatatatataactatataacatagccgactgctaaataaagaaaataccacatmtagattctgaatttgaaaggaatctatcatgtctagattctgcatttgaaaataatctatcttcacttcaggggacaggaaaaagtcttggagttccaaa

SEQ ID NO: 504641 - DNA, 201 bp, Homo sapiens
actagatctttgatatactgaagaattactggtaattttttggtgtgatgatggtattgtggttatgatttttaagggtgtttggtttcagattagtatartatataataatggatgaaattataccatgtctgggatttgcttttcaatagtccagtgtgaggggggcaggggaagtgggtggaggtacagatgaggcat

SEQ ID NO: 504642 - DNA, 201 bp, Homo sapiens
ccaatatatttcccactttggtgttatggcatctgaagttcatataagaactgtcattttcagattctatattaaaatacaaacattcctgaatttcacartacattatataactaacatcttattgagaattcatttaccagataacccttccttaaaatagcttcacagttggacagctgaaaatacctaggagattaa

SEQ ID NO: 504643 - DNA, 201 bp, Homo sapiens
atggtggtgcaggcctataattccagctactagggaggctgagacaggagaattgctttaacccaggaggcagaagttgcagtgagctgagatcctgccaytgcactccagcctgggtgacagagtgagactctgtctcaaaaaaaaaaaaaaaaaaaaaaaagtggtacatccatacaatggaatattattcggccataa

SEQ ID NO: 504644 - DNA, 201 bp, Homo sapiens
agttttacagttcctgaaaagtttaaacaggccagcatggtggctcacgcctgtaatcccaacagtttgagaggctgaggttggagaattcatctctgagstcaggagttcaagaccagactgtgcaacatagcaagacctcatctctatcaaaaaatttaaaaatcagctaagcgtcggggagcttacctgtggtcccag

SEQ ID NO: 504645 - DNA, 201 bp, Homo sapiens
aatctaatatatttgcatgtttgtcactgccaggtgctgacaaaagtaagcagagaagtctctgttccctataacagaggttgtacataggattgttggcyaagcatattttcatcaggtaacctacctggtatatcccattcatgaagtgcacaggtatactaaagggcaaagaatggtgataagggtttcggagaagag

SEQ ID NO: 504646 - DNA, 201 bp, Homo sapiens
agaggttatctttaggtagcagcaatatatgtgatttttatttttccttcgctctgttctgtattctcctttctatattttttcaaggaagtataaaacaygttacagcagaattctcttctgaagaacatggtggttaatgctcaaccactaaacaaggtacaaaaagtcttcaaacaacaaaaaaatttttttaatttc

SEQ ID NO: 504647 - DNA, 201 bp, Homo sapiens
gtagggcacaggagacatcgagggcagtgaaagtccataaaaagacaatgtccataaaaagtcaaatggataaacaaattgtgtgtgtgtgtgtgtgtgtrtatatatggaacattattcagccataatgaggaataaagcatgacacatgctacaacgtggataaatatcaaaaacattctgctaaatgaaagaagccag

SEQ ID NO: 504648 - DNA, 201 bp, Homo sapiens
cctcactcaaacctccccacaaagcattcttcatctttactgtattattatagtcacaagctgaatttaaaattaccagtcacaagtcaatatacagtgawttaatattaacaaatataaagaaagcaattgcatgaagaatagtacagagtaacttataaaaacatgttacagcagaattctcttctgaagaacatggtg

SEQ ID NO: 504649 - DNA, 201 bp, Homo sapiens; identical to SEQ ID NO: 122617

SEQ ID NO: 504650 - DNA, 201 bp, Homo sapiens
aggaggtgtactgatgggaaaaagccccaaccgaagtgttttttatttttctgtccatcagaatcataatggcagtgaagcccatcccttatttggttcartatggatttgttattagtgtgaatcctttatagcaaaactgtttcaaaactcagctgttctgatagtaaatctaatatatttgcatgtttgtcactgcca

SEQ ID NO: 504651 - DNA, 201 bp, Homo sapiens
gtgagactgtctcaaaaaaaaaagttaattttatgttatgtgaattccactttgattaaagaacaaaacacagaagcaattattagctatttggaaaaatytgaatactgactagatctttgatatactgaagaattactggtaattttttggtgtgatgatggtattgtggttatgatttttaagggtgtttggtttcag

SEQ ID NO: 504652 - DNA, 201 bp, Homo sapiens
aatttttttccaattatttaacaacatataagtattttaccttaaatcatttaacaacatataaatattttaccttaaataatttaatagcttctgtctgsagggcttcggaaggtagagttgtcagaggggaaatgattccttctttactgtgacacaaagtggggtgtctccatatctgagaggctaaatgcagaataa

SEQ ID NO: 504653 - DNA, 201 bp, Homo sapiens
agtgattaactttaacagtaataataaggaatgctttgtatcattacttgcattatgggaaggaaatcaatcaggcgtctgatttatagtttgaggaattrcgttctaaacagaaaacactttccactcaccggagatttgtagtaaagtaattcaccacctttaagaacaaaccaccgccgcttccaagacttgacttta

SEQ ID NO: 504654 - DNA, 201 bp, Homo sapiens
ggactaaatgcttaatgaataaggtttccttttgagatgagtttcctttcgacattttggaactagataaaggtgatgattgtacacaacactgaaatgtycatttaaaaatgttaattttggctgggcacggtggctcatgcctgtaatcccagcactttgggaggccaaggggggcaaatcacaaggtcaggagttcga

SEQ ID NO: 504655 - DNA, 201 bp, Homo sapiens
tgggcatggtggcaggcgcctgtaatcccagctatctgggaggctgaagcaggaaaatcgcttgaacctgggaggcaaaggttgcagtaagctgagatcgygccattgcactccagcctgggcagcaagggtgaagttctgtctcaaaaaaaaaaaaagaatgcctgaacctcttctccataaatgtctttggcaggccag

SEQ ID NO: 504656 - DNA, 201 bp, Homo sapiens
ccaaattctagccttaatttaaaggaaacatattactgtagagctggaagtcattttattttcatttctttgttttcatagaatccttgccccattgtttyctgaggtttttcctaaggagattaaccttgttaataaccttttccattacccatattagcatttatgattaatgattcacattggcatttactagcaatg

SEQ ID NO: 504657 - DNA, 201 bp, Homo sapiens
cgcagtggctcatgcctgtaatcccagcactttgggaggccgaggcgggcagatcacctgaggtcaggagtttgataccagcctggccaacatggtgaaamccagtctctactaaaaatacaaaaattagctgggcatggtggcaggcgcctgtaatcccagctatctgggaggctgaagcaggaaaatcgcttgaacctg

SEQ ID NO: 504658 - DNA, 201 bp, Homo sapiens
tcaattttcacattaatactgacaatattcagtacgttagaaataaatataagcagaatcgttcttaaaagactacaacatttattaagtgcaccccagcktcttaaagccttcagatgtccccaaattctagccttaatttaaaggaaacatattactgtagagctggaagtcattttattttcatttctttgttttcat

SEQ ID NO: 504659 - DNA, 201 bp, Homo sapiens
agccaaatatgtgtgaccatggcctgtgacacagccctcaggaggtcctgagaacatgtacccaaggtggtcggggagctgcttggttttacgcattttasggaggctgagacttcaatcaaataacttaagaaatctattggtttggtctaggaaggcagaacaacttgaagtgaagactccacaacctcttatggcaac

SEQ ID NO: 504660 - DNA, 201 bp, Homo sapiens
ggctctgagatacataaaagtagttttaaatgtttggtaatattttatcaggctatttttaataagcagcctaataatgtatttctgagttccccttgctrtgaactgccctgctatgaaatttacattaggaatggaaagcctcagttatgaagaacggtgacagcaaaactctcagagccctggaatggaactgcagtt

SEQ ID NO: 504661 - DNA, 201 bp, Homo sapiens
ctggtggaggtcaacaatatcacccaagaagtagtcttgaaaaaagagaaagaaaagtcaaatttttagatctaactatattttacaggaaatataggggwagaggagcttgttaaatcacatcataggtatgcaataggcaaactccagaatgtggaaagctttagagaacaaattaacccatacaaataagttgaaaga

SEQ ID NO: 504662 - DNA, 201 bp, Homo sapiens
tcagctcataattttaccatattctgaaatttaaggaagtattacagtttgattcaattgctacaattcacggtttggatttttactataatgattccttwtcatcactctcaatttggccaggtccaggttaagtctttcaagccagaggtcctttggcgtatttaagggtaagttgttgtgatcctgacaagtttgcat

SEQ ID NO: 504663 - DNA, 201 bp, Homo sapiens
gcagtgagctgagatcgcatcactgcactccagcctggatgacagagcaagaccctgtctcaaaagacaaacaaacaaaaaaaagatgtactagaacattragtataaagatcaccaagatttatctggcaataaaatatttatctgtgactttttttctgcagacaatttagttaattgttacagaagtgatgccattca

SEQ ID NO: 504664 - DNA, 201 bp, Homo sapiens
tgggtaaaattaattttaatattgcctatttaacccaatatccacaatatcatttcaacatataatcaatataaaaattattgctgagatattttacattmtttcatgctaaaactttgaaatcctgtatttattctacttttacaacacacctcaatttgaactagccttatctgaagtgttgaacatccacatgtggct

SEQ ID NO: 504665 - DNA, 201 bp, Homo sapiens
acagaccaaaaaaaaaaaaagaagaagaaaattaaagaaaaagaaaccacaactagaacagcaattccgaaataacattcctatcaatgttcattcactgrcaaagaaaacatttaatctgatagcataaaaattaataataaaaaagctattttacttatagagaaattactggagataacaacacttttattattttta

SEQ ID NO: 504666 - DNA, 201 bp, Homo sapiens
tacacacccagtatcagtaattatttccacacctaggaggtgtactgatgggaaaaagccccaaccgaagtgttttttatttttctgtccatcagaatcayaatggcagtgaagcccatcccttatttggttcagtatggatttgttattagtgtgaatcctttatagcaaaactgtttcaaaactcagctgttctgatag

SEQ ID NO: 504667 - DNA, 201 bp, Homo sapiens
aaaaactattagttggactttttgagggtctctcctgaatgtaatgggagcaagaaccatattctcattactttgttcctagattttctccatgttattgwgttcatactctcattctactagcattaatcccgggaatagagtccttcccaggatatacagttgtgttcggaaccacaatttatactttattggagcatg

SEQ ID NO: 504668 - DNA, 201 bp, Homo sapiens
cagatattaatcaattatggtataatacaaaattattttctaaaataaaatgtattatgatccaaaatagatagtagtggtactaattttatttaggcatyatctacctttacaatgttgagtccgaaacaagtcactgcagaaaaatgagaaaatataagaaaaaaataaaaagcatctatattccagcatctagtggaa

SEQ ID NO: 504669 - DNA, 201 bp, Homo sapiens
taaaaggcactcagaaaatataaccccttgaaaaaaagtgtgtgtgtgtttgttttttaagcaattataaggggaaacagtgactataacacaaaagaatrgtttggtttccagaaaattttcagtgatcttctgattatagccacaggattagacctgccaggtgaatttagtaattcctgctcaccagattaaacaaaa

SEQ ID NO: 504670 - DNA, 201 bp, Homo sapiens
ttgaatgtgtattgttaatgactaccataaaatcatcttgatagcctccaaaggtcattagactcttgtacacatagctgactattaacctctttaaagakaagaaaaagtatatatgttatatgctcttacttccaaggagagatggaaaataattaataatatatctccattaaaaggcagatattaatcaattatggt

SEQ ID NO: 504671 - DNA, 201 bp, Homo sapiens
acaggaaacagaagttgcagtgagctgagatcgcatcactgcactccagcctggatgacagagcaagaccctgtctcaaaagacaaacaaacaaaaaaaasatgtactagaacattgagtataaagatcaccaagatttatctggcaataaaatatttatctgtgactttttttctgcagacaatttagttaattgttaca

SEQ ID NO: 504672 - DNA, 201 bp, Homo sapiens
agagaggtggtgaaatgctgccttttgctgatggaagttgtttatgtaactggcgatcaaaagagtgatttcaagaatctaaaacaaggaaaacagaattsttttgctccttagaagttctcatcacttccagaagagagtaaagtgttggccacaggtgagctccatttgcaagtgcccaggctaccagaattcccttct

SEQ ID NO: 504673 - DNA, 201 bp, Homo sapiens
tttacaacacaattattttggcatagtactccatgattataaagtaggattcttcttgcagaagttgaaaagcaagatcattaaataatttgctttccatwtaatgaagggtgggcctcatatagcaaagcattgcaatgtaatatccattacaaggtcatggatattagaatgactgagcagtattgatttattaagagt

SEQ ID NO: 504674 - DNA, 201 bp, Homo sapiens
tgagaataaagccctcacacataagtaacagctctgtcaagcctctggctcaccaactaattattaaatggctctctaggaacttagaaactcttctgtawcccagccaaaaggcttctgagagtcatcacaaactggttaccagtttattctcaaaaacaaatttgcttattcgatgggcgactgtggctcaaaagatgt

SEQ ID NO: 504675 - DNA, 201 bp, Homo sapiens
atggccagatataaggctgtaaataaggagagggacacacggatctttgcatgtcatgctacactacttggatgggatctcataagaaagggaaggccatrtgtttataaaatatctttttaaagcttcttagaaaacttgaactcaagaatgtgtcaaaatttactgacatgttatcagtgaaatcagcaagttgattat

SEQ ID NO: 504676 - DNA, 201 bp, Homo sapiens
agatattttcattaaaacatggatggagaccaaaagaaatttttaaacctgagaaaaatattcataatggaatataacagaaaatattgtgaaaatccttrttcatatttttgtgttgaatatatttattgggaagccatgagtaacttggcacatttatctactttccaatgtgtaaaacacatcagaataattccatct

SEQ ID NO: 504677 - DNA, 201 bp, Homo sapiens
cccaaacctcagcatcacgtaatataaccatgtagcaaacctgcacatgtaccctctgagtctaaaataacagttaaaattattttaaaatatatatatakagagagaaggggggacatggccagatataaggctgtaaataaggagagggacacacggatctttgcatgtcatgctacactacttggatgggatctcata

SEQ ID NO: 504678 - DNA, 201 bp, Homo sapiens
cgccactgcactccaacctgggcagcagagcaagactctgtctcaaaaaacaaacaaacaaacaaacaaaaaaaaccagaaagacacaggaaaataataaygagttacttctgtgtgccagacgctctattagctgcatcacaagtctgaaagatctacggtctaacggcagctctgctttttgttagctgtgtgatattg

SEQ ID NO: 504679 - DNA, 201 bp, Homo sapiens
aaaaaagaatgagatcatgtcctttgtagcaacatggatgcaactggaggtcattatcctaagagaattaatgcaggaactgaaaactaaataccacatgstctcacttataagtgggagctaaacattaaatacacaagggcataaagatagggacaacagacactgaggactatgagacagggagcaagagacggggac

SEQ ID NO: 504680 - DNA, 201 bp, Homo sapiens
atcccagactactttccagttacttaaaatttacttgttgatttgtttagatttgtttagattgtttagattcatacaataacaacttccttatagattckggatattagaccattgttggatgcatagttggtgaatattttctcctattctgtaggctgtatgtttactctattgatagtttcttttgctgtgcagaag

SEQ ID NO: 504681 - DNA, 201 bp, Homo sapiens
agatgtggtggcccatgactgtaatgccagctacttgggaggctgaggtgggagaatcacttgaatccaggaggtggaggttgcagtgagccaagattgcrcaactgcactccagcctgggcaacagagtgggaccccgtcacacacacacacacacacacacacacacacacacacacacacgaatgtaattacatttag

SEQ ID NO: 504682 - DNA, 201 bp, Homo sapiens
tatctgaaacatggtagtccatgttctcctggcataaagcattactatcagtgtaagaacataattttattctcctaatgatataaaggtcatgtttttgttttttgcctaaatacctaaaaaatgttttctttttctttaacatccagtattttgatgaaaaatatgccttgaagtgggtcattctaggttgatgttctc

SEQ ID NO: 504683 - DNA, 201 bp, Homo sapiens
gcaaaatctcttagagaaagagaccacaaagtagttacaagcaacctacttaccaactgatcctattaagaccaagttctgtagacaggatttagccttcyttggtaattaatatgaataagaggtctacagaaaagctaagaggtccacagaaaagccaagatgccttttaaaacatctcaccacaaccatatggaaaat

SEQ ID NO: 504684 - DNA, 201 bp, Homo sapiens
cactttgggaggctgagatgggtggatcacttgaggtcaggagttcaagaccagcctggccaacatggtgaaaccccgtctctacccaaaatacaaaattrgccagatgtggtggcccatgactgtaatgccagctacttgggaggctgaggtgggagaatcacttgaatccaggaggtggaggttgcagtgagccaagat

SEQ ID NO: 504685 - DNA, 201 bp, Homo sapiens
tcatatttaaatgatgttaagtgagcattaagtacataaccccaatccccagtgcaattttttcctttttttttttttttttgagatggagtctcgctcastcgcccaggctggagtgcagtggtgcaatctcggctcactgcaagctccacctcctgggttcacgccgctctcctgcgtcagcctcccaagtagctggga

SEQ ID NO: 504686 - DNA, 201 bp, Homo sapiens
attggttaatttaggtggaatcctttaggaccttcacacccactgatgtggacagcagttccctgccacgtgtctctcttcctgacttttcccccacagascccatgaaagattctaccaccaaacattatttgatgttgttataataaataatatcttcaaccagtaaccaaagatgtgacatttaaattagcctatacg

SEQ ID NO: 504687 - DNA, 201 bp, Homo sapiens
tctaagtgcttaatttactgctacagaagtaccctctgtagccaaagtgaacttagcagcaagtggcagagggaaatttgccactgagcctgtatacttayagagcctctcattgttaaagggattgtatacaaataaatttgtttaatggattggttaatttaggtggaatcctttaggaccttcacacccactgatgtg

SEQ ID NO: 504688 - DNA, 201 bp, Homo sapiens
tggtcatatttaaatgatgttaagtgagcattaagtacataaccccaatccccagtgcaattttttcctttttttttttttttttgagatggagtctcgcycagtcgcccaggctggagtgcagtggtgcaatctcggctcactgcaagctccacctcctgggttcacgccgctctcctgcgtcagcctcccaagtagctg

SEQ ID NO: 504689 - DNA, 201 bp, Homo sapiens
tcacaatatagactataatgtaaaccttgggtcaattccatagccaatctatattaagtcagtaaaagaaacctgaaatggccgggtacagtggctcacgyctgtaatcccagcactttgggaggccaaggtgggcagatcagttaaggttaggagtttgagaccagcctggccaacatggtgaaaccccatctctactaa

SEQ ID NO: 504690 - DNA, 201 bp, Homo sapiens
atgctaagttacatgttatcagggaacttatcacagaaagaaacaaagggatagaaatataaccaagagaggctaaatttgaaatttgagggccgggcgcrgtggctcacgcctataatctcagcactttgggaggccgaggcgggtggatcacaaggtcaggagttcgagaccagcttggccaagatagtgaaaccctat

SEQ ID NO: 504691 - DNA, 201 bp, Homo sapiens
accttaactgctcttcagaacagccatctctataccttttaggataaaatttctctatgacttgctttagagtttgattcactttgcactgattggtaacrtgccctgctggagttgagaaaggtctttcaaaatctccaatctctacctaattggaaatccacaaaagtgaaaatatattgaaaagagttttaagacaga

SEQ ID NO: 504692 - DNA, 201 bp, Homo sapiens
aaaggtagacatcaaaatattaatacctatttttccttctgcactttttgtattctccaaatgtctatgctgaatgtgtatcattcttacaatcagaaaaraaaacactttaaattgcatgtatatgtatcaatattaatatctacctgcaatggtcctggttgattctgtggctgtcttcgtcttgtctgtttaataagc

SEQ ID NO: 504693 - DNA, 201 bp, Homo sapiens
gacaaggagttgtctatatctaggtgacaggattatggatatagtagtttgcatcatatatgatgaggcaccagagggagttttacggagctgaaaaaagkaagagaataatggcagggaggaaaataaatgggtgttagaaacttgcattagaaatagtaggcaatagttaatcaaagataattctgctcccttagaggg

SEQ ID NO: 504694 - DNA, 201 bp, Homo sapiens
acagtccttgtaccttcacattttccaggctgctgttctttggaagcctgttcccatttggaaataatgtcacaaatctagaaaggaagtggaaaactgakatttacagtacttttcaaatcaacattttttgaagacaagtgtgctgcagactgaaatttttcaattaatatgatcaaaccaaatatactcaagcttttt

SEQ ID NO: 504695 - DNA, 201 bp, Homo sapiens
taacttttaaggcattcaatagaaaggtaaatagtaggtgcattattagaacatattgtatactcatactttggcatctggatgcagtattacacacctgyttttgtatgtcagacgaacagtccttgtaccttcacattttccaggctgctgttctttggaagcctgttcccatttggaaataatgtcacaaatctagaa

SEQ ID NO: 504696 - DNA, 201 bp, Homo sapiens
taacacctttcctctctttaatatggaatgtgtatatgtagagattgtgtattaagaattctatgggtttaacaaagtcctgcattttttttttcttatcrtggagattagattggttaaagttttggaaaactcctgaattaaacttcttgcaaagtttactcttcttgtaaagagtagcttctttgctgttcgttgggc

SEQ ID NO: 504697 - DNA, 201 bp, Homo sapiens
tcaccccttatgccttttccactgtaaaattattttaaaggaaacgatttcagctttaaactgccatagaaatgaaaacgtgtgcttctcagctaccaaawacattaattttatgagatatagatgtatgtcctattattatttgaaattaattagaactaaaattaacttattagaataaagttattcacactgatcctc

SEQ ID NO: 504698 - DNA, 201 bp, Homo sapiens
taccattagagattggtacccatcatccatatgtctgacctcccaggctaatgtctctgtacagtacttttagcaagctggactctctggaacttagtttsgttctaaaaagtgtaccaatggaaggtcttttagaatagagagaggcaaaattagtatttggtcatgtttttctgatctacgtagtgaccactttggtag

SEQ ID NO: 504699 - DNA, 201 bp, Homo sapiens
tgtgtgatgccaagaaacctcctccaaagtgttcaatgcagctacaaatgtatggtatctgtgactcccctaatctccattaaaaggtctattctctaagkccaaaattcaagtcttcttggacttctggagtgcatgtctctctgatacaactacctctaactcactatcttgtgtggtaaagtcccctgtgttctttca

SEQ ID NO: 504700 - DNA, 201 bp, Homo sapiens
gagcatcagtacaagcaatctcagctgtactccactattagaaaaagggaaggaaatgaaaatggcttctcaaaaggcaaaaaaaagatgcaagtaggccrggtgcagtggctcacaccggtaaatccagcacttttgggaggccaaggctggcagattgcttgagcccaggagctcaaggccagcctgagcaacatggtg

SEQ ID NO: 504701 - DNA, 201 bp, Homo sapiens
ataaatacaaagctatagtttaataaacagaccttgcaccaaacttcgatacattgagatatgcaaaatcatgaagaaaatataaacacagaaaagctttycttgctctacttttggtttaatcataactacaaaatgtgtttttataataagaataacactctttaaaaatatctttagatatggtttatttttatgtat

SEQ ID NO: 504702 - DNA, 201 bp, Homo sapiens
caactttcactatcaaagaaagcagtcaccaaaaaaatgaacagcatgaattctattttagaaggaaagaaaatgacacctcctttcaactaaatatttarattataatgaagtaaatttaagcataataaatacaaagctatagtttaataaacagaccttgcaccaaacttcgatacattgagatatgcaaaatcatga

SEQ ID NO: 504703 - DNA, 201 bp, Homo sapiens
agcctgggtgacagagcaagaccctgcctctattttttttaaaggaataaaccaaaaatttcatacaaataatttacattatcctgtgttagtcttatgtmttttttaaacacaagtttttgaaaactataagctttatataaaactcagagccctaacatgtcaatataatagtttccaaattggtttttacaaaaaaac

SEQ ID NO: 504704 - DNA, 201 bp, Homo sapiens
ctagtgagatccatgtacaaattttaaattctaagacaaattccagaactggtgagaacttatggaaagaacttaatgggaaataggagactaaggctggatggagcccaactgtgctacttaacctttctatgtctcagtttagccaatccagaaaagggggcatgttgacaacaaaccattattccttgtgggtatgta

SEQ ID NO: 504705 - DNA, 201 bp, Homo sapiens
gatccctctccacctattcactttcccctccccaagaggaagagtggcttaatgtgattggtaagctgagaaggagaaactgggcatgcagagcctggcarcttcctctcccctttctcttgagaagtagctgcctgcaggaaacaaccatctgttctgttttttgaggtagtaagttttagaggggcatggcttcagtag

SEQ ID NO: 504706 - DNA, 201 bp, Homo sapiens
gaaggaagagcccaacgcagagtgccaagagctgccagccctgggcagggagaagcaccacaggttagataccacgtgccagtcagagatccacatctgartgagtgcaatgggctgatgacagtctctcttaacccaaaaacgttttgcttctttcacatatgcatgatctgtttacagcatttatcataggttaaaaac

SEQ ID NO: 504707 - DNA, 201 bp, Homo sapiens
ggagtgattagatttattctgcatgaattatatcgaatatcttttcagcagtagtttttgtttaaaatgatggaaaaggatatattatgataacactaatsaaaagaaatctggaatcgccacaataatagcagacaaagcagatttcagagcaaggaattctgccagagataaagagggtcattttataatgataaaggg

SEQ ID NO: 504708 - DNA, 201 bp, Homo sapiens
atacatgtgaatctcatccagcatatttttcattttagtcactgcatttttcatctctaaaaattcaatttgggtctttttaatatcttctcttactcttsttaaaatgctcatgctttcctttaccttcctgaacatgtgaagtgtggtggccaatctccaaagtggtcctccgtgatctccacatcctgacattcagat

SEQ ID NO: 504709 - DNA, 201 bp, Homo sapiens
attaaattatattcttacaaggaaataaagtaaagataaatccagaggactgagatggggttgttttaacacagtactctaagtggtatgaacttagactrctactgtcaatgacttctgtttctgttctatttagtactttccgcaaaataagaaaaaactgctttgaggttgaggttgagaagtgctggaggtggcgct

SEQ ID NO: 504710 - DNA, 201 bp, Homo sapiens
acatttttaacataagttcctttagccctccacttccacgcactaatttcagccttgataccactcttaccaacaggattagaaaatgacatatttgaacraggctcatttccagggaggtaaagaatctctgaaaacagaggtgaaagtctatagcaaaattttcttccttatttccattaaattgatttgataattatt

SEQ ID NO: 504711 - DNA, 201 bp, Homo sapiens
tgactgctttttaaaaatcatattcaatatttacatttttcccattatcactggaagatgagcaagtttttgggagcttctgctctggctgtgagtactcygtgtctgtggagtaagcatcaggaggaatagcataatcactttcagaagccacagaggagagagacacacctaagagaacaaagaaagaaatcaagtcag

SEQ ID NO: 504712 - DNA, 201 bp, Homo sapiens
aggtatactaaagggcaaagaatggtgataagggtttcggagaagagttgaaagaatttccatccttgagggtcttgcttctctgtcaccattttgttgcrttctttctacacaacgctggcagtaaatggcatattttccaaattctgtcctgtaatacaaaacttaagataaaatctaagaataaatttaattgacaac

SEQ ID NO: 504713 - DNA, 201 bp, Homo sapiens
ggaggtgtactgatgggaaaaagccccaaccgaagtgttttttatttttctgtccatcagaatcataatggcagtgaagcccatcccttatttggttcagwatggatttgttattagtgtgaatcctttatagcaaaactgtttcaaaactcagctgttctgatagtaaatctaatatatttgcatgtttgtcactgccag

SEQ ID NO: 504714 - DNA, 201 bp, Homo sapiens
aaccaaaggcttcctgtaccaatatttgtttcatacattcttctgaaaatgtacctggcagatcgttaaatacttatgatttatcgtagactttcagaggycacataaacagttcagctggctagtattctgcacacctggaatctgcattcctctttaggtgaagcctgaggagccacaggaaaggatgatggggaagga

SEQ ID NO: 504715 - DNA, 201 bp, Homo sapiens
tctttttaatatcttctcttactcttcttaaaatgctcatgctttcctttaccttcctgaacatgtgaagtgtggtggccaatctccaaagtggtcctccrtgatctccacatcctgacattcagatccatagttaattccctcctgtattctaccagggttggtctgtgtgactggtagcatgtggcacgccatttctaa

SEQ ID NO: 504716 - DNA, 201 bp, Homo sapiens
tggaagaatttttttttttttttagtctagcagtgttatcctactaatggtcaatgtttcaatggaagaagattttatctattctaggtctgtagaaagayactttggaaaccaatggctatataagctcaaaaagaaaattaaatttatcttaaagccaatcaaataacgactaagttcaaaaacttataactaacaaga

SEQ ID NO: 504717 - DNA, 201 bp, Homo sapiens
tctgtagttccagctacttgggaggctaaggcaggagaattgcctgaacccaggtggcagaggttgcagtgagctgagatggcgccattgcactctagccygggagacaagagtgaaacttcatctcaaaaaaaaaaaaaaaaattaaaattaaacagatcatttcattttatttcaaatattggaagaattttttttttt

SEQ ID NO: 504718 - DNA, 201 bp, Homo sapiens
actaaaaatacaaaaaattagccaggtgtggtggtaaacgtctgtagttccagctacttgggaggctaaggcaggagaattgcctgaacccaggtggcagrggttgcagtgagctgagatggcgccattgcactctagcccgggagacaagagtgaaacttcatctcaaaaaaaaaaaaaaaaattaaaattaaacagatc

SEQ ID NO: 504719 - DNA, 201 bp, Homo sapiens
acctctactaaaaatacaaaaaattagccaggtgtggtggtaaacgtctgtagttccagctacttgggaggctaaggcaggagaattgcctgaacccaggwggcagaggttgcagtgagctgagatggcgccattgcactctagcccgggagacaagagtgaaacttcatctcaaaaaaaaaaaaaaaaattaaaattaaa

SEQ ID NO: 504720 - DNA, 201 bp, Homo sapiens
cccttgagaaaagggaccacaggtggttcctaatgcatagagcaacatgtcctgaatttaataatgggtctaacttggacacagttgactgtccaggacayagtgggcaactaaggccatcctcttcaagacagccagtggcttgagaggcaactggcatgagatctccgactatcagggacattttcgattgaatagtgc

SEQ ID NO: 504721 - DNA, 201 bp, Homo sapiens
gggctatgggcgcccgccaccacgcccggctaattttttttgtatttttagtagagatggggtttcaacgtgttagccaggatggtcttgatctcctgacytcgtgatctgtctgcctcagcctcccaaagtgctgggataacaggcgcgagccaccgtgcccggcccatcttaatcatttttaattgtacagttcagtaa

SEQ ID NO: 504722 - DNA, 201 bp, Homo sapiens
tttgtaatgagcatgcattgtttccataagaattttttggaagaaataaagaaaggggaaatgtgttttaaattctgggaaaaaaggacatagaagcctawatttttaccattttaaacagctgaaatgccacagtttctctgatttagtctctctcaggtaaaaaaatatacatcagagttgagtgtatttgagtcccca

SEQ ID NO: 504723 - DNA, 201 bp, Homo sapiens
gggatagagcaaacaacaaaaatattggctctcgtggaacaaattctagcggaaggagaccactgacaaacaggcagtaggtggtatggaacaataaaacrtagagcagactaaagggaataaaaagagctggcaacagaagaaagacaaagggctgcaatttgagtggtgtggtcagggtggacctcattgagaaagcag

SEQ ID NO: 504724 - DNA, 201 bp, Homo sapiens
attctcttacaaaattgaataagtgaattggagtgcactagtccaacagctatggcatctatgacctcaccgcccagcagatactctcccaccctctcacrctaaagaaaagattgactgctaaccagcaactgaccatttatacataattgtcagtttactttgcaggtgtcctattcttaaatataaatagaccactaa

SEQ ID NO: 504725 - DNA, 201 bp, Homo sapiens
gggagaagcactgtaagggggaggacaagatgcaagggaattggttttgaaattttgaagtgttacttgattttggaagcatgatggtttctggctctgakatacataaaagtagttttaaatgtttggtaatattttatcaggctatttttaataagcagcctaataatgtatttctgagttccccttgctatgaactgc

SEQ ID NO: 504726 - DNA, 201 bp, Homo sapiens
cactgagaaatatagtctgtaaaaaaaaagagtaaatttctcattaaattatattcttacaaggaaataaagtaaagataaatccagaggactgagatggkgttgttttaacacagtactctaagtggtatgaacttagactactactgtcaatgacttctgtttctgttctatttagtactttccgcaaaataagaaaaa

SEQ ID NO: 504727 - DNA, 201 bp, Homo sapiens
cagcaacttttctctatcagtctctccacgagcttgcactgagaaatatagtctgtaaaaaaaaagagtaaatttctcattaaattatattcttacaaggwaataaagtaaagataaatccagaggactgagatggggttgttttaacacagtactctaagtggtatgaacttagactactactgtcaatgacttctgttt

SEQ ID NO: 504728 - DNA, 201 bp, Homo sapiens
ctttttctttaacatccagtattttgatgaaaaatatgccttgaagtgggtcattctaggttgatgttctcagccacacgatccactatttcaatatgcawtattttgcttttttaaggttctgtaaacgtttcttaaattacactgtttgtatttgtttcattcccttgttttcttcaggggcttcttttatctgtatat

SEQ ID NO: 504729 - DNA, 201 bp, Homo sapiens
agaatgcaattattcctaaatcataagcctccctagactagatttattctcattcctttggccataaataactttttttgagacagagtctcgctctgtcrccaggctggagtgcactggcacaatctcggctcactgcaacctctgcctcctgggttcaagcgattctcccgcctcagcctcccgagtagctggggctac

SEQ ID NO: 504730 - DNA, 201 bp, Homo sapiens
cccaggaggcagaggttgcagtgaactgagatcacatcaccgcactctagcctgggccaacagagtgagactccgtctcaaaaaaaaaaaaagtttcttcsttttcaccttcatttctcattaaagcattatgtgttgagtttatccattcttcggttccttctgctttagtcttagtttataaaatatatttttctactt

SEQ ID NO: 504731 - DNA, 201 bp, Homo sapiens
caccagctctgagtgctcctacagaatgcaattattcctaaatcataagcctccctagactagatttattctcattcctttggccataaataacttttttygagacagagtctcgctctgtcaccaggctggagtgcactggcacaatctcggctcactgcaacctctgcctcctgggttcaagcgattctcccgcctcag

SEQ ID NO: 504732 - DNA, 201 bp, Homo sapiens
tccctactccttgatcatccagagttctctcaagttagagagcagttaccaccttttcccttcccccacctttgtgcataatatcagggatgggtatcaagggaactggccagactcaaagctaattaactcttcgggtaacaactgtggaaacacaaattgaagagttgttttattattgttgttgttttggggataggg

SEQ ID NO: 504733 - DNA, 201 bp, Homo sapiens
acaaatgacaaaatcaactataaataaaataagaagatcttgcatataagaagataaattattggaacgaacatgtgattagatattatgaactcagaatkttccagtctcaaattagccacactgcaaattttccaaatttcagaaacttacaaatgattcttaactgccatgcccaaagacaaagctttccttgattct

SEQ ID NO: 504734 - DNA, 201 bp, Homo sapiens
atcaatattcaatatatgtatatgctctgacatcccattttcagcgatcatgggctcatgcccatagctgcctgggacattgctatgcacaggaggttccyaccttagtgagcaatcccttcatggtgggtttgccctcaggctgcagggaaagtgggttggcagcttgtactcgaagaacattctgtaacactttaatcc

SEQ ID NO: 504735 - DNA, 201 bp, Homo sapiens
gaatgcaaaatggtacagtctccttagaaacagttcggcagtttcttaagttaaacatatgttgggggaggagccaagatggccgaataggaacagctccrgtctacagctcccagcgtgagcgacgcagaagacgggtgatttctgcatttccatctgaggtaccaggttcatctcactagggagtgccagacagtgggc

SEQ ID NO: 504736 - DNA, 201 bp, Homo sapiens
agactcggcacaggtaaatcttctctcagaagtcattactgacacatctcaataattgtactttatatcattgtaaataagcttttgtctccctctttttyaatagattatgaggctctctgaggaatgggacagtggcctattcatcttagtatctttcagcacattgtgctgcatgtggtaactgcgtaatacattttc

SEQ ID NO: 504737 - DNA, 201 bp, Homo sapiens
ttctatttatccttgggtacatcctactttcctgaatgattattctccacccttttccccactcttagtaaataacattgtcgtacggaataatgttcatyaagaaaactgaggatattagacatgatatcactcaatgtcctacaaacttaagatacttttctgcacccttcctcacttttcctccagtttcagcccttc

SEQ ID NO: 504738 - DNA, 201 bp, Homo sapiens
cttcaaggtcacacaggtggtaagtggcagagccaggacttgtgcccaggcagtcttgttcccatccttgcccttgcctcttggccacactgtctccacawccttgctctcttcacttccagtaacctttgctgtccctccacttttgccacccatcccctcagccataccctaatcctttttccttcactgggaactgct

SEQ ID NO: 504739 - DNA, 201 bp, Homo sapiens
tgattctcctgcctcagcctcccaagcagctgggactacaggcacgtgctaccatggccagctaatttttgtatttttagtagagacagggtttcaccatrttggccaggatggtctcaatctcttgaccttgtgatctgcccgcctcggcctcccaaagtgctgggattaccactgtgagccactgtgcctggcctagaa

SEQ ID NO: 504740 - DNA, 201 bp, Homo sapiens
acctggcagatcgttaaatacttatgatttatcgtagactttcagaggccacataaacagttcagctggctagtattctgcacacctggaatctgcattcytctttaggtgaagcctgaggagccacaggaaaggatgatggggaaggaagagcccaacgcagagtgccaagagctgccagccctgggcagggagaagcac

SEQ ID NO: 504741 - DNA, 201 bp, Homo sapiens
gaggagccacaggaaaggatgatggggaaggaagagcccaacgcagagtgccaagagctgccagccctgggcagggagaagcaccacaggttagataccaygtgccagtcagagatccacatctgagtgagtgcaatgggctgatgacagtctctcttaacccaaaaacgttttgcttctttcacatatgcatgatctgtt

SEQ ID NO: 504742 - DNA, 201 bp, Homo sapiens
tcctagctccacatcaatgataaccaaaggcttcctgtaccaatatttgtttcatacattcttctgaaaatgtacctggcagatcgttaaatacttatgayttatcgtagactttcagaggccacataaacagttcagctggctagtattctgcacacctggaatctgcattcctctttaggtgaagcctgaggagccaca

SEQ ID NO: 504743 - DNA, 201 bp, Homo sapiens
ttttagtagagacagggtttccccctgttggccaggctggtctcgaactcctgatctcaggtgatacacccacctcagcctcccaaagtgctggggttacrgggtgagccaccgcgcccgatcagccctgtgaagtctaactaccttggccttctcaaattctgaactctgtctccgtgactcaggaagactgccaggctc

SEQ ID NO: 504744 - DNA, 201 bp, Homo sapiens
actgaaagggaagaaaatgataggagacaaatattacaattaaacatgtaacattattctcttgtaaccaatcataataacatactttgaatttttgaatrgctatataatttcccagaaaataaaattttcacatcatcagttacagaaaattgatttccttccatcaaaatattttatctctgctctatcaaaaataaa

SEQ ID NO: 504745 - DNA, 201 bp, Homo sapiens
gccaccgcgcccggccaggttcctacttattgaaatgaggagcagaatgattaaagactataataaaatagcatagttttagcaactaaagaagaggtttyttaatacaaatgacaaaatcaactataaataaaataagaagatcttgcatataagaagataaattattggaacgaacatgtgattagatattatgaactc

SEQ ID NO: 504746 - DNA, 201 bp, Homo sapiens
aaatatgtttttttaaaaaaagaacagtactttacattactcaggtgataatgatagaggcgggaggcagacaaatgcctaggcagatggggcaggtcccyggtgaaacccaaccttcaagctggaaacagtccctggtaaatccttgaaccagattgagaacctgccttcccgtttggcacactttctttcgattgatcc

SEQ ID NO: 504747 - DNA, 201 bp, Homo sapiens
gaaccaccaacagaatcatgaacaaataaaatgattgttaattgaagccactaaggtttttttgttttattttgttttgttttgtttgttttttgacacgragttttgctcttgttgcccaggctagagtgcaatggcgcgatctcggctcactgcaacctccacctctcgggctcaagcgattcttctgcctcagcctcc

SEQ ID NO: 504748 - DNA, 201 bp, Homo sapiens
atgctactaggaaggccaaagtcagaaaacacaagacaatgaaggaaaaagaagggaagggaaaggaaggggaaaagaagggaaggagaaaagaaggaaarggaaggggagtatagtatcatatcctatatgatactatagaagaggatacacagcattatacatttgtcaaaatccatagaacataaaacaccaagagta

SEQ ID NO: 504749 - DNA, 201 bp, Homo sapiens
tgtttgttttttgacacggagttttgctcttgttgcccaggctagagtgcaatggcgcgatctcggctcactgcaacctccacctctcgggctcaagcgaktcttctgcctcagcctcccaagtagctgggattacagatacttgccaccatgcctggctaattttttgtatttttagtagagacagggttttaccatgtt

SEQ ID NO: 504750 - DNA, 201 bp, Homo sapiens
aagatgaaaaggtagaataggtagggcacaggagacatcgagggcagtgaaagtccataaaaagacaatgtccataaaaagtcaaatggataaacaaattktgtgtgtgtgtgtgtgtgtgtatatatggaacattattcagccataatgaggaataaagcatgacacatgctacaacgtggataaatatcaaaaacattc

SEQ ID NO: 504751 - DNA, 201 bp, Homo sapiens
tgaggcataagaatcacttgaacccaggaggtggagattgcagtgagccgagatcatgccactgcactccagcctgggcaatacagcgagactctatctcaaaaaaaaaaaatcactaagatacattccagattaaatagatgatgaagtattaatggcacaatgataagttaacctttagaagaaagatttttctgaaca

SEQ ID NO: 504752 - DNA, 201 bp, Homo sapiens
gtaatcccagcactttgggaggccaaggggggcaaatcacaaggtcaggagttcgagaccagcctggccaacatggtgaaaccccatctctctaaaaatayaaaaaattagccaggcgtggtggtgggtgcctatagtcccagctactcgggaggctgaggcaggagaatcgcttgaactcaggaggtggaggtggcagtg

SEQ ID NO: 504753 - DNA, 201 bp, Homo sapiens
aaattgagggtgatggggcctggtggggagagggtccagagtaggctctcagacccgaaactgaatggggtgtctggggcatcagggagctcccttgcctggccctcagtggcctgatggagtaagagcgtttggttgagtgattcagatctggtcactatggtaggagaacaaaaatgcatattgtgtcatatcgtgtac

SEQ ID NO: 504754 - DNA, 201 bp, Homo sapiens
aaagatttttctgaacaaagaatgtgtatttttttcttttcatgaaaatgcatctaatattacaaattaaaagtctgctgctgttgcaaagctcaaggagytgttgagggctgaattactctcccagacgaaaaatctcattcagttgtaataatcatcctaccccaagtgagatttccaacccatccccacacaacctta

SEQ ID NO: 504755 - DNA, 201 bp, Homo sapiens
aatttcaaccaggcagaaacagaaattctacttgtcaaatggaagatgtgactatgctatggaacaagaaatcaaataagtcaagcaaatacaatcaagaragatataattggtagtgtcaagaaaatgagaaacttggaatgacaaactttgtacggctgccacatatagaggtccttctgaaagatttacaagtgataa

SEQ ID NO: 504756 - DNA, 201 bp, Homo sapiens; identical to SEQ ID NO: 122619

SEQ ID NO: 504757 - DNA, 201 bp, Homo sapiens
tgaggcaggagaatcacttgaacccgggaggcggaggttgcagtaagccaagatcgcgccactgcactccagcctgggccacagagcaagattccgtctcaaaaaaaaaaaaaaaaaaagggaaaaaatcattcctgattccgtaattcaaacaattgtaaacatttgttaaaattttggggtgtttcctctcagcctttt

SEQ ID NO: 504758 - DNA, 201 bp, Homo sapiens
gaggcaggagaatcacttgaacccgggaggcggaggttgcagtaagccaagatcgcgccactgcactccagcctgggccacagagcaagattccgtctcaaaaaaaaaaaaaaaaaaagggaaaaaatcattcctgattccgtaattcaaacaattgtaaacatttgttaaaattttggggtgtttcctctcagccttttt

SEQ ID NO: 504759 - DNA, 201 bp, Homo sapiens
caaacactgcagagggccgaagggtcctctgcctaggaaaaccagagacctttgttcacttgtttatctgctgaccttccctccactattgtcctatgacmctgccaaatccccctctgcgagaaacacccaagaatgatcaattaaaaaaaaaaaaactcataaagtcatcatcagtttggatattttaaactagttcac

SEQ ID NO: 504760 - DNA, 201 bp, Homo sapiens
cctgtgaagtctaactaccttggccttctcaaattctgaactctgtctccgtgactcaggaagactgccaggctctatttgggtgctccctctctgcacarcagtcttgaatctctccagacagtaagctgcagcaatcacagggcgtatgtcattagttttttccgaagaatctgtcctacactgcctacattcaacatc

SEQ ID NO: 504761 - DNA, 201 bp, Homo sapiens
ttctgaactctgtctccgtgactcaggaagactgccaggctctatttgggtgctccctctctgcacagcagtcttgaatctctccagacagtaagctgcarcaatcacagggcgtatgtcattagttttttccgaagaatctgtcctacactgcctacattcaacatctgaaaaccactggcagggcaaatccagtccctg

SEQ ID NO: 504762 - DNA, 201 bp, Homo sapiens
aaaacaaggaaaacagaattgttttgctccttagaagttctcatcacttccagaagagagtaaagtgttggccacaggtgagctccatttgcaagtgcccrggctaccagaattcccttctctctagatcaaacaatgaagtgcttacatgtccagcaccatcaaggcagccacacgttttttcattacttaaaccagcag

SEQ ID NO: 504763 - DNA, 201 bp, Homo sapiens
aaagtaatttctctgttggtttgtcctttgaatgtgtattgttaatgactaccataaaatcatcttgatagcctccaaaggtcattagactcttgtacacrtagctgactattaacctctttaaagataagaaaaagtatatatgttatatgctcttacttccaaggagagatggaaaataattaataatatatctccatt

SEQ ID NO: 504764 - DNA, 201 bp, Homo sapiens
cagcaattaaatttttgtggaaataactttgttactccagtttacctaattttggggttatgattttatatcttgtttatttgtcacattttccctttctygcttaaatgtgttacaggttcctacttttcttttttttttttttttgagacagagtctctttctgtcgcccaggctggagtgcagtggcgccatcttggc

SEQ ID NO: 504765 - DNA, 201 bp, Homo sapiens
gagggccgaagggtcctctgcctaggaaaaccagagacctttgttcacttgtttatctgctgaccttccctccactattgtcctatgaccctgccaaatcyccctctgcgagaaacacccaagaatgatcaattaaaaaaaaaaaaactcataaagtcatcatcagtttggatattttaaactagttcactggagatgcgt

SEQ ID NO: 504766 - DNA, 201 bp, Homo sapiens
gtgaacacagatgcaaaaatctttaacaaaatatcagcaaatccaatccaaatatacacaacaaagatattatgtcatggctaagtggggtttatcctagsaatgcaaggttgttttaacttttgaaaaataaaccaatgtagttcaccatgtcaagtggctagaaaagaaatatcatttcgatagatgaagaaaaatcat

SEQ ID NO: 504767 - DNA, 201 bp, Homo sapiens
tgagacaggagaattgctttaacccaggaggcagaagttgcagtgagctgagatcctgccattgcactccagcctgggtgacagagtgagactctgtctcaaaaaaaaaaaaaaaaaaaaaaaagtggtacatccatacaatggaatattattcggccataaaaaaggaatacagtactaatacacgctatagtcatggaa

SEQ ID NO: 504768 - DNA, 201 bp, Homo sapiens
cactgttacataactaatacaggtctttctacatagtagatatttaatatattacaaattattgatgaaatgacaaagctctctgtcatgcctaaagtacsatgcatatatgaaggacagtatcattatttttaccactgccaaataactttttttctgctcctatggcactgacttcctatcttgtactatcttcccaac

SEQ ID NO: 504769 - DNA, 201 bp, Homo sapiens
gcctgggcacagctgacttcttggggagacccctcaactttctcccatatagaatctcttgtttcctatatcccatgccttcctcgttcttggtttacttmctccttttaataaagcactccttctggagagtcctcagagaagttacatgggaccttgaatgtcttcaaaatatctttattctaccttcaaataaaattc

SEQ ID NO: 504770 - DNA, 201 bp, Homo sapiens
gtagtggttacggaatcatatatatttgccaaaactctttgaactaaacacccaaaagggtgacttttacatatgtactcaattaacttgaccaaaaaaawtttttaaaaagtgccttgcaggccaggcacagtggctaacacctgtaatcccagcactttgggaggacaaggcaggcggatcacttgaggtcaggagttc

SEQ ID NO: 504771 - DNA, 201 bp, Homo sapiens
aggcggatcacttgaggtcaggagttcgagaccagcctggccaacagggtcaaacactgtctctactaaaaatacaaaaattacccaggcatgatggcacrtgcctgtagtcccagctacttgggaggctaaagcaggagaatcacttgaacctgggaggcagaggttgccagtgagctgagatctcaccactgcactcca

SEQ ID NO: 504772 - DNA, 201 bp, Homo sapiens
gcctgtaatcccaacactttgggaggctgaggcaggcagatagatggcttgagcccaggagtttgagaccagcctgggcaacatgacaaaaacctcgcttytaccaaaaaaaagaaaaaaatatatatatacaaaaattagccaggcatggtggcacacacctgtattcccatctactcaggagactgaggtgggaggatc

SEQ ID NO: 504773 - DNA, 201 bp, Homo sapiens
aaaattagccggcatgatggcacacacctatagtcccagctactcgggaggctgaggcataagaatcacttgaacccaggaggtggagattgcagtgagcygagatcatgccactgcactccagcctgggcaatacagcgagactctatctcaaaaaaaaaaaatcactaagatacattccagattaaatagatgatgaag

SEQ ID NO: 504774 - DNA, 201 bp, Homo sapiens
gatagtgaaaccctatctctactaaaaatacaacaatggttgaggcaggcataatgaatacacataacagaaactcaatgtttgctgaacaaaatgaataaatgaatgaatgaatgaatgaaaagattttaactccaaaaaattatgttgtgaggataaactttgataaagggtaatcactacattttcacaatctatatt

SEQ ID NO: 504775 - DNA, 201 bp, Homo sapiens
tacctgggtgatgggatctgtactccaaacctcagcatcatgcaatattcacatgtaacaaacctgcacgtgcaccccctatatctaaaataaaagttgtaaaaaaaaaaaaaaagatttacctgttaacagtagtagaatggcaagttttgctttggtgctcaccattcaacatacaacgaatgtttactatgcatcaaa

SEQ ID NO: 504776 - DNA, 201 bp, Homo sapiens
atagtgaaaccctatctctactaaaaatacaacaatggttgaggcaggcataatgaatacacataacagaaactcaatgtttgctgaacaaaatgaataaatgaatgaatgaatgaatgaaaagattttaactccaaaaaattatgttgtgaggataaactttgataaagggtaatcactacattttcacaatctatatta

SEQ ID NO: 504777 - DNA, 201 bp, Homo sapiens
caggggtgtccaatcttttgacttccttgggccacgttagaagaagaattgtcttgagccacacataaaatacactaacactaaaggtagctgatgagctaaaaaaaaaaattgcaaaacaaatctcataatgctttaagaaagtttacaaatttgttttgggccacattcaaagccatcctgggctgcctgtggcctgca

SEQ ID NO: 504778 - DNA, 201 bp, Homo sapiens
cactagcatttgcaaataaatattttttgtcttaaagtccaatctaccctaacactggcaaaagaatatgccaaatatagcttcaaatacttgacaaaaaytaaatcaaacccccaaagtactgagattatttaatataaatgaagcagaccctaaatagctgacatttaataacaaagcttagggagaaagcttaccttc

SEQ ID NO: 504779 - DNA, 201 bp, Homo sapiens
ctactaaaacatttcatagtccttttcatttttaaatttataaagcatacctttaaaaattttactttattttttattttccttttttttttttttttgaracagggttgggtctccctctgtctcccaggctggagtgcagtggcgcaatcagtaacctcactgtaaccttgaactcctgggcttcagggatccttccat

SEQ ID NO: 504780 - DNA, 201 bp, Homo sapiens
ccaaaggtcattagactcttgtacacatagctgactattaacctctttaaagataagaaaaagtatatatgttatatgctcttacttccaaggagagatgraaaataattaataatatatctccattaaaaggcagatattaatcaattatggtataatacaaaattattttctaaaataaaatgtattatgatccaaaat

SEQ ID NO: 504781 - DNA, 201 bp, Homo sapiens
tagtgaaaccctatctctactaaaaatacaacaatggttgaggcaggcataatgaatacacataacagaaactcaatgtttgctgaacaaaatgaataaatgaatgaatgaatgaatgaaaagattttaactccaaaaaattatgttgtgaggataaactttgataaagggtaatcactacattttcacaatctatattac

SEQ ID NO: 504782 - DNA, 201 bp, Homo sapiens
agaaaaagtatatatgttatatgctcttacttccaaggagagatggaaaataattaataatatatctccattaaaaggcagatattaatcaattatggtayaatacaaaattattttctaaaataaaatgtattatgatccaaaatagatagtagtggtactaattttatttaggcatcatctacctttacaatgttgagt

SEQ ID NO: 504783 - DNA, 201 bp, Homo sapiens
agtgaaaccctatctctactaaaaatacaacaatggttgaggcaggcataatgaatacacataacagaaactcaatgtttgctgaacaaaatgaataaatgaatgaatgaatgaatgaaaagattttaactccaaaaaattatgttgtgaggataaactttgataaagggtaatcactacattttcacaatctatattaca

SEQ ID NO: 504784 - DNA, 201 bp, Homo sapiens
aagtatatatgttatatgctcttacttccaaggagagatggaaaataattaataatatatctccattaaaaggcagatattaatcaattatggtataatayaaaattattttctaaaataaaatgtattatgatccaaaatagatagtagtggtactaattttatttaggcatcatctacctttacaatgttgagtccgaa

SEQ ID NO: 504785 - DNA, 201 bp, Homo sapiens
ggctgaggtgggagaatcacttgaatccaggaggtggaggttgcagtgagccaagattgcgcaactgcactccagcctgggcaacagagtgggaccccgtcacacacacacacacacacacacacacacacacacacacacacgaatgtaattacatttaggtcacctcccctgttcacttaaccagtgtgtccattcaga

SEQ ID NO: 504786 - DNA, 201 bp, Homo sapiens
gctgaggtgggagaatcacttgaatccaggaggtggaggttgcagtgagccaagattgcgcaactgcactccagcctgggcaacagagtgggaccccgtcacacacacacacacacacacacacacacacacacacacacacgaatgtaattacatttaggtcacctcccctgttcacttaaccagtgtgtccattcagaa

SEQ ID NO: 504787 - DNA, 201 bp, Homo sapiens
aaggcctggacgtggtggctcatgcttataatcccagcactctgggaggccgaggcggttagactgcctgagctcatgagtttgagaccagcctgggcaakgtggcaaaaccctgtctttattaaaaaaaaaaaaaaaaaaaaaattagccaggcatggtggtgcaggcctgtagtcccagctacttgggggttgaggcag

SEQ ID NO: 504788 - DNA, 201 bp, Homo sapiens
gcttataatcccagcactctgggaggccgaggcggttagactgcctgagctcatgagtttgagaccagcctgggcaaggtggcaaaaccctgtctttattaaaaaaaaaaaaaaaaaaaaaattagccaggcatggtggtgcaggcctgtagtcccagctacttgggggttgaggcaggaagatcacttgagcccaggagg

SEQ ID NO: 504789 - DNA, 201 bp, Homo sapiens
ctgaggtgggagaatcacttgaatccaggaggtggaggttgcagtgagccaagattgcgcaactgcactccagcctgggcaacagagtgggaccccgtcacacacacacacacacacacacacacacacacacacacacacgaatgtaattacatttaggtcacctcccctgttcacttaaccagtgtgtccattcagaaa

SEQ ID NO: 504790 - DNA, 201 bp, Homo sapiens
tgaggtgggagaatcacttgaatccaggaggtggaggttgcagtgagccaagattgcgcaactgcactccagcctgggcaacagagtgggaccccgtcacacacacacacacacacacacacacacacacacacacacacgaatgtaattacatttaggtcacctcccctgttcacttaaccagtgtgtccattcagaaag

SEQ ID NO: 504791 - DNA, 201 bp, Homo sapiens
tggtatatcaatataaagtattggtaactttatacttggcattggagttgctgggtcatatgccaagggatggggtcatatgccaagggatgaaatacacrtccacaccaaaacttgtaaataaatgttcagagcaacattattcatgatagccaaagagtagaaacagcctgtgtccaccatcagatgaatgaataaaat

SEQ ID NO: 504792 - DNA, 201 bp, Homo sapiens
tgtctagtgagatccatgtacaaattttaaattctaagacaaattccagaactggtgagaacttatggaaagaacttaatgggaaataggagactaaggctggatggagcccaactgtgctacttaacctttctatgtctcagtttagccaatccagaaaagggggcatgttgacaacaaaccattattccttgtgggtat

SEQ ID NO: 504793 - DNA, 201 bp, Homo sapiens
gtctagtgagatccatgtacaaattttaaattctaagacaaattccagaactggtgagaacttatggaaagaacttaatgggaaataggagactaaggctggatggagcccaactgtgctacttaacctttctatgtctcagtttagccaatccagaaaagggggcatgttgacaacaaaccattattccttgtgggtatg

SEQ ID NO: 504794 - DNA, 201 bp, Homo sapiens
tcacttttaaagtaacctcacattttaaaaaaacacaattcagtagtattttttcattcaagttccataagctactaagcagtttacagattttaaaaatmtttcataaaagagaaacaataagattgaaagatataaacaaactatttctttcacttgccagcagctataacataaaattcaatggaacatttatacaat

SEQ ID NO: 504795 - DNA, 201 bp, Homo sapiens
tctagtgagatccatgtacaaattttaaattctaagacaaattccagaactggtgagaacttatggaaagaacttaatgggaaataggagactaaggctggatggagcccaactgtgctacttaacctttctatgtctcagtttagccaatccagaaaagggggcatgttgacaacaaaccattattccttgtgggtatgt

SEQ ID NO: 504796 - DNA, 201 bp, Homo sapiens
aaggcaggagaattgcctgaacccaggtggcagaggttgcagtgagctgagatggcgccattgcactctagcccgggagacaagagtgaaacttcatctcaaaaaaaaaaaaaaaaattaaaattaaacagatcatttcattttatttcaaatattggaagaatttttttttttttttagtctagcagtgttatcctacta

SEQ ID NO: 504797 - DNA, 201 bp, Homo sapiens
attatggtagcagttgtagtgttataatttgaatgataaaactaaaagtcacaaatgtccaaaaacaggattatctaaatatataaataatggtacatccwtacagttagataccatacagtcattacaaatttttatggatggatgaaatgatatatttgggacttgtctcaatataacataggaggaaagaagtaggtc

SEQ ID NO: 504798 - DNA, 201 bp, Homo sapiens
ggaggcagaaagaaattatttagatagacagttagggtaaagcaagtccccagcagaaaactttcctttttaaaaacgcagctcaaagatagctccttttytaaccccaggcagttcaaggaaatcacttctcttctaacaacaagcagcctgaaagagcagacagtgaaacacagataagacagcttcggcacagaagga

SEQ ID NO: 504799 - DNA, 201 bp, Homo sapiens
acacaagtttttgaaaactataagctttatataaaactcagagccctaacatgtcaatataatagtttccaaattggtttttacaaaaaaacatgttgggaaaaaaaaaactgagagtctaaagagagataataaaagaagcaaaatgtgaaacagggcaactttcactatcaaagaaagcagtcaccaaaaaaatgaaca

SEQ ID NO: 504800 - DNA, 201 bp, Homo sapiens
ctttaaagagaaaaaaaaagaggaggtgagtaaagaatttatacaggtagtgaagtgattaggtcagcatctaatcatgaatttaattcatctcttggacttttttttttttttttgagacagggtgtctctttgttgcccaggctggagtacagtggcatgatcatggctcactgcagccccaaactcccgggctcaagt

SEQ ID NO: 504801 - DNA, 201 bp, Homo sapiens
ttacttttctattaatagctattaacacccaaaaccttggcatcattgcagtctctcatactgacttttcagtcaataaatcctgtcaacaagactttcaraatctatctagaatctgttcatctctcacatgtccacagcaccactaaaccacaatcccctctcacctggattactgcaatggctcctaacccatctcct

SEQ ID NO: 504802 - DNA, 201 bp, Homo sapiens
ttttcatttgttcttcatttaagattcactagagtacagcattattataaaaccatcatcggtgccaactaaaatatgccattgtgaatagtactgttgaratttttctccatctgttagtttttccattatttatctttttcccacatttttgtttgataaattattttgaagacgtgaagaaaaagtaagagaaagctt

SEQ ID NO: 504803 - DNA, 201 bp, Homo sapiens
ctgaggcagtggatcgcttgagcccaggagtttgagaccaacctgggcaacatggcaaaaccctttctctactaaaaccaaacatggtggcatacacctgyaatctcagttacttgggaggctgaggcacaagaattgcttgaacctgggaaggggaggttgcagtgagccgagatcatgccactgcactacagcctgggc

SEQ ID NO: 504804 - DNA, 201 bp, Homo sapiens
aacaaatctcataatgctttaagaaagtttacaaatttgttttgggccacattcaaagccatcctgggctgcctgtggcctgcaggccacaggttggacaygcttgctctaaactcttagaagaaaagaggtataaatcttcatgaccttggattaggcaacagattcttagatatgacacctaaagcacaaggaatcgaa

SEQ ID NO: 504805 - DNA, 201 bp, Homo sapiens
gagacaggagaattgctttaacccaggaggcagaagttgcagtgagctgagatcctgccattgcactccagcctgggtgacagagtgagactctgtctcaaaaaaaaaaaaaaaaaaaaaaaagtggtacatccatacaatggaatattattcggccataaaaaaggaatacagtactaatacacgctatagtcatggaag

SEQ ID NO: 504806 - DNA, 201 bp, Homo sapiens
agacaggagaattgctttaacccaggaggcagaagttgcagtgagctgagatcctgccattgcactccagcctgggtgacagagtgagactctgtctcaaaaaaaaaaaaaaaaaaaaaaaagtggtacatccatacaatggaatattattcggccataaaaaaggaatacagtactaatacacgctatagtcatggaaga

SEQ ID NO: 504807 - DNA, 201 bp, Homo sapiens
gacaggagaattgctttaacccaggaggcagaagttgcagtgagctgagatcctgccattgcactccagcctgggtgacagagtgagactctgtctcaaaaaaaaaaaaaaaaaaaaaaaagtggtacatccatacaatggaatattattcggccataaaaaaggaatacagtactaatacacgctatagtcatggaagag

SEQ ID NO: 504808 - DNA, 201 bp, Homo sapiens
cagtttcctgaggtctcagtggtcgtatcatgcttatagcgtttctatttgtaccaaacatcctgtcagagcttaactgtggctggcttaagtgccttttsgctagtgctacacttatactgaaaacattaggaatccttaactttgggggtggcaggtgtgatgaaggcactaattgtgttccttttccagagagtgagt

SEQ ID NO: 504809 - DNA, 201 bp, Homo sapiens
atcgtgtgtgtgatgtgtgtgtgtgtgtgtgtgtgtgtgtgtgtgtgtgttaaaagatctttctcgacgagactgaggcatgccttgtttaaggaaccttytgaccaccacctagccacctagccccacttgggcaacgcctgcccttcggtgaccctgcccagaacagccgagctcctcactacatactcctctgggaca

SEQ ID NO: 504810 - DNA, 201 bp, Homo sapiens
tatagaagtttgttaaacatagaaccaaggcatataaaaacttgaacaaatcactctttatgccagaaaaaaagcctaaagttcatctttattgatgtacwataacatagaaccttcaatgacaagcatcacatcccaatgtttaaattctgttttacatattttgaatgttcaaaatatttttaactggagaaagaaaaa

SEQ ID NO: 504811 - DNA, 201 bp, Homo sapiens
agaggaagaggaagaaggaagaggaagaaggaagaagaaaaagaaggagaaggaagaagaagaggaagaagaagaagaactaactttacagaaagggaagrttagctcatgtgttagaatggtcagaggcaactttaaatgtagctgctaccatgcctgaatcaaacacaggcaagggatcaagcccaaaaggataaaata

SEQ ID NO: 504812 - DNA, 201 bp, Homo sapiens
aaaagacaatgtccataaaaagtcaaatggataaacaaattgtgtgtgtgtgtgtgtgtgtgtatatatggaacattattcagccataatgaggaataaakcatgacacatgctacaacgtggataaatatcaaaaacattctgctaaatgaaagaagccagacactaaagatcacatagtatataaatccatttatatga

SEQ ID NO: 504813 - DNA, 201 bp, Homo sapiens
ttattcagccataatgaggaataaagcatgacacatgctacaacgtggataaatatcaaaaacattctgctaaatgaaagaagccagacactaaagatcamatagtatataaatccatttatatgaaatatccagaataggtaaatccatagcaacagaaagcagattggtggttgccaggggctagtgggagggggaaat

SEQ ID NO: 504814 - DNA, 201 bp, Homo sapiens
aaaaagaaaagaaaagaaaagccacattgcacaatgtgtctgatgacaagggagaagggagatggaaaaaatgatgaattcttactcatttactctataakaaaattagtgtgttggcaaattttgtgtttatgttttactgttaatatttatttgaatatttaagaatcaaataaaagagactaacccccttcattgtta

SEQ ID NO: 504815 - DNA, 201 bp, Homo sapiens
gatttgcaaaggatagggagaattcaattcaaaaggatgcccttcaactctagtgtccactgacaggtgaatggataaacaaaatgtggtatatatatacmtacagtggaatgttattctgcctcaaaagggaaggaaattttgacacatgttacaacatggatgaaccttgaagacattacactaagtgaaataagccaa

SEQ ID NO: 504816 - DNA, 201 bp, Homo sapiens
ttaatagctattaacacccaaaaccttggcatcattgcagtctctcatactgacttttcagtcaataaatcctgtcaacaagactttcagaatctatctaraatctgttcatctctcacatgtccacagcaccactaaaccacaatcccctctcacctggattactgcaatggctcctaacccatctcctccttattccct

SEQ ID NO: 504817 - DNA, 201 bp, Homo sapiens
taacactggcaaaagaatatgccaaatatagcttcaaatacttgacaaaaattaaatcaaacccccaaagtactgagattatttaatataaatgaagcagrccctaaatagctgacatttaataacaaagcttagggagaaagcttaccttctctgctaaaagctctcgtatcttgcttgcttgaactctaaatttcatga

SEQ ID NO: 504818 - DNA, 201 bp, Homo sapiens; identical to SEQ ID NO: 20676

SEQ ID NO: 504819 - DNA, 201 bp, Homo sapiens
acaggattatggatatagtagtttgcatcatatatgatgaggcaccagagggagttttacggagctgaaaaaagtaagagaataatggcagggaggaaaawaaatgggtgttagaaacttgcattagaaatagtaggcaatagttaatcaaagataattctgctcccttagagggaatgagtagaaaatcaagaggaagat

SEQ ID NO: 504820 - DNA, 201 bp, Homo sapiens
ccactgctaattaggaggtcattagtgacttttgtgattccagctgcactgtggagaagtgagggcataagctggaatgcaagagtctgaatgaattaaastcattaggaagagcaaattaaacctaaagccaacagaaatttaaaaactaacaataaagattagaggagaaatgaataaaattaaaaacataaaaataga

SEQ ID NO: 504821 - DNA, 201 bp, Homo sapiens
tcttgtactatcttcccaactacattgtaaagttgtcttgaaggcgcaatcaggctcaaaagttacttgctttcttaatgaaaaggaggtaatccttgaartatgaatatagggaaaactggaaagaatactgaacttaaaggcaagacctaaattggaactcagattccaatactagctatgtgatgatgggtacattat

SEQ ID NO: 504822 - DNA, 201 bp, Homo sapiens
acaaaaattagctgggcatggtggcaggcgcctgtaatcccagctatctgggaggctgaagcaggaaaatcgcttgaacctgggaggcaaaggttgcagtragctgagatcgtgccattgcactccagcctgggcagcaagggtgaagttctgtctcaaaaaaaaaaaaagaatgcctgaacctcttctccataaatgtct

SEQ ID NO: 504823 - DNA, 201 bp, Homo sapiens
gcccaagcaggtctcgaactcctgggctcaagggatcctccctcctcagctttcccagtagctgagactacagacaggtaccattgtgctgggctttaatmaaaaagttttgatcctgtagttctactctgacccattcattgtactttagagaaccttccagaagaaagaattgcaattatttaaaaatgttatatacac

SEQ ID NO: 504824 - DNA, 201 bp, Homo sapiens
ttactgtttacccttaaaattttaagacacacaggtaatataaataattatctgccccaccctacaccagtctgcccggtatctatcaatgctgcagataytgggaatacatttagagatcatcttctgcagaggtaggtccaccttcttgaagtacagacagacctgcatggtgcactacatgtgaaacttaaaagataa

SEQ ID NO: 504825 - DNA, 201 bp, Homo sapiens
ttgttgccagactccttacccttctaaaataaaaattaaaaaggaaaaagatttggtagtactcaagttgaaggaaggaaacatgacaaacttagaggaakcataaggaatttcatatgcacttcttaggagaaataattttgtatttaagccttttttttcttttgtttttagttgatacataataattgtacatattta

SEQ ID NO: 504826 - DNA, 201 bp, Homo sapiens
taatactgttaaaggaaattatgaaagtgaaaaatgcatccttgtatcaactactctaagagagcaactatttttttctgtagtttttctgattgtgtgcktgtgtgtgtgtgtgtgtattttttgtttgttttgagacagggtttcactctgttgcccaggctggagtgtagagtgcagtggcacaatcacggctcactg

SEQ ID NO: 504827 - DNA, 201 bp, Homo sapiens
gttattttactatgatctggaaaagattcttttaaaatccctcccttttcatttccacaggtctgttttctttctttcttcctttcttttctttttctttyttttttttttttttttgtgagacagtcttgctctgtcacccaggctggagtgcagtggcgtgatcacggctcactgcagcctcgacctcatgggctcaag

SEQ ID NO: 504828 - DNA, 201 bp, Homo sapiens
aattgcatgaagaatagtacagagtaacttataaaaacatgttacagcagaattctcttctgaagaacatggtggttaacgcttgaccactaaacaaggtaaaaaaaaaaaaatgtcttcaggccaggcatggtggctcatgcctgtaatcccagcactttgggaggctgaagtgggcagatcacctgaggtcgagagttc

SEQ ID NO: 504829 - DNA, 201 bp, Homo sapiens
aacaaaaaattaaaaagtaaaacattcaaatgctacaacacaattaatattcaggataatttgttaaattacccaatgtacacattataatcactgtctartgagatccatgtacaaattttaaattctaagacaaattccagaactggtgagaacttatggaaagaacttaatgggaaataggagactaaggctggatgg

SEQ ID NO: 504830 - DNA, 201 bp, Homo sapiens
gccaccgccccctgcccacctctcccggcgacatccagacttgggggccgactctgggctgtggcgggaggtgcagcggcggatcccgagtcagcccgctycgtccctctcgtccccgccttcccgctcctcccggcgccccaaacctcggccccgcgagcccccctggacggggcgccctcaagggggcggggatcccag

SEQ ID NO: 504831 - DNA, 201 bp, Homo sapiens
cttccctgggccacactggaagaagaattgtcttgggccacacataaaatatataaacactaatgatagctgatgagcttaaaaacaaaaaactcacaaaraaattttgtaatgttttaagaaagtttatgaatttgtgttgggccacattcaaagccatctggggccacaggccacctgtgggttgcaggttggccaagc

SEQ ID NO: 504832 - DNA, 201 bp, Homo sapiens
ttttctaagagctcttatttattctctgaatattccctgtgtcatggatgcactatcctttcctttctctctgagaatattaaatgatagagttttgctcrttttgttttgcttacttttccccacataggcaatgctggttttttctgattgtgccctgtctttcgtgttagaggctttcttcagatgtctggtcatcca

SEQ ID NO: 504833 - DNA, 201 bp, Homo sapiens
agaagaattgtcttgggccacacataaaatatataaacactaatgatagctgatgagcttaaaaacaaaaaactcacaaagaaattttgtaatgttttaaraaagtttatgaatttgtgttgggccacattcaaagccatctggggccacaggccacctgtgggttgcaggttggccaagcttgctataaaagaattaagt

SEQ ID NO: 504834 - DNA, 201 bp, Homo sapiens
gcagaatcttttctttgatctctatattctaaacgttcattatgatgtaacttgaggtggaaattatgttaatctgttatggtaggttcttggtagacacrttcaacttggaatcttgtatgcttcaattctaggaaactttcttgtattgtttcatttattttcttccctccagtcttcctattacttggatcttggaca

SEQ ID NO: 504835 - DNA, 201 bp, Homo sapiens
tatccaaaggtgacacagaatacccataatgatgactgggcatgcgttttacctttgggcagacaccccatctttttattctgaaatttaaaataattcarattcttttggggaggggattagtttaaacattaataaacagaatataaacaggcagatggatgggtagataagcggtattcgggaatttgagggcttggg

SEQ ID NO: 504836 - DNA, 201 bp, Homo sapiens
cctccttttaataaagcactccttctggagagtcctcagagaagttacatgggaccttgaatgtcttcaaaatatctttattctaccttcaaataaaattmataattggcctcggtgcagaattctgggtttgatataattttccttcagaattttgaagacattttttcattatcctctaatttctagtggtgcttttga

SEQ ID NO: 504837 - DNA, 201 bp, Homo sapiens
gaaaatataagaaactgatggttgtggggagggaatagaagaagactgttctaggtcttagaagatgcattaattaaaagttgctaaggcttgtaattaaraatcaagacccttgtaggtgtaggtgatagacctttgtgtgattttctcagttgcaccaaattataccaaatttcaacctcataaagattctgaagtttt

SEQ ID NO: 504838 - DNA, 201 bp, Homo sapiens
attgtctctcaaaatgtttgttcacgtctggttttctaccaatttcatgtttttaagccactcccagaactgacctgtgccaggctcaattggttcacctstctgcctgggcacagctgacttcttggggagacccctcaactttctcccatatagaatctcttgtttcctatatcccatgccttcctcgttcttggttta

SEQ ID NO: 504839 - DNA, 201 bp, Homo sapiens
cgggtactatgctcactacctgggtgatgggatctgtactccaaacctcagcatcatgcaatattcacatgtaacaaacctgcacgtgcaccccctatatytaaaataaaagttgtaaaaaaaaaaaaaaagatttacctgttaacagtagtagaatggcaagttttgctttggtgctcaccattcaacatacaacgaatg

SEQ ID NO: 504840 - DNA, 201 bp, Homo sapiens
atatttgccttcatgttttaagtaacatgcttctgtttcttttgacttttttagtttagtgatttcttattcactcacttaatgaaaaatgaggatttagytctctgttctccttgccatccatccaaacaaatacacttcctatctcccattctcccaatatgtttatatcttacctttggttaaatcattgttcagaaa

SEQ ID NO: 504841 - DNA, 201 bp, Homo sapiens
gactgtctagaatcaaattagtcaagttcttagcatctacctatattattctgtacttaataaaaacaatgtgacaacctgagaaaacttcctcccctccraggtattcaaatgcaatttgacagtatctcatattgcagcctgaatgtgagctcagaacaagtcactcagaataactgagggaagctgttctctcataag

SEQ ID NO: 504842 - DNA, 201 bp, Homo sapiens
tttcctaacctttccttcaccaaatcccccaccactacactatcctatacagatatttttttgttgtttttaattatccccaacatttccttgccacattmcagtttcaagttctattctgttataaagtatttgtgcgggcctttattattattattattattttatttttatttattttttagcccaggcatcattata

SEQ ID NO: 504843 - DNA, 201 bp, Homo sapiens
ttataaggatttaaaagtttatatatttaaagcacttagaagatttcttggcatagtaagcaacagtttcctaatctataaaatgagcacaataaaatgtmttacttcacaagttgttataagaattaaataaatcataccatacctatacagagcttatcctatacataataaatcaataaatattagatattttcatta

SEQ ID NO: 504844 - DNA, 201 bp, Homo sapiens
caaggcatcaaactaaccccccaaagtgaataaagaaacactgaattatcctatctcctttccattaggttggataattgagaattgagtctggcatgatmcaaaaaaaaaaaaaaaaaaaaaaaagttaagtacctgaactgtttgtttgttatctcctcttaaaatactacaggatgcactaagttcaatatggccctg

SEQ ID NO: 504845 - DNA, 201 bp, Homo sapiens
ggatttacacaacatttagcatcttccattgtccatcaaagatacataattacctaaattttaagagcttcatgaaagttcaaattgaaggtgctggtttstgttccagaaaatgcctagtttctaaagtgttatctaaagaaaaatcaatcccagctattgtaagactttcagcagttcctggttttgatactctgctct

SEQ ID NO: 504846 - DNA, 201 bp, Homo sapiens
tccattctatggtttctaatggatttacacaacatttagcatcttccattgtccatcaaagatacataattacctaaattttaagagcttcatgaaagttyaaattgaaggtgctggtttctgttccagaaaatgcctagtttctaaagtgttatctaaagaaaaatcaatcccagctattgtaagactttcagcagttcc

SEQ ID NO: 504847 - DNA, 201 bp, Homo sapiens
aggcatcaaactaaccccccaaagtgaataaagaaacactgaattatcctatctcctttccattaggttggataattgagaattgagtctggcatgatacmaaaaaaaaaaaaaaaaaaaaaaagttaagtacctgaactgtttgtttgttatctcctcttaaaatactacaggatgcactaagttcaatatggccctggg

SEQ ID NO: 504848 - DNA, 201 bp, Homo sapiens
ttaactttaacagtaataataaggaatgctttgtatcattacttgcattatgggaaggaaatcaatcaggcgtctgatttatagtttgaggaattacgttytaaacagaaaacactttccactcaccggagatttgtagtaaagtaattcaccacctttaagaacaaaccaccgccgcttccaagacttgactttaccact

SEQ ID NO: 504849 - DNA, 201 bp, Homo sapiens
aactgcttaccaaccaattcagtaagcagtacataggaagatattctctgactattcataaccctattaccagcatggtatcaaaaccactgttctggtgsggcatggtggttcccatctgtaatcccaggactttgggaggctgaggcagtggatcgcttgagcccaggagtttgagaccaacctgggcaacatggcaaa

SEQ ID NO: 504850 - DNA, 201 bp, Homo sapiens
ggagacagaggcgggcagatcacttgaggtcaggagttcgagaccaacctggccaacatggcaaaatcccatctctatcaaaaatacaaaattagccggcmtgatggcacacacctatagtcccagctactcgggaggctgaggcataagaatcacttgaacccaggaggtggagattgcagtgagccgagatcatgccac
